United States Patent Application Publication US 2024/0124889 A1 - sequence listing, part 2

SEQ ID NO: 367 - DNA, 2217 bp, Artificial Sequence
  source: /note="Description of Artificial Sequence: Synthetic polynucleotide"
atggctgccgatggttatcttccagattggctcgaggacaacctctctgagggcattcgcgagtggtgggcgctgaaacctggagccccgaagcccaaagccaaccagcaaaagcaggacgacggccggggtctggtgcttcctggctacaagtacctcggacccttcaacggactcgacaagggggagcccgtcaacgcggcggacgcagcggccctcgagcacgacaaggcctacgaccagcagctgcaggcgggtgacaatccgtacctgcggtataaccacgccgacgccgagtttcaggagcgtctgcaagaagatacgtcttttgggggcaacctcgggcgagcagtcttccaggccaagaagcgggttctcgaacctctcggtctggttgaggaaggcgctaagacggctcctggaaagaagagaccggtagagccatcaccccagcgttctccagactcctctacgggcatcggcaagaaaggccaacagcccgccagaaaaagactcaattttggtcagactggcgactcagagtcagttccagaccctcaacctctcggagaacctccagcagcgccctctggtgtgggacctaatacaatggctgcaggcggtggcgcaccaatggcagacaataacgaaggcgccgacggagtgggtagttcctcgggaaattggcattgcgattccacatggctgggcgacagagtcatcaccaccagcacccgaacctgggccctgcccacctacaacaaccacctctacaagcaaatctccaacgggacatcgggaggagccaccaacgacaacacctacttcggctacagcaccccctgggggtattttgactttaacagattccactgccacttttcaccacgtgactggcagcgactcatcaacaacaactggggattccggcccaagagactcagcttcaagctcttcaacatccaggtcaaggaggtcacgcagaatgaaggcaccaagaccatcgccaataacctcaccagcaccatccaggtgtttacggactcggagtaccagctgccgtacgttctcggctctgcccaccagggctgcctgcctccgttcccggcggacgtgttcatgattccccagtacggctacctaacactcaacaacggtagtcaggccgtgggacgctcctccttctactgcctggaatactttccttcgcagatgctgagaaccggcaacaacttccagtttacttacaccttcgaggacgtgcctttccacagcagctacgcccacagccagagcttggaccggctgatgaatcctctgattgaccagtacctgtactacttgtctcggactcaaacaacaggaggcacggcaaatacgcagactctgggcttcagccaaggtgggcctaatacaatggccaatcaggcaaagaactggctgccaggaccctgttaccgccaacaacgcgtctcaacgacaaccgggcaaaacaacaatagcaactttgcctggactgctgggaccaaataccatctgaatggaagaaattcattggctaatcctggcatcgctatggcaacacacaaagacgacgaggagcgtttttttcccagtaacgggatcctgatttttggcaaacaaaatgctgccagagacaatgcggattacagcgatgtcatgctcaccagcgaggaagaaatcaaaaccactaaccctgtggctacagaggaatacggtatcgtggcagataacttgcagcagcaaaacacggctcctcaaattggaactgtcaacagccagggggccttacccggtatggtctggcagaaccgggacgtgtacctgcagggtcccatctgggccaagattcctcacacggacggcaacttccacccctctcccctcatgggtggattcggacttaaacatcctccgcctcagatcctgatcaagaacacgcctgtacctgcggatcctccgaccaccttcaaccagtcaaagctgaactctttcatcacgcaatacagcaccggacaggtcagcgtggaaattgaatgggagctgcagaaggaaaacagcaagcgctggaaccccgagatccagtacacctccaactactacaaatctacaagtgtggactttgctgttaatacagaaggcgtgtactctgaaccccgccccattggcacccgttacctcacccgtaatctgtaa

SEQ ID NO: 368 - protein, 738 aa, Artificial Sequence; identical to SEQ ID NO: 114
  source: /note="Description of Artificial Sequence: Synthetic polypeptide"

SEQ ID NO: 369 - DNA, 2211 bp, Artificial Sequence
  source: /note="Description of Artificial Sequence: Synthetic polynucleotide"
atggctgctgacggttatcttccagattggctcgaggacaacctttctgaaggcattcgagagtggtgggcgctgcaacctggagcccctaaacccaaggcaaatcaacaacatcaggacaacgctcggggtcttgtgcttccgggttacaaatacctcggacccggcaacggactcgacaagggggaacccgtcaacgcagcggacgcggcagccctcgagcacgacaaggcctacgaccagcagctcaaggccggtgacaacccctacctcaagtacaaccacgccgacgccgagttccaggagcggctcaaagaagatacgtcttttgggggcaacctcgggcgagcagtcttccaggccaaaaagaggcttcttgaacctcttggtctggttgaggaagcggctaagacggctcctggaaagaagaggcctgtagatcagtctcctcaggaaccggactcatcatctggtgttggcaaatcgggcaaacagcctgccagaaaaagactaaatttcggtcagactggcgactcagagtcagtcccagaccctcaacctctcggagaaccaccagcagcccccacaagtttgggatctaatacaatggcttcaggcggtggcgcaccaatggcagacaataacgagggtgccgatggagtgggtaattcctcaggaaattggcattgcgattcccaatggctgggcgacagagtcatcaccaccagcaccagaacctgggccctgcccacttacaacaaccatctctacaagcaaatctccagccaatcaggagcttcaaacgacaaccactactttggctacagcaccccttgggggtattttgactttaacagattccactgccacttctcaccacgtgactggcagcgactcattaacaacaactggggattccggcccaagaaactcagcttcaagctcttcaacatccaagttaaagaggtcacgcagaacgatggcacgacgactattgccaataaccttaccagcacggttcaggtgtttacggactcggagtatcagctcccgtacgtgctcgggtcggcgcaccaaggctgtctcccgccgtttccagcggacgtcttcatggtccctcagtatggatacctcaccctgaacaacggaagtcaagcggtgggacgctcatccttttactgcctggagtacttcccttcgcagatgctaaggactggaaataacttccaattcagctataccttcgaggatgtaccttttcacagcagctacgctcacagccagagtttggatcgcttgatgaatcctcttattgatcagtatctgtactacctgaacagaacgcaaggaacaacctctggaacaaccaaccaatcacggctgctttttagccaggctgggcctcagtctatgtctttgcaggccagaaattggctacctgggccctgctaccggcaacagagactttcaaagactgctaacgacaacaacaacagtaactttccttggacagcggccagcaaatatcatctcaatggccgcgactcgctggtgaatccaggaccagctatggccagtcacaaggacgatgaagaaaaatttttccctatgcacggcaatctaatatttggcaaagaagggacaacggcaagtaacgcagaattagataatgtaatgattacggatgaagaagagattcgtaccaccaatcctgtggcaacagagcagtatggaactgtggcaaataacttgcagagctcaaatacagctcccacgactagaactgtcaatgatcagggggccttacctggcatggtgtggcaagatcgtgacgtgtaccttcaaggacctatctgggcaaagattcctcacacggatggacactttcatccttctcctctgatgggaggctttggactgaaacatccgcctcctcaaatcatgatcaaaaatactccggtaccggcaaatcctccgacgactttcagcccggccaagtttgcttcatttatcactcagtactccactggacaggtcagcgtggaaattgagtgggagctacagaaagaaaacagcaaacgttggaatccagagattcagtacacttccaactacaacaagtctgttaatgtggactttactgtagacactaatggtgtttatagtgaacctcgccccattggcacccgttaccttacccgtcccctgtaa

SEQ ID NO: 370 - protein, 736 aa, Artificial Sequence; identical to SEQ ID NO: 340
  source: /note="Description of Artificial Sequence: Synthetic polypeptide"

SEQ ID NO: 371 - DNA, 2211 bp, Artificial Sequence; identical to SEQ ID NO: 339
  source: /note="Description of Artificial Sequence: Synthetic polynucleotide"

SEQ ID NO: 372 - protein, 736 aa, Artificial Sequence; identical to SEQ ID NO: 340
  source: /note="Description of Artificial Sequence: Synthetic polypeptide"

SEQ ID NO: 373 - DNA, 2211 bp, Artificial Sequence
  source: /note="Description of Artificial Sequence: Synthetic polynucleotide"
atggctgctgacggttatcttccagattggctcgaggacaacctttctgaaggcattcgtgagtggtgggctctgaaacctggagtccctcaacccaaagcgaaccaacaacaccaggacaaccgtcggggtcttgtgcttccgggttacaaatacctcggacccggtaacggactcgacaaaggagagcccgtcaacgcggcggatgcagcggccctcgagcacgacaaggcctacgaccagcagctcaaagcgggtgacaatccgtacctgcggtataaccacgccgacgccgagtttcaggagcgtctgcaagaagatacgtcttttgggggcaacctcgggcgagcagtcttccaggccaagaagagggttctcgaaccttttggtctggttgaggaaggtgctaagacggctcctggaaagaaacgtccggtagagcagtcgccacaagagccagactcctcctcgggcatcggcaagacaggccagcagcccgctaaaaagagactcaattttggtcagactggcgactcagagtcagtccccgacccacaacctctcggagaacctccagcaacccccgctgctgtgggacctactacaatggcttcaggcggtggcgcaccaatggcagacaataacgaaggcgccgacggagtgggtaatgcctcaggaaattggcattgcgattccacatggctgggcgacagagtcatcaccaccagcacccgcacctgggccttgcccacctacaataaccacctctacaagcaaatctccagtgcttcaacgggggccagcaacgacaaccactacttcggctacagcaccccctgggggtattttgatttcaacagattccactgccatttctcaccacgtgactggcagcgactcatcaacaacaattggggattccggcccaagagactcaacttcaagctcttcaacatccaagtcaaggaggtcacgacgaatgatggcgtcacgaccatcgctaataaccttaccagcacggttcaagtcttctcggactcggagtaccagcttccgtacgtcctcggctctgcgcaccagggctgcctccctccgttcccggcggacgtgttcatgattccgcaatacggctacctgacgctcaacaatggcagccaagccgtgggacgttcatccttttactgcctggaatatttcccttctcagatgctgagaacgggcaacaactttaccttcagctacacctttgaggaagtgcctttccacagcagctacgcgcacagccagagcctggaccggctgatgaatcctctcatcgaccaatacctgtattacctgaacagaactcaaaatcagtccggaagtgcccaaaacaaggacttgctgtttagccgtgggtctccagctggcatgtctgttcagcccaaaaactggctacctggaccctgttatcggcagcagcgcgtttctaaaacaaaaacagacaacaacaacagcaattttacctggactggtgcttcaaaatataacctcaatgggcgtgaatccatcatcaaccctggcactgctatggcctcacacaaagacgacgaagacaagttctttcccatgagcggtgtcatgatttttggaaaagagagcgccggagcttcaaacactgcattggacaatgtcatgattacagacgaagaggaaattaaagccactaaccctgtggccaccgaaagatttgggaccgtggcagtcaatttccagagcagcagcacagaccctgcgaccggagatgtgcatgttatgggagccttacctggaatggtgtggcaagacagagacgtatacctgcagggtcctatttgggccaaaattcctcacacggatggacactttcacccgtctcctctcatgggcggctttggacttaagcacccgcctcctcagatcctcatcaaaaacacgcctgttcctgcgaatcctccggcagagttttcggctacaaagtttgcttcattcatcacccagtattccacaggacaagtgagcgtggagattgaatgggagctgcagaaagaaaacagcaaacgctggaatcccgaagtgcagtatacatctaactatgcaaaatctgccaacgttgatttcactgtggacaacaatggactttatactgagcctcgccccattggcacccgttacctcacccgtcccctgtaa

SEQ ID NO: 374 - protein, 736 aa, Artificial Sequence
  source: /note="Description of Artificial Sequence: Synthetic polypeptide"
MAADGYLPDWLEDNLSEGIREWWALKPGVPQPKANQQHQDNRRGLVLPGYKYLGPGNGLDKGEPVNAADAAALEHDKAYDQQLKAGDNPYLRYNHADAEFQERLQEDTSFGGNLGRAVFQAKKRVLEPFGLVEEGAKTAPGKKRPVEQSPQEPDSSSGIGKTGQQPAKKRLNFGQTGDSESVPDPQPLGEPPATPAAVGPTTMASGGGAPMADNNEGADGVGNASGNWHCDSTWLGDRVITTSTRTWALPTYNNHLYKQISSASTGASNDNHYFGYSTPWGYFDFNRFHCHFSPRDWQRLINNNWGFRPKRLNFKLFNIQVKEVTTNDGVTTIANNLTSTVQVFSDSEYQLPYVLGSAHQGCLPPFPADVFMIPQYGYLTLNNGSQAVGRSSFYCLEYFPSQMLRTGNNFTFSYTFEEVPFHSSYAHSQSLDRLMNPLIDQYLYYLNRTQNQSGSAQNKDLLFSRGSPAGMSVQPKNWLPGPCYRQQRVSKTKTDNNNSNFTWTGASKYNLNGRESIINPGTAMASHKDDEDKFFPMSGVMIFGKESAGASNTALDNVMITDEEEIKATNPVATERFGTVAVNFQSSSTDPATGDVHVMGALPGMVWQDRDVYLQGPIWAKIPHTDGHFHPSPLMGGFGLKHPPPQILIKNTPVPANPPAEFSATKFASFITQYSTGQVSVEIEWELQKENSKRWNPEVQYTSNYAKSANVDFTVDNNGLYTEPRPIGTRYLTRPL

SEQ ID NO: 375 - DNA, 2217 bp, Artificial Sequence
  source: /note="Description of Artificial Sequence: Synthetic polynucleotide"
atggctgccgatggttatcttccagattggctcgaggacaacctctctgagggcattcgcgagtggtgggacttgaaacctggagccccgaaacccaaagccaaccagcaaaagcaggacgacggccggggtctggtgcttcctggctacaagtacctcggacccttcaacggactcgacaagggggagcccgtcaacgcggcggatgcaacggccctcgagcacgacaaggcctacgaccagcagctgcaggcgggtgacaatccgtacctgcggtataaccacgccgacgccgagtttcaggagcgtctgcaagaagatacgtcttttgggggcaacctcgggcgagcagtcttccaggccaagaagcgggttctcgaacctctcggtctggttgaggaaggcgctaagacggctcctggaaagaagagaccggtagagccatcaccccagcgttctccagactcctctacgggcatcggcaagaaaggccaacagcccgccagaaaaagactcaattttggtcagactggcgactcagagtcagttccagaccctcaacctctcggagaaccaccagcagcccccacaagtttgggatctaatacaatggcttcaggcggtggcgcaccaatggcagacaataacgagggtgccgatggagtgggtaattcctcaggaaattggcattgcgattcccaatggctgggcgacagagtcatcaccaccagcacccgcacctgggccttgcccacctacaataaccacctctacaagcaaatctccagtgcttcaacgggggccagcaacgacaaccactacttcggctacagcaccccctgggggtattttgactttaaccgcttccactgccacttctcgccaagagactggcaaagactcatcaacaacaattggggattccggcccaagagactcaacttcaaactcttcaacatccaagtcaaggaggtcacgacgaatgatggcgtcacgaccatcgccaataacctcaccagcaccatccaggtgtttacggactcggagtaccagctgccgtacgttctcggctctgcccaccagggctgcctgcctccgttcccggcggacgtgttcatgattccccagtatggatacctcaccctgaacaacggaagtcaagcggtgggacgctcatccttttactgcctggagtacttcccttcgcagatgctaaggactggaaataacttccaattcagctataccttcgaggatgtaccttttcacagcagctacgctcacagccagagtttggatcgcttgatgaatcctcttattgatcagtatctgtactacctgaacagaacgcaaggaacaacctctggaacaaccaaccaatcacggctgctttttagccaggctgggcctcagtctatgtctttgcaggccagaaattggctacctgggccctgctaccggcaacagagactttcaaagactgctaacgacaacaacaacagtaactttccttggacagcagccagcaaatatcatctcaatggccgcgactcgctggtgaatccaggaccagctatggccagtcacaaggacgatgaagaaaaatttttccctatgcacggcaatctaatatttggcaaagaagggacaacggcaagtaacgcagaattagataatgtaatgattacggatgaagaagagattcgtaccaccaatcctgtggcaacagagcagtatggaactgtggcaaataacttgcagagctcaaatacagctcccacgactagaactgtcaatgatcagggggccttacctggcatggtgtggcaagatcgtgacgtgtaccttcaggggcccatctgggcaaagattccacacacggacggacattttcacccctctcccctcatgggtggattcggacttaaacaccctcctccgcagattctcatcaagaacaccccggtacctgcgaatccttcgaccaccttcagtgcggcaaagtttgcttccttcatcacacagtactccacgggacaggtcagcgtggagatcgagtgggagctgcagaaggaaaacagcaagcgctggaacccggagatccagtacacttccaactattacaagtctaataatgttgaatttgctgttaatactgaaggtgtatatagtgaaccccgccccattggcaccagatacctgactcgtaatctgtaa

SEQ ID NO: 376 - protein, 738 aa, Artificial Sequence
  source: /note="Description of Artificial Sequence: Synthetic polypeptide"
MAADGYLPDWLEDNLSEGIREWWDLKPGAPKPKANQQKQDDGRGLVLPGYKYLGPFNGLDKGEPVNAADATALEHDKAYDQQLQAGDNPYLRYNHADAEFQERLQEDTSFGGNLGRAVFQAKKRVLEPLGLVEEGAKTAPGKKRPVEPSPQRSPDSSTGIGKKGQQPARKRLNFGQTGDSESVPDPQPLGEPPAAPTSLGSNTMASGGGAPMADNNEGADGVGNSSGNWHCDSQWLGDRVITTSTRTWALPTYNNHLYKQISSASTGASNDNHYFGYSTPWGYFDFNRFHCHFSPRDWQRLINNNWGFRPKRLNFKLFNIQVKEVTTNDGVTTIANNLTSTIQVFTDSEYQLPYVLGSAHQGCLPPFPADVFMIPQYGYLTLNNGSQAVGRSSFYCLEYFPSQMLRTGNNFQFSYTFEDVPFHSSYAHSQSLDRLMNPLIDQYLYYLNRTQGTTSGTTNQSRLLFSQAGPQSMSLQARNWLPGPCYRQQRLSKTANDNNNSNFPWTAASKYHLNGRDSLVNPGPAMASHKDDEEKFFPMHGNLIFGKEGTTASNAELDNVMITDEEEIRTTNPVATEQYGTVANNLQSSNTAPTTRTVNDQGALPGMVWQDRDVYLQGPIWAKIPHTDGHFHPSPLMGGFGLKHPPPQILIKNTPVPANPSTTFSAAKFASFITQYSTGQVSVEIEWELQKENSKRWNPEIQYTSNYYKSNNVEFAVNTEGVYSEPRPIGTRYLTRNL

SEQ ID NO: 377 - DNA, 2208 bp, Artificial Sequence
  source: /note="Description of Artificial Sequence: Synthetic polynucleotide"
atggctgccgatggttatcttccagattggctcgaggacaaccttagtgaaggaattcgcgagtggtgggacttgaaacctggagccccgaagcccaaagccaaccagcaaaagcaggacgacggccggggtctggtgcttcctggctacaagtacctcggacccttcaacggactcgacaagggggagcccgtcaacgcggcggacgcagcggccctcgagcacgacaaggcctacgaccagcagctcaaagcgggtgacaatccgtacctgcggtataaccacgccgacgccgagtttcaggagcgtctgcaagaagatacgtcttttgggggcaacctcgggcgagcagtcttccaggccaagaagcgggttctcgaacctctcggtctggttgaggaaggtgctaagacggctcctggaaagaaacgtccggtagagcagtcgccacaagagccagactcctcctcgggcattggcaagacaggccagcagcccgctaaaaagagactcaattttggtcagactggcgactcagagtcagtccccgacccacaacctctcggagaacctccagcaacccccgctgctgtgggacctactacaatggcttcaggcggtggcgcaccaatggcagacaataacgaaggcgccgacggagtgggtaatgcctcaggaaattggcattgcgattccacatggctgggcgacagagtcatcaccaccagcacccgaacctgggccctgcccacctacaacaaccacctctacaaacaaatttccagccaatcaggagcctcgaacgacaatcactactttggctacagcaccccttgggggtattttgatttcaacagattccactgccacttttcaccacgtgactggcagcgactcatcaacaacaattggggattccggcccaagagactcagcttcaagctcttcaacatccaggtcaaggaggtcacgcagaatgaaggcaccaagaccatcgccaataaccttaccagcacggttcaagtgtttacggactcggagtatcagctcccgtacgtgctcggctcggcgcatcaaggatgcctcccgccgttcccagcagacgtcttcatggtgccacagtatggatacctcaccctgaacaacgggagtcaggcagtaggacgctcttcattttactgcctggagtactttccttctcagatgctgcgtaccggaaacaactttaccttcagctacacttttgaggacgttcctttccacagcagctacgctcacagccagagtctggaccgtctcatgaatcctctgattgaccagtacctgtattacttgagcagaacaaacactccaagtggaaccaccacgcagtcaaggcttcagttttctcaggccggagcgagtgacattcgggaccagtctaggaactggcttcctggaccctgttaccgccagcagcgagtatcaaagacatctgcggataacaacaacagtgaatactcgtggactggagctaccaagtaccacctcaatggcagagactctctggtgaatccgggcccggccatggcaagccacaaggactatgaagaaaagttttttcctcagagcggggttctcatctttgggaagcaaggctcagagaaaacaaatgtggacattgaaaaggtcatgattacagacgaagaggaaatcaggacaaccaatcccgtggctacggagcagtatggttctgtatctaccaacctccagagaggcaacagacaagcagctaccgcagatgtcaacacacaaggcgttcttccaggcatggtctggcaggacagagatgtgtaccttcaggggcccatctgggcaaagattccacacacggacggacattttcacccgtctccgctgatgggcggctttggcctgaaacatcctccgcctcagatcctgatcaagaacacgcctgtacctgcggatcctccgaccaccttcaaccagtcaaagctgaactctttcatcactcagtattctactggccaagtcagcgtggagatcgagtgggagctgcagaaggaaaacagcaagcgctggaaccccgagatccagtacacctccaactactacaaatctacaagtgtggactttgctgttaatacagaaggcgtgtactctgaaccccgccccattggcacccgttacctcacccgtaatctgtaa

SEQ ID NO: 378 - protein, 735 aa, Artificial Sequence
  source: /note="Description of Artificial Sequence: Synthetic polypeptide"
MAADGYLPDWLEDNLSEGIREWWDLKPGAPKPKANQQKQDDGRGLVLPGYKYLGPFNGLDKGEPVNAADAAALEHDKAYDQQLKAGDNPYLRYNHADAEFQERLQEDTSFGGNLGRAVFQAKKRVLEPLGLVEEGAKTAPGKKRPVEQSPQEPDSSSGIGKTGQQPAKKRLNFGQTGDSESVPDPQPLGEPPATPAAVGPTTMASGGGAPMADNNEGADGVGNASGNWHCDSTWLGDRVITTSTRTWALPTYNNHLYKQISSQSGASNDNHYFGYSTPWGYFDFNRFHCHFSPRDWQRLINNNWGFRPKRLSFKLFNIQVKEVTQNEGTKTIANNLTSTVQVFTDSEYQLPYVLGSAHQGCLPPFPADVFMVPQYGYLTLNNGSQAVGRSSFYCLEYFPSQMLRTGNNFTFSYTFEDVPFHSSYAHSQSLDRLMNPLIDQYLYYLSRTNTPSGTTTQSRLQFSQAGASDIRDQSRNWLPGPCYRQQRVSKTSADNNNSEYSWTGATKYHLNGRDSLVNPGPAMASHKDYEEKFFPQSGVLIFGKQGSEKTNVDIEKVMITDEEEIRTTNPVATEQYGSVSTNLQRGNRQAATADVNTQGVLPGMVWQDRDVYLQGPIWAKIPHTDGHFHPSPLMGGFGLKHPPPQILIKNTPVPADPPTTFNQSKLNSFITQYSTGQVSVEIEWELQKENSKRWNPEIQYTSNYYKSTSVDFAVNTEGVYSEPRPIGTRYLTRNL

SEQ ID NO: 379 - DNA, 2214 bp, Artificial Sequence
  source: /note="Description of Artificial Sequence: Synthetic polynucleotide"
atggctgccgatggttatcttccagattggctcgaggacaacctctctgagggcattcgcgagtggtgggacttgaaacctggagccccgaaacccaaagccaaccagcaaaagcaggacgacggccggggtctggtgcttcctggctacaagtacctcggacccttcaacggactcgacaagggggagcccgtcaacgcggcggatgcagcggccctcgagcacgacaaggcctacgaccagcagctcaaagcgggtgacaatccgtacctgcggtataaccacgccgacgccgagtttcaggagcgtctgcaagaagatacgtcttttgggggcaacctcgggcgagcagtcttccaggccaagaagagggttctcgaaccttttggtctggttgaggaaggtgctaagacggctcctggaaagaaacgtccggtagagcagtcgccacaagagccagactcctcctcgggcattggcaagacaggccagcagcctgcaagaaaaagattgaattttggtcagactggagacgcagactcagtacctgacccccagcctctcggacagccaccagcagccccctctggtctgggaactaatacgatggctacaggcagtggcgcaccaatggcagacaataacgagggcgccgacggagtgggtaattcctcgggaaattggcattgcgattcccaatggctgggggacagagtcatcaccaccagcacccgaacctgggccctgcccacctacaacaatcacctctacaagcaaatctccaacagcacatctggaggatcttcaaatgacaacgcctacttcggctacagcaccccctgggggtattttgatttcaacagattccactgccatttctcaccacgtgactggcagcgactcatcaacaacaattggggattccggcccaagagactcaacttcaagctcttcaacatccaggtcaaggaggtcacgcagaatgaaggcaccaagaccatcgccaataacctcaccagcaccatccaggtgtttacggactcggagtaccagctgccgtacgttctcggctctgcccaccagggctgcctgcctccgttcccggcggacgtgttcatgattccccagtacggctacctaacactcaacaacggtagtcaggccgtgggacgctcctccttctactgcctggaatactttccttcgcagatgctgagaaccggcaacaacttccagtttacttacaccttcgaggacgtgcctttccacagcagctacgcccacagccagagcttggaccggctgatgaatcctctgattgaccagtacctgtactacttgtctcggactcaaacaacaggaggcacgacaaatacgcagactctgggcttcagccaaggtgggcctaatacaatggccaatcaggcaaagaactggctgccaggaccctgttaccgccagcagcgagtatcaaagacatttgcggataacaacaacagtgaatactcgtggactggagctaccaagtaccacctcaatggcagagactctctggtgaatccgggcccggccatggcaagccacaaggacgatgaagaaaagttttttcctcagagcggggttctcatctttgggaagcaaggctcagagaaaacaaatgtggacattgaaaaggtcatgattacagacgaagaggaaatcaggacaaccaatcccgtggctacggagcagtatggttctgtatctaccaacctccagagaggcaacagacaagcagctaccgcagatgtcaacacacaaggcgttcttccaggcatggtctggcaggacagagatgtgtaccttcaggggcccatctgggcaaagattccacacacggacggacattttcacccctctcccctcatgggtggattcggacttaaacaccctccgcctcagatcctgatcaagaacacgcctgtacccgcggatcctccgaccaccttcaaccagtcaaagctgaactctttcatcacccagtattctactggccaagtcagcgtggagatcgagtgggagctgcagaaggaaaacagcaagcgctggaaccccgagatccagtacacctccaactactacaaatctacaagtgtggactttgctgttaatacagaaggcgtgtactctgaaccccgccccattggcacccgttacctcacccgtaatctgtaa

SEQ ID NO: 380 - protein, 737 aa, Artificial Sequence
  source: /note="Description of Artificial Sequence: Synthetic polypeptide"
MAADGYLPDWLEDNLSEGIREWWDLKPGAPKPKANQQKQDDGRGLVLPGYKYLGPFNGLDKGEPVNAADAAALEHDKAYDQQLKAGDNPYLRYNHADAEFQERLQEDTSFGGNLGRAVFQAKKRVLEPFGLVEEGAKTAPGKKRPVEQSPQEPDSSSGIGKTGQQPARKRLNFGQTGDADSVPDPQPLGQPPAAPSGLGTNTMATGSGAPMADNNEGADGVGNSSGNWHCDSQWLGDRVITTSTRTWALPTYNNHLYKQISNSTSGGSSNDNAYFGYSTPWGYFDFNRFHCHFSPRDWQRLINNNWGFRPKRLNFKLFNIQVKEVTQNEGTKTIANNLTSTIQVFTDSEYQLPYVLGSAHQGCLPPFPADVFMIPQYGYLTLNNGSQAVGRSSFYCLEYFPSQMLRTGNNFQFTYTFEDVPFHSSYAHSQSLDRLMNPLIDQYLYYLSRTQTTGGTTNTQTLGFSQGGPNTMANQAKNWLPGPCYRQQRVSKTFADNNNSEYSWTGATKYHLNGRDSLVNPGPAMASHKDDEEKFFPQSGVLIFGKQGSEKTNVDIEKVMITDEEEIRTTNPVATEQYGSVSTNLQRGNRQAATADVNTQGVLPGMVWQDRDVYLQGPIWAKIPHTDGHFHPSPLMGGFGLKHPPPQILIKNTPVPADPPTTFNQSKLNSFITQYSTGQVSVEIEWELQKENSKRWNPEIQYTSNYYKSTSVDFAVNTEGVYSEPRPIGTRYLTRNL

SEQ ID NO: 381 - DNA, 2217 bp, Artificial Sequence
  source: /note="Description of Artificial Sequence: Synthetic polynucleotide"
atggctgccgatggttatcttccagattggctcgaggacactctctctgaaggaataagacagtggtgggcgctgaaacctggagccccgaagcccaaagccaaccagcaaaagcaggacgacggccggggtctggtgcttcctggctacaagtacctcggacccttcaacggactcgacaagggggagcccgtcaacgcggcggatgcagcggccctcgagcacgacaaggcctacgaccagcagctcaaagcgggtgacaatccgtacctgcggtataaccacgccgacgccgagtttcaggagcgtctgcaagaagatacgtcttttgggggcaacctcgggcgagcagtcttccaggccaagaagcgggttctcgaacctctcggtctggttgaggaaggcgctaagacggctcctggaaagaagagaccggtagagccatcaccccagcgttctccagactcctctacgggcatcggcaagaaaggccaacagcccgccagaaaaagactcaattttggtcagactggcgactcagagtcagttccagaccctcaacctctcggagaaccaccagcagcccccacaagtttgggatctaatacaatggcttcaggcggtggcgcaccaatggcagacaataacgagggtgccgatggagtgggtaattcctcaggaaattggcattgcgattcccaatggctgggcgacagagtcatcaccaccagcacccgcacctgggccttgcccacctacaataaccacctctacaagcaaatctccagtgcttcaacgggggccagcaacgacaaccactacttcggctacagcaccccctgggggtattttgactttaaccgcttccactgccacttctcgccaagagactggcaaagactcatcaacaacaattggggattccggcccaagagactcaacttcaaactcttcaacatccaagtcaaggaggtcacgacgaatgatggcgtcacgaccatcgccaataacctcaccagcaccatccaggtgtttacggactcggagtaccagctgccgtacgttctcggctctgcccaccagggctgcctgcctccgttcccggcggacgtgttcatgattccccagtatggatacctcaccctgaacaacggaagtcaagcggtgggacgctcatccttttactgcctggagtacttcccttcgcagatgctaaggactggaaataacttccaattcagctataccttcgaggatgtaccttttcacagcagctacgctcacagccagagtttggatcgcttgatgaatcctcttattgatcagtatctgtactacctgaacagaacgcaaggaacaacctctggaacaaccaaccaatcacggctgctttttagccaggctgggcctcagtctatgtctttgcaggccagaaattggctacctgggccctgctaccggcaacagagactttcaaagactgctaacgacaacaacaacagtaactttccttggacagcagccagcaaatatcatctcaatggccgcgactcgctggtgaatccaggaccagctatggccagtcacaaggacgatgaagaaaaatttttccctatgcacggcaatctaatatttggcaaagaagggacaacggcaagtaacgcagaattagataatgtaatgattacggatgaagaagagattcgtaccaccaatcctgtggcaacagagcagtatggaactgtggcaaataacttgcagagctcaaatacagctcccacgactagaactgtcaatgatcagggggccttacctggcatggtgtggcaagatcgtgacgtgtaccttcaggggcccatctgggcaaagattccacacacggacggacattttcacccctctcccctcatgggtggattcggacttaaacaccctcctccgcagattctcatcaagaacaccccggtacctgcgaatccttcgaccaccttcagtgcggcaaagtttgcttccttcatcacacagtactccacgggacaggtcagcgtggagatcgagtgggagctgcagaaggaaaacagcaagcgctggaacccggagatccagtacacttccaactattacaagtctaataatgttgaatttgctgttaatactgaaggtgtatatagtgaaccccgccccattggcaccagatacctgactcgtaatctgtaa

SEQ ID NO: 382 - protein, 738 aa, Artificial Sequence
  source: /note="Description of Artificial Sequence: Synthetic polypeptide"
MAADGYLPDWLEDTLSEGIRQWWALKPGAPKPKANQQKQDDGRGLVLPGYKYLGPFNGLDKGEPVNAADAAALEHDKAYDQQLKAGDNPYLRYNHADAEFQERLQEDTSFGGNLGRAVFQAKKRVLEPLGLVEEGAKTAPGKKRPVEPSPQRSPDSSTGIGKKGQQPARKRLNFGQTGDSESVPDPQPLGEPPAAPTSLGSNTMASGGGAPMADNNEGADGVGNSSGNWHCDSQWLGDRVITTSTRTWALPTYNNHLYKQISSASTGASNDNHYFGYSTPWGYFDFNRFHCHFSPRDWQRLINNNWGFRPKRLNFKLFNIQVKEVTTNDGVTTIANNLTSTIQVFTDSEYQLPYVLGSAHQGCLPPFPADVFMIPQYGYLTLNNGSQAVGRSSFYCLEYFPSQMLRTGNNFQFSYTFEDVPFHSSYAHSQSLDRLMNPLIDQYLYYLNRTQGTTSGTTNQSRLLFSQAGPQSMSLQARNWLPGPCYRQQRLSKTANDNNNSNFPWTAASKYHLNGRDSLVNPGPAMASHKDDEEKFFPMHGNLIFGKEGTTASNAELDNVMITDEEEIRTTNPVATEQYGTVANNLQSSNTAPTTRTVNDQGALPGMVWQDRDVYLQGPIWAKIPHTDGHFHPSPLMGGFGLKHPPPQILIKNTPVPANPSTTFSAAKFASFITQYSTGQVSVEIEWELQKENSKRWNPEIQYTSNYYKSNNVEFAVNTEGVYSEPRPIGTRYLTRNL

SEQ ID NO: 383 - DNA, 2208 bp, Artificial Sequence; identical to SEQ ID NO: 19
  source: /note="Description of Artificial Sequence: Synthetic polynucleotide"

SEQ ID NO: 384 - protein, 735 aa, Artificial Sequence [sequence omitted]

SEQ ID NO: 385 - DNA, 2208 bp, Artificial Sequence
  source: /note="Description of Artificial Sequence: Synthetic polynucleotide"
atggctgccgatggttatcttccagattggctcgaggacaacctctctgagggcattcgcgagtggtgggcgctgaaacctggagccccgaagcccaaagccaaccagcaaaagcaggacgacggccggggtctggtgcttcctggctacaagtacctcggacccttcaacggactcgacaagggggagcccgtcaacgcggcggacgccgcggccctcgagcacgacaaggcctacgaccagcagctgcaggcgggtgacaatccgtacctgcggtataaccacgccgacgccgagtttcaggagcgtctgcaagaagatacgtcttttgggggcaacctcgggcgagcagtcttccaggccaaaaagaggcttcttgaacctcttggtctggttgaggaagcagctaaaacggctcctggaaagaagaggcctgtagagcagtctcctcaggaaccggactcctccgcgggtattggcaaatcgggtgcacagcccgccaaaaagagactcaatttcggtcagactggcgactcagagtcagtcccagaccctcaacctctcggagaaccaccagcagcccccacaagtttgggatctaatacaatggcttcaggcggtggcgcaccaatggcagacaataacgaaggcgccgacggagtgggtaatgcctcaggaaattggcattgcgattccacatggctgggcgacagagtcatcaccaccagcacccgcacctgggccttgcccacctacagcaaccatctctacaagcaaatctccagccaatcaggagcttcaaacgacaacgactactttggctacagcaccccttgggggtattttgatttcaacagattccactgccacttttcaccacgtgactggcaaagactcatcaacaacaactggggattccgacccaagagactcaacttcaagctctttaacattcaagtcaaagaggtcacgcagaatgacggtacgacgacgattgccaataaccttaccagcacggttcaggtgtttactgactcggagtaccagctcccgtacgtcctcggctcggcgcatcaaggatgcctcccgccgttcccagcagacgtcttcatggtgccacagtatggatacctcaccctgaacaacgggagtcaggcagtaggacgctcttcattttactgcctggagtactttccttctcagatgctgcgtaccggaaacaactttaccttcagctacacttttgaggacgttcctttccacagcagctacgctcacagccagagtctggaccgtctcatgaatcctctcatcgaccagtacctgtattacttgagcagaacaaacactccaagtggaaccaccacgcagtcaaggcttcagttttctcaggccggagcgagtgacattcgggaccagtctaggaactggcttcctggaccctgttaccgccagcagcgagtatcaaagacatctgaggataacaacaacagtgaatactcgtggactggagctaccaagtaccacctcaatggcagagactctctggtgaatccgggcccggccatggcaagccacaaggacgatgaagaaaagttttttcctcagagcggggttctcatctttgggaagcaaggctcagagaaaacaaatgtggacattgaaaaggtcatgattacagacgaagaggaaatcaggacaaccaatcccgtggctacggagcagtatggttctgtatctaccaacctccagagaggcaacagacaagcagctaccgcagatgtcaacacacaaggcgttcttccaggcatggtctggcaggacagagatgtgtaccttcaggggcccatctgggcaaagattccacacacggacggacattttcacccctctcccctcatgggtggattcggacttaaacaccctcctccacagattctcatcaagaacaccccggtacctgcgaatccttcgaccaccttcagtgcggcaaagtttgcttccttcatcacacagtactccacgggacaggtcagcgtggagatcgagtgggagctgcagaaggaaaacagcaaacgctggaatcccgaaattcagtacacttccaactacaacaagtctgttaatgtggactttactgtggacactaatggcgtgtattcagagcctcgccccattggcaccagatacctgactcgtaatctgtaa

SEQ ID NO: 386 - protein, 735 aa, Artificial Sequence
  source: /note="Description of Artificial Sequence: Synthetic polypeptide"
MAADGYLPDWLEDNLSEGIREWWALKPGAPKPKANQQKQDDGRGLVLPGYKYLGPFNGLDKGEPVNAADAAALEHDKAYDQQLQAGDNPYLRYNHADAEFQERLQEDTSFGGNLGRAVFQAKKRLLEPLGLVEEAAKTAPGKKRPVEQSPQEPDSSAGIGKSGAQPAKKRLNFGQTGDSESVPDPQPLGEPPAAPTSLGSNTMASGGGAPMADNNEGADGVGNASGNWHCDSTWLGDRVITTSTRTWALPTYSNHLYKQISSQSGASNDNDYFGYSTPWGYFDFNRFHCHFSPRDWQRLINNNWGFRPKRLNFKLFNIQVKEVTQNDGTTTIANNLTSTVQVFTDSEYQLPYVLGSAHQGCLPPFPADVFMVPQYGYLTLNNGSQAVGRSSFYCLEYFPSQMLRTGNNFTFSYTFEDVPFHSSYAHSQSLDRLMNPLIDQYLYYLSRTNTPSGTTTQSRLQFSQAGASDIRDQSRNWLPGPCYRQQRVSKTSEDNNNSEYSWTGATKYHLNGRDSLVNPGPAMASHKDDEEKFFPQSGVLIFGKQGSEKTNVDIEKVMITDEEEIRTTNPVATEQYGSVSTNLQRGNRQAATADVNTQGVLPGMVWQDRDVYLQGPIWAKIPHTDGHFHPSPLMGGFGLKHPPPQILIKNTPVPANPSTTFSAAKFASFITQYSTGQVSVEIEWELQKENSKRWNPEIQYTSNYNKSVNVDFTVDTNGVYSEPRPIGTRYLTRNL

SEQ ID NO: 387 - DNA, 2208 bp, Artificial Sequence
  source: /note="Description of Artificial Sequence: Synthetic polynucleotide"
atggctgccgatggttatcttccagattggctcgaggacaacctctctgagggcattcgcgagtggtgggcgctgaaacctggagccccgaagcccaaagccaaccagcaaaagcaggacgacggccggggtctggtgcttcctggctacaagtacctcggacccttcaacggactcgacaagggggagcccgtcaacgcggcggacgcagcggccctcgagcacgacaaggcctacgaccagcagctgcaggcgggtgacaatccgtacctgcggtataaccacgccgacgccgagttccaggagcgtctgcaagaagatacgtcttttgggggcaacctcgggcgagcagtcttccaggccaagaagagggttctcgaaccttttggtctggttgaggaaggtgctaagacggctcctggaaagaaacgtccggtagagcagtcgccacaagagccagactcctcctcgggcattggcaagacaggccagcagcccgctaaaaagagactcaattttggtcagactggcgactcagagtcagtcccagaccctcaacctctcggagaaccaccagcagcccccacaagtttgggatctaatacaatggcttcaggcggtggcgcaccaatggcagacaataacgagggcgccgacggagtgggtaattcctcgggaaattggcattgcgattccacatggatgggcgacagagtcatcaccaccagcacccgaacctgggccctgcccacctacaacaaccacctctacaaacaaatttccagccaatcaggagcttcaaacgacaaccactactttggctacagcaccccttgggggtattttgactttaacagattccactgccacttttcaccacgtgactggcagcgactcattaacaacaactggggattccggcccaagaaactcaacttcaagctctttaacatccaggtcaaggaggtcacgcagaatgaaggcaccaagaccatcgccaataacctcaccagcaccatccaggtgtttacggactcggagtaccagctgccgtacgttctcggctctgcccaccagggctgcctgcctccgttcccggcggacgtgttcatgattccccagtacggctacctaacactcaacaacggtagtcaggccgtgggacgctcctccttctactgcctggaatactttccttcgcagatgctgagaaccggcaacaacttccagtttacttacaccttcgaggacgtgcctttccacagcagctacgcccacagccagagcttggaccggctgatgaatcctctgattgaccagtacctgtattacttgtctcggactcaaacaacaggaggcacgacaaatacgcagactctgggcttcagccaaggtgggcctaatacaatggccaatcaggcaaagaactggctgcctggaccctgttaccgccagcagcgagtatcaaagacatctgcggataacaacaacagtgaatactcgtggactggagctaccaagtaccacctcaatggcagagactctctggtgaatccgggcccggccatggcaagccacaaggacgatgaagaaaagttttttcctcagagcggggttctcatctttgggaagcaaggctcagagaaaacaaatgtggacattgaaaaggttatgattacagacgaagaggaaatcaggacaaccaatcccgtggctacggagcagtatggttctgtatctaccaacctccagagaggcaacagacaagcagctaccgcagatgtcaacacacagggcgttcttccaggcatggtctggcaggacagagatgtgtaccttcagggtcccatttgggccaaaattcctcacacagatggacactttcacccgtcccctcttatgggcggctttggactcaagaacccgcctcctcagatcctcatcaaaaacacgcctgttcctgcgaatcctccggcagagttttcagctacaaagtttgcttcattcatcacccaatactccacaggacaagtgagtgtggaaattgaatgggagctgcagaaagaaaacagcaagcgctggaatcccgaagtgcagtacacatccaattatgcaaaatctgccaacgttgattttactgtggacactaatggcgtgtattcagagcctcgccccattggcaccagatacctcacccgtaatctgtaa

SEQ ID NO: 388 - protein, 735 aa, Artificial Sequence
  source: /note="Description of Artificial Sequence: Synthetic polypeptide"
MAADGYLPDWLEDNLSEGIREWWALKPGAPKPKANQQKQDDGRGLVLPGYKYLGPFNGLDKGEPVNAADAAALEHDKAYDQQLQAGDNPYLRYNHADAEFQERLQEDTSFGGNLGRAVFQAKKRVLEPFGLVEEGAKTAPGKKRPVEQSPQEPDSSSGIGKTGQQPAKKRLNFGQTGDSESVPDPQPLGEPPAAPTSLGSNTMASGGGAPMADNNEGADGVGNSSGNWHCDSTWMGDRVITTSTRTWALPTYNNHLYKQISSQSGASNDNHYFGYSTPWGYFDFNRFHCHFSPRDWQRLINNNWGFRPKKLNFKLFNIQVKEVTQNEGTKTIANNLTSTIQVFTDSEYQLPYVLGSAHQGCLPPFPADVFMIPQYGYLTLNNGSQAVGRSSFYCLEYFPSQMLRTGNNFQFTYTFEDVPFHSSYAHSQSLDRLMNPLIDQYLYYLSRTQTTGGTTNTQTLGFSQGGPNTMANQAKNWLPGPCYRQQRVSKTSADNNNSEYSWTGATKYHLNGRDSLVNPGPAMASHKDDEEKFFPQSGVLIFGKQGSEKTNVDIEKVMITDEEEIRTTNPVATEQYGSVSTNLQRGNRQAATADVNTQGVLPGMVWQDRDVYLQGPIWAKIPHTDGHFHPSPLMGGFGLKNPPPQILIKNTPVPANPPAEFSATKFASFITQYSTGQVSVEIEWELQKENSKRWNPEVQYTSNYAKSANVDFTVDTNGVYSEPRPIGTRYLTRNL

SEQ ID NO: 389 - DNA, 2214 bp, Artificial Sequence; identical to SEQ ID NO: 379
  source: /note="Description of Artificial Sequence: Synthetic polynucleotide"

SEQ ID NO: 390 - protein, 737 aa, Artificial Sequence; identical to SEQ ID NO: 380
  source: /note="Description of Artificial Sequence: Synthetic polypeptide"

SEQ ID NO: 391 - DNA, 2196 bp, Artificial Sequence
  source: /note="Description of Artificial Sequence: Synthetic polynucleotide"
atggctgctgacggttatcttccagattggctcgaggacaacctctctgagggcattcgcgagtggtgggcgctgaaacctggagccccgcaacccaaagccaaccagcaaaagcaggacgacggccggggtctggtgcttcctggctacaagtacctcggacccttcaacggactcgacaagggggagcccgtcaacgaggcggacgccgcggccctcgagcacgacaaggcctacgaccagcagctcaaagcgggtgacaatccgtacctgcggtataatcacgccgacgccgagtttcaagagcgtctgcaagaagatacgtcctttgggggcaacctcgggcgagcagtcttccaggccaaaaagagggtactcgagcctctgggtctggttgaggaaggcgctaagacggctcctggaaagaagcggccagtagaaccggactccagctcgggcatcggcaagtcaggccagcagcccgcgaaaaagagactgaattttgggcagactggcgactcagagtcagtgcctgacccccaacctctctcagaaccacccgcaggtccctctggtctgggatctggtacaatggctgctggcggtggcgctccaatggcagacaataacgaaggcgccgacggagtgggtaatgtctcaggaaattggcattgcgattccacatggctgggcgaccgagtcatcaccaccagcactcggacctgggccctccccacctacaacaaccacctctacaagcaaatctccaacgggacctcgggaggcagcagcaacgacaacacctactttggctacagcaccccctgggggtattttgactttaacagattccactgccacttttcaccacgtgactggcagcgactcatcaacaacaactgggggttccggcccaagaagctcaacttcaagctcttcaacatccaggtcaaggaggtcacccagaatgaaggcaccaagaccatcgccaataacctcaccagcacggtgcaggtctttacggactcggagtaccagctcccgtacgtgctcggctctgcccaccagggctgcctgcctccgttcccggcggacgtgttcatgattccgcagtacgggtacctgacgctgaacaacgggagccaggccgtggggcgatcctccttctactgcctggagtactttccctcgcagatgctgagaacgggcaacaactttaccttcagctacaccttcgaggacgtgcccttccacagcagctacgcgcacagccagagcctggaccggctgatgaacccgctgattgaccagtacctgtactacctgtctcggactcagaccaacgggaccaatgccacgcagactctgttgtttgctcaggccgggcctcagaacatgtcggctcaggccaagaactggctgcctggtccttgctatcggcagcagcgcgtctctacgacagtgtcgcaaaacaacaacagcaactttacctggaccggggcgaccaagtaccacctgaacggccgagactccctggtgagccccggtgtcgccatggcaacgcacaaggacgacgaggagcgcttcttcccgagcagcggggtcctgatgtttggcaagcagggcgctggaaaggacaatgtcgagtacaccaacgtgatgctcaccagcgaggaggagatcaagaccaccaaccctgtggccacggagcagtacggcgtggtggctgacaatctgcagcagaccaactcagctcccattgtgggggcagtcaacagccagggggccttacccggtatggtctggcagaaccgggacgtgtacctgcagggtcccatctgggccaagatcccgcatacggacggcaactttcacccgtctcctctcatgggcggctttggactgaaacacccgcctccccagatcctgatcaaaaacacgccggtacctgcggatcccccggtgaactttacggacgctaagctggcgagtttcatcacgcagtacagcaccgggcaggtcagcgtggagattgagtgggagctgcagaaggagaacagcaagcgctggaatcccgagattcagtacacttccaattattataaatcagctaatgtggactttgccgtcaatgcagatggtgtatatagtgaaccccgccccattggcactcgttacctcacccgtaatctgtaa

SEQ ID NO: 392 - protein, 731 aa, Artificial Sequence
  source: /note="Description of Artificial Sequence: Synthetic polypeptide"
MAADGYLPDWLEDNLSEGIREWWALKPGAPQPKANQQKQDDGRGLVLPGYKYLGPFNGLDKGEPVNEADAAALEHDKAYDQQLKAGDNPYLRYNHADAEFQERLQEDTSFGGNLGRAVFQAKKRVLEPLGLVEEGAKTAPGKKRPVEPDSSSGIGKSGQQPAKKRLNFGQTGDSESVPDPQPLSEPPAGPSGLGSGTMAAGGGAPMADNNEGADGVGNVSGNWHCDSTWLGDRVITTSTRTWALPTYNNHLYKQISNGTSGGSSNDNTYFGYSTPWGYFDFNRFHCHFSPRDWQRLINNNWGFRPKKLNFKLFNIQVKEVTQNEGTKTIANNLTSTVQVFTDSEYQLPYVLGSAHQGCLPPFPADVFMIPQYGYLTLNNGSQAVGRSSFYCLEYFPSQMLRTGNNFTFSYTFEDVPFHSSYAHSQSLDRLMNPLIDQYLYYLSRTQTNGTNATQTLLFAQAGPQNMSAQAKNWLPGPCYRQQRVSTTVSQNNNSNFTWTGATKYHLNGRDSLVSPGVAMATHKDDEERFFPSSGVLMFGKQGAGKDNVEYTNVMLTSEEEIKTTNPVATEQYGVVADNLQQTNSAPIVGAVNSQGALPGMVWQNRDVYLQGPIWAKIPHTDGNFHPSPLMGGFGLKHPPPQILIKNTPVPADPPVNFTDAKLASFITQYSTGQVSVEIEWELQKENSKRWNPEIQYTSNYYKSANVDFAVNADGVYSEPRPIGTRYLTRNL

SEQ ID NO: 393 - DNA, 2196 bp, Artificial Sequence
  source: /note="Description of Artificial Sequence: Synthetic polynucleotide"
atggctgctgacggttatcttccagattggctcgaggacaacctctctgagggcattcgcgagtggtgggcgctgaaacctggagccccgcaacccaaagccaaccagcaaaagcaggacgacggccggggtctggtgcttcctggctacaagtacctcggacccttcaacggactcgacaagggggagcccgtcaacgaggcggacgccgcggccctcgagcacgacaaggcctacgaccagcagctcaaagcgggtgacaatccgtacctgcggtataatcacgccgacgccgagtttcaagagcgtctgcaagaagatacgtcctttgggggcaacctcgggcgagcagtcttccaggccaaaaagagggtactcgagcctctgggtctggttgaggaaggcgctaagacggctcctggaaagaagcggccagtagaaccggactccagctcgggcatcggcaagtcaggccggcagcccgcgaaaaagagactgaattttgggcagactggcgactcagagtcagtgcctgacccccaacctctctcagaaccacccgcaggtccctctggtctgggatctggtacaatggctgcaggcggtggcgctccaatggcagacaataacgaaggcgccgacggagtgggtaatgcctcaggaaattggcattgcgattccacatggctgggcgaccgagtcatcaccaccagcactcggacctgggccctccccacctacaacaaccacctctacaagcaaatctccaacgggacctcgggaggcagcagcaacgacaacacctactttggctacagcaccccctgggggtattttgactttaacagattccactgccacttttcaccacgtgactggcagcgactcatcaacaacaactggggattccggcccaagaggctcaacttcaagctcttcaacatccaggtcaaggaggtcacccagaatgaaggcaccaagaccatcgccaataacctcaccagcacggtgcaggtctttacggactcgaagtaccagctcccgtacgtgctcggctctgcccaccagggctgcctgcctccgttcccggcggacgtgttcatgattccgcagtacgggtacctgacgctgaacaacgggagccaggccgtggggcgatcctccttctactgcctggagtactttccctcgcagatgctgagaacgggcaacaactttaccttcagctacaccttcgaggacgtgcccttccacagcagctacgcgcacagccagagcctggaccggctgatgaacccgctgattgaccagtacctgtactacctgtctcggactcagaccaacgggaccaatgccacgcagactctgttgtttgctcaggccgggcctcagaacatgtcggctcaggccaagaactggctgcctggtccttgctatcggcagcagcgcgtctctacgacagtgtcgcaaaacaacaacagcaactttacctggaccggggcgaccaagtaccacctgaacggccgagactccctggtgaaccccggtgtcgccatggcaacgcacaaggacgacgaggagcgcttcttcccgagcagcggggtcctgatgtttggcaagcagggcgctggaaaggacaatgtcgagtacaccaacgtgatgctcaccagcgaggaggagatcaagaccaccaaccctgtggccacggagcagtacggtgtggtggctgacaatctgcagcagaccaactcggctcccattgtgggggcagtcaacagccagggggccttacccggtatggtctggcagaaccgggacgtgtacctgcagggtcccatctgggccaagatcccgcatacggacggcaactttcacccgtctcctctcatgggcggctttggactgaaacacccgcctccccagatcctgatcaaaaacacgccggtacctgcggatcccccggtgaactttacggacgctaagctggcgagtttcatcacgcagtacagcaccgggcaggtcagcgtggagattgagtgggagctgcagaaggagaacagcaagcgctggaatcccgagattcagtacacttccaattattataaatcagctaatgtggactttgccgtcaatgcagatggtgtatatagtgaaccccgccccattggcactcgttacctcacccgtaatctgtaa

SEQ ID NO: 394 - protein, 731 aa, Artificial Sequence
  source: /note="Description of Artificial Sequence: Synthetic polypeptide"
MAADGYLPDWLEDNLSEGIREWWALKPGAPQPKANQQKQDDGRGLVLPGYKYLGPFNGLDKGEPVNEADAAALEHDKAYDQQLKAGDNPYLRYNHADAEFQERLQEDTSFGGNLGRAVFQAKKRVLEPLGLVEEGAKTAPGKKRPVEPDSSSGIGKSGRQPAKKRLNFGQTGDSESVPDPQPLSEPPAGPSGLGSGTMAAGGGAPMADNNEGADGVGNASGNWHCDSTWLGDRVITTSTRTWALPTYNNHLYKQISNGTSGGSSNDNTYFGYSTPWGYFDFNRFHCHFSPRDWQRLINNNWGFRPKRLNFKLFNIQVKEVTQNEGTKTIANNLTSTVQVFTDSKYQLPYVLGSAHQGCLPPFPADVFMIPQYGYLTLNNGSQAVGRSSFYCLEYFPSQMLRTGNNFTFSYTFEDVPFHSSYAHSQSLDRLMNPLIDQYLYYLSRTQTNGTNATQTLLFAQAGPQNMSAQAKNWLPGPCYRQQRVSTTVSQNNNSNFTWTGATKYHLNGRDSLVNPGVAMATHKDDEERFFPSSGVLMFGKQGAGKDNVEYTNVMLTSEEEIKTTNPVATEQYGVVADNLQQTNSAPIVGAVNSQGALPGMVWQNRDVYLQGPIWAKIPHTDGNFHPSPLMGGFGLKHPPPQILIKNTPVPADPPVNFTDAKLASFITQYSTGQVSVEIEWELQKENSKRWNPEIQYTSNYYKSANVDFAVNADGVYSEPRPIGTRYLTRNL

SEQ ID NO: 395 - DNA, 2196 bp, Artificial Sequence
  source: /note="Description of Artificial Sequence: Synthetic polynucleotide"
atggctgctgacggttatcttccagattggctcgaggacaacctctctgagggcattcgcgagtggtgggcgctgaaacctggagccccgcaacccaaagccaaccagcaaaagcaggacgacggccggggtctggtgcttcctggctacaagtacctcggacccttcaacggactcgacaagggggagcccgtcaacgaggcggacgccgcggccctcgagcacgacaaggcctacgaccagcagctcaaagcgggtgacaatccgtacctgcggtataatcacgccgacgccgagtttcaagagcgtctgcaagaagatacgtcctttgggggcaacctcgggcgagcagtcttccaggccaaaaagagggtactcgagcctctgggtctggttgaggaaggcgctaagacggctcctggaaagaagcggccagtagaaccggactccagctcgggcatcggcaagtcaggccagcagcccgcgaaaaagagactgaattttgggccgactggcgactcagagtcagtgcctgacccccaacctctctcagaaccacctgcaggtccctctggtctgggatctggtacaatggctgcaggcggtggcgctccaatggcagacaataacgaaggcgccgacggagtgggtaatgtctcaggaaattggcattgcgattccacatggctgggcgaccgagtcatcaccaccagcactcggacctgggccctccccacctacaacaaccacctctacaagcaaatctccaacgggacctcgggaggcagcagcaacgacaacacctactttggctacagcaccccctgggggtattttgactttaacagattccactgccacttttcaccacgcgactggcagcgactcatcaacaacaactggggattccggcccaagaagctcaacttcaagctcttcaacatccaggtcaaggaggtcacccagaatgaaggcaccaagaccaccgccaataacctcaccagcacggtgcaggtctttacggactcggagtaccagctcccgtacgtgctcggctctgcccaccagggctgcctgcctccgttcccggcggacgtgttcatgattccgcagtacgggtacctgacgctgaacaacgggagccaggccgtggggcgatcctccttctactgcctggagtactttccctcgcagatgctgagaacgggcaacaactttaccttcagctacaccttcgaggacgtgcccttccacagcagctacgcgcacagccagagcctggaccggctgatgaacccgctgattgaccagtacctgtactacctgtctcggactcagaccaacgggaccaatgccacgcagactctgttgtttgctcaggccgggcctcagaacatgtcggctcaggccaagaactggctgcctggtccttgctatcggcagcagcgcgtctctacggcagtgtcgcaaaacaacaacagcaactttacctggaccggggcgaccaagtaccacctgaacggccgagactccctggtgaaccccggtgtcgccatggcaacgcacaaggacgacgaggagcgcttcttcccgagcagcggggtcctgatgtttggcaagcagggcgctggaaaggacaatgtcgagtacaccaacgtgatgctcaccagcgaggaggagatcaagaccaccaaccctgtggccacggagcagtacggtgtggtggctgacaatctgcagcagaccaactcggctcccattgtgggggcagtcaacagccagggggccttacccggtatggtctggcagaaccgggacgtgtacctgcagggtcccatctgggccaagatcccgcatacggacggcaactttcacccgtctcctctcatgggcggctttggactgaaacacccgcctccccagatcctgatcaaaaacacgccggtacctgcggatcccccggtgaactttacggacgctaagctggcgagtttcatcacgcagtacagcaccgggcaggtcagcgtggagattgagtgggagctgcagaaggagaacagcaagcgctggaatcccgagattcagtacacttccaattattataaatcagctaatgtggactttgccgtcaatgcagatggtgtatatagcgaaccccgccccattggcactcgttacctcacccgtaatctgtaa

SEQ ID NO: 396 - protein, 731 aa, Artificial Sequence
  source: /note="Description of Artificial Sequence: Synthetic polypeptide"
MAADGYLPDWLEDNLSEGIREWWALKPGAPQPKANQQKQDDGRGLVLPGYKYLGPFNGLDKGEPVNEADAAALEHDKAYDQQLKAGDNPYLRYNHADAEFQERLQEDTSFGGNLGRAVFQAKKRVLEPLGLVEEGAKTAPGKKRPVEPDSSSGIGKSGQQPAKKRLNFGPTGDSESVPDPQPLSEPPAGPSGLGSGTMAAGGGAPMADNNEGADGVGNVSGNWHCDSTWLGDRVITTSTRTWALPTYNNHLYKQISNGTSGGSSNDNTYFGYSTPWGYFDFNRFHCHFSPRDWQRLINNNWGFRPKKLNFKLFNIQVKEVTQNEGTKTTANNLTSTVQVFTDSEYQLPYVLGSAHQGCLPPFPADVFMIPQYGYLTLNNGSQAVGRSSFYCLEYFPSQMLRTGNNFTFSYTFEDVPFHSSYAHSQSLDRLMNPLIDQYLYYLSRTQTNGTNATQTLLFAQAGPQNMSAQAKNWLPGPCYRQQRVSTAVSQNNNSNFTWTGATKYHLNGRDSLVNPGVAMATHKDDEERFFPSSGVLMFGKQGAGKDNVEYTNVMLTSEEEIKTTNPVATEQYGVVADNLQQTNSAPIVGAVNSQGALPGMVWQNRDVYLQGPIWAKIPHTDGNFHPSPLMGGFGLKHPPPQILIKNTPVPADPPVNFTDAKLASFITQYSTGQVSVEIEWELQKENSKRWNPEIQYTSNYYKSANVDFAVNADGVYSEPRPIGTRYLTRNL

SEQ ID NO: 397 - DNA, 4404 bp, Artificial Sequence
  source: /note="Description of Artificial Sequence: Synthetic polynucleotide"
atggctgccgatggttatcttccagattggctcgagggcaacctctctgagggcattcgcgagtggtgggacttgaaacctggagccccgaaacccaaagccaaccagcaaaagcaggacgacggccggggtctggtgcttcctggctacaggtacctcggacccttcaacggactcgacaagggagagccggtcaacgaggcagacgccgcggccctcgagcacgacaaggcctacgacaagcagctcgagcagggggacaacccgtacctcaagtacaaccacgccgacgccgagtttcaggagcgtcttcaagaagatacgtcttttgggggcaacctcgggcgagcagtcttccaggccaagaagcgggttctcgaacctctcggtctggttgaggaaggcgctaagacggctcctggaaagaagagacccatagaatcccccgactcctccacgggcatcggcaagaacggccagccgcccgctaaaaagaagctcaactttgggcagactggcgactcagagtcagtgcccgacccccaacctctcggagaacctcccgccgcgccctcaggtctgggatctggtacaatggctgcaggcggtggcgcaccaatggcagacaataacgaaggcgccgacggagtgggtaatgcctccggaaattggcattgcgattccacatggctgggcgacagagtcatcaccaccagcacccgcacctgggccctgcccacctacaacaaccacctctacaagcagatatcaagtcagagcggggctaccaacgacaaccacttcttcggctacagcaccccctggggctattttgacttcaacagattccactgccacttctcaccacgtgactggcagcgactcatcaacaacaactggggattccggcccagaaagctgcggttcaagttgttcaacatccaggtcaaggaggtcacgacgaacgacggcgttacgaccatcgctaataaccttaccagcacgattcaggtcttctcggactcggagtaccaactgccgtacgtcctcggctctgcgcaccagggctgcctccctccgttccctgcggacgtgttcatgattcctcagtacggatatctgactctaaacaacggcagtcagtctgtgggacgttcctccttctactgcctggagtactttccttctcagatgctgagaacgggcgataactttgaattcagctacacctttgaggaagtgcctttccacagcagctatgcgcacagccagagcctggaccggctgatgaatcccctcatcgaccagtacctgtactacctggcccggacccagagcactacggggtccacaagggagctgcagttccatcaggctgggcccaacaccatggccgagcaatcaaagaactggctgcccggaccctgttatcggcagcagagactgtcaaaaaacatagacagcaacaacaacagtaactttgcctggaccggggccactaaataccatctgaatggtagaaattcattaaccaacccgggcgtagccatggccaccaacaaggacgacgaggaccagttctttcccatcaacggagtgctggtttttggcaaaacgggggctgccaacaagacaacgctggaaaacgtgctaatgaccagcgaggaggagatcaaaaccaccaatcccgtggctacagaagaatacggtgtggtctccagcaacctgcaatcgtctacggccggaccccagacacagactgtcaacagccagggggctctgcccggcatggtctggcagaaccgggacgtgtacctgcagggtcccatctgggccaaaattcctcacacggacggcaactttcacccgtctcccctgatgggcggatttggactcaaacacccgcctcctcaaattctcatcaaaaacaccccggtacctgctaatcctccagaggtgtttactcctgccaagtttgcctcatttatcacgcagtacagcaccggccaggtcagcgtggagatcgagtgggaactgcagaaagaaaacagcaaacgctggaatccagagattcagtacacctcaaattatgccaagtctaataatgtggaatttgctgtcaacaacgaaggggtttatactgagcctcgccccattggcacccgttacctcacccgtaacctgtaaatggctgccgatggttatcttccagattggctcgaggacaacctctctgagggcattcgcgagtggtgggacttgaaacctggagccccgaaacccaaagccaaccagcaaaagcaggacgacggccggggtctggtgcttcctggctacaagtacctcggacccttcaacggactcgacaagggggagcccgtcaacgcggcggacgcagcggccctcgagcacgacaaggcctacgaccagcagctcaaagcgggtgacaatccgtacctgcggtataaccacgccgacgccgagtttcaggagcgtctgcaagaagatacgtcttttgggggcaacctcgggcgagcagtcttccaggccaagaagcgggttctcgaacctctcggtctggttgaggaaggcgctaagacggctcctggaaagaagagaccggtagagccatcaccccagcgttctccagactcctctacgggcatcggcaagaaaggccagcagcccgcgaaaaagagactcaactttgggcagactggcgactcagagtcagtgcccgaccctcaaccaatcggagaaccccccgcaggcccctctggtctgggatctggtacaatggctgcaggcggtggcgctccaatggcagacaataacgaaggcgccgacggagtgggtagttcctcaggaaattggcattgcgattccacatggctgggcgacagagtcatcaccaccagcacccgaacctgggccctccccacctacaacaaccacctctacaagcaaatctccaacgggacttcgggaggaagcaccaacgacaacacctacttcggctacagcaccccctgggggtattttgactttaacagattccactgccacttctcaccacgtgactggcagcgactcatcaacaacaactggggattccggcccaagagactcaacttcaagctcttcaacatccaggtcaaggaggtcacgcagaatgaaggcaccaagaccatcgccaataaccttaccagcacgattcaggtctttacggactcggaataccagctcccgtacgtcctcggctctgcgcaccagggctgcctgcctccgttcccggcggacgtcttcatgattcctcagtacgggtacctgactctgaacaatggcagtcaggccgtgggccgttcctccttctactgcctggagtactttccttctcaaatgctgagaacgggcaacaactttgagttcagctaccagtttgaggacgtgccttttcacagcagctacgcgcacagccaaagcctggaccggctgatgaaccccctcatcgaccagtacctgtactacctgtctcggactcagtccacgggaggtaccgcaggaactcagcagttgctattttctcaggccgggcctaataacatgtcggctcaggccaaaaactggctacccgggccctgctaccggcagcaacgcgtctccacgacactgtcgcaaaataacaacagcaactttgcctggaccggtgccaccaagtatcatctgaatggcagagactctctggtaaatcccggtgtcgctatggcaacccacaaggacgacgaagagcgattttttccgtccagcggagtcttaatgtttgggaaacagggagctggaaaagacaacgtggactatagcagcgttatgctaaccagtgaggaagaaattaaaaccaccaacccagtggccacagaacagtacggcgtggtggccgataacctgcaacagcaaaacgccgctcctattgtaggggccgtcaacagtcaaggagccttacctggcatggtctggcagaaccgggacgtgtacctgcagggtcctatctgggccaagattcctcacacggacggaaactttcatccctcgccgctgatgggaggctttggactgaaacacccgcctcctcagatcctgattaagaatacacctgttcccgcggatcctccaactaccttcagtcaagctaagctggcgtcgttcatcacgcagtacagcaccggacaggtcagcgtggaaattgaatgggagctgcagaaagaaaacagcaaacgctggaacccagagattcaatacacttccaactactacaaatctacaaatgtggactttgctgttaacacagatggcacttattctgagcctcgccccatcggcacccgttacctcacccgtaatctgtaa

SEQ ID NO: 398 - protein, 738 aa, Artificial Sequence; identical to SEQ ID NO: 16
  source: /note="Description of Artificial Sequence: Synthetic polypeptide"

SEQ ID NO: 399 - DNA, 3129 bp, Artificial Sequence
  source: /note="Description of Artificial Sequence: Synthetic polynucleotide"
gaattcgccctttctacggctgcgtcaactggaccaatgagaactttcccttcaacgattgcgtcgacaagatggtgatctggtgggaggagggcaagatgacggccaaggtcgtggagtccgccaaggccattctcggcggcagcaaagtgcgcgtggaccaaaagtgcaagtcgtccgcccagatcgaccccacccccgtgatcgtcacctccaacaccaacatgtgcgccgtgattgacgggaacagcaccaccttcgagcaccagcagccgttgcaggaccggatgttcaagtttgaactcacccgccgtctggagcacgactttggcaaggtgacaaagcaggaagtcagagagttcttccgctgggcgcaggatcacgtgaccgaggtggcgcacgagttctacgtcagaaagggtggagccaacaagagacccgcccccgatgacgcggataaaagcgagcccaagcgggcctgcccctcagtcgcggatccatcgacgtcagacgcggaaggagctccggtggactttgccgacaggtaccaaaacaaatgttctcgtcacgcgggcatgcttcagatgctgtttccctgcaaaacatgcgagagaatgaatcagaatttcaacatttgcttcacgcacgggaccagagactgttcagaatgtttccccggcgtgtcagaatctcaaccggtcgtcagaaaaaagacgtatcggaaactctgtgcgattcatcatctgctgggggcgggcacccgagattgcttgctcggcctgcgatctggtcaacgtggacctagatgactgtgtttctgagcaataaatgacttaaaccaggtatggctgccgatggttatcttccagattggctcgaggacaacctctctgagggcattcgcgagtggtgggacttgaaacctggagccccgaaacccaaagccaaccagcaaaagcaggacgacggccggggtctggtgcttcctggctacaagtacctcggacccttcaacggactcgacaagggggagcccgtcaacgcggcggacgcagcggccctcgagcacgacaaggcctacgaccagcagctcaaagcgggtgacaatccgtacctgcggtataaccacgccgacgccgagtttcaggagcgtctgcaagaagatacgtcttttgggggcaacctcgggcgagcagtcttccaggccaagaagcgggttctcgaacctctcggtctggttgaggaaggcgctaagacggctcctggaaagaagagaccggtagagccatcaccccagcgttctccagactcctctacgggcatcggcaagaaaggccagcagcccgcgaaaaagagactcaactttgggcagactggcgactcagagtcagtgcccgaccctcaaccaatcggagaaccccccgcaggcccctctggtctgggatctggtacaatggctgcaggcggtggcgctccaatggcagacaataacgaaggcgccgacggagtgggtagttcctcaggaaattggcattgcgattccacatggctgggcgacagagtcatcaccaccagcacccgaacctgggccctccccacctacaacaaccacctctacaagcaaatctccaacgggacttcgggaggaagcaccaacgacaacacctacttcggctacagcaccccctgggggtattttgactttaacagattccactgccacttctcaccacgtgactggcagcgactcatcaacaacaactggggattccggcccaagagactcaacttcaagctcttcaacatccaggtcaaggaggtcacgcagaatgaaggcaccaagaccatcgccaataaccttaccagcacgattcaggtctttacggactcggaataccagctcccgtacgtcctcggctctgcgcaccagggctgcctgcctccgttcccggcggacgtcttcatgattcctcagtacgggtacctgactctgaacaatggcagtcaggccgtgggccgttcctccttctactgcctggagtactttccttctcaaatgctgagaacgggcaacaactttgagttcagctaccagtttgaggacgtgccttttcacagcagctacgcgcacagccaaagcctggaccggctgatgaaccccctcatcgaccagtacctgtactacctgtctcggactcagtccacgggaggtaccgcaggaactcagcagttgctattttctcaggccgggcctaataacatgtcggctcaggccaaaaactggctacccgggccctgctaccggcagcaacgcgtctccacgacactgtcgcaaaataacaacagcaactttgcctggaccggtgccaccaagtatcatctgaatggcagagactctctggtaaatcccggtgtcgctatggcaacccacaaggacgacgaagagcgattttttccgtccagcggagtcttaatgtttgggaaacagggagctggaaaagacaacgtggactatagcagcgttatgctaaccagtgaggaagaaattaaaaccaccaacccagtggccacagaacagtacggcgtggtggccgataacctgcaacagcaaaacgccgctcctattgtaggggccgtcaacagtcaaggagccttacctggcatggtctggcagaaccgggacgtgtacctgcagggtcctatctgggccaagattcctcacacggacggaaactttcatccctcgccgctgatgggaggctttggactgaaacacccgcctcctcagatcctgattaagaatacacctgttcccgcggatcctccaactaccttcagtcaagctaagctggcgtcgttcatcacgcagtacagcaccggacaggtcagcgtggaaattgaatgggagctgcagaaagaaaacagcaaacgctggaacccagagattcaatacacttccaactactacaaatctacaaatgtggactttgctgttaacacagatggcacttattctgagcctcgccccatcggcacccgttacctcacccgtaatctgtaattgcttgttaatcaataaaccggttgattcgtttcagttgaactttggtctctgcgaagggcgaattc

SEQ ID NO: 400 - protein, 738 aa, Artificial Sequence; identical to SEQ ID NO: 16
  source: /note="Description of Artificial Sequence: Synthetic polypeptide"

SEQ ID NO: 401 - protein, 733 aa, Artificial Sequence
  source: /note="Description of Artificial Sequence: Synthetic polypeptide"
MAADGYLPDWLEDNLSEGIREWWDLRPGAPKPKANQQKQDDGRGLVLPGYKYLGPFNGLDKGEPVNEADAAALEHDKAYDKQLEQGDNPYLKYNHADAEFQERLQEDTSFGGNLGRAVFQAKKRVLEPLGLVEEGAKTAPGKKRPIESPDSSTGIGKKGQQPAKKRLNFGQTGDSESVPDPQPIGEPPAGPSGLGSGTMAAGGGAPMADNNEGADGVGSSSGNWHCDSTWLGDRVITTSTRTWALPTYNNHLYKQISNGTSGGSTNDNTYFGYSTPWGYFDFNRFHCHFSPRDWQRLINNNWGFRPKRLNFKLFNIQVKEVTQNEGTKTIANNLTSTIQVFTDSEYQLPYVLGSAHQGCLPPFPADVFMIPQYGYLTLNNGSQAVGRSSFYCLEYFPSQMLRTGNNFEFSYQFEDVPFHSSYAHSQSLDRLMNPLIDQYLYYLSRTQSTGGTAGTQQLLFSQAGPNNMSAQAKNWLPGPCYRQQRVSTTVSQNNNSNFAWTGATKYHLNGRDSLVNPGVAMATHKGDEERFFPSSGVLMFGKQGAGKDNVDYSSVMLTSEEEIKTTNPVATEQYGVVADNLQQQNAAPIVGAVNSQGALPGMVWQNRDVYLQGPIWAKIPHTDGNFHPSPLMGGFGLKHPPPQILIKNTPVPADPPTTFSQAKLASFITQYSTGQVSVEIEWELQKENSKRWNPEIQYTSNYYKSTNVDFAVNTEGTYSEPRPIGTRYLTRNL

SEQ ID NO: 402 - DNA, 2501 bp, Artificial Sequence
  source: /note="Description of Artificial Sequence: Synthetic polynucleotide"
gaattcgcccttggctgcgtcaactggaccaatgagaactttcccttcaacgattgcgtcgacaagatggtgatctggtgggaggagggcaagatgacggccaaggtcgtggagtccgccaaggccattcatcatctgctggggcgggctcccgagattgcttgctcggcctgcgatctggtcaacgtggacctggatgactgtgtttctgagcaataaatgacttaaaccaggtatggctgccgatggttatcttccagattggctcgaggacaacctctctgagggcattcgcgagtggtgggacttgagacctggagccccgaaacccaaagccaaccagcaaaagcaggacgacggccggggtctggtgcttcctggctacaagtacctcggacccttcaacggactcgacaagggagagccggtcaacgaggcagacgccgcggccctcgagcacgacaaggcctacgacaagcagctcgagcagggggacaacccgtacctcaagtacaaccacgccgacgccgagtttcaggagcgtcttcaagaagatacgtcttttgggggcaacctcgggcgagcagtcttccaggccaagaagcgggttctcgaacctctcggtctggttgaggaaggcgctaagacggctcctggaaagaagagacccatagaatcccccgactcctccacgggcatcggcaagaaaggccagcagcccgctaaaaagagactcaactttgggcagactggcgactcagagtcagtgcccgaccctcaaccaatcggagaaccccccgcaggcccctctggtctgggatctggcacaatggctgcaggcggtggcgctccaatggcagacaataacgaaggcgccgacggagtgggtagttcctcaggaaattggcattgcgattccacatggctgggcgacagagtcatcaccaccagcacccgaacctgggccctccccacctacaacaaccacctctacaagcaaatctccaacgggacatcgggaggaagcaccaacgacaacacctacttcggctacagcaccccctgggggtattttgactttaacagattccactgccacttctcaccacgtgactggcagcgactcatcaacaacaactggggattccggcccaagagactcaacttcaagctcttcaacatccaggtcaaggaggtcacgcagaatgaaggcaccaagaccatcgccaataaccttaccagcacgattcaggtctttacggactcggaataccagctcccgtacgtcctcggctctgcgcaccagggctgcctgcctccgttcccggcggacgtcttcatgattcctcagtacgggtacctgactctgaacaacggcagtcaggccgtgggccgttcctccttctactgcctggagtactttccttctcaaatgctgagaacgggcaacaactttgagttcagctaccagtttgaggacgtgccttttcacagcagctatgcgcacagccaaagcctggaccggctgatgaaccccctcatcgaccagtacctgtactacctgtctcggactcagtccacgggaggtaccgcaggaactcagcagttgctattttctcaggccgggcctaataacatgtcggctcaggccaaaaactggctacccgggccctgctaccggcagcaacgcgtctccacgacagtgtcgcaaaataacaacagcaactttgcttggaccggtgccaccaagtatcatctgaatggcagagactctctggtaaatcccggtgtcgctatggcaacgcacaagggcgacgaagagcgattttttccatccagcggagtcttgatgtttgggaaacagggagctggaaaagacaacgtagactatagcagcgttatgctaaccagtgaggaagaaatcaaaaccaccaacccagtggccacagaacagtacggcgtggtggccgataacctgcaacagcaaaacgccgctcctattgtaggggccgtcaacagtcaaggagccttacctggcatggtctggcagaaccgggacgtgtacctgcagggtcctatctgggccaagattcctcacacggacggcaactttcatccttcgccgctgatgggaggctttggactgaaacacccgcctcctcagatcctgattaagaatacacctgttcccgcggatcctccaactaccttcagtcaagccaagctggcgtcgttcatcacgcagtacagcaccggacaggtcagcgtggaaattgaatgggagctgcagaaagagaacagcaagcgctggaacccagagattcagtatacttccaactactacaaatctacaaatgtggactttgctgtcaatactgagggtacttattcagagcctcgccccattggcacccgttacctcacccgtaacctgtaattgcctgttaatcaataaaccggttgattcgtttcagttgaactttggtctcaagggcgaattc

SEQ ID NO: 403 - DNA, 2187 bp, Artificial Sequence
  source: /note="Description of Artificial Sequence: Synthetic polynucleotide"
atggctgccgatggttatcttccagattggctcgaggacaacctctctgagggcattcgcgagtggtgggacttgaaacctggagccccgaaacccaaagccaaccagcaaaagcaggacgacggccggggtctggtgcttcctggctacaagtacctcggacccttcaacggactcgacaagggagagccggtcaacgaggcagacgccgcggccctcgagcacgacaaggcctacgacaagcagctcgagcagggggacaacccgtacctcaagtacaaccacgccgacgccgagtttcaggagcgtcttcaagaagatacgtcttttgggggcaacctcgggcgagcagtcttccaggccaagaagcgggttctcgaacctctcggtctggttgaggaaggcgctaagacggctcctggaaagaagagacccatagaatcccccgactcctccacgggcatcggcaagaaaggccagcagcccgctaaaaagaagctcaactttgggcagactggcgactcagagtcagtgcccgacccccaacctctcggagaacctcccgccgcgccctcaggtctgggatctggtacaatggctgcaggcggtggcgcaccaatggcagacaataacgaaggcgccgacggagtgggtaatgcctccggaaattggcattgcgattccacatggctgggcgacagagtcatcaccaccagcacccgcacctgggccctgcccacctacaacaaccacctctacaagcagatatcaagtcagagcggggctaccaacgacaaccacttcttcggctacagcaccccctggggctattttgacttcaacagattccactgccacttctcaccacgtgactggcagcgactcatcaacaacaactggggattccggcccagaaagctgcggttcaagttgttcaacatccaggtcaaggaggtcacgacgaacgacggcgttacgaccatcgctaataaccttaccagcacgattcaggtcttctcggactcggagtaccaactgccgtacgtcctcggctctgcgcaccagggctgcctccctccgttccctgcggacgtgttcatgattcctcagtacggatatctgactctaaacaacggcagtcagtctgtgggacgttcctccttctactgcctggagtactttccttctcagatgctgagaacgggcaataactttgaattcagctacacctttgaggaagtgcctttccacagcagctatgcgcacagccagagcctggaccggctgatgaatcccctcatcgaccagtacctgtactacctggcccggacccagagcactacggggtccacaagggagctgcagttccatcaggctgggcccaacaccatggccgagcaatcaaagaactggctgcccggaccctgttatcggcagcagagactgtcaaaaaacatagacagcaacaacaacagtaactttgcctggaccggggccactaaataccatctgaatggtagaaattcattaaccaacccgggcgtagccatggccaccaacaaggacgacgaggaccagttctttcccatcaacggagtgctggtttttggcgaaacgggggctgccaacaagacaacgctggaaaacgtgctaatgaccagcgaggaggagatcaaaaccaccaatcccgtggctacagaagaatacggtgtggtctccagcaacctgcaatcgtctacggccggaccccagacacagactgtcaacagccagggggctctgcccggcatggtctggcagaaccgggacgtgtacctgcagggtcccatctgggccaaaattcctcacacggacggcaactttcacccgtctcccctgatgggcggatttggactcaaacacccgcctcctcaaattctcatcaaaaacaccccggtacctgctaatcctccagaggtgtttactcctgccaagtttgcctcatttatcacgcagtacagcaccggccaggtcagcgtggagatcgagtgggaactgcagaaagaaaacagcaaacgctggaatccagagattcagtacacctcaaattatgccaagtctaataatgtggaatttgctgtcaacaacgaaggggtttatactgagcctcgccccattggcacccgttacctcacccgtaacctgtaa

SEQ ID NO: 404 - protein, 728 aa, Artificial Sequence; identical to SEQ ID NO: 72
  source: /note="Description of Artificial Sequence: Synthetic polypeptide"

SEQ ID NO: 405 - protein, 728 aa, Artificial Sequence; identical to SEQ ID NO: 164
  source: /note="Description of Artificial Sequence: Synthetic polypeptide"

SEQ ID NO: 406 - protein, 728 aa, Artificial Sequence; identical to SEQ ID NO: 164
  source: /note="Description of Artificial Sequence: Synthetic polypeptide"

SEQ ID NO: 407 - protein, 733 aa, Artificial Sequence
  source: /note="Description of Artificial Sequence: Synthetic polypeptide"
MAADGHLPDWLEDNLSEGIREWWDLKPGAPKPKANQQKQDDGRGLVLPGYKYLGPFNGLDKGEPVNAADAAALEHDKAYDQQLKAGDNPYLRYNHADAEFQERLQEDTSFGGNLGRAVFQAKKRVLEPLGLVEEGAKTAPGKKRPIESPDSSTGIGKKGQQPAKKKLNFGQTGDSESVPDPQPIGEPPAGPSGLGSGTMAAGGGAPMADNNEGADGVGSSSGNWHCDSTWLGDRVITTSTRTWALPTYNNHLYKQISNGTSGGSTNDNTYFGYSTPWGYFDFNRFHCHFSPRDWQRLINNSWGFRPKRLNFKLFNIQVKEVTQNEGTKTIANNLTSTIQVFTDSEYQLPYVLGSAHQGCLPPFPADVFMIPQYGYLTLNNGSQAVGRSSFYCLEYFPSQMLRTGNNFEFSYQFEDVPFHSSYAHSQSLDRLMNPLIDQYLYYLSRTQSTGGTAGTQQLLFSQAGPNNMSAQAKNWLPGPCYRQQRVSTTLSQNNNSNFAWTGATKYHLNGRDSLVNPGVAMATHKDDEERFFPSSGVLMFGKQGAGKDNVDYSSVMLTSEEEIKTTNPVATEQYGVVADNLQQQNAAPIVGAVNSQGALPGMVWQNRDVYLQGPIWAKIPHTDGNFHPSPLMGGFGLKHPPPQILIKNTPVPADPPTTFSQAKLASFITQYSTGQVSVEIEWELQKENSKRWNPEIQYTSNYYKSTNVDFAVNTEGTYSEPRPIGTRYLTRNL

SEQ ID NO: 408 - DNA, 3113 bp, Artificial Sequence
  source: /note="Description of Artificial Sequence: Synthetic polynucleotide"
gaattcgccctttctacggctgcgtcaactggaccaatgagaactttcccttcaacgattgcgtcgacaagatggtgatctggtgggaggagggcaagatgacggccaaggtcgtggagtccgccaaggccattctcggcggcagcaaggtgcgcgtggaccaaaagtgcaagtcgtccgcccagatcgatcccacccccgtgatcgtcacttccaacaccaacatgtgcgccgtgattgacgggaacagcaccaccttcgagcaccagcagccgttacaagaccggatgttcaaatttgaactcacccgccgtctggagcatgactttggcaaggtgacaaagcaggaagtcaaagagttcttccgctgggcgcaggatcacgtgaccgaggtggcgcatgagttctacgtcagaaagggtggagccaacaagagacccgcccccgatgacgcggataaaagcgagcccaagcgggcctgcccctcagtcgcggatccatcgacgtcagacgcggaaggagctccggtggactttgccgacaggtaccaaaacaaatgttctcgtcacgcgggcatgcttcagatgctgcttccctgcaagacatgcgagagaatgaatcagaatttcagcatttgcttcacgcacgggaccagagactgttcagaatgtttccccggcgtgtcagaatctcaaccggtcgtcagaaagaggacgtatcggaaactctgtgccattcatcatctgctggggcgggctcccgagattgcttgctcggcctgcgatctggtcaacgtggacctggatgactgtgtttctgagcaataaatgacttaaaccaggtatggctgccgatggtcatcttccagattggctcgaggacaacctctctgagggcattcgcgagtggtgggacttgaaacctggagccccgaaacccaaagccaaccagcaaaagcaggacgacggccggggtctggtgcttcctggctacaagtacctcggacccttcaacggactcgacaagggggagcccgtcaacgcggcggacgcagcggccctcgagcacgacaaggcctacgaccagcagctcaaagcgggtgacaatccgtacctgcggtataaccacgccgacgccgagtttcaggagcgtcttcaagaagatacgtcttttgggggcaacctcgggcgagcagtcttccaggccaagaagcgggttctcgaacctctcggtctggttgaggaaggcgctaagacggctcctggaaagaagagacccatagaatcccccgactcctccacgggcatcggcaagaaaggccagcagcccgctaaaaagaagctcaactttgggcagactggcgactcagagtcagtgcccgaccctcaaccaatcggagaaccccccgcaggcccctctggtctgggatctggtacaatggctgcaggcggtggcgctccaatggcagacaataacgaaggcgccgacggagtgggtagttcctcaggaaattggcattgcgattccacatagctgggcgacagagtcatcaccaccagcacccgaacctgggccctccccacctacaacaaccacctctacaagcaaatctccaacgggacatcgggaggaagcaccaacgacaacacctacttcggctacagcaccccctgggggtattttgactttaacagattccactgccacttctcaccacgtgactggcagcgactcatcaacaacagctggggattccggcccaagagactcaacttcaagctcttcaacatccaggtcaaggaggtcacgcagaatgaaggcaccaagaccatcgccaataaccttaccagcacgattcaggtctttacggactcggaataccagctcccgtacgtcctcggctctgcgcaccagggctgcctgcctccgttcccggcggacgtcttcatgattcctcagtacgggtacctgactctgaacaacggcagtcaggccgtgggccgttcctccttctactgcctggagtactttccttctcaaatgctgagaacgggcaacaactttgagttcagctaccagtttgaggacgtgccttttcacagcagctacgcgcacagccaaagcctggaccggctgatgaaccccctcatcgaccagtacctgtactacctgtctcggactcagtccacgggaggtaccgcaggaactcagcagttgctattttctcaggccgggcctaataacatgtcggctcaggccaaaaactggctacccgggccctgctaccggcagcaacgcgtctccacgacactgtcgcaaaataacaacagcaactttgcttggaccggtgccaccaagtatcatctgaatggcagagactctctggtaaatcccggtgtcgctatggcaacgcacaaggacgacgaagagcgattttttccatccagcggagtcttgatgtttgggaaacagggagctggaaaagacaacgtggactatagcagcgttatgctaaccagtgaggaagaaatcaaaaccaccaacccagtggccacagaacagtacggcgtggtggccgataacctgcaacagcaaaacgccgctcctattgtaggggccgtcaacagtcaaggagccttacctggcatggtctggcagaaccgggacgtgtacctgcagggtcctatctgggccaagattcctcacacggacggcaactttcatccttcgccgctgatgggaggctttggactgaaacacccgcctcctcagatcctgattaagaatacacctgttcccgcggatcctccaactaccttcagtcaagccaagctggcgtcgttcatcacgcagtacagcaccggacaggtcagcgtggaaattgaatgggagctgcagaaagagaacagcaagcgctggaacccagagattcagtatacttccaactactacaaatctacaaatgtggactttgctgtcaatactgagggtacttattcagagcctcgccccattggcacccgttacctcacccgtaacctgtaattgcctgttaatcaataaaccggttaattcgtttcagttgaactttggtctctgcgaagggcgaattc

SEQ ID NO: 409 - protein, 731 aa, Artificial Sequence
  source: /note="Description of Artificial Sequence: Synthetic polypeptide"
MAADGYLPDWLEDNLSEGIREWWDLKPGAPKPKANQQKQDDGRGLVLPGYKYLGPFNGLDKGEPVNEADAAALEHDKAYDKQLEQGDNPYLKYNHADAEFQERLQEDTSFGGNLGRAVFRAKKRVLEPLGLVEEGAKTAPGKKRPIESPDSSTGIGKKGQQPAKKKLNFGQTGDSESVPDPQPLGEPPAAPSGLGSGTMAAGGGAPMADNNEGADGVGNASGNWHCDSTWLGDRVITTSTRTWALPTYNNHLYKQISSQSGATNDNHFFGYSTPWGYFDFNRFHCHFSPRDWQRLINNNRGFRPRKLRFKLFNIQVKEVTTNDGVTTIANNLTSTIQVFSDSEYQLPYVLGSAHQGCLPPFPADVFMIPQYGYLTLNNGSQSVGRSSFYCLEYFPSQMLRTGNNFEFSYQFEDVPFHSSYAHSQSLDRLMNPLIDQYLYYLSRTQSTGGTAGTQQLLFSQAGPNNMSAQAKNWLPGPCYRQQRVSTTLSQNNNSNFAWTGATKYHLNGRDSLVNPGVAMATHKDDEERFFPSSGVLMFGKQGAGKDNVDYSSVMLTSEEEIKTTNPVATEQYGVVADNLQQQNAAPIVGAVNSQGALPGMAWQNRDVYLQGPIWAKIPHTDGNFHPSPLMGGFGLKHPPPQILIKNTPVPADPPTTFSQAKLASFITQYSTGQVSVEIEWELQKENSKRWNPEIQYTSNYYKSTNVDFAVNTEGTYSEPRPIGTRYLTRNL

SEQ ID NO: 410 - DNA, 3106 bp, Artificial Sequence
  source: /note="Description of Artificial Sequence: Synthetic polynucleotide"
gaattcgcccttctacggctgcgtcaactggaccaatgagaactttcccttcaacgattgcgtcgacaagatggtgatctggtgggaggagggcaagatgacggccaaggtcgtggagtccgccaaggccattctcggcggcagcaaggtgcgcgtggaccaaaagtgcaagtcgtccgcccagatcgaccccacccccgtgatcgtcacctccaacaccaacatgtgcgccgtgattgacgggaacagcaccaccttcgagcaccagcagccgttgcaggaccggatgttcaaatttgaactcacccgccgtctggagcatgactttggcaaggcgacaaagcaggaagtcaaagagttcttccgctgggcgcaggatcacgtgaccgaggtggcgcatgagttctacgtcagaaagggtggagccaacaagagacccgcccccgatgacgcggataaaagcgagcccaagcgggcccgcccctcagtcgcggatccatcgacgtcagacgcggaaggagctccggtggactttgccgacaggtaccaaaacaaatgttctcgtcacgcgggcatgcttcagatgctgtttccctgcaaaacatgcgagagaatgaatcagaatttcaacatttgcttcacgcacgggaccagagactgttcagaatgtttccccggcgtgtcagaatctcaaccggtcgtcagaaagaggacgtatcggaaactctgtgccattcatcatctgctggggcgggctcccgagattgcttgctcggcctgcgatctggtcaacgtggacctggatgactgtgtttctgagcaataaatgacttaaaccaggtatggctgccgatggttatcttccagattggctcgaggacaacctctctgagggcattcgcgagtggtgggacttgaaacctggagccccgaaacccaaagccaaccagcaaaagcaggacgacggccggggtctggtgcttcctggctacaagtacctcggacccttcaacggactcgacaagggagagccggtcaacgaggcagacgccgcggccctcgagcacgacaaggcctacgacaagcagctcgagcagggggacaacccgtacctcaagtacaaccacgccgacgccgagtttcaggagcgtcttcaagaagatacgtcttttgggggcaacctcgggcgagcagtcttccgggccaagaagcgggttctcgaacctctcggtctggttgaggaaggcgctaagacggctcctggaaagaagagacccatagaatcccccgactcctccacgggcatcggcaagaaaggccagcagcccgctaaaaagaagctcaactttgggcagactggcgactcagagtcagtgcccgacccccaacctctcggagaacctcccgccgcgccctcaggtctgggatctggtacaatggctgcaggcggtggcgcaccaatggcagacaataacgaaggcgccgacggagtgggtaatgcctccggaaattggcattgcgattccacatggctgggcgacagagtcatcaccaccagcacccgcacctgggccctgcccacctacaacaaccacctctacaagcagatatcaagtcagagcggggctaccaacgacaaccacttcttcggctacagcaccccctggggctattttgacttcaacagattccactgccacttctcaccacgtgactggcagcgactcatcaacaacaaccggggattccggcccagaaagctgcggttcaagttgttcaacatccaggtcaaggaggtcacgacgaacgacggcgttacgaccatcgctaataaccttaccagcacgattcaggtcttctcggactcggagtaccaactgccgtacgtcctcggctctgcgcaccagggctgcctccctccgttccctgcggacgtgttcatgattcctcagtacggatatctgactctaaacaacggcagtcagtctgtgggacgttcctccttctactgcctggagtactttccttctcagatgctgagaacgggcaataactttgaattcagctaccagtttgaggacgtgccctttcacagcagctacgcgcacagccaaagcctggaccggctgatgaaccccctcatcgaccagtacctgtactacctgtctcggactcagtccacgggaggtaccgcaggaactcagcagttgctattttctcaggccgggcctaataacatgtcggctcaggccaaaaactggctacccgggccctgctaccggcagcaacgcgtctccacgacactgtcgcaaaataacaacagcaactttgcttggaccggtgccaccaagtatcatctgaatggcagagactctctggtaaatcccggtgtcgctatggcaacgcacaaggacgacgaagagcgattttttccatccagcggagtcttgatgtttgggaaacagggagctggaaaagacaacgtggactatagcagcgttatgctaaccagtgaggaagaaatcaaaaccaccaacccagtggccacagaacagtacggcgtggtggccgataacctgcaacagcaaaacgccgctcctattgtaggggccgtcaacagtcaaggagccttacctggcatggcctggcagaaccgggacgtgtacctgcagggtcctatctgggccaagattcctcacacggacggcaactttcatccttcgccgctgatgggaggctttggactgaaacacccgcctcctcagatcctgattaagaatacacctgttcccgcggatcctccaactaccttcagtcaagccaagctggcgtcgttcatcacgcagtacagcaccggacaggtcagcgtggaaattgaatgggagctgcagaaagagaacagcaagcgctggaacccagagattcagtatacttccaactactacaaatctacaaatgtggactttgctgtcaatactgagggtacttattcagagcctcgccccattggcacccgttacctcacccgtaacctgtaattgcctgttaatcaataaaccggttaattcgtttcagttgaactttggtctctgcgaagggcgaattc

SEQ ID NO: 411 - protein, 738 aa, Artificial Sequence
  source: /note="Description of Artificial Sequence: Synthetic polypeptide"
MAADGYLPDWLEDNLSEGIREWWDLKPGAPKPKANQQKQDDGRGLVLPGYKYLGPFNGLDKGEPVNEADAAALEHDKAYDKQLEQGDNPYLKYNHADAEFQERLQEDTSFGGNLGRAVFQAKKRVLEPLGLVEEGAKTAPGKKRPVEPSPQRSPDSSTGIGKTGQQPAKKRLNFGQTGDSESVPDPQPIGEPPAGPSGLGSGTMAAGGGAPMADNNEGADGVGSSSGNWHCDSTWLGDRVITTSTRTWALPTYNNHLYKQISNGTSGGSTNDNTYFGYSTPWGYFDFNRFHCHFSPRDWQRLINNNWGFRPKRLNFKLFNIQVKEVTQNEGTKTIANNLTSTIQVFTDSEYQLPYVLGSAHQGCLPPFPADVFMIPQYGYLTLNNGSQAVGRSSFYCLEYFPSQMLRTGNNFEFSYQFEDVPFHSSYAHSQSLDRLMNPLIDQYLYYLSRTQSTGGTAGTQQLLFSQAGPNNMSAQAKNWLPGPCYRQQRVSTTLSQNNNSNFAWTGATKYHLNGRDSLVNPGVAMATHKDDEERFFPSSGVLMFGKQGAGKDNVDYSSVMLTSEEEIKTTNPVATEQYGVVADNLQQQNAAPIVGAVNSQGALPGMVWQNRDVYLQGPIWAKIPHTDGNFHPSPLMGGFGLKHPPPQILIKNTPVPADPPTTFSQAKLASFITQYSTGQVSVEIEWELQKENSKRWNPEIQYTSNYYKSTNVDFAVNTEGTYSEPRPIGTRYLTRNL

SEQ ID NO: 412 - DNA, 3197 bp, Artificial Sequence
  source: /note="Description of Artificial Sequence: Synthetic polynucleotide"
gaattcgccctttctacggctgcgtcaactggaccaatgagaactttcccttcaacgattgcgtcgacaagatggtgatctggtgggaggagggcaagatgacggccaaggtcgtggagtccgccaaggccattctcggcggcagcaaggtgcgcgtggaccaaaagtgcaagtcgtccgcccagatcgaccccacccccgtgatcgtcacctccaacaccaacatgtgcgccgtgattgacgggaacagcaccaccttcgagcaccagcagccgttacaagaccggatgttcaaatttgaactcacccgccgtctggagcacgactttggcaaggtgacaaagcaggaagtcaaagagttcttccgctgggcgcaggatcacgtgaccgaggtggcgcatgagttctacgtcagaaagggtggagccaacaagagacccgcccccgatgacgcggataaaagcgagcccaagcgggcctgcccctcagtcgcggatccatcgacgtcagacgcggaaggagctccggtggactttgccgacaggtaccaaaacaaatgttctcgtcacgcgggcatgcttcagatgctgtttccctgcaagacatgcgagagaatgaatcagaatttcaacatttgcttcacgcacgggaccagagactgttcagaatgtttccccggcgtgtcagaatctcaaccggtcgtcagaaagaggacgtatcggaaactctgtgccattcatcatctgctggggcgggctcccgagattgcttgctcggcctgcgatctggtcaacgtggacctggatgactgtgtttctgagcaataaatgacttaaaccaggtatggctgccgatggttatcttccagattggctcgaggacaacctctctgagggcattcgcgagtggtgggacttgaaacctggagccccgaaacccaaagccaaccagcaaaagcaggacgacggccggggtctggtgcttcctggctacaagtacctcggacccttcaacggactcgacaagggagagccggtcaacgaggcagacgccgcggccctcgagcacgacaaggcctacgacaagcagctcgagcagggggacaacccgtacctcaagtacaaccacgccgacgccgagtttcaggagcgtcttcaagaagatacgtcttttgggggcaacctcgggcgagcagtcttccaggccaagaagcgggttctcgaacctctcggtctggttgaggaaggcgctaagacggctcctggaaagaagagaccggtagagccatcaccccagcgttctccagactcctctacgggcatcggcaagacaggccagcagcccgcgaaaaagagactcaactttgggcagactggcgactcagagtcagtgcccgaccctcaaccaatcggagaaccccccgcaggcccctctggtctgggatctggtacaatggctgcaggcggtggcgctccaatggcagacaataacgaaggcgccgacggagtgggtagttcctcaggaaattggcattgcgattccacatggctgggcgacagagtcatcaccaccagcacccgaacctgggccctccccacctacaacaaccacctctacaagcaaatctccaacgggacatcgggaggaagcaccaacgacaacacctacttcggctacagcaccccctgggggtattttgactttaacagattccactgccacttctcaccacgtgactggcagcgactcatcaacaacaactggggattccggcccaagagactcaacttcaagctcttcaacatccaggtcaaggaggtcacgcagaatgaaggcaccaagaccatcgccaataaccttaccagcacgattcaggtctttacggactcggaataccagctcccgtacgtcctcggctctgcgcaccagggctgcctgcctccgttcccggcggacgtcttcatgattcctcagtacgggtacctgactctgaacaacggcagtcaggccgtgggccgttcctccttctactgcctggagtactttccttctcaaatgctgagaacgggcaacaactttgagttcagctaccagtttgaggacgtgccttttcacagcagctacgcgcacagccaaagcctggaccggctgatgaaccccctcatcgaccagtacctgtactacctgtctcggactcagtccacgggaggtaccgcaggaactcagcagttgctattttctcaggccgggcctaataacatgtcggctcaggccaaaaactggctacccgggccctgctaccggcagcaacgcgtctccacgacactgtcgcaaaataacaacagcaactttgcttggaccggtgccaccaagtatcatctgaatggcagagactctctggtaaatcccggtgtcgctatggcaacgcacaaggacgacgaagagcgattttttccatccagcggagtcttgatgtttgggaaacagggagctggaaaagacaacgtggactatagcagcgttatgctaaccagtgaggaagaaatcaaaaccaccaacccagtggccacagaacagtacggcgtggtggccgataacctgcaacagcaaaacgccgctcctattgtaggggccgtcaacagtcaaggagccttacctggcatggtctggcagaaccgggacgtgtacctgcagggtcctatctgggccaagattcctcacacggacggcaactttcatccttcgccgctgatgggaggctttggactgaaacacccgcctcctcagatcctgattaagaatacacctgttcccgcggatcctccaactaccttcagtcaagccaagctggcgtcgttcatcacgcagtacagcaccggacaggtcagcgtggaaattgaatgggagctgcagaaagagaacagcaagcgctggaacccagagattcagtatacttccaactactacaaatctacaaatgtggactttgctgtcaatactgagggtacttattcagagcctcgccccattggcacccgttacctcacccgtaacctgtaattgcctgttaatcaataaaccggttaattcgtttcagttgaactttggtctctgcgaagggcgaattcgtttaaacctgcaggactagtccctttagtgagggttaattctgagcttggcgtaatcatgggtcatag

SEQ ID NO: 413 - protein, 735 aa, Artificial Sequence
  source: /note="Description of Artificial Sequence: Synthetic polypeptide"
MAADGYLPDWLEDNLSEGIREWWDLKPGAPKPKANQQKQDDGRGLVLPGYKYLGPFNGLDKGEPVNEADAAALEHDKAYDKQLEQGDNPYLKYNHADAEFQERLQEDTSFGGNLGRAVFQAKKRVLEPLGLVEEGAKTAPGKKRPVEPSPQRSPDSSTGIGKTGQQPAKKRLNFGQTGDSESVPDPQPIGEPPAGPSGLGSGTMAAGGGAPMADNNEGADGVGSSSGNWHCDSTWLGDRVITTSTRTWALPTYNNHLYKQISNGTSGGSTNDNTYFGYSTPWGYFDFNRFHCHFSPRDWQRLINNNWGFRPRKLRFKLFNIQVKEVTTDDGVTTIANNLTSTIQVFSDSEYQLPYVLGSAHQGCLPPFPADVFMIPQYGYLTLNNGSQSVGRSSFYCLEYFPSQMLRTGNNFEFSYTFEEVPFHSSYAHSQSLDRLMNPLIDQYLYYLARTQSTTGSTRELQFHQAGPNTMAEQSKNWLPGPCYRQQRLSKNIDSNNNSNFAWTGATKYHLNGRNSLTNPGVAMATNKDDEDQFFPINGVLVFGKTGAANKTTLENVLMTSEEEIKTTNPVATEEYGVVSSNLQSSTAGPQTQTVNSQGALPGMVWQNRDVYLQGPIWAKIPHTDGNFHPSPLMDGFGLKHPPPQILIKNTPVPANPPEVFTPAKFASFITQYSTGQVSVEIEWELQKENSKRWNPEIQYTSNYAKSNNVEFAVNNEGVYTEPRPIGTRYLTRNL

SEQ ID NO: 414 - DNA, 3276 bp, Artificial Sequence
  source: /note="Description of Artificial Sequence: Synthetic polynucleotide"
gaattcgcccttcgcagagaccaaagttcaactgaaacgaattaaccggtttattgattaacaggcaattacaggttacgggtgaggtaacgggtgccaatggggcgaggctcagtataaaccccttcgttgttgacagcaaattccacattattagacttggcataatttgaggtgtactgaatctctggattccagcgtttgctgttttctttctgcagttcccactcgatctccacgctgacctggccggtgctgtactgcgtgataaatgaggcaaacttggcaggagtaaacacctctggaggattagcaggtaccggggtgtttttgatgagaatttgaggaggcgggtgtttgagtccaaatccgtccatcaggggagacgggtgaaagttgccgtccgtgtgaggaattttggcccagatgggaccctgcaggtacacgtcccggttctgccagaccatgccgggcagagccccctggctgttgacagtctgtgtctggggtccggccgtagacgattgcaggttgctggagaccacaccgtattcttctgtagccacgggattggtggttttgatctcctcctcgctggtcattagcacgttttccagcgttgtcttgttggcagcccccgttttgccaaaaaccagcactccgttgatgggaaagaactggtcctcgtcgtccttgttggtggccatggctacgcccgggttggttaatgaatttctaccattcagatggtatttagtggccccggtccaggcaaagttactgttgttgttgctgtctatgttttttgacagtctctgctgccgataacagggtccgggcagccagttctttgattgctcggccatggtgttgggcccagcctgatggaactgcagctcccttgtggaccccgtagtgctctgggtccgggccaggtagtacaggtactggtcgatgaggggattcatcagccggtccaggctctggctatgcgcatagctgctgtggaaaggcacttcctcaaaggtgtagctgaattcaaagttattgcccgttctcagcatctgagaaggaaagtactccaggcagtagaaggaggaacgtcccacagactgactgccgttgtttagagtcagatatccgtactgaggaatcatgaacacgtccgcagggaacggagggaggcagccctggtgcgcagagccgaggacgtacggcagttggtactccgagtccgagaagacctgaatcgtgctggtaaggttattagcgatggtcgtaacgccgtcgtccgtcgtgacctccttgacctggatgttgaacaacttgaaccgcagctttctgggccggaatccccagttgttgttgatgagtcgctgccagtcacgtggtgagaagtggcagtggaatctgttaaagtcaaaatacccccagggggtgctgtagccgaagtaggtgttgtcgttggtgcttcctcccgatgtcccgttggagatttgcttgtagaggtggttgttgtaggtggggagggcccaggttcgggtgctggtggtgatgactctgtcgcccagccatgtggaatcgcaatgccaatttcctgaggaactacccactccgtcggcgccttcgttattgtctgccattggagcgccaccgcctgcagccattgtaccagatcccagaccagaggggcctgcggggggttctccgattggttgagggtcgggcactgactctgagtcgccagtctgcccaaagttgagtctctttttcgcgggctgctggcctgtcttgccgatgcccgtagaggagtctggagaacgctggggtgatggctctaccggtctcttctttccaggagccgtcttagcgccttcctcaaccagaccgagaggttcgagaacccgcttcttggcctggaagactgctcgcccgaggttgcccccaaaagacgtatcttcttgaagacgctcctgaaactcggcgtcggcgtggttgtacttgaggtacgggttgtccccctgctcgagctgcttgtcgtaggccttgtcgtgctcgagggccgcggcgtctgcctcgttgaccggctctcccttgtcgagtccgttgaagggtccgaggtacttgtagccaggaagcaccagaccccggccgtcgtcctgcttttgctggttggctttgggtttcggggctccaggtttcaagtcccaccactcgcgaatgccctcagagaggttgtcctcgagccaatctggaagataaccatcggcagccatacctggtttaagtcatttattgctcagaaacacagtcatccaggtccacgttgaccagatcgcaggccgagcaagcaatctcgggagcccgccccagcagatgatgaatggcacagagtttccgatacgtcctctttctgacgaccggttgagattctgacacgccggggaaacattctgaacagtctctggtcccgtgcgtgaagcaaatgttgaaattctgattcattctctcgcatgtcttgcagggaaacagcatctgaagcatgcccgcgtgacgagaacacttgttttggtacctgtcggcaaagtccaccggagctccttccgcgtctgacgtcgatggatgcaaaatgtcgcaaaagcactcacgtgacagctaatacaggaccactcccctatgacgtgatttacgtcagcgctatgcccgcgtgacgagaacatttgttttggtacctgtcggcaaagtccaccggagctccttccgcgtctgacgtcgatggatccgcgactgaggggcaggcccgcttgggctcgcttttatccgcgtcatcgggggcgggtctcttgttggctccaccctttctgacgtagaactcatgcgccacctcggtcacgtgatcctgcgcccagcggaagaactctttgacttcctgctttgtcaccttgccaaagtcatgctccagacggcgggtgagttcaaatttgaacatccggtcctgcaacggctgctggtgctcgaaggtggtgctgttcccgtcaatcacggcgcacatgttggtgttggaagtgacgatcacgggggtgggatcgatctgggcggaagacttgcacttttggtccacgcgcaccttgctgccgccgagaatggccttggcggactccacgaccttggccgtcatcttgccctcctcccaccagatcaccatcttgtcgacgcaatcgttgaagggaaagttctcattggtccagttgacgcagccgtagaaagggcgaattc

SEQ ID NO: 415 - protein, 738 aa, Artificial Sequence; identical to SEQ ID NO: 80
  source: /note="Description of Artificial Sequence: Synthetic polypeptide"

SEQ ID NO: 416 - protein, 738 aa, Artificial Sequence
  source: /note="Description of Artificial Sequence: Synthetic polypeptide"
MAADGYLPDWLEDNLSEGIREWWDLKPGAPKPKANQQKQDDGRGLVLPGYKYLGPFNGLDKGEPVNAADAAALEHDKAYDQQLKAGDNPYLRYNHADAEFQERLQEDTSFGGNLGRAVFQAKKRVLEPLGLVEEGAKTAPGKKRPVEPSPQRSPDSSTGIGKKGHQPARKRLNFGQTGDSESVPDPQPIGEPPAGPSGLGSGTMAAGGGAPMADNNEGADGVGSSSGNWHCDSTWLGDRVITTSTRTWALPTYNNHLYKQISNGTSGGSTNDNTYFGYSTPWGYFDFNRFHCHFSPRDWQRLINNNWGFRPKRLNFKLFNIQVKEVTQNEGTKTIANNLTSTIQVFTDSEYQLPYVPGSAHQGCLPPFPADVFMIPQYGYLTLNNGSQAVGRSSFYCLEYFPSQMLRTGNNFEFSYTFEDVPFHSSYAHSQSLDRLMNPLIDQYLYYLSRTQSTGGTQGTQQLLFSQAGPANMSAQAKNWLPGPCYRQQRVSTTLSQNNNSNFAWTGATKYHLNGRDSLVNPGVAMATHKDDEERFFPSSGVLMFGKQGAGKDNVDYSSVMLTSEEEIKTTNPVATEQYGVVADNLQQTNGAPIVGTVNSQGALPGMVWQNRDVYLQGPIWAKIPHTDGNFHPSPLMGGFGLKHPPPQILIKNTPVPADPPTTFSQAKLASFITQYSTGQVSVEIEWELQKENSKRWNPEIQYTSNYYKSTNVDFAVNTEGTYSEPRPIGTRYLTRNL

SEQ ID NO: 417 - protein, 738 aa, Artificial Sequence; identical to SEQ ID NO: 78
  source: /note="Description of Artificial Sequence: Synthetic polypeptide"

SEQ ID NO: 418 - protein, 728 aa, Artificial Sequence
  source: /note="Description of Artificial Sequence: Synthetic polypeptide"
MAADGYLPDWLEDNLSEGIREWWDLKPGAPKPKANQQKQDDGRGLVLPGYKYLGPFNGLDKGEPVNEADAAALEHDKAYDKQLEQGDNPYLKYNHADAEFQERLQEDTSFGGNLGRAVFQAKKRVLEPLGLVEEGAKTAPGKKRPIESPDSSTGIGRKGQQPAKKKLNFGQTGDSESVPDPQPIGEPPAGPSGLGSGTMAAGGGAPMADNNEGADGVGNASGNWHCDSTWLGDRVITTSTRTWALPTYNNHLYKQISSQSGATNDNHFFGYSTPWGYFDFNRFHCHFSPRDWQRLINNNWGFRPRKLRFKLFNIQVKEVTTNDGVTTIANNLTSTIQVFSDSEYQLPYVLGSAHQGCLPPFPADVFMIPQYGYLTLNNGSQSVGRSSFYCLEYFPSQMLRTGNNFEFSYTFEEVPFHSSYAHSQSLDRLMNPLIDQYLYYLARTQSTTGSTRELQFHQAGPNTMAEQSKNWLPGPCYRQQRLSKNIDSNNNSNFAWTGATKYHLNGRNSLTNPGVAMATNKDDEDQFFPINGVLVFGKTGAANKTTLENVLMTSEEEIKTTNPVATEEYGVVSSNLQSSTAGPQTQTVNSQGALPGMVWQNRDVYLQGPIWAKIPHTDGNFHPSPLMGGFGLKHPPPQILIKNTPVPANPPEVFTPAKFASFITQYSTGQVSVEIEWELQKENSKRWNPEIQYTSNYAKSNNVEFAVNNEGVYTEPRPIGTRYLTRNL

SEQ ID NO: 419 - DNA, 2489 bp, Artificial Sequence
  source: /note="Description of Artificial Sequence: Synthetic polynucleotide"
gaattcgccctttctacggctgcgtcaactggaccaatgagaactttcccttcaacgattgcgtcgacaagatggtgatctggtgggaggagggcaagatgacggccaaggtcgtgaagtccgccaaggccattcatcatctgctggggcgggctcccgagattgcttgctcggcctgcgatctggtcaacgtggacctggatgactgtgtttctgagcaataaatgacttaaaccaggtatggctgccgatggttatcttccagattggctcgaggacaacctctctgagggcattcgcgagtggtgggacttgaaacctggagccccgaaacccaaagccaaccagcaaaagcaggacgacggccggggtctggtgcttcctggctacaagtacctcggacccttcaacggactcgacaagggagagccggtcaacgaggcagacgccgcggccctcgagcacgacaaggcctacgacaagcagctcgagcagggggacaacccgtacctcaagtacaaccacgccgacgccgagtttcaggagcgtcttcaagaagatacgtcttttgggggcaacctcgggcgagcagtcttccaggccaagaagcgggttctcgaacctctcggtctggttgaggaaggcgctaagacggctcctggaaagaagagacccatagaatcccccgactcctccacgggcatcggcaggaaaggccagcagcccgctaaaaagaagctcaactttgggcagactggcgactcagagtcagtgcccgaccctcaaccaatcggagaaccccccgcaggcccctctggtctgggatctggtacaatggctgcaggcggtggcgctccaatggcagacaataacgaaggcgccgacggagtgggtaatgcctccggaaattggcattgcgattccacatggctgggcgacagagtcatcaccaccagcacccgcacctgggccctgcccacctacaacaaccacctctacaagcagatatcaagtcagagcggggctaccaacgacaaccacttcttcggctacagcaccccctggggctattttgacttcaacagattccactgccacttctcaccacgtgactggcagcgactcatcaacaacaactggggattccggcccagaaagctgcggttcaagttgttcaacatccaggtcaaggaggtcacgacgaacgacggcgttacgaccatcgccaataaccttaccagcacgattcaggtcttctcggactcggagtaccaactgccgtacgtcctcggctctgcgcaccagggctgcctccctccgttccctgcggacgtgttcatgattcctcagtacggatatctgactctaaacaacggcagtcagtctgtgggacgttcctccttctactgcctggagtactttccttctcagatgctgagaacgggcaataactttgaattcagctacacctttgaggaagtgcctttccacagcagctatgcgcacagccagagcctggaccggctgatgaatcccctcatcgaccagtacctgtactacctggcccggacccagagcactacggggtccacaagggagctgcagttccatcaggctgggcccaacaccatggccgagcaatcaaagaactggctgcccggaccctgttatcggcagcagagactgtcaaaaaacatagacagcaacaacaacagtaactttgcctggaccggggccactaaataccatctgaatggtagaaattcattaaccaacccgggcgtagccatggccaccaacaaggacgacgaggaccagttctttcccatcaacggagtgctggtttttggcaaaacgggggctgccaacaagacaacgctggaaaacgtgctaatgaccagcgaggaggagatcaaaaccaccaatcccgtggctacagaagaatacggtgtggtctccagcaacctgcaatcgtctacggccggaccccagacacagactgtcaacagccagggggctctgcccggcatggtctggcagaaccgggacgtgtacctgcagggtcccatctgggccaaaattcctcacacggacggcaactttcacccgtctcccctgatgggcggatttggactcaaacacccgcctcctcaaattctcatcaaaaacaccccggtacctgctaatcctccagaggtgtttactcctgccaagtttgcctcatttatcacgcagtacagcaccggccaggtcagcgtggagatcgagtgggaactgcagaaagaaaacagcaaacgctggaatccagagattcagtacacctcaaattatgccaagtctaataatgtggaatttgctgtcaacaacgaaggggtttatactgagcctcgccccattggcacccgttacctcacccgtaacctgtaattgcctgttaatcaataaaccggttaattcgtttcagttgaactttggtcaagggcgaattc

SEQ ID NO: 420 - protein, 728 aa, Artificial Sequence
  source: /note="Description of Artificial Sequence: Synthetic polypeptide"
MAADGYLPDWLEDNLSEGIREWWDLKPGAPKPKANQQKQDDGRGLVLPGYKYLGPFNGLDKGEPVNAADAAALEHDKAYDQQLKAGDNPYLRYNHADAEFQERLQEDTSFGGNLGRAVFQAKKRVLEPLGLVEEGAKTAPGKKRPIESPDSSTGIGKKGQQPAKKKLNFGQTGDSESVPDPQPIGEPPAGPSGLGSGTMAAGGGAPMADNNEGADGVGNASGNWHCDSTWLGDRVITTSTRTWALPTYNNHLYKQISSQSGATNDNHFFGYSTPWGYFDFNRFHCHFSPRDWQRLINNNWGFRPRKLRFKLFNIQVKEVTTNDGVTTIANNLTSTIQVFSDSEYQLPYVLGSAHQGCLPPFPADVFMIPQYGYLTLNNGSQSVGRSSFYCLEYFPSQMLRTGNNFEFSYTFEEVPFHSSYAHSQSLDRLMNPLIDQYLYYLARTQSTTGSTRELQFHQAGPNTMAEQSKNWLPGPCYRRQRLSKDIDSNNNSNFAWTGATKYHLNGRNSLTNPGVAMATNKDDEDQFFPINGVLVFGKTGAANKTTLENVLMTSEEEIKTTNPVATEEYGVVSSNLQSSTAGPQTQTVNSQGALPGMVWQNRDVYLQGPIWAKIPHTDGNFHPSPLMGGFGLKHPPPQILIKNTPVPANPPEVFTPAKFASFITQYSTGQVSVEIEWELQKENSKRWNPEIQYTSNYAKSNNVEFAVNNEGVYTEPRPIGTRYLTRNL

SEQ ID NO: 421 - DNA, 3098 bp, Artificial Sequence
  source: /note="Description of Artificial Sequence: Synthetic polynucleotide"
gaattcgccctttctacggctgcgtcaactggaccaatgagaactttcccttcaacgattgcgtcgacaagatggtgatctggtgggaggagggcaagatgacggccaaggtcgtggagtccgccaaggccattctcggcggcagcaaggtgcgcgtggaccaaaagtgcaagtcttccgcccagatcgatcccacccccgtgatcgtcacttccaacaccaacatgtgcgccgtgattgacgggaacagcaccaccttcgagcaccagcagccgttacaagaccggatgttcaaatttgaactcacccgccgtctggagcacgactttggcaaggtgacaaagcaggaagtcaaagagttcttccgctgggcgcaggatcacgtgaccgaggtggcgcatgagttctacgtcagaaagggtggagccaacaagagacccgcccccgatgacgcggataaaagcgagcccaagcgggcctgcccctcagtcgcggatccatcgacgtcagacgcggaaggagctccggtggactttgccgacaggtaccaaaacaaatgttctcgtcacgcgggcatgcttcagatgctgtttccctgcaagacatgcgagagaatgaatcagaatttcaacatttgcttcacgcacgggaccggagactgttcagaatgtttccccggcgtgtcagaatctcaaccggtcgtcagaaagaggacgtatcggaaactctgtgccattcatcatctgctggggcgggctcccgagattgcttgctcggcctgcgatctggtcaacgtggacctggatgactgtgtttctgagcaataaatgacttaaaccaggtatggctgccgatggttatcttccagattggctcgaggacaacctctctgagggcattcgcgagtggtgggacttgaaacctggagccccgaaacccaaagccaaccagcaaaagcaggacgacggccggggtctggtgcttcctggctacaagtacctcggacccttcaacggactcgacaagggagagccggtcaacgcggcggacgcagcggccctcgagcacgacaaggcctacgaccagcagctcaaagcgggtgacaatccgtacctgcggtataaccacgccgacgccgagtttcaggagcgtcttcaagaagatacgtcttttgggggcaacctcgggcgagcagtcttccaggccaagaagcgggttctcgaacctctcggtctggttgaggaaggcgctaagacggctcctggaaagaagagacccatagaatcccccgactcctccacgggcatcggcaagaaaggccagcagcccgctaaaaagaagctcaactttgggcagactggcgactcagagtcagtgcccgaccctcaaccaatcggagaaccccccgcaggcccctctggtctgggatctggtacaatggctgcaggcggtggcgctccaatggcagacaataacgaaggcgccgacggagtgggtaatgcctccggaaattggcattgcgattccacatggctgggcgacagagtcatcaccaccagcacccgcacctgggccctgcccacctacaacaaccacctctacaagcagatatcaagtcagagcggggctaccaacgacaaccacttcttcggctacagcaccccctggggctattttgacttcaacagattccactgccacttctcaccacgtgactggcagcgactcatcaacaacaactggggattccggcccagaaagctgcggttcaagttgttcaacatccaggtcaaggaggtcacgacgaacgacggcgttacgaccatcgctaataaccttaccagcacgattcaggtcttctcggactcggagtaccaactgccgtacgtcctcggctctgcgcaccagggctgcctccctccgttccctgcggacgtgttcatgattcctcagtacggatatctgactctaaacaacggcagtcagtctgtgggacgttcctccttctactgcctggagtactttccttctcagatgctgagaacgggcaataactttgaattcagctacacctttgaggaagtgcctttccacagcagctatgcgcacagccagagcctggaccggctgatgaatcccctcatcgaccagtacctgtactacctggcccggacccagagcactacggggtccacaagggagctgcagttccatcaggctgggcccaacaccatggccgagcaatcaaagaactggctgcccggaccctgttatcggcggcagagactgtcaaaagacatagacagcaacaacaacagtaactttgcctggaccggggccactaaataccatctgaatggtagaaattcattaaccaacccgggcgtagccatggccaccaacaaggacgacgaggaccagttctttcccatcaacggagtgctggtttttggcaaaacgggggctgccaacaagacaacgctggaaaacgtgctaatgaccagcgaggaggagatcaaaaccaccaatcccgtggctacagaagaatacggtgtggtctccagcaacctgcaatcgtctacggccggaccccagacacagactgtcaacagccagggggctctgcccggcatggtctggcagaaccgggacgtgtacctgcagggtcccatctgggccaaaattcctcacacggacggcaactttcacccgtctcccctgatgggcggatttggactcaaacacccgcctcctcaaattctcatcaaaaacaccccggtacctgctaatcctccagaggtgtttactcctgccaagtttgcctcatttatcacgcagtacagcaccggccaggtcagcgtggagatcgagtgggaactgcagaaagagaacagcaaacgctggaatccagagattcagtacacctcaaattatgccaagtctaataatgtggaatttgctgtcaacaacgaaggggtttatactgagcctcgccccattggcacccgttacctcacccgtaacctgtaattacttgttaatcaataaaccggttgattcgtttcagttgaactttggtctctgcgaagggcgaattc

SEQ ID NO: 422 - protein, 685 aa, Artificial Sequence
  source: /note="Description of Artificial Sequence: Synthetic polypeptide"
MAADGYLPDWLEDNLSEGIREWWDLKPGAPKPKANQQKQDDGRGLVLPGYKYLGPFNGLDKGEPVNEADAAALEHDKAYDKQLEQGDNPYLKYNHADAEFQERLQEDTSFGGNLGRAVFQAKKRVLEPLGLVEEGAKTAPGKKRPVEPSPQRSPDSSTGIGKTGQQPAKKRLNFGQTGDSESVPDPQPIGEPPAGPSGLGSGTMAAGGGAPMADNNEGADGVGSSSGNWHCDSTWLGDRVITTSTRTWALPTYNNHLYKQISNGTSGGSTNDNTYFGYSTPWGYFDFNRFHCHFSPRDWQRLINNNWGFRPKRLNFKLFNIQVKEVTQNEGTKTIANNLTSTIQVFTDSEYQLPYVLGSAHQGCLPPFPADVFMIPQYGYLTLNNGSQAVGRSSFYCLEYFPSQMLRTGNNFEFSYQFEDVPFHSSYAHSQSLDRLTNPLIDQYLYYLARTQSTTGSTRGLQFHQAGPNTMAEQSKNWLPGPCYRQQRLSKNIDSNNNSNFAWTGATKYHLNGRNSLTNPGVAMATNKDDEDQFFPINGVLVFGKTGAANKTTLENVLMTSEEEIKTTNPVATEEYGVVSSNLQSSTAGPQTQTVNSQGALPGMVWQNRDVYLQGPIWAKIPHTDGNFHPSPLMGGFGLKHPPPQILIKYTSNYYKSTNVDFAVNTEGTYSEPRPIGTRYLTRNL

SEQ ID NO: 423 - DNA, 2969 bp, Artificial Sequence
  source: /note="Description of Artificial Sequence: Synthetic polynucleotide"
gaattcgccctttctacggctgcgtcaactggaccaatgagaactttcccttcaacgattgcgtcgacaagatggtgatctggtgggaggagggcaagatgacggccaaggtcgtggagtccgccaaggccattctcggcggcagcaaggtgcgcgtggaccaaaagtgcaagtcgtccgcccagatcgaccccacccccgtgatcgtcacctccaacaccaacatgtgcgccgtgattgacgggaacagcaccaccttcgagcaccagcagccgttacaagaccggatgttcaaatttgaactcacccgccgtctggagcacgactttggcaaggtgacaaagcaggaagtcaaagagttcttccgctgggcgcaggatcacgtgaccgaggtggcgcatgagttctacgtcagaaagggtggagccaacaagagacccgcccccgatgacgcggataaaagcgagcccaagcgggcctgcccctcagtcgcggatccatcgacgtcagacgcggaaggagctccggtggactttgccgacaggtaccaaaacaaatgttctcgtcacgcgggcatgcttcagatgctgtttccctgcaagacatgcgagagaatgaatcagaatttcaacatttgcttcacgcacgggaccagagactgttcagaatgtttccccggcgtgtcagaatctcaaccggtcgtcagaaagaggacgtatcggaaactctgtgccattcatcatctgctggggcgggctcccgagattgcttgctcggcctgcgatctggtcaacgtggacctggatgactgtgtttctgagcaataaatgacttaaaccaggtatggctgccgatggttatcttccagattggctcgaggacaacctctctgagggcatccgcgagtggtgggacttgaaacctggagccccgaaacccaaagccaaccagcaaaagcaggacgacggccggggtctggtgcttcctggctacaagtacctcggacccttcaacggactcgacaagggagagccggtcaacgaggcagacgccgcggccctcgagcacgacaaggcctacgacaagcagctcgagcagggggacaacccgtacctcaagtacaaccacgccgacgccgagtttcaggagcgtcttcaagaagatacgtcttttgggggcaacctcgggcgagcagtcttccaggccaagaagcgggttctcgaacctctcggtctggttgaggaaggcgctaagacggctcctggaaagaagagaccggtagagccatcaccccagcgttctccagactcctctacgggcatcggcaagacaggccagcagcccgcgaaaaagagactcaactttgggcagactggcgactcagagtcagtgcccgaccctcaaccaatcggagaaccccccgcaggcccctctggtctgggatctggtacaatggctgcaggcggtggcgctccaatggcagacaataacgaaggcgccgacggagtgggtagttcctcaggaaattggcattgcgattccacatggctgggcgacagagtcatcaccaccagcacccgaacctgggccctccccacctacaacaaccacctctacaagcaaatctccaacgggacatcgggaggaagcaccaacgacaacacctacttcggctacagcaccccctgggggtattttgactttaacagattccactgccacttctcaccacgtgactggcagcgactcatcaacaacaactggggattccggcccaagagactcaacttcaagctcttcaacatccaggtcaaggaggtcacgcagaatgaaggcaccaagaccatcgccaataaccttaccagcacgattcaggtctttacggactcggaataccagctcccgtacgtcctcggctctgcgcaccagggctgcctgcctccgttcccggcggacgtcttcatgattcctcagtacgggtacctgactctgaacaacggcagtcaggccgtgggccgttcctccttctactgcctggagtactttccttctcaaatgctgagaacgggcaacaactttgagttcagctaccagtttgaggacgtgccttttcacagcagctacgcgcacagccaaagcctggaccggctgacgaaccccctcatcgaccagtacctgtactacctggcccggacccagagcactacggggtccacaagggggctgcagttccatcaggctgggcccaacaccatggccgagcaatcaaagaactggctgcccggaccctgttatcggcagcagagactgtcaaaaaacatagacagcaacaacaacagtaactttgcctggaccggggccactaaataccatctgaatggtagaaattcattaaccaacccgggcgtagccatggccaccaacaaggacgacgaggaccagttctttcccatcaacggagtgctggtttttggcaaaacgggggctgccaacaagacaacgctggaaaacgtgctaatgaccagcgaggaggagatcaaaaccaccaatcccgtggctacagaagaatacggtgtggtctccagcaacctgcaatcgtctacggccggaccccagacacagactgtcaacagccagggggctctgcccggcatggtctggcagaaccgggacgtgtacctgcagggtcccatctgggccaaaattcctcacacggacggcaactttcacccgtctcccctgatgggcggatttggactcaaacacccgcctcctcaaattctcatcaagtatacttccaactactacaaatctacaaatgtggactttgctgtcaatactgagggtacttattcagagcctcgccccattggcacccgttacctcacccgtaacctgtaattgcctgttaatcaataaaccggttaattcgtttcagttgaactttggtctctgcgaagggcgaattc

SEQ ID NO: 424 - protein, 733 aa, Artificial Sequence
  source: /note="Description of Artificial Sequence: Synthetic polypeptide"
MAADGYLPDWLEDNLSEGIREWWDLKPGAPKPKANQQKQDDGRGLVLPGYKYLGPFNGLDKGEPVNAADAAALEHDKAYDQQLKAGDNPYLRYNHADAEFQERLQEDTSFGGNLGRAVFQAKKRVLEPLGLVEEGAKTAPGKKRPIESPDSSTGIGKKGQQPAKKKLNFGQTGDSESVPDPQPIGEPPAGPSGLGSGTMAAGGGAPMADNNEGADGVGSSSGNWHCDSTWLGDRVITTSTRTWALPTYNNHLYKQISNGTSGGSTNDNTYFGYSTPWGYFDFNRFHCHFSPRDWQRLINNNWGFRPKRLNFKLFNIQVKEVTQNEGTKTIANNLTSTIQVFTDSEYQLPYVLGSAHQGCLPPFPADVFMIPQYGYLTLNNGSQAVGRSSFYCLEYFPSQMLRTGNNFEFSYQFEDVPFHSSYAHSQSLDRLMNPLIDQYLYYLSRTQSTGGTAGTQQLLFSQAGPNNMSAQAKNWLPGPCYRQQRVSTTVSQNNNSNFAWTGATKYHLNGRDSLVNPGVAMATHKGDEERFFPSSGVLMFGKQGAGKDNVDYSSVMLTSEEEIKTTNPVATEQYGVVADNLQQQNAAPIVGAVNSQGALPGMVWQNRDVYLQGPIWAKIPHTDGNFHPSPLMGGFGLKHPPPQILIKNTPVPADPPTTFSQAKLASFITQYSTGQVSVEIEWELQKENSKRWNPEIQYTSNYYKSTNVDFAVNTEGTYSEPRPIGTRYLTRSL

SEQ ID NO: 425 - DNA, 3113 bp, Artificial Sequence
  source: /note="Description of Artificial Sequence: Synthetic polynucleotide"
gaattcgccctttctacggctgcgtcaactggaccaatgagaactttcccttcaacgattgcgtcgacaagatggtgatctggtgggaggagggcaagatgacggccaaggtcgtggagtccgccaaggccattctcggcggcagcaaggtgcgcgtggaccaaaagtgcaagtcgtccgcccagatcgatcccacccccgtgatcgtcacttccaacaccaacatgtgcgccgtgattgacgggaacagcaccaccttcgagcaccagcagccgttacaagaccggatgttcaaatttgaactcacccgccgtctggagcatgactttggcaaggtgacaaagcaggaagtcaaagagttcttccgctgggcgcaggatcacgtgaccgaggtggcgcatgagttctacgtcagaaagggtggagccaacaagagacccgcccccgatgacgcggataaaagcgagcccaagcgggcctgcccctcagtcgcggatccatcgacgtcagacgcggaaggagctccggtggactttgccgacaggtaccaaaacaaatgttctcgtcacgcgggcatgcttcagatgctgtttccctgcaagacatgcgagagaatgaatcagaatttcaacatttgcttcacgcacgggaccagagactgttcagaatgtttccccggcgtgtcagaatctcaaccggtcgtcagaaagaggacgtatcggaaactctgtgccattcatcatctgctggggcgggctcccgagattgcttgctcggcctgcgatctggtcaacgtggacctggatgactgtgtttctgagcaataaatgacttaaaccaggtatggctgccgatggttatcttccagattggctcgaggacaacctctctgagggcattcgcgagtggtgggacttgaaacctggagccccgaaacccaaagccaaccagcaaaagcaggacgacggccggggtctggtgcttcctggctacaagtacctcggacccttcaacggactcgacaagggggagcccgtcaacgcggcggacgcagcggccctcgagcacgacaaggcctacgaccagcagctcaaagcgggtgacaatccgtacctgcggtataaccacgccgacgccgagtttcaggagcgtcttcaagaagatacgtcttttgggggcaacctcgggcgagcagtcttccaggccaagaagcgggttctcgaacctctcggtctggttgaggaaggcgctaagacggctcctggaaagaagagacccatagaatcccccgactcctccacgggcatcggcaagaaaggccagcagcccgctaaaaagaagctcaactttgggcagactggcgactcagagtcagtgcccgaccctcaaccaatcggagaaccccccgcaggcccctctggtctgggatctggtacaatggctgcaggcggtggcgctccaatggcagacaataacgaaggcgccgacggagtgggtagttcctcaggaaattggcattgcgattccacatggctgggcgacagagtcatcaccaccagcacccgaacctgggccctccccacctacaacaaccacctctacaagcaaatctccaacgggacatcgggaggaagcaccaacgacaacacctacttcggctacagcaccccctgggggtattttgactttaacagattccactgccacttctcaccacgtgactggcagcgactcatcaacaacaactggggattccggcccaagagactcaacttcaagctcttcaacatccaggtcaaggaggtcacgcagaatgaaggcaccaagaccatcgccaataaccttaccagcacgattcaggtctttacggactcggaataccagctcccgtacgtcctcggctctgcgcaccagggctgcctgcctccgttcccggcggacgtcttcatgattcctcagtacgggtacctgactctgaacaacggcagtcaggccgtgggccgttcctccttctactgcctggagtactttccttctcaaatgctgagaacgggcaacaactttgagttcagctaccagtttgaggacgtgccttttcacagcagctatgcgcacagccaaagcctggaccggctgatgaaccccctcatcgaccagtacctgtactacctgtctcggactcagtccacgggaggtaccgcaggaactcagcagttgctattttctcaggccgggcctaataacatgtcggctcaggccaaaaactggctacccgggccctgctaccggcagcaacgcgtctccacgacagtgtcgcaaaataacaacagcaactttgcttggaccggtgccaccaagtatcatctgaatggcagagactctctggtaaatcccggtgtcgctatggcaacgcacaagggcgacgaagagcgattttttccatccagcggagtcttgatgtttgggaaacagggagctggaaaagacaacgtggactatagcagcgttatgctaaccagtgaggaagaaatcaaaaccaccaacccagtggccacagaacagtacggcgtggtggccgataacctgcaacagcaaaacgccgctcctattgtaggggccgtcaacagtcaaggagccttacctggcatggtctggcagaaccgggacgtgtacctgcagggtcctatctgggccaagattcctcacacggacggcaactttcatccttcgccgctgatgggaggctttggactgaaacacccgcctcctcagatcctgattaagaatacacctgttcccgcggatcctccaactaccttcagtcaagccaagctggcgtcgttcatcacgcagtacagcaccggacaggtcagcgtggaaattgaatgggagctgcagaaagagaacagcaagcgctggaacccagagattcagtatacttccaactactacaaatctacaaatgtggactttgctgtcaatactgagggtacttattcagagcctcgccccattggcacccgttacctcacccgtagcctgtaattgcctgttaatcaataaaccggttgattcgtttcagttgaactttggtctctgcgaagggcgaattc

SEQ ID NO: 426 - protein, 738 aa, Artificial Sequence
  source: /note="Description of Artificial Sequence: Synthetic polypeptide"
MAADGYLPDWLEDNLSEGIREWWDLKPGAPKPKANQQKQDDGRGLVLPGYKYLGPFNGLDKGEPVNAADAAALEHDKAYDQQLKAGDNPYLRYNHADAEFQERLQEDTSFGGNLGRAVFQAKKRVLEPLGLVEEGAKTAPGKKRPVEPSPQRSPDSSTGIGKTGQQPAKKRLNFGQTGDSESVPDPQPIGEPPAGPSGLGSGTMAAGGGAPMADNNEGADGVGSSSGNWHCDSTWLGDRVITTSTRTWALPTYNNHLYKQISNGTSGGSTNDNTYFGYSTPWGYFDFNRFHCHFSPRDWQRLINNNWGFRPKRLNFKLFNIQVKEVTQNEGTKTIANNLTSTIQVFTDSEYQLPYVLGSAHQGCPPPFPADVFMIPQYGYLTLNNGSQAVGRSSFYCLEYFPSQMRRTGNNFEFSYQFEDVPFHSSYAHSQSLDRLMNPLIDQYLYYLSRTQSTGGTAGTQQLLFSQAGPNNMSAQAKNWLPGPCYRQQRVSTTLSQNNNSNFAWTGATKYHLNGRDSLVNPGVAMATHKDDEERFFPSSGVLMFGKQGAGKDNVDYSSVMLTSEEEIKTTNPVATEQYGVVADNLQQQNAAPIVGAVNSQGALPGMVWQNRDVYLQGPIWAKIPHTDGNFHPSPLMGGFGLKHPPPQILIKNTPVPADPPTTFSQAKLASFITQYSTGQVSVEIEWELQKENSKRWNPEIQYTSNYYKSTNVDFAVNTEGTYSEPRPIGTRYLTRNL

SEQ ID NO: 427 - DNA, 3128 bp, Artificial Sequence
  source: /note="Description of Artificial Sequence: Synthetic polynucleotide"
gaattcgccctttctacggctgcgtcaactggaccaatgagaactttcccttcaacgattgcgtcgacaagatggtgatctggtgggaggagggcaagatgacggccaaggtcgtggagtccgccaaggccattctcggcggcagcaaggtgcgcgtggaccaaaagtgcaagtcgtccgcccagatcgaccccacccccgtgatcgtcacctccaacaccaacatgtgcgccgtgattgacgggaacagcaccaccttcgagcaccagcagccgttgcaggaccggatgttcaaatttgaactcacccgccgtctggagcatgactttggcaaggtgacaaagcaggaagtcaaagagttcttccgctgggcgcaggatcacgtgaccgaggtggcgcatgagttctacgtcagaaagggtggagccaacaagagacccgcccccgatgacgcggataaaagcgagcccaagcgggcctgcccctcagtcgcggatccatcgacgtcagacgcggaaggagctccggtggactttgccgacaggtaccaaaacaaatgttctcgtcacgcgggcatgcttcagatgctgtttccctgcaagacatgcgagagaatgaatcagaatttcaacatttgcttcacgcgcgggaccagagactgttcagaatgtttcccgggcgtgtcagaatctcaaccggtcgtcagaaagaggacgtatcggaaactctgtgccattcatcatctgctggggcgggctcccgagattgcttgctcggcctgcgatctggtcaacgtggacctggatgactgtgtttctgagcaataaatgacttaaaccaggtatggctgccgatggttatcttccagattggctcgaggacaacctctctgagggcattcgcgagtggtgggacttgaaacctggagccccgaaacccaaagccaaccagcaaaagcaggacgacggccggggtctggtgcttcctggctacaagtacctcggacccttcaacggactcgacaagggggagcccgtcaacgcggcggacgcagcggccctcgagcacgacaaggcctacgaccagcagctcaaagcgggtgacaatccgtacctgcggtataaccacgccgacgccgagtttcaggagcgtctgcaagaagatacgtcttttgggggcaacctcgggcgagcagtcttccaggccaagaagcgggttctcgaacctctcggtctggttgaggaaggcgctaagacggctcctggaaagaagagaccggtagagccatcaccccagcgttctccagactcctctacgggcatcggcaagacaggccagcagcccgcgaaaaagagactcaactttgggcagactggcgactcagagtcagtgcccgaccctcaaccaatcggagaaccccccgcaggcccctctggtctgggatctggtacaatggctgcaggcggtggcgctccaatggcagacaataacgaaggcgccgacggagtgggtagttcctcaggaaattggcattgcgattccacatggctgggcgacagagtcatcaccaccagcacccgaacctgggccctccccacctacaacaaccacctctacaagcaaatctccaacgggacatcgggaggaagcaccaacgacaacacctacttcggctacagcaccccctgggggtattttgactttaacagattccactgccacttctcaccacgtgactggcagcgactcatcaacaacaactggggattccggcccaagagactcaacttcaagctcttcaacatccaggtcaaggaggtcacgcagaatgaaggcaccaagaccatcgccaataaccttaccagcacgattcaggtctttacggactcggaataccagctcccgtacgtcctcggctctgcgcaccagggctgcccgcctccgttcccggcggacgtcttcatgattcctcagtacgggtacctgactctgaacaacggcagtcaggccgtgggccgttcctccttctactgcctggagtactttccttctcaaatgcggagaacgggcaacaactttgagttcagctaccagtttgaggacgtgccttttcacagcagctacgcgcatagccaaagcctggaccggctgatgaaccccctcatcgaccagtacctgtactacctgtctcggactcagtccacgggaggtaccgcaggaactcagcagttgctattttctcaggccgggcctaataacatgtcggctcaggccaaaaactggctacccgggccctgctaccggcagcaacgcgtctccacgacactgtcgcaaaataacaacagcaactttgcttggaccggtgccaccaagtatcatctgaatggcagagactctctggtaaatcccggtgtcgctatggcaacgcacaaggacgacgaagagcgattttttccatccagcggagtcttgatgtttgggaaacagggagctggaaaagacaacgtggactatagcagcgttatgctaaccagtgaggaagaaatcaaaaccaccaacccagtggccacagaacagtacggcgtggtggccgataacctgcaacagcaaaacgccgctcctattgtaggggccgtcaacagtcaaggagccttacctggcatggtctggcagaaccgggacgtgtacctgcagggtcctatctgggccaagattcctcacacggacggcaactttcatccttcgccgctgatgggaggctttggactgaaacacccgcctcctcagatcctgattaagaatacacctgttcccgcggatcctccaactaccttcagtcaagccaagctggcgtcgttcatcacgcagtacagcaccggacaggtcagcgtggaaattgaatgggagctgcagaaagagaacagcaagcgctggaacccagagattcagtatacttccaactactacaaatctacaaatgtggactttgctgtcaatactgagggtacttattcagagcctcgccccattggcacccgttacctcacccgtaacctgtaattgcctgttaatcaataaaccggttaattcgtttcagttgaactttggtctctgcgaagggcgaattc

SEQ ID NO: 428 - protein, 738 aa, Artificial Sequence; identical to SEQ ID NO: 416
  source: /note="Description of Artificial Sequence: Synthetic polypeptide"

SEQ ID NO: 429 - DNA, 1933 bp, Artificial Sequence
  source: /note="Description of Artificial Sequence: Synthetic polynucleotide"
  modified_base (1302)..(1302): a, c, t, g, unknown or other
caaggcctacgaccagcagctcaaagcgggtgacaatccgtacctgcggtataaccacgccgacgccgagtttcaggagcgtcttcaagaagatacgtcttttgggggcaacctcgggcgagcagtcttccaggccaaaaagcgggttctcgaacctcttggtctggttgagacgccagctaagacggcacctggaaagaagcgaccggtagactcgccagactccacctcgggcatcggcaagaaaggccagcagcccgcgaaaaagagactcaactttgggcagactggcgactcagagtcagtccccgaccctcaaccaatcggagaaccaccagcaggcccctctggtctgggatctggtacaatggctgcaggcggtggcgcaccaatggctgacaataacgagggcgccgacggagtgggtaatgcctcaggaaattggcattgcgattccacatggctgggcgacagagtcatcaccaccagcacccgaacctgggccctgcccacctacaacaaccacctctacaagcaaatctccagtcagtcagcagggagcaccaacgataacgtctatttcggctacagcaccccctgggggtattttgacttcaacagattccattgccacttctcaccacgtgactggcagcgacttatcaacaacaactggggattccggcccaagaagctcaacttcaagctcttcaacatccaggtcaaggaggtcacgacgaatgacggtgtcacaaccatcgctaataaccttaccagcacggttcaggtcttttcggactcggaatatcaactgccgtacgtcctcggctccgcgcaccagggctgcctgcctccgttcccggcagacgtgttcatgattccgcagtacggatacctgactctgaacaatggcagccaatcggtaggccgttcctccttctactgcctggagtactttccttctcagatgctgagaacgggcaacaacttcacctttagctacaccttcgaggacgtgcctttccacagcagctacgcgcacagccagagtctggaccggctgatgaatcccctcatcgaccagtacctgtactacttggccagaacacagagcaacgcaggaggtactgctggcaatcgggaactgcagttttatcagggcggacctaccaccatggccgaacaagcaaagaactggctgcccggaccttgcttccggcaacagagagtatccaagacgctggatcaaaataacaacagcaactttgcctggactggtgccacaaaataccatttaaatgnaagaaattcattggttaatcccggtgtcgccatggcaacccacaaggacgacgaggaacgcttcttcccttcgagcggagttctaatttttggcaaaactggagcagctaataaaactacattagaaaacgtgctcatgacaaatgaagaagaaattcgtcctaccaacccggtagctaccgaggaatacgggattgtaagcagcaacttgcaggcggctagcaccgcagcccagacacaagttgttaacaaccagggagccttacctggcatggtctggcagaaccgggacgtgtacctgcaaggtcccatttgggccaagattcctcacacggacggcaactttcacccgtctcctctaatgggtggctttggactgaaacacccgcctccccagatcctgatcaaaaacacaccggtacctgctaatcctccagaagtgtttactcctgccaagtttgcttccttcatcacgcagtacagcaccgggcaagtcagcgttgagatcgagtgggagctgcagaaagagaacagcaagcgctggaacccagagattcagtacacctccaactttgacaaacagactggagtggactttgctgttgacagccagggtgtttactctgagcct

SEQ ID NO: 430 - protein, 733 aa, Artificial Sequence
  source: /note="Description of Artificial Sequence: Synthetic polypeptide"
MAADGYLPDWLEDNLSEGIREWWDLKPGAPKPKANQQKQDDGRGLVLPGYKYLGPFNGLDKGEPVNAADAAALEHDKAYDQQLKAGDNPYLRYNHADAEFQERLQEDTSFGGNLGRAVFQAKKRVLEPLGLVEEGAKTAPGKKRPLESPQEPDSSSGIGKKGKQPAKKRLNFEEDTGAGDGPPEGSDTSAMSSDIEMRAAPGGNAVDAGQGSDGVGNASGDWHCDSTWSEGKVTTTSTRTWVLPTYNNHLYLRLGTTSNSNTYNGFSTPWGYFDFNRFHCHFSPRDWQRLINNNWGLRPKAMRVKIFNIQVKEVTTSNGETTVANNLTSTVQIFADSSYELPYVMDAGQEGSLSPFPNDVFMVPQYGYCGIVTGENQNQTDRNAFYCLEYFPSQMLRTGNNFEMAYNFGKVPFHSMYAYSQSPDRLMNPLLDQYLWHLQSTTSGETLNQGNAATTFGKIRSGDFAFYRKNWLPGPCVKQQRLSKTASQNYKIPASGGNALLKYDTHYTLNNRWSNIAPGPPMATAGPSDGDFSNAQLIFPGPSVTGNTTTSANNLLFTSEEEIAATNPRDTDMFGQIADNNQNATTAPITGNVTAMGVLPGMVWQNRDIYYQGPIWAKIPHADGHFHPSPLIGGFGLKHPPPQIFIKNTPVPANPATTFTAARVDSFITQYSTGQVAVQIEWEIEKERSKRWNPEVQFTSNYGNQSSMLWAPDTTGKYTEPRVIGSRYLTNHL

SEQ ID NO: 431 - DNA, 3105 bp, Artificial Sequence
  source: /note="Description of Artificial Sequence: Synthetic polynucleotide"
gaattcgcccttgctgcgtcaactggaccaatgagaactttcccttcaacgattgcgtcgacaagatggtgatctggtgggaggagggcaagatgaccgccaaggtcgtggagtccgccaaggccattctgggcggaagcaaggtgcgcgtggaccaaaagtgcaagtcatcggcccagatcgaccccacgcccgtgatcgtcacctccaacaccaacatgtgcgccgtgatcgacgggaacagcaccaccttcgagcaccagcagccgctgcaggaccgcatgttcaagttcgagctcacccgccgtctggagcacgactttggcaaggtgaccaagcaggaagtcaaagagttcttccgctgggctcaggatcacgtgactgaggtggcgcatgagttctacgtcagaaagggcggagccaccaaaagacccgcccccagtgacgcggatataagcgagcccaagcgggcctgcccctcagttgcggagccatcgacgtcagacgcggaagcaccggtggactttgcggacaggtaccaaaacaaatgttctcgtcacgcgggcatgcttcagatgctgtttccctgcaagacatgcgagagaatgaatcagaatttcaacgtctgcttcacgcacggggtcagagactgctcagagtgcttccccggcgcgtcagaatctcaacccgtcgtcagaaaaaagacgtatcagaaactgtgcgcgattcatcatctgctggggcgggcacccgagattgcgtgttcggcccgcgatctcgtcaacgtggacttggatgactgtgtttctgagcaataaatgacttaaaccaggtatggctgctgacggttatcttccagattggctcgaggacaacctctctgagggcattcgcgagtggtgggacctgaaacctggagcccccaagcccaaggccaaccagcagaagcaggacgacggccggggtctggtgcttcctggctacaagtacctcggacccttcaacggactcgacaagggggagcccgtcaacgcggcggacgcagcggccctcgagcacgacaaggcctacgaccagcagctcaaagcgggtgacaatccgtacctgcggtataaccacgccgacgccgagtttcaggagcgtctgcaagaagatacgtcttttgggggcaacctcgggcgagcagtcttccaggccaagaagagggtactcgaacctctgggcctggttgaagaaggtgctaagacggctcctggaaagaagagaccgttagagtcaccacaagagcccgactcctcctcaggaatcggcaaaaaaggcaaacaaccagccaaaaagagactcaactttgaagaggacactggagccggagacggaccccctgaaggatcagataccagcgccatgtcttcagacattgaaatgcgtgcagcaccgggcggaaatgctgtcgatgcgggacaaggttccgatggagtgggtaatgcctcgggtgattggcattgcgattccacctggtctgagggcaaggtcacaacaacctcgaccagaacctgggtcttgcccacctacaacaaccacttgtacctgcggctcggaacaacatcaaacagcaacacctacaacggattctccaccccctggggatactttgactttaacagattccactgtcacttctcaccacgtgactggcaaagactcatcaacaacaactggggactacgaccaaaagccatgcgcgttaaaatcttcaatatccaagttaaggaggtcacaacgtcgaacggcgagactacggtcgctaataaccttaccagcacggttcagatatttgcggactcgtcgtatgagctcccgtacgtgatggacgctggacaagagggaagtctgtctcctttccccaatgacgtcttcatggtgcctcaatatggctactgtggcattgtgactggcgaaaatcagaaccagacggacagaaatgctttctactgcctggagtattttccttcacaaatgctgagaactggcaataactttgaaatggcttacaactttgggaaggtgccgttccactcaatgtatgcttacagccagagcccggacagactgatgaatcccctcctggaccagtacctgtggcacttacagtcgaccacctctggagagactctgaatcaaggcaatgcagcaaccacatttggaaaaatcaggagtggagactttgccttttacagaaagaactggctgcctgggccttgtgttaaacagcagagactctcaaaaactgccagtcaaaattacaagattcctgccagcgggggcaacgctctgttaaagtatgacacccactataccttaaacaaccgctggagcaacatagcgcctggacctccaatggcaacagctggaccttcagatggggacttcagcaacgcccagctcatcttccctggaccatcagtcaccggaaacacaacaacctcagcaaacaatctgttgtttacatcagaagaagaaattgctgccaccaacccaagagacacggacatgtttggtcagattgctgacaataatcagaatgctacaactgctcccataaccggcaacgtgactgctatgggagtgcttcctggcatggtgtggcaaaacagagacatttactaccaagggccaatttgggccaagatcccacacgcggacggacattttcatccttcaccgctaattggcggttttggactgaaacatccgcctccccagatatttatcaaaaacacccccgtacctgccaatcctgcgacaaccttcactgcagccagagtggactctttcatcacacaatacagcaccggccaggtcgctgttcagattgaatgggaaatcgaaaaggaacgctccaaacgctggaatcctgaagtgcagtttacttcaaactatgggaaccagtcttctatgttgtgggctcccgatacaactgggaagtatacagagccgcgggttattggctctcgttatttgactaatcatttgtaactgcctagttaatcaataaaccgtgtgattcgtttcagttgaactttggtctctgcgaagggcgaattc

SEQ ID NO: 432 - protein, 733 aa, Artificial Sequence
  source: /note="Description of Artificial Sequence: Synthetic polypeptide"
MAADGYLPDWLEDNLSEGIREWWDLKPGAPKPKANQQKQDDGRGLVLPGYKYLGPFNGLDKGEPVNAADAAALEHDKAYDQQLKAGDNPYLRYNHADAEFQERLQEDTSFGGNLGRAVFQAKKRVLEPLGLVEEGAKTAPGKKRPLESPQEPDSSSGIGKKGKQPAKKRLNFEEDTGAGDGPPEGSDTSAMSSDIEMRAAPGGNAVDAGQGSDGVGNASGDWHCDSTWSEGKVTTTSTRTWVLPTYNNHLYLRLGTTSNSNTYNGFSTPWGYFDFNRFHCHFSPRDWQRLINNNWGLRPKAMRVKIFNIQVKEVTTSNGETTVANNLTSTVQIFADSSYELPYVMDAGQEGSLPPFPNDVFMVPQYGYCGIVTGENQNQTDRNAFYCLEYFPSQMLRTGNNFEMAYNFEKVPFHSMYAHSQSLDRLMNPLLDQYLWHLQSTTSGETLNQGNAATTFGKIRSGDFAFYRKNWLPGPCVKQQRFSKTASQNYKIPASGGNALLKYDTHYTLNNRWSNIAPGPPMATAGPSDGDFSNAQLIFPGPSVTGNTTTSANNLLFTSEEEIAATNPRDTDMFGQIADNNQNATTAPITGNVTAMGVLPGMVWQNRDIYYQGPIWAKIPHADGHFHPSPLIGGFGLKHPPPQIFIKNTPVPANPATTFTAARVDSFITQYSTGQVAVQIEWEIEKERSKRWNPEVQFTSNYGNQSSMLWAPDTTGKYTEPRVIGSRYLTNHL

SEQ ID NO: 433 - DNA, 3105 bp, Artificial Sequence
  source: /note="Description of Artificial Sequence: Synthetic polynucleotide"
gaattcgcccttgctgcgtcaactggaccaatgagaactttcccttcaacgattgcgtcgacaagatggtgatctggtgggaggagggcaagatgaccgccaaggtcgtggagtccgccaaggccattctgggcggaagcaaggtgcgcgtggaccaaaagtgcaagtcatcggcccagatcgaccccacgcccgtgatcgtcacctccaacaccaacatgtgcgccgtgatcgacgggaacagcaccaccttcgagcaccagcagccgctgcaggaccgcatgttcaagttcgagctcacccgccgtctggagcacgactttggcaaggtgaccaagcaggaagtcaaagagttcttccgctgggctcaggatcacgtgactgaggtggcgcatgagttctacgtcagaaagggcggagccaccaaaagacccgcccccagtgacgcggatataagcgagcccaagcgggcctgcccctcagttgcggagccatcgacgtcagacgcggaagcaccggtggactttgcggacaggtaccaaaacaaatgttctcgtcacgcgggcatgcttcagatgctgtttccctgcaagacatgcgagagaatgaatcagaatttcaacgtctgcttcacgcacggggtcagagactgctcagagtgcttccccggcgcgtcagaatctcaacccgtcgtcagaaaaaagacgtatcagaaactgtgcgcgattcatcatctgctggggcgggcacccgagattgcgtgttcggcctgcgatctcgtcaacgtggacttggatgactgtgtttctgagcaataaatgacttaaaccaggtatggctgctgacggttatcttccagattggctcgaggacaacctctctgagggcattcgcgagtggtgggacctgaaacctggagcccccaagctcaaggccaaccagcagaagcaggacgacggccggggtctggtgcttcctggctacaagtacctcggacccttccacggactcgacaagggggagcccgtcaacgcggcggacgcagcggccctcgagcacgacaaggcctacgaccagcagctcaaagcgggtgacaatccgtacctgcggtataaccacgccgacgccgagtttcaggagcgtctgcaagaagatacgtcttttgggggcaacctcgggcgagcagtcttccaggccaagaagagggtactcgaaccactgggcctggttgaagaaggtgctaagacggctcctggaaagaagagaccgttagagtcaccacaagagcccgactcctcctcaggaatcggcaaaaaaggcaaacaaccagccaaaaagagactcaactttgaagaggacactggagccggagacggaccccctgaaggatcagataccagcgccatgtcttcagacattgaaatgcgtgcagcaccgggcggaaatgctgtcgatgcgggacaaggttccgatggagtgggtaatgcctcgggtgattggcattgcgattccacctggtctgagggcaaggtcacaacaacctcgaccagaacctgggtcttgcccacctacaacaaccacttgtacctgcggctcggaacaacatcaaacagcaacacctacaacggattctccaccccctggggatactttgactttaacagattccactgtcacttctcaccacgtgactggcaaagactcatcaacaacaactggggactacgaccaaaagccatgcgcgttaaaatcttcaatatccaagttaaggaggtcacaacgtcgaacggcgagactacggtcgctaataaccttaccagcacggttcagatatttgcggactcgtcgtatgagctcccgtacgtgatggacgctggacaagagggaagtctgcctcctttccccaatgacgtcttcatggtgcctcaatatggctactgtggcattgtgactggcgaaaatcagaaccagacggacagaaatgctttctactgcctggagtattttccttcacaaatgctgagaactggcaataactttgaaatggcttacaactttgagaaggtgccgttccactcaatgtatgctcacagccagagcctggacagactgatgaatcccctcctggaccagtacctgtggcacttacagtcgaccacctctggagagactctgaatcaaggcaatgcagcaaccacatttggaaaaatcaggagtggagactttgccttttacagaaagaactggctgcctgggccttgtgttaaacagcagagattctcaaaaactgccagtcaaaattacaagattcctgccagcgggggcaacgctctgttaaagtatgacacccactataccttaaacaaccgctggagcaacatagcgcctggacctccaatggcaacagctggaccttcagatggggacttcagcaacgcccagctcatcttccctggaccatcagtcaccggaaacacaacaacctcagcaaacaatctgttgtttacatcagaaggagaaattgctgccaccaacccaagagacacggacatgtttggtcagattgctgacaataatcagaatgctacaactgctcccataaccggcaacgtgactgctatgggagtgcttcctggcatggtgtggcaaaacagagacatttactaccaagggccaatttgggccaagatcccacacgcggacggacattttcatccttcaccgctaattggcggttttggactgaaacatccgcctccccagatatttatcaaaaacacccccgtacctgccaatcctgcgacaaccttcactgcagccagagtggactctttcatcacacaatacagcaccggccaggtcgctgttcagattgaatgggaaatcgaaaaggaacgctccaaacgccggaatcctgaagtgcagtttacttcaaactatgggaaccagtcttctatgttgtgggctcccgatacaactgggaagtatacagagccgcgggttattggctctcgttatttgactaatcatttgtaactgcctagttaatcaataaaccgtgtgattcgtttcagttgaactttggtctctgcgaagggcgaattc

SEQ ID NO: 434 - protein, 733 aa, Artificial Sequence
  source: /note="Description of Artificial Sequence: Synthetic polypeptide"
MAADGYLPDWLEDNLSEGIREWWDLKPGAPKPKANQQKQDDGRGLVLPGYEYLGPFNGLDKGEPVNAADAAALEHDKAYDQQLKAGDNPYLRYNHADAEFQERLQEDTSFGGNLGRAVFQAKKRVLEPLGLVEEGAKTAPGKKRPLESPQEPDSSSGIGKKGKQPAKKRLNFEEDTGAGDGPPEGSDTSAMSSDIEMRAAPGGNAVDAGQGSDGVGNASGDWHCDSTWSEGKVTTTSTRTWVLPTYNNHLYLRLGTTSNSNTYNGFSTPWGYFDFNRFHCHFSPRDWQRLINNNWGLRPKAMRVKIFNIQVKEVTTSNGETTVANNLTSTVQIFADSSYELPYVMDAGQEGSLPPFPNDVFMVPQYGYCGIVTGENQNQTDRNAFYCLEYFPSQMLRTGNNFETAYNFEKVPFHSMYAHSQSLDGLMNPLLDQYLWHLQSTTSGETLNQGNAATTFGKIRSGDFAFYRKNWLPGPCVKQQRFSKTASQNYKIPASGGNALLKYDTHYTLNNRWSNIAPGPPMATAGPSDGDFSNAQLIFPGPSVTGNTTTSANNLLFTSEEEIAATNPRDTDMFGQIADNNQNATTAPITGNVTAMGVLPGMVWQNRDIYYQGPIWAKIPHADGHFHPSPLIGGFGLKHPPPQIFIKNTPVPAYPATTFTAARVDSFITQYSTGQVAVQIEWEIEKERSKRWNPEVQFTSNCGNQSSMLWAPDTTGKYTEPRVIGSRYLTNHL

SEQ ID NO: 435 - DNA, 3105 bp, Artificial Sequence
  source: /note="Description of Artificial Sequence: Synthetic polynucleotide"
gaattcgcccttcgcagagaccaaagttcaactgaaacgaatcacacggtttattgattaactaggcagttacaaatgattagtcaaataacgagagccaataacccgcggctctgtatacttcccagttgtatcgggagcccacaacatagaagactggttcccacagtttgaagtaaactgcacttcaggattccagcgtttggagcgttccttttcgatttcccattcaatctgaacagcgacctggccggtgctgtattgtgtgatgaaagagtccactctggctgcagtgaaggttgtcgcaggataggcaggtacgggggtgtttttgataaatatctggggaggcggatgtttcagtccaaaaccgccaattagcggtgaaggatgaaaatgtccgtccgcgtgtgggatcttggcccaaattggcccttggtagtaaatgtctctgttttgccacaccatgccaggaagcactcccatagcagtcacgttgccggttatgggagcagttgtagcattctgattattgtcagcaatctgaccaaacatgtccgtgtctcttgggttggtggcagcaatttcttcttctgatgtaaacaacagattgtttgctgaggttgttgtgtttccggtgactgatggtccagggaagatgagctgggcgttgctgaagtccccatctgaaggtccagctgttgccattggaggtccaggcgctatgttgctccagcggttgtttaaggtatagtgggtgtcatactttaacagagcgttgcccccgctggcaggaatcttgtaattttgactggcagtttttgagaatctctgctgtttaacacaaggcccaggcagccagttctttctgtaaaaggcaaagtctccactcctgatttttccaaatgtggttgctgcattgccttgattcagagtctctccagaggtggtcgactgtaagtgccacaggtactggtccaggaggggattcatcagtccgtccaggctctggctgtgagcatacattgagtggaacggcaccttctcaaagttgtaagccgtttcaaagttattgccagttctcagcatttgtgaaggaaaatactccaggcagtagaaagcatttctgtccgtctggttctgattttcgccagtcacaatgccacagtagccatattgaggcaccatgaagacgtcattggggaaaggaggcagacttccctcttgtccagcgtccatcacgtacgggagctcatacgacgagtccgcaaatatctgaaccgtgctggtaaggttattagcgaccgtagtctcgccgttcgacgttgtgacctccttaacttggatattgaagattttaacgcgcatggcttttggtcgtagtccccagttgttgttgatgagtctttgccagtcacgtggtgagaagtgacagtggaatctgttaaagtcaaagtatccccagggggtggagaatccgttgtaggtgttgctgtttgatgttgttccgagccgcaggtacaagtggttgttgtaggtgggcaagacccaggttctggtcgaggttgttgtgaccttgccctcagaccaggtggaatcgcaatgccaatcacccgaggcattacccactccatcggaaccttgtcccgcatcgacagcatttccgcccggtgctgcacgcatttcaatgtctgaagacatggcgctggtatctgatccttcagggggtccgtctccggctccagtgtcctcttcaaagttgagtctctttttggctggttgtttgccttttttgccgattcctgaggaggagtcgggctcttgtggtgactctaacggtctcttctttccaggagccgtcttagcaccttcttcaaccaggcccagaggttcgagtaccctcttcttggcctggaagactgctcgcccgaggttgcccccaaaagacgtatcttcttgcagacgctcctgaaactcggcgtcggcgtggttataccgcaggtacggattgtcacccgctttgagctgctggtcgtaggccttgtcgtgctcgagggccgctgcgtccgccgcgttgacgggctcccccttgtcgagtccgttgaagggtccgaggtactcgtagccaggaagcaccagaccccggccgtcgtcctgcttctgctggttggccttgggcttgggggctccaggtttcaggtcccaccactcgcgaatgccctcagagaggttgtcctcgagccaatctggaagataaccgtcagcagccatacctggtttaagtcatttattgctcagaaacacagtcatccaagtccacgttgacgagatcgcaggccgaacacgcaatctcgggtgcccgccccagcagatgatgaatcgcgcacagtttctgatacgtcttttttctgacgacgggttgagattctgacgcgccggggaagcactctgagcagtctctgaccccgtgcgtgaagcagacgttgaaattctgattcattctctcgcatgtcttgcagggaaacagcatctgaagcatgcccgcgtgacgagaacatttgttttggtacctgtccgcaaggtccaccggtgcttccgcgtctgacgtcgatggctccgcaactgaggggcaggcccgcttgggctcgcttatatccgcgtcactgggggcgggtcttttggtggctccgccctttctgacgtagaactcatgcgccacctcagtcacgtgatcctgagcccagcggaagaactctttgacttcctgcttggtcaccttgccaaagtcgtgctccagacggcgggtgagctcgaacttgaacatgcggtcctgcagcggctgctggtgctcgaaggtggtgctgttcccgtcgatcacggcgcacatgttggtgttggaggtgacgatcacgggcgtggggtcgatctgggccgatgacttgcacttttggtccacgcgcaccttgcttccgcccagaatggccttggcggactccacgaccttggcggtcatcttgccctcctcccaccagatcaccatcttgtcgacgcaatcgttgaagggaaagttctcattggtccagttgacgcagcaagggcgaattc

SEQ ID NO: 436 - protein, 729 aa, Artificial Sequence
  source: /note="Description of Artificial Sequence: Synthetic polypeptide"
MAADGYLPDWLEDNLSEGIREWWDLKPGAPKPKANQQKQDDGRGLVLPGYKYLGPFNGLDKGEPVNAADAAALEHDKAYDQQLKAGDNPYLRYNHADAEFQERLQEDTSFGGNLGRAVFQAKKRVLEPLGLVEEGAKTAPGKKRPIDSPDSSTGIGKKGQQPAKKKLNFGQTGDSESVPDPQPLGEPPAAPSSVGSGTMAAGGGAPMADNNEGADGVGNASGNWHCDSTWLGDRVITTSTRTWALPTYNNHLYKQISSSSSGATNDNHYFGYSTPWGYFDFNRFHCHFSPRDWQRLINNNWGFRPKKLRFKLFNIQVKEVTTNDGVTTIANNLTSTVQVFSDSEYQLPYVLGSAHQGCLPPFPADVFMIPQYGYLTLNNGSQSVGRSSFYCLEYFPSQMLRTGNNFEFSYSFEDVPFHSSYAHSQSLDRLMNPLIDQYLYYLARTQSTTGSTRELQFHQAGPNTMAEQSKNWLPGPCYRQQGLSKNLDFNNNSNFAWTAATKYHLNGRNSLTNPGIPMATNKDDEDQFFPINGVLVFGKTGAANKTTLENVLMTSEEEIKTTNPVATEEYGVVSSNLQPSTAGPQSQTINSQGALPGMVWQNRDVYLQGPIWAKIPHTDGNFHPSPLMGGFGLKHPPPQILIKNTPVPANPPEVFTPAKFASFITQYSTGQVSVEIEWELQKENSKRWNPEIQYTSNYAKSNNVEFAVNPDGVYTEPRPIGTRYLPRNL

SEQ ID NO: 437 - DNA, 3094 bp, Artificial Sequence
  source: /note="Description of Artificial Sequence: Synthetic polynucleotide"
gaattcgcccttgctgcgtcaactggaccaagagaactttcccttcaacgattgcgtcgacaagatggtgatctggtgggaggagggcaagatgacggccaaggtcgtggagtccgccaaagccattctgggcggaagcaaggtgcgcgtcgaccaaaagtgcaagtcctcggcccagatcgatcccacccccgtgatcgtcacctccaacaccaacatgtgcgccgtgatcgacgggaacagcaccaccttcgagcaccagcagccgttgcaggaccggatgttcaaatttgaactcacccgccgtctggaacacgactttggcaaggtgaccaagcaggaagtcaaagagttcttccgctgggctagtgatcacgtgactgaggtgacgcatgagttctacgtcagaaagggcggagccagcaaaagacccgcccccgatgacgcggatataagcgagcccaagcgggcctgtccctcagtcacggacccatcgacgtcagacgcggaaggagctccggtggactttgccgacaggtaccaaaacaaatgttctcgtcacgcgggcatgcttcagatgctgtttccctgcaaaacgtgcgagagaatgaatcagaatttcaacatttgcttcacgcacggggtcagagactgtttagaatgtttccccggcgtgtcagaatctcaaccggtcgtcagaaaaaagacgtatcggaagctgtgtgcgattcatcatctgctggggcgggcacccgagattgcttgctcggcctgcgacctggtcaacgtggacctggacgactgtgtttctgagcaataaatgacttaaaccgggtatggctgccgatggttatcttccagattggctcgaggacaacctctctgagggcattcgcgagtggtgggacctgaaacctggagccccgaaacccaaagccaaccagcaaaagcaggacgacggccggggtctggtgcttcctggctacaagtacctcggacccttcaacggactcgacaagggggagcccgtcaacgcggcggacgcagcggccctcgagcacgacaaggcctacgaccagcagctcaaagcgggtgacaatccgtacctgcggtataaccacgccgacgccgagtttcaggagcgtctgcaagaagatacgtcatttgggggcaacctcgggcgagcagtcttccaggccaagaagcgggttctcgaacctctcggtctggttgaggaaggcgctaagacggctcctggaaagaagagacccatagactctccagactcctccacgggcatcggcaaaaaaggccagcagcccgctaaaaagaagctcaattttggtcagactggcgactcagagtcagtccccgaccctcaacctcttggagaacctccagcagcgccctctagtgtgggatctggtacaatggctgcaggcggtggcgcaccaatggcagacaataacgaaggtgccgacggagtgggtaatgcctcaggaaattggcattgcgattccacatggctgggcgacagagtcatcaccaccagcaccagaacctgggccctccccacctacaacaaccacctctacaagcaaatctccagcagcagctcaggagccaccaatgacaaccactacttcggctacagcaccccctgggggtattttgactttaacagattccactgccacttctcaccacgtgactggcagcgactcatcaacaacaactggggattccggcccaagaagctgcggttcaagctcttcaacatccaggtcaaggaggtcacaacgaatgacggcgtcacgaccatcgctaataaccttaccagcacggttcaggtcttctcggactcggaataccagctgccgtacgtcctcggctctgcgcaccagggctgcctgcctccgttcccggcggacgtcttcatgattcctcagtacggctacctgactctgaacaacggcagccaatcggtgggccgttcctccttctactgcctggaatatttcccctctcaaatgctgagaacgggcaacaactttgagttcagttacagcttcgaggacgtgcctttccacagcagctacgcgcacagccagagcctagaccggctgatgaaccctctcatcgaccagtacctgtactacctggcccggacccagagcaccacgggttccaccagggaactgcaatttcatcaagctgggcccaatactatggccgagcagtcaaagaactggctgcctggaccctgctataggcaacagggactgtcaaagaacttggactttaacaacaacagcaattttgcctggactgctgccactaaatatcatctgaatggcagaaactctttgaccaatcctggcattcccatggcaaccaacaaggatgatgaggaccagttctttcccatcaacggggtactggtttttggcaagacgggagctgccaacaaaactacgctggaaaacgttctgatgaccagcgaggaggagatcaagaccactaaccctgtggctacagaagaatacggtgtggtctccagcaacctgcagccgtctacagccgggcctcaatcacagactatcaacagccagggagcactgcctggcatggtctggcagaaccgggacgtgtatctgcagggtcccatctgggccaaaattcctcacacggatggcaactttcacccgtctcctctgatgggcggttttggactcaaacacccgcctccacagatcctgatcaaaaacacacctgtacctgctaatcctccggaggtgtttactcctgccaagtttgcctccttcatcacgcagtacagcaccggacaagtcagcgtggaaatcgagtgggagctgcagaaagaaaacagcaagcgctggaacccagaaattcagtatacttccaattatgccaagtctaataatgttgaatttgctgtgaaccctgatggtgtttatactgagcctcgccccattggcactcgttacctcccccgtaatctgtaattgcttgttaatcaataaaccggttgattcgtttcagttgaactttggtctctgcgaagggcgaattc

SEQ ID NO: 438 - protein, 1458 aa, Artificial Sequence
  source: /note="Description of Artificial Sequence: Synthetic polypeptide"
MAADGYLPDWLEDNLSEGIREWWDLKPGAPKPKANQQKQDDGRGLVLPGYKYLGPFNGLDKGEPVNAADAAALEHDKAYDQQLKAGDNPYLRYNHADAEFQERLQEDTSFGGNLGRAVFQAKKRVLEPLGLVEEGAKTAPGKKRPIDSPDSSTGIGKKGQQPAKKKLNFGQTGDSESVPDPQPLGEPPAAPSSVGSGTMAAGGGAPTADNNEGADGVGNASGNWHCDSTWLGDRVITTSTRTWALPTYNNHLYKQISSSSSGATNDNHYFGYSTPWGYFDFNRFHCHFSPRDWQRLINNNWGFRPKKLRFKLFNIQVKEVTTNDGVTTIANNLTSTVQVFSDSEYQLPYVLGSAHQGCLPPFPADVFMIPQYGYLTLNNGSQSVGRSSFYCLEYFPSQMLRTGNNFEFSYSFEDVPFHSSYAHSQSLDRLMNPLIDQYLYYLARTQSTTGSTRELQFHQAGPNTMAEQSKNWLPGPCYRQQRLSKNLDFNNNSNFAWTAATKYHLNGRNSLTNPGIPMATNKDDEDQFFPINGVLVFGKTGAANKTTLENVLMTSEEEIKTTNPVATEEYGVVSSNLQSSTAGPQSQTINSQGALPGMVWQNRDVYLQGPIWAKIPHTDGNFHPSPLMGGFGLEHPPPQILIKNTPVPANPPEVFTPAKFASFITQYSTGQVSVEIEWELQKENSKRWNPEIQYTSNYAKSNNVEFAVNPDGVYTEPRPIGTRYLTRNLMAADGYLPDWLEDNLSEGIREWWDLKPGAPKPKANQQKQDDGRGLVLPGYKYLGPFNGLDKGEPVNAADAAALEHDKAYDQQLKAGDNPYLRYNHADAEFQERLQEDTSFGGNLGRAVFQAKKRVLEPLGLVEEGAKTAPGKKRPIGSPDSSTGIGKKGQQPAKKKLNFGQTGDSESVPDPQPLGEPPAAPSSVGSGTMAAGGGAPMADNNEGADGVGNASGNWHCDSTWLGDRVITTSTRTWALPTYNNHLYKQISSSSSGATNDNHYFGYSTPWGYFDFNRFHCHFSPRDWQRLINNNWGFRPKKLRFKLLNIQVKEVTTNDGVTTIANNLTSTVQVFSDSEYQLPYVLGSAHQGCLPPFPADVFMIPQYGYLTLDNGSQSVGRSSFYCLEYFPSQMLRTGNNFEFSYSFEDVPFHSSYAHSQSLDRLMNPLIDQYLYYLARTQSTTGSTRELQFHQAGPNTMAEQSKNWLPGPCYRQQRLSKNLDFNNNSNFAWTAATKYHLNGRNSLTNPGIPMATNKDDEDQFFPINGVLVFGKTGAANKTTLENVLMTSEEEIKTTNPVATEEYGVVSSNLQSSTAGPQSQTINSQGALPGMVWQNRDVYLQGPIWAKIPHTDGNFHPSPLMGGFGLKHPPPQILIKNTPVPANPPEVFTPAKFASFITQYSTGQVSVEIEWELQKENSKRWNPEIQYTSNYAKSNNVEFAVNPDGVYTEPRPIGTRYLTRNL

SEQ ID NO: 439 - DNA, 3095 bp, Artificial Sequence
  source: /note="Description of Artificial Sequence: Synthetic polynucleotide"
gaattcgcccttcgcagagaccaaagttcaactgaaacgaatcaaccggtttattgattaacaagcaattacagattacgggtgaggtaacgagtgccaatggggcgaggctcagtataaacaccatcagggttcacagcaaattcaacattattagacttggcataattggaagtatactgaatttctgggttccagcgcttgctgttttctttctgcagctcccactcgatttccacgctgacttgtccggtgctgtactgcgtgatgaaggaggcaaacttggcaggagtaaacacctccggaggattagcaggtacaggtgtgtttttgatcaggatctgtggaggcgggtgtttgagtccaaaaccgcccatcagaggagacgggtgaaagttgccatccgtgtgaggaattttggcccagatgggaccctgcagatacacgtcccggttctgccagaccatgccaggcagtgctccctggctgttgatagtctgtgattgaggcccggctgtagacgactgcaggttgctggagaccacaccgtattcttctgtagccacagggttagtggtcttgatctcctcctcgctggtcatcagaacgttttccagcgtagttttgttggcagctcccgtcttgccaaaaaccagtaccccgttgatgggaaagaactggtcctcatcatccttgttggttgccatgggaatgccaggattggtcaaagagtttctgccattcagatgatatttagtggcagcagtccaggcaaaattgctgttgttgttaaagtccaagttctttgacagtctctgttgcctatagcagggtccaggcagccagttctttgactgctcggccatagtattgggcccagcttgatgaaattgcagttccctggtggaacccgtggtgctctgggtccgggccaggtagtacaggtactggtcgatgagagggttcatcagccggtctaggctctggctgtgcgcgtagctgctgtggaaaggcacgtcctcgaagctgtaactgaactcaaagttgttgcccgttctcagcatttgagaggggaaatattccaggcagtagaaggaggaacggcccaccgattggctgccgttgtccagagtcaggtagccgtactgaggaatcatgaagacgtccgccgggaacggaggcaggcagccctggtgcgcagagccgaggacgtacggcagctggtattccgagtccgagaagacctgaaccgtgctggtaaggttattagcgatggtcgtgacgccgtcattcgttgtgacctccttgacctggatgttgaggagcttgaaccgcagcttcttgggccggaatccccagttgttgttgatgagtcgctgccagtcacgtggtgagaagtggcagtggaatctgttaaagtcaaaatacccccagggggtgctgtagccgaagtagtggttgtcattggtggctcctgagctgctgctggagatttgcttgtagaggtggttgttgtaggtggggagggcccaggttctggtgctggtggtgatgactctgtcgcccagccatgtggaatcgcaatgccaatttcctgaggcattacccactccgtcggcaccttcgttattgtctgccattggtgcgccaccgcctgcagccattgtaccagatcccacactagagggcgctgctggaggttctccaagaggttgagggtcggggactgactctgagtcgccagtctgaccaaaattgagcttctttttagcgggctgctggccttttttgccgatgcccgtggaggagtctggagagcctatgggtctcttctttccaggagccgtcttagcgccttcctcaaccagaccgagaggttcgagaacccgcttcttggcctggaagactgctcgcccgaggttgcccccaaatgacgtatcttcttgcagacgctcctgaaactcggcgtcggcgtggttataccgcaggtacggattgtcacccgctttgagctgctggtcgtaggccttgtcgtgctcgagggccgctgcgtccgccgcgttgacgggctcccccttgtcgagtccgttgaagggtccgaggtacttgtagccaggaagcaccagaccccggccgtcgtcctgcttttgctggttggctttgggtttcggggctccaggtttcaggtcccaccactcgcgaatgccctcagagaggttgtcctcgagccaatctggaagataaccatcggcagccatacctggtttaagtcatttattgctcagaaacacagtcgtccaggtccacgttgaccaggtcgcaggccgagcaagcaatctcgggtgcccgccccagcagatgatgaatcgcacacagcttccgatacgtcttttttctgacgaccggttgagattctgacacgccggggaaacattctaaacagtctctgaccccgtgcgtgaagcaaatgttgaaattctgattcattctctcgcacgttttgcagggaaacagcacctgaagcatgcccgcgtgacgagaacatttgttttggtacctgtcggcaaagtccaccggagctccttccgcgtctgacgtcgatgggtccgtgactgagggacgggcccgcttgggctcgcttatatccgcgtcatcgggggcgggtcttttgctggctccgccctttctgacgtagaactcatgcgtcacctcagtcacgtgatcactagcccagcggaagaactctttgacttcctgctttgtcaccttgccaaagtcgtgttccagacggcgggtgagttcaaatttgaacatccggtcctgcaacggttgctggtgctcgaaggtggtgctgttcccgtcgatcacggcgcacatgttggtgttggaggtgacgatcacgggggtgggatcgatctgggcggacgacttgcacttttggtccacgcgcaccttgctgccgccgagaatggccttggcggactccacgaccttggccgtcatcttgccctcctcccaccagatcaccatcttgtcgacgcaatcgttgaagggaaagttctcattggtccagttgacgcagcaagggcgaattc

SEQ ID NO: 440 - DNA, 3095 bp, Artificial Sequence
  source: /note="Description of Artificial Sequence: Synthetic polynucleotide"
gaattcgcccttcgcagagaccaaagttcaactgaaacgaatcaaccggtttattgattaacaagcaattacagattacgggtgaggtaacgagtgccaatggggcgaggctcagtataaacaccatcagggttcacagcaaattcaacattattagacttggcataattggaagtatactgaatttctgggttccagcgcttgctgttttctttctgcagctcccactcgatttccacgctgacttgtccggtgctgtactgcgtgatgaaggaggcaaacttggcaggagtaaacacctccggaggattagcaggtacaggtgtgtttttgatcaggatctgtggaggcgggtgttcgagtccaaaaccgcccatcagaggagacgggtgaaagttgccatccgtgtgaggaattttggcccagatgggaccctgcagatacacgtcccggttctgccagaccatgccaggcagtgctccctggctgttgatagtctgtgattgaggcccggctgtagacgactgcaggttgctggagaccacaccgtattcttctgtagccacagggttagtggtcttgatctcctcctcgctggtcatcagaacgttttccagcgtagttttgttggcagctcccgtcttgccaaaaaccagtaccccgttgatgggaaagaactggtcctcatcatccttgttggttgccatgggaatgccaggattggtcaaagagtttctgccattcagatgatatttagtggcagcagtccaggcaaaattgctgttgttgttaaagtccaagttctttgacagtctctgttgcctatagcagggtccaggcagccagttctttgactgctcggccatagtattgggcccagcttgatgaaattgcagttccctggtggaacccgtggtgctctgggtccgggccaggtagtacaggtactggtcgatgagagggttcatcagccggtctaggctctggctgtgcgcgtagctgctgtggaaaggcacgtcctcgaagctgtaactgaactcaaagttgttgcccgttctcagcatttgagaggggaaatattccaggcagtagaaggaggaacggcccaccgattggctgccgttgttcagagtcaggtagccgtactgaggaatcatgaagacgtccgccgggaacggaggcaggcagccctggtgcgcagagccgaggacgtacggcagctggtattccgagtccgagaagacctgaaccgtgctggtaaggttattagcgatggtcgtgacgccgtcattcgttgtgacctccttgacctggatgttgaagagcttgaaccgcagcttcttgggccggaatccccagttgttgttgatgagtcgctgccagtcacgtggtgagaagtggcagtggaatctgttaaagtcaaaatacccccagggggtgctgtagccgaagtagtggttgtcattggtggctcctgagctgctgctggagatttgcttgtagaggtggttgttgtaggtggggagggcccaggttctggtgctggtggtgatgactctgtcgcccagccatgtggaatcgcaatgccaatttcctgaggcattacccactccgtcggcaccttcgttattgtctgccgttggtgcgccaccgcctgcagccattgtaccagatcccacactagagggcgctgctggaggttctccaagaggttgagggtcggggactgactctgagtcgccagtctgaccaaaattgagcttctttttagcgggctgctggccttttttgccgatgcccgtggaggagtctggagagtctatgggtctcttctttccaggagccgtcttagcgccttcctcaaccagaccgagaggttcgagaacccgcttcttggcctggaagactgctcgcccgaggttgcccccaaatgacgtatcttcttgcaggcgctcctgaaactcggcgtcggcgtggttataccgcaggtacggattgtcacccgctttgagctgctggtcgtaggccttgtcgtgctcgagggccgctgcgtccgccgcgttgacgggctcccccttgtcgagtccgttgaagggtccgaggtacttgtagccaggaagcaccagaccccggccgtcgtcctgcttttgctggttggctttgggtttcggggctccaggtttcaggtcccaccactcgcgaatgccctcagagaggttgtcctcgagccaatctggaagataaccatcggcagccatacctggtttaagccatttattgctcagaaacacagtcgtccaggtccacgttgaccaggtcgcaggccgagcaggcaatctcgggtgcccgccccagcagatgatgaatcgcacacagcttccgatacgtcttttttctgacgaccggttgagattctgacacgccggggaaacattctaaacagtctctgaccccgtgcgtgaagcaaatgttgaaattctgattcattctctcgcacgttttgcagggaaacagcatctgaagcatgcccgcgtggcgagaacatttgttttggtacctgtcggcaaagtccaccggagctccttccgcgtctgacgtcgatgggtccgtgactgagggacaggcccgcttgggctcgcttatatccgcgtcatcgggggcgggtcttttgctggctccgccctttctgacgtagaactcatgcgtcacctcagtcacgtgatcactagcccagcggaagaactctttgacttcctgctttgtcaccttgccaaagtcgtgttccagacggcgggtgagttcaaatttgaacatccggtcctgcaacggctgctggtgctcgaaggtggtgctgttcccgtcgatcacggcgcgcatgttggtgttggaggtgacgatcacgggggtgggatcgatctgggcggacgacttgcacttttggtccacgcgcaccttgctgccgccgagaatggccttggcggactccacgaccttggccgtcatcttgccctcctcccaccagatcaccatcttgtcgacgcaatcgttgaagggaaagttctcattggtccagttgacgcagcaagggcgaattc

SEQ ID NO: 441 - protein, 729 aa, Artificial Sequence; identical to SEQ ID NO: 169
  source: /note="Description of Artificial Sequence: Synthetic polypeptide"

SEQ ID NO: 442 - protein, 729 aa, Artificial Sequence
  source: /note="Description of Artificial Sequence: Synthetic polypeptide"
MAADGYLPDWLEDNLSEGIREWWDLKPGAPKPKANQQKQDDGRGLVLPGYKYLGPFNGLDKGEPVNAADAAALEHDKAYDQQLKAGDNPYLRYNHADAEFQERLQEDTSFGGNLGRAVFQAKKRVLEPLGLVEEGAKTAPGKKRPIDSPDSSTGIGKKGQQPAKKKLNFGQTGDSESVPDPQPLGEPPAAPSSVGSGTMAAGGGAPTADNNEGADGVGNASGNWHCDSTWLGDRVITTSTRTWALPTYNNHLYKQISSSSSGATNDNHYFGYSTPWGYFDFNRFHCHFSPRDWQRLINNNWGFRPKKLRFKLFNIQVKEVTTNDGVTTIANNLTSTVQVFSDSEYQLPYVLGSAHQGCLPPFPADVFMIPQYGYLTLNNGSQSVGRSSFYCLEYFPSQMLRTGNNFEFSYSFEDVPFHSSYAHSQSLDRLMNPLIDQYLYYLARTQSTTGSTRELQFHQAGPNTMAEQSKNWLPGPCYRQQRLSKNLDFNNNSNFAWTAATKYHLNGRNSLTNPGIPMATNKDDEDQFFPINGVLVFGKTGAANKTTLENVLMTSEEEIKTTNPVATEEYGVVSSNLQSSTAGPQSQTINSQGALPGMVWQNRDVYLQGPIWAKIPHTDGNFHPSPLMGGFGLKHPPPQILIKNTPVPANPPEVFTPAKFASFITQYSTGQVSVEIEWELQKENSKRWNPEIQYTSNYAKSNNVEFAVNPDGVYTEPRPIGTRYLTRNL

SEQ ID NO: 443 - protein, 729 aa, Artificial Sequence
  source: /note="Description of Artificial Sequence: Synthetic polypeptide"
MAADGYLPDWLEDNLSEGIREWWDLKPGAPKPKANQQKQDDGRGLVLPGYKYLGPFNGLDKGEPVNAADAAALEHDKAYDQQLKAGDNPYLRYNHADAEFQERLQEDTSFGGNLGRAVFQAKKRVLEPLGLVEEGAKTAPGKKRPIDSPDSSTGIGKKGQQPAKKKLNFGQTGDSESVPDPQPLGEPPAAPSSVGSGTMAAGGGAPMADNNEGADGVGNASGNWHCDSTWLGDRVITTSTRTWALPTYNNHLYKQISSSSSGATNDNHYFGYSTPWGYFDFNRFHCHFSPRDWQRLINNNWGFRPKKLRFKLFNIQVKEVTTNDGVTTIANNLTSTVQVFSDSEYQLPYVLGSAHQGCLPPFPADVFMIPQYGYLTLNNGSQSVGRSSFYCLEYFPSQMLRTGNNFEFSYSFEDVPFHSSYAHSQSLDRLMNPLIDQYLYYLARTQSTTGSTRELQFHQAGPNTMAEQSKNWLPGPCYRQQRLSKNLDFNNNSNFAWTAATKYHLNGRNSLTNPGIPMATNKDDEDQFFPINGVLVFGKTGAANKTTLENVLMTSEEEIKTTNPVATEEYGVVSSNLQSSTAGPQSQTINSQGALPGMVWQNRDVYLQGPIWAKIPHTDGNFHPSPLMGGFGLKHPPPQILIKNTPVPANPPEVFTPAKFASFITQYSTGQVSVEIEWELQKENSKRWNPEIQYTSNYAKSNNVEFAVNPDGVYTEPRPIGTRYLTRNL

SEQ ID NO: 444 - DNA, 2217 bp, Artificial Sequence
  source: /note="Description of Artificial Sequence: Synthetic polynucleotide"
atggctgctgacggttatcttccagattggctcgaggacaacctctctgagggcattcgcgagtggtgggacctgaaacctggagcccccaagcccaaggccaaccagcagaagcaggacgacggccggggtctggtgcttcctggctacaagtacctcggacccttcaacggactcgacaagggggagcccgtcaacgcggcggacgcagcggccctcgagcacgacaaggcctacgaccagcagctcaaagcgggtgacaatccgtacctgcggtataaccacgccgacgccgagtttcaggagcgtctacaagaagatacgtcttttgggggcaacctcgggcgagcagtcttccaggccaagaagcgggttctcgaacctctcggtctggttgaggaagctgctaagacggctcctggaaagaagagaccggtagaaccgtcacctcagcgttcccccgactcctccacgggcatcggcaagaaaggccagcggcccgctaaaaagagactgaactttggtcagactggcgactcagagtcagtccccgaccctcaaccaatcggagaaccaccagcaggcccctctggtctgggatctggtacaatggctgcaggcggtggcgctccaatggcagacaataacgaaggcgccgacggagtgggtagttcctcaggaaattggcattgcgattccacatggctgggcgacagagtcatcaccaccagcacccgaacctgggccctgcccacctacaacaaccacctctacaagcaaatatccaatgggacatcgggaggaagcaccaacgacaacacctacttcggctacagcaccccctgggggtattttgacttcaacagattccactgccacttctcaccacgtgactggcagcgactcatcaacaacaactggggattccggccaaaaagactcagcttcaagcccttcaacatccaggtcaaggaggtcacgcagaatgaaggcaccaagaccatcgccaataaccttaccagcacgattcaggtatttacggactcggaataccagctgccgtacgtcctcggctccgcgcaccagggctgcctgcctccgttcccggcggacgtcttcatgattccccagtacggctaccttacactgaacaatggaagtcaagccgtaggccgttcctccttctactgcctggaatattttccatctcaaatgctgcgaactggaaacaattttgaattcagctacaccttcgaggacgtgcctttccacagcagctacgcacacagccagagcttggaccgactgatgaatcctctcatcgaccagtacctgcactacttatccagaactcagtccacaggaggaactcaaggtacccagcaattgttattttctcaagctgggcctgcaaacatgtcggctcaggctaagaactggctacctggaccttgctaccggcagcagcgagtctctacgacactgtcgcaaaacaacaacagcaactttgcttggactggtgccaccaaatatcacctgaacggaagagactctttggtaaatcccggtgtcgccatggcaacccacaaggacgacgaggaacgcttcttcccgtcgagtggagtcctgatgtttggaaaacagggtgctggaagagacaatgtggactacagcagcgttatgctaaccagcgaagaagaaattaaaaccactaaccctgtagccacagaacaatacggtgtggtggctgacaacttgcagcaaaccaatacagggcctattgtgggaaatgtcaacagccaaggagccttacctggcatggtctggcagaaccgagacgtgtacctgcagggtcccatctgggccaagattcctcacacggacggcaacttccacccttcaccgctaatgggaggatttggactgaagcacccacctcctcagatcctgatcaagaacacgccggtacctgcggatcctccaacaacgttcagccaggcgaaattggcttccttcattacgcagtacagcaccggacaggtcagcgtggaaatcgagtgggagctgcagaaggagaacagcaaacgctggaacccagagattcagtacacttcaaactactacaaatctacaaatgtggactttgctgtcaatacagagggaacttattctgagcctcgccccattggtactcgctacctcacccgtaatctgtaa

SEQ ID NO: 445 - protein, 738 aa, Artificial Sequence
  source: /note="Description of Artificial Sequence: Synthetic polypeptide"
MAADGYLPDWLEDNLSEGIREWWDLKPGAPKPKANQQKQDDGRGLVLPGYKYLGPFNGLDKGEPVNAADAAALEHDKAYDQQLKAGDNPYLRYNHADAEFQERLQEDTSFGGNLGRAVFQAKKRVLEPLGLVEEAAKTAPGKKRPVEPSPQRSPDSSTGIGKKGQRPAKKRLNFGQTGDSESVPDPQPIGEPPAGPSGLGSGTMAAGGGAPMADNNEGADGVGSSSGNWHCDSTWLGDRVITTSTRTWALPTYNNHLYKQISNGTSGGSTNDNTYFGYSTPWGYFDFNRFHCHFSPRDWQRLINNNWGFRPKRLSFKPFNIQVKEVTQNEGTKTIANNLTSTIQVFTDSEYQLPYVLGSAHQGCLPPFPADVFMIPQYGYLTLNNGSQAVGRSSFYCLEYFPSQMLRTGNNFEFSYTFEDVPFHSSYAHSQSLDRLMNPLIDQYLHYLSRTQSTGGTQGTQQLLFSQAGPANMSAQAKNWLPGPCYRQQRVSTTLSQNNNSNFAWTGATKYHLNGRDSLVNPGVAMATHKDDEERFFPSSGVLMFGKQGAGRDNVDYSSVMLTSEEEIKTTNPVATEQYGVVADNLQQTNTGPIVGNVNSQGALPGMVWQNRDVYLQGPIWAKIPHTDGNFHPSPLMGGFGLKHPPPQILIKNTPVPADPPTTFSQAKLASFITQYSTGQVSVEIEWELQKENSKRWNPEIQYTSNYYKSTNVDFAVNTEGTYSEPRPIGTRYLTRNL

SEQ ID NO: 446 - DNA, 2217 bp, Artificial Sequence
  source: /note="Description of Artificial Sequence: Synthetic polynucleotide"
atggctgctgacggttatcttccagattggctcgaggacaacctctctgagggcattcgcgagtggtgggacctgaaacctggagcccccaagcccaaggccaaccagcagaagcaggacgacggccggggtctggtgcttcctggctacaagtacctcggacccttcaacggactcgacaagggggagcccgtcaacgcggcggacgcagcggccctcgagcacgacaaggcctacgaccagcagctcaaagcgggtgacaatccgtacctgcggtataaccacgccgacgccgagtttcaggagcgtctgcaagaagatacgtcttttgggggcaacctcgggcgagcagtcttccaggccaagaagcgggttctcgaacctctcggtctggttgaggaagctgctaagacggctcctggaaagaagagaccggtagaaccgtcacctcagcgttcccccgactcctccacgggcatcggcaagaaaggccagcagcccgctaaaaagagactgaactttggtcagactggcgactcagagtcagtccccgaccctcaaccaatcggagaaccaccagcaggcccctctggtctgggatctggtacaatggctgcaggcggtggcgctccaatggcagacaataacgaaggcgccgacggagtgggtagttcctcaggaaattggcattgcgattccacatggctgggcgacagagtcatcaccaccagcacccgaacctgggccctgcccacctacaacaaccacctctacaagcaaatatccaatgggacatcgggaggaagcaccaacgacaacacctacttcggctacagcaccccctgggggtattttgacttcaacagattccactgccacttctcaccacgtgactggcagcgactcatcaacaacaactggggattccggccaaaaagactcagcttcaagctcttcaacatccaggtcaaggaggtcacgcagaatgaaggcaccaagaccatcgccaataaccttaccagcacgattcaggtatttacggactcggaataccagctgccgtacgtcctcggctccgcgcaccagggctgcctgcctccgttcccggcggacgtcttcatgattccccagtacggctaccttacactgaacaatggaagtcaagccgtaggccgttcctccttctactgcctggaatattttccatctcaaatgctgcgaactggaaacaattttgaattcagctacaccttcgaggacgtgcctttccacagcagctacgcacacagccagagcttggaccgactgatgaatcctctcatcgaccagtacctgtactacttatccagaactcagtccacaggaggaactcaaggtacccagcaattgttattttctcaagctgggcctgcaaacatgtcggctcaggctaagaactggctacctggaccttgctaccggcagcagcgagtctctacgacactgtcgcaaaacaacaacagcaactttgcttggactggtgccaccaaatatcacctgaacggaagagactctttggtaaatcccggtgtcgccatggcaacccacaaggacgacgaggaacgcttcttcccgtcgagtggagtcctgatgtttggaaaacagggtgctggaagagacaatgtggactacagcagcgttatgctaaccagcgaagaagaaattaaaaccactaaccctgtagccacagaacaatacggtgtggtggctgataacttgcagcaaaccaatacggggcctattgtgggaaatgtcaacagccaaggagccttacctggcatggtctggcagaaccgagacgtgtacctgcagggtcccatctgggccaagattcctcacacggacggcaacttccacccttcaccgctaatgggaggatttggactgaagcacccacctcctcagatcctgatcaagaacacgccggtacctgcggatcctccaacaacgttcagccaggcgaaattggcttccttcattacgcagtacagcaccggacaggtcagcgtggaaatcgagtgggagctgcagaaggagaacagcaaacgctggaacccagagattcagtacacttcaaactactacaaatctacaaatgtggactttgctgtcaatacagagggaacttattctgagcctcgccccattggtactcgttacctcacccgtaatctgtaa

SEQ ID NO: 447 - protein, 738 aa, Artificial Sequence; identical to SEQ ID NO: 99
  source: /note="Description of Artificial Sequence: Synthetic polypeptide"

SEQ ID NO: 448 - protein, 738 aa, Artificial Sequence
  source: /note="Description of Artificial Sequence: Synthetic polypeptide"
MAADGYLPDWLEDNLSEGIREWWDLKPGAPKPKANQQKQDDGRGLVLPGYKYLGPFNGLDKGEPVNAADAAALEHDKAYDQQLKAGDNPYLRYNHADAEFQERLQEDTSFGGNLGRAVFQAKKRVLEPLGLVEEAAKTAPGKKRPVEPSPQRSPDSSTGIGKKGQQPAKKRLNFGQTGDSESVPDPQPIGEPPAGPSGLGSGTMAAGGGAPMADNNEGADGVGSSSGNWHCDSTWLGDRVITTSTRTWALPTYNNHLYKQISNGTSGGSTNDNTYFGYSTPWGYFDFNRFHCHFSPRDWQRLINNNWGFRPKRLSFKLFNIQVKEVTQDEGTKTIANNLTSTIQVFTDSEYQLPYVLGSAHQGCLPPFPADVFMIPQYGYLTLNNGSQAVGRSSFYCLEYFPSQMLRTGNNFEFSYTFEDVPFHSSYAHSQSLDRLMNPLIDQYLYYLSRTQSTGGTQGTQQLLFSQAGPANMSARAKNWLPGPCYRQQRVSTTLSQNNNSNFAWTGATKYHLNGRDSLVNPGVAMATHKDDEERFFPSSGVLMFGKQGAGRDNVDYSSVMLTSEEEIKTTNPVATEQYGVVADNLQQANTGPIVGNVNSQGALPGMVWQNRDVYLQGPIWAKIPHTDGNFHPSPLMGGFGLKHPPPQILIKNTPVPADPPTTFSQAKLASFITQYSTGQVSVEIEWELQKENSKRWNPEIQYTSNYYKSTNVDFAVNSEGTYSEPRPIGTRYLTRNL

SEQ ID NO: 449 - DNA, 2217 bp, Artificial Sequence
  source: /note="Description of Artificial Sequence: Synthetic polynucleotide"
atggctgctgacggttatcttccagattggctcgaggacaacctctctgagggcattcgcgagtggtgggacctgaaacctggagcccccaagcccaaggccaaccagcagaagcaggacgacggccggggtctggtgcttcctggctacaagtacctcggacccttcaacggactcgacaagggggagcccgtcaacgcggcggacgcagcggccctcgagcacgacaaggcctacgaccagcagctcaaagcgggtgacaatccgtacctgcggtataaccacgccgacgccgagtttcaggagcgtctgcaagaagatacgtcttttgggggcaacctcgggcgagcagtcttccaggccaagaagcgggttctcgaacctctcggtctggttgaggaagctgctaagacggctcctggaaagaagagaccggtagaaccgtcacctcagcgttcccccgactcctccacgggcatcggcaagaaaggccagcagcccgctaaaaagagactgaactttggtcagactggcgactcagagtcagtccccgaccctcaaccaatcggagaaccaccagcaggcccctctggtctgggatctggtacaatggctgcaggcggtggcgctccaatggcagacaataacgaaggcgccgacggagtgggtagttcctcaggaaattggcattgcgattccacatggctgggcgacagagtcatcaccaccagcacccgaacctgggccctgcccacctacaacaaccacctctacaagcaaatatccaatgggacatcgggaggaagcaccaacgacaacacctacttcggctacagcaccccctgggggtattttgacttcaacagattccactgccacttctcaccacgtgactggcagcgactcatcaacaacaactggggattccggccaaaaagactcagcttcaagctcttcaacatccaggtcaaggaggtcacgcaggatgaaggcaccaagaccatcgccaataaccttaccagcacgattcaggtatttacggactcggaataccagctgccgtacgtcctcggctccgcgcaccagggctgcctgcctccgttcccggcggacgtcttcatgattccccagtacggctaccttacactgaacaatggaagtcaagccgtaggccgttcctccttctactgcctggaatattttccatctcaaatgctgcgaactggaaacaattttgaattcagctacaccttcgaggacgtgcctttccacagcagctacgcacacagccagagcttggaccgactgatgaatcctctcatcgaccagtacctgtactacttatccagaactcagtccacaggaggaactcaaggtacccagcaattgttattttctcaagctgggcctgcaaacatgtcggctcgggctaagaactggctacctggaccttgctaccggcagcagcgagtctctacgacactgtcgcaaaacaacaacagcaactttgcttggactggtgccaccaaatatcacctgaacggaagagactctttggtaaatcccggtgttgctatggcaacgcataaggacgacgaggaacgtttctttccatcgagcggagtcctgatgtttggaaaacagggtgctggaagagacaatgtggactatagcagcgttatgctaaccagcgaggaagaaattaaaaccactaaccctgtagccacagaacaatacggtgtggtggctgacaacttgcagcaagccaatacagggcctattgtgggaaatgtcaacagccaaggagccttacctggcatggtctggcagaaccgagacgtgtacctgcagggtcccatctgggccaaaattcctcacacggacggcaattttcacccgtctcctctgatgggcggctttggactgaagcacccacctccccagatcctgatcaagaatacgccggtacctgcggatcctccaacgacgttcagccaggcaaaattggcttccttcatcacgcagtacagcaccggccaggtcagcgtggagatcgagtgggagctgcagaaggagaacagcaagcgatggaacccagaaattcagtacacttccaactactacaaatctacaaatgtggactttgctgtcaattctgagggtacatattcagagcctcgccccattggtactcgttatctgacacgtaatctgtaa

SEQ ID NO: 450 - DNA, 2211 bp, Artificial Sequence
  source: /note="Description of Artificial Sequence: Synthetic polynucleotide"
atggctgccgatggttatcttccagattggctcgaggacaacctctctgagggcattcgcgagtggtgggacttgaaacctggagccccgaaacccaaagccaaccagcaaaagcaggacgacggccggggcctggtgcttcctggctacaagtacctcggacccttcaacggactcgacaagggggagcccgtcaacgcggcggacgcagcggccctcgagcacgacaaggcctacgaccagcagctcgaagcgggtgacaatccgtacctgcggtataaccacgccgacgccgagtttcaggagcgtctgcaagaagatacgtcttttgggggcaacctcgggcgagcagtcttccaggccaagaagcgggttctcgaacctctcggtctggttgaggaaggcgctaagacggctcctggaaagaagagaccagtagagcagtcaccccaagaaccagactcctcctcgggcatcggcaagaaaggccaacagcccgccagaaaaagactcaattttggccagactggcgactcagagtcagttccagaccctcaacctctcggagaacctccagcagcgccctctggtgtgggacctaatacaatggctgcaggcggtggcgcaccaatggcagacaataacgaaggcgccgacggagtgggtagttcctcgggaaattggcattgcgattccacatggctgggcgacagagtcatcaccaccagcacccgaacctgggccctgcccacctacaacaaccacctctacaagcaaatctccaacgggacatcgggaggagccaccaacgacaacacctacttcggctacagcaccccctgggggtattttgactttaacagattccactgccacttttcaccacgtgactggcagcgactcatcaacaacaactggggattccggcccaagagactcagcttcaagctcttcaacatccaggtcaaggaggtcacgcagaatgaaggcaccaagaccatcgccaataacctcaccagcaccatccaggtgtttacggactcggagtaccagctgccgtacgttctcggctctgcccaccagggctgcctgcctccgttcccggcggacgtgttcatgattccccagtacggctacctaacactcaacaacggtagtcaggccgtgggacgctcctccttctactgcctggaatactttccttcgcagatgctgagaaccggcaacaacttccagtttacttacaccttcgaggacgtgcctttccacagcagctacgcccacagccagagcttggaccggctgatgaatcctctgattgaccagtacctgtactacttgtctcggactcaaacaacaggaggcacggcaaatacgcagactctgggcttcagccaaggtgggcctaatacaatggccaatcaggcaaagaactggctgccaggaccctgttaccgccaacaacgcgtctcaacgacaaccgggcaaaacaacaatagcaactttgcctggactgctgggaccaaataccatctgaatggaagaaattcattggctaatcctggcatcgctatggcaacacacaaagacgacgaggagcgttttttcccagtaacgggatcctgtttttggcaacaaaatgctgccagagacaatgcggattacagcgatgtcatgctcaccagcgaggaagaaatcaaaaccactaaccctgtggctacagaggaatacggtatcgtggcagataacttgcagcagcaaaacacggctcctcaaattggaactgtcaacagccagggggccttacccggtatggtctggcagaaccgggacgtgtacctgcagggtcccatctgggccaagattcctcacacggacggcaacttccacccgtctccgctgatgggcggctttggcctgaaacatcctccgcctcagatcctgatcaagaacacgcctgtacctgcggatcctccgaccaccttcaaccagtcaaagctgaactctttcatcacgcaatacagcaccggacaggtcagcgtggaaattgaatgggagctacagaaggaaaacagcaagcgctggaaccccgagatccagtacacctccaactactacaaatctacaagtgtggactttgctgttaatacagaaggcgtgtactctgaaccccgccccattggcacccgttacctcacccgtaatctgtaa

SEQ ID NO: 451 - protein, 736 aa, Artificial Sequence
  source: /note="Description of Artificial Sequence: Synthetic polypeptide"
MAADGYLPDWLEDNLSEGIREWWDLKPGAPKPKANQQKQDDGRGLVLPGYKYLGPFNGLDKGEPVNAADAAALEHDKAYDQQLEAGDNPYLRYNHADAEFQERLQEDTSFGGNLGRAVFQAKKRVLEPLGLVEEGAKTAPGKKRPVEQSPQEPDSSSGIGKKGQQPARKRLNFGQTGDSESVPDPQPLGEPPAAPSGVGPNTMAAGGGAPMADNNEGADGVGSSSGNWHCDSTWLGDRVITTSTRTWALPTYNNHLYKQISNGTSGGATNDNTYFGYSTPWGYFDFNRFHCHFSPRDWQRLINNNWGFRPKRLSFKLFNIQVKEVTQNEGTKTIANNLTSTIQVFTDSEYQLPYVLGSAHQGCLPPFPADVFMIPQYGYLTLNNGSQAVGRSSFYCLEYFPSQMLRTGNNFQFTYTFEDVPFHSSYAHSQSLDRLMNPLIDQYLYYLSRTQTTGGTANTQTLGFSQGGPNTMANQAKNWLPGPCYRQQRVSTTTGQNNNSNFAWTAGTKYHLNGRNSLANPGIAMATHKDDEERFFPVTGSCFWQQNAARDNADYSDVMLTSEEEIKTTNPVATEEYGIVADNLQQQNTAPQIGTVNSQGALPGMVWQNRDVYLQGPIWAKIPHTDGNFHPSPLMGGFGLKHPPPQILIKNTPVPADPPTTFNQSKLNSFITQYSTGQVSVEIEWELQKENSKRWNPEIQYTSNYYKSTSVDFAVNTEGVYSEPRPIGTRYLTRNL

SEQ ID NO: 452 - DNA, 2214 bp, Artificial Sequence
  source: /note="Description of Artificial Sequence: Synthetic polynucleotide"
atggctgctgacggttatcttccagattggctcgaggacaacctctctgagggcattcgcgagtggtgggacctgaaacctggagcccccaagcccaaggccaaccagcagaagcaggacgacggccggggtctggtgcttcctggctacaagtacctcggacccttcaacggactcgacaagggggagcccgtcagcgcggcggacgcagcggccctcgagcacgacaaggcctgcgaccagcggctcaaagcgggtgacaatccgtacctgcggtataaccacgccgacgccgagtttcaggagcgtctgcaagaagatacgtcttttgggggcaacctcgggcgagcagtcttccaggccaagaagcgggttctcgaacctctcggtctggttgaggaagctgctaagacggctcctggaaagaagggaccggtagaaccgtcacctcagcgttcccccgactcctccacgggcatcggcaagaaaggccagcagcccgctagaaagagactgaactttgggcagactggcgactcagagtcagtccccgaccctcaaccaatcggagaaccaccagcaggcccctctggtctgggatctggtacaatggctgcaggcggtggcgcaccaatggctgacaataacgagggcgccgacggagtgggtaatgcctcaggaaattggcattgcgattccacatggctgggcgacagagtcatcaccaccagcacccgaacctgggctttgcccacctacaacaatcacctctacaagcaaatctccagtcagtcagcaggtagcaccaacgacaacgtctacttcggctacagcaccccctgggggtattttgacttcaacagattccactgtcacttctcaccacgtgactggcagcggctcatcaacaacaactggggattccggcccaagaagctcaacttcaagctgttcaacatccaggtcaaggaggtcacaacgaatgacggcgtcacgaccatcgccaataaccttaccagcacggttcaggtcttttcggactcggaataccagctgccctacgtcctcggctccgcacaccagggctgcctgcctccgttcccggcggacgtcttcatgattccccagtacggctacctgactctgaacaatggcagccaatcggtgggtcgttcctctttctactgcctggaatatttcccttctcaaatgctgagaacgggcaacaacttcaccttcagctacaccttcgaggacgttcccttccacagcagctacgcacacagccagagcctggaccggctgatgaatcctcttatcgaccagtacctgtattacctggccagaacacagagcaacgcaggaggcacagctggcaatcgggaactgcagttttatcagggcgggcctaccaccatggccgaacaagccaaaaactggctgcctggaccttgcttccggcaacaaagagtctccaagacgctggatcaaaacaacaacagcaactttgcttggactggtgccaccaaataccatctaaatggaagaaattcattggttaatcccggtgtcgccatggcaacccacaaggacgacgaggaacgcttcttcccttcgagcggagtcctgatttttggaaaaactggagcagctaataagactacactggaaaatgtgttaatgacaaatgaagaggaaattcgtcctaccaacccggtagccaccgaggaatacgggactgttagcagcaacctgcaggcggctaacactgcagcccagacacaagttgtcaacaaccagggagccttacctggtatggtctggcagaaccgggacgtgtacctgcagggtcccatctgggccaagattcctcacacggacggcaactttcacccgtctccgctgatgggcggctttggactgaagcatccgcctcctcagatcctgatcaaaaacactcctgttcctgctaatcccccggaggtgtttacgcctgccaagtttgcttctttcatcacacagtacagcaccggccaggtcagcgtggagatcgagtgggagctgcagaaggagaacagcaagcgctggaacccagagattcagtatacctccaattttgacgaacagactggtgtggactttgccgttgacagccagggtgtttattctgagcctcgccccattggtactcgttacctcacccgtaatctgtaa

SEQ ID NO: 453 - protein, 737 aa, Artificial Sequence
  source: /note="Description of Artificial Sequence: Synthetic polypeptide"
MAADGYLPDWLEDNLSEGIREWWDLKPGAPKPKANQQKQDDGRGLVLPGYKYLGPFNGLDKGEPVSAADAAALEHDKACDQRLKAGDNPYLRYNHADAEFQERLQEDTSFGGNLGRAVFQAKKRVLEPLGLVEEAAKTAPGKKGPVEPSPQRSPDSSTGIGKKGQQPARKRLNFGQTGDSESVPDPQPIGEPPAGPSGLGSGTMAAGGGAPMADNNEGADGVGNASGNWHCDSTWLGDRVITTSTRTWALPTYNNHLYKQISSQSAGSTNDNVYFGYSTPWGYFDFNRFHCHFSPRDWQRLINNNWGFRPKKLNFKLFNIQVKEVTTNDGVTTIANNLTSTVQVFSDSEYQLPYVLGSAHQGCLPPFPADVFMIPQYGYLTLNNGSQSVGRSSFYCLEYFPSQMLRTGNNFTFSYTFEDVPFHSSYAHSQSLDRLMNPLIDQYLYYLARTQSNAGGTAGNRELQFYQGGPTTMAEQAKNWLPGPCFRQQRVSKTLDQNNNSNFAWTGATKYHLNGRNSLVNPGVAMATHKDDEERFFPSSGVLIFGKTGAANKTTLENVLMTNEEEIRPTNPVATEEYGTVSSNLQAANTAAQTQVVNNQGALPGMVWQNRDVYLQGPIWAKIPHTDGNFHPSPLMGGFGLKHPPPQILIKNTPVPANPPEVFTPAKFASFITQYSTGQVSVEIEWELQKENSKRWNPEIQYTSNFDEQTGVDFAVDSQGVYSEPRPIGTRYLTRNL

SEQ ID NO: 454 - DNA, 2214 bp, Artificial Sequence
  source: /note="Description of Artificial Sequence: Synthetic polynucleotide"
atggctgccgatggttatcttccagattggctcgaggacaacctctctgagggcattcgcgagtggtgggacctgaaacctggagccccgaaacccaaagccaaccagcaaaagcaggacgacggccggggtctggtgcttcctggctacaagtacctcggacccttcaacggactcgacaagggggagcccgtcaacgcggcggacgcagcggccctcgagcacgacaaggcctacgaccagcagctcaaagcgggtgacaatccgtacctgcggtataaccacgccgacgccgagtttcaggagcgtctgcaagaagatacgtcttttgggggcaacctcgggcgagcagtcttccaggccaagaagcgggttctcgaacctctcggtctggttgaggaagctgctaagacggctcctggaaagaagagaccggtagaaccgtcacctcagcgttcccccgactcctccacgggcatcggcaagaaaggccagcagcccgctagaaagagactgaactttgggcagactggcgactcagagtcagtccccgaccctcaaccaatcggagaaccaccagcaggcccctctggtctgggatctggtacaatggctgcaggcggtggcgctccaatggcagacaataacgaaggcgccgacggagtgggtaatgcctcaggaaattggcattgcgattccacatggctgggcgacagagtcatcaccaccagcacccgaacctgggctttgcccacctacaacaaccacctctacaagcaaatctccagtcagtcagcaggtagcaccaacgacaacgtctacttcggctacagcaccccctgggggtattttgacttcaacagattccactgtcacttctcaccacgtgactggcagcggctcatcaacaacaactggggattccggcccaagaagctcaacttcaagctgttcaacatccaggtcaaggaggtcacaacgaatgacggcgtcacgaccatcgccaataaccttaccagcacggttcaggtcttttcggactcggaataccagctgccctacgtcctcggctccgcacaccagggctgcctgcctccgttcccggcggacgtcttcatgattcctcagtacggctacctgactctcaacaacggtagtcaggccgtgggacgttcctccttctactgcctggagtacttcccctctcagatgctgagaacgggcaacaacttttccttcagctacactttcgaggacgtgcctttccacagcagctacgcgcacagccagagtttggacaggctgatgaatcctctcatcgaccagtacctgtactacctgtcaagaacccagtctacgggaggcacagcgggaacccagcagttgctgttttctcaggccgggcctagcaacatgtcgactcaggccagaaactggctgcctggaccctgctacagacagcagcgcgtctccacgacactgtcgcaaaacaacaacagcaactttgcctggactggtgccaccaagtatcatctgaacggcagagactctctggtgaatccgggcgtcgccatggcaaccaacaaggacgacgaggaccgcttcttcccatccagcggcatcctcatgtttggcaagcagggagctggaaaagacaacgtggactatagcaacgtgatgctaaccagcgaggaagaaatcaagaccaccaaccccgtggccacagaacagtatggcgtggtggctgataacctacagcagcaaaacaccgctcctattgtgggggccgtcaacagccagggagccttacctggcatggtctggcagaaccgggacgtgtacctgcagggtcctatttgggccaagattcctcacacagatggcaactttcacccgtctcctttaatgggcggctttggacttaaacatccgcctcctcagatccttatcaaaaacactcctgttcctgcggatcctccaacagcgttcaaccaggccaagctgaattctttcatcacgcagtacagcaccggacaagtcagcgtggagatcgagtgggagctgcagaaggagaacagcaagcgctggaacccagagattcagtatacttccaactactacaaatctacaaatgtggactttgctgttaatactgagggtgcttactctgagcctcgccccattggcactcgttacctcacccgtaatctgtaa

SEQ ID NO: 455 - protein, 737 aa, Artificial Sequence
  source: /note="Description of Artificial Sequence: Synthetic polypeptide"
MAADGYLPDWLEDNLSEGIREWWDLKPGAPKPKANQQKQDDGRGLVLPGYKYLGPFNGLDKGEPVNAADAAALEHDKAYDQQLKAGDNPYLRYNHADAEFQERLQEDTSFGGNLGRAVFQAKKRVLEPLGLVEEAAKTAPGKKRPVEPSPQRSPDSSTGIGKKGQQPARKRLNFGQTGDSESVPDPQPIGEPPAGPSGLGSGTMAAGGGAPMADNNEGADGVGNASGNWHCDSTWLGDRVITTSTRTWALPTYNNHLYKQISSQSAGSTNDNVYFGYSTPWGYFDFNRFHCHFSPRDWQRLINNNWGFRPKKLNFKLFNIQVKEVTTNDGVTTIANNLTSTVQVFSDSEYQLPYVLGSAHQGCLPPFPADVFMIPQYGYLTLNNGSQAVGRSSFYCLEYFPSQMLRTGNNFSFSYTFEDVPFHSSYAHSQSLDRLMNPLIDQYLYYLSRTQSTGGTAGTQQLLFSQAGPSNMSTQARNWLPGPCYRQQRVSTTLSQNNNSNFAWTGATKYHLNGRDSLVNPGVAMATNKDDEDRFFPSSGILMFGKQGAGKDNVDYSNVMLTSEEEIKTTNPVATEQYGVVADNLQQQNTAPIVGAVNSQGALPGMVWQNRDVYLQGPIWAKIPHTDGNFHPSPLMGGFGLKHPPPQILIKNTPVPADPPTAFNQAKLNSFITQYSTGQVSVEIEWELQKENSKRWNPEIQYTSNYYKSTNVDFAVNTEGAYSEPRPIGTRYLTRNL

SEQ ID NO: 456 - DNA, 2217 bp, Artificial Sequence
  source: /note="Description of Artificial Sequence: Synthetic polynucleotide"
atggctgccgatggttatcttccagattggctcgaggacaacctctctgagggcattcgcgagtggtgggacctgaaacctggagccccgaaacccaaagccaaccagcaaaagcaggacgacggccggggtctggtgcttcctggctacaagtacctcggacccttcaacggactcgacaagggggagcccgtcaacgcggcggacgcagcggccctcgagcacgacaaggcctacgaccagcagctcaaagcgggtgacaatccgtacctgcggtataatcacgccgacgccgagtttcaggagcgtctgcaagaagatacgtcttttgggggcaacctcgggcgagcagtcttccaggccaagaagcgggttctcgaacctctcggtctggttgaggaaggcgctaagacggctcctggaaagaagagaccggtagagccgtcaccacagcgttcccccgactcctccacgggcatcggcaagaaaggccagcagcccgccagaaagagactcaatttcggtcagactggcgactcagagtcagtccccgaccctcaacctatcggagaacctccagcagcgccctctagtgtgggatctggtacaatggctgcaggcggtggcgcaccaatggcagacaataacgaaggtgccgacggagtgggtagttcctcgggaaattggcattgcgattccacatggctgggcgacagagtcatcaccaccagcacccgaacctgggccctgcccacctacaacaaccacctctacaagcaaatctccaacgggacctcgggaggcagcaccaacgacaacacctactttggctacagcaccccctgggggtattttgactttaacagattccactgccacttctcaccacgtgactggcagcgactcatcaacaacaactggggattccggcccaagagactcagcttcaagctcttcaacatccaggtcaaagaggtcacgcagaatgaaggcaccaagaccatcgccaataacctcaccagcaccatccaggtgtttacggactcggaataccagctgccgtacgtcctcggctctgcccaccagggctgcctgcctccgttcccggcggacgtcttcatgattcctcagtacggctacctgactctcaacaacggtagtcaggccgtgggacgttcctccttctactgcctggagtacttcccctctcagatgctgagaacgggcaacaacttttccttcagctacactttcgaggacgtgcctttccacagcagctacgcgcacagccagagtttggacaggctgatgaatcctctcatcgaccagtacctgtactacctgtcaagaacccagtctacgggaggcacagcgggaacccagcagttgctgttttctcaggccgggcctagcaacatgtcggctcaggccagaaactggctgcctggaccctgctacagacagcagcgcgtctccacgacactgtcgcaaaacaacaacagcaactttgcctggactggtgccaccaagtatcatctgaacggcagagactctctggtgaatccgggcgtcgccatggcaaccaacaaggacgacgaggaccgcttcttcccatccagcggcatcctcatgtttggcaagcagggagctggaaaagacaacgtggactatagcaacgtgatgctaaccagcgaggaagaaatcaaggccaccaaccccgtggccacagaacagtatggcgtggtggctgataacctacagcagcaaaacaccgctcctattgtgggggccgtcaacagccagggagccttacctggcatggtctggcagaaccgggacgtgtacctgcagggtcctatttgggccaagattcctcacacagatggcaactttcacccgtctcctttaatgggcggctttggacttaaacatccgcctcctcagatcctcatcaaaaacactcctgttcctgcggatcctccaacagcgttcaaccaggccaagctgaattctttcatcacgcagtacagcaccggacaagtcagcgtggagatcgagtgggagctgcagaaggagaacagcaagcgctggaacccagagattcagtatacttccaactactacaaatctacaaatgtggactttgctgttaatactgagggtgtttactctgagcctcgccccattggcactcgttacctcacccgtaatctgtaa

SEQ ID NO: 457 - protein, 738 aa, Artificial Sequence
  source: /note="Description of Artificial Sequence: Synthetic polypeptide"
MAADGYLPDWLEDNLSEGIREWWDLKPGAPKPKANQQKQDDGRGLVLPGYKYLGPFNGLDKGEPVNAADAAALEHDKAYDQQLKAGDNPYLRYNHADAEFQERLQEDTSFGGNLGRAVFQAKKRVLEPLGLVEEGAKTAPGKKRPVEPSPQRSPDSSTGIGKKGQQPARKRLNFGQTGDSESVPDPQPIGEPPAAPSSVGSGTMAAGGGAPMADNNEGADGVGSSSGNWHCDSTWLGDRVITTSTRTWALPTYNNHLYKQISNGTSGGSTNDNTYFGYSTPWGYFDFNRFHCHFSPRDWQRLINNNWGFRPKRLSFKLFNIQVKEVTQNEGTKTIANNLTSTIQVFTDSEYQLPYVLGSAHQGCLPPFPADVFMIPQYGYLTLNNGSQAVGRSSFYCLEYFPSQMLRTGNNFSFSYTFEDVPFHSSYAHSQSLDRLMNPLIDQYLYYLSRTQSTGGTAGTQQLLFSQAGPSNMSAQARNWLPGPCYRQQRVSTTLSQNNNSNFAWTGATKYHLNGRDSLVNPGVAMATNKDDEDRFFPSSGILMFGKQGAGKDNVDYSNVMLTSEEEIKATNPVATEQYGVVADNLQQQNTAPIVGAVNSQGALPGMVWQNRDVYLQGPIWAKIPHTDGNFHPSPLMGGFGLKHPPPQILIKNTPVPADPPTAFNQAKLNSFITQYSTGQVSVEIEWELQKENSKRWNPEIQYTSNYYKSTNVDFAVNTEGVYSEPRPIGTRYLTRNL

SEQ ID NO: 458 - DNA, 2217 bp, Artificial Sequence
  source: /note="Description of Artificial Sequence: Synthetic polynucleotide"
atggctgccgatggttatcttccagattggctcgaggacaacctctctgagggcattcgcgagtggtgggacctgaaacctggagccccgaaacccaaagccaaccagcaaaagcaggacgacggccggggtctggtgcttcctggctacaagcacctcggacccttcaacggactcgacaagggggagcccgtcaacgcggcggacgcagcggccctcgagcacgacaaggcctacgaccagcagctcaaagcgggtgacaatccgtacctgcggtataatcacgctgacgccgagtttcaggagcgtctgcaagaagatacgtcttttgggggcaacctcgggcgagcagtcttccaggccaagaagcgggttctcgaacctctcggtctggttgaggaaggcgctaagacggctcctggaaagaagagaccggtagagccgtcaccacagcgttcccccgactcctccacgggcatcggcaagaaaggccagcagcccgccagaaagagactcaatttcggtcagactggcgactcagagtcagtccccgaccctcaacctatcggagaacctccagcagcgccctctagtgtgggatctggtacaatggctgcaggcggtggcgcaccaatggcagacaataacgaaggtgccgacggagtgggtagttcctcgggaaattggcattgcgattccacatggctgggcgacagagtcatcaccaccagcacccgaacctgggccctgcccacctacaacaaccacctctacaagcaaatctccaacgggacctcgggaggcagcaccaacgacaacacctactttggctacagcaccccctgggggtattttgactttaacagattccactgccacttctcaccacgtgactggcagcgactcatcaacaacaactggggattccggcccaagagactcagcttcaagctcttcaacatccaggtcaaagaggtcacgcagaatgaaggcaccaagaccatcgccaataaccttaccagcacggttcaggtcttttcggactcggaataccagctgccctacgtcctcggctccgcacaccagggctgcctgcctccgttcccggcggacgtcttcatgattccccagtacggctacctgactctgaacaatggcagccaatcggtgggtcgttcctctttctactgcctggaatatttcccttctcaaatgctgagaacgggcaacaacttcaccttcagctacaccttcgaggacgttcccttccacagcagctacgcacacagccagagcctggaccggctgatgaatcctcttatcgaccagtacctgtattacctggccagaacacagagcaacgcaggaggcacagctggcaatcgggaactgcagttttatcagggcgggcctaccaccatggccgaacaagccaaaaactggctgcctggaccttgcttccggcaacaaagagtctccaagacgctggatcaaaacaacaacagcaactttgcttggactggtgccaccaaataccatctaaatggaagaaattcattggttaatcccggtgtcgccatggcaacccacaaggacgacgaggaacgcttcttcccttcgagcggagtcctgatttttggaaaaactggagcagctaataagactacactggaaaatgtgttaatgacaaatgaagaggaaattcgtcctaccaacccggtagccaccgaggaatacgggactgttagcagcaacctgcaggcggctaacactgcagcccagacacaagttgtcaacaaccagggagccttacctggtatggtctggcagaaccgggacgtgtacctgcagggtcccatctgggccaagattcctcacacggacggcaactttcacccgtctccgctgatgggcggctttggactgaagcatccgcctcctcagatcctgatcaaaaacactcctgttcctgctaatcccccggaggtgtttacgcctgccaagtttgcttctttcatcacacagtacagcaccggccaggtcagcgtggagatcgagtgggagctgcagaaggagaacagcaagcgctggaacccagagattcagtatacctccaattttgacaaacagactggtgtggactttgccgttgacagccagggtgtttattctgagcctcgccccattggtactcgttacctcacccgtaatctgtaa

SEQ ID NO: 459 - protein, 738 aa, Artificial Sequence
  source: /note="Description of Artificial Sequence: Synthetic polypeptide"
MAADGYLPDWLEDNLSEGIREWWDLKPGAPKPKANQQKQDDGRGLVLPGYKHLGPFNGLDKGEPVNAADAAALEHDKAYDQQLKAGDNPYLRYNHADAEFQERLQEDTSFGGNLGRAVFQAKKRVLEPLGLVEEGAKTAPGKKRPVEPSPQRSPDSSTGIGKKGQQPARKRLNFGQTGDSESVPDPQPIGEPPAAPSSVGSGTMAAGGGAPMADNNEGADGVGSSSGNWHCDSTWLGDRVITTSTRTWALPTYNNHLYKQISNGTSGGSTNDNTYFGYSTPWGYFDFNRFHCHFSPRDWQRLINNNWGFRPKRLSFKLFNIQVKEVTQNEGTKTIANNLTSTVQVFSDSEYQLPYVLGSAHQGCLPPFPADVFMIPQYGYLTLNNGSQSVGRSSFYCLEYFPSQMLRTGNNFTFSYTFEDVPFHSSYAHSQSLDRLMNPLIDQYLYYLARTQSNAGGTAGNRELQFYQGGPTTMAEQAKNWLPGPCFRQQRVSKTLDQNNNSNFAWTGATKYHLNGRNSLVNPGVAMATHKDDEERFFPSSGVLIFGKTGAANKTTLENVLMTNEEEIRPTNPVATEEYGTVSSNLQAANTAAQTQVVNNQGALPGMVWQNRDVYLQGPIWAKIPHTDGNFHPSPLMGGFGLKHPPPQILIKNTPVPANPPEVFTPAKFASFITQYSTGQVSVEIEWELQKENSKRWNPEIQYTSNFDKQTGVDFAVDSQGVYSEPRPIGTRYLTRNL

SEQ ID NO: 460 - protein, 737 aa, Artificial Sequence
  source: /note="Description of Artificial Sequence: Synthetic polypeptide"
MAADGYLPDWLEDNLSEGIREWWDLKPGAPKPKANQQKQDDGRGLVLPGYKYLGPFNGLDKGEPVNAADAAALEHDKAYDQQLKAGDNPYLRYNHADAEFQERLQEDTSFGGNLGRAVFQAKKRVLEPLGLVEEAAKTAPGKKRPVEPSPQRSPDSSTGIGKKGQQPARKRLNFGQTGDSESVPDPQPIGEPPAGPSGLGSGTMAAGGGAPMADNNKGADGVGNASGNWHCDSTWLGDRVITTSTRTWALPTYNNHLYKQISSQSAGSTNDNVYFGYSTPWGYFDFNRFHCHFSPRDWQRLINSNWGFRPKKLNFKLFNIQVKEVTTNDGVTTIANNLTSTVQVFSDSEYQLPYVLGSAHQGCLPPFPADVFMIPQYGYLTLNNGSQSVGRSSFYCLEYFPSQMLRTGNNFTFSYTFEDVPFHSSYAHSQSLDRLMNPLIDQYLYYLARTQSNAGGTAGNRELQFYQGGPTTMAEQAKNWLPGPCFRQQRVSKTLDQNNNSNFAWTGATKYHLNGRNSLVNPGVAMATHKDDEERFFPSSGVLIFGKTGAANKTTLENVLMTNEEEIRPTNPVATEEYGTVSSNLQAANTAAQTQVVNNQGALPGMVWQNRDVYLQGPIWAKIPHTDGNFHPSPLMGGFGLKHPPPQILIKNTPVPANPPEVFTPAKFASFITQYSTGQVSVEIEWELQKENSKRWNPEIQYTSNFDKQTGVDFAVDSQGVYSEPRPIGTRYLTRNL

SEQ ID NO: 461 - protein, 737 aa, Artificial Sequence
  source: /note="Description of Artificial Sequence: Synthetic polypeptide"
MAADGYLPDWLEDNLSEGIREWWDLKPGAPKPKANQQKQDDGRGLVLPGYKYLGPFNGLDKGEPVNAADAAALEHDKAYDQQLKAGDNPYLRYNHADAEFQERLQEDTSFGGNLGRAVFQAKKRVLEPLGLVEEAAKTAPGKKRPVEPSPQRSPDSSTGIGKKGQQPARKRLNFGQTGDSESVPDPQPIGEPPAGPSGLGSGTMAAGGGAPMADNNEGADGVGNASGNWHCDSTWLGDRVITTSTRTWALPTYNNHLYKQISSQSAGSTNDNVYFGYSTPWGYFDFNRFHCHFSPRDWQRLINSNWGFRPKKLNFKLFNIQVKEVTTNDGVTTIANNLTSTVQVFSDSEYQLPYVLGSAHQGCLPPFPADVFMIPQYGYLTLNNGSQSVGRSSFYCLEYFPSQMLRTGNNFTFSYTFEDVPFHSSYAHSQSLDRLMNPLIDQYLYYLARTQSNAGGTAGNRELQFYQGGPTTMAEQAKNWLPGPCFRQQRVSKTLDQNNNSNFAWTGATKYHLNGRNSLVNPGVAMATHKDDEERFFPSSGVLIFGKTGAANKTTLENVLMTNEEEIRPTNPVATEEYGTVSSNLQAANTAAQTQVVNNQGALPGMVWQNRDVYLQGPIWAKIPHTDGNFHPSPLMGGFGLKHPPPQILIKNTPVPANPPEVFTPAKFASFITQYSTGQVSVEIEWELQKENSKRWNPEIQYTSNFDKQTGVDFAVDSQGVYSEPRPIGTRYLTRNL

SEQ ID NO: 462 - protein, 737 aa, Artificial Sequence
  source: /note="Description of Artificial Sequence: Synthetic polypeptide"
MAADGYLPDWLEDNLSEGIREWWDLKPGAPKPKANQQKQDDGRGLVLPGYKYLGPFNGLDKGEPVNAADAAALEHDKAYDQQLKAGDNPYLRYNHADAEFQERLQEDTSFGGNLGRAVFQAKKRVLEPLGLVEEAAKTAPGKKRPVEPSPQRSPDSSTGIGKKGQQPARKRLNFGQTGDSESVPDPQPIGEPPAGPSGLGSGTMAAGGGAPMADNNEGADGVGNASGNWHCDSTWLGDRVITTSTRTWALPTYNNHLYKQISSQSAGSTNDNVYFGYSTPWGYFDFNRFHCHFSPRDWQRLINNNWGFRPKKLNFKLFNIQVKEVTTNDGVTTIANNLTSTVQVFSDSEYQLPYVLGSAHQGCLPPFPADVFMIPQYGYLTLNNGSQSVGRSSFYCLEYFPSQMLRTGNNFTFSYTFEDVPFHSSYAHSQSLDRLMNPLIDQYLYYLARTQSNAGGTAGNRELQFYQGGPTTMAEQAKNWLPGPCFRQQRVSKTLDQNNNSNFAWTGATKYHLNGRNSLVNPGVAMATHKDDEERFFPSSGVLIFGKTGAANKTTLENVLMTNEEEIRPTNPVATEEYGTVSSNLQAANTAAQTQVVNNQGALPGMVWQNRDVYLQGPIWAKIPHTDGNFHPSPLMGGFGLKHPPPQILIKNTPVPANPPEVFTPAKFASFITQYSTGQVSVEIEWELQKENSKRWNPEIQYTSNFDKQTGVDFAVDSQGVYSEPRPIGTRYLTRNL

SEQ ID NO: 463 - protein, 737 aa, Artificial Sequence
  source: /note="Description of Artificial Sequence: Synthetic polypeptide"
MAADGYLPDWLEDNLSEGIREWWDLKPGAPKPKANQQKQDDGRGLVLPGYKYLGPFNGLDKGEPVNAADAAALEHDKAYDQQLKAGDNPYLRYNHADAEFQERLQEDTSFGGNLGRAVFQAKKRVLEPLGLVEEAAKTAPGKKRPVEPSPQRSPDSSTGIGKKGQQPARKRLNFGQTGDSESVPDPQPIGEPPAGPSGLGSGTMAAGGGAPMADNNKGADGVGNASGNWHCDSTWLGDRVITTSTRTWALPTYNNHLYKQISSQSAGSTNDNVYFGYSTPWGYFDFNRFHCHFSPRDWQRLINNNWGFRPKKLNFKLFNIQVKEVTTNDGVTTIANNLTSTVQVFSDSEYQLPYVLGSAHQGCLPPFPADVFMIPQYGYLTLNNGSQSVGRSSFYCLEYFPSQMLRTGNNFTFSYTFEDVPFHSSYAHSQSLDRLMNPLIDQYLYYLARTQSNAGGTAGNRELQFYQGGPTTMAEQAKNWLPGPCFRQQRVSKTLDQNNNSNFAWTGATKYHLNGRNSLVNPGVAMATHKDDEERFFPSSGVLIFGKTGAANKTTLENVLMTNEEEIRPTNPVATEEYGTVSSNLQAANTAAQTQVVNNQGALPGMVWQNRDVYLQGPIWAKIPHTDGNFHPSPLMGGFGLKHPPPQILIKNTPVPANPPEVFTPAKFASFITQYSTGQVSVEIEWELQKENSKRWNPEIQYTSNFDKQTGVDFAVDSQGVYSEPRPIGTRYLTRNL

SEQ ID NO: 464 - DNA, 2214 bp, Artificial Sequence
  source: /note="Description of Artificial Sequence: Synthetic polynucleotide"
atggctgctgacggttatcttccagattggctcgaggacaacctctctgagggcattcgcgagtggtgggacctgaaacctggagcccccaagcccaaggccaaccagcagaagcaggacgacggccggggtctggtgcttcctggctacaagtacctcggacccttcaacggactcgacaagggggagcccgtcaacgcggcggacgcagcggccctcgagcacgacaaggcctacgaccagcagctcaaagcgggtgacaatccgtacctgcggtataaccacgccgacgccgagtttcaggagcgtctgcaagaagatacgtcttttgggggcaacctcgggcgagcagtcttccaggccaagaagcgggttctcgaacctctcggtctggttgaggaagctgctaagacggctcctggaaagaagagaccggtagaaccgtcacctcagcgttcccccgactcctccacgggcatcggcaagaaaggccagcagcccgctagaaagagactgaactttgggcagactggcgactcagagtcagtccccgaccctcaaccaatcggagaaccaccagcaggcccctctggtctgggatctggtacaatggctgcaggcggtggcgcaccaatggctgacaataacaagggcgccgacggagtgggtaatgcctcaggaaattggcattgcgattccacatggctgggcgacagagtcatcaccaccagcacccgaacctgggctttgcccacctacaacaaccacctctacaagcaaatctccagtcagtcagcaggtagcaccaacgacaacgtctacttcggctacagcaccccctgggggtattttgacttcaacagattccactgtcacttctcaccacgtgactggcagcggctcatcaacagcaactggggattccggcccaagaagctcaacttcaagctgttcaacatccaggtcaaggaggtcacaacgaatgacggcgtcacgaccatcgccaataaccttaccagcacggttcaggtcttttcggactcggaataccagctgccctacgtcctcggctccgcacaccagggctgcctgcctccgttcccggcggacgtcttcatgattccccagtacggctacctgactctgaacaatggcagccaatcggtgggtcgttcctctttctactgcctggaatatttcccttctcaaatgctgagaacgggcaacaacttcaccttcagctacaccttcgaggacgttcccttccacagcagctacgcacacagccagagcctggaccggctgatgaatcctcttatcgaccagtacctgtattacctggccagaacacagagcaacgcaggaggcacagctggcaatcgggaactgcagttttatcagggcgggcctaccaccatggccgaacaagccaaaaactggctgcctggaccttgcttccggcaacaaagagtctccaagacgctggatcaaaacaacaacagcaactttgcttggactggtgccaccaaataccatctaaatggaagaaattcattggttaatcccggtgtcgccatggcaacccacaaggacgacgaggaacgcttcttcccttcgagcggagtcctgatttttggaaaaactggagcagctaataagactacactggaaaatgtgttaatgacaaatgaagaggaaattcgtcctaccaacccggtagccaccgaggaatacgggactgttagcagcaacctgcaggcggctaacactgcagcccagacacaagttgtcaacaaccagggagccttacctggtatggtctggcagaaccgggacgtgtacctgcagggtcccatctgggccaagattcctcacacggacggcaactttcacccgtctccgctgatgggcggctttggactgaagcatccgcctcctcagatcctgatcaaaaacactcctgttcctgctaatcccccggaggtgtttacgcctgccaagtttgcttctttcatcacacagtacagcaccggccaggtcagcgtggagatcgagtgggagctgcagaaggagaacagcaagcgctggaacccagagattcagtatacctccaattttgacaaacagactggtgtggactttgccgttgacagccagggtgtttattctgagcctcgccccattggtactcgttacctcacccgtaatctgtaa

SEQ ID NO: 465 - DNA, 2217 bp, Artificial Sequence
  source: /note="Description of Artificial Sequence: Synthetic polynucleotide"
atggctgccgatggttatcttccagattggctcgaggacaacctctctgagggcattcgcgagtggtgggacctgaaacctggagccccgaaacccaaagccaaccagcaaaagcaggacgacggccggggtctggtgcttcctggctacaagtacctcggacccttcaacggactcgacaagggggagcccgtcaacgcggcggacgcagcggccctcgagcacgacaaggcctacgaccagcagctcaaagcgggtgacaatccgcacctgcggtataatcacgccgacgccgagtttcaggagcgtctgcaagaagatacgtcttttgggggcaacctcgggcgagcagtcttccaggccaagaagcgggttctcgaacctctcggtctggttgaggaaggcgctaagacggctcctggaaagaagagaccggtagagccgtcaccacagcgttcccccgactcctccacgggcatcggcaagaaaggccagcagcccgccagaaagagactcaatttcggtcagactggcgactcagagtcagtccccgaccctcaacttatcggagaacctccagcagcgccctctagtgtgggatctggtacaatggctgcaggcggtggcgcaccaatggcagacaataacgaaggtgccgacggagtgggtagttcctcgggaaattggcattgcgattccacatggctgggcgacagagtcatcaccaccagcacccgaacctgggccctgcccacctacaacaaccacctctacaagcaaatctccaacgggacctcgggaggcagcaccaacgacaacacctactttggctacagcaccccctgggggtattttgactttaacagattccactgccacttctcaccacgtgactggcagcgactcatcaacaacaactggggattccggcccaagagactcagcttcaagctcttcaacatccaggtcaaagaggtcacgcagaatgaaggcaccaagaccatcgccaataacctcaccagcaccatccaggtgtttacggactcggagtaccagctgccgtacgtcctcggctctgcccaccagggctgcctgcctccgttcccggcggacgtcttcatgattcctcagtacggcaacctgactctcaacaacggtagtcaggccgtgggacgttcctccttctactgcctggagtacttcccctctcagatgctgagaacgggcaacaacttttccttcagctacactttcgaggacgtgcctttccacagcagctacgcgcacagccagagtttggacaggctgatgaatcctctcatcgaccagtacctgtactacctgtcaagaacccagtctacgggaggcacagcgggaacccagcagttgctgttttctcaggccgggcctagcaacatgtcggctcaggccagaaactggctgcctggaccctgctacagacagcagcgcgtctccacgacactgtcgcaaaacaacaacagcaactttgcctggactggtgccaccaagtatcatctgaacggcagagactctctggtgaatccgggcgtcgccatggcaaccaacaaggacgacgaggaccgcttcttcccatccagcggcatcctcatgtttggcaagcagggagctggaaaagacaacatgggctatagcaacgtgatgctaaccagcgaggaagaaatcaagaccaccaaccccgtggccacagaacagtatggcgtggtggctgataacctacagcagcaaaacaccgctcctattgtgggggccgtcaacagccagggagccttacctggcatggtctggcagaaccgggacgtgtacctgcagggtcctatttgggccaagattcctcacacagatggcaactttcacccgtctcctttaatgggcggctttggacttaaacatccgcctcctcagatcctcatcaaaaacactcctgttcctgcggatcctccaacagcgttcaaccaggccaagctgaattctttcatcacgcagtacggcaccggacaagtcagcgtggagatcgagtgggagctgcagaaggagaacagcaagcgctggaacccagagattcagtatacttccaactactacaaatctacaaatgtggactttgctgttaatactgagggtgtttactctgagcctcgccccattggcactcgttacctcacccgtaatctgtaa

SEQ ID NO: 466 - protein, 738 aa, Artificial Sequence
  source: /note="Description of Artificial Sequence: Synthetic polypeptide"
MAADGYLPDWLEDNLSEGIREWWDLKPGAPKPKANQQKQDDGRGLVLPGYKYLGPFNGLDKGEPVNAADAAALEHDKAYDQQLKAGDNPHLRYNHADAEFQERLQEDTSFGGNLGRAVFQAKKRVLEPLGLVEEGAKTAPGKKRPVEPSPQRSPDSSTGIGKKGQQPARKRLNFGQTGDSESVPDPQLIGEPPAAPSSVGSGTMAAGGGAPMADNNEGADGVGSSSGNWHCDSTWLGDRVITTSTRTWALPTYNNHLYKQISNGTSGGSTNDNTYFGYSTPWGYFDFNRFHCHFSPRDWQRLINNNWGFRPKRLSFKLFNIQVKEVTQNEGTKTIANNLTSTIQVFTDSEYQLPYVLGSAHQGCLPPFPADVFMIPQYGNLTLNNGSQAVGRSSFYCLEYFPSQMLRTGNNFSFSYTFEDVPFHSSYAHSQSLDRLMNPLIDQYLYYLSRTQSTGGTAGTQQLLFSQAGPSNMSAQARNWLPGPCYRQQRVSTTLSQNNNSNFAWTGATKYHLNGRDSLVNPGVAMATNKDDEDRFFPSSGILMFGKQGAGKDNMGYSNVMLTSEEEIKTTNPVATEQYGVVADNLQQQNTAPIVGAVNSQGALPGMVWQNRDVYLQGPIWAKIPHTDGNFHPSPLMGGFGLKHPPPQILIKNTPVPADPPTAFNQAKLNSFITQYGTGQVSVEIEWELQKENSKRWNPEIQYTSNYYKSTNVDFAVNTEGVYSEPRPIGTRYLTRNL

SEQ ID NO: 467 - DNA, 2217 bp, Artificial Sequence
  source: /note="Description of Artificial Sequence: Synthetic polynucleotide"
atggctgccgatggttatcttccagattggctcgaggacaacctctctgagggcattcgcgagtggtgggacctgaaacctggagccccgaaacccaaagccaaccagcaaaagcaggacgacggccggggtctggtgcttcctggctacaagtacctcggacccttcaacggactcgacaagggggagcccgtcaacgcggcggacgcagcggccctcgagcacgacaaggcctacgaccagcagctcaaagcgggtgacaatccgtacctgcggtataatcacgccgacgccgagtttcaggagcgtctgcaagaagatacgtcttttgggggcaacctcgggcgagcagtcttccaggccaagaagcgggttctcgaacctctcggtctggttgaggaaggcgctaagacggctcctggaaagaagagaccggtagagccgtcaccacagcgttcccccgactcctccacgggcatcggcaagaaaggccagcagcccgccggaaagagactcaatttcggtcagactggcgactcagagtcagtccccgaccctcaacctatcggagaacctccagcagcgccctctagtgtgggatctggtacaatggctgcaggcggtggcgcaccaatggcagacaataacgaaggtgccgacggagtgggtagttcctcgggaaattggcattgcgattccacatggctgggcgacagagtcatcaccaccagcacccgaacctgggccctgcccacctacaacaaccacctctacaagcaaatctccaacgggacctcgggaggcagcaccaacgacaacacctactttggctacagcaccccctgggggtattttgactttaacagattccactgccacttctcaccacgtgactggcagcgactcatcaacaacaactggggattccggcccaagagactcagcttcaagctcttcaacatccaggtcaaagaggtcacgcagaatgaaggcaccaagaccatcgccaataacctcaccagcaccatccaggtgtttacggactcggaataccagctgccgtacgtcctcggctctgcccaccagggctgcctgcctccgttcccggcggacgtcttcatgattcctcagtacggctacctgactctcaacaacggtagtcaggccgtgggacgttcctccttctactgcctggagtacttcccctctcagatgctgagaacgggcaacaacttttccttcagctacactttcgaggacgtgcctttccacagcagctacgcgcacagccagagtttggacaggctgatgaatcctctcgtcgaccagtacctgtactacctgtcaagaacccagtctacgggaggcacagcgggaacccagcagttgctgttttctcaggccgggcctagcaacatgtcggctcaggccagaaactggctgcctggaccctgctacagacagcagcgcgtctccacgacactgtcgcaaaacaacaacagcaactttgcctggactggtgccaccaagtatcatctgaacggcagagactctctggtgaatccgggcgtcgccatggcaaccaacaaggacgacgaggaccgcttcttcccatccagcggcatcctcatgtttggcaagcagggagctggaaaagacaacgtggactatagcaacgtgatgctaaccagcgaggaagaaatcaagaccaccaaccccgtggccacagaacagtatggcgtggtggctgataacctacagcagcaaaacaccgctcctattgtgggggccgtcaacagccagggagccttacctggcatggtctggcagaaccgggacgtgtacctgcagggtcctatttgggccaagattcctcacacagatggcaactttcacccgtctcctttaatgggcggctttggacttaaacatccgcctcctcagatcctcatcaaaaacactcctgttcctgcggatcctccaacagcgttcaaccaggccaagctgaattctttcatcacgcagtacagcaccggacaagtcagcgtggagatcgagtgggagctgcagaaggagaacagcaagcgctggagcccagagattcagtatacttccaactactacaaatctacaaatgtggactttgctgttaatactgagggtgtttactctgagcctcgccccattggcactcgttacctcacccgtaatctgtaa

SEQ ID NO: 468 - protein, 738 aa, Artificial Sequence
  source: /note="Description of Artificial Sequence: Synthetic polypeptide"
MAADGYLPDWLEDNLSEGIREWWDLKPGAPKPKANQQKQDDGRGLVLPGYKYLGPFNGLDKGEPVNAADAAALEHDKAYDQQLKAGDNPYLRYNHADAEFQERLQEDTSFGGNLGRAVFQAKKRVLEPLGLVEEGAKTAPGKKRPVEPSPQRSPDSSTGIGKKGQQPAGKRLNFGQTGDSESVPDPQPIGEPPAAPSSVGSGTMAAGGGAPMADNNEGADGVGSSSGNWHCDSTWLGDRVITTSTRTWALPTYNNHLYKQISNGTSGGSTNDNTYFGYSTPWGYFDFNRFHCHFSPRDWQRLINNNWGFRPKRLSFKLFNIQVKEVTQNEGTKTIANNLTSTIQVFTDSEYQLPYVLGSAHQGCLPPFPADVFMIPQYGYLTLNNGSQAVGRSSFYCLEYFPSQMLRTGNNFSFSYTFEDVPFHSSYAHSQSLDRLMNPLVDQYLYYLSRTQSTGGTAGTQQLLFSQAGPSNMSAQARNWLPGPCYRQQRVSTTLSQNNNSNFAWTGATKYHLNGRDSLVNPGVAMATNKDDEDRFFPSSGILMFGKQGAGKDNVDYSNVMLTSEEEIKTTNPVATEQYGVVADNLQQQNTAPIVGAVNSQGALPGMVWQNRDVYLQGPIWAKIPHTDGNFHPSPLMGGFGLKHPPPQILIKNTPVPADPPTAFNQAKLNSFITQYSTGQVSVEIEWELQKENSKRWSPEIQYTSNYYKSTNVDFAVNTEGVYSEPRPIGTRYLTRNL

SEQ ID NO: 469 - DNA, 2217 bp, Artificial Sequence
  source: /note="Description of Artificial Sequence: Synthetic polynucleotide"
atggttgccgatggttatcttccagattggctcgaggacaacctctctgagggcattcgcgagtggtgggacctgaaacctggagccccgaaacccaaagccaaccagcaaaagcagggcgacggccggggtctggtgcttcctggctacaagtacctcggacccttcaacggactcgacaagggggagcccgtcaacgcggcggacgcagcggccctcgagcacgacaaggcctacgaccagcagcttaaagcgggtgacaatccgtacctgcggtataatcacgccgacgccgagcttcaggagcgtctgcaagaagatacgtcttttgggggcaacctcgggcgagcagtcttccaggccaagaagcgggttctcgaacctctcggtctggttgaggaaggcgctaagacggctcctggaaagaagagaccggtagagccgtcaccacagcgttcccccgactcctccacgggcatcggcaagaaaggccagcagcccgccagaaagagactcaatttcggtcagactggcgactcagagtcagtccccgaccctcaacctatcggagaacctccagcagcgccctctagtgtgggatctggtacaatggctgcaggcggtggcgcgccaatggcagacaataacgaaggtgccgacggagtgggtagttcctcgggaaattggcattgcgattccacatggctgggcgacagagtcatcaccaccagcacccgaacctgggccctgcccacctacaacaaccacctctacaagcaaatctccaacgggacctcgggaggcagcaccaacgacaacacctactttggctacagcaccccctgggggtattttgactttaacagattccactgccacttctcaccacgtgactggcagcgactcatcaacaacaactggggattccggcccaagagactcagcttcaagctcttcaacatccaggtcaaagaggtcacgcagaatgaaggcaccaagaccatcgccaataacctcaccagcaccatccaggtgtttacggactcggaataccagctgccgtacgtcctcggctctgcccaccagggctgccagcctccgttcccggcggacgtcttcatgattcctcagtacggctacctgactctcaacaacggtagtcaggccgtgggacgttcctccttctactgcctggagtacttcccctctcagatgctgagaacgggcaacaacttttccttcagctacactttcgaggacgtgcctttccacagcagctacgcgcacagccagagtttggacaggctgatgaatcctctcatcgaccagtacctgtactacctgtcaagaacccagtctacgggaggcacagcgggaacccagcagttgctgttttctcaggccgggcctagcaacatgtcggctcaggccagaaactggctgcctggaccctgctacagacagcagcgcgtctccacgacactgtcgcaaaacaacaacagcaactttgcctggactggtgccaccaagtatcatctgaacggcagagactctctggtgaatccgggcgtcgccatggcaaccaacaaggacgacgaggaccgcttcttcccatccagcggcatcctcatgtttggcaagcagggagctggaaaagacaacgtggactatagcaacgtgatgctaaccagcgaggaagaaatcaagaccaccaaccccgtggccacagaacagtatggcgtggtggctgataacctacagcagcaaaacaccgctcctattgtgggggccgtcaacagccagggagccttacctggcatggtctggcagaaccgggacgtgtacctgcagggtcctatttgggccaagattcctcacacagatggcaactttcacccgtctcctttaatgggcggctttggacttaaacatccgcctcctcagatcctcatcaaaaacactcctgttcctgcggatcctccaacagcgttcaaccaggccaagctgaattctttcatcacgcagtacagcaccggacaagtcagcgtggagatcgagtgggagccgcagaaggagaacagcaagcgctggaacccagagattcagtatacttccaactactacaaatctacaaatgtggactttgctgttaatactgagggtgtttactctgagcctcgccccattggcactcgttacctcacccgtaatctgtaa

SEQ ID NO: 470 - protein, 738 aa, Artificial Sequence
  source: /note="Description of Artificial Sequence: Synthetic polypeptide"
MVADGYLPDWLEDNLSEGIREWWDLKPGAPKPKANQQKQGDGRGLVLPGYKYLGPFNGLDKGEPVNAADAAALEHDKAYDQQLKAGDNPYLRYNHADAELQERLQEDTSFGGNLGRAVFQAKKRVLEPLGLVEEGAKTAPGKKRPVEPSPQRSPDSSTGIGKKGQQPARKRLNFGQTGDSESVPDPQPIGEPPAAPSSVGSGTMAAGGGAPMADNNEGADGVGSSSGNWHCDSTWLGDRVITTSTRTWALPTYNNHLYKQISNGTSGGSTNDNTYFGYSTPWGYFDFNRFHCHFSPRDWQRLINNNWGFRPKRLSFKLFNIQVKEVTQNEGTKTIANNLTSTIQVFTDSEYQLPYVLGSAHQGCQPPFPADVFMIPQYGYLTLNNGSQAVGRSSFYCLEYFPSQMLRTGNNFSFSYTFEDVPFHSSYAHSQSLDRLMNPLIDQYLYYLSRTQSTGGTAGTQQLLFSQAGPSNMSAQARNWLPGPCYRQQRVSTTLSQNNNSNFAWTGATKYHLNGRDSLVNPGVAMATNKDDEDRFFPSSGILMFGKQGAGKDNVDYSNVMLTSEEEIKTTNPVATEQYGVVADNLQQQNTAPIVGAVNSQGALPGMVWQNRDVYLQGPIWAKIPHTDGNFHPSPLMGGFGLKHPPPQILIKNTPVPADPPTAFNQAKLNSFITQYSTGQVSVEIEWEPQKENSKRWNPEIQYTSNYYKSTNVDFAVNTEGVYSEPRPIGTRYLTRNL

SEQ ID NO: 471 - DNA, 2217 bp, Artificial Sequence
  source: /note="Description of Artificial Sequence: Synthetic polynucleotide"
atggctgccgatggttatcttccagattggctcgaggacaacctctctgagggcattcgcgagtggtgggacctgaaacctggagccccgaaacccaaagccaaccagcaaaagcaggacgacggccggggtctggtgcttcctggctacaagtacctcggacccttcaacggactcgacaagggggagcccgtcaacgcggcggacgcagcggccctcgagcacgacaaggcctacgaccagcagctcaaagcgggtgacaatccgtacctgcggtataatcacgccgacgccgagtttcaggagcgtctgcaagaagatacgtcttttgggggcaacctcgggcgagcagtcttccaggccaagaagcgggttctcgaacctctcggtctggttgaggaaggcgctaagacggctcctggaaagaagagaccggtagagccgtcaccacagcgttcccccgactcctccacgggcatcggcaagaaaggccagcagcccgccagaaagagactcaatttcggtcagactggcgactcagagtcagtccccgaccctcaacctatcggagaacctccagcagcgccctctagtgtgggatctggtacaatggctgcaggcggtggcgcaccaatggcagacaataacgaaggtgccgacggagtgggtagttcctcgggaaattggcattgcgattccacatggctgggcgacagagtcatcaccaccagcacccgaacctgggccctgcccacctacaacaaccacctctacaagcaaatctccaacgggacctcgggaggcagcaccaacgacaacacctactttggctacagcaccccctgggggtattttgactttaacagattccactgccacttctcaccacgtgactggcagcgactcatcaacaacaactggggattccggcccaagagactcagcttcaagctcttcaacatccaggtcaaagaggtcacgcagaatgaaggcaccaagaccatcgccaatagcctcaccagcaccatccaggtgtttacggactcggaataccagctgccgtacgtcctcggctctgcccaccagggctgcctgcctccgttcccggcggacgtcttcatgattcctcagtacggctacctgactcccaacaacggtagtcaggccgtgggacgttcctccttctactgcctggagtacttcccctctcagatgctgagaacgggcaacaacttttccttcagctacactttcgaggacgtgcctttccacagcagctacgcgcacagccagagtttggacaggctgatgaatcctctcatcgaccagtacctgtactacctgtcaagaacccagtctacgggaggcacagcgggaacccagcagttgctgtcttctcaggccgggcctagcaacatgtcggctcaggccagaaactggctgcctggaccctgctacagacagcagcgcgtctccacgacactgtcgcaaaacaacaacagcaactttgcctggactggtgccaccaagtatcatctgaacggcagagactctctggtgaatccgggcgtcgccatggcaaccaacaaggacgacgaggaccgcttcttcccatccagcggcatcctcatgtttggcaagcagggagctggaaaagacaacgtggactatagcaacgtgatgctaaccagcgaggaagaaatcaagaccaccaaccccgtggccacagaacagtatggcgtggtggctgataacctacagcagcaaaacaccgctcctattgtgggggccgtcaacagccagggagccttacctggcatggtctggcagaaccgggacgtgtacttgcagggtcctatttgggccaagattcctcacacagatggcaactttcacccgtctcctttaatgggcggctttggacttaaacatccgcctcctcagatcctcatcaaaaacactcctgttcctgcggatcctccaacagcgttcaaccaggccaagctgaattctttcatcacgcagtacagcaccggacaagtcagcgtggagatcgagtgggagctgcagaaggagaacagcaagcgctggaacccagagattcagtatacttccaactactacaaatctacaaatgtggactttgctgttaatactgagggtgtttactctgagcctcgccccattggcactcgttacctcacccgtaatctgtaa

SEQ ID NO: 472 - protein, 738 aa, Artificial Sequence
  source: /note="Description of Artificial Sequence: Synthetic polypeptide"
MAADGYLPDWLEDNLSEGIREWWDLKPGAPKPKANQQKQDDGRGLVLPGYKYLGPFNGLDKGEPVNAADAAALEHDKAYDQQLKAGDNPYLRYNHADAEFQERLQEDTSFGGNLGRAVFQAKKRVLEPLGLVEEGAKTAPGKKRPVEPSPQRSPDSSTGIGKKGQQPARKRLNFGQTGDSESVPDPQPIGEPPAAPSSVGSGTMAAGGGAPMADNNEGADGVGSSSGNWHCDSTWLGDRVITTSTRTWALPTYNNHLYKQISNGTSGGSTNDNTYFGYSTPWGYFDFNRFHCHFSPRDWQRLINNNWGFRPKRLSFKLFNIQVKEVTQNEGTKTIANSLTSTIQVFTDSEYQLPYVLGSAHQGCLPPFPADVFMIPQYGYLTPNNGSQAVGRSSFYCLEYFPSQMLRTGNNFSFSYTFEDVPFHSSYAHSQSLDRLMNPLIDQYLYYLSRTQSTGGTAGTQQLLSSQAGPSNMSAQARNWLPGPCYRQQRVSTTLSQNNNSNFAWTGATKYHLNGRDSLVNPGVAMATNKDDEDRFFPSSGILMFGKQGAGKDNVDYSNVMLTSEEEIKTTNPVATEQYGVVADNLQQQNTAPIVGAVNSQGALPGMVWQNRDVYLQGPIWAKIPHTDGNFHPSPLMGGFGLKHPPPQILIKNTPVPADPPTAFNQAKLNSFITQYSTGQVSVEIEWELQKENSKRWNPEIQYTSNYYKSTNVDFAVNTEGVYSEPRPIGTRYLTRNL

SEQ ID NO: 473 - protein, 738 aa, Artificial Sequence
  source: /note="Description of Artificial Sequence: Synthetic polypeptide"
MAADGYLPDWLEDNLSEGIREWWDLKPGAPKPKANQQKQDDGRGLVLPGYKYLGPFNGLDKGEPVNAADAAALEHDKAYDQQLKAGDNPYLRYNHADAEFQERLQEDTSFGGNLGRAVFQAKKRVLEPLGLVEEGAKTAPGKKRPVEPSPQRSPDSSTGIGKKGQQPARKRLNFGQTGDSESVPDPQPIGEPPAAPSSVGSGTMAAGGGAPMADNNEGADGVGSSSGNWHCDSTWLGDRVITTSTRTWALPTYNNHLYKQISNGTSGGSTNDNTYFGYSTPWGYFDFNRFHCHFSPRDWQRLINNNWGFRPKRLSFKLFNIQVKEVTQNEGTKTIANNLTSTIQVFTDSEYQLPYVLGSAHQGCLPPFPADVFMIPQYGYLTLNNGSQAVGRSSFYCLEYFPSQMLRTGNNFSFSYTFEDVPFHSSYVHSQSLDRLMNPLIDQYLYYLSRTQSTGGTAGTQQLLFSQAGPSNMSAQARNWLPGPCYRQQRVSTTLSQNNNSNFAWTGATKYHLNGRDSLVNSGVAMATNKDDEDRFFPSSGILMFGKQGAGKDNVDYSNVMLTSEEEIKTTNPVATEQYGVVADNLQQQNTAPIVGAVNSQGALPGMVWQNRDVYLQGPIWAKIPHTDGNFHPSPLMGGFGLKHPPPQILIKNTPVPADPPTAFNQAKLNSFITQYSTGQVSVEIEWELQKENSKRWNPEIQYTSNYYKSTNVDFAVNTEGVYSEPRPIGTRYPTRNL

SEQ ID NO: 474 - DNA, 2217 bp, Artificial Sequence
  source: /note="Description of Artificial Sequence: Synthetic polynucleotide"
atggctgccgatggttatcttccagattggctcgaggacaacctctctgagggcattcgcgagtggtgggacctgaaacctggagccccgaaacccaaagccaaccagcaaaagcaggacgacggccggggtctggtgcttcctggctacaagtacctcggacccttcaacggactcgacaagggggagcccgtcaacgcggcggacgcagcggccctcgagcacgacaaggcctacgaccagcagctcaaagcgggtgacaatccgtacctgcggtataatcacgccgacgccgagtttcaggagcgtctgcaagaagatacgtcttttgggggcaacctcgggcgagcagtcttccaggccaagaagcgggttctcgaacctctcggtctggttgaggaaggcgctaagacggctcctggaaagaagagaccggtagagccgtcaccacagcgttcccccgactcctccacgggcatcggcaagaaaggccagcagcccgccagaaagagactcaatttcggtcagactggcgactcagagtcagtccccgaccctcaacctatcggagaacctccagcagcgccctctagtgtgggatctggtacaatggctgcaggcggtggcgcaccaatggcagacaataacgaaggtgccgacggagtgggtagttcctcgggaaattggcattgcgattccacatggctgggcgacagagtcatcaccaccagcacccgaacctgggccctgcccacctacaacaaccacctctacaagcaaatctccaacgggacctcgggaggcagcaccaacgacaacacctactttggctacagcaccccctgggggtattttgactttaacagattccactgccacttctcaccacgtgactggcagcgactcatcaacaacaactggggattccggcccaagagactcagcttcaagctcttcaacatccaggtcaaagaggtcacgcagaatgaaggcaccaagaccatcgccaataacctcaccagcaccatccaggtgtttacggactcggaataccagctgccgtacgtcctcggctctgcccaccagggctgcctgcctccgttcccggcggacgtcttcatgattcctcagtacggctacctgactctcaacaacggtagtcaggccgtgggacgttcctccttctactgcctggagtacttcccctctcagatgctgagaacgggcaacaacttttccttcagctacactttcgaggacgtgcctttccacagcagctacgtgcacagccagagtttggacaggctgatgaatcctctcatcgaccagtacctgtactacctgtcaagaacccagtctacgggaggcacagcgggaacccagcagttgctgttttctcaggccgggcctagcaacatgtcggctcaggccagaaactggctgcctggaccctgctacagacagcagcgcgtctccacgacactgtcgcaaaacaacaacagcaactttgcctggactggtgccaccaagtatcatctgaacggcagagactctctggtgaattcgggcgtcgccatggcaaccaacaaggacgacgaggaccgcttcttcccatccagcggcatcctcatgtttggcaagcagggagctggaaaagacaacgtggactatagcaacgtgatgctaaccagcgaggaagaaatcaagaccaccaaccccgtggccacagaacagtatggcgtggtggctgataacctacagcagcaaaacaccgctcctattgtgggggccgtcaacagccagggagccttacctggcatggtctggcagaaccgggacgtgtacctgcagggtcctatttgggccaagattcctcacacagatggcaactttcacccgtctcctttaatgggcggctttggacttaaacatccgcctcctcagatcctcatcaaaaacactcctgttcctgcggatcctccaacagcgttcaaccaggccaagctgaattctttcatcacgcagtacagcaccggacaagtcagcgtggagatcgagtgggagctgcagaaggagaacagcaagcgctggaacccagagattcagtatacttccaactactacaaatctacaaatgtggactttgctgttaatactgagggtgtttactctgagcctcgccccattggcactcgttaccccacccgtaatctgtaa

SEQ ID NO: 475 - protein, 734 aa, Artificial Sequence; identical to SEQ ID NO: 300
  source: /note="Description of Artificial Sequence: Synthetic polypeptide"

SEQ ID NO: 476 - DNA, 2214 bp, Artificial Sequence
  source: /note="Description of Artificial Sequence: Synthetic polynucleotide"
atggctgctgacggttatcttccagattggctcgaggacaacctctctgagggcattcgcgagtggtgggacctgaaacctggagccccgaaacccaaagccaaccagcagaagcaggacgacggccggggtctggtgcttcctggctacaagtacctcggacccttcaacggactcgacaagggggagcccgtcaacgcggcggacgcagcggccctcgagcacgacaaggcctacgaccagcagctcaaagcgggtgacaatccgtacctgcggtataaccacgccgacgccgagtttcaggagcgtctgcaagaagatacgtcttttgggggcaacctcgggcgagcagtcttccaggccaagaagcgggttctcgaacctctcggtctggttgaggaagctgctaagacggctcctggaaagaagagaccggtagaaccgtcacctcagcgttcccccgactcctccacgggcatcggcaagaaaggccagcagcccgctagaaagagactgaactttgggcagactggcgactcagagtcagtccccgaccctcaacctctcggagaaccaccagcaggcccctctggtctgggatctggtacaatggctgcaggcggtggcgctccaatggcagacaataacgaaggcgccgacggagtgggtaatgcctcaggaaattggcattgcgattccacatggctgggcgacagagtcatcaccaccagcacccgaacctgggctttgcccacctacaacaaccacctctacaagcaaatctccagtcagtcagcaggtagcaccaacgacaacgtctacttcggctacagcaccccctgggggtattttgacttcaacagattccactgtcacttctcaccacgtgactggcagcgactcatcaacaacaactggggattccggcccaagaagctcaacttcaagctcttcaacatccaagtcaaggaggtcacgacgaatgacggcgtcacgaccatcgctaataaccttaccagcacggttcaggtcttttcggactcggagtaccagctgccgtacgtcctcggctctgcccaccagggctgcctgcctccgttcccggcggacgtcttcatgattcctcagtacggctacctgactctgaacaatggcagccaatcggtgggacgttcatccttctactgcctggaatacttcccttctcaggtgctgagaacgggtaacaacttcaccttcagttacaccttcgaggacgtgcctttccacagcagctacgcgcacagccagagcctagaccggctgatgaatcccctcatcgaccagtacctgtattacctggctagaacacagagtaacccaggaggcacatctggcaatcgggaactgcagttttaccagggcgggccttccaccatggccgaacaagccaagaactggttacctggaccttgcttccggcaacaaagagtttccaaaacactggatcaaaacaacaacagcaactttgcttggactggtgccaccaaatatcacctgaacggcagaaactcattggtgaatcctggtgtcgccatggcaactcacaaggacgacgaggaccgctttttcccatccagcggagtcctgatttttggaaaaactggagcaaccaacaagactacattggaaaacgtgttaatgacaaatgaagaagaaattcgtcctactaatcctgtggccacagaagaatacgggatagtcagcagcaatttacaagcggccaatactgcagcccagacacaagttgtcaacaaccagggagccttacctggcatggtctggcagaaccgggacgtgtacctgcagggtcccatctgggccaaaattcctcacacagacggcaactttcacccgtctccgctgatgggcggctttggactgaagcatccgcctcctcagatcctgatcaaaaacactcctgttcctgctaatcccccggaggtgtttacgcctgccaagtttgcttctttcatcacacagtacagcaccggccaggtcagcgtggagatcgagtgggagctgcagaaggagaacagcaagcgctggaacccagagattcagtatacctccaattttgacaaacagactggtgtggactttgccgttgacagccagggtgtttattctgagcctcgccccattggtactcgttacctcacccgtaatctgtaa

SEQ ID NO: 477 - protein, 737 aa, Artificial Sequence
  source: /note="Description of Artificial Sequence: Synthetic polypeptide"
MAADGYLPDWLEDNLSEGIREWWDLKPGAPKPKANQQKQDDGRGLVLPGYKYLGPFNGLDKGEPVNAADAAALEHDKAYDQQLKAGDNPYLRYNHADAEFQERLQEDTSFGGNLGRAVFQAKKRVLEPLGLVEEAAKTAPGKKRPVEPSPQRSPDSSTGIGKKGQQPARKRLNFGQTGDSESVPDPQPLGEPPAGPSGLGSGTMAAGGGAPMADNNEGADGVGNASGNWHCDSTWLGDRVITTSTRTWALPTYNNHLYKQISSQSAGSTNDNVYFGYSTPWGYFDFNRFHCHFSPRDWQRLINNNWGFRPKKLNFKLFNIQVKEVTTNDGVTTIANNLTSTVQVFSDSEYQLPYVLGSAHQGCLPPFPADVFMIPQYGYLTLNNGSQSVGRSSFYCLEYFPSQVLRTGNNFTFSYTFEDVPFHSSYAHSQSLDRLMNPLIDQYLYYLARTQSNPGGTSGNRELQFYQGGPSTMAEQAKNWLPGPCFRQQRVSKTLDQNNNSNFAWTGATKYHLNGRNSLVNPGVAMATHKDDEDRFFPSSGVLIFGKTGATNKTTLENVLMTNEEEIRPTNPVATEEYGIVSSNLQAANTAAQTQVVNNQGALPGMVWQNRDVYLQGPIWAKIPHTDGNFHPSPLMGGFGLKHPPPQILIKNTPVPANPPEVFTPAKFASFITQYSTGQVSVEIEWELQKENSKRWNPEIQYTSNFDKQTGVDFAVDSQGVYSEPRPIGTRYLTRNL

SEQ ID NO: 478 - DNA, 2214 bp, Artificial Sequence
  source: /note="Description of Artificial Sequence: Synthetic polynucleotide"
atggctgccgatggttatcttccagattggctcgaggacaacctctctgagggcattcgcgagtggtgggacctgaaacctggagccccgaaacccaaagccaaccagcaaaagcaggacgacggccggggtctggtgcttcctggctacaagtacctcggacccttcaacggactcgacaagggggagcccgtcaacgcggcggacgcagcggccctcgagcacgacaaggcctacgaccagcagctcaaagcgggtgacaatccgtacctgcggtataatcacgccgacgccgagtttcaggagcgtctgcaagaagatacgtcttttgggggcaacctcgggcgagcagtcttccaggccaagaagcgggttctcgaacctctcggtctggttgaggaaggcgctaagacggctcctggaaagaagagaccggtagagccgtcaccacagcgttcccccgactcctccacgggcatcggcaagaaaggccagcagcccgccagaaagagactcaatttcggtcagactggcgactcagagtcagtccccgaccctcaacctatcggagaacctccagcagcgccctctagtgtgggatctggtacaatggctgcaggcggtggcgcaccaatggcagacaataacgaaggtgccgacggagtgggtagttcctcgggaaattggcattgcgattccacacggctgggcgacagagtcatcaccaccagcacccggacctgggctttgcccacctacaacaaccacctctacaagcaaatctccagtcagtcagcaggtagcaccaacgacaacgtctacttcggctacagcaccccctgggggtattttgacttcaacagattccactgtcacttctcaccacgtgactggcagcggctcatcaacaacaactggggattccggcccaagaagctcaacttcaagctgttcaacatccaggtcaaggaggtcacaacgaatgacggcgtcacgaccatcgccaataaccttaccagcacggttcaggtcttttcggactcggaataccagctgccctacgtcctcggctccgcacaccagggctgcctgcctccgttcccggcggacgtcttcatgattccccagtacggctacctgactctgaacaatggcagccaatcggtgggtcgttcctctttctactgcctggaatatttcccttctcaaatgctgagaacgggcaacaacttcaccttcagctacaccttcgaggacgttcccttccacagcagctacgcacacagccagagcctggaccggctgatgaatcctcttatcgaccagtacctgtattacctggccagaacacagagcaacgcaggaggcacagctggcaatcgggaactgcagttttatcagggcgggcctaccaccatggccgaacaagccaaaaactggctgcctggaccttgcttccggcaacgaagagtctccaagacgctggatcaaaacaacaacagcaactttgcttggactggtgccaccaaataccatctaaatggaagaaattcattggttaatcccggtgtcgccatggcaacccacaaggacgacgaggaacgcttcttcccttcgagcggagtcctgatttttggaaaaactggagcagctaataagactacactggaaaatgtgttaatgacaaatgaagaggaaattcgtcctaccaacccggtagccaccgaggaatacgggactgttagcagcaacctgcaggcggctaacactgcagcccagacacaagttgtcaacaaccagggagccttacctggtatggtctggcagaaccgggacgtgtacctgcagggtcccatctgggccaagattcctcacacggacggcaactttcacccgtctccgctgatgggcggctttggactgaagcatccgcctcctcagatcctgatcaaaaacactcctgttcctgctaatcccccggaggtgtttacgcctgccaagtttgcttctttcatcacacagtacagcaccggccaggtcagcgtggagatcgagtgggagctgcagaaggagaacagcaagcgctggaacccagagattcagtatacctccaattttgacaaacagactggtgtggactttgccgttgacagccagggtgtttattctgagcctcgccccattggtactcgttacctcacccgtaatctgtaa

SEQ ID NO: 479 - protein, 737 aa, Artificial Sequence
  source: /note="Description of Artificial Sequence: Synthetic polypeptide"
MAADGYLPDWLEDNLSEGIREWWDLKPGAPKPKANQQKQDDGRGLVLPGYKYLGPFNGLDKGEPVNAADAAALEHDKAYDQQLKAGDNPYLRYNHADAEFQERLQEDTSFGGNLGRAVFQAKKRVLEPLGLVEEGAKTAPGKKRPVEPSPQRSPDSSTGIGKKGQQPARKRLNFGQTGDSESVPDPQPIGEPPAAPSSVGSGTMAAGGGAPMADNNEGADGVGSSSGNWHCDSTRLGDRVITTSTRTWALPTYNNHLYKQISSQSAGSTNDNVYFGYSTPWGYFDFNRFHCHFSPRDWQRLINNNWGFRPKKLNFKLFNIQVKEVTTNDGVTTIANNLTSTVQVFSDSEYQLPYVLGSAHQGCLPPFPADVFMIPQYGYLTLNNGSQSVGRSSFYCLEYFPSQMLRTGNNFTFSYTFEDVPFHSSYAHSQSLDRLMNPLIDQYLYYLARTQSNAGGTAGNRELQFYQGGPTTMAEQAKNWLPGPCFRQRRVSKTLDQNNNSNFAWTGATKYHLNGRNSLVNPGVAMATHKDDEERFFPSSGVLIFGKTGAANKTTLENVLMTNEEEIRPTNPVATEEYGTVSSNLQAANTAAQTQVVNNQGALPGMVWQNRDVYLQGPIWAKIPHTDGNFHPSPLMGGFGLKHPPPQILIKNTPVPANPPEVFTPAKFASFITQYSTGQVSVEIEWELQKENSKRWNPEIQYTSNFDKQTGVDFAVDSQGVYSEPRPIGTRYLTRNL

SEQ ID NO: 480 - DNA, 2208 bp, Artificial Sequence
  source: /note="Description of Artificial Sequence: Synthetic polynucleotide"
atggctgccgatggttatcttccagattggctcgaggacactctctctgaaggaataagacagtggtggaagctcaaacctggcccaccaccaccaaagcccgcagagcggcataaggacgacagcaggggtcttgtgcttcctgggtacaagtacctcggacccttcaacggactcgacaagggggagccggtcaacgaggcagacgccgcggccctcgagcacgacaaggcctacgaccggcagctcgacagcggagacaacccgtacctcaagtacaaccacgccgacgcggagtttcaggagcgtcttaaagaagatacgtcttttgggggcaacctcggacgagcagtcttccaggcgaaaaagagggttcttgaacctctgggcctggttgaggaacctgttaagacggctccgggaaaaaagaggccggtagagcactctcctgcggagccagactcctcctcgggaaccggaaaagcgggccagcagcctgcaagaaaaagattgaattttggtcagactggagacgcagactccgtacctgacccccagcctctcggacagccaccagcagccccctctggtttgggatctactacaatggctacaggcagtggcgcaccaatggcagacaataacgagggtgccgatggagtgggtaattcttcaggaaattggcattgcgattcccaatggctgggcgacagagtcatcaccaccagcacccgaacctgggcccagcccacctacaacaaccacctctacaagcaaatctcaagccaatcaggagcctcaaacgacaaccactactttggctacagcaccccttgggggtattttgacttcaacagattccactgccacttttcaccacgtgactggcaaagactcatcaacaacaactggggattccgacccaagagactcaacttcaagctctttaacattcaagtcaaagaggtcacgcagaatgacggtacgacgacgattgccaataaccttaccagcacggttcaggtgtttactgactcggagtaccagctcccgtacgtcctcgggtcggcgcatcaaggatgcctcccgccgtttccagcggacgtcttcatggtcccacagtatggatacctcaccctgaacaacgggagtcaggcggtaggacgctcttccttttactgcctggagtactttccttctcagatgcttcgtactggaaacaactttcagttcagctacacctttgaagacgttcctttccacagcagctacgctcacagccagagtctggatcggctgatgaatcctctgatcgaccagtacctgtattatctgaacaaaacacaatcaaatagtggagctcttcagcagtctcggctactgtttagtcaagctggacccaccagcatgtctcttcaagctaaaaactggctacctggaccttgctacagacagcagcgtctgtcaaagcaggcaaacgacaacaacaacagcaactttccctggactgcggctacaaagtaccacctaaatggccgggactcgttggttaatccaggaccagctatggccagtcacaaagacgatgaagaaaagtttttccccatgcatggaaccctgatatttggtaaacaaggaacaaatgctaacgacgcggatttggacaatgtcatgattacagatgaagaagaaatccgcaccaccaatcccgtggctacggagcagtacggatatgtgtcaaataatttgcaaaactcaaatactggtccaactactggaactgtcaatcaccgaggagcgttacctggcatggtgtggcaggatcgagacgtgtacctgcagggacccatttgggccaagattcctcacaccgatggacactttcatccttctccactgatgggaggttttgggctcaaacacccgcctcctcagatcatgatcaaaaacactcccgttccagccaatcctcccacaaacttcagttctgccaagtttgcttctttcatcacacagtattccacggggcaggtcagcgtggagatcgagtgggagctgcagaaagagaacagcaaacgctggaatcccgaaattcagtacacttccaactacaacaaatctgttaatgtggactttactgtggacactaatggcgtgtattcagagcctcgccccattggcaccagatacctgactcgtaatctgtaa

SEQ ID NO: 481 - protein, 735 aa, Artificial Sequence
  source: /note="Description of Artificial Sequence: Synthetic polypeptide"
MAADGYLPDWLEDTLSEGIRQWWKLKPGPPPPKPAERHKDDSRGLVLPGYKYLGPFNGLDKGEPVNEADAAALEHDKAYDRQLDSGDNPYLKYNHADAEFQERLKEDTSFGGNLGRAVFQAKKRVLEPLGLVEEPVKTAPGKKRPVEHSPAEPDSSSGTGKAGQQPARKRLNFGQTGDADSVPDPQPLGQPPAAPSGLGSTTMATGSGAPMADNNEGADGVGNSSGNWHCDSQWLGDRVITTSTRTWAQPTYNNHLYKQISSQSGASNDNHYFGYSTPWGYFDFNRFHCHFSPRDWQRLINNNWGFRPKRLNFKLFNIQVKEVTQNDGTTTIANNLTSTVQVFTDSEYQLPYVLGSAHQGCLPPFPADVFMVPQYGYLTLNNGSQAVGRSSFYCLEYFPSQMLRTGNNFQFSYTFEDVPFHSSYAHSQSLDRLMNPLIDQYLYYLNKTQSNSGALQQSRLLFSQAGPTSMSLQAKNWLPGPCYRQQRLSKQANDNNNSNFPWTAATKYHLNGRDSLVNPGPAMASHKDDEEKFFPMHGTLIFGKQGTNANDADLDNVMITDEEEIRTTNPVATEQYGYVSNNLQNSNTGPTTGTVNHRGALPGMVWQDRDVYLQGPIWAKIPHTDGHFHPSPLMGGFGLKHPPPQIMIKNTPVPANPPTNFSSAKFASFITQYSTGQVSVEIEWELQKENSKRWNPEIQYTSNYNKSVNVDFTVDTNGVYSEPRPIGTRYLTRNL

SEQ ID NO: 482 - DNA, 2217 bp, Artificial Sequence
  source: /note="Description of Artificial Sequence: Synthetic polynucleotide"
atggctgccgatggttatcttccagattggctcgaggacaacctctctgagggcattcgcgagtggtgggcgctgaaacctggagccccgaagcccaaagccaaccagcaaaagcaggacgacggccggggtctggtgcttcctggctacaagtacctcggacccttcaacggactcgacaagggggagcccgtcaacgcggcggacgcagcggccctcgagcacgacaaggcctacgaccagcagctgcaggcgggtgacaatccgtacctgcggtataatcacgccgacgccgagtttcaggagcgtctgcaagaagatacgtcttttgggggcaacctcgggcgagcagtcttccaggccaagaagcgggttctcgaacctctcggtctggttgaggaaggcgctaagacggctcctggaaagaagagaccggtagagccgtcaccacagcgttcccccgactcctccacgggcatcggcaagaaaggccagcagcccgccagaaagagactcaatttcggtcagactggcgactcagagtcagtccccgaccctcaacctatcggagaacctccagcagcgccctctagtgtgggatctggtacaatggctgcaggcggtggcgcgccaatggcagacaataacgaaggtgccgacggagtgggtagttcctcgggaaattggcattgcgattccacatggctgggcgacagagtcatcaccaccagcacccgaacctgggccctgcccacctacaacaaccacctctacaagcaaacctccaacgggacctcgggaggcagcaccaacgacaacacctactttggctacagcaccccctgggggtattttgactttaacagattccactgccacttctcaccacgtgactggcagcgactcatcaacaacaactggggattccggcccaagagactcagcttcaagctcttcaacatccaggtcaaagaggtcacgcagaatgaaggcaccaagaccatcgccaataacctcaccagcaccatccaggtgtttacggactcggaataccagctgccgtacgtcctcggctctgcccaccagggctgcctgcctccgttcccggcggacgtcttcatgattcctcagtacggctacctgactctcaacaacggtagtcaggccgtgggacgttcctccttctactgcctggagtacttcccctctcagatgctgagaacgggcaacaacttttccttcagctacactttcgaggacgtgcctttccacagcagctacgcgcacagccagagtttggacaggctgatgaatcctctcatcgaccagtacctgtactacctgtcaagaacccagtctacgggaggcacagcgggaacccagcagttgctgttttctcaggccgggcctagcaacatgtcggctcaggccagaaactggctgcctggaccctgctacagacagcagcgcgtctccacgacactgtcgcaaaacaacaacagcaactttgcctggactggtgccaccaagtatcatctgaacggcagagactctctggtgaatccgggcgtcgccatggcaaccaacaaggacgacgaggaccgcttcttcccatccagcggcatcctcatgtttggcaagcagggagctggaaaagacaacgtggactatagcaacgtgatgctaaccagcgaggaagaaatcaagaccaccaaccccgtggccacagaacagtatggcgtggtggctgataacctacagcagcaaaacaccgctcctattgtgggggccgtcaacagccagggagccttacctggcatggtctggcagaaccgggacgtgtacctgcagggtcctatttgggccaagattcctcacacagatggcaactttcacccgtctcctttaatgggcggctttggacttaaacatccgcctcctcagatcctcatcaaaaacactcctgttcctgcggatcctccaacagcgttcaaccaggccaagctgaattctttcatcacgcagtacagcaccggacaagtcagcgcggagatcgagtgggagctgcagaaggagaacagcaagcgctggaacccagagattcagtatacttccaactactacaaatctacaaatgtggactttgctgttaatactgagggtgtttactctgagcctcgccccattggcactcgttacctcacccgtaatctgtaa

SEQ ID NO: 483 - protein, 738 aa, Artificial Sequence
  source: /note="Description of Artificial Sequence: Synthetic polypeptide"
MAADGYLPDWLEDNLSEGIREWWALKPGAPKPKANQQKQDDGRGLVLPGYKYLGPFNGLDKGEPVNAADAAALEHDKAYDQQLQAGDNPYLRYNHADAEFQERLQEDTSFGGNLGRAVFQAKKRVLEPLGLVEEGAKTAPGKKRPVEPSPQRSPDSSTGIGKKGQQPARKRLNFGQTGDSESVPDPQPIGEPPAAPSSVGSGTMAAGGGAPMADNNEGADGVGSSSGNWHCDSTWLGDRVITTSTRTWALPTYNNHLYKQTSNGTSGGSTNDNTYFGYSTPWGYFDFNRFHCHFSPRDWQRLINNNWGFRPKRLSFKLFNIQVKEVTQNEGTKTIANNLTSTIQVFTDSEYQLPYVLGSAHQGCLPPFPADVFMIPQYGYLTLNNGSQAVGRSSFYCLEYFPSQMLRTGNNFSFSYTFEDVPFHSSYAHSQSLDRLMNPLIDQYLYYLSRTQSTGGTAGTQQLLFSQAGPSNMSAQARNWLPGPCYRQQRVSTTLSQNNNSNFAWTGATKYHLNGRDSLVNPGVAMATNKDDEDRFFPSSGILMFGKQGAGKDNVDYSNVMLTSEEEIKTTNPVATEQYGVVADNLQQQNTAPIVGAVNSQGALPGMVWQNRDVYLQGPIWAKIPHTDGNFHPSPLMGGFGLKHPPPQILIKNTPVPADPPTAFNQAKLNSFITQYSTGQVSAEIEWELQKENSKRWNPEIQYTSNYYKSTNVDFAVNTEGVYSEPRPIGTRYLTRNL

SEQ ID NO: 484 - DNA, 2217 bp, Artificial Sequence
  source: /note="Description of Artificial Sequence: Synthetic polynucleotide"
atggctgctgacggttatcttccagattggctcgaggacaacctctctgagggcattcgcgagtggtgggacctgaaacctggagcccccaagcccaaggccaaccagcagaagcaggacgacggccggggtctggtgcttcctggctacaagtacctcggacccttcaacggactcgacaagggggagcccgtcaacgcggcggacgcagcggccctcgagcacgacaaggcctacgaccagcagctcaaagcgggtgacaatccgtacctgcggtataatcacgccgacgccgagtttcaggagcgtctgcaagaagatacgtcttttgggggcaacctcgggcgagcagtcttccaggccaagaagcgggttctcgaacctctcggtctggttgaggaagctgctaagacggctcctggaaagaagagaccggtagaaccgtcacctcagcgttcccccgactcctccacgggcatcggcaagaaaggccagcagcccgctagaaagagactgaactttgggcagactggcgactcagagtcagtccccgaccctcaaccaatcggagaacctccagcagcgccctctagtgtgggatctggtacaatggccgcaggcggtggcgcaccaatggcagacaataacgaaggtgccgacggagtgggtagttcctcgggaaattggcattgcgattccacatggctgggcgacagagtcatcaccaccagcacccgaacctgggccctgcccacctacaacaaccacctctacaagcaaatctccaacgggacctcgggaggcagcaccaacgacaacacctactttggctacagcaccccctgggggtattttgactttaacagattccactgccacttctcaccacgtgactggcagcgactcatcaacaacaactggggattccggcccaagagactcagcttcaagctcttcaacatccaggtcaaagaggtcacgcagaatgaaggcaccaagaccatcgccaataacctcaccagcaccatccaggtgtttacggactcggaataccagctgccgtacgtcctcggctctgcccaccagggctgcctgcctccgttcccggcggacgtcttcatgattcctcagtacggctacctgactctcaacaacggtagtcaggccgtgggacgttcctccttctactgcctggagtacttcccctctcagatgctgagaacgggcaacaacttttccttcagctacactttcgaggacgtgcctttccacagcagctacgcgcacagccagagtttggacaggctgatgaatcctctcatcgaccagtacctgtactacctgtcaagaacccagtctacgggaggcacagcgggaacccagcagctgctgttttctcaggccgggcctagcaacatgtcggctcaggccagaaactggctgcctggaccctgctacagacagcagcgcgtctccacgacactgtcgcaaaacaacaacagcaactttgcctggactggtgccaccaagtatcatctgaacggcagagactctctggtgaatccgggcgtcgccatggcaaccaacaaggacgacgaggaccgcttcttcccatccagcggcatcctcatgtttggcaagcagggagctggaaaagacaacgtggactatagcaacgtgatgctaaccagcgaggaagaaatcaagaccaccaaccccgtggccacagaacagtatggcgtggtggctgataacctacagcagcaaaacaccgctcctattgtgggggccgtcaacagccagggagccttacctggcatggtctggcagaaccgggacgtgtacctgcagggtcctatttgggccaagattcctcacacagatggcaactttcacccgtctcctttaatgggcggctttggacttaaacatccgcctcctcagatcctcatcaaaagcactcctgttcctgcggatcctccaacagcgttcaaccaggccaagctgaattctttcatcacgcagtacagcaccggacaagtcagcgtggagatcgagtgggagctgcagaaggagaacagcaagtgctggaacccagagattcagtatacttccaactactacaaatctacaaatgtggactttgctgttaatactgagggtgtttactctgagcctcgccccattggcactcgttacctcacccgtaatctgtaa

SEQ ID NO: 485 - protein, 738 aa, Artificial Sequence
  source: /note="Description of Artificial Sequence: Synthetic polypeptide"
MAADGYLPDWLEDNLSEGIREWWDLKPGAPKPKANQQKQDDGRGLVLPGYKYLGPFNGLDKGEPVNAADAAALEHDKAYDQQLKAGDNPYLRYNHADAEFQERLQEDTSFGGNLGRAVFQAKKRVLEPLGLVEEAAKTAPGKKRPVEPSPQRSPDSSTGIGKKGQQPARKRLNFGQTGDSESVPDPQPIGEPPAAPSSVGSGTMAAGGGAPMADNNEGADGVGSSSGNWHCDSTWLGDRVITTSTRTWALPTYNNHLYKQISNGTSGGSTNDNTYFGYSTPWGYFDFNRFHCHFSPRDWQRLINNNWGFRPKRLSFKLFNIQVKEVTQNEGTKTIANNLTSTIQVFTDSEYQLPYVLGSAHQGCLPPFPADVFMIPQYGYLTLNNGSQAVGRSSFYCLEYFPSQMLRTGNNFSFSYTFEDVPFHSSYAHSQSLDRLMNPLIDQYLYYLSRTQSTGGTAGTQQLLFSQAGPSNMSAQARNWLPGPCYRQQRVSTTLSQNNNSNFAWTGATKYHLNGRDSLVNPGVAMATNKDDEDRFFPSSGILMFGKQGAGKDNVDYSNVMLTSEEEIKTTNPVATEQYGVVADNLQQQNTAPIVGAVNSQGALPGMVWQNRDVYLQGPIWAKIPHTDGNFHPSPLMGGFGLKHPPPQILIKSTPVPADPPTAFNQAKLNSFITQYSTGQVSVEIEWELQKENSKCWNPEIQYTSNYYKSTNVDFAVNTEGVYSEPRPIGTRYLTRNL

SEQ ID NO: 486 - protein, 738 aa, Artificial Sequence
  source: /note="Description of Artificial Sequence: Synthetic polypeptide"
MAADGYLPDWLEDNLSEGIREWWDLKPGAPKPKANQQKQDDGRGLVLPGYKYLGPFNGLDKGEPVNAADAAALEHDKAYDQQLKAGDNPYLRYNHADAEFQERLQEDTSFGGNLGRAVFQAKKRVLEPLGLVEEAAKTAPGKKRPVEPSPQRSPDSSTGIGKKGQQPARKRLNFGQTGDSESVPDPQPIGEPPAAPSSVGSGTMAAGGGAPMADNNEGADGVGSSSGNWHCDSTWLGDRVITTSTRTWALPTYNNHLYKQISNGTSGGSTNDNTYFGYSTPWGYFDFNRFHCHFSPRDWQRLINNNWGFRPKRLSFKLFNIQVKEVTQNEGTKTIANNLTSTIQVFTDSEYQLPYVLGSAHQGCLPPFPADVFMIPQYGYLTLNNGSQAVGRSSFYCLEYFPSQMLRTGNNFSFSYTFEDVPFHSSYAHSQSLDRLMNPLIDQYLYYLSRTQSTGGTAGTQQLLFSQAGPSNMSAQARNWLPGPCYRQQRVSTTLSQNNNSNFAWTGATKYHLNGRDSLVNPGVAMATNKDDEDRFFPSSGILMFGKQGAGKDNVDYSNVMLTSEEEIKTTNPVATEQYGVVADNLQQQNTAPIVGAVNSQGALPGMVWQNRDVYLQGPIWAKIPHTDGNFHPSPLMGGFGLKHPPPQILIKSTPVPADPPTAFNQAKLNSFITQYSTGQVSVEIEWELQKENSKRWNPEIQYTSNYYKSTNVDFAVNTEGVYSEPRPIGTRYLTRNL

SEQ ID NO: 487 - DNA, 2217 bp, Artificial Sequence
  source: /note="Description of Artificial Sequence: Synthetic polynucleotide"
atggctgctgacggttatcttccagattggctcgaggacaacctctctgagggcattcgcgagtggtgggacctgaaacctggagcccccaagcccaaggccaaccagcagaagcaggacgacggccggggtctggtgcttcctggctacaagtacctcggacccttcaacggactcgacaagggggagcccgtcaacgcggcggacgcagcggccctcgagcacgacaaggcctacgaccagcagctcaaagcgggtgacaatccgtacctgcggtataaccacgccgacgccgagtttcaggagcgtctgcaagaagatacgtcttttgggggcaacctcgggcgagcagtcttccaggccaagaagcgggttctcgaacctctcggtctggttgaggaagctgctaagacggctcctggaaagaagagaccggtagaaccgtcacctcagcgttcccccgactcctccacgggcatcggcaagaaaggccagcagcccgctagaaagagactgaactttgggcagactggcgactcagagtcagtccccgaccctcaaccaatcggagaaccaccagcaggcccctctggtctgggatctggtacaatggctgcaggcggtggcgcaccaatggctgacaataacgagggcgccgacggagtgggtaatgcctcaggaaattggcattgcgattccacatggctgggcgacagagtcatcaccaccagcacccgaacctgggctttgcccacctacaacaaccacctctacaagcaaatctccagtcagtcagcaggtagcaccaacgacaacgtctacttcggctacagcaccccctgggggtattttgacttcaacagattccactgtcacttctcaccacgtgactggcagcggctcatcaacaacaactggggattccggcccaagaagctcaacttcaagctgttcaacatccaggtcaaggaggtcacaacgaatgacggcgtcacgaccatcgccaataaccctaccagcacggttcaggtcttttcggactcggaataccagctgccctacgtcctcggctccgcacaccagggctgcctgcctccgttcccggcggacgtcttcatgattccccagtacggctacctgactctgaacaatggcagccaatcggtgggtcgttcctctttctactgcctggaatatttcccttctcaaatgctgagaacgggcaacaacttcaccttcagctacaccttcgaggacgttcccttccacagcagctacgcacacagccagagcctggaccggctgatgaatcctcttatcgaccagtacctgtattacctggccagaacacagagcaacgcaggaggcacagctggcaatcgggaactgcagttttatcagggcgggcctaccaccatggccgaacaagccaaaaactggctgcctggaccctgctacagacagcagcgcgtctccacgacactgtcgcaaaacaacaacagcaactttgcctggactggtgccaccaagtatcatctgaacggcagagactctctggtgaatccgggcgtcgccatggcaaccaacaaggacgacgaggaccgcttcttcccatccagcggcatcctcatgtttggcaagcagggagctggaaaagacaacgtggactatagcaacgtgatgctaaccagcgaggaagaaatcaagaccaccaaccccgtggccacagaacagtatggcgtggtggctgataacctacagcagcaaaacaccgctcctattgtgggggccgtcaacagccagggagccttacctggcatggtctggcagaaccgggacgtgtacctgcagggtcctatttgggccaagattcctcacacagatggcaactttcacccgtctcctttaatgggcggctttggacttaaacatccgcctcctcagatcctcatcaaaaacactcctgttcctgcggatcctccaacagcgttcaaccaggccaagctgaattctttcatcacgcagtacagcaccggacaagtcagcgtggagatcgagtgggagctgcagaaggagaacagcaagcgctggaacccagagattcagtatacttccaactactacaaatctacaaatgtggactttgctgttaatactgagggtgtttactctgagcctcgccccattggcactcgttacctcacccgtaatctgtaa

SEQ ID NO: 488 - protein, 738 aa, Artificial Sequence
  source: /note="Description of Artificial Sequence: Synthetic polypeptide"
MAADGYLPDWLEDNLSEGIREWWDLKPGAPKPKANQQKQDDGRGLVLPGYKYLGPFNGLDKGEPVNAADAAALEHDKAYDQQLKAGDNPYLRYNHADAEFQERLQEDTSFGGNLGRAVFQAKKRVLEPLGLVEEAAKTAPGKKRPVEPSPQRSPDSSTGIGKKGQQPARKRLNFGQTGDSESVPDPQPIGEPPAGPSGLGSGTMAAGGGAPMADNNEGADGVGNASGNWHCDSTWLGDRVITTSTRTWALPTYNNHLYKQISSQSAGSTNDNVYFGYSTPWGYFDFNRFHCHFSPRDWQRLINNNWGFRPKKLNFKLFNIQVKEVTTNDGVTTIANNPTSTVQVFSDSEYQLPYVLGSAHQGCLPPFPADVFMIPQYGYLTLNNGSQSVGRSSFYCLEYFPSQMLRTGNNFTFSYTFEDVPFHSSYAHSQSLDRLMNPLIDQYLYYLARTQSNAGGTAGNRELQFYQGGPTTMAEQAKNWLPGPCYRQQRVSTTLSQNNNSNFAWTGATKYHLNGRDSLVNPGVAMATNKDDEDRFFPSSGILMFGKQGAGKDNVDYSNVMLTSEEEIKTTNPVATEQYGVVADNLQQQNTAPIVGAVNSQGALPGMVWQNRDVYLQGPIWAKIPHTDGNFHPSPLMGGFGLKHPPPQILIKNTPVPADPPTAFNQAKLNSFITQYSTGQVSVEIEWELQKENSKRWNPEIQYTSNYYKSTNVDFAVNTEGVYSEPRPIGTRYLTRNL

SEQ ID NO: 489 - DNA, 2208 bp, Artificial Sequence
  source: /note="Description of Artificial Sequence: Synthetic polynucleotide"
atggctgccgatggttatcttccagattggctcgaggacaacctctctgagggcattcacgagtggtgggacccgaaacctggagccccgaaacccaaagccaaccagcaaaagcaggacgacggccggggtctggtgcttcctggctacaagtacctcggacccttcaacggactcgacaagggggagcccgtcaacgcggcggacgcagcggccctcgagcacgacaaggcctacgaccagcagctcaaagcgggtgacaatccgtacctgcggtataatcacgccgacgccgagtttcaggagcgtctgcaagaagatacgtcttttgggggcaacctcgggcgagcagtcttccaggccaagaagcgggttctcgaacctctcggtctggttgaggaaggcgctaagacggctcctggaaagaagagaccggtagagccgtcaccacagcgttcccccgactcctccacgggcatcggcaagaaaggccagcagcccgccagaaagagactcaatttcggtcagactggcgactcagagtcagtccccgaccctcaacctatcggagaacctccagcagcgccctctagtgtgggatctggtacaatggctgcaggcggtggcgcaccaatggcagacaataacgaaggtgccgacggagtgggtagttcctcgggaaattggcattgcgattccacatggctgggcgacagagtcatcaccaccagcacccgaacctgggccctgcccacccacaacaaccacctctacaagcaaatctccaacgggacctcgggaggcagcaccaacgacaacgtctacttcggctacagcaccccctgggggtattttgacttcaacagattccactgtcacttctcaccacgtgaccggcagcgactcatcaacaacaactggggattccggcccaagagactcagcttcaagctcttcaacatccaggtcaaagaggtcacgcagaatgaaggcaccaagaccatcgccaataacctcaccagcaccatccaggtgtttacggactcggaataccagctgccgtacgtcctcggctctgcccaccagggctgcctgcctccgttcccggcggacgtcttcatgattcctcagtacggctacctgactctcaacaacggtagtcaggccgtgggacgttcctccttctactgcctggagtacttcccctctcagatgctgagaacgggcaacaacttttccttcagctacactttcgaggacgtgcctttccacagcagctacgcgcacagccagagtttggacaggctgatgaatcctctcatcgaccagtacctgtactacctgtcaagaacccagtctacggaaggcacagcgggaacccagcagttgctgttttctcaggccgggcctagcaacatgtcggctcaggccagaaactggctgcctggaccctgctacagacagcagcgcgtctccacgacactgtcgcaaaacaacaacagcaactttgcctggactggtgccaccaagtatcatctgaacggcagagactctctggtgaatccgggcgtcgccatggcaacccacaaggacgacgaggaacgcttcttcccttcgagcggagtcctgatttttggaaaaactggagcagctaataagactacactggaaaatgtgttaatgacaaatgaagaggaaattcgtcctaccaacccggtagccaccgaggaatacgggactgttagcagcaacctgcaggcggctaacactgcagcccagacacaagttgtcaacaaccagggagccttacctggtatggtctggcagaaccgggacgtgtacctgcagggtcccatctgggccaagattcctcacacggacggcaactttcacccgtctccgctgatgggcggctttggactgaagcatcctcagatcctgatcaaaaacactcctgttcctgctaatcccccggaggtgtttacgcctgccaagtttgcttctttcatcacacagtacagcaccggccaggtcagcgtggagatcgagtgggagctgcagaaggagaacagcaagcgctggaacccagagattcagtatacctccaattttgacaaacagactggtgtggactttgccgttgacagccagggtgtttattctgagcctcgccccattggtactcgttacctcacccgtaatctgtaa

SEQ ID NO: 490 - protein, 735 aa, Artificial Sequence
  source: /note="Description of Artificial Sequence: Synthetic polypeptide"
MAADGYLPDWLEDNLSEGIHEWWDPKPGAPKPKANQQKQDDGRGLVLPGYKYLGPFNGLDKGEPVNAADAAALEHDKAYDQQLKAGDNPYLRYNHADAEFQERLQEDTSFGGNLGRAVFQAKKRVLEPLGLVEEGAKTAPGKKRPVEPSPQRSPDSSTGIGKKGQQPARKRLNFGQTGDSESVPDPQPIGEPPAAPSSVGSGTMAAGGGAPMADNNEGADGVGSSSGNWHCDSTWLGDRVITTSTRTWALPTHNNHLYKQISNGTSGGSTNDNVYFGYSTPWGYFDFNRFHCHFSPRDRQRLINNNWGFRPKRLSFKLFNIQVKEVTQNEGTKTIANNLTSTIQVFTDSEYQLPYVLGSAHQGCLPPFPADVFMIPQYGYLTLNNGSQAVGRSSFYCLEYFPSQMLRTGNNFSFSYTFEDVPFHSSYAHSQSLDRLMNPLIDQYLYYLSRTQSTEGTAGTQQLLFSQAGPSNMSAQARNWLPGPCYRQQRVSTTLSQNNNSNFAWTGATKYHLNGRDSLVNPGVAMATHKDDEERFFPSSGVLIFGKTGAANKTTLENVLMTNEEEIRPTNPVATEEYGTVSSNLQAANTAAQTQVVNNQGALPGMVWQNRDVYLQGPIWAKIPHTDGNFHPSPLMGGFGLKHPQILIKNTPVPANPPEVFTPAKFASFITQYSTGQVSVEIEWELQKENSKRWNPEIQYTSNFDKQTGVDFAVDSQGVYSEPRPIGTRYLTRNL

SEQ ID NO: 491 - protein, 738 aa, Artificial Sequence
  source: /note="Description of Artificial Sequence: Synthetic polypeptide"
MAADGYLPDWLEDNLSEGIREWWDLKPGAPKPKANQQKQDDGRGLVLPGYKYLGPFNGLDKGEPVNAADAAALEHDKAYDQQLKAGDNPYLRYNHADAEFQERLQEDTSFGGNLGRAVFQAKKRVLEPLGLVEEGAKTAPGKKRPVEPSPQRSPDSSTGIGKKGQQPARKRLNFGQTGDSESVPDPQPIGEPPAAPSSVGSGTMAAGGGAPMADNNEGADGVGSSSGNWHCDSTWLGDRVITTSTRTWALPTYNNHLYKQISNGTSGGSTNDNTYFGYSTPWGYFDFNRFHCHFSPRDWQRPINNNWGFRPKRLSFKLFNIQVKEVTQNEGTKTIANNLTSTIQVFTDSEYQLPYVLGSAHQGCLPPFPADVFMIPQYGYLTLNNGSQAVGRSSFYCLEYFPSQMLRTGNNFSFSYPFEDVPFHSSYAHSQSLDRLMNPLIDQYLYYLSRTQSTGGTAGTQQLLFSQAGPSNMSAQARNWLPGPCYRQQRVSTTLSQNNNSNFAWTGATKYHLNGRDSLVNPGVAMATNKDDEDRFFPSSGILMFGKQGAGKDNVDYSNVMLTSEEEIKTTNPVATEQYGVVADNLQQQDTAPIVGAVNSQGALPGMVWQNRDVYLQGPIWAKIPHTDGNFHPSPLMGGFGLKHPPPQVLIKNTPVPADPPTAFNQAKLNSFITQYSTGQVSVEIEWELQKENSKRWNPEIQYTSNYYKSTNVDFAVNTEGVYSEPRPIGTRYLTRNL

SEQ ID NO: 492 - DNA, 2217 bp, Artificial Sequence
  source: /note="Description of Artificial Sequence: Synthetic polynucleotide"
atggctgccgatggttatcttccagattggctcgaggacaacctctctgagggcattcgcgagtggtgggacctgaaacctggagccccgaaacccaaggccaaccagcaaaagcaggacgacggccggggtctggtgcttcctggctacaagtacctcggacccttcaacggactcgacaagggggagcccgtcaacgcggcggacgcagcggccctcgagcacgacaaggcctacgaccagcagctcaaagcgggtgacaatccgtacctgcggtataatcacgccgacgccgagtttcaggagcgtctgcaagaagatacgtcttttgggggcaacctcgggcgagcagtcttccaggccaagaagcgggttctcgaacctctcggtctggttgaggaaggcgctaagacggctcctggaaagaagagaccggtagagccgtcaccacagcgttcccccgactcctccacgggcatcggcaagaaaggccagcagcccgccagaaagagactcaatttcggtcagactggcgactcagagtcagtccccgaccctcaacctatcggagaacctccagcagcgccctctagtgtgggatctggtacaatggctgcaggcggtggcgcaccaatggcagacaataacgaaggtgccgacggagtgggtagttcctcgggaaattggcattgcgattccacatggctgggcgacagagtcatcaccaccagcacccgaacctgggccctgcccacctacaacaaccacctctacaagcaaatctccaacgggacctcgggaggcagcaccaacgacaacacctactttggctacagcaccccctgggggtattttgactttaacagattccactgccacttctcaccacgtgactggcagcgacccatcaacaacaactggggattccggcccaagagactcagcttcaagctcttcaacatccaggtcaaagaggtcacgcagaatgaaggcaccaagaccatcgccaataacctcaccagcaccatccaggtgtttacggactcggaataccagctgccgtacgtcctcggctctgcccaccagggctgcctgcctccgttcccggcggacgtcttcatgattcctcagtacggctacctgactctcaacaacggtagtcaggccgtgggacgttcctccttctactgcctggagtacttcccctctcagatgctgagaacgggcaacaacttttccttcagctaccctttcgaggacgtgcctttccacagcagctacgcgcacagccagagtttggacaggctgatgaatcctctcatcgaccagtacctgtactacctgtcaagaacccagtctacgggaggcacagcgggaacccagcagttgctgttttctcaggccgggcctagcaacatgtcggctcaggccagaaactggctgcctggaccctgctacagacagcagcgcgtctccacgacactgtcgcaaaacaacaacagcaactttgcctggactggtgccaccaagtatcatctgaacggcagagactctctggtgaatccgggcgtcgccatggcaaccaacaaggacgacgaggaccgcttcttcccatccagcggcatcctcatgtttggcaagcagggagctggaaaagacaacgtggactatagcaacgtgatgctaaccagcgaggaagaaatcaagaccaccaaccccgtggccacagaacagtatggcgtggtggctgataacctacagcagcaagacaccgctcctattgtgggggccgtcaacagccagggagccttacctggcatggtctggcagaaccgggacgtgtacctgcagggtcctatttgggccaagattcctcacacagatggcaactttcacccgtctcctttaatgggcggctttggacttaaacatccgcctcctcaggtcctcatcaaaaacactcctgttcctgcggatcctccaacagcgttcaaccaggccaagctgaattctttcatcacgcagtacagcaccggacaagtcagcgtggagatcgagtgggagctgcagaaggagaacagcaagcgctggaacccagagattcagtatacttccaactactacaaatctacaaatgtggactttgctgttaatactgagggtgtttactctgagcctcgccccattggcactcgttacctcacccgtaatctgtaa

SEQ ID NO: 493 - DNA, 2214 bp, Artificial Sequence
  source: /note="Description of Artificial Sequence: Synthetic polynucleotide"
atggctgctgacggttatcttccagattggctcgaggacaacctctctgagggcattcgcgagtggtgggacctgaaacctggagcccccaagcccaaggccaaccagcagaagcaggacgacggccggggtctggtgcttcctggctacaagtacctcggacccttcaacggactcgacaagggggagcccgtcaacgcggcggacgcagcggccctcgagcacgacaaggcctacgaccagcagctcaaagcgggtgacaatccgtacctgcggtataaccacgccgacgccgagttccaggagcgtctgcaagaagatacgtcttttgggggcaacctcgggcgagcagtcttccaggccaagaagcgggttctcgaacctctcggtctggctgaggaagctgctaagacggctcctggaaagaagagaccggtagaaccgtcacctcagcgttcccccgactcctccacgggcatcggcaagaaaggccagcagcccgctagaaagagactgaactttgggcagactggcgactcagagtcagtccccgaccctcaaccaatcggagagccaccagcaggcccctctggtctgggatctggtacaatggctgcaggcggtggcgcaccaatggctgacaataacaagggcgccgacggagtgggtaatgcctcaggaaattggcattgcgattccacatggctgggcgacagagtcatcaccaccagcacccgaacctgggctttgcccacctacaacaaccacctctacaagcaaatctccagtcagtcagcaggtagcaccaacgacaacgtctacttcggctacagcaccccctgggggtattttgacttcaacagattccactgtcacttctcaccacgtgactggcagcggctcatcaacaacaactggggattccggcccaagaagctcaacttcaagctgttcaacatccaggtcaaggaggtcacaacgggtgacggcgtcacgaccatcgccaataaccttaccagcacggttcaggtcttttcggactcggaataccagctgccctacgtcctcggctccgcacaccagggctgcctgcctccgttcccggcggacgtcttcatgattccccagtacggctacctgactctgaacaatgacagccaatcggtgggtcgttcctctttctactgcctggaatatttcccttctcaaatgctgagaacgggcaacaacttcaccttcagctacaccttcgaggacgttcccttccacagcagctacgcacacagccagagcctggaccggctgatgaatcctcttatcgaccagtacctgtattacctggccagaacacagagcaacgcaggaggcacagctggcaatcgggaactgcagttttatcagggcgggcctaccaccatggccgaacaagccaaaaactggctgcctggaccttgcttccggcaacaaagagtctccaagacgctggatcaaaacaacaacagcaactttgcttggactggtgccaccaaataccatctaaatggaagaaattcattggttaatcccggtgtcgccatggcaacccacaaggacgacgaggaacgcttcttcccttcgagcggagtcctgatttttggaaaaactggagcagctaataagactacactggaaaatgtgttaatgacaaatgaagaggaaattcgtcctaccaacccggtagccaccgaggaatacgggactgttagcagcaacctgcaggcggctaacactgcagcccagacacaagttgtcaacaaccagggagccttacctggtatggtctggcagaaccgggacgtgtacctgcagggtcccatctgggccaagattcctcacacggacggcaactttcacccgtctccgctgatgggcggctttggactgaagcatccgcctcctcagatcctgatcaaaaacactcctgttcctgctaatcccccggaggtgtttacgcctgccaagtttgcttctttcatcacacagtacagcaccggccaggtcagcgtggagatcgagtgggagctgcagaaggagaacagcaagcgctggaacccagagattcagtatacctccaattttgacaaacagactggtgtggactttgccgttgacagccagggtgtttattctgagcctcgccccattggtactcgttacctcacccgtaatctgtaa

SEQ ID NO: 494 - protein, 737 aa, Artificial Sequence
  source: /note="Description of Artificial Sequence: Synthetic polypeptide"
MAADGYLPDWLEDNLSEGIREWWDLKPGAPKPKANQQKQDDGRGLVLPGYKYLGPFNGLDKGEPVNAADAAALEHDKAYDQQLKAGDNPYLRYNHADAEFQERLQEDTSFGGNLGRAVFQAKKRVLEPLGLAEEAAKTAPGKKRPVEPSPQRSPDSSTGIGKKGQQPARKRLNFGQTGDSESVPDPQPIGEPPAGPSGLGSGTMAAGGGAPMADNNKGADGVGNASGNWHCDSTWLGDRVITTSTRTWALPTYNNHLYKQISSQSAGSTNDNVYFGYSTPWGYFDFNRFHCHFSPRDWQRLINNNWGFRPKKLNFKLFNIQVKEVTTGDGVTTIANNLTSTVQVFSDSEYQLPYVLGSAHQGCLPPFPADVFMIPQYGYLTLNNDSQSVGRSSFYCLEYFPSQMLRTGNNFTFSYTFEDVPFHSSYAHSQSLDRLMNPLIDQYLYYLARTQSNAGGTAGNRELQFYQGGPTTMAEQAKNWLPGPCFRQQRVSKTLDQNNNSNFAWTGATKYHLNGRNSLVNPGVAMATHKDDEERFFPSSGVLIFGKTGAANKTTLENVLMTNEEEIRPTNPVATEEYGTVSSNLQAANTAAQTQVVNNQGALPGMVWQNRDVYLQGPIWAKIPHTDGNFHPSPLMGGFGLKHPPPQILIKNTPVPANPPEVFTPAKFASFITQYSTGQVSVEIEWELQKENSKRWNPEIQYTSNFDKQTGVDFAVDSQGVYSEPRPIGTRYLTRNL

SEQ ID NO: 495 - DNA, 2217 bp, Artificial Sequence
  source: /note="Description of Artificial Sequence: Synthetic polynucleotide"
atggctgccgatggttatcttccagattggctcgaggacaacctctctgagggcattcgcgagtggtgggacctgaaacctggagccccgaaacccaaagccaaccagcaaaagcaggacgacggccggggtctggtgcttcctggctacaagtacctcggacccttcaacggactcgacaagggggagcccgtcaacgcggcggacgcagcggccctcgagcacgacaaggcctacgaccagcagctcaaagcgggtgacaatccgtacctgcggtataatcacgccgacgccgagtttcaggagcgtctgcaagaagatacgtcttttgggggcaacctcgggcgagcagtcttccaggccaagaagcgggttctcgaacctctcggtctggttgaggaaggcgctaagacggctcctggaaagaagagaccggtagagccgtcaccacagcgttcccccgactcctccacgggcatcggcaagaaaggccagcagcccgccagaaagagactcaatttcggtcagactggcgactcagagtcagtccccgaccctcaacctatcggagaacctccagcagcgccctctagtgtgggatctggtacaatggctgcaggcggtggcgcaccaatggcagacaataacgaaggtgccgacggagtgggtagttcctcgggaaattggcattgcgattccacatggctgggcgacagagtcatcaccaccagcacccgaacctgggccctgcccacctacaacaaccacctctacaagcaaatctccaacgggacctcgggaggcagcaccaacgacaacacctactttggctacagcaccccctgggggtattttgactttaacagattccactgccacttctcaccacgtgactggcagcgactcatcaacaacaactggggattccggcccaagagactcagcttcaagctcttcaacatccaggtcaaagaggtcacgcagaatgaaggcaccaagaccatcgccaataacctcaccagcaccatccaggtgtttacggactcggaataccagctgccgtacgtcctcggctctgcccaccagggctgcctgcctccgttcccggcggacgtcttcatgattcctcagtacggctacctgactctcaacaacggtagtcaggccgtgggacgttcctccttctactgcctggagtacttcccctctcagatgctgagaacgggcaacaacttttccttcagctacactttcgaggacgtgcctttccacagcagctacgcgcacagccagagtttggacaggctgatgaatcctctcatcgaccagtacctgtactacctgtcaagaacccagtctacgggaggcacagcgggaacccagcagttgctgttttctcaggccgggcctagcaacatgtcggctcaggccagaaactggctgcctggaccctgctacagacagcagcgcgtctccacgacactgtcgcaaaacaacaacagcaactttgcctggactggtgccaccaagtatcatctgaacggcagagactctctggtgaatccgggcgtcgccatggcaaccaacaaggacgacgaggaccgcttcttcccatccagcggcatcctcatgtttggcaagcagggagctggaaaagacaacgtggactatagcaacgtgatgctaaccagcgaggaagaaatcaagaccaccaaccccgtggccacagaacagtatggcgtggtggctgataacctacagcagcaaaacaccgctcctattgtgggggccgtcaacagccagggagccttacctggcatggtctggcagaaccgggacgtgtacctgcagggtcctatttgggccaagattcctcacacagatggcaactttcacccgtctcctttaatgggcggctttggacttaaacatccgcctcctcagatcctcatcaaaaacactcctgttcctgcggatcctccaacagcgttcaaccaggccaagctgaattctttcatcacgcagtacagcaccggacaagtcagcgtggagatcgtgtgggagctgcagaaggagaacagcaagcgcaggaacccagagattcagtatacttccaactactacaaatctacaaatgtggactttgctgttaatactgagggtgtttactctgagcctcgccccattggcactcgttacctcacccgtaatctgtaa

SEQ ID NO: 496 - protein, 738 aa, Artificial Sequence
  source: /note="Description of Artificial Sequence: Synthetic polypeptide"
MAADGYLPDWLEDNLSEGIREWWDLKPGAPKPKANQQKQDDGRGLVLPGYKYLGPFNGLDKGEPVNAADAAALEHDKAYDQQLKAGDNPYLRYNHADAEFQERLQEDTSFGGNLGRAVFQAKKRVLEPLGLVEEGAKTAPGKKRPVEPSPQRSPDSSTGIGKKGQQPARKRLNFGQTGDSESVPDPQPIGEPPAAPSSVGSGTMAAGGGAPMADNNEGADGVGSSSGNWHCDSTWLGDRVITTSTRTWALPTYNNHLYKQISNGTSGGSTNDNTYFGYSTPWGYFDFNRFHCHFSPRDWQRLINNNWGFRPKRLSFKLFNIQVKEVTQNEGTKTIANNLTSTIQVFTDSEYQLPYVLGSAHQGCLPPFPADVFMIPQYGYLTLNNGSQAVGRSSFYCLEYFPSQMLRTGNNFSFSYTFEDVPFHSSYAHSQSLDRLMNPLIDQYLYYLSRTQSTGGTAGTQQLLFSQAGPSNMSAQARNWLPGPCYRQQRVSTTLSQNNNSNFAWTGATKYHLNGRDSLVNPGVAMATNKDDEDRFFPSSGILMFGKQGAGKDNVDYSNVMLTSEEEIKTTNPVATEQYGVVADNLQQQNTAPIVGAVNSQGALPGMVWQNRDVYLQGPIWAKIPHTDGNFHPSPLMGGFGLKHPPPQILIKNTPVPADPPTAFNQAKLNSFITQYSTGQVSVEIVWELQKENSKRRNPEIQYTSNYYKSTNVDFAVNTEGVYSEPRPIGTRYLTRNL

SEQ ID NO: 497 - protein, 738 aa, Artificial Sequence
  source: /note="Description of Artificial Sequence: Synthetic polypeptide"
MAADGYLPDWLEDNLSEGIREWWDLKPGAPKPKANQQKQDDGRGLVLPGYKYLGPFNGLDKGEPVNAADAAALEHDKAYDQQLKAGDNPYLRYNHADAEFQERLQEDTSFGGNLGRAVFQAKKRVLEPLGLVEEGAKTAPGKKRPVEPSPQRSPDSSTGIGKKGQQPARKRLNFGQTGDSESVPDPQPIGEPPAAPSSVGSGTMAAGGGAPMADNNEGADGVGSSSGNWHCDSTWLGDRVITTSTRTWALPTYNNHLYKQISNGTSGGSTNDNTYFGYSTPWGYFDFNRFHCHFSPRDWQRLINNNWGFRPKRLSFKLFNIQVKEVTQNEGTKTIANNLTSTIQVFTDSEYQLPYVLGSAHQGCLPPFPADVFMIPQYGYLTLNNGSQAVGRSSFYCLEYFPSQMLRTGNNFSFSYTFEDVPFHSSYAHSQSLDRLMNPLIDQYLYYLSRTQSTGGTAGTQQLLFSQAGPSNMSAQARNWLPGPCYRQQRVSTTLSQNNNSNFAWTGATKYHLNGRDSLVNPGVAMATNKDDEDRFFPSSGILMFGKQGAGKDNVDYSNVMLTSEEEIKTTNPVATEQYGVVADNLQQQNTAPIVGAVNSQGALPGMVWQNRDVYLQGPIWAKIPHTDGNFHPSPLMGGFGLKHPPPQILIKNTPVPADPPTAFNQAKLNSFITQYSTGQVSVEIEWELQKENSKRWNPEIQYTSNYYKSTNVDFAVNTEGVYSEPRPIGTRYLTRNL

SEQ ID NO: 498 - protein, 738 aa, Artificial Sequence
  source: /note="Description of Artificial Sequence: Synthetic polypeptide"
MAADGYLPDWLEDNLSEGIREWWDLKPGAPKPKANQQKQDDGRGLVLPGYKYLGPFNGLDKGEPVNAADAAALEHDKAYDQQLKAGDNPYLRYNHADAEFQERLQEDTSFGGNLGRAVFQAKKRVLEPLGLVEEGAKTAPGKKRPVEPSPQRSPDSSTGIGKKGQQPARKRLNFGQTGDSESVPDPQPIGEPPAAPSSVGSGTMAAGGGAPMADNNEGADGVGSSSGNWHCDSTWLGDRVITTSTRTWALPTYNNHLYKQISNGTSGGSTNDNTYFGYSTPWGYFDFNRFHCHFSPRDWQRLINNNWGFRPKRLSFKLFNIQVKEVTQNEGTKTIANNLTSTIQVFTDSEYQLPYVLGSAHQGCLPPFPADVFMIPQYGYLTLNNGSQAVGRSSFYCLEYFPSQMLRTGNNFSFSYTFEDVPFHSSYAHSQSLDRLMNPLIDQYLYYLSRTQSTGGTAGTQQLLFSQAGPSNMSAQARNWLPGPCYRQQRVSTTLSQNNNSNFAWTGATKYHLNGRDSLVNPGVAMATNKDDEDRFFPSSGILMFGKQGAGKDNVDYSNVMLTSEEEIKTTNPVATEQYGVVADNLQQQNTAPIVGAVNSQGALPGMVWQNRDVYLQGPIWAKIPHTDGNFHPSPLMGGFGLKHPPPQILIKNTPVPADPPTAFNQAKLNSFITQYSTGQVSVEIVWELQKENSKRWNPEIQYTSNYYKSTNVDFAVNTEGVYSEPRPIGTRYLTRNL

SEQ ID NO: 499 - protein, 738 aa, Artificial Sequence; identical to SEQ ID NO: 497
  source: /note="Description of Artificial Sequence: Synthetic polypeptide"

SEQ ID NO: 500 - DNA, 2214 bp, Artificial Sequence
  source: /note="Description of Artificial Sequence: Synthetic polynucleotide"
atggctgctgacggttatcttccagattggctcgaggacaacctctctgagggcattcgcgagtggtgggacctgaaacctggagcccccaagcccaaggccaaccagcagaagcaggacgacggccggggtctggtgcttcctggctacaagtacctcggacccttcaacggactcgacaagggggagcccgtcaacgcggcggacgcagcggccctcgagcacgacaaggcctacgaccagcagctcaaagcgggtgacaatccgtacctgcggtataaccacgccgacgccgagtttcaggagcgtctgcaagaagatacgtcttttgggggcaacctcgggcgagcagtcttccaggccaagaagcgggttctcgaacctctcggtctggttgaggaagctgctaagacggctcctggaaagaagagaccggtagaaccgtcacctcagcgttcccccgactcctccacgggcatcggcaagaaaggccagcagcccgctagaaagagactgaactttgggcagactggcgactcagagtcagtccccgaccctcaaccaatcggagaaccaccagcaggcccctctggtctgggatctggtacaatggctgcaggcggtggcgctccaatggcagacaataacgaaggcgccgacggagtgggtaatgcctcaggaaattggcattgcgattccacatggctgggcgacagagtcatcaccaccagcacccgaacctgggctttgcccacctacaacaaccacctctacaagcaaatctccagtcagtcagcaggtagcaccaacgacaacgtctacttcggctacagcaccccctgggggtattttgacttcaacagattccactgtcacttctcaccacgtgactggcagcggctcatcaacaacaactggggattccggcccaagaagctcaacttcaagctgttcaacatccaggtcaaggaggtcacaacgaatgacggcgtcacgaccatcgccaataaccttaccagcacggttcaggtcttttcggactcggaataccagctgccctacgtcctcggctccgcacaccagggctgcctgcctccgttcccggcggacgtcttcatgattccccagtacggctacctgactctgaacaatggcagccaatcggtgggtcgttcctctttctactgcctggaatatttcccttctcaaatgctgagaacgggcaacaacttcaccttcagctacaccttcgaggacgttcccttccacagcagctacgcacacagccagagcctggaccggctgatgaatcctcttatcgaccagtacctgtattacctggccagaacacagagcaacgcaggaggcacagctggcaatcgggaactgcagttttatcagggcgggcctaccaccatggccgaacaagccaaaaactggctgcctagaccttgcttccggcaacaaagagtctccaagacgctggatcaaaacaacaacagcaactttgcttggactggtgccaccaaataccatctaaatggaagaaattcattggttaatcccggtgtcgccatggcaacccacaaggacgacgaggaacgcttcttcccttcgagcggagtcctgatttttggaaaaactggagcagctaataagactacactggaaaatgtgttaatgacaaatgaagaggaaattcgtcctaccaacccggtagccaccgaggaatacgggactgttagcagcaacctgcaggcggctaacactgcagcccagacacaagttgtcaacaaccagggagccttacctggtatggtctggcagaaccgggacgtgtacctgcagggtcccatctgggccaagattcctcacacggacggcaactttcacccgtctccgctgatgggcggctttggactgaagcatccgcctcctcagatcctgatcaaaaacactcctgttcctgctaatcccccggaggtgtttacgcctgccaagtttgcttctttcatcacacagtacagcaccggccaggtcagcgtggagatcgagtgggagctgcagaaggagaacagcaagcgctggaacccagagattcagtatacctccaattttgacaaacagactggtgtggactttgccgttgacagccagggtgtttattctgagcctcgccccattggtactcgttacctcacccgtaatctgtaa

SEQ ID NO: 501 - protein, 737 aa, Artificial Sequence
  source: /note="Description of Artificial Sequence: Synthetic polypeptide"
MAADGYLPDWLEDNLSEGIREWWDLKPGAPKPKANQQKQDDGRGLVLPGYKYLGPFNGLDKGEPVNAADAAALEHDKAYDQQLKAGDNPYLRYNHADAEFQERLQEDTSFGGNLGRAVFQAKKRVLEPLGLVEEAAKTAPGKKRPVEPSPQRSPDSSTGIGKKGQQPARKRLNFGQTGDSESVPDPQPIGEPPAGPSGLGSGTMAAGGGAPMADNNEGADGVGNASGNWHCDSTWLGDRVITTSTRTWALPTYNNHLYKQISSQSAGSTNDNVYFGYSTPWGYFDFNRFHCHFSPRDWQRLINNNWGFRPKKLNFKLFNIQVKEVTTNDGVTTIANNLTSTVQVFSDSEYQLPYVLGSAHQGCLPPFPADVFMIPQYGYLTLNNGSQSVGRSSFYCLEYFPSQMLRTGNNFTFSYTFEDVPFHSSYAHSQSLDRLMNPLIDQYLYYLARTQSNAGGTAGNRELQFYQGGPTTMAEQAKNWLPRPCFRQQRVSKTLDQNNNSNFAWTGATKYHLNGRNSLVNPGVAMATHKDDEERFFPSSGVLIFGKTGAANKTTLENVLMTNEEEIRPTNPVATEEYGTVSSNLQAANTAAQTQVVNNQGALPGMVWQNRDVYLQGPIWAKIPHTDGNFHPSPLMGGFGLKHPPPQILIKNTPVPANPPEVFTPAKFASFITQYSTGQVSVEIEWELQKENSKRWNPEIQYTSNFDKQTGVDFAVDSQGVYSEPRPIGTRYLTRNL

SEQ ID NO: 502 - DNA, 2214 bp, Artificial Sequence
  source: /note="Description of Artificial Sequence: Synthetic polynucleotide"
atggctgctgacggttatcttccagattggctcgaggacaacctctctgagggcattcgcgagtggtgggacctgaaacctggagcccccaagcccaaggccaaccagcagaagcaggacgacggccggggtctggtgcttcctggctacaagtacctcggacccttcaacggactcgacaagggggagcccgtcaacgcggcggacgcagcggccctcgagcacgacaaggcctacgaccagcagctcaaagcgggtgacaatccgtacctgcggtataaccatgccgacgccgagtttcaggagcgtctgcaagaagatacgtcttttgggggcaacctcgggcgagcagtcctccaggccaagaagcgggttctcgaacctctcggtctggttgaggaagctgctaagacggctcctggaaagaagagaccggtagaaccgtcacctcagcgttcccccgactcctccacgggcatcggcaagaaaggccagcagcccgctagaaagagactgaactttgggcagactggcgactcagagtcagtccccgaccctcaaccaatcggagaaccaccagcaggcccctctggtctgggatctggtacaatggctgcaggcggtggcgctccaatggcagacaataacgaaggcgccgacggagtgggtaatgcctcaggaaattggcattgcgattccacatggctgggcgacagagtcatcaccaccagcacccgaacctgggctttgcccacctacaacaaccacctctacaagcaaatctccagtcagtcagcaggtagcaccaacgacaacgtctacttcggctacagcaccccctgggggtattttgacttcaacagattccactgtcacttctcaccacgtgactggcagcggctcatcaacaacaactggggattccggcccaagaagctcaacttcaagctgttcaacatccaggtcaaggaggtcacaacgaatgacggcgtcacgaccatcgccaataaccttaccagcacggttcaggtcttttcggactcggaataccagctgccctacgtcctcggctccgcacaccagggctgcctgcctccgttcccggcggacgtcttcatgattccccagtacggctacctgactctgaacaatggcagccaatcggtgggtcgttcctctttctactgcctggaatatttcccttctcaaatgctgagaacgggcaacaacttcaccttcagctacaccttcgaggacgttcccttccacagcagctacgcacacagccagagcctggaccggctgatgaatcctcttatcgaccagtacctgtattacctggccagaacacagagcaacgcaggaggcacagctggcaatcgggaactgcagttttatcagggcgggcctaccaccatggccgaacaagccaaaaactggctgcctggaccttgcttccggcaacaaagagtctccaagacgctggatcaaaacaacaacagcaactttgcttggactggtgccaccaaataccatctaaatggaagaaattcattggttaatcccggtgtcgccatggcaacccacaaggacgacgaggaacgcttcttcccttcgagcggagtcctgatttttggaaaaactggagcagctaataagactacactggaaaatgtgttaatgacaaatgaagaggaaattcgtcctaccaacccggtagccaccgaggaatacgggactgttagcagcaacctgcaggcggctaacactgcagcccagacacaagttgtcaacaaccagggagccttacctggtatggtctggcagaaccgggacgtgtacctgcagggtcccatctgggccaagattcctcacacggacggcaactttcacccgtctccgctgatgggcggctttggactgaagcatccgcctcctcagatcctgatcaaaaacactcctgttcctgctaatcccccggaggtgtttacgcctgccaagtttgcttctttcatcacacagtacagcaccggccaggtcagcgtggagatcgagtgggagctgcagaaggagaacagcaagcgctggaacccagagattcagtatacctccaattttgacaaacagactggtgtggactttgccgttgacagccagggtgtttattctgagcctcgccccattggtactcgttacctcacccgtaatctgtaa

SEQ ID NO: 503 - protein, 737 aa, Artificial Sequence; identical to SEQ ID NO: 462
  source: /note="Description of Artificial Sequence: Synthetic polypeptide"

SEQ ID NO: 504 - protein, 737 aa, Artificial Sequence
  source: /note="Description of Artificial Sequence: Synthetic polypeptide"
MAADGYLPDWLEDNLSEGIREWWDLKPGAPKPKANQQKQDDGRGLVLPGYKYLGPFNGLDKGEPVNAADAAALEHDKAYDQQLKAGDNPYLRYNHADAEFQERLQEDTSFGGNLGRAVLQAKKRVLEPLGLVEEAAKTAPGKKRPVEPSPQRSPDSSTGIGKKGQQPARKRLNFGQTGDSESVPDPQPIGEPPAGPSGLGSGTMAAGGGAPMADNNEGADGVGNASGNWHCDSTWLGDRVITTSTRTWALPTYNNHLYKQISSQSAGSTNDNVYFGYSTPWGYFDFNRFHCHFSPRDWQRLINNNWGFRPKKLNFKLFNIQVKEVTTNDGVTTIANNLTSTVQVFSDSEYQLPYVLGSAHQGCLPPFPADVFMIPQYGYLTLNNGSQSVGRSSFYCLEYFPSQMLRTGNNFTFSYTFEDVPFHSSYAHSQSLDRLMNPLIDQYLYYLARTQSNAGGTAGNRELQFYQGGPTTMAEQAKNWLPGPCFRQQRVSKTLDQNNNSNFAWTGATKYHLNGRNSLVNPGVAMATHKDDEERFFPSSGVLIFGKTGAANKTTLENVLMTNEEEIRPTNPVATEEYGTVSSNLQAANTAAQTQVVNNQGALPGMVWQNRDVYLQGPIWAKIPHTDGNFHPSPLMGGFGLKHPPPQILIKNTPVPANPPEVFTPAKFASFITQYSTGQVSVEIEWELQKENSKRWNPEIQYTSNFDKQTGVDFAVDSQGVYSEPRPIGTRYLTRNL

SEQ ID NO: 505 - DNA, 2217 bp, Artificial Sequence
  source: /note="Description of Artificial Sequence: Synthetic polynucleotide"
atggctgccgatggttatcttccagattggctcgaggacaacctctctgagggcattcgcgagtggtgggacctgaaacctggagccccgaaacccaaagccaaccagcaaaagcaggacgacggccggggtctggtgcttcctggctacaagtacctcggacccttcaacggactcgacaagggggagcccgtcaacgcggcggacgcagcggccctcgagcacgacaaggcctacgaccagcagctcaaagcgggtgacaatccgtacctgcggtataatcacgccgacgccgagtttcaggagcgtctgcaagaagatacgtcttttgggggcaacctcgggcgagcagtcttccaggccaagaagcgggttctcgaacctctcggtctggttgaggaaggcgctaagacggctcctggaaagaagagaccggtagagccgtcaccacagcgttcccccgactcctccacgggcatcggcaagaaaggccagcagcccgccagaaagagactcaatttcggtcagactggcgactcagagtcagtccccgaccctcaacctatcggagaacctccagcagcgccctctagtgtgggatctggtacaatggctgcaggcggtggcgcaccaatggcagacaataacgaaggtgccgacggagtgggtagttcctcgggaaattggcattgcgattccacatggctgggcgacagagtcatcaccaccagcacccgaacctgggccctgcccacctacaacaaccacctctacaagcaaatctccaacgggacctcgggaggcagcaccaacgacaacacctactttggctacagcaccccctgggggtattttgactttaacagattccactgccacttctcaccacgtgactggcagcgactcatcaacaacaactggggattccggcccaagagactcagcttcaagctcttcaacatccaggtcaaagaggtcacgcagaatgaaggcaccaagaccatcgccaataacctcaccagcaccatccaggtgtttacggactcggaataccagctgccgtacgtcctcggctctgcccaccagggctgcctgcctccgttcccggcggacgtcttcatgattcctcagtacggctacctgactctcaacaacggtagtcaggccgtgggacgttcctccttctactgcctggagtacttcccctctcagatgctgagaacgggcaacaacttttccttcagctacactttcgaggacgtgcctttccacagcagctacgcgcacagccagagtttggacaggctgatgaatcctctcatcgaccagtacctgtactacctgtcaagaacccagtctacgggaggcacagcgggaacccagcagttgctgttttctcaggccgggcctagcaacatgtcggctcaggccagaaactggctgcctggaccctgctacagacagcagcgcgtctccacgacactgtcgcaaaacaacaacagcaactttgcctggactggtgccaccaagtatcatctgaacggcagagactctctggtgaatccgggcgtcgccatggcaaccaacaaggacgacgaggaccgcttcttcccacccagcggcatcctcatgtttggcaagcagggagctggaaaagacaacgtggactatagcaacgtgatgctaaccagcgaggaagaaatcaagaccaccaaccccgtggccacagaacagtatggcgtggtggctgataacctacagcagcaaaacaccgctcctattgtgggggccgtcaacagccagggagccttacctggcatggtctggcagaaccgggacgtgtacctgcagggtcctatttgggccaagattcctcacacagatggcaactttcacccgtctcctttaatgggcggctttggacttaaacatccgcctcctcagatcctcatcaaaaacactcctgttcctgcggatcctccaacagcgttcaaccaggccaagctgaattctttcatcacgcagtacagcaccggacaagtcagcgtggtgatcgagtgggagctgcagaaggagaacagcaagcgctggaacccagagattcagtatacttccaactactacaaatctacaaatgtggactttgctgttaatactgagggtgtttactctgagcttcgccccattggcactcgttacctcacccgtaatctgtaa

SEQ ID NO: 506 - protein, 738 aa, Artificial Sequence
  source: /note="Description of Artificial Sequence: Synthetic polypeptide"
MAADGYLPDWLEDNLSEGIREWWDLKPGAPKPKANQQKQDDGRGLVLPGYKYLGPFNGLDKGEPVNAADAAALEHDKAYDQQLKAGDNPYLRYNHADAEFQERLQEDTSFGGNLGRAVFQAKKRVLEPLGLVEEGAKTAPGKKRPVEPSPQRSPDSSTGIGKKGQQPARKRLNFGQTGDSESVPDPQPIGEPPAAPSSVGSGTMAAGGGAPMADNNEGADGVGSSSGNWHCDSTWLGDRVITTSTRTWALPTYNNHLYKQISNGTSGGSTNDNTYFGYSTPWGYFDFNRFHCHFSPRDWQRLINNNWGFRPKRLSFKLFNIQVKEVTQNEGTKTIANNLTSTIQVFTDSEYQLPYVLGSAHQGCLPPFPADVFMIPQYGYLTLNNGSQAVGRSSFYCLEYFPSQMLRTGNNFSFSYTFEDVPFHSSYAHSQSLDRLMNPLIDQYLYYLSRTQSTGGTAGTQQLLFSQAGPSNMSAQARNWLPGPCYRQQRVSTTLSQNNNSNFAWTGATKYHLNGRDSLVNPGVAMATNKDDEDRFFPPSGILMFGKQGAGKDNVDYSNVMLTSEEEIKTTNPVATEQYGVVADNLQQQNTAPIVGAVNSQGALPGMVWQNRDVYLQGPIWAKIPHTDGNFHPSPLMGGFGLKHPPPQILIKNTPVPADPPTAFNQAKLNSFITQYSTGQVSVVIEWELQKENSKRWNPEIQYTSNYYKSTNVDFAVNTEGVYSELRPIGTRYLTRNL

SEQ ID NO: 507 - DNA, 2214 bp, Artificial Sequence
  source: /note="Description of Artificial Sequence: Synthetic polynucleotide"
atggctgctgacggttatcttccagattggctcgaggacaacctctctgagggcattcgcgagtggtgggacctgaaacctggagcccccaagcccaaggccaaccagcagaagcaggacgacggccggggtctggtgcttcctggctacaagtacctcggacccttcaacggactcgacaagggggagcccgtcaacgcggcggacgcagcggccctcgagcacgacaaggcctacgaccagcagctcaaagcgggtgacaatccgtacctgcggtataaccacgccgacgccgagtttcaggagcgtctgcaagaagatacgtcttttgggggcaacctcgggcgagcagtcttccaggccaagaagcgggttctcgaacctctcggtctggttgaggaagctgctaagacggctcctggaaagaagagaccggtagaaccgtcacctcagcgttcccccgactcctccacgggcatcggcaagaaaggccagcagcccgctagaaagagactgaactttgggcagactggcgactcagagtcagtccccgaccctcaaccaatcggagaaccaccagcaggcccctctggtctgggatctggtacaatggctgcaggcggtggcgccccaatggcagacaataacgaaggcgccgacggagtgggtaatgcctcaggaaattggcattgcgattccacatggctgggcgacagagtcatcaccaccagcacccgaacctgggctttgcccacctacaacaaccacctctacaagcaaatctccagtcagtcagcaggtagcaccaacgacaacgtctacttcggctacagcaccccctgggggtattttgacttcaacagattccactgtcacttctcaccacgtgactggcagcggctcatcaacaacaactggggattccggcccaagaagctcaacttcaagctgttcaacatccaggtcaaggaggtcacaacgaatgacggcgtcacgaccatcgccaataaccttaccagcacggttcaggtcttttcggactcggaataccagctgccctacgtcctcggctccgcacaccagggctgcctgcctccgttcccggcggacgtcttcatgattccccagtacggctacctgactctgaacaatggcagccaatcggtgggtcgttcctctttctactgcctggaatatttcccttctcaaatgctgagaacgggcaacaacttcaccatcagctacaccttcgaggacgttcccttccacagcagctacgcacacagccagagcctggaccggctgatgaatcctcttatcgaccagtacctgtattacctggccagaacacagagcaacgcaggaggcacagctggcaatcaggaactgcagttttatcagggcgggcctaccaccatggccgaacaagccaaaaactggctgcctggaccttgcttccggcaacaaagagtctccaagacgctggatcaaaacaacaacagcaactttgcttggactggtgccaccaaataccatctaaatggaagaaattcattggttaatcccggtgtcgccatggcaacccacaaggacgacgaggaacgcttcttcccttcgagcggagtcctgatttttggaaaaactggagcagctaataagactacactggaaaatgtgttaatgacaaatgaagaggaaattcgtcctaccaacccggtagccaccgaggaatacgggactgttagcagcaacctgcaggcggctaacactgcagcccagacacaagttgtcaacaaccagggagccttacctggtatggtctggcagaaccgggacgtgtacctgcagggtcccatctgggccaagattcctcacacagatggcaactttcacccgtctcctttaatgggcggctttggacttaaacatccgcctcctcagatcctcatcaaaaacactcctgttcctgcggatcctccaacagcgttcaaccaggccaagctgaattctttcatcacgcagtacagcaccggacaagtcagcgtggagatcgagtgggagctgcagaaggagaacagcaagcgctggaacccagagattcagtatacttccaactactacaaatctacaaatgtggactttgctgttaatactgagggtgtttactctgagcctcgccccattggcactcgttacctcacccgtaatctgtaa

SEQ ID NO: 508 - protein, 737 aa, Artificial Sequence
  source: /note="Description of Artificial Sequence: Synthetic polypeptide"
MAADGYLPDWLEDNLSEGIREWWDLKPGAPKPKANQQKQDDGRGLVLPGYKYLGPFNGLDKGEPVNAADAAALEHDKAYDQQLKAGDNPYLRYNHADAEFQERLQEDTSFGGNLGRAVFQAKKRVLEPLGLVEEAAKTAPGKKRPVEPSPQRSPDSSTGIGKKGQQPARKRLNFGQTGDSESVPDPQPIGEPPAGPSGLGSGTMAAGGGAPMADNNEGADGVGNASGNWHCDSTWLGDRVITTSTRTWALPTYNNHLYKQISSQSAGSTNDNVYFGYSTPWGYFDFNRFHCHFSPRDWQRLINNNWGFRPKKLNFKLFNIQVKEVTTNDGVTTIANNLTSTVQVFSDSEYQLPYVLGSAHQGCLPPFPADVFMIPQYGYLTLNNGSQSVGRSSFYCLEYFPSQMLRTGNNFTISYTFEDVPFHSSYAHSQSLDRLMNPLIDQYLYYLARTQSNAGGTAGNQELQFYQGGPTTMAEQAKNWLPGPCFRQQRVSKTLDQNNNSNFAWTGATKYHLNGRNSLVNPGVAMATHKDDEERFFPSSGVLIFGKTGAANKTTLENVLMTNEEEIRPTNPVATEEYGTVSSNLQAANTAAQTQVVNNQGALPGMVWQNRDVYLQGPIWAKIPHTDGNFHPSPLMGGFGLKHPPPQILIKNTPVPADPPTAFNQAKLNSFITQYSTGQVSVEIEWELQKENSKRWNPEIQYTSNYYKSTNVDFAVNTEGVYSEPRPIGTRYLTRNL

SEQ ID NO: 509 - DNA, 2217 bp, Artificial Sequence
  source: /note="Description of Artificial Sequence: Synthetic polynucleotide"
atggctgccgatggttatcttccagattggctcgaggacaacctctctgagggcattcgcgagtggtgggacctgaaacctggagccccgaaacccaaagccaaccagcaaaagcaggacgacggccggggtctggtgcttcctggctacaagtacctcggacccttcaacggactcgacaagggggagcccgtcaacgcggcggacgcagcggccctcgagcacgacaaggcctacgaccagcagctcaaagcgggtgacaatccgtacctgcggtataatcacgccgacgccgagtttcaggagcgtctgcaagaagatacgtcttttgggggcaacctcgggcgagcagtcttccaggccaagaagcgggttctcgaacctctcggtctggttgaggaaggcgctaagacggctcctggaaagaagagaccggtagagccgtcaccacagcgttcccccgactcctccacgggcatcggcaagaaaggccagcagcccgccagaaagagactcaatttcggtcagactggcgactcagagtcagtccccgaccctcaacctatcggagaacctccagcagcgccctctagtgtgggatctggtacaatggctgcaggcggtggcgcaccaatggcagacaataacgaaggtgccgacggagtgggtagttcctcgggaaattggcattgcgattccacatggctgggcgacagagtcatcaccaccagcacccgaacctgggccctgcccgcctacaacaaccacctctacaagcaaatctccaacgggacctcgggaggcagcaccaacgacaacacctactttggctacagcaccccctgggggtattttgactttaacagattccactgccacttctcaccacgtgactggcagcgactcatcaacaacaactggggattccggcccaagagactcagcttcaagctcttcaacatccaggtcaaagaggtcacgcagaatgaaggcaccaagaccatcgccaataacctcaccagcaccatccaggtgtttacggactcggaataccagctgccgtacgtcctcggctctgcccaccagggctgcctgcctccgttcccggcggatgtcttcatgattcctcagtacggctacctgactctcaacaacggtagtcaggccgtgggacgttcctccttctactgcctggagtacttcccctctcagatgctgagaacgggcaacaacttttccttcagctacactttcgaggacgtgcctttccacagcagctacgcgcacagccagagtttggacaggctgatgaatcctctcatcgaccagtacctgtactacctgtcaagaacccagtctacgggaggcacagcgggaacccagcagttgctgttttctcaggccgggcctagcaacatgtcggctcaggccagaaactggctgcctggaccctgctacagacagcagcgcgtctccacgacactgtcgcaaaacaacaacagcaactttgcctggactggtgccaccaagtatcatctgagcggcagagactctctggtgaatccgggcgtcgccatggcaaccaacaaggacgacgaggaccgcttcttcccatccagcggcatcctcatgtttggcaagcagggagctggaaaagacaacgtggactatagcaacgtgatgctaaccagcgaggaagaaatcaagaccaccaaccccgtggccacagaacagtatggcgtggtggctgataacctacagcagcaaaacaccgctcctattgtgggggccgtcaacagccagggagccttacctggcatggtctggcagaaccgggacgtgtacctgcagggtcctatttgggccaagattcctcacacagatggcaactttcacccgtctcctttaatgggcggctttggacttaaacatccgcctcctcagatcctcatcaaaaacactcctgttcctgcggatcctccaacagcgttcaaccaggccaagctgaattcttccatcacgcagtacagcaccggacaagtcagcgtggagatcgagtgggagctgcagaaggagaacagcaagcgctggaacccagagattcagtatacttccaactactacaaatctacaaatgtggactttgctgttaatactgagggtgtttactctgagcctcgccccattggcactcgttacctcacccgtaatttgtaa

SEQ ID NO: 510 - protein, 738 aa, Artificial Sequence
  source: /note="Description of Artificial Sequence: Synthetic polypeptide"
MAADGYLPDWLEDNLSEGIREWWDLKPGAPKPKANQQKQDDGRGLVLPGYKYLGPFNGLDKGEPVNAADAAALEHDKAYDQQLKAGDNPYLRYNHADAEFQERLQEDTSFGGNLGRAVFQAKKRVLEPLGLVEEGAKTAPGKKRPVEPSPQRSPDSSTGIGKKGQQPARKRLNFGQTGDSESVPDPQPIGEPPAAPSSVGSGTMAAGGGAPMADNNEGADGVGSSSGNWHCDSTWLGDRVITTSTRTWALPAYNNHLYKQISNGTSGGSTNDNTYFGYSTPWGYFDFNRFHCHFSPRDWQRLINNNWGFRPKRLSFKLFNIQVKEVTQNEGTKTIANNLTSTIQVFTDSEYQLPYVLGSAHQGCLPPFPADVFMIPQYGYLTLNNGSQAVGRSSFYCLEYFPSQMLRTGNNFSFSYTFEDVPFHSSYAHSQSLDRLMNPLIDQYLYYLSRTQSTGGTAGTQQLLFSQAGPSNMSAQARNWLPGPCYRQQRVSTTLSQNNNSNFAWTGATKYHLSGRDSLVNPGVAMATNKDDEDRFFPSSGILMFGKQGAGKDNVDYSNVMLTSEEEIKTTNPVATEQYGVVADNLQQQNTAPIVGAVNSQGALPGMVWQNRDVYLQGPIWAKIPHTDGNFHPSPLMGGFGLKHPPPQILIKNTPVPADPPTAFNQAKLNSSITQYSTGQVSVEIEWELQKENSKRWNPEIQYTSNYYKSTNVDFAVNTEGVYSEPRPIGTRYLTRNL

SEQ ID NO: 511 - protein, 736 aa, Artificial Sequence; identical to SEQ ID NO: 11
  source: /note="Description of Artificial Sequence: Synthetic polypeptide"

SEQ ID NO: 512 - DNA, 2217 bp, Artificial Sequence
  source: /note="Description of Artificial Sequence: Synthetic polynucleotide"
atggctgctgacggttatcttccagattggctcgaggacaacctctctgagggcattcgcgagtggtgggacctgaaacctggagcccccaagcccaaggccaaccagcagaagcaggacgacggccggggtctggtgcttcctggctacaagtacctcggacccttcaacggactcgacaagggggagcccgtcaacgcggcggacgcagcggccctcgagcacgacaaggcctacgaccagcagctcaaagcgggtgacaatccgtacctgcggtataaccacgccgacgccgagtttcaggagcgtctgcaagaagatacgtcttttgggggcaacctcgggcgagcagtcttccaggccaagaagcgggttctcgaacctctcggtctggttgaggaagctgctaagacggctcctggaaagaagagaccggtagaaccgtcacctcagcgttcccccgactcctccacgggcatcggcaagaaaggccagcagcccgctaaaaagagactgaactttggtcagactggcgactcagagtcagtccccgaccctcaaccaatcggagaaccaccagcaggcccctctggtctgggatctggtacaatggctgcaggcggtggcgctccaatggcagacaataacgaaggcgccgacggagtgggtagttcctcaggaaattggcattgcgattccacatggctgggcgacagagtcatcaccaccagcacccgaacctgggccctgcccacctacaacaaccacctctacaagcaaatatccaatgggacatcgggaggaagcaccaacgacaacacctacttcggctacagcaccccctgggggtattttgacttcaacagattccactgccacttctcaccacgtgactggcagcgactcatcaacaacaactggggattccggccaaaaagactcagcttcaagctcttcaacatccaggtcaaggaggtcacgcagaatgaaggcaccaagaccatcgccaataaccttaccagcacgattcaggtatttacggactcggaataccagctgccgtacgtcctcggctccgcgcaccagggctgcctgcctccgttcccggcggacgtcttcatgattccccagtacggctaccttacactgaacaatggaagtcaagccgtaggccgttcctccttctactgcctggaatattttccatctcaaatgctgcgaactggaaacaattttgaattcagctacaccttcgaggacgtgcctttccacagcagctacgcacacagccagagcttggaccgactgatgaatcctctcatcgaccagtacctgtactacttatccagaactcagtccacaggaggaactcaaggtacccagcaattgttattttctcaagctgggcctgcaaacatgtcggctcaggctaagaactggctacctggaccttgctaccggcagcagcgagtctctacgacactgtcgcaaaacaacaacagcaactttgcttggactggtgccaccaaatatcacctgaacggaagagactctttggtaaatcccggtgtcgccatggcaacccacaaggacgacgaggaacgcttcttcccgtcgagtggagtcctgatgtttggaaaacagggtgctggaagagacaatgtggactacagcagcgttatgctaaccagcgaagaagaaattaaaaccactaaccctgtagccacagaacaatacggtgtggtggctgacaacttgcagcaaaccaatacagggcctattgtgggaaatgtcaacagccaaggagccttacctggcatggtctggcagaaccgagacgtgtacctgcagggtcccatctgggccaagattcctcacacggacggcaacttccacccttcaccgctaatgggaggatttggactgaagcacccacctcctcagatcctgatcaagaacacgccggtacctgcggatcctccaacaacgttcagccaggcgaaattggcttccttcattacgcagtacagcaccggacaggtcagcgtggaaatcgagtgggagctgcagaaggagaacagcaaacgctggaacccagagattcagtacacttcaaactactacaaatctacaaatgtggactttgctgtcaatacagagggaacttattctgagcctcgccccattggtactcgttacctcacccgtaatctgtaa

SEQ ID NO: 513 - protein, 738 aa, Artificial Sequence
  source: /note="Description of Artificial Sequence: Synthetic polypeptide"
MAADGYLPDWLEDNLSEGIREWWDLKPGAPKPKANQQKQDDGRGLVLPGYKYLGPFNGLDKGEPVNAADAAALEHDKAYDQQLKAGDNPYLRYNHADAEFQERLQEDTSFGGNLGRAVFQAKKRVLEPLGLVEEGAKTAPGKKRPVEPSPQRSPDSSTGIGKKGQQPARKRLNFGQTGDSESVPDPQPLGEPPAAPSSVGSGTMAAGGGAPMADNNEGADGVGSSSGNWHCDSTWLGDRVITTSTRTWALPTYNNHLYKQISNGTSGGSTNDNTYFGYSTPWGYFDFNRFHCHFSPRDWQRLINNNWGFRPKRLSFKLFNIQVKEVTQNEGTKTIANNLTSTIQVFTDSEYQLPYVLGSAHQGCLPPFPADVFMIPQYGYLTLNNGSQAVGRSSFYCLEYFPSQMLRTGNNFSFSYTFEDVPFHSSYAHSQSLDRLMNPLIDQYLYYLSRTQSTGGTAGTQQLLFSQAGPSNMSAQARNWLPGPCYRQQRVSTTLSQNNNSNFAWTGATKYHLNGRDSLVNPGVAMATNKDDEDRFFPSSGILMFGKQGAGKDNVDYSNVMLTSEEEIKTTNPVATEQYGVVADNLQRQNTAPIVGAVNSQGALPGMVWQNRDVYLQGPIWAKIPHTDGNFHPSPLMGGFGLKHPPPQILIKNTPVPADPPTAFNQAKLNSFITQYSTGQVSVEIEWELQKENSKRWNPEIQYTSNYYKSTNVDFAVNTEGVYSEPRPIGTRYLTRNL

SEQ ID NO: 514 - protein, 736 aa, Artificial Sequence
  source: /note="Description of Artificial Sequence: Synthetic polypeptide"
MAADGYLPDWLEDNLSEGIREWLNLKPGAPQPKANQQKQDNARGLVLPGYKYLGPFNGLDKGDPVNEADAAALEHDKAYGQQLKAGDNPYLKYNHADAEFQERLQKDTSFGGNLGKAVFQAKKRILEPLGLVETPAKTAPGKKRPVDPSPQRSPDSSSGIGKKSPHPARKRLNFGQTGEAESVPDPQPIGEPPSDPSSVGSGTMAAGGGAPMADNNEGADGVGNSSGNWHCDSTWLGDRVITTSTRTWALPTYNNHLYKQISSQSGATNDNHYFGYSTPWGYFDFNRFHCHFSPRDWQRLINNNWGFRPKRLSFKLFNIQVKEVTQNDGTTTIANNLTSTVQVFTDSEYQLPYVLGSAHQGCLPPFPADVFMIPQYGYLTLNNGSQAVGRSSFYCLEYFPSQMLRTGNNFQFSYTFEDVPFHSSYAHSQSLDRLMNPLIDQYLYYLSKTQGTNATVQGAKLQFSQAGPSNMRDQARNWLPGPCYRQQRVSKTANDNNNSEYAWTGATKYHLNGRDSLVNPGPAMASHKDDEEKFFPMNGTLVFGKNGAGNSNVDIENVMITDEEEIRTTNPVATEQYGVVSDNLQSSNTRPITGDVDSQGVLPGMVWQDRDVYLQGPIWAKIPHTDGHFHPSPLMGGFGLKHPPPQILIKNTPVPANPATTFTPGKFASFITQYSTGQVSVQIEWELQKENSKRWNPEIQYTSNYNKSVNVDFTVDTNGVYSEPRPIGTRYLTRNL

SEQ ID NO: 515 - protein, 736 aa, Artificial Sequence; identical to SEQ ID NO: 90
  source: /note="Description of Artificial Sequence: Synthetic polypeptide"

SEQ ID NO: 516 - protein, 736 aa, Artificial Sequence
  source: /note="Description of Artificial Sequence: Synthetic polypeptide"
MAADGYLPDWLEDNLSEGIREWWDLKPGAPKPKANQQKQDDGRGLVLPGYKYLGPFNGLDKGEPVNAADAAALEHDKAYDQQLKAGDNPYLRYNHADAEFQERLQEDTSFGGNLGRAVFQAKKRVLEPLGLVEEGAKTAPGKKRPVEQSPQEPDSSSGIGKTGQQPAKKRLNFGQTGDSESVPDPQPLGEPPAAPSGLGPNTMASGGGAPMADNNEGADGVGNSSGNWHCDSTWLGDRVITTSTRTWALPTYNNHLYKQISNGTSGGSTNDNTYFGYSTPWGYFDFNRFHCHFSPRDWQRLINNNWGFRPKRLNFKLFNIQVKEVTTNEGTKTIANNLTSTVQVFTDSEYQLPYVLGSAHQGCLPPFPADVFMVPQYGYLTLNNGSQALGRSSFYCLEYFPSQMLRTGNNFQFSYTFEDVPFHSSYAHSQSLDRLMNPLIDQYLYYLVRTQTTGTGGTQTLAFSQAGPSSMANQARNWVPGPCYRQQRVSTTTNQNNNSNFAWTGAAKFKLNGRDSLMNPGVAMASHKDDEDRFFPSSGVLIFGKQGAGNDGVDYSQVLITDEEEIKATNPVATEEYGAVAINNQAANTQAQTGLVHNQGVIPGMVWQNRDVYLQGPIWAKIPHTDGNFHPSPLMGGFGLKHPPPQILIKNTPVPADPPLTFNQAKLNSFITQYSTGQVSVEIEWELQKENSKRWNPEIQYTSNYYKSTNVDFAVNTEGVYSEPRPIGTRYLTRNL

SEQ ID NO: 517 - protein, 736 aa, Artificial Sequence; identical to SEQ ID NO: 516
  source: /note="Description of Artificial Sequence: Synthetic polypeptide"

SEQ ID NO: 518 - protein, 736 aa, Artificial Sequence
  source: /note="Description of Artificial Sequence: Synthetic polypeptide"
MAADGYLPDWLEDNLSEGIREWWDLKPGAPKPKANQQKQDDGRGLVLPGYKYLGPFNGLDKGEPVNAADAAALEHDKAYDQQLKAGDNPYLRYNHADAEFQERLQEDTSFGGNLGRAVFQAKKRVLEPLGLVEEGAKTAPGKKRPVEQSPQEPDSSSGIGKTGQQPAKKRLNFGQTGDSESVPDPQPLGEPPAAPSGLGPNTMASGGGAPMADNNEGADGVGNSSGNWHCDSTWLGDRVITTSTRTWALPTYNNHLYKQISNGTSGGSTNDNTYFGYSTPWGYFDFNRFHCHFSPRDWQRLINNNWGFRPKRLNFKLFNIQVKEVTTNEGTKTIANNLTSTVQVFTDSEYQLPYVLGSAHQGCLPPFPADVFMVPQYGYLTLNNGSQALGRSSFYCLEYFPSQMLRTGNNFQFSYTFEDVPFHSSYAHSQSLDRLMNPLIDQYLYYLVRTQTTGTGGTQTLAFSQAGPSSMANQARNWVPGPCYRQQRVSTTTNQNNNSNFAWTGAAKFKLNGRDSLMNPGVAMASHKDDEDRFFPSSGVLIFGKQGAGNDGVDYSQVLITDEEEIKATNPVATEEYGAVAINNQRANTQAQTGLVHNQGVIPGMVWQNRDVYLQGPIWAKIPHTDGNFHPSPLMGGFGLKHPPPQILIKNTPVPADPPLTFNQAKLNSFITQYSTGQVSVEIEWELQKENSKRWNPEIQYTSNYYKSTNVDFAVNTEGVYSEPRPIGTRYLTRNL

SEQ ID NO: 519 - protein, 736 aa, Artificial Sequence
  source: /note="Description of Artificial Sequence: Synthetic polypeptide"
MAADGYLPDWLEDNLSEGIREWWDLKPGAPKPKANQQKQDDGRGLVLPGYKYLGPFNGLDKGEPVNAADAAALEHDKAYDQQLKAGDNPYLRYNHADAEFQERLQEDTSFGGNLGRAVFQAKKRVLEPLGLVEEGAKTAPGKKRPVEQSPQEPDSSSGIGKTGQQPAKKRLNFGQTGDSESVPDPQPLGEPPAAPSGLGPNTMASGGGAPMADNNEGADGVGNSSGNWHCDSTWLGDRVITTSTRTWALPTYNNHLYKQISNGTSGGSTNDNTYFGYSTPWGYFDFNRFHCHFSPRDWQRLINNNWGFRPKRLNFKLFNIQVKEVTTNEGTKTIANNLTSTVQVFTDSEYQLPYVLGSAHQGCLPPFPADVFMVPQYGYLTLNNGSQALGRSSFYCLEYFPSQMLRTGNNFQFSYTFEDVPFHSSYAHSQSLDRLMNPLIDQYLYYLVRTQTTGTGGTQTLAFSQAGPSSMANQARNWVPGPCYRQQRVSTTTNQNNNSNFAWTGAAKFKLNGRDSLMNPGVAMASHKDDEDAFFPSSGVLIFGKQGAGNDGVDYSQVLITDEEEIKATNPVATEEYGAVAINNQAANTQAQTGLVHNQGVIPGMVWQNRDVYLQGPIWAKIPHTDGNFHPSPLMGGFGLKHPPPQILIKNTPVPADPPLTFNQAKLNSFITQYSTGQVSVEIEWELQKENSKRWNPEIQYTSNYYKSTNVDFAVNTEGVYSEPRPIGTRYLTRNL

SEQ ID NO: 520 - DNA, 1803 bp, Bovine adeno-associated virus
acggcgcctgcggcaaaaaagaggcctctagagcagagtcctcaagagccagactcctcgagcggagttggcaagaaaggcaaacagcctgccagaaagagactcaactttgacgacgaacctggagccggagacgggcctcccccagaaggaccatcttccggagctatgtctactgagactgaaatgcgtgcagcagctggcggaaatggtggcgatgcgggacaaggtgccgagggagtgggtaatgcctccggtgattggcattgcgattccacttggtcagagagccacgtcaccaccacctcaacccgcacctgggtcctgccgacctacaacaaccacctgtacctgcggctcggctcgagcaacgccagcgacaccttcaacggattctccaccccctggggatactttgactttaaccgcttccactgccacttctcgccaagagactggcaaaggctcatcaacaaccactggggactgcgccccaaaagcatgcaagtccgcatcttcaacatccaagttaaggaggtcacgacgtctaacggggagacgaccgtatccaacaacctcaccagcacggtccagatctttgcggacagcacgtacgagctcccgtacgtgatggatgcaggtcaggagggcagcttgcctcctttccccaacgacgtgttcatggtgcctcagtacgggtactgcggactggtaaccggaggcagctctcaaaaccagacagacagaaatgccttctactgtctggagtactttcccagccagatgctgagaaccggaaacaactttgagatggtgtacaagtttgaaaacgtgcccttccactccatgtacgctcacagccagagcctggataggctgatgaacccgctgctggaccagtacctgtgggagctccagtctaccacctctggaggaactctcaaccagggcaattcagccaccaactttgccaagctgaccaaaacaaacttttctggctaccgcaaaaactggctcccggggcccatgatgaagcagcagagattctccaagactgccagtcaaaactacaagattccccagggaagaaacaacagtctgctccattatgagaccagaactaccctcgacggaagatggagcaattttgccccgggaacggccatggcaaccgcagccaacgacgccaccgacttctctcaggcccagctcatctttgcggggcccaacatcaccggcaacaccaccacagatgccaataacctgatgttcacttcagaagatgaacttagggccaccaacccccgggacactgacctgtttggccacctggcaaccaaccagcaaaacgccaccaccgttcctaccgtagacgacgtggacggagtcggcgtgtacccgggaatggtgtggcaggacagagacatttactaccaagggcccatttgggccaaaattccacacacggatggacactttcacccgtctcctctcattggcggatttggactgaaaagcccgcctccacaaatattcatcaaaaacactcctgtacccgccaatcccgcaacgaccttctctccggccagaatcaacagcttcatcacccagtacagcaccggacaggtggctgtcaaaatagaatgggaaatccagaaggagcggtccaagagatggaacccagaggtccagttcacgtccaactacggagcacaggactcgcttctctgggctcccgacaacgccggagcctacaaagagcccagggccattggatcccgatacctcaccaaccacctctag

SEQ ID NO: 521 - DNA, 1617 bp, Bovine adeno-associated virus
atgcgtgcagcagctggcggaaatggtggcgatgcgggacaaggtgccgagggagtgggtaatgcctccggtgattggcattgcgattccacttggtcagagagccacgtcaccaccacctcaacccgcacctgggtcctgccgacctacaacaaccacctgtacctgcggctcggctcgagcaacgccagcgacaccttcaacggattctccaccccctggggatactttgactttaaccgcttccactgccacttctcgccaagagactggcaaaggctcatcaacaaccactggggactgcgccccaaaagcatgcaagtccgcatcttcaacatccaagttaaggaggtcacgacgtctaacggggagacgaccgtatccaacaacctcaccagcacggtccagatctttgcggacagcacgtacgagctcccgtacgtgatggatgcaggtcaggagggcagcttgcctcctttccccaacgacgtgttcatggtgcctcagtacgggtactgcggactggtaaccggaggcagctctcaaaaccagacagacagaaatgccttctactgtctggagtactttcccagccagatgctgagaaccggaaacaactttgagatggtgtacaagtttgaaaacgtgcccttccactccatgtacgctcacagccagagcctggataggctgatgaacccgctgctggaccagtacctgtgggagctccagtctaccacctctggaggaactctcaaccagggcaattcagccaccaactttgccaagctgaccaaaacaaacttttctggctaccgcaaaaactggctcccggggcccatgatgaagcagcagagattctccaagactgccagtcaaaactacaagattccccagggaagaaacaacagtctgctccattatgagaccagaactaccctcgacggaagatggagcaattttgccccgggaacggccatggcaaccgcagccaacgacgccaccgacttctctcaggcccagctcatctttgcggggcccaacatcaccggcaacaccaccacagatgccaataacctgatgttcacttcagaagatgaacttagggccaccaacccccgggacactgacctgtttggccacctggcaaccaaccagcaaaacgccaccaccgttcctaccgtagacgacgtggacggagtcggcgtgtacccgggaatggtgtggcaggacagagacatttactaccaagggcccatttgggccaaaattccacacacggatggacactttcacccgtctcctctcattggcggatttggactgaaaagcccgcctccacaaatattcatcaaaaacactcctgtacccgccaatcccgcaacgaccttctctccggccagaatcaacagcttcatcacccagtacagcaccggacaggtggctgtcaaaatagaatgggaaatccagaaggagcggtccaagagatggaacccagaggtccagttcacgtccaactacggagcacaggactcgcttctctgggctcccgacaacgccggagcctacaaagagcccagggccattggatcccgatacctcaccaaccacctctag

SEQ ID NO: 522 - DNA, 1173 bp, Bovine adeno-associated virus
atggcgctggtaagctggctggtggaacatggcatcacttccgagaagcagtggattcaggagaatcaggagagctacctgtccttcaactccacgggaaactctcggagccagattaaagccgcgcttgacaacgcgtcaaaaattatgagtctgaccaaatctgcctcagactatctcgtgggacagactgttccagaggacatttctgaaaacagaatctggcagatttttgatctcaacggctacgacccggcatacgcgggctctgttctctacggctggtgcactcgcgcctttggaaagaggaacaccgtctggctgtatggacccgcgaccaccggaaagaccaacatcgcggaagccatctctcacaccgtgcccttttatggctgtgtgaactggactaatgagaactttccctttaatgactgtgtggaaaaaatgttgatctggtgggaggagggaaagatgaccagcaaggtggtggaacccgccaaggccatcttgggggggtctagagtacgagtggatcaaaaatgtaaatcctctgtacaagtagactctaccccggtgattatcacctccaatactaacatgtgtgtggtggtggatgggaactccacgacctttgaacaccagcagccgctggaagaccgcatgttcagatttgaactcatgcggcggctcccgccagattttggcaagattaccaagcaggaagtcaaagacttttttgcttgggcaaaggtcaaccaggtgccggtgactcacgagtttatggttcccaagaaagtggcgggaactgagagggcggagacttctagaaaacgcccactggatgacgtcaccaataccaactataaaagtccggagaagcgggcccggctctcagttgttcctgagacgcctcgcagttcagacgtgcctgtagagcccgctcctctgcgacctctcaactggtcttccaggtatgaatgcagatgtgactatcatgctaaatttgactctgtaacgggggaatgtgacgagtgtgaatatttgaatcggggcaaaaatggctgtatctttcataatgctacacattgtcaaatttgtcacgctgttcctccatgggaaaaggaaaatgtgtcagattttaatgattttgatgactgtaataaagagcagtaa

SEQ ID NO: 523 - DNA, 1833 bp, Bovine adeno-associated virus
atggctaccttctatgaagtcattgttcgcgttccatttgatgtggaagagcacctgcctggaatttctgacaactttgtagactgggtaactggtcaaatttgggagctgcctcccgagtcagatttgaatttgactctgattgagcagcctcagctgacggtggctgacagaattcgccgcgtgttcctgtacgagtggaacaaattttccaagcaggagagcaaattctttgtgcagtttgaaaagggatctgaatattttcatctgcacacgctcgtggagacctccggcatctcttctatggtccttggccgctacgtgagtcagattcgcgcccagctggtgaaggtggtgttccagaacattgagccgcggattaacgactgggtcgccatcaccaaggtaaagaagggcggagccaataaggtggtggattctgggtatattcccgcctacctgctgccgaaggtccaaccagagcttcagtgggcgtggactaacctcgaagagtataaattggccgccctcaatctggaggagcgcaaacggctcgtcgctcagtttcagcttgagtcctcgcagcgctcgcaagaggcatcttcccagagggacgtttcggctgacccggtcatcaagagcaagacttcccagaaatacatggcgctggtaagctggctggtggaacatggcatcacttccgagaagcagtggattcaggagaatcaggagagctacctgtccttcaactccacgggaaactctcggagccagattaaagccgcgcttgacaacgcgtcaaaaattatgagtctgaccaaatctgcctcagactatctcgtgggacagactgttccagaggacatttctgaaaacagaatctggcagatttttgatctcaacggctacgacccggcatacgcgggctctgttctctacggctggtgcactcgcgcctttggaaagaggaacaccgtctggctgtatggacccgcgaccaccggaaagaccaacatcgcggaagccatctctcacaccgtgcccttttatggctgtgtgaactggactaatgagaactttccctttaatgactgtgtggaaaaaatgttgatctggtgggaggagggaaagatgaccagcaaggtggtggaacccgccaaggccatcttgggggggtctagagtacgagtggatcaaaaatgtaaatcctctgtacaagtagactctaccccggtgattatcacctccaatactaacatgtgtgtggtggtggatgggaactccacgacctttgaacaccagcagccgctggaagaccgcatgttcagatttgaactcatgcggcggctcccgccagattttggcaagattaccaagcaggaagtcaaagacttttttgcttgggcaaaggtcaaccaggtgccggtgactcacgagtttatggttcccaagaaagtggcgggaactgagagggcggagacttctagaaaacgcccactggatgacgtcaccaataccaactataaaagtccggagaagcgggcccggctctcagttgttcctgagacgcctcgcagttcagacgtgcctgtagagcccgctcctctgcgacctctcaactggtcttccaggtatgaatgcagatgtgactatcatgctaaatttgactctgtaacgggggaatgtgacgagtgtgaatatttgaatcggggcaaaaatggctgtatctttcataatgctacacattgtcaaatttgtcacgctgttcctccatgggaaaaggaaaatgtgtcagattttaatgattttgatgactgtaataaagagcagtaa

SEQ ID NO: 524 - DNA, 2211 bp, Bovine adeno-associated virus
atgtcttttgttgaccaccctccagattggttggaatcgatcggcgacggctttcgtgaatttctcggccttgaggcgggtcccccgaaacccaaggccaatcaacagaagcaagataacgctcgaggtcttgtgcttcctgggtacaagtatcttggtcctgggaacggccttgataagggcgatcctgtcaattttgctgacgaggttgcccgagagcacgacctctcctaccagaaacagcttgaggcgggcgataacccttacctcaagtacaaccacgcggacgcagagtttcaggagaaactcgcttctgacacttcttttgggggaaaccttgggaaggctgttttccaggctaaaaagaggattctcgaacctcttggcctggttgagacgccggataaaacggcgcctgcggcaaaaaagaggcctctagagcagagtcctcaagagccagactcctcgagcggagttggcaagaaaggcaaacagcctgccagaaagagactcaactttgacgacgaacctggagccggagacgggcctcccccagaaggaccatcttccggagctatgtctactgagactgaaatgcgtgcagcagctggcggaaatggtggcgatgcgggacaaggtgccgagggagtgggtaatgcctccggtgattggcattgcgattccacttggtcagagagccacgtcaccaccacctcaacccgcacctgggtcctgccgacctacaacaaccacctgtacctgcggctcggctcgagcaacgccagcgacaccttcaacggattctccaccccctggggatactttgactttaaccgcttccactgccacttctcgccaagagactggcaaaggctcatcaacaaccactggggactgcgccccaaaagcatgcaagtccgcatcttcaacatccaagttaaggaggtcacgacgtctaacggggagacgaccgtatccaacaacctcaccagcacggtccagatctttgcggacagcacgtacgagctcccgtacgtgatggatgcaggtcaggagggcagcttgcctcctttccccaacgacgtgttcatggtgcctcagtacgggtactgcggactggtaaccggaggcagctctcaaaaccagacagacagaaatgccttctactgtctggagtactttcccagccagatgctgagaaccggaaacaactttgagatggtgtacaagtttgaaaacgtgcccttccactccatgtacgctcacagccagagcctggataggctgatgaacccgctgctggaccagtacctgtgggagctccagtctaccacctctggaggaactctcaaccagggcaattcagccaccaactttgccaagctgaccaaaacaaacttttctggctaccgcaaaaactggctcccggggcccatgatgaagcagcagagattctccaagactgccagtcaaaactacaagattccccagggaagaaacaacagtctgctccattatgagaccagaactaccctcgacggaagatggagcaattttgccccgggaacggccatggcaaccgcagccaacgacgccaccgacttctctcaggcccagctcatctttgcggggcccaacatcaccggcaacaccaccacagatgccaataacctgatgttcacttcagaagatgaacttagggccaccaacccccgggacactgacctgtttggccacctggcaaccaaccagcaaaacgccaccaccgttcctaccgtagacgacgtggacggagtcggcgtgtacccgggaatggtgtggcaggacagagacatttactaccaagggcccatttgggccaaaattccacacacggatggacactttcacccgtctcctctcattggcggatttggactgaaaagcccgcctccacaaatattcatcaaaaacactcctgtacccgccaatcccgcaacgaccttctctccggccagaatcaacagcttcatcacccagtacagcaccggacaggtggctgtcaaaatagaatgggaaatccagaaggagcggtccaagagatggaacccagaggtccagttcacgtccaactacggagcacaggactcgcttctctgggctcccgacaacgccggagcctacaaagagcccagggccattggatcccgatacctcaccaaccacctctag

SEQ ID NO: 525 - DNA, 4694 bp, Bovine adeno-associated virus
gtggcactcccccccctgtcgcgttcgctcgttcgctggctcgattgggggggtggcagctcaaagagctgccagacgacggccctctgggccgtcgcccccccaatcgagccagcgaacgagcgaacgcgacaggggggggagtgccacactctctagcaagggggttttgtaggtggtgatgtcattgttgatgtcattatagttgtcacgcgatagttaatgattaacagtcatgtgatgtgtgttatccaataggatgaaagcgcgcgaatgagatctcgcgagacttccggggtataaaaggggtgagtgaacgagcccgccgccattctctgctctggactgctagaggaccctcgctgccatggctaccttctatgaagtcattgttcgcgttccatttgatgtggaagagcacctgcctggaatttctgacaactttgtagactgggtaactggtcaaatttgggagctgcctcccgagtcagatttgaatttgactctgattgagcagcctcagctgacggtggctgacagaattcgccgcgtgttcctgtacgagtggaacaaattttccaagcaggagagcaaattctttgtgcagtttgaaaagggatctgaatattttcatctgcacacgctcgtggagacctccggcatctcttctatggtccttggccgctacgtgagtcagattcgcgcccagctggtgaaggtggtgttccagaacattgagccgcggattaacgactgggtcgccatcaccaaggtaaagaagggcggagccaataaggtggtggattctgggtatattcccgcctacctgctgccgaaggtccaaccagagcttcagtgggcgtggactaacctcgaagagtataaattggccgccctcaatctggaggagcgcaaacggctcgtcgctcagtttcagcttgagtcctcgcagcgctcgcaagaggcatcttcccagagggacgtttcggctgacccggtcatcaagagcaagacttcccagaaatacatggcgctggtaagctggctggtggaacatggcatcacttccgagaagcagtggattcaggagaatcaggagagctacctgtccttcaactccacgggaaactctcggagccagattaaagccgcgcttgacaacgcgtcaaaaattatgagtctgaccaaatctgcctcagactatctcgtgggacagactgttccagaggacatttctgaaaacagaatctggcagatttttgatctcaacggctacgacccggcatacgcgggctctgttctctacggctggtgcactcgcgcctttggaaagaggaacaccgtctggctgtatggacccgcgaccaccggaaagaccaacatcgcggaagccatctctcacaccgtgcccttttatggctgtgtgaactggactaatgagaactttccctttaatgactgtgtggaaaaaatgttgatctggtgggaggagggaaagatgaccagcaaggtggtggaacccgccaaggccatcttgggggggtctagagtacgagtggatcaaaaatgtaaatcctctgtacaagtagactctaccccggtgattatcacctccaatactaacatgtgtgtggtggtggatgggaactccacgacctttgaacaccagcagccgctggaagaccgcatgttcagatttgaactcatgcggcggctcccgccagattttggcaagattaccaagcaggaagtcaaagacttttttgcttgggcaaaggtcaaccaggtgccggtgactcacgagtttatggttcccaagaaagtggcgggaactgagagggcggagacttctagaaaacgcccactggatgacgtcaccaataccaactataaaagtccggagaagcgggcccggctctcagttgttcctgagacgcctcgcagttcagacgtgcctgtagagcccgctcctctgcgacctctcaactggtcttccaggtatgaatgcagatgtgactatcatgctaaatttgactctgtaacgggggaatgtgacgagtgtgaatatttgaatcggggcaaaaatggctgtatctttcataatgctacacattgtcaaatttgtcacgctgttcctccatgggaaaaggaaaatgtgtcagattttaatgattttgatgactgtaataaagagcagtaaataaagtgagtagtcatgtcttttgttgaccaccctccagattggttggaatcgatcggcgacggctttcgtgaatttctcggccttgaggcgggtcccccgaaacccaaggccaatcaacagaagcaagataacgctcgaggtcttgtgcttcctgggtacaagtatcttggtcctgggaacggccttgataagggcgatcctgtcaattttgctgacgaggttgcccgagagcacgacctctcctaccagaaacagcttgaggcgggcgataacccttacctcaagtacaaccacgcggacgcagagtttcaggagaaactcgcttctgacacttcttttgggggaaaccttgggaaggctgttttccaggctaaaaagaggattctcgaacctcttggcctggttgagacgccggataaaacggcgcctgcggcaaaaaagaggcctctagagcagagtcctcaagagccagactcctcgagcggagttggcaagaaaggcaaacagcctgccagaaagagactcaactttgacgacgaacctggagccggagacgggcctcccccagaaggaccatcttccggagctatgtctactgagactgaaatgcgtgcagcagctggcggaaatggtggcgatgcgggacaaggtgccgagggagtgggtaatgcctccggtgattggcattgcgattccacttggtcagagagccacgtcaccaccacctcaacccgcacctgggtcctgccgacctacaacaaccacctgtacctgcggctcggctcgagcaacgccagcgacaccttcaacggattctccaccccctggggatactttgactttaaccgcttccactgccacttctcgccaagagactggcaaaggctcatcaacaaccactggggactgcgccccaaaagcatgcaagtccgcatcttcaacatccaagttaaggaggtcacgacgtctaacggggagacgaccgtatccaacaacctcaccagcacggtccagatctttgcggacagcacgtacgagctcccgtacgtgatggatgcaggtcaggagggcagcttgcctcctttccccaacgacgtgttcatggtgcctcagtacgggtactgcggactggtaaccggaggcagctctcaaaaccagacagacagaaatgccttctactgtctggagtactttcccagccagatgctgagaaccggaaacaactttgagatggtgtacaagtttgaaaacgtgcccttccactccatgtacgctcacagccagagcctggataggctgatgaacccgctgctggaccagtacctgtgggagctccagtctaccacctctggaggaactctcaaccagggcaattcagccaccaactttgccaagctgaccaaaacaaacttttctggctaccgcaaaaactggctcccggggcccatgatgaagcagcagagattctccaagactgccagtcaaaactacaagattccccagggaagaaacaacagtctgctccattatgagaccagaactaccctcgacggaagatggagcaattttgccccgggaacggccatggcaaccgcagccaacgacgccaccgacttctctcaggcccagctcatctttgcggggcccaacatcaccggcaacaccaccacagatgccaataacctgatgttcacttcagaagatgaacttagggccaccaacccccgggacactgacctgtttggccacctggcaaccaaccagcaaaacgccaccaccgttcctaccgtagacgacgtggacggagtcggcgtgtacccgggaatggtgtggcaggacagagacatttactaccaagggcccatttgggccaaaattccacacacggatggacactttcacccgtctcctctcattggcggatttggactgaaaagcccgcctccacaaatattcatcaaaaacactcctgtacccgccaatcccgcaacgaccttctctccggccagaatcaacagcttcatcacccagtacagcaccggacaggtggctgtcaaaatagaatgggaaatccagaaggagcggtccaagagatggaacccagaggtccagttcacgtccaactacggagcacaggactcgcttctctgggctcccgacaacgccggagcctacaaagagcccagggccattggatcccgatacctcaccaaccacctctagcccaattctgttgcataccctcaataaaccgtgtattcgtttcagtaaaatactgcctcttgtggtcattcggcgtacaacagcttacaacaacaacaaaacccccttgctagagagtgtggcactcccccccctgtcgcgttcgctcgttcgctggctcgattgggggggtggcagctcaaagagctgccagacgacggccctctgggccgtcgcccccccaatcgagccagcgaacgagcgaacgcgacaggggggggagtgccac

SEQ ID NO: 526 - protein, 390 aa, Bovine adeno-associated virus
MALVSWLVEHGITSEKQWIQENQESYLSFNSTGNSRSQIKAALDNASKIMSLTKSASDYLVGQTVPEDISENRIWQIFDLNGYDPAYAGSVLYGWCTRAFGKRNTVWLYGPATTGKTNIAEAISHTVPFYGCVNWTNENFPFNDCVEKMLIWWEEGKMTSKVVEPAKAILGGSRVRVDQKCKSSVQVDSTPVIITSNTNMCVVVDGNSTTFEHQQPLEDRMFRFELMRRLPPDFGKITKQEVKDFFAWAKVNQVPVTHEFMVPKKVAGTERAETSRKRPLDDVTNTNYKSPEKRARLSVVPETPRSSDVPVEPAPLRPLNWSSRYECRCDYHAKFDSVTGECDECEYLNRGKNGCIFHNATHCQICHAVPPWEKENVSDFNDFDDCNKEQ

SEQ ID NO: 527 - protein, 610 aa, Bovine adeno-associated virus
MATFYEVIVRVPFDVEEHLPGISDNFVDWVTGQIWELPPESDLNLTLIEQPQLTVADRIRRVFLYEWNKFSKQESKFFVQFEKGSEYFHLHTLVETSGISSMVLGRYVSQIRAQLVKVVFQNIEPRINDWVAITKVKKGGANKVVDSGYIPAYLLPKVQPELQWAWTNLEEYKLAALNLEERKRLVAQFQLESSQRSQEASSQRDVSADPVIKSKTSQKYMALVSWLVEHGITSEKQWIQENQESYLSFNSTGNSRSQIKAALDNASKIMSLTKSASDYLVGQTVPEDISENRIWQIFDLNGYDPAYAGSVLYGWCTRAFGKRNTVWLYGPATTGKTNIAEAISHTVPFYGCVNWTNENFPFNDCVEKMLIWWEEGKMTSKVVEPAKAILGGSRVRVDQKCKSSVQVDSTPVIITSNTNMCVVVDGNSTTFEHQQPLEDRMFRFELMRRLPPDFGKITKQEVKDFFAWAKVNQVPVTHEFMVPKKVAGTERAETSRKRPLDDVTNTNYKSPEKRARLSVVPETPRSSDVPVEPAPLRPLNWSSRYECRCDYHAKFDSVTGECDECEYLNRGKNGCIFHNATHCQICHAVPPWEKENVSDFNDFDDCNKEQ

SEQ ID NO: 528 - protein, 538 aa, Bovine adeno-associated virus
MRAAAGGNGGDAGQGAEGVGNASGDWHCDSTWSESHVTTTSTRTWVLPTYNNHLYLRLGSSNASDTFNGFSTPWGYFDFNRFHCHFSPRDWQRLINNHWGLRPKSMQVRIFNIQVKEVTTSNGETTVSNNLTSTVQIFADSTYELPYVMDAGQEGSLPPFPNDVFMVPQYGYCGLVTGGSSQNQTDRNAFYCLEYFPSQMLRTGNNFEMVYKFENVPFHSMYAHSQSLDRLMNPLLDQYLWELQSTTSGGTLNQGNSATNFAKLTKTNFSGYRKNWLPGPMMKQQRFSKTASQNYKIPQGRNNSLLHYETRTTLDGRWSNFAPGTAMATAANDATDFSQAQLIFAGPNITGNTTTDANNLMFTSEDELRATNPRDTDLFGHLATNQQNATTVPTVDDVDGVGVYPGMVWQDRDIYYQGPIWAKIPHTDGHFHPSPLIGGFGLKSPPPQIFIKNTPVPANPATTFSPARINSFITQYSTGQVAVKIEWEIQKERSKRWNPEVQFTSNYGAQDSLLWAPDNAGAYKEPRAIGSRYLTNHL

SEQ ID NO: 529 - protein, 736 aa, Artificial Sequence
  source: /note="Description of Artificial Sequence: Synthetic polypeptide"
MSFVDHPPDWLESIGDGFREFLGLEAGPPKPKANQQKQDNARGLVLPGYKYLGPGNGLDKGDPVNFADEVAREHDLSYQKQLEAGDNPYLKYNHADAEFQEKLASDTSFGGNLGKAVFQAKKRILEPLGLVETPDKTAPAAKKRPLEQSPQEPDSSSGVGKKGKQPARKRLNFDDEPGAGDGPPPEGPSSGAMSTETEMRAAAGGNGGDAGQGAEGVGNASGDWHCDSTWSESHVTTTSTRTWVLPTYNNHLYLRLGSSNASDTFNGFSTPWGYFDFNRFHCHFSPRDWQRLINNHWGLRPKSMQVRIFNIQVKEVTTSNGETTVSNNLTSTVHIFADSTYELPYVMDAGQEGSLPPFPNDVFMVPQYGYCGLVTGGSSQNQTDRNAFYCLEYFPSQMLRTGNNFEMVYKFENVPFHSMYAHSQSLDRLMNPLLDQYLWELQSTTSGGTLNQGNSATNFAKLTNKNFSGYRKNWLPGPMMKQQRFSKTASQNYKIPQGGNNSLLHYETRTTLDRRWSNFAPGTAMATAANDATDFSQAQLIFAGPNITGNTTTDANNLMFTSEDELRATNPRDTDLFGHLATNQQNATTVPTVDDVDGVGVYPGMVWQDRDIYYQGPIWAKIPHTDGHFHPSPLIGGFGLKSPPPQIFIKNTPVPANPATTFSPARINSFITQYSTGQVAVKIEWEIQKERSKRWNPEVQFTSNYGAQDSLLWAPDNAGAYKEPRAIGSRYLTNHL

SEQ ID NO: 530 - protein, 736 aa, Artificial Sequence
  source: /note="Description of Artificial Sequence: Synthetic polypeptide"
MSFVDHPPDWLESIGDGFREFLGLEAGPPKPKANQQKQDNARGLVLPGYKYLGPGNGLDKGDPVNFADEVAREHDLSYQKQLEAGDNPYLKYNHADAEFQEKLASDTSFGGNLGKAVFQAKKRILEPLGLVETPDKTAPAAKKRPLEQSPQEPDSSSGVGKKGKQPARKRLNFDDEPGAGDGPPPEGPSSGAMSTETEMRAAAGGNGGDAGQGAEGVGNASGDWHCDSTWSESHVTTTSTRTWVLPTYNNHLYLRLGSSNASDTFNGFSTPWGYFDFNRFHCHFSPRDWQRLINNHWGLRPKSMQVRIFNIQVKEVTTSNGETTVSNNLTSTVQIFADSTYELPYVMDAGQEGSLPPFPNDVFMVPQYGYCGLVTGGSSQNQTDRNAFYCLEYFPSQMLRTGNNFEMVYKFENVPFHSMYAHSQSLDRLMNPLLDQYLWELQSTTSGGTLNQGNSATNFAKLTKTNFSGYRKNWLPGPMMKQQRFSKTASQNYKIPQGRNNSLLHYETRTTLDGRWSNFAPGTAMATAANDATDFSQAQLIFAGPNITGNTTTDANNLMFTSEDELRATNPRDTDLFGHLATNQQNATTVPTVDDVDGVGVYPGMVWQDRDIYYQGPIWAKIPHTDGHFHPSPLIGGFGLKSPPPQIFIKNTPVPANPATTFSPARINSFITQYSTGQVAVKIEWEIQKERSKRWNPEVQFTSNYGAQDSLLWAPDNAGAYKEPRAIGSRYLTNHL

SEQ ID NO: 531 - protein, 736 aa, Bovine adeno-associated virus; identical to SEQ ID NO: 530

SEQ ID NO: 532 - protein, 600 aa, Bovine adeno-associated virus
TAPAAKKRPLEQSPQEPDSSSGVGKKGKQPARKRLNFDDEPGAGDGPPPEGPSSGAMSTETEMRAAAGGNGGDAGQGAEGVGNASGDWHCDSTWSESHVTTTSTRTWVLPTYNNHLYLRLGSSNASDTFNGFSTPWGYFDFNRFHCHFSPRDWQRLINNHWGLRPKSMQVRIFNIQVKEVTTSNGETTVSNNLTSTVQIFADSTYELPYVMDAGQEGSLPPFPNDVFMVPQYGYCGLVTGGSSQNQTDRNAFYCLEYFPSQMLRTGNNFEMVYKFENVPFHSMYAHSQSLDRLMNPLLDQYLWELQSTTSGGTLNQGNSATNFAKLTKTNFSGYRKNWLPGPMMKQQRFSKTASQNYKIPQGRNNSLLHYETRTTLDGRWSNFAPGTAMATAANDATDFSQAQLIFAGPNITGNTTTDANNLMFTSEDELRATNPRDTDLFGHLATNQQNATTVPTVDDVDGVGVYPGMVWQDRDIYYQGPIWAKIPHTDGHFHPSPLIGGFGLKSPPPQIFIKNTPVPANPATTFSPARINSFITQYSTGQVAVKIEWEIQKERSKRWNPEVQFTSNYGAQDSLLWAPDNAGAYKEPRAIGSRYLTNHL

SEQ ID NO: 533 - DNA, 2214 bp, Artificial Sequence
  source: /note="Description of Artificial Sequence: Synthetic polynucleotide"
atggctgccgatggttatcttccagattggctcgaggacactctctctgaaggaataagacagtggtggaagctcaaacctggcccaccaccaccaaagcccgcagagcggcataaggacgacagcaggggtcttgtgcttcctgggtacaagtacctcggacccttcaacggactcgacaagggagagccggtcaacgaggcagacgccgcggccctcgagcacgacaaagcctacgaccggcagctcgacagcggagacaacccgtacctcaagtacaaccacgccgacgcggagtttcaggagcgccttaaagaagatacgtcttttgggggcaacctcgggcgagcagtcttccaggccaaaaagaggcttcttgaacctcttggtctggttgaggaagcggctaagacggctcctggaaagaagaggcctgtagagcagtctcctcaggaaccggactcctcctcgggcatcggcaagacaggccagcagcccgctaaaaagagactcaatttcggtcagactggcgacacagagtcagtcccagaccctcaaccaatcggagaacctcccgcagccccctcaggtgtgggatctcttacaatggcttcaggtggtggcgcaccagtggcagacaataacgaaggtgccgatggagtgggtagttcctcgggaaattggcattgcgattcccaatggctgggggacagagtcatcaccaccagcacccgaacctgggccctgcccacctacaacaatcacctctacaagcaaatctccaacgggacatcgggaggagccaccaacgacaacacctacttcggctacagcaccccctgggggtattttgactttaacagattccactgccacttttcaccacgtgactggcagcgactcatcaacaacaactggggattccggcccaagagactcagcttcaagctcttcaacatccaggtcaaggaggtcacgcagaatgaaggcaccaagaccatcgccaataaccttaccagcacggtccaggtcttcacggactcggagtaccagctgccgtacgttctcggctctgcccaccagggctgcctgcctccgttcccggcggacgtgttcatgattccccagtacggctacctaacactcaacaacggtagtcaggccgtgggacgctcctccttctactgcctggaatactttccttcgcagatgctgagaaccggcaacaacttccagtttacttacaccttcgaggacgtgcctttccacagcagctacgcccacagccagagcttggaccggctgatgaatcctctgattgaccagtacctgtactacttgtctcggactcaaacaacaggaggcacggcaaatacgcagactctgggcttcagccaaggtgggcctaatacaatggccaatcaggcaaagaactggctgccaggaccctgttaccgccaacaacgcgtctcaacgacaaccgggcaaaacaacaatagcaactttgcctggactgctgggaccaaataccatctgaatggaagaaattcattggctaatcctggcatcgctatggcaacacacaaagacgacaaggagcgtttttttcccagtaacgggatcctgatttttggcaaacaaaatgctgccagagacaatgcggattacagcgatgtcatgctcaccagcgaggaagaaatcaaaaccactaaccctgtggctacagaggaatacggtatcgtggcagataacttgcagcagcaaaacacggctcctcaaattggaactgtcaacagccagggggccttacccggtatggtttggcagaaccgggacgtgtacctgcagggtcccatctgggccaagattcctcacacggacggcaacttccacccgtctccgctgatgggcggctttggcctgaaacatcctccgcctcagatcctgatcaagaacacgcctgtacctgcggatcctccgaccaccttcaaccagtcaaagctgaactctttcatcacgcaatacagcaccggacaggtcagcgtggaaattgaatgggagctgcagaaggaaaacagcaagcgctggaaccccgagatccagtacacctccaactactacaaatctacaagtgtggactttgctgttaatacagaaggcgtgtactctgaaccccaccccattggcacccgttacctcacccgtcccctgtaa

SEQ ID NO: 534 - protein, 737 aa, Artificial Sequence
  source: /note="Description of Artificial Sequence: Synthetic polypeptide"
MAADGYLPDWLEDTLSEGIRQWWKLKPGPPPPKPAERHKDDSRGLVLPGYKYLGPFNGLDKGEPVNEADAAALEHDKAYDRQLDSGDNPYLKYNHADAEFQERLKEDTSFGGNLGRAVFQAKKRLLEPLGLVEEAAKTAPGKKRPVEQSPQEPDSSSGIGKTGQQPAKKRLNFGQTGDTESVPDPQPIGEPPAAPSGVGSLTMASGGGAPVADNNEGADGVGSSSGNWHCDSQWLGDRVITTSTRTWALPTYNNHLYKQISNGTSGGATNDNTYFGYSTPWGYFDFNRFHCHFSPRDWQRLINNNWGFRPKRLSFKLFNIQVKEVTQNEGTKTIANNLTSTVQVFTDSEYQLPYVLGSAHQGCLPPFPADVFMIPQYGYLTLNNGSQAVGRSSFYCLEYFPSQMLRTGNNFQFTYTFEDVPFHSSYAHSQSLDRLMNPLIDQYLYYLSRTQTTGGTANTQTLGFSQGGPNTMANQAKNWLPGPCYRQQRVSTTTGQNNNSNFAWTAGTKYHLNGRNSLANPGIAMATHKDDKERFFPSNGILIFGKQNAARDNADYSDVMLTSEEEIKTTNPVATEEYGIVADNLQQQNTAPQIGTVNSQGALPGMVWQNRDVYLQGPIWAKIPHTDGNFHPSPLMGGFGLKHPPPQILIKNTPVPADPPTTFNQSKLNSFITQYSTGQVSVEIEWELQKENSKRWNPEIQYTSNYYKSTSVDFAVNTEGVYSEPHPIGTRYLTRPL

SEQ ID NO: 535 - protein, 736 aa, Artificial Sequence
  source: /note="Description of Artificial Sequence: Synthetic polypeptide"
MAADGYLPDWLEDNLSEGIREWWDLKPGAPKPKANQQKQDDGRGLVLPGYKYLGPFNGLDKGEPVNAADAAALEHDKAYDQQLKAGDNPYLRYNHADAEFQERLQEDTSFGGNLGRAVFQAKKRVLEPLGLVEEGAKTAPGKKRPVEQSPQEPDSSSGIGKTGQQPAKKRLNFGQTGDTESVPDPQPIGEPPAAPSGVGSLTMASGGGAPVADNNEGADGVGSSSGNWHCDSQWLGDRVITTSTRTWALPTYNNHLYKQISSASTGASNDNHYFGYSTPWGYFDFNRFHCHFSPRDWQRLINNNWGFRPKRLNFKLFNIQVKEVTDNNGVKTIANNLTSTVQVFTDSDYQLPYVLGSAHQGCLPPFPADVFMIPQYGYLTLNNGSQAVGRSSFYCLEYFPSQMLRTGNNFQFTYTFEDVPFHSSYAHSQSLDRLMNPLIDQYLYYLSRTQTTGGTANTQTLGFSQGGPNTMANQAKNWLPGPCYRQQRVSTTTGQNNNSNFAWTAGTKYHLNGRNSLANPGIAMATHKDDKERFFPSNGILIFGKQNAARDNADYSDVMLTSEEEIKTTNPVATEEYGIVADNLQQQNTAPQIGTVNSQGALPGMVWQNRDVYLQGPIWAKIPHTDGNFHPSPLMGGFGLKHPPPQILIKNTPVPADPPTTFNQSKLNSFITQYSTGQVSVEIEWELQKENSKRWNPEIQYTSNYYKSTSVDFAVNTEGVYSEPHPIGTRYLTRPL

SEQ ID NO: 536 - protein, 736 aa, Artificial Sequence
  source: /note="Description of Artificial Sequence: Synthetic polypeptide"
MAADGYLPDWLEDTLSEGIRQWWKLKPGPPPPKPAERHKDDSRGLVLPGYKYLGPFNGLDKGEPVNEADAAALEHDKAYDRQLDSGDNPYLKYNHADAEFQERLQGDTSFGGNLGRAVFQAKKRVLEPLGLVEEGAKTAPGKKRPVEQSPQEPDSSSGIGETGQQPAKKRLNFGQTGDSESVPDPQPLGEPPATPAAVGPTTMASGGGAPMADNNEGADGVGSSSGNWHCDSQWLGDRVITTSTRTWALPTYNNHLYKQISSASTGASNDNHYFGYSTPWGYFDFNRFHCHFSPRDWQRLINNNWGFRPKRLSFKLFNIQVKEVTDNNGVKTIANNLTSTVQVFTDSEYQLPYVLGSAHQGCLPPFPADVFMIPQYGYLTLNNGSQAVGRSSFYCLEYFPSQMLRTGNNFTFSYTFEDVPFHSSYAHSQSLDRLMNPLIDQYLYYLSRTQTTGGTANTQTLGFSQGGPNTMANQAKNWLPGPCYRQQRVSTTTGQNNNSNFAWTAGTKYHLNGRNSLANPGIAMATHKDDKERFFPSNGILIFGKQNAARDNADYSDVMLTSEEEIKTTNPVATEEYGIVADNLQQQNTAPQIGTVNSQGALPGMVWQNRDVYLQGPIWAKIPHTDGNFHPSPLMGGFGLKHPPPQILIKNTPVPADPPTTFNQSKLNSFITQYSTGQVSVEIEWELQKENSKRWNPEIQYTSNYYKSTSVDFAVNTEGVYSEPHPIGTRYLTRPL

SEQ ID NO: 537 - DNA, 2181 bp, Artificial Sequence
  source: /note="Description of Artificial Sequence: Synthetic polynucleotide"
atgtcttttgttgatcaccctccagattggttggaagaagttggtgaaggtcttcgcgagtttttgggccttgaagcgggcccaccgaaaccaaaacccaatcagcagcatcaagatcaagcccgtggtcttgtgctgcctggttataactatctcggacccggaaacggtctcgatcgaggagagcctgtcaacagggcagacgaggtcgcgcgagagcacgacatctcgtacaacgagcagcttgaggcgggagacaacccctacctcaagtacaaccacgcggacgccgagtttcaggagaagctcgccgacgacacatccttcgggggaaacctcggaaaggcagtctttcaggccaagaaaagggttctcgaaccttttggcctggttgaagagggtgctaagacggcccctaccggaaagcggatagacgaccactttccaaaaagaaagaaggctcggaccgaagaggactccaagccttccacctcgtcagacgccgaagctggacccagcggatcccagcagctgcaaatcccagcacaaccagcctcaagtttgggagctgatacaatgtctgcgggaggtggcggcccattgggcgacaataaccaaggtgccgatggagtgggcaatgcctcgggagattggcattgcgattccacgtggatgggggacagagtcgtcaccaagtccacccgcacctgggtgctgcccagctacaacaaccaccagtaccgagagatcaaaagcggctccgtcgacggaagcaacgccaacgcctactttggatacagcaccccctgggggtactttgactttaaccgcttccacagccactggagcccccgagactggcaaagactcatcaacaactattggggcttcagaccccggtctctcagagtcaaaatcttcaacatccaagtcaaagaggtcacggtgcaggactccaccaccaccatcgccaacaacctcacctccaccgtccaagtgtttacggacgacgactaccaactcccgtacgtcgtcggcaacgggaccgagggatgcctgccggccttccccccgcaggtctttacgctgccgcagtacggctacgcgacgctgaaccgagacaacggagacaacccgacagagcggagcagcttcttttgcctagagtactttcccagcaagatgctgaggacgggcaacaactttgagtttacctacagctttgaagaggtgcccttccactgcagcttcgccccgagccagaacctctttaagctggccaacccgctggtggaccagtacctgtaccgcttcgtgagcacctcggccacgggcgccatccagttccaaaagaacctggcgggcagatacgccaacacctacaaaaactggttcccggggcccatgggccgaacccagggctggaacacgagctctggggtcagcagcaccaacagagtcagcgtcaacaacttttccgtctcaaaccggatgaacctggagggggccagctaccaagtgaacccccagcccaacgggatgacaaacacgctccaaggcagcaaccgctacgcgctggaaaacaccatgatcttcaacgctcaaaacgccacgccgggaactacctcggtgtacccagaggacaatctactgctgaccagcgagagcgagactcagcccgtcaaccgggtggcttacaacacgggcggtcagatggccaccaacgcccagaacgccaccacggctcccacggtcgggacctacaacctccaggaagtgcttcctggcagcgtatggatggagagggacgtgtacctccaaggacccatctgggccaagatcccagagacgggggcgcactttcacccctctccggccatgggcggattcggactcaaacacccgccgcccatgatgctcatcaaaaacacgccggtgcccggcaacatcaccagcttctcggacgtgcccgtcagcagcttcatcacccagtacagcaccgggcaggtcaccgtggagatggaatgggagctcaaaaaggaaaactccaagaggtggaacccagagatccagtacaccaacaactacaacgacccccagtttgtggactttgctccagacggctccggcgaatacagaaccaccagagccatcggaacccgatacctcacccgacccctt

SEQ ID NO: 538 - protein, 726 aa, Artificial Sequence
  source: /note="Description of Artificial Sequence: Synthetic polypeptide"
MSFVDHPPDWLEEVGEGLREFLGLEAGPPKPKPNQQHQDQARGLVLPGYNYLGPGNGLDRGEPVNRADEVAREHDISYNEQLEAGDNPYLKYNHADAEFQEKLADDTSFGGNLGKAVFQAKKRVLEPFGLVEEGAKTAPTGKRIDDHFPKRKKARTEEDSKPSTSSDAEAGPSGSQQLQIPAQPASSLGADTMSAGGGGPLGDNNQGADGVGNASGDWHCDSTWMGDRVVTKSTRTWVLPSYNNHQYREIKSGSVDGSNANAYFGYSTPWGYFDFNRFHSHWSPRDWQRLINNYWGFRPRSLRVKIFNIQVKEVTVQDSTTTIANNLTSTVQVFTDDDYQLPYVVGNGTEGCLPAFPPQVFTLPQYGYATLNRDNGDNPTERSSFFCLEYFPSKMLRTGNNFEFTYSFEEVPFHCSFAPSQNLFKLANPLVDQYLYRFVSTSATGAIQFQKNLAGRYANTYKNWFPGPMGRTQGWNTSSGSSTNRVSVNNFSVSNRMNLEGASYQVNPQPNGMTNTLQGSNRYALENTMIFNAQNATPGTTSVYPEDNLLLTSESETQPVNRVAYNTGGQMATNAQNATTAPTVGTYNLQEVLPGSVWMERDVYLQGPIWAKIPETGAHFHPSPAMGGFGLKHPPPMMLIKNTPVPGNITSFSDVPVSSFITQYSTGQVTVEMEWELKKENSKRWNPEIQYTNNYNDPQFVDFAPDGSGEYRTTRAIGTRYLTRPL

SEQ ID NO: 539 - protein, 735 aa, Artificial Sequence
  source: /note="Description of Artificial Sequence: Synthetic polypeptide"
MAADGYLPDWLEDTLSEGIRQWWKLKPGPPPPKPAERHKDDSRGLVLPGYKYLGPFNGLDKGEPVNEADAAALEHDKAYDRQLDSGDNPYLKYNHADAEFQERLKEDTSFGGNLGRAVFQAKKRILEPLGLVEEPVKTAPGKKRPVEHSPAEPDSSSGTGKSGQQPARKRLNFGQTGDADSVPDPQPLGQPPAAPSGLGTNTMASGSGAPMADNNEGADGVGNSSGNWHCDSTWMGDRVITTSTRTWALPTYNNHLYKQISSQSGASNDNHYFGYSTPWGYFDFNRFHCHFSPRDWQRLINNNWGFRPKRLSFKLFNIQVKEVTQNDGTTTIANNLTSTVQVFTDSEYQLPYVLGSAHQGCLPPFPADVFMVPQYGYLTLNNGSQAVGRSSFYCLEYFPSQMLRTGNNFTFSYTFEDVPFHSSYAHSQSLDRLMNPLIDQYLYYLSRTNTPSGTTTMSRLQFSQAGASDIRDQSRNWLPGPCYRQQRVSKTAADNNNSDYSWTGATKYHLNGRDSLVNPGPAMASHKDDEEKYFPQSGVLIFGKQDSGKTNVDIEKVMITDEEEIRTTNPVATEQYGSVSTNLQSGNTQAATSDVNTQGVLPGMVWQDRDVYLQGPIWAKIPHTDGHFHPSPLMGGFGLKHPPPQILIKNTPVPANPSTTFSAAKFASFITQYSTGQVSVEIEWELQKENSKRWNPEIQYTSNYNKSVNVDFTVDTNGVYSEPRPIGTRYLTRNL

SEQ ID NO: 540 - DNA, 1797 bp, Artificial Sequence
  source: /note="Description of Artificial Sequence: Synthetic polynucleotide"
acggctccgaccggagacaagcggaaaggcgaagacgaacctcgtttgcccgacacttcttcacagactcccaagaaaaacaagaagcctcgcaaggaaagaccttccggcggggcagaagatccgggcgaaggcacctcttccaacgctggagcagcagcacccgcctctagtgtgggatcatctatcatggctgaaggaggtggcggcccagtgggcgatgcaggccagggtgccgatggagtgggcaattcctccggaaattggcattgcgattcccaatggctggaaaacggagtcgtcactcgaaccacccgaacctgggtcttgcccagctacaacaaccacctgtacaaacgaatccaaggacccagcggaggcgacaacaacaacaaattctttggattcagcaccccctggggatactttgactacaatcgattccactgccacttttccccgcgagactggcaacgactcatcaacaacaactggggcatccgtcccaaagcgatgcgctttagactctttaacatccaggttaaagaggtcacggtccaagacttcaacaccaccatcggcaacaacctcaccagtacggtccaggtctttgcggacaaggactaccaactgccgtacgtcctcggatcggctaccgaaggcaccttcccgccgttcccagcggatatctacacgatcccgcagtacgggtactgcacgctaaactacaacaacgaggcggtggatcgttcggccttctactgtctggactactttccctcagacatgctgcggacaggaaataactttgagtttacttacaccttcgaggacgttcctttccatagcatgtttgcccacaaccagacgctagaccggctgatgaatcccctcgtggatcagtacctctgggctttcagctccgtcagccaagcaggctcatctggacgagctcttcattactcgcgggcgactaaaaccaacatggcggctcaatataggaactggttacctgggcctttcttccgtgatcagcaaatctttacgggcgctagcaacatcactaaaaataacgtctttagcgtttgggaaaaaggcaagcaatgggaactcgacaatcggaccaacctaatgcagcccggtcctgcggcagcgaccacctttagcggagaacctgaccgtcaagccatgcaaaacacgctggcttttagcaggaccgtctacgatcaaacgaccgccacgaccgatcgtaaccagatactcatcaccaacgaagacgaaatcagacccaccaactcggtcggtatcgacgcgtggggagcagttcccaccaacaaccagtcgatcgtgacccccggcactcgcgcggccgtcaacaatcaaggggcgcttcccgggatggtgtggcaaaacagagacatttaccctacagggacccatttggccaaaattcccgacactgacaatcacttccatccgtccccgcttattgggcggtttggctgcaagcatccccctccccagattttcattaaaaacacacccgtccctgccaacccttcggaaacgttccagacggccaaagtggcctccttcatcaaccagtactcgaccggacagtgcaccgtcgaaatcttttgggaactcaagaaggaaacctccaagcgctggaaccccgaaatccagttcacctccaactttggcaacgcggccgacatccagtttgccgtctccgacacgggatcctattccgaacctcgtcccatcggtacccgttaccttaccaaacctctgtaa

SEQ ID NO: 541 - DNA, 1989 bp, Artificial Sequence
  source: /note="Description of Artificial Sequence: Synthetic polynucleotide"
atgaggtcgtactacgaggtcatcgttcagctgcccaacgacgtcgagagtcaggtacctggaatctccgattcgttcgtcaactggattacgtcgcgagaatggacgttgcctgaggacgccgattgggatttggaccaggtcgatcaagttcaactgacgctcggcgacaaaatccaacgggagattcgaactcattgggggacgatggccaaagaaccggactttcactattttatccaactggaacaaggtgaggtgttctttcatttacacgtcctgctggaaacgtgttccgtaaagccgatggtactcggaagatatatccgacatattcaacaaaaaattgtgagtaaagtctactgcgccacgagcctacgatggaaggatggatgcgtggtgaccaagaccaaaaatttcgggggcgcgaacaaggtccgggccgagtcgtatattcccgcctacctgatcccgaaacagcaaccggaagtgcagtgggcgtggactaacgtgcccgagtatataaaagcgtgcttgcaccgagaactgcgtgccagtctcgcgcgacttcacttcgaggaggcgggcgtctcgcaatccaaggaaaatctcgcgagaactgcagacggcgctcccgtgatgccgacccgcgtcagcaaacgctacatggagctcgtggattggctcgtggagaaggggatcaccaccgagaaggaatggctgctggaaaacagagaaagctttcggagctttcaggcctcgagcaactcggcgcgtcagatcaagacggccctgcaaggcgccattcaggagatgcttctgaccaagacggcggaggactacctcgtcggaaaggatcccgtctcggacgacgacatccgtcagaaccgcatctacaagattctggaactgaaccactacgacccagcgtacgtggggagtattttggtcgggtggtgccagaagaaatggggcaagcgaaacacgctgtggctgttcggacatgcgaccaccggcaagaccaacatcgcggaggctattgcccatgctgtgccgttctatggatgcgttaactggaccaacgagaactttccgttcaacgactgcgtcgaaaaaatgattatctggtgggaggagggcaaaatgaccgccaaagtggtggaaacagccaaggcgattctgggaggatctcgggtgagagtggaccaaaaatgcaaagcttcggttccgatcgaaccgacgccggtcattattaccagtaacaccaacatgtgttatgtcatcgacgggaacacgaccacgttcgagcataagcagccgttggaggacaggatgtttaagctcgaattgctgactcggttgcctgatgactttggtaaggtgaccaaacaggaggtgcgtcaattcttcaggtggtctcaggatcacctgacccctgtgatcccagaattcctagtgcggaaggcggagtctcgcaaaagacccgccccttccggggaaggctatataagcccgacaaagcggcccgcgctcgcagagcagcagcaggcgtcggagagcgcggacccggttcccaccaggtatcgtatcaaatgctcgaaacattgcggtatggataaaatgttgtttccttgccaaatttgtgaatcgatgaacagagatattaatatttgtgctattcataaaacgaccgactgtaaagagtgtttccccgactacggggataaagatgatgtagaactacccccctgtacagaacacaacgtgtctcgttgttatcaatgtcattcgggcgaattgtatcgcgtgacttcggactctgacgagaaacctgcccccgagagtgatgaaggcaccgagccatcctatgctccctgcacgattcaccacctgatgggcaagagtcacgggttagtcacttgcgcggcgtgtcggttgaaaaatagtacgttgcatgatgacttggatgacggtgatctcgaacaataa

SEQ ID NO: 542 - DNA, 1626 bp, Artificial Sequence
  source: /note="Description of Artificial Sequence: Synthetic polynucleotide"
atgaggtcgtactacgaggtcatcgttcagctgcccaacgacgtcgagagtcaggtacctggaatctccgattcgttcgtcaactggattacgtcgcgagaatggacgttgcctgaggacgccgattgggatttggaccaggtcgatcaagttcaactgacgctcggcgacaaaatccaacgggagattcgaactcattgggggacgatggccaaagaaccggactttcactattttatccaactggaacaaggtgaggtgttctttcatttacacgtcctgctggaaacgtgttccgtaaagccgatggtactcggaagatatatccgacatattcaacaaaaaattgtgagtaaagtctactgcgccacgagcctacgatggaaggatggatgcgtggtgaccaagaccaaaaatttcgggggcgcgaacaaggtccgggccgagtcgtatattcccgcctacctgatcccgaaacagcaaccggaagtgcagtgggcgtggactaacgtgcccgagtatataaaagcgtgcttgcaccgagaactgcgtgccagtctcgcgcgacttcacttcgaggaggcgggcgtctcgcaatccaaggaaaatctcgcgagaactgcagacggcgctcccgtgatgccgacccgcgtcagcaaacgctacatggagctcgtggattggctcgtggagaaggggatcaccaccgagaaggaatggctgctggaaaacagagaaagctttcggagctttcaggcctcgagcaactcggcgcgtcagatcaagacggccctgcaaggcgccattcaggagatgcttctgaccaagacggcggaggactacctcgtcggaaaggatcccgtctcggacgacgacatccgtcagaaccgcatctacaagattctggaactgaaccactacgacccagcgtacgtggggagtattttggtcgggtggtgccagaagaaatggggcaagcgaaacacgctgtggctgttcggacatgcgaccaccggcaagaccaacatcgcggaggctattgcccatgctgtgccgttctatggatgcgttaactggaccaacgagaactttccgttcaacgactgcgtcgaaaaaatgattatctggtgggaggagggcaaaatgaccgccaaagtggtggaaacagccaaggcgattctgggaggatctcgggtgagagtggaccaaaaatgcaaagcttcggttccgatcgaaccgacgccggtcattattaccagtaacaccaacatgtgttatgtcatcgacgggaacacgaccacgttcgagcataagcagccgttggaggacaggatgtttaagctcgaattgctgactcggttgcctgatgactttggtaaggtgaccaaacaggaggtgcgtcaattcttcaggtggtctcaggatcacctgacccctgtgatcccagaattcctagtgcggaaggcggagtctcgcaaaagacccgccccttccggggaaggctatataagcccgacaaagcggcccgcgctcgcagagcagcagcaggcgtcggagagcgcggacccggttcccaccagattggttggagcggttggtcaaaaagggagtgaatgctgcagctga

SEQ ID NO: 543 - DNA, 1323 bp, Artificial Sequence
  source: /note="Description of Artificial Sequence: Synthetic polynucleotide"
atggagctcgtggattggctcgtggagaaggggatcaccaccgagaaggaatggctgctggaaaacagagaaagctttcggagctttcaggcctcgagcaactcggcgcgtcagatcaagacggccctgcaaggcgccattcaggagatgcttctgaccaagacggcggaggactacctcgtcggaaaggatcccgtctcggacgacgacatccgtcagaaccgcatctacaagattctggaactgaaccactacgacccagcgtacgtggggagtattttggtcgggtggtgccagaagaaatggggcaagcgaaacacgctgtggctgttcggacatgcgaccaccggcaagaccaacatcgcggaggctattgcccatgctgtgccgttctatggatgcgttaactggaccaacgagaactttccgttcaacgactgcgtcgaaaaaatgattatctggtgggaggagggcaaaatgaccgccaaagtggtggaaacagccaaggcgattctgggaggatctcgggtgagagtggaccaaaaatgcaaagcttcggttccgatcgaaccgacgccggtcattattaccagtaacaccaacatgtgttatgtcatcgacgggaacacgaccacgttcgagcataagcagccgttggaggacaggatgtttaagctcgaattgctgactcggttgcctgatgactttggtaaggtgaccaaacaggaggtgcgtcaattcttcaggtggtctcaggatcacctgacccctgtgatcccagaattcctagtgcggaaggcggagtctcgcaaaagacccgccccttccggggaaggctatataagcccgacaaagcggcccgcgctcgcagagcagcagcaggcgtcggagagcgcggacccggttcccaccaggtatcgtatcaaatgctcgaaacattgcggtatggataaaatgttgtttccttgccaaatttgtgaatcgatgaacagagatattaatatttgtgctattcataaaacgaccgactgtaaagagtgtttccccgactacggggataaagatgatgtagaactacccccctgtacagaacacaacgtgtctcgttgttatcaatgtcattcgggcgaattgtatcgcgtgacttcggactctgacgagaaacctgcccccgagagtgatgaaggcaccgagccatcctatgctccctgcacgattcaccacctgatgggcaagagtcacgggttagtcacttgcgcggcgtgtcggttgaaaaatagtacgttgcatgatgacttggatgacggtgatctcgaacaataa

SEQ ID NO: 544 - DNA, 960 bp, Artificial Sequence
  source: /note="Description of Artificial Sequence: Synthetic polynucleotide"
atggagctcgtggattggctcgtggagaaggggatcaccaccgagaaggaatggctgctggaaaacagagaaagctttcggagctttcaggcctcgagcaactcggcgcgtcagatcaagacggccctgcaaggcgccattcaggagatgcttctgaccaagacggcggaggactacctcgtcggaaaggatcccgtctcggacgacgacatccgtcagaaccgcatctacaagattctggaactgaaccactacgacccagcgtacgtggggagtattttggtcgggtggtgccagaagaaatggggcaagcgaaacacgctgtggctgttcggacatgcgaccaccggcaagaccaacatcgcggaggctattgcccatgctgtgccgttctatggatgcgttaactggaccaacgagaactttccgttcaacgactgcgtcgaaaaaatgattatctggtgggaggagggcaaaatgaccgccaaagtggtggaaacagccaaggcgattctgggaggatctcgggtgagagtggaccaaaaatgcaaagcttcggttccgatcgaaccgacgccggtcattattaccagtaacaccaacatgtgttatgtcatcgacgggaacacgaccacgttcgagcataagcagccgttggaggacaggatgtttaagctcgaattgctgactcggttgcctgatgactttggtaaggtgaccaaacaggaggtgcgtcaattcttcaggtggtctcaggatcacctgacccctgtgatcccagaattcctagtgcggaaggcggagtctcgcaaaagacccgccccttccggggaaggctatataagcccgacaaagcggcccgcgctcgcagagcagcagcaggcgtcggagagcgcggacccggttcccaccagattggttggagcggttggtcaaaaagggagtgaatgctgcagctga

SEQ ID NO: 545 - DNA, 1608 bp, Artificial Sequence
  source: /note="Description of Artificial Sequence: Synthetic polynucleotide"
atggctgaaggaggtggcggcccagtgggcgatgcaggccagggtgccgatggagtgggcaattcctccggaaattggcattgcgattcccaatggctggaaaacggagtcgtcactcgaaccacccgaacctgggtcttgcccagctacaacaaccacctgtacaaacgaatccaaggacccagcggaggcgacaacaacaacaaattctttggattcagcaccccctggggatactttgactacaatcgattccactgccacttttccccgcgagactggcaacgactcatcaacaacaactggggcatccgtcccaaagcgatgcgctttagactctttaacatccaggttaaagaggtcacggtccaagacttcaacaccaccatcggcaacaacctcaccagtacggtccaggtctttgcggacaaggactaccaactgccgtacgtcctcggatcggctaccgaaggcaccttcccgccgttcccagcggatatctacacgatcccgcagtacgggtactgcacgctaaactacaacaacgaggcggtggatcgttcggccttctactgtctggactactttccctcagacatgctgcggacaggaaataactttgagtttacttacaccttcgaggacgttcctttccatagcatgtttgcccacaaccagacgctagaccggctgatgaatcccctcgtggatcagtacctctgggctttcagctccgtcagccaagcaggctcatctggacgagctcttcattactcgcgggcgactaaaaccaacatggcggctcaatataggaactggttacctgggcctttcttccgtgatcagcaaatctttacgggcgctagcaacatcactaaaaataacgtctttagcgtttgggaaaaaggcaagcaatgggaactcgacaatcggaccaacctaatgcagcccggtcctgcggcagcgaccacctttagcggagaacctgaccgtcaagccatgcaaaacacgctggcttttagcaggaccgtctacgatcaaacgaccgccacgaccgatcgtaaccagatactcatcaccaacgaagacgaaatcagacccaccaactcggtcggtatcgacgcgtggggagcagttcccaccaacaaccagtcgatcgtgacccccggcactcgcgcggccgtcaacaatcaaggggcgcttcccgggatggtgtggcaaaacagagacatttaccctacagggacccatttggccaaaattcccgacactgacaatcacttccatccgtccccgcttattgggcggtttggctgcaagcatccccctccccagattttcattaaaaacacacccgtccctgccaacccttcggaaacgttccagacggccaaagtggcctccttcatcaaccagtactcgaccggacagtgcaccgtcgaaatcttttgggaactcaagaaggaaacctccaagcgctggaaccccgaaatccagttcacctccaactttggcaacgcggccgacatccagtttgccgtctccgacacgggatcctattccgaacctcgtcccatcggtacccgttaccttaccaaacctctgtaa

SEQ ID NO: 546 - DNA, 2232 bp, Artificial Sequence
  source: /note="Description of Artificial Sequence: Synthetic polynucleotide"
atgtctctcatttctgatgcgattccagattggttggagcggttggtcaaaaagggagtgaatgctgcagctgatttctaccatttggaaagcggtcctcctcgtcctaaggcaaatcagcaaactcaagaatctcttgaaaaggacgattcgagaggtctcgtgttcccaggctacaattatctaggccctttcaacggtctagataaaggagaacccgtcaacgaggcagacgctgccgccttagaacacgacaaggcttacgacctcgaaatcaaggacgggcacaacccgtactttgagtacaacgaggccgacagacgtttccaggaacgtctcaaagacgatacctcctttggaggcaatttaggtaaagccatcttccaggccaaaaagagggttctcgaaccctttggtctggtggaagactcaaagacggctccgaccggagacaagcggaaaggcgaagacgaacctcgtttgcccgacacttcttcacagactcccaagaaaaacaagaagcctcgcaaggaaagaccttccggcggggcagaagatccgggcgaaggcacctcttccaacgctggagcagcagcacccgcctctagtgtgggatcatctatcatggctgaaggaggtggcggcccagtgggcgatgcaggccagggtgccgatggagtgggcaattcctccggaaattggcattgcgattcccaatggctggaaaacggagtcgtcactcgaaccacccgaacctgggtcttgcccagctacaacaaccacctgtacaaacgaatccaaggacccagcggaggcgacaacaacaacaaattctttggattcagcaccccctggggatactttgactacaatcgattccactgccacttttccccgcgagactggcaacgactcatcaacaacaactggggcatccgtcccaaagcgatgcgctttagactctttaacatccaggttaaagaggtcacggtccaagacttcaacaccaccatcggcaacaacctcaccagtacggtccaggtctttgcggacaaggactaccaactgccgtacgtcctcggatcggctaccgaaggcaccttcccgccgttcccagcggatatctacacgatcccgcagtacgggtactgcacgctaaactacaacaacgaggcggtggatcgttcggccttctactgtctggactactttccctcagacatgctgcggacaggaaataactttgagtttacttacaccttcgaggacgttcctttccatagcatgtttgcccacaaccagacgctagaccggctgatgaatcccctcgtggatcagtacctctgggctttcagctccgtcagccaagcaggctcatctggacgagctcttcattactcgcgggcgactaaaaccaacatggcggctcaatataggaactggttacctgggcctttcttccgtgatcagcaaatctttacgggcgctagcaacatcactaaaaataacgtctttagcgtttgggaaaaaggcaagcaatgggaactcgacaatcggaccaacctaatgcagcccggtcctgcggcagcgaccacctttagcggagaacctgaccgtcaagccatgcaaaacacgctggcttttagcaggaccgtctacgatcaaacgaccgccacgaccgatcgtaaccagatactcatcaccaacgaagacgaaatcagacccaccaactcggtcggtatcgacgcgtggggagcagttcccaccaacaaccagtcgatcgtgacccccggcactcgcgcggccgtcaacaatcaaggggcgcttcccgggatggtgtggcaaaacagagacatttaccctacagggacccatttggccaaaattcccgacactgacaatcacttccatccgtccccgcttattgggcggtttggctgcaagcatccccctccccagattttcattaaaaacacacccgtccctgccaacccttcggaaacgttccagacggccaaagtggcctccttcatcaaccagtactcgaccggacagtgcaccgtcgaaatcttttgggaactcaagaaggaaacctccaagcgctggaaccccgaaatccagttcacctccaactttggcaacgcggccgacatccagtttgccgtctccgacacgggatcctattccgaacctcgtcccatcggtacccgttaccttaccaaacctctgtaa

SEQ ID NO: 547 - protein, 535 aa, Artificial Sequence
  source: /note="Description of Artificial Sequence: Synthetic polypeptide"
MAEGGGGPVGDAGQGADGVGNSSGNWHCDSQWLENGVVTRTTRTWVLPSYNNHLYKRIQGPSGGDNNNKFFGFSTPWGYFDYNRFHCHFSPRDWQRLINNNWGIRPKAMRFRLFNIQVKEVTVQDFNTTIGNNLTSTVQVFADKDYQLPYVLGSATEGTFPPFPADIYTIPQYGYCTLNYNNEAVDRSAFYCLDYFPSDMLRTGNNFEFTYTFEDVPFHSMFAHNQTLDRLMNPLVDQYLWAFSSVSQAGSSGRALHYSRATKTNMAAQYRNWLPGPFFRDQQIFTGASNITKNNVFSVWEKGKQWELDNRTNLMQPGPAAATTFSGEPDRQAMQNTLAFSRTVYDQTTATTDRNQILITNEDEIRPTNSVGIDAWGAVPTNNQSIVTPGTRAAVNNQGALPGMVWQNRDIYPTGTHLAKIPDTDNHFHPSPLIGRFGCKHPPPQIFIKNTPVPANPSETFQTAKVASFINQYSTGQCTVEIFWELKKETSKRWNPEIQFTSNFGNAADIQFAVSDTGSYSEPRPIGTRYLTKPL

SEQ ID NO: 548 - protein, 440 aa, Artificial Sequence
  source: /note="Description of Artificial Sequence: Synthetic polypeptide"
MELVDWLVEKGITTEKEWLLENRESFRSFQASSNSARQIKTALQGAIQEMLLTKTAEDYLVGKDPVSDDDIRQNRIYKILELNHYDPAYVGSILVGWCQKKWGKRNTLWLFGHATTGKTNIAEAIAHAVPFYGCVNWTNENFPFNDCVEKMIIWWEEGKMTAKVVETAKAILGGSRVRVDQKCKASVPIEPTPVIITSNTNMCYVIDGNTTTFEHKQPLEDRMFKLELLTRLPDDFGKVTKQEVRQFFRWSQDHLTPVIPEFLVRKAESRKRPAPSGEGYISPTKRPALAEQQQASESADPVPTRYRIKCSKHCGMDKMLFPCQICESMNRDINICAIHKTTDCKECFPDYGDKDDVELPPCTEHNVSRCYQCHSGELYRVTSDSDEKPAPESDEGTEPSYAPCTIHHLMGKSHGLVTCAACRLKNSTLHDDLDDGDLEQ

SEQ ID NO: 549 - protein, 319 aa, Artificial Sequence
  source: /note="Description of Artificial Sequence: Synthetic polypeptide"
MELVDWLVEKGITTEKEWLLENRESFRSFQASSNSARQIKTALQGAIQEMLLTKTAEDYLVGKDPVSDDDIRQNRIYKILELNHYDPAYVGSILVGWCQKKWGKRNTLWLFGHATTGKTNIAEAIAHAVPFYGCVNWTNENFPFNDCVEKMIIWWEEGKMTAKVVETAKAILGGSRVRVDQKCKASVPIEPTPVIITSNTNMCYVIDGNTTTFEHKQPLEDRMFKLELLTRLPDDFGKVTKQEVRQFFRWSQDHLTPVIPEFLVRKAESRKRPAPSGEGYISPTKRPALAEQQQASESADPVPTRLVGAVGQKGSECCS

SEQ ID NO: 550 - protein, 662 aa, Artificial Sequence
  source: /note="Description of Artificial Sequence: Synthetic polypeptide"
MRSYYEVIVQLPNDVESQVPGISDSFVNWITSREWTLPEDADWDLDQVDQVQLTLGDKIQREIRTHWGTMAKEPDFHYFIQLEQGEVFFHLHVLLETCSVKPMVLGRYIRHIQQKIVSKVYCATSLRWKDGCVVTKTKNFGGANKVRAESYIPAYLIPKQQPEVQWAWTNVPEYIKACLHRELRASLARLHFEEAGVSQSKENLARTADGAPVMPTRVSKRYMELVDWLVEKGITTEKEWLLENRESFRSFQASSNSARQIKTALQGAIQEMLLTKTAEDYLVGKDPVSDDDIRQNRIYKILELNHYDPAYVGSILVGWCQKKWGKRNTLWLFGHATTGKTNIAEAIAHAVPFYGCVNWTNENFPFNDCVEKMIIWWEEGKMTAKVVETAKAILGGSRVRVDQKCKASVPIEPTPVIITSNTNMCYVIDGNTTTFEHKQPLEDRMFKLELLTRLPDDFGKVTKQEVRQFFRWSQDHLTPVIPEFLVRKAESRKRPAPSGEGYISPTKRPALAEQQQASESADPVPTRYRIKCSKHCGMDKMLFPCQICESMNRDINICAIHKTTDCKECFPDYGDKDDVELPPCTEHNVSRCYQCHSGELYRVTSDSDEKPAPESDEGTEPSYAPCTIHHLMGKSHGLVTCAACRLKNSTLHDDLDDGDLEQ

SEQ ID NO: 551 - protein, 541 aa, Artificial Sequence
  source: /note="Description of Artificial Sequence: Synthetic polypeptide"
MRSYYEVIVQLPNDVESQVPGISDSFVNWITSREWTLPEDADWDLDQVDQVQLTLGDKIQREIRTHWGTMAKEPDFHYFIQLEQGEVFFHLHVLLETCSVKPMVLGRYIRHIQQKIVSKVYCATSLRWKDGCVVTKTKNFGGANKVRAESYIPAYLIPKQQPEVQWAWTNVPEYIKACLHRELRASLARLHFEEAGVSQSKENLARTADGAPVMPTRVSKRYMELVDWLVEKGITTEKEWLLENRESFRSFQASSNSARQIKTALQGAIQEMLLTKTAEDYLVGKDPVSDDDIRQNRIYKILELNHYDPAYVGSILVGWCQKKWGKRNTLWLFGHATTGKTNIAEAIAHAVPFYGCVNWTNENFPFNDCVEKMIIWWEEGKMTAKVVETAKAILGGSRVRVDQKCKASVPIEPTPVIITSNTNMCYVIDGNTTTFEHKQPLEDRMFKLELLTRLPDDFGKVTKQEVRQFFRWSQDHLTPVIPEFLVRKAESRKRPAPSGEGYISPTKRPALAEQQQASESADPVPTRLVGAVGQKGSECCS

SEQ ID NO: 552 - protein, 743 aa, Artificial Sequence
  source: /note="Description of Artificial Sequence: Synthetic polypeptide"
MSLISDAIPDWLERLVKKGVNAAADFYHLESGPPRPKANQQTQESLEKDDSRGLVFPGYNYLGPFNGLDKGEPVNEADAAALEHDKAYDLEIKDGHNPYFEYNEADRRFQERLKDDTSFGGNLGKAIFQAKKRVLEPFGLVEDSKTAPTGDKRKGEDEPRLPDTSSQTPKKNKKPRKERPSGGAEDPGEGTSSNAGAAAPASSVGSSIMAEGGGGPVGDAGQGADGVGNSSGNWHCDSQWLENGVVTRTTRTWVLPSYNNHLYKRIQGPSGGDNNNKFFGFSTPWGYFDYNRFHCHFSPRDWQRLINNNWGIRPKAMRFRLFNIQVKEVTVQDFNTTIGNNLTSTVQVFADKDYQLPYVLGSATEGTFPPFPADIYTIPQYGYCTLNYNNEAVDRSAFYCLDYFPSDMLRTGNNFEFTYTFEDVPFHSMFAHNQTLDRLMNPLVDQYLWAFSSVSQAGSSGRALHYSRATKTNMAAQYRNWLPGPFFRDQQIFTGASNITKNNVFSVWEKGKQWELDNRTNLMQPGPAAATTFSGEPDRQAMQNTLAFSRTVYDQTTATTDRNQILITNEDEIRPTNSVGIDAWGAVPTNNQSIVTPGTRAAVNNQGALPGMVWQNRDIYPTGTHLAKIPDTDNHFHPSPLIGRFGCKHPPPQIFIKNTPVPANPSETFQTAKVASFINQYSTGQCTVEIFWELKKETSKRWNPEIQFTSNFGNAADIQFAVSDTGSYSEPRPIGTRYLTKPL

SEQ ID NO: 553 - protein, 598 aa, Artificial Sequence
  source: /note="Description of Artificial Sequence: Synthetic polypeptide"
TAPTGDKRKGEDEPRLPDTSSQTPKKNKKPRKERPSGGAEDPGEGTSSNAGAAAPASSVGSSIMAEGGGGPVGDAGQGADGVGNSSGNWHCDSQWLENGVVTRTTRTWVLPSYNNHLYKRIQGPSGGDNNNKFFGFSTPWGYFDYNRFHCHFSPRDWQRLINNNWGIRPKAMRFRLFNIQVKEVTVQDFNTTIGNNLTSTVQVFADKDYQLPYVLGSATEGTFPPFPADIYTIPQYGYCTLNYNNEAVDRSAFYCLDYFPSDMLRTGNNFEFTYTFEDVPFHSMFAHNQTLDRLMNPLVDQYLWAFSSVSQAGSSGRALHYSRATKTNMAAQYRNWLPGPFFRDQQIFTGASNITKNNVFSVWEKGKQWELDNRTNLMQPGPAAATTFSGEPDRQAMQNTLAFSRTVYDQTTATTDRNQILITNEDEIRPTNSVGIDAWGAVPTNNQSIVTPGTRAAVNNQGALPGMVWQNRDIYPTGTHLAKIPDTDNHFHPSPLIGRFGCKHPPPQIFIKNTPVPANPSETFQTAKVASFINQYSTGQCTVEIFWELKKETSKRWNPEIQFTSNFGNAADIQFAVSDTGSYSEPRPIGTRYLTKPL

SEQ ID NO: 554 - DNA, 4694 bp, Artificial Sequence
  source: /note="Description of Artificial Sequence: Synthetic polynucleotide"
tggccagtttccaagacaggctcgctcgctcactcgggccggggccccaaaggggcccctagcgaccgcttcgcggtcgcggcccgagtgagcgagcgagcctgtcttggaaactggccagcactccggtgaggtaatgccgtcacgtggtcgggaatgggaacgggaaatctcgcgagaacgtaaacaaatataagacggcgccacacggcgctgcgtcatacgcgcgcgcgcaccggcgagatgaggtcgtactacgaggtcatcgttcagctgcccaacgacgtcgagagtcaggtacctggaatctccgattcgttcgtcaactggattacgtcgcgagaatggacgttgcctgaggacgccgattgggatttggaccaggtcgatcaagttcaactgacgctcggcgacaaaatccaacgggagattcgaactcattgggggacgatggccaaagaaccggactttcactattttatccaactggaacaaggtgaggtgttctttcatttacacgtcctgctggaaacgtgttccgtaaagccgatggtactcggaagatatatccgacatattcaacaaaaaattgtgagtaaagtctactgcgccacgagcctacgatggaaggatggatgcgtggtgaccaagaccaaaaatttcgggggcgcgaacaaggtccgggccgagtcgtatattcccgcctacctgatcccgaaacagcaaccggaagtgcagtgggcgtggactaacgtgcccgagtatataaaagcgtgcttgcaccgagaactgcgtgccagtctcgcgcgacttcacttcgaggaggcgggcgtctcgcaatccaaggaaaatctcgcgagaactgcagacggcgctcccgtgatgccgacccgcgtcagcaaacgctacatggagctcgtggattggctcgtggagaaggggatcaccaccgagaaggaatggctgctggaaaacagagaaagctttcggagctttcaggcctcgagcaactcggcgcgtcagatcaagacggccctgcaaggcgccattcaggagatgcttctgaccaagacggcggaggactacctcgtcggaaaggatcccgtctcggacgacgacatccgtcagaaccgcatctacaagattctggaactgaaccactacgacccagcgtacgtggggagtattttggtcgggtggtgccagaagaaatggggcaagcgaaacacgctgtggctgttcggacatgcgaccaccggcaagaccaacatcgcggaggctattgcccatgctgtgccgttctatggatgcgttaactggaccaacgagaactttccgttcaacgactgcgtcgaaaaaatgattatctggtgggaggagggcaaaatgaccgccaaagtggtggaaacagccaaggcgattctgggaggatctcgggtgagagtggaccaaaaatgcaaagcttcggttccgatcgaaccgacgccggtcattattaccagtaacaccaacatgtgttatgtcatcgacgggaacacgaccacgttcgagcataagcagccgttggaggacaggatgtttaagctcgaattgctgactcggttgcctgatgactttggtaaggtgaccaaacaggaggtgcgtcaattcttcaggtggtctcaggatcacctgacccctgtgatcccagaattcctagtgcggaaggcggagtctcgcaaaagacccgccccttccggggaaggctatataagcccgacaaagcggcccgcgctcgcagagcagcagcaggcgtcggagagcgcggacccggttcccaccaggtatcgtatcaaatgctcgaaacattgcggtatggataaaatgttgtttccttgccaaatttgtgaatcgatgaacagagatattaatatttgtgctattcataaaacgaccgactgtaaagagtgtttccccgactacggggataaagatgatgtagaactacccccctgtacagaacacaacgtgtctcgttgttatcaatgtcattcgggcgaattgtatcgcgtgacttcggactctgacgagaaacctgcccccgagagtgatgaaggcaccgagccatcctatgctccctgcacgattcaccacctgatgggcaagagtcacgggttagtcacttgcgcggcgtgtcggttgaaaaatagtacgttgcatgatgacttggatgacggtgatctcgaacaataaatgattgaaatgtagccatgtctctcatttctgatgcgattccagattggttggagcggttggtcaaaaagggagtgaatgctgcagctgatttctaccatttggaaagcggtcctcctcgtcctaaggcaaatcagcaaactcaagaatctcttgaaaaggacgattcgagaggtctcgtgttcccaggctacaattatctaggccctttcaacggtctagataaaggagaacccgtcaacgaggcagacgctgccgccttagaacacgacaaggcttacgacctcgaaatcaaggacgggcacaacccgtactttgagtacaacgaggccgacagacgtttccaggaacgtctcaaagacgatacctcctttggaggcaatttaggtaaagccatcttccaggccaaaaagagggttctcgaaccctttggtctggtggaagactcaaagacggctccgaccggagacaagcggaaaggcgaagacgaacctcgtttgcccgacacttcttcacagactcccaagaaaaacaagaagcctcgcaaggaaagaccttccggcggggcagaagatccgggcgaaggcacctcttccaacgctggagcagcagcacccgcctctagtgtgggatcatctatcatggctgaaggaggtggcggcccagtgggcgatgcaggccagggtgccgatggagtgggcaattcctccggaaattggcattgcgattcccaatggctggaaaacggagtcgtcactcgaaccacccgaacctgggtcttgcccagctacaacaaccacctgtacaaacgaatccaaggacccagcggaggcgacaacaacaacaaattctttggattcagcaccccctggggatactttgactacaatcgattccactgccacttttccccgcgagactggcaacgactcatcaacaacaactggggcatccgtcccaaagcgatgcgctttagactctttaacatccaggttaaagaggtcacggtccaagacttcaacaccaccatcggcaacaacctcaccagtacggtccaggtctttgcggacaaggactaccaactgccgtacgtcctcggatcggctaccgaaggcaccttcccgccgttcccagcggatatctacacgatcccgcagtacgggtactgcacgctaaactacaacaacgaggcggtggatcgttcggccttctactgtctggactactttccctcagacatgctgcggacaggaaataactttgagtttacttacaccttcgaggacgttcctttccatagcatgtttgcccacaaccagacgctagaccggctgatgaatcccctcgtggatcagtacctctgggctttcagctccgtcagccaagcaggctcatctggacgagctcttcattactcgcgggcgactaaaaccaacatggcggctcaatataggaactggttacctgggcctttcttccgtgatcagcaaatctttacgggcgctagcaacatcactaaaaataacgtctttagcgtttgggaaaaaggcaagcaatgggaactcgacaatcggaccaacctaatgcagcccggtcctgcggcagcgaccacctttagcggagaacctgaccgtcaagccatgcaaaacacgctggcttttagcaggaccgtctacgatcaaacgaccgccacgaccgatcgtaaccagatactcatcaccaacgaagacgaaatcagacccaccaactcggtcggtatcgacgcgtggggagcagttcccaccaacaaccagtcgatcgtgacccccggcactcgcgcggccgtcaacaatcaaggggcgcttcccgggatggtgtggcaaaacagagacatttaccctacagggacccatttggccaaaattcccgacactgacaatcacttccatccgtccccgcttattgggcggtttggctgcaagcatccccctccccagattttcattaaaaacacacccgtccctgccaacccttcggaaacgttccagacggccaaagtggcctccttcatcaaccagtactcgaccggacagtgcaccgtcgaaatcttttgggaactcaagaaggaaacctccaagcgctggaaccccgaaatccagttcacctccaactttggcaacgcggccgacatccagtttgccgtctccgacacgggatcctattccgaacctcgtcccatcggtacccgttaccttaccaaacctctgtaaattaaacccttcaataaaccgtttatgcgtaactgtatttccgtctcctgtcgttattcagtcacatgatgcggcattacctcaccggagtgctggccagtttccaagacaggctcgctcgctcactcgggccggggccccaaaggggcccctagcgaccgcttcgcggtcgcggcccgagtgagcgagcgagcctgtcttggaaactggcca

SEQ ID NO: 555 - DNA, 2211 bp, Artificial Sequence
  source: /note="Description of Artificial Sequence: Synthetic polynucleotide"
atggctgctgatggttatcttccagattggctcgaggacactctctctgaaggaataagacagtggtggaagctcaaacctggcccaccaccaccaaagcccgcagagcggcataaggacgacagcaggggtcttgtgcttcctgggtacaagtacctcggacccttcaacggactcgacaagggagagccggtcaacgaggcagacgcagcggccctcgagcacgacaaggcctacgaccagcagctcaaggccggtgacaacccctacctcaagtacaaccacgccgacgcggagttccagcagcggcttcagggcgacacatcgtttgggggcaacctcggcagagcagtcttccaggccaaaaagagggttcttgaacctcttggtctggttgagcaagcgggtgagacggctcctggaaagaagagaccgttgattgaatccccccagcagcccgactcctccacgggtatcggcaaaaaaggcaagcagccggctaaaaagagactcaattttggtcagactggcgactcagagtcagtccccgacccacaacctctcggagaacctccagcaacccccgctgctgtgggacctactacaatggcttcaggtggtggcgcaccaatggcagacaataacgaaggcgccgacggagtgggtaatgcctcaggaaattggcattgcgattccacatggctgggcgacagagtcatcaccaccagcacccgcacctgggccttgcccacctacaataaccacctctacaagcaaatctccagtgcttcaacgggggccagcaacgacaaccactacttcggctacagcaccccctgggggtattttgacttcaacagattccactgccacttttcaccacgtgactggcagcgactcatcaacaacaattggggattccggcccaagagactcaacttcaaactcttcaacatccaagtcaaggaggtcacgacgaatgatggcgtcacaaccatcgctaataaccttaccagcacggttcaagtcttctcggactcagactatcagctcccgtacgtgctcgggtcggctcacgagggctgcctcccgccgttcccagcagacgtcttcatggtgccacagtatggatacctcaccctgaacaacgggagtcaggcagtaggacgctcttcattttactgcctggagtactttccttctcagatgctgcgtaccggaaacaactttaccttcagctacacttttgaggacgttcctttccacagcagctacgctcacagccagagtctggaccgtctcatgaatcctctcatcgaccagtacctgtattacctgaacagaactcagaatcagtccggaagtgcccaaaacaaggacttgctgtttagccgggggtctccagctggcatgtctgttcagcccaaaaactggctacctggaccctgttatcggcagcagcgcgtttctaaaacaaaaacagacaacaacaacagcaactttacctggactggtgcttcaaaatataaccttaatgggcgtgaatctataatcaaccctggcactgctatggcctcacacaaagacgacaaagacaagttctttcccatgagcggtgtcatgatttttggaaaggagagcgccggagcttcaaacactgcattggacaatgtcatgatcacagacgaagaggaaatcaaagccactaaccccgtggccaccgaaagatttgggactgtggcagtcaatctccagagcagcagcacagaccctgcgaccggagatgtgcatgttatgggagccttacctggaatggtgtggcaagacagagacgtatacctgcagggtcccatttgggccaaaattcctcacacagatggacactttcacccgtctcctcttatgggcggctttggactcaagaacccgcctcctcagatcctcatcaaaaacacgcctgttcctgcgaatcctccggcggagttttcagctacaaagtttgcttcattcatcacccaatactccacaggacaagtgagtgtggaaattgaatgggagctgcagaaagaaaacagcaagcgctggaatcccgaagtgcagtacacatccaattatgcaaaatctgccaacgttgattttactgtggacaacaatggactttatactgagcctcgccccattggcacccgttacctcacccgtcccctgtaa

SEQ ID NO: 556 - protein, 736 aa, Artificial Sequence
  source: /note="Description of Artificial Sequence: Synthetic polypeptide"
MAADGYLPDWLEDTLSEGIRQWWKLKPGPPPPKPAERHKDDSRGLVLPGYKYLGPFNGLDKGEPVNEADAAALEHDKAYDQQLKAGDNPYLKYNHADAEFQQRLQGDTSFGGNLGRAVFQAKKRVLEPLGLVEQAGETAPGKKRPLIESPQQPDSSTGIGKKGKQPAKKRLNFGQTGDSESVPDPQPLGEPPATPAAVGPTTMASGGGAPMADNNEGADGVGNASGNWHCDSTWLGDRVITTSTRTWALPTYNNHLYKQISSASTGASNDNHYFGYSTPWGYFDFNRFHCHFSPRDWQRLINNNWGFRPKRLNFKLFNIQVKEVTTNDGVTTIANNLTSTVQVFSDSDYQLPYVLGSAHEGCLPPFPADVFMVPQYGYLTLNNGSQAVGRSSFYCLEYFPSQMLRTGNNFTFSYTFEDVPFHSSYAHSQSLDRLMNPLIDQYLYYLNRTQNQSGSAQNKDLLFSRGSPAGMSVQPKNWLPGPCYRQQRVSKTKTDNNNSNFTWTGASKYNLNGRESIINPGTAMASHKDDKDKFFPMSGVMIFGKESAGASNTALDNVMITDEEEIKATNPVATERFGTVAVNLQSSSTDPATGDVHVMGALPGMVWQDRDVYLQGPIWAKIPHTDGHFHPSPLMGGFGLKNPPPQILIKNTPVPANPPAEFSATKFASFITQYSTGQVSVEIEWELQKENSKRWNPEVQYTSNYAKSANVDFTVDNNGLYTEPRPIGTRYLTRPL

SEQ ID NO: 557 - DNA, 2211 bp, Artificial Sequence
  source: /note="Description of Artificial Sequence: Synthetic polynucleotide"
atggcttccgatggttatcttccagattggctcgaggacaacctctctgagggcatccgcgagtggtgggacttgaaacctggagccccgaaacccaaagccaaccagcaaaagcaggacgacggccggggtctggtgcttcctggctacaagtacctcggacccttcaacggactcgacaagggggagcccgtcaacgcggcggatgcagcggccctcgagcacgacaaggcctacgaccagcagctcagagcgggtgacaatccgtacctgcggtataaccacgccgacgccgagtttcaggagcgtctgcaagaagatacgtcttttgggggcaacctcgggcgagcagtcttccaggccaagaagagggttctcgaaccttttggtctggttgaggaaggtgctaagacggctcctggaaagaaacgtccggtagagcagtcgccacaagagccagactcctcctcgggcattggcaagacaggccagcagcccgctaaaaagagactcaattttggtcagactggcgactcagagtcagtccccgacccacaacctctcggagaacctccagcaacccccgctgctgtgggacctactacaatggcttcaggcggtggcgcaccaatggcagacaataacgaaggcgccgacggagtgggtaatgcctcaggaaattggcattgcgattccacatggctgggcgacagagtcatcaccaccagcacccgaacatgggccttgcccacctataacaaccacctctacaagcaaatctccagtgcttcaacgggggccagcaacgacaaccactacttcggctacagcaccccctgggggtattttgatttcaacagattccactgccatttctcaccacgtgactggcagcgactcatcaacaacaattggggattccggcccaagagactcaacttcaaactcttcaacatccaagtcaaggaggtcacgacgaatgatggcgtcacaaccatcgctaataaccttaccagcacggttcaagtcttctcggactcggagtaccagcttccgtacgtcctcggctctgcgcaccagggctgcctccctccgttcccggcggacgtgttcatgattccgcagtacggctacctaacgctcaacaatggcagccaggcagtgggacggtcatccttttactgcctggaatatttcccatcgcagatgctgagaacgggcaataactttaccttcagctacaccttcgaggacgtgcctttccacagcagctacgcgcacagccagagcctggaccggctgatgaatcctctcatcgaccagtacctgtattacctgaacagaactcagaatcagtccggaagtgcccaaaacaaggacttgctgtttagccgggggtctccagctggcatgtctgttcagcccaaaaactggctacctggaccctgttaccggcagcagcgcgtttctaaaacaaaaacagacaacaacaacagcaactttacctggactggtgcttcaaaatataaccttaatgggcgtgaatctataatcaaccctggcactgctatggcctcacacaaagacgacaaagacaagttctttcccatgagcggtgtcatgatttttggaaaggagagcgccggagcttcaaacactgcattggacaatgtcatgatcacagacgaagaggaaatcaaagccactaaccccgtggccaccgaaagatttgggactgtggcagtcaatctccagagcagcagcacagaccctgcgaccggagatgtgcatgttatgggagccttacctggaatggtgtggcaagacagagacgtatacctgcagggtcccatttgggccaaaattcctcacacagatggacactttcacccgtctcctcttatgggcggctttggacttaagcacccgcctcctcagatcctcatcaaaaacacgcctgttcctgcgaatcctccggcagagttttcggctacaaagtttgcttcattcatcacccagtattctactggccaagtcagcgtggagattgaatgggagctgcagaaagaaaacagcaaacgctggaatcccgaagtgcagtatacatctaactatgcaaaatctgccaacgttgatttcactgtggacaacaatggactttatactgagcctcgtcccattggcacccgttacctcacccgtcccctgtaa

SEQ ID NO: 558 - protein, 736 aa, Artificial Sequence
  source: /note="Description of Artificial Sequence: Synthetic polypeptide"
MASDGYLPDWLEDNLSEGIREWWDLKPGAPKPKANQQKQDDGRGLVLPGYKYLGPFNGLDKGEPVNAADAAALEHDKAYDQQLRAGDNPYLRYNHADAEFQERLQEDTSFGGNLGRAVFQAKKRVLEPFGLVEEGAKTAPGKKRPVEQSPQEPDSSSGIGKTGQQPAKKRLNFGQTGDSESVPDPQPLGEPPATPAAVGPTTMASGGGAPMADNNEGADGVGNASGNWHCDSTWLGDRVITTSTRTWALPTYNNHLYKQISSASTGASNDNHYFGYSTPWGYFDFNRFHCHFSPRDWQRLINNNWGFRPKRLNFKLFNIQVKEVTTNDGVTTIANNLTSTVQVFSDSEYQLPYVLGSAHQGCLPPFPADVFMIPQYGYLTLNNGSQAVGRSSFYCLEYFPSQMLRTGNNFTFSYTFEDVPFHSSYAHSQSLDRLMNPLIDQYLYYLNRTQNQSGSAQNKDLLFSRGSPAGMSVQPKNWLPGPCYRQQRVSKTKTDNNNSNFTWTGASKYNLNGRESIINPGTAMASHKDDKDKFFPMSGVMIFGKESAGASNTALDNVMITDEEEIKATNPVATERFGTVAVNLQSSSTDPATGDVHVMGALPGMVWQDRDVYLQGPIWAKIPHTDGHFHPSPLMGGFGLKHPPPQILIKNTPVPANPPAEFSATKFASFITQYSTGQVSVEIEWELQKENSKRWNPEVQYTSNYAKSANVDFTVDNNGLYTEPRPIGTRYLTRPL

SEQ ID NO: 559 - DNA, 2211 bp, Artificial Sequence
  source: /note="Description of Artificial Sequence: Synthetic polynucleotide"
atggctgctgatggttatcttccagattggctcgaggacactctctctgaaggaataagacagtggtggaagctcaaacctggcccaccaccaccaaagcccgcagagcggcataaggacgacagcaggggtcttgtgcttcctgggtacaagtacctcggacccttcaacggactcgacaagggagagccggtcaacgaggcagacgcagcggccctcgagcacgacaaggcctacgaccagcagctcaaggccggtgacaacccctacctcaagtacaaccacgccgacgcggagttccagcagcggcttcagggcgacacatcgtttgggggcaacctcggcagagcagtcttccaggccaaaaagagggttcttgaacctcttggtctggttgagcaagcgggtgagacggctcctggaaagaagagaccgttgattgaatccccccagcagcccgactcctccacgggtatcggcaaaaaaggcaagcagccggctaaaaagagactcaattttggtcagactggcgactcagagtcagtccccgacccacaacctctcggagaacctccagcaacccccgctgctgtgggacctactacaatggcttcaggtggtggcgcaccaatggcagacaataacgaaggcgccgacggagtgggtaatgcctcaggaaattggcattgcgattccacatggctgggcgacagagtcatcaccaccagcacccgcacctgggccttgcccacctacaataaccacctctacaagcaaatctccagtgcttcaacgggggccagcaacgacaaccactacttcggctacagcaccccctgggggtattttgacttcaacagattccactgccacttttcaccacgtgactggcagcgactcatcaacaacaattggggattccggcccaagagactcaacttcaaactcttcaacatccaagtcaaggaggtcacgacgaatgatggcgtcacaaccatcgctaataaccttaccagcacggttcaagtcttctcggactcagactatcagctcccgtacgtgctcgggtcggctcacgagggctgcctcccgccgttcccagcagacgtcttcatggtgccacagtatggatacctcaccctgaacaacgggagtcaggcagtaggacgctcttcattttactgcctggagtactttccttctcagatgctgcgtaccggaaacaactttaccttcagctacacttttgaggacgttcctttccacagcagctacgctcacagccagagtctggaccgtctcatgaatcctctcatcgaccagtacctgtattacctgaacagaactcagaatcagtccggaagtgcccaaaacaaggacttgctgtttagccgggggtctccaactggcatgtctgttcagcccaaaaactggctacctggaccctgttatcggcagcagcgcgtttctaaaacaaaaacagacaacaacaacagcaactttacctggactggtgcttcaaaatataaccttaatgggcgtgaatctataatcaaccctggcactgctatggcctcacacaaagacgacaaagacaagttctttcccatgagcggtgtcatgatttttggaaaggagagcgccggagcttcaaacactgcattggacaatgtcatgatcacagacgaagaggaaatcaaagccactaaccccgtggccactgaaagatttgggactgtggcagtcaatctccagagcagcagcacagaccctgcgaccggagatgtgcatgccatgggagccttacctggaatggtgtggcaagacagagacgtatacctgcagggtcctatttgggccaaaattcctcacacggatggacactttcacccgtctcctctcatgggcggctttggactcaagaacccgcctcctcagatcctcatcaaaaacacgcctgttcctgcgaatcctccggcggagttttcagctacaaagtttgcttcattcatcacccagtattccacaggacaagtgagcgtggagattgaatgggagctgcagaaagaaaacagcaaacgctggaatcccgaagtgcagtatacatctaactatgcaaaatctgccaacgttgatttcactgtggacaacaatggactttatactgagcctcgccccattggcacccgttacctcacccgtcccctgtaa

SEQ ID NO: 560 - protein, 736 aa, Artificial Sequence
  source: /note="Description of Artificial Sequence: Synthetic polypeptide"
MAADGYLPDWLEDTLSEGIRQWWKLKPGPPPPKPAERHKDDSRGLVLPGYKYLGPFNGLDKGEPVNEADAAALEHDKAYDQQLKAGDNPYLKYNHADAEFQQRLQGDTSFGGNLGRAVFQAKKRVLEPLGLVEQAGETAPGKKRPLIESPQQPDSSTGIGKKGKQPAKKRLNFGQTGDSESVPDPQPLGEPPATPAAVGPTTMASGGGAPMADNNEGADGVGNASGNWHCDSTWLGDRVITTSTRTWALPTYNNHLYKQISSASTGASNDNHYFGYSTPWGYFDFNRFHCHFSPRDWQRLINNNWGFRPKRLNFKLFNIQVKEVTTNDGVTTIANNLTSTVQVFSDSDYQLPYVLGSAHEGCLPPFPADVFMVPQYGYLTLNNGSQAVGRSSFYCLEYFPSQMLRTGNNFTFSYTFEDVPFHSSYAHSQSLDRLMNPLIDQYLYYLNRTQNQSGSAQNKDLLFSRGSPTGMSVQPKNWLPGPCYRQQRVSKTKTDNNNSNFTWTGASKYNLNGRESIINPGTAMASHKDDKDKFFPMSGVMIFGKESAGASNTALDNVMITDEEEIKATNPVATERFGTVAVNLQSSSTDPATGDVHAMGALPGMVWQDRDVYLQGPIWAKIPHTDGHFHPSPLMGGFGLKNPPPQILIKNTPVPANPPAEFSATKFASFITQYSTGQVSVEIEWELQKENSKRWNPEVQYTSNYAKSANVDFTVDNNGLYTEPRPIGTRYLTRPL

SEQ ID NO: 561 - DNA, 2211 bp, Artificial Sequence
  source: /note="Description of Artificial Sequence: Synthetic polynucleotide"
atggctgccgatggttatcttccagattggctcgaggacaacctctctgagggcattcgcgagtggtgggcgctgaaacctggagccccgaagcccaaagccaaccagcaaaagcaggacgacggccggggtctggtgcttcctggctacaagtacctcggacccttcaacggactcgacaagggggagcccgtcaacgcggcggatgcagcggccctcgagcacgacaaggcctacgaccagcagctcaaagcgggtgacaatccgtacctgcggtataaccacgccgacgccgagtttcaggagcgtctgcaagaagatacgtcttttgggggcaacctcgggcgagcagtcttccaggccaagaagcgggttctcgaacctctcggtctggttgaggaaggcgctaagacggctcctggaaagaaacgtccggtagagcaatcgccacaagagccagactcctcctcgggcatcggcaagacaggccagcagcccgctaaaaagagactcaattttggtcagactggcgactcagagtcagtccccgacccacaacctctcggagaacctccagcaacccccgctgctgtgggacctactacaatggcttcaggcggtggcgcaccaatggcagacaataacgaaggcgccgacggagtgggtaatgcctcaggaaattggcattgcgattccacatggctgggcgacagagtcatcaccaccagcacccgaacatgggccttgcccacctataacaaccacctctacaagcaaatctccagtgcttcgacgggggccagcaacgacaaccactacttcggctacagcaccccctgggggtattttgactttaacagattccactgccacttttcaccacgtgactggcagcgactcatcaacaacaactggggattccggcccaagagactcagcttcaagctcttcaacatccaggtcaaggaggtcacgacgaatgatggcgtcacaaccatcgctaataaccttaccagcacggttcaagtcttctcggactcggagtaccagcttccgtacgtcctcggctctgcgcaccagggctgcctccctccgttcccggcggacgtgttcatgattccgcaatacggctacctgacgctcaacaatggcagccaagccgtgggacgttcatccttttactgcctggaatatttcccttctcagatgctgagaacgggcaacaactttaccttcagctacacctttgaggaagtgcctttccacagcagctacgcgcacagccagagcctggaccggctgatgaatcctctcatcgatcaatacctgtattacctgaacagaactcaaaatcagtccggaagtgcccaaaacaaggacttgctgtttagccgtgggtctccagctggcatgtctgttcagcccaaaaactggctacctggaccctgttatcggcagcagcgcgtttctaaaacaaaaacagacaacaacaacagcaattttacctggactggtgcttcaaaatataacctcaatgggcgtgaatccatcatcaaccctggcactgctatggcctcacataaagacgacgaagacaagttctttcccatgagcggtgtcatgatttttggaaaagagagcgccggagcttcaaacactgcattggacaatgtcatgattacagacgaagaggaaattaaagccactaaccctgtggccaccgaaagatttgggaccgtggcagtcaatttccagagcagcagcacagaccctgcgaccggagatgtgcatgctatgggagcattacctggcatggtgtggcaagatagagacgtgtacctgcagggtcccatttgggccaaaattcctcacacagatggacactttcacccgtctcctcttatgggcggctttggactcaagaacccgcctcctcagatcctcatcaaaaacacgcctgttcctgcgaatcctccggcggagttttcagctacaaagtttgcttcattcatcacccaatactccacaggacaagtgagcgtggagattgaatgggagctgcagaaagaaaacagcaaacgctggaatcccgaagtgcagtatacatctaactatgcaaaatctgccaacattgatttcactgtggacaacaatggactttatactgagcctcgccccattggcacccgttacctcacccgtccccagtaa

SEQ ID NO: 562 - protein, 736 aa, Artificial Sequence
  source: /note="Description of Artificial Sequence: Synthetic polypeptide"
MAADGYLPDWLEDNLSEGIREWWALKPGAPKPKANQQKQDDGRGLVLPGYKYLGPFNGLDKGEPVNAADAAALEHDKAYDQQLKAGDNPYLRYNHADAEFQERLQEDTSFGGNLGRAVFQAKKRVLEPLGLVEEGAKTAPGKKRPVEQSPQEPDSSSGIGKTGQQPAKKRLNFGQTGDSESVPDPQPLGEPPATPAAVGPTTMASGGGAPMADNNEGADGVGNASGNWHCDSTWLGDRVITTSTRTWALPTYNNHLYKQISSASTGASNDNHYFGYSTPWGYFDFNRFHCHFSPRDWQRLINNNWGFRPKRLSFKLFNIQVKEVTTNDGVTTIANNLTSTVQVFSDSEYQLPYVLGSAHQGCLPPFPADVFMIPQYGYLTLNNGSQAVGRSSFYCLEYFPSQMLRTGNNFTFSYTFEEVPFHSSYAHSQSLDRLMNPLIDQYLYYLNRTQNQSGSAQNKDLLFSRGSPAGMSVQPKNWLPGPCYRQQRVSKTKTDNNNSNFTWTGASKYNLNGRESIINPGTAMASHKDDEDKFFPMSGVMIFGKESAGASNTALDNVMITDEEEIKATNPVATERFGTVAVNFQSSSTDPATGDVHAMGALPGMVWQDRDVYLQGPIWAKIPHTDGHFHPSPLMGGFGLKNPPPQILIKNTPVPANPPAEFSATKFASFITQYSTGQVSVEIEWELQKENSKRWNPEVQYTSNYAKSANIDFTVDNNGLYTEPRPIGTRYLTRPQ

SEQ ID NO: 563 - DNA, 2211 bp, Artificial Sequence
  source: /note="Description of Artificial Sequence: Synthetic polynucleotide"
atggctgccgatggttatcttccagattggctcgaggacaacctctctgagggcattcgcgagtggtgggacttgaaacctggagccccgaaacccaaagccaaccagcaaaagcaggacgacggccggggtctggtgcttcctggctacaagtacctcggacccttcaacggactcgacaagggggagcccgtcaacgcggcggatgcagcggccctcgagcacgacaaggcctacgaccagcagctcaaagcgggtgacaatccgtaccttcggtataaccacgccgacgccgagtttcaggagcgtctgcaagaagatacgtcttttgggggcaacctcgggcgagcagtcttccaggccaaaaagagggttctcgaacctctcggtctggttgaggaagcggctaagacggctcctggaaagaaacgtccggtagagcagtcgccacaagagccagactcctcctcgggcattggcaagacaggccagcagcccgctaaaaagagactcaattttggtcagactggcgactcagagtcagtccccgacccacaacctctcggagaacctcccgcagccccctcaggtgtgggatctcttacaatggcttcaggtggtggcgcaccaatggcagacaataacgaaggcgccgacggagtgggtaatgcctcaggaaattggcattgcgattccacatggctgggcgacagagtcatcaccaccagcacccgcacctgggccttgcccacctacaataaccacctctacaagcaaatctccagtgcttcaacgggggccagcaacgacaaccactacttcggctacagcaccccctgggggtattttgacttcaacagattccactgccacttttcaccacgtgactggcaaagactcatcaacaacaattggggattccggcccaagagactcaacttcaagctcttcaacatccaagtcaaggaggtcacgacgaatgatggcgtcacgaccatcgctaataaccttaccagcacggttcaagtcttctcggactcggagtaccagttgccgtacgtcctcggctctgcgcaccagggctgcctccctccgttcccggcggacgtgttcatgattccgcagtacggctacctaacgctcaacaatggcagccaggcagtgggacggtcatccttttactgcctggaatatttcccatcgcagatgctgagaacgggcaacaactttaccttcagctacacctttgaggaagtgcctttccacagcagctacgcgcacagccagagcctggaccggctgatgaatcctctcatcgaccagtacctgtattacctgaacagaactcaaaatcagtccggaagtgcccaaaacaaggacttgctgtttagccgtgggtctccagctggcatgtctgttcagcccaaaaactggctacctggaccctgttaccggcagcagtgcgtttctaaaacaaaaacagacaacaacaacagcaactttacctggactggtgcttcaaaatataaccttaatgggcgtgaatctataatcaaccctggcactgctatggcctcacacaaagacgacaaagacaagttctttcccatgagcggtgtcatgatttttggaaaggagagcgccggagcttcaaacactgcattggacaatgtcatgatcacagacgaagaggaaatcaaagccactaaccccgtggccaccgaaagatttgggactgtggcagtcaatctccagagcagcagcacagaccctgcgaccggagatgtgcatgttatgggagccttacctggaatggtgtggcaagacagagacgtatacctgcagggtcctatttgggccaaaattcctcacacagatggacactttcacccgtctcctcttatgggcggctttggactcaagaacccgcctcctcagatcctcatcaaaaacacgcctgttcctgcgaatcctccggcggagttttcagctacaaagtttgcttcattcatcacccaatactccacaggacaagtgagcgtggagattgaatgggagctgcagaaagaaaacagcaagcgctggaatcccgaagtgcagtacacatccaattatgcaaaatctgccaacgttgatttcactgtggacaacaatggactttatactgagcctcgccccattggcacccgttacctcacccgtcccctgtaa

SEQ ID NO: 564 - protein, 736 aa, Artificial Sequence
  source: /note="Description of Artificial Sequence: Synthetic polypeptide"
MAADGYLPDWLEDNLSEGIREWWDLKPGAPKPKANQQKQDDGRGLVLPGYKYLGPFNGLDKGEPVNAADAAALEHDKAYDQQLKAGDNPYLRYNHADAEFQERLQEDTSFGGNLGRAVFQAKKRVLEPLGLVEEAAKTAPGKKRPVEQSPQEPDSSSGIGKTGQQPAKKRLNFGQTGDSESVPDPQPLGEPPAAPSGVGSLTMASGGGAPMADNNEGADGVGNASGNWHCDSTWLGDRVITTSTRTWALPTYNNHLYKQISSASTGASNDNHYFGYSTPWGYFDFNRFHCHFSPRDWQRLINNNWGFRPKRLNFKLFNIQVKEVTTNDGVTTIANNLTSTVQVFSDSEYQLPYVLGSAHQGCLPPFPADVFMIPQYGYLTLNNGSQAVGRSSFYCLEYFPSQMLRTGNNFTFSYTFEEVPFHSSYAHSQSLDRLMNPLIDQYLYYLNRTQNQSGSAQNKDLLFSRGSPAGMSVQPKNWLPGPCYRQQCVSKTKTDNNNSNFTWTGASKYNLNGRESIINPGTAMASHKDDKDKFFPMSGVMIFGKESAGASNTALDNVMITDEEEIKATNPVATERFGTVAVNLQSSSTDPATGDVHVMGALPGMVWQDRDVYLQGPIWAKIPHTDGHFHPSPLMGGFGLKNPPPQILIKNTPVPANPPAEFSATKFASFITQYSTGQVSVEIEWELQKENSKRWNPEVQYTSNYAKSANVDFTVDNNGLYTEPRPIGTRYLTRPL

SEQ ID NO: 565 - DNA, 2211 bp, Artificial Sequence
  source: /note="Description of Artificial Sequence: Synthetic polynucleotide"
atggctgccgatggttatcttccagattggctcgaggacaacctctctgagggcattcgcgaatggtgggacttgaaacctggagccccgaaacccaaagtcaaccagcaaaagcaggacaacgctcggggtcttgtgcttccgggttacaaatacctcggacccttcaacggactcgacaagggggagcccgtcaacgcggcggacgcagcggccctcgagcacgacaaggcctacgaccagcagctcaaagcgggtgacaatccgtaccttcggtataaccacgccgacgccgagtttcaggagcgtctgcaagaagatacgtcttttgggggcaaccttggacgagcagtcttccaggccaagaagagggttctcgaaccttttggtctggttgaggaaggtgctaagacggctcctggaaagaaacgtccggtagagcagtcgccacaagagccagactcctcctcgggcattggcaagacaggccagcagcccgctaaaaagagactcaattttggtcagactggcgactcagagtcagtccccgacccacaacctctcggagaacctccagcaacccccgctgctgtgggacctactacaatggcttcaggcggtggcgcaccaatggcagacaataacgaaggcgccgacggagtgggtaatgcctcaggaaattggcattgcgattccacatggctgggcgacagagtcatcaccaccagcacccgcacctgggccttgcccacctacaataaccacctctacaagcaaatctccagtgcttcaacgggggccagcaacgacaaccactacttcggctacagcaccccctgggggtattttgacttcaacagattccactgccacttttcaccacgtgactggcaaagactcatcaacaacaattggggattccggcccaagagactcaacttcaagctcttcaacatccaagtcaaggaggtcacgacgaatgatggcgtcacgaccatcgctaataaccttaccagcacggttcaagtcttctcggactcggagtaccagttgccgtacgtcctcggctctgcgcaccagggctgcctccctccgttcccggcggacgtgttcatgattccgcaatacggctacctgacgctcaacaatggcagccaggcagtgggacggtcatccttttactgcctggaatatttcccatcgcagatgctgagaacgggcaataactttaccttcagctacacttttgaggacgttcctttccacagcagctacgctcacagccagagcctggaccggctgatgaatcctctcatcgaccagtacctgtattacctgaacagaactcagaatcagtccggaagtgcccaaaacaaggacttgctgtttagccgtgggtctccaactggcatgtctgttcagcccaaaaactggctacctggaccctgttatcggcagcagcgcgtttctaaaacaaaaacagacaacaacaacagcaactttacctggactggtgcttcaaaatataaccttaatgggcgtgaatctataatcaaccctggcactgctatggcctcacacaaagacgacgaagacaagttctttcccatgagcggtgtcatgatttttggaaaggagagcgccggagcttcaaacactgcattggacaatgtcatgatcacagacgaagaggaaatcaaagccactaaccccgtggccactgaaagatttgggactgtggcagtcaatctccagagcagcagcacagaccctgcgaccggagatgtgcatgccatgggagccttacctggaatggtgtggcaagacagagacgtatacctgcagggtcctatttgggccaaaattcctcacacggatggacactttcacccgtctcctctcatgggcggctttggacttaagcacccgcctcctcagatcctcatcaaaaacacgcctgttcctgcgaatcctccggcagagttttcggctacaaagtttgcttcattcatcacccagtattccacaggacaagtgagcgtggagattgaatgggagctgcagaaagaaaacagcaaacgctggaatcccgaagtgcagtatacatctaactatgcaaaatctgccaacgttgatttcactgtggacaacaatggactttatactgagcctcgccccattggcacccgttacctcacccgtcccctgtaa

SEQ ID NO: 566 - protein, 736 aa, Artificial Sequence
  source: /note="Description of Artificial Sequence: Synthetic polypeptide"
MAADGYLPDWLEDNLSEGIREWWDLKPGAPKPKVNQQKQDNARGLVLPGYKYLGPFNGLDKGEPVNAADAAALEHDKAYDQQLKAGDNPYLRYNHADAEFQERLQEDTSFGGNLGRAVFQAKKRVLEPFGLVEEGAKTAPGKKRPVEQSPQEPDSSSGIGKTGQQPAKKRLNFGQTGDSESVPDPQPLGEPPATPAAVGPTTMASGGGAPMADNNEGADGVGNASGNWHCDSTWLGDRVITTSTRTWALPTYNNHLYKQISSASTGASNDNHYFGYSTPWGYFDFNRFHCHFSPRDWQRLINNNWGFRPKRLNFKLFNIQVKEVTTNDGVTTIANNLTSTVQVFSDSEYQLPYVLGSAHQGCLPPFPADVFMIPQYGYLTLNNGSQAVGRSSFYCLEYFPSQMLRTGNNFTFSYTFEDVPFHSSYAHSQSLDRLMNPLIDQYLYYLNRTQNQSGSAQNKDLLFSRGSPTGMSVQPKNWLPGPCYRQQRVSKTKTDNNNSNFTWTGASKYNLNGRESIINPGTAMASHKDDEDKFFPMSGVMIFGKESAGASNTALDNVMITDEEEIKATNPVATERFGTVAVNLQSSSTDPATGDVHAMGALPGMVWQDRDVYLQGPIWAKIPHTDGHFHPSPLMGGFGLKHPPPQILIKNTPVPANPPAEFSATKFASFITQYSTGQVSVEIEWELQKENSKRWNPEVQYTSNYAKSANVDFTVDNNGLYTEPRPIGTRYLTRPL

SEQ ID NO: 567 - DNA, 2208 bp, Artificial Sequence
  source: /note="Description of Artificial Sequence: Synthetic polynucleotide"
  modified_base (955)..(955): a, c, t, g, unknown or other
  modified_base (971)..(972): a, c, t, g, unknown or other
  modified_base (981)..(981): a, c, t, g, unknown or other
  modified_base (986)..(986): a, c, t, g, unknown or other
  modified_base (1235)..(1235): a, c, t, g, unknown or other
  modified_base (1694)..(1696): a, c, t, g, unknown or other
  modified_base (1698)..(1698): a, c, t, g, unknown or other
  modified_base (1763)..(1765): a, c, t, g, unknown or other
  modified_base (1778)..(1778): a, c, t, g, unknown or other
  modified_base (2204)..(2204): a, c, t, g, unknown or other
atggctgccgatggttatcttccagattggctcgaggacaacctctctgagggcattcgcgaatggtgggacttgaaacctggagccccgaaacccaaagtcaaccagcaaaagcaggacaacgctcggggtcttgtgcttccgggttacaaatacctcggacccttcaacggactcgacaagggggagcccgtcaacgcggcggacgcagcggccctcgagcacgacaaggcctacgaccagcagctcaaagcgggtgacaatccgtaccttcggtataaccacgccgacgccgagtttcaggagcgtctgcaagaagatacgtcttttgggggcaaccttggacgagcagtcttccaggccaagaagagggttctcgaaccttttggtctggttgaggaaggtgctaagacggctcctggaaagaaacgtccggtagagcagtcgccacaagagccagactcctcctcgggcattggcaagacaggccagcagcccgctaaaaagagactcaattttggtcagactggcgactcagagtcagtccccgacccacaacctctcggagaacctccagcaacccccgctgctgtgggacctactacaatggcttcaggcggtggcgcaccaatggcagacaataacgaaggcgccgacggagtgggtaatgcctcaggaaattggcattgcgattccacatggctgggcgacagagtcatcaccaccagcacccgaacatgggccttgcccacctataacaaccacctctacaagcaaatctccagtgcttcaacgggggccagcaacgacaaccactacttcggctacagcaccccctgggggtattttgatttcaacagattccactgccacttttcaccacgtgactggcagcgactcatcaataacaattggggattccggcccaagagactcaacttcaaactcttcaacntccaagtcaaggaggnnacgacgaangatgncgtcacaaccatcgctaataaccttaccagcacggttcaagtcttctcggactcggagtaccagcttccgtacgtcctcggctctgcgcaccagggctgcctccctccgttcccggcggacgtgttcatgattccgcaatacggctacctgacgctcaacaatggcagccaggcagtgggacggtcatccttttactgcctggaatatttcccatcgcagatgctgagaacgggcaataactttacctncagctacacttttgaggacgttcctttccacagcagctacgctcacagccagagcctggaccggctgatgaatcctctcatcgaccagtacctgtattacctgaacagaactcagaatcagtccggaagtgcccaaaacaaggacttgctgtttagccgtgggtctccaactggcatgtctgttcagcccaaaaactggctacctggaccctgttatcggcagcagcgcgtttctaaaacaaaaacagacaacaacaacagcaactttacctggactggtgcttcaaaatataaccttaatgggcgtgaatctataatcaaccctggcactgctatggcctcacacaaagacgacgaagacaagttctttcccatgagcggtgtcatgatttttggaaaggagagcgccggagcttcaaacactgcattggacaatgtcatgatcacagacgaagagannncnaagccactaaccccgtggccactgaaagatttgggactgtggcagtcaatctccaagcagcacannnaccctgcgaccgnagatgtgcatgccatgggagccttacctggaatggtgtggcaagacagagacgtatacctgcagggtcctatttgggccaaaattcctcacacggatggacactttcacccgtctcctctcatgggcggctttggacttaagcacccgcctcctcagatcctcatcaaaaacacgcctgttcctgcgaatcctccggcagagttttcggctacaaagtttgcttcattcatcacccagtattccacaggacaagtgagcgtggagattgaatgggagctgcagaaagaaaacagcaaacgctggaatcccgaagtgcagtatacatctaactatgcaaaatctgccaacgttgatttcactgtggacaacaatggactttatactgagcctcgccccattggcacccgttacctcacccgtccccngtaa

SEQ ID NO: 568 - protein, 723 aa, Artificial Sequence
  source: /note="Description of Artificial Sequence: Synthetic polypeptide"
MAADGYLPDWLEDNLSEGIREWWDLKPGAPKPKVNQQKQDNARGLVLPGYKYLGPFNGLDKGEPVNAADAAALEHDKAYDQQLKAGDNPYLRYNHADAEFQERLQEDTSFGGNLGRAVFQAKKRVLEPFGLVEEGAKTAPGKKRPVEQSPQEPDSSSGIGKTGQQPAKKRLNFGQTGDSESVPDPQPLGEPPATPAAVGPTTMASGGGAPMADNNEGADGVGNASGNWHCDSTWLGDRVITTSTRTWALPTYNNHLYKQISSASTGASNDNHYFGYSTPWGYFDFNRFHCHFSPRDWQRLINNNWGFRPKRLNFKLFNQVKETTDVTTIANNLTSTVQVFSDSEYQLPYVLGSAHQGCLPPFPADVFMIPQYGYLTLNNGSQAVGRSSFYCLEYFPSQMLRTGNNFTSYTFEDVPFHSSYAHSQSLDRLMNPLIDQYLYYLNRTQNQSGSAQNKDLLFSRGSPTGMSVQPKNWLPGPCYRQQRVSKTKTDNNNSNFTWTGASKYNLNGRESIINPGTAMASHKDDEDKFFPMSGVMIFGKESAGASNTALDNVMITDEEATNPVATERFGTVAVNLQSSPATDVHAMGALPGMVWQDRDVYLQGPIWAKIPHTDGHFHPSPLMGGFGLKHPPPQILIKNTPVPANPPAEFSATKFASFITQYSTGQVSVEIEWELQKENSKRWNPEVQYTSNYAKSANVDFTVDNNGLYTEPRPIGTRYLTRP

SEQ ID NO: 569 - DNA, 2208 bp, Artificial Sequence
  source: /note="Description of Artificial Sequence: Synthetic polynucleotide"
atggctgccgatggttatcttccagattggctcgaggacactctctctgaaggaataagacagtggtggaagctcaaacctggcccaccaccaccaaagcccgcagagcggcataaggacgacagcaggggtcttgtgcttcctgggtacaagtacctcggacccttcaacggactcgacaagggagagccggtcaacgaggcagacgccgcggccctcgagcacgacaaagcctatgaccggcagctcgacagcggagacaacccgtacctcaagtacaaccacgccgacgcggagtttcaggagcgccttaaagaagatacgtcttttgggggcaacctcggacgagcagtcttccaggcgaaaaagagggttcttgaacctctgggcctggttgaggaacctgttaagacggctccgggaaaaaagaggccggtagagcactctcctgtggagccagactcctcctcgggaaccggaaaggcgggtcagcagcctgcaagaaaaagattgaattttggtcagactggagacgcagactcagtacctgacccccagcctctcggacagccaccagcagccccctctggtctgggaactaatacgatggctacaggcagtggcgcaccaatggcagacaataacgagggcgccgacggagtgggtaattcctcgggaaattggcattgcgattccacatggatgggcgacagagtcatcaccaccagcacccgaacctgggccctgcccacctacaacaaccacctctacaaacaaatttccagccaatcaggagcctcgaacgacaatcactactttggctacagcaccccttgggggtattttgacttcaacagattccactgccacttttcaccacgtgactggcaaagactcatcaacaacaactggggattccgacccaagagactcaagttcaagctctttaacattcaagtcaaagaggtcacgcagaatgacggtacgacgacgattgccaataaccttaccagcacggttcaggtgtttactgactcggagtaccagctcccgtacgtcctcggctcggcgcatcaaggatgcctcccgccgttcccagcagacgtcttcatggtgccacagtatggatacctcaccctgaacaacgggagtcaggcagtaggacgctcttcattttactgcctggagtactttccttctcagatgctgcgtaccggtaacaactttaccttcagctacacttttgaggacgttcctttccacagcagctacgctcacagccagagtctggaccgtctcatgaatcctctcatcgaccagtacctgtattacttgagcagaacagacgctccaagtggaaccaccacgcagtcaaggcttcagttttctcaggccggagcgagtgacattcgggaccagtctaggaactggcttcctggaccctgttaccgccagcagcgagtatcaaagacatctgcggataacaacaacagtgaatactcgtggactggagctaccaagtaccacctcaatggcagagactctctggtgaatccgggcccggccatggcaagccacaaggacgatgaagaaaagttttttcctcagagcggggttctcatctttgggaagcaaggctcagagaaaacaagtgtggacattgaaaaggtcatgattacagacgaagaggaaatcaggacaaccaatcccgtggctacggagcagtatggttctgtatctaccaacctccagagaggcaacagacaagcagctaccgcagatgtcaacacacaaggcgttcttccaggcatggtctggcaggacagagatgtgtaccttcaggggcccatctgggcaaagattccacacacggacggacattttcacccctctcccctcatgggtggattcggacttaaacaccctcctccacagattctcatcaagaacaccccggtacctgcgaatccttcgaccaccttcagtgcggcaaagtttgcttccttcatcacacagtactccacgggacaggtcagcgtggagatcgagtgggagctgcagaaggaaaacagcaaacgctggaatcccgaagttcagtacacttccaactacaacaagtctgttaatgtggactttactgtggacactaatggcgtgtattcagagcctcgccccattggcaccagatacctgactcgtaatctgtaa

SEQ ID NO: 570 - protein, 735 aa, Artificial Sequence
  source: /note="Description of Artificial Sequence: Synthetic polypeptide"
MAADGYLPDWLEDTLSEGIRQWWKLKPGPPPPKPAERHKDDSRGLVLPGYKYLGPFNGLDKGEPVNEADAAALEHDKAYDRQLDSGDNPYLKYNHADAEFQERLKEDTSFGGNLGRAVFQAKKRVLEPLGLVEEPVKTAPGKKRPVEHSPVEPDSSSGTGKAGQQPARKRLNFGQTGDADSVPDPQPLGQPPAAPSGLGTNTMATGSGAPMADNNEGADGVGNSSGNWHCDSTWMGDRVITTSTRTWALPTYNNHLYKQISSQSGASNDNHYFGYSTPWGYFDFNRFHCHFSPRDWQRLINNNWGFRPKRLKFKLFNIQVKEVTQNDGTTTIANNLTSTVQVFTDSEYQLPYVLGSAHQGCLPPFPADVFMVPQYGYLTLNNGSQAVGRSSFYCLEYFPSQMLRTGNNFTFSYTFEDVPFHSSYAHSQSLDRLMNPLIDQYLYYLSRTDAPSGTTTQSRLQFSQAGASDIRDQSRNWLPGPCYRQQRVSKTSADNNNSEYSWTGATKYHLNGRDSLVNPGPAMASHKDDEEKFFPQSGVLIFGKQGSEKTSVDIEKVMITDEEEIRTTNPVATEQYGSVSTNLQRGNRQAATADVNTQGVLPGMVWQDRDVYLQGPIWAKIPHTDGHFHPSPLMGGFGLKHPPPQILIKNTPVPANPSTTFSAAKFASFITQYSTGQVSVEIEWELQKENSKRWNPEVQYTSNYNKSVNVDFTVDTNGVYSEPRPIGTRYLTRNL

SEQ ID NO: 571 - DNA, 2208 bp, Artificial Sequence
  source: /note="Description of Artificial Sequence: Synthetic polynucleotide"
atggctgccgatggttatcttccagattggctcgaggacactctctctgaaggaataagacagtggtggaagctcaaacctggcccaccaccaccaaagcccgcagagcggcataaggacgacagcaggggtcttgtgcttcctgggtacaagtacctcggacccttcaacggactcgacaagggagagccggtcaacgaggcagacgccgcggccctcgagcacgacaaagcctatgaccggcagctcgacagcggagacaacccgtacctcaagtacaaccacgccgacgcggagtttcaggagcgccttaaagaagatacgtcttttgggggcaacctcggacgagcagtcttccaggcgaaaaagagggttcttgaacctctgggcctggttgaggaacctgttaagacggctccgggaaaaaagaggccggtagagcactctcctgtggagccagactcctcctcgggaaccggaaaggcgggccagcagcctgcaagaaaaagattgaattttggtcagactggagacgcaaactcagtacctgacccccagcctctcggacagccaccagcagccccctctggtctgggaactaatacgatggctacaggcagtggcgcaccaatggcagacaataacgagggcgccgacggagtgggtaattcctcgggaaattggcattgcgattccacatggatgggcgacagagtcatcaccaccagcacccgaacctgggccctgcccacctacaacaaccacctctacaaacaaatttccagccaatcaggagcctcgaacgacaatcactactttggctacagcaccccttgggggtattttgacttcaacagattccactgccacttttcaccacgtgactggcaaagactcatcaacaacaactggggattccgacccaagagactcaagttcaagctctttaacattcaagtcaaagaggtcacgcagaatgacggtacgacgacgattgccaataaccttaccagcacggttcaggtgtttactgactcggagtaccagctcccgtacgtcctcggctcggcgcatcaaggatgcctcccgccgttcccagcagacgtcttcatggtgccacagtatggatacctcaccctgaacaacgggagtcgggcagtaggacgctcttcattttactgcctggagtactttccttctcagatgctgcgtaccggtaacaactttaccttcagctacacttttgaggacgttcctttccacagcagctacgctcacagccagagtctggaccgtctcatgaatcctctcatcgaccagtacctgtattacttgagcagaacagacactccaagtggaaccaccacgcagtcaaggcttcagttttctcaggccggagcgagtgacattcgggaccagtctaggaactggcttcctggaccctgttaccgccagcagcgagtatcaaagacatctgcggataacaacaacagtgaatactcgtggactggagctaccaagtaccacctcaatggcagagactctctggtgaatccgggcccggccatggcaagccacaaggacgatgaagaaaagttttttcctcagagcggggttctcatctttgggaagcaaggctcagagaaaacaagtgtggacattgaaaaggtcatgattacagacgaagaggaaatcaggacgaccaatcccgtggctacggagcagtatggttctgtatctaccaacctccagagaggcaacagacaagcagctaccgcagatgtcaacacacaaggcgttcttccaggcatggtctggcaggacagagatgtgtaccttcaggggcccatctgggcaaagattccacacacggacggacattttcacccctctcccctcatgggtggattcggacttaaacaccctcctccacagattctcatcaagaacaccccggtacctgcgaatccttcgaccaccttcagtgcggcaaagtttgcttccttcatcacacagtactccacgggacaggtcagcgtggagatcgagtgggagctgcagaaggaaaacagcaaacgctggaatcccgaagttcagtacacttccaactacaacaagtctgttaatgtggactttactgtggacactaatggcgtgtatacagagcctcgccccattggcaccagatacctgactcgtaatctgtaa

SEQ ID NO: 572 - protein, 735 aa, Artificial Sequence
  source: /note="Description of Artificial Sequence: Synthetic polypeptide"
MAADGYLPDWLEDTLSEGIRQWWKLKPGPPPPKPAERHKDDSRGLVLPGYKYLGPFNGLDKGEPVNEADAAALEHDKAYDRQLDSGDNPYLKYNHADAEFQERLKEDTSFGGNLGRAVFQAKKRVLEPLGLVEEPVKTAPGKKRPVEHSPVEPDSSSGTGKAGQQPARKRLNFGQTGDANSVPDPQPLGQPPAAPSGLGTNTMATGSGAPMADNNEGADGVGNSSGNWHCDSTWMGDRVITTSTRTWALPTYNNHLYKQISSQSGASNDNHYFGYSTPWGYFDFNRFHCHFSPRDWQRLINNNWGFRPKRLKFKLFNIQVKEVTQNDGTTTIANNLTSTVQVFTDSEYQLPYVLGSAHQGCLPPFPADVFMVPQYGYLTLNNGSRAVGRSSFYCLEYFPSQMLRTGNNFTFSYTFEDVPFHSSYAHSQSLDRLMNPLIDQYLYYLSRTDTPSGTTTQSRLQFSQAGASDIRDQSRNWLPGPCYRQQRVSKTSADNNNSEYSWTGATKYHLNGRDSLVNPGPAMASHKDDEEKFFPQSGVLIFGKQGSEKTSVDIEKVMITDEEEIRTTNPVATEQYGSVSTNLQRGNRQAATADVNTQGVLPGMVWQDRDVYLQGPIWAKIPHTDGHFHPSPLMGGFGLKHPPPQILIKNTPVPANPSTTFSAAKFASFITQYSTGQVSVEIEWELQKENSKRWNPEVQYTSNYNKSVNVDFTVDTNGVYTEPRPIGTRYLTRNL

SEQ ID NO: 573 - DNA, 2211 bp, Artificial Sequence
  source: /note="Description of Artificial Sequence: Synthetic polynucleotide"
atggctgccgatggttatcttccagattggctcgaggacactctctctgaaggaataagacagtggtggaagctcaaacctggcccaccaccaccaaagcccgcagagcggcataaggacgacagcaggggtcttgtgcttcctgggtacaagtacctcggacccttcaacggactcgacaagggagagccggtcaacgaggcagacgccgcggccctcgagcacgacaaggcctacgaccagcagctcaaagcgggtgacaatccgtacctgcggtataaccacgccgacgccgagtttcaggagcgtctgcaagaagatacgtcttttgggggcaacctcgggcgagcagtcttccaggccaagaagcgggttctcgaacctctcggtctggttgaggaaggcgctaagacggctcctggaaagaaacgtccggtagagcagtcgccacaagagccagactcctcctcgggcatcggcaagacaggccagcagcccgctaaaaagagactcaattttggtcagactggcgactcagagtcagtccccgacccacaacctctcggagaacctccagcaacccccgctgctgtgggacctactacaatggcttcaggcggtggcgcaccaatggcagacaataacgaaggcgccgacggagtgggtaatgcctcaggaaattggcattgcgattccacatggctgggcgacagagtcatcaccaccagcacccgaacatgggccttgcccacctataacaaccacctctacaagcaaatctccagtgcttcgacgggggccagcaacgacaaccactacttcggctacagcaccccctgggggtattttgactttaacagattccactgccacttttcaccacgtgactggcagcgactcatcaacaataactggggattccggcccaagagactcagcttcaagctcttcaacatccaggtcaaggaggtcacgacgaatgatggcgtcacaaccatcgctaataaccttaccagcacggttcaagtcttctcggactcggagtaccagcttccgtacgtcctcggctctgcgcaccagggctgcctccctccgttcccggcggacgtgttcatgattccgcaatacggctacctgacgctcaacaatggcagccaagccgtgggacgttcatccttttactgcctggaatatttcccttctcagatgctgagaacgggcaacaactttaccttcagctacacctttgaggaagtgcctttccacagcagctacgcgcacagccagagcctggaccggctgatgaatcctctcatcgatcaatacctgtattacctgaacagaactcaaaatcagtccggaagtgcccaaaacaaggacttgctgtttagccgtgggtctccagctggcatgtctgttcagcccaaaaactggctacctggaccctgttatcggcagcagcgcgtttctaaaacaaaaacagacaacaacaacagcaattttacctggactggtgcttcaaaatataacctcaatgggcgtgaatccatcatcaaccctggcactgctatggcctcacacaaagacgacgaagacaagttctttcccatgagcggtgtcatgatttttggaaaagagagcgccggagcttcaaacactgcattggacaatgtcatgattacggacgaagaggaaattaaagccactaaccctgtggccaccgaaagatttgggaccgtggcagtcaatttccagagcagcagcacagaccctgcgaccggagatgtgcatgctatgggagcattacctggcatggtgtggcaagatagagacgtgtacctgcagggtcccatttgggccaaaattcctcacacagatggacactttcacccgtctcctcttatgggcggctttggactcaagaacccgcctcctcagatcctcatcaaaaacacgcctgttcctgcgaatcctccggcggagttttcagctacaaagtttgcttcattcatcactcaatactccacaggacaagtgagcgtggaaattgaatgggagctgcagaaagaaaacagcaaacgctggaatcccgaagtgcagtatacatctaactatgcaaaatctgccaacgttgatttcactgtggacaacaatggactttatactgagcctcgccccattggcacccgttacctcacccgtcccctgtaa

SEQ ID NO: 574 - protein, 736 aa, Artificial Sequence
  source: /note="Description of Artificial Sequence: Synthetic polypeptide"
MAADGYLPDWLEDTLSEGIRQWWKLKPGPPPPKPAERHKDDSRGLVLPGYKYLGPFNGLDKGEPVNEADAAALEHDKAYDQQLKAGDNPYLRYNHADAEFQERLQEDTSFGGNLGRAVFQAKKRVLEPLGLVEEGAKTAPGKKRPVEQSPQEPDSSSGIGKTGQQPAKKRLNFGQTGDSESVPDPQPLGEPPATPAAVGPTTMASGGGAPMADNNEGADGVGNASGNWHCDSTWLGDRVITTSTRTWALPTYNNHLYKQISSASTGASNDNHYFGYSTPWGYFDFNRFHCHFSPRDWQRLINNNWGFRPKRLSFKLFNIQVKEVTTNDGVTTIANNLTSTVQVFSDSEYQLPYVLGSAHQGCLPPFPADVFMIPQYGYLTLNNGSQAVGRSSFYCLEYFPSQMLRTGNNFTFSYTFEEVPFHSSYAHSQSLDRLMNPLIDQYLYYLNRTQNQSGSAQNKDLLFSRGSPAGMSVQPKNWLPGPCYRQQRVSKTKTDNNNSNFTWTGASKYNLNGRESIINPGTAMASHKDDEDKFFPMSGVMIFGKESAGASNTALDNVMITDEEEIKATNPVATERFGTVAVNFQSSSTDPATGDVHAMGALPGMVWQDRDVYLQGPIWAKIPHTDGHFHPSPLMGGFGLKNPPPQILIKNTPVPANPPAEFSATKFASFITQYSTGQVSVEIEWELQKENSKRWNPEVQYTSNYAKSANVDFTVDNNGLYTEPRPIGTRYLTRPL

SEQ ID NO: 575 - protein, 735 aa, Artificial Sequence
  source: /note="Description of Artificial Sequence: Synthetic polypeptide"
MAADGYLPDWLEDTLSEGIRQWWKLKPGPPPPKPAERHKDDSRGLVLPGYKYLGPFNGLDKGEPVNEADAAALEHDKAYDRQLDSGDNPYLKYNHADAEFQERLKEDTSFGGNLGRAVFQAKKRVLEPLGLVEEPVKTAPGKKRPVEHSPVEPDSSSGTGKAGQQPARKRLNFGQTGDADSVPDPQPLGQPPAAPSGLGTNTMATGSGAPMADNNEGADGVGNSSGNWHCDSTWMGDRVITTSTRTWALPTYNNHLYKQISSQSGASNDNHYFGYSTPWGYFDFNRFHCHFSPRDWQRLINNNWGFRPKRLKFKLFNIQVKEVTQNDGTTTIANNLTSTVQVFTDSEYQLPYVLGSAHQGCLPPFPADVFMVPQYGYLTLNNGSQAVGRSSFYCLEYFPSQMLRTGNNFTFSYTFEDVPFHSSYAHSQSLDRLMNPLIDQYLYYLSRTDTPSGTTTQSRLQFSQAGASDIRNQSRNWLPGPCYRQQRVSKTSADNNNSEYSWTGATKYHLNGRDSLVNPGPAMASHKDDEEKFFPQSGVLIFGKQGSEKTSVDIEKVMITDEEEIRTTNPVATEQYGSVSTNLQRGNRQAATADVNTQGVLPGMVWQDRDVYLQGPIWAKIPHTDGHFHPSPLMGGFGLKHPPPQILIKNTPVPANPSTTFSAAKFASFITQYSTGQVSVEIEWELQKENSKRWNPEVQYTSNYNKSVNVDFTVDTNGVYSEPRPIGTRYLTRNQ

SEQ ID NO: 576 - DNA, 2208 bp, Artificial Sequence
  source: /note="Description of Artificial Sequence: Synthetic polynucleotide"
atggctgccgatggttatcttccagattggctcgaggacactctctctgaaggaataagacagtggtggaagctcaaacctggcccaccaccaccaaagcccgcagagcggcataaggacgacagcaggggtcttgtgcttcctgggtacaagtacctcggacccttcaacggactcgacaagggagagccggtcaacgaggcagacgccgcggccctcgagcacgacaaagcctatgaccggcagctcgacagcggagacaacccgtacctcaagtacaaccacgccgacgcggagtttcaggaacgccttaaagaagatacgtcttttgggggcaacctcggacgagcagtcttccaggcgaaaaagagggttcttgaacctctgggcctggttgaggaacctgttaagacggctccgggaaaaaagaggccggtagagcactctcctgtggagccagactcctcctcgggaaccggaaaggcgggccagcagcctgcaagaaaaagattgaattttggtcagactggagacgcagactcagtacctgacccccagcctctcggacagccaccagcagccccctctggtctgggaactaatacgatggctacaggcagtggcgcaccaatggcagacaataacgagggcgccgacggagtgggtaattcctcgggaaattggcattgcgattccacatggatgggcgacagagtcatcaccaccagcacccgaacctgggccctgcccacctacaacaaccacctctacaaacaaatttccagccaatcaggagcctcgaacgacaatcactactttggctacagcaccccttgggggtattttgacttcaacagattccactgccacttttcaccacgtgactggcaaagactcatcaacaacaactggggattccgacccaagagactcaagttcaagctctttaacattcaagtcaaagaggtcacgcagaatgacggtacgacgacgattgccaataaccttaccagcacggttcaggtgtttactgactcggagtaccagctcccgtacgtcctcggctcggcgcatcaaggatgcctcccgccgttcccagcagacgtcttcatggtgccacagtatggatacctcaccctgaacaacgggagtcaggcagtaggacgctcttcattttactgcctggagtactttccttctcagatgctgcgtaccggtaacaactttaccttcagctacacttttgaggacgttcctttccacagcagctacgctcacagccagagtctggaccgtctcatgaatcctctcatcgaccagtacctgtattacttgagcagaacagacactccaagtggaaccaccacgcagtcaaggcttcagttttctcaggccggagcgagtgacattcggaaccagtctaggaactggcttcctggaccctgttaccgccagcagcgagtatcaaagacatctgcggataacaacaacagtgaatactcgtggactggagctaccaagtaccacctcaatggcagagactctctggtgaatccgggcccggccatggcaagccacaaggacgatgaagaaaagttttttcctcagagcggggttctcatctttgggaagcaaggctcagagaaaacaagtgtggacattgaaaaggtcatgattacagacgaagaggaaatcaggacaaccaatcccgtggctacggagcagtatggttctgtatctaccaacctccagagaggcaacagacaagcagctaccgcagatgtcaacacacaaggcgttcttccaggcatggtctggcaggacagagatgtgtaccttcaggggcccatctgggcaaagattccacacacggacggacattttcacccctctcccctcatgggtggattcggacttaaacaccctcctccacagattctcatcaagaacaccccggtacctgcgaatccttcgaccaccttcagtgcggcaaagtttgcttccttcatcacacagtactccacgggacaggtcagcgtggagatcgagtgggagctgcagaaggaaaacagcaaacgctggaatcccgaagttcagtacacttccaactacaacaagtctgttaatgtggactttactgtggacactaatggcgtgtattcagagcctcgccccattggcaccagatacctgactcgtaatcagtaa

SEQ ID NO: 577 - DNA, 2208 bp, Artificial Sequence
  source: /note="Description of Artificial Sequence: Synthetic polynucleotide"
atggctgccgatggttatcttccagattggctcgaggacactctctctgaaggaataagacagtggtggaagctcaaacctggcccaccaccaccaaagcccgcagagcggcataaggacgacagcaggggtcttgtgcttcctgggtacaagtacctcggacccttcaacggactcgacaagggagagccggtcaacgaggcagacgccgcggccctcgagcacgacaaagcctatgaccggcagctcgacagcggagacaacccgtacctcaagtacaaccacgccgacgcggagtttcaggagcgccttaaagaagatacgtcttttgggggcaacctcggacgagcagtcttccaggcgaaaaagagggttcttgaacctctgggcctggttgaggaacctgttaagacggctccgggaaaaaagaggccggtagagcactctcctgtggagccagactcctcctcgggaaccggaaaggcgggccagcagcctgcaagaaaaagattgaattttggtcagactggagacgcagactcagtacctgatccccagcctctcggacagccaccagcagccccctctggtctgggaactaatacgatggctacaggcagtggcgcaccaatggcagacaataacgagggcgccgacggagtgggtaattcctcgggaaattggcattgcgattccacatggatgggcgacagagtcatcaccaccagcacccgaacctgggccctgcccacctacaacaaccacctctacaaacaaatttccagccaatcaggagcctcgaacgacaatcactactttggctacagcaccccttgggggtattttgacttcaacagattccactgccacttttcaccacgtgactggcaaagactcatcaacaacaactggggattccgacccaagagactcaagttcaagctctttaacattcaagtcaaagaggtcacgcagaatgacggtacgacgacgattgccaataaccttaccagcacggttcaggtgtttactgactcggagtaccagctcccgtatgtcctcggctcggcgcatcaaggatgcctcccgccgttcccagcagacgtcttcatggtgccacagtatggatacctcaccctgaacaacgggagtcaggcagtaggacgctcttcattttactgcctggagtactttccttctcagatgctgcgtaccggtaacaactttaccttcagctacacttttgaggacgttcctttccacagcagctacgctcacagccagagtctggaccgtctcatgaatcctctcatcgaccagtacctgtattacttgagcagaacagacactccaagtggaaccaccacgcagtcaaggcttcagttttctcaggccggagcgagtgacattcgggaccagtctaggaactggcttcctggaccctgttaccgccagcagcgagtatcaaagacatctgcggataacaacaacagtgaatactcgtggactggagctaccaagtaccacctcaatggcagagactctctggtgaatccgggcccggccatggcaagccacaaggacgatgaagaaaagttttttcctcagagcggggttctcatctttgggaagcaaggctcagagaaaacaagtgtggacattgaaaaggtcatgattacagacgaagaggaaatcaggacaaccaatcccgtggctacggagcagtatggttctgtatctaccaacctccagagaggcaacagacaagcagctaccgcagatgtcaacacacaaggcgttcttccaggcatggtctggcaggacagagatgtgtaccttcaggggcccatctgggcaaagattccacacacggacggacattttcacccctctcccctcatgggtggattcggacttaaacaccctcctccacagattctcatcaagaacaccccggtacctgcgaatccttcgaccaccttcagtgcggcaaagtttgcttccttcatcacacagtactccacgggacaggtcagcgtggagatcgagtgggagctgcagaaggaaaacagcaaacgctggaatcccgaagttcagtacacttccaactacaacaagtctgttaatgtggactttactgtggacactaatggcgtgtattcagagcctcgccccattggcaccagatacctgactcgtaatctgtaa

SEQ ID NO: 578 - protein, 735 aa, Artificial Sequence
  source: /note="Description of Artificial Sequence: Synthetic polypeptide"
MAADGYLPDWLEDTLSEGIRQWWKLKPGPPPPKPAERHKDDSRGLVLPGYKYLGPFNGLDKGEPVNEADAAALEHDKAYDRQLDSGDNPYLKYNHADAEFQERLKEDTSFGGNLGRAVFQAKKRVLEPLGLVEEPVKTAPGKKRPVEHSPVEPDSSSGTGKAGQQPARKRLNFGQTGDADSVPDPQPLGQPPAAPSGLGTNTMATGSGAPMADNNEGADGVGNSSGNWHCDSTWMGDRVITTSTRTWALPTYNNHLYKQISSQSGASNDNHYFGYSTPWGYFDFNRFHCHFSPRDWQRLINNNWGFRPKRLKFKLFNIQVKEVTQNDGTTTIANNLTSTVQVFTDSEYQLPYVLGSAHQGCLPPFPADVFMVPQYGYLTLNNGSQAVGRSSFYCLEYFPSQMLRTGNNFTFSYTFEDVPFHSSYAHSQSLDRLMNPLIDQYLYYLSRTDTPSGTTTQSRLQFSQAGASDIRDQSRNWLPGPCYRQQRVSKTSADNNNSEYSWTGATKYHLNGRDSLVNPGPAMASHKDDEEKFFPQSGVLIFGKQGSEKTSVDIEKVMITDEEEIRTTNPVATEQYGSVSTNLQRGNRQAATADVNTQGVLPGMVWQDRDVYLQGPIWAKIPHTDGHFHPSPLMGGFGLKHPPPQILIKNTPVPANPSTTFSAAKFASFITQYSTGQVSVEIEWELQKENSKRWNPEVQYTSNYNKSVNVDFTVDTNGVYSEPRPIGTRYLTRNL

SEQ ID NO: 579 - DNA, 2601 bp, Artificial Sequence
  source: /note="Description of Artificial Sequence: Synthetic polynucleotide"
ccatcgacgtcagacgcggaagcttcgatcaactacgcggacaggtaccaaaacaaatgttctcgtcacgtgggcatgaatctgatgctgtttccctgcagacaatgcgagagactgaatcagaattcaaatatctgcttcactcacggtgtcaaagactgtttagagtgctttcccgtgtcagaatctcaacccgtttctgtcgtcaaaaaggcgtatcagaaactgtgctacattcatcacatcatgggaaaggtgccagacgcttgcactgcttgcgacctggtcaatgtggacttggatgactgtgtttctgaacaataaatgacttaaaccaggtatgactgccgatggttatcttccagattggctcgaggacaaccttagtgaaggaattcgcgagtggtgggctttgaaacctggagcccctcaacccaaggcaaatcaacaacatcaagacaacgctcgaggtcttgtgcttccgggttacaaataccttggacccggcaacggactcgacaagggggagccggtcaacgcagcagacgcggcggccctcgagcacgacaaggcctacgaccagcagctcaaggccggagacaacccgtacctcaagtacaaccacgccgacgccgagttccaggagcggctcaaagaagatacgtcttttgggggcaacctcgggcgagcagtcttccaggccaaaaagaggcttcttgaacctcttggtctggttgaggaagcggctaagacggctcctggaaagaagaggcctgtagagcagtctcctcaggaaccggactcctccgcgggtattggcaaatcgggtgcacagcccgctaaaaagagactcaatttcggtcagactggcgacacagagtcagtcccagaccctcaaccaatcggagaacctcccgcagccccctcaggtgtgggatctcttacaatggcttcaggtggtggcgcaccagtggcagacaataacgaaggtgccgatggagtgggtagttcctcgggaaattggcattgcgattcccaatggctgggggacagagtcatcaccaccagcacccgaacctgggccctgcccacctacaacaatcacctctacaagcaaatctccaacagcacatctggaggatcttcaaatgacaacgcctacttcggctacagcaccccctgggggtattttgacttcaacagattccactgccacttctcaccacgtgactggcagcgactcatcaacaacaactggggattccggcctaagcaactcaacttcaagctcttcaacattcaggtcaaagaggttacggacaacaatggagtcaagaccatcgccaataaccttaccagcacggtccaggtcttcacggactcagactatcagctcccgtacgtgctcgggtcggctcacgagggctgcctcccgccgttcccagcggacgttttcatgattcctcagtacgggtatctgacgcttaatgatggaagccaggccgtgggtcgttcgtccttttactgcctggaatatttcccgtcgcaaatgctaagaacgggtaacaacttccagttcagctacgagtttgagaacgtacctttccatagcagctacgctcacagccaaagcctggaccgactaatgaatccactcatcgaccaatacttgtactatctctcaaagactattaacggttctggacagaatcaacaaacgctaaaattcagtgtggccggacccagcaacatggctgtccagggaagaaactacatacctggacccagctaccgacaacaacgtgtctcaaccactgtgactcaaaacaacaacagcgaatttgcttggcctggagcttcttcttgggctctcaatggacgtaatagcttgatgaatcctggacctgctatggccagccacaaagaaggagaggaccgtttctttcctttgtctggatctttaatttttggcaaacaaggaactggaagagacaacgtggatgcggacaaagtcatgataaccaacgaagaagaaattaaaactactaacccggtagcaacggagtcctatggacaagtggccacaaaccaccagagtgcccaagcacaggcgcagaccggctgggttcaaaaccaaggaatacttccgggtatggtttggcaggacagagatgtgtacctgcaaggacccatttgggccaaaattcctcacacggacggcaactttcacccttctccgctgatgggagggtttggaatgaagcacccgcctcctcagatcctcatcaaaaacacacctgtacctgcggatcctccaacggccttcaacaaggacaagctgaactctttcatcacccagtattctactggccaagtcagcgtggagatcgagtgggagctgcagaaggaaaacagcaagcgctggaacccggagatccagtacacttccaactattacaagtctaataatgttgaatttgctgttaatactgaaggtgtatatagtgaaccccgccccattggcaccagatacctgactcgtaatctgtaattgcttgttaatcaataaaccgtttaattcgtttcagttgaactgcggcc

SEQ ID NO: 580 - DNA, 2601 bp, Artificial Sequence
  source: /note="Description of Artificial Sequence: Synthetic polynucleotide"
ccatcgacgtcagacgcggaagcttcgatcaactacgcggacaggtaccaaaacaaatgttctcgtcacgtgggcatgaatctgatgctgtttccctgcagacaatgcgagagactgaatcagaattcaaatatctgcttcactcacggtgtcaaagactgtttagagtgctttcccgtgtcagaatctcaacccgtttctgtcgtcaaaaaggcgtatcagaaactgtgctacattcatcacatcatgggaaaggtgccagacgcttgcactgcttgcgacctggtcaatgtggacttggatgactgtgtttctgaacaataaatgacttaaaccaggtatggctgccgatggttatcttccagattggctcgaggacaaccttagtgaaggaattcgcgagtggtgggctttgaaacctggagcccctcaacccaaggcaaatcaacaacatcaagacaacgctcgaggtcttgtgcttccgggttacaaataccttggacccggcaacggactcgacaagggggagccggtcaacgcagcagacgcggcggccctcgagcacgacaaggcctacgaccagcagctcaaggccggagacaacccgtacctcaagtacaaccacgccgacgccgagttccaggagcggctcaaagaagatacgtcttttgggggcaacctcgggcgagcagtcttccaggccaaaaagaggcttcttgaacctcttggtctggttgaggaagcggctaagacggctcctggaaagaagaggcctgtagagcagtctcctcaggaaccggactcctccgcgggtattggcaaatcgggtgcacagcccgctaaaaagagactcaatttcggtcagactggcgacacagagtcagtcccagaccctcaaccaatcggagaacctcccgcagccccctcaggtgtgggatctcttacaatggcttcaggtggtggcgcaccagtggcagacaataacgaaggtgccgatggagtgggtagttcctcgggaaattggcattgcgattcccaatggctgggggacagagtcatcaccaccagcacccgaacctgggccctgcccacctacaacaatcacctctacaagcaaatctccaacagcacatctggaggatcttcaaatgacaacgcctacttcggctacagcaccccctgggggtattttgacttcaacagattccactgccacttctcaccacgtgactggcagcgactcatcaacaacaactggggattccggcctaagcgactcaacttcaagctcttcaacattcaggtcaaagaggttacggacaacaatggagtcaagaccatcgccaataaccttaccagcacggtccaggtcttcacggactcagactatcagctcccgtacgtgctcgggtcggctcacgagggctgcctcccgccgttcccagcggacgttttcatgattcctcagtacgggtatctgacgcttaatgatggaagccaggccgtgggtcgttcgtccttttactgcctggaatatttcccgtcgcaaatgctaagaacgggtaacaacttccagttcagctacgagtttgagaacgtacctttccatagcagctacgctcacagccaaagcctggaccgactaatgaatccactcatcgaccaatacttgtactatctctcaaagactattaacggttctggacagaatcaacaaacgctaaaattcagtgtggccggacccagcaacatggctgtccagggaagaaactacatacctggacccagctaccgacaacaacgtgtctcaaccactgtgactcaaaacaacaacagcgaatttgcttggcctggggcttcttcttgggctctcaatggacgtaatagcttgatgaatcctggacctgctatggccagccacaaagaaggagaggaccgtttctttcctttgtctggatctttaatttttggcaaacaaggaactggaagagacaacgtggatgcggacaaagtcatgataaccaacgaagaagaaattaaaactactaacccggtagcaacggagtcctatggacaagtggccacaaaccaccagagtgcccaagcacaggcgcagaccggctgggttcaaaaccaaggaatacttccgggtatggtttggcaggacagagatgtgtacctgcaaggacccatttgggccaaaattcctcacacgggcggcaactttcacccttctccgctgatgggagggtttggaatgaagcacccgcctcctcagatcctcatcaaaaacacacctgtacctgcggatcctccaacggccttcaacaaggacaagctgaactctttcatcacccagtattctactggccaagtcagcgtggagatcgagtgggagctgcagaaggaaaacagcaagcgctggaacccggagatccagtacacttccaactattacaagtctaataatgttgaatttgctgttaatactggaggtgtatatagtgaaccccgccccattggcaccagatacctgactcgtaatctgtaattgcttgttaatcaataaaccgtttaattcgtttcagttgaactgcggcc

SEQ ID NO: 581 - DNA, 2601 bp, Artificial Sequence
  source: /note="Description of Artificial Sequence: Synthetic polynucleotide"
ccatcgacgtcagacgcggaagcttcgatcaactacgcggacaggtaccaaaacaaatgttctcgtcacgtgggcatgaatctgatgctgtttccctgcagacaatgcgagagactgaatcagaattcaaatatctgcttcactcacggtgtcaaagactgtttagagtgctttcccgtgtcagaatctcaacccgtttctgtcgtcaaaaaggcgtatcagaaactgtgctacattcatcacatcatgggaaaggtgccagacgcttgcactgcttgcgacctggtcaatgtggactcggatgactgtgtttctgaacaataaatgacttaaaccaggtatggctgccgatggttatcttccagattggctcgaggacaaccttagtgaaggaattcgcgagtggtgggctttgaaacctggagcccctcaacccaaggcaaatcaacaacatcaagacaacgctcgaggtcttgtgcttccgggttacaaataccttggacccggcaacggactcgacaagggggagccggtcaacgcagcagacgcggcggccctcgagcacgacaaggcctacgaccagcagctcaaggccggagacaacccgtacctcaagtacaaccacgccgacgccgagttccaggagcggctcaaagaagatacgtcttttgggggcaacctcgggcgagcagtcttccaggccaaaaagaggcttcttgaacctcttggtctggttgaggaagcggctaagacggctcctggaaagaagaggcctgtagagcagtctcctcaggaaccggactcctccgcgggtattgacaaatcgggtgcacagcccgctaaaaagagactcaatttcggtcagactggcgacacagagtcagtcccagaccctcaaccaatcggagaacctcccgcagccccctcaggtgtgggatctcttacaatggcttcaggtggtggcgcaccagtggcagacaataacgaaggtgccgatggagtgggtagttcctcgggaaattggcattgcgattcccaatggctgggggacagagtcatcaccaccagcacccgaacctgggccctgcccacctacaacaatcacctctacaagcaaatctccaacagcacatctggaggatcttcaaatgacaacgcctacttcggctacagcaccccctgggggtattttgacttcaacagattccactgccacttctcaccacgtgactggcagcgactcatcaacaacaactggggattccggcctaagcgactcaacttcaagctcttcaacattcaggtcaaagaggttacggacaacaatggagtcaagaccatcgccaataaccttaccagcacggtccaggtcttcacggactcggactatcagctcccgtacgtgctcgggtcggctcacgagggctgcctcccgccgttcccagcggacgttttcatgattcctcagtacgggtatctgacgcttaatgatggaagccaggccgtgggtcgttcgtccttttactgcctggaatatttcccgtcgcaaatgctaagaacgggtaacaacttccagttcagctacgagtttgagaacgtacctttccatagcagctacgctcacagccaaagcctggaccgactaatgaatccactcatcgaccaatacttgtactatctctcaaagactattaacggttctggacagaatcaacaaacgctaaaattcagtgtggccggacccagcaacatggctgtccagggaagaaactacatacctggacccagctaccgacaacaacgtgtctcaaccactgtgactcaaaacaacaacagcgaatttgcttggcctggagcttcttcttgggctctcaatggacgtaatagcttgatgaatcctggacctgctatggccagccacaaagaaggagaggaccgtttctttcctttgtctggatctttaatttttggcaaacaaggaactggaagagacaacgtggatgcggacaaagtcatgataaccaacgaagaagaaattaaaactactaacccggtagcaacggagtcctatggacaagtggccacaaaccaccagagtgcccaagcacaggcgcagaccggctgggttcaaaaccaaggaatacttccgggtatggtttggcaggacagagatgtgtacctgcaaggacccatttgggccaaaattcctcacacggacggcaactttcacccttctccgctgatgggagggtttggaatgaagcacccgcctcctcagatcctcatcaaaaacacacctgtacctgcggatcctccaacggccttcaacaaggacaagctgaactctttcatcacccagtattctactggccaagtcagcgtggagatcgagtgggagctgcagaaggaaaacagcaagcgctggaacccggagatccagtacacttccaactattacaagtctaataatgttgaatttgctgttaatactgaaggtgtatatagtgaaccccgccccattggcaccagatacctgactcgtaatctgtaattgcttgttaatcaataaaccgtttaattcgtttcagttgaactgcggcc

SEQ ID NO: 582 - DNA, 2601 bp, Artificial Sequence
  source: /note="Description of Artificial Sequence: Synthetic polynucleotide"
ccatcgacgtcagacgcggaagcttcgatcaactacgcggacaggtaccaaaacaaatgttctcgtcacgtgggcatgaatctgatgctgtttccctgcagacaatgcgagagactgaatcagaattcaaatatctgcttcactcacggtgtcaaagactgtttagagtgctttcccgtgtcagaatctcaacccgtttctgtcgtcaaaaaggcgtatcagaaactgtgctacattcatcacatcatgggaaaggtgccagacgcttgcactgcttgcgacctggtcaatgtggacttggatgactgtgtttctgaacaataaatgacttaaaccaggtatggctgccgatggttatcttccagattggctcgaggacaaccttagtgaaggaattcgcgagtggtgggctttgaaacctggagcccctcaacccaaggcaaatcaacaacatcaagacaacgctcgaggtcttgtgcttccgggttacaaataccttggacccggcaacggactcgacaagggggagccggtcaacgcagcagacgcggcggccctcgagcacgacaaggcctacgaccagcagctcaaggccggagacaacccgtacctcaagtacaaccacgccgacgccgagttccaggagcggctcaaagaagatacgtcttttgggggcaacctcgggcgagcagtcctccaggccaaaaagaggcttcttgaacctcttggtctggttgaggaagcggctaagacggctcctggaaagaagaggcctgtagagcagtctcctcaggaaccggactcctccgcgggtattggcaaatcgggtgcacagcccgctaaaaagagactcaatttcggtcagactggcgacacagagtcagtcccagaccctcaaccaatcggagaacctcccgcagccccctcaggtgtgggatctcttacaatggcttcaggtggtggcgcaccagtggcagacaataacgaaggtgccgatggagtgggtagttcctcgggaaattggcattgcgattcccaatggctgggggacagagtcatcaccaccagcacccgaacctgggccctgcccacctacaacaatcacctctacaagcaaatctccaacagcacatctggaggatcttcaaatgacaacgcctacttcggctacagcaccccctgggggtattttgacttcaacagattccactgccacttctcaccacgtgactggcagcgactcatcaacaacaactggggattccggcctaagcgactcaacttcaagctcttcaacattcaggtcaaagaggttacggacaacaatggagtcaagaccatcgccaataaccttaccagcacggtccaggtcttcacggactcagactatcagctcccgtacgtgctcgggtcggctcacgagggctgcctcccgccgttcccagcggacgttttcatgattcctcagtacgggtatctgacgcttaatgatggaagccaggccgtgggtcgttcgtccttttactgcctggaatatttcccgtcgcaaatgctaagaacgggtaacaacttccagttcagctacgagtttgagaacgtacctttccatagcagctacgctcacagccaaagcctggaccgactaatgaatccactcatcgaccaatacttgtactatctctcaaagactattaacggttctggacagaatcaacaaacgctaaaattcagtgtggccggatccagcaacatggctgtccagggaagaaactacatacctggacccagctaccgacaacaacgtgtctcaaccactgtgactcaaaacaacaacagcgaatttgcttggcctggagcttcttcttgggctctcaatggacgtaatagcttgatgaatcctggacctgctatggccagccacaaagaaggagaggaccgtttctttcctttgtctggatctttaatttttggcaaacaaggaactggaagagacaacgtggatgcggacaaagtcatgataaccaacgaagaagaaattaaaactactaacccggtagcaacggagtcctatggacaagtggccacaaaccaccagagtgcccaagcacaggcgcagaccggctgggttcaaaaccaaggaatacttccaggtatggtttggcaggacagagatgtgtacctgcaaggacccatttgggccaaaattcctcacacggacggcaactttcacccttctccgctgatgggagggtttggaatgaagcacccgcctcctcagatcctcatcaaaaacacacctgtacctgcggatcctccaacggccttcaacaaggacaagctgaactctttcatcacccagtattctactggccaagtcagcgtggagatcgagtgggagctgcagaaggaaaacagcaagcgctggaacccggagatccagtacacttccaactattacaagtctaataatgttgaatttgctgttaatactgaaggtgtatatagtgaaccccgccccattggcaccagatacctgactcgtaatctgtaattgcttgttaatcaataaaccgtttaattcgtttcagttgaactgcggcc

SEQ ID NO: 583 - DNA, 2601 bp, Artificial Sequence
  source: /note="Description of Artificial Sequence: Synthetic polynucleotide"
ccatcgacgtcagacgcggaagcttcgatcaactacgcggacaggtaccaaaacaaatgttctcgtcacgtgggcatgaatctgatgctgtttccctgcagacaatgcgagagactgaatcagaattcaaatatctgcttcactcacggtgtcaaagactgtttagagtgctttcccgtgtcagaatctcaacccgtttctgtcgtcaaaaaggcgtatcagaaactgtgctacattcatcacatcatgggaaaggtgccagacgcttgcactgcttgcgacctggtcaatgtggacttggatgactgtgtttctgaacaataaatgacttaaaccaggtatggctgccgatggttatcttccagattggctcgaggacaaccttagtgaaggaattcgcgagtggtgggctttgaaacctggagcccctcaacccaaggcaaatcaacaacatcaagacaacgctcgaggtcttgtgcttccgggttacaaataccttggacccggcaacggactcgacaagggggagccggtcaacgcagcagacgcggcggccctcgagcacgacagggcctacgaccagcagctcaaggccggagacaacccgtacctcaagtacaaccacgccgacgccgagttccaggagcggctcaaagaagatacgtcttttgggggcaacctcgggcgagcagtcttccaggccaaaaagaggcttcttgaacctcttggtctggttgaggaagcggctaagacggctcctggaaagaagaggcctgtagagcagtctcctcaggaaccggactcctccgcgggtattggcaaatcgggtgcacagcccgctaaaaagagactcaatttcggtcagactggcgacacagagtcagtcccagaccctcaaccaatcggagaacctcccgcagccccctcaggtgtgggatctcttacaatggcttcaggtggtggcgcaccagtggcagacaataacgaaggtgccgatggagtgggtagttcctcgggaaattggcattgcgattcccaatggctgggggacagagtcatcaccaccagcacccgaacctgggccctgcccacctacaacaatcacctctacaagcaaatctccaacagcacatctggaggatcttcaaatgacaacgcctacttcggctacagcaccccctgggggtattttgacttcaacagattccactgccacttctcaccacgtgactggcagcgactcatcaacaacaactggggattccggcctaagcgactcaacttcaagctcttcaacattcaggtcaaagaggttacggacaacaatggagtcaagaccatcgccaataaccttaccagcacggtccaggtcttcacggactcagactatcagctcccgtacgtgctcgggtcggctcacgagggctgcctcccgccgttcccagcggacgttttcatgattcctcagtacgggtatctgacgcttaatgatggaagccaggccgtgggtcgttcgtccttttactgcctggaatatttcccgtcgcaaatgctaagaacgggtaacaacttccagttcagctacgagtttgagaacgtacctttccatagcagctacgctcacagccaaagcctggaccgactaatgaatccactcatcgaccaatacttgtactatctctcaaagactattaacggttctggacagaatcaacaaacgctaaaattcagtgtggccggacctagcaacatggctgtccagggaagaaactacatacctggacccagctaccgacaacaacgtgtctcaaccactgtgactcaaaacaacaacagcgaatttgcttggcctggagcttcttcttgggctctcaatggacgtaatagcttgatgaatcctggacctgctatggccagccacaaagaaggagaggaccgtttctttcctttgtctggatctttaatttttggcaaacaaggaactggaagagacaacgtggatgcggacaaagtcatgataaccaacgaagaagaaattaaaactactaacccggtagcaacggagtcctatggacaagtggccacaaaccaccagagtgcccaagcacaggcgcagaccggctgggttcaaaaccaaggaatacttccgggtatggtttggcaggacagagatgtgtacctgcaaggacccatttgggccaaaattcctcacacggacggcaactttcacccttctccgctgatgggagggtttggaatgaagcacccgcctcctcagatcctcatcaaaaacacacctgtacctgcggatcctccaacggccttcaacaaggacaagctgaactctttcatcacccagtattctactggccaagtcagcgtggagatcgagtgggagctgcagaagaaaaacagcaagcgctggaacccggagatccagtacacttccaactattacaagtctaataatgttgaatttgctgttaacactgaaggtgtatatagtgaaccccgccccattggcaccagatacctgactcgtaatctgtaattgcttgttaatcaataaaccgtttaattcgtttcagttgaactgcggcc

SEQ ID NO: 584 - DNA, 2601 bp, Artificial Sequence
  source: /note="Description of Artificial Sequence: Synthetic polynucleotide"
ccatcgacgtcagacgcggaagcttcgatcaactacgcggacaggtaccaaaacaaatgttctcgtcacgtgggcatgaatctgatgctgtttccctgcagacaatgcgagagactgaatcagaattcaaatatctgcttcactcacggtgtcaaagactgtttagagtgctttcccgtgtcagaatctcaacccgtttctgtcgtcaaaaaggcgtatcagaaactgtgctacattcatcacatcatgggaaaggtgccagacgcttgcactgcttgcgacctggtcaatgtggacttggatgactgtgtttctgaacaataaatgacttaaaccaggtatggctgccgatggttatcttccagattggctcgaggacaaccttagtgaaggaattcgcgagtggtgggctttgaaacctggagcccctcaacccaaggcaaatcaacaacatcaagacaacgctcgaggtcttgtgcttccgggttacaaataccttggacccggcaacggactcgacaagggggagccggtcaacgcagcagacgcggcggccctcgagcacgacaaggcctacgaccagcagctcaaggccggagacaacccgtacctcaagtacaaccacgccgacgccgagttccaggagcggctcaaagaagatacgtcttttgggggcaacctcgggcgagcagtcttccaggccaaaaagaggcttcttgaacctcttggtctggttgaggaagcggctaagacggctcctggaaagaagaggcctgtagagcagtctcctcaggaaccggactcctccgcgggtattggcaaatcgggtgcacagcccgctaaaaagagactcaatttcggtcagactggcgacacagagtcagtcccagaccctcaaccaatcggagaacctcccgcagccccctcaggtgtgggatctcttacaatggcttcaggtggtggcgcaccagtggcagacaataacgaaggtgccgatggagtgggtagttcctcgggaaattggcattgcgattcccaatggctgggggacagagtcatcaccaccagcacccgaacctgggccctgcccacctacaacaatcacctctacaagcaaatctccaacagcacatctggaggatcttcaaatgacaacgcctacttcggctacagcaccccctgggggtattttgacttcaacagattccactgccacttctcaccacgtgactggcagcgactcatcaacaacaactggggattccggcctaagcgactcaacttcaagctcttcaacattcaggtcaaagaggttacggacaacaatggagtcaagaccatcgccaataaccttaccagcacggtccaggtcttcacggactcagactatcagctcccgtacgtgctcgggtcggctcacgagggctgcctcccgccgttcccagcggacgttttcatgattcctcagtacgggtatctgacgcttaatgatggaagccaggccgtgggtcgttcgtccttttactgcctggaatatttcccgtcgcaaatgctaagaacgggtaacaacttccagttcagctacgagtttgagaacgtacctttccatagcagctacgctcacagccaaagcctggaccgactaatgaatccactcatcgaccaatacttgtactatctctcaaagactattaacggttctggacagaatcaacaaacgctaaaattcagtgtggccggacccagcaacatggctgtccagggaagaaactacatacctggacccagctaccgacaacaacgtgtctcaaccactgtgactcaaaacaacaacagcgaatttgcttggcctggagcttcttcttgggctctcaatggacgtaatagcttgatgaatcctggacctgctatggccagccacaaagaaggagaggaccgtttctttcctttgtctggatctttaatttttggcaaacaaggaactggaagagacaacgtggatgcggacaaagtcatgataaccaacgaagaagaaattaaaactactaacccggtagcaacggagtcctatggacaagtggccacaaaccaccagagtgcccaagcacgggcgcagaccggctgggttcaaaaccaaggaatacttccgggtatggtttggcaggacagagatgtgtacctgcaaggacccatttgggccaaaattcctcacacggacggcaactttcacccttctccgctgatgggagggtttggaatgaagcacccgcctcctcagatcctcatcaaaaacacacctgtacctgcggatcctccaacggccttcaacaaggacaagctgaactctttcatcacccagtattctactggccaagtcagcgtggagatcgagtgggagctgcagaaggaaaacagcaagcgctggaacccggagatccagtacacttccaactattacaagtctaataatgttgaatttgctgttaatactgaaggtgtatatagtgaaccccgccccattggcaccagatacctgactcgtaatctgtaattgcttgttaatcaataaaccgtttaattcgtttcagttgaactgcggcc

SEQ ID NO: 585 - DNA, 2601 bp, Artificial Sequence
  source: /note="Description of Artificial Sequence: Synthetic polynucleotide"
ccatcgacgtcagacgcggaagcttcgatcaactacgcggacaggtaccaaaacaaatgttctcgtcacgtgggcatgaatctgatgctgtttccctgcagacaatgcgagagactgaatcagaattcaaatatctgcttcactcacggtgtcaaagactgtttagagtgctttcccgtgtcagaatctcaacccgtttctgtcgtcaaaaaggcgtatcagaaactgtgctacattcatcacatcatgggaaaggtgccagacgcttgcactgcttgcgacctggtcaatgtggacttggatgactgtgtttctgaacaataaatgacttaaaccaggtatggctgccgatggttatcttccagattggctcgaggacaaccttagtgaaggaattcgcgagtggtgggctttgaaacctggagcccctcaacccaaggcaaatcaacaacatcaagacaacgctcgaggtcttgtgcttccgggttacaaataccttggacccggcaacggactcgacaagggggagccggtcaacgcagtagacgcggcggccctcgagcacgacaaggcctacgaccagcagctcaaggccggagacaacccgtacctcaagtacaaccacgccgacgccgagttccaggagcggctcaaagaagatacgtcttttgggggcaacctcgggcgagcagtcttccaggccaaaaagaggcttcttgaacctcttggtctggttgaggaagcggctaagacggctcctggaaagaagaggcctgtagagcagtctcctcaggaaccggactcctccgcgggtattggcaaatcgggtgcacagcccgctaaaaagagactcaatttcggtcagactggcgacacagagtcagtcccagaccctcaaccaatcggagaacctcccgcagccccctcaggtgtgggatctcttacaatggcttcaggtggtggcgcaccagtggcagacaataacgaaggtgccgatggagtgggtagttcctcgggaaattggcattgcgattcccaatggctgggggacagagtcatcaccaccagcacccgaacctgggccctgcccacctacaacaatcacctctacaagcaaatctccaacagcacatctggaggatcttcaaatgacaacgcctacttcggctacagcaccccctgggggtattttgacttcaacagattccactgccacttctcaccacgtgactggcagcgactcatcaacaacaactggggatttcggcctaagcgactcaacttcaagctcttcaacattcaggtcaaagaggttacggacaacaatggagtcaagaccatcgccaataaccttaccagcacggtccaggtcttcacggactcagactatcagctcccgtacgtgctcgggtcggctcacgagggctgcctcccgccgttcccagcggacgttttcatgattcctcagtacgggtatctgacgcttaatgatggaagccaggccgtgggtcgttcgtccttttactgcctggaatatttcccgtcgcaaatgctaagaacgggtaacaacttccagttcagctacgagtttgagaacgtacctttccatagcagctacgctcacagccaaagcctggaccgactaatgaatccactcatcgaccaatacttgtactatctctcaaagactattaacggttctggacagaatcaacaaacgctaaaattcagtgtggccggacccagcaacatggctgtccagggaagaaactacatacctggacccagctaccgacaacaacgtgtctcaaccactgtgactcaaaacaacaacagcgaatttgcttggcctggagcttcttcttgggctctcaatggacgtaatagcttgatgaatcctggacctgctatggccagccacaaagaaggagaggaccgtttctttcctttgtctggatctttaatttttggcaaacaaggaactggaagagacaacgtggatgcggacaaagtcatgataaccaacgaagaagaaattaaaactactaacccggtagcaacggagtcctatggacaagtggccacaaaccaccagagtgcccaagcacaggcgcagaccggctgggttcaaaaccaaggaatacttccgggtatggtttggcaggacagagatgtgtacctgcaaggacccatttgggccaaaattcctcacacggacggcaactttcacccttctccgctgatgggagggtttggaatgaagcacccgcctcctcagatcctcatcaaaaacacacctgtacctgcggatcctccaacggccttcaacaaggacaagctgaactctttcatcacccagtattctactggccaagtcagcgtggagatcgagtgggagctgcagaaggaaaacagcaagcgctggaacccggagatccagtacacttccaactattacaagtctaataatgttgaatttgctgttaatactgaaggtgtatatagtgaaccccgccccattggcaccagatacctgactcgtaatctgtaattgcttgttaatcaataaaccgtttaattcgtttcagttgaactgcggcc

SEQ ID NO: 586 - DNA, 2580 bp, Artificial Sequence
  source: /note="Description of Artificial Sequence: Synthetic polynucleotide"
ccatcgacgtcagacgcggaagcttcgatcaactacgcggacaggtaccaaaacaaatgttctcgtcacgtgggcatgaatctgatgctgtttccctgcagacaatgcgagagactgaatcagaattcaaatatctgcttcactcacggtgtcaaagactgtttagagtgctttcccgtgtcagaatctcaacccgtttctgtcgtcaaaaaggcgtatcagaaactgtgctacattcatcacatcatgggaaaggtgccagacgcttgcactgcttgcgacctggtcaatgtggacttggatgactgtgtttctgaacaataaatgacttaaaccaggtatggctgccgatggttatcttccagattggctcgaggacaaccttagtgaaggaattcgcgagtggtgggctttgaaacctggagcccctcaacccaaggcaaatcaacaacatcaagacaacgctcgaggtcttgtgcttccgggttacaaataccttggacccggcaacggactcgacaagggggagccggtcaacgcagcagacgcggcggccctcgagcacgacaaggcctacgaccagcagctcaaggccggagacaacccgtacctcaagtacaaccacgccgacgccgagttccaggagcggctcaaagaagatacgtcttttgggggcaacctcgggcgagcagtcttccaggccaaaaagaggcttcttgaacctcttggtctggttgaggaagcggctaagacggctcctggaaagaagaggcctgtagagcagtctcctcgggaaccggactcctccgcgggtattggcaaatcgggtgcacagcccgctaaaaagagactcaatttcggtcagactggcgacacagagtcagtcccagaccctcaaccaatcggagaacctcccgcagccccctcaggtgtgggatctcttacaatggcttcaggtggtggcgcaccagtggcagacaataacgaaggtgccgatggagtgggtagttcctcgggaaattggcattgcgattcccaatggctgggggacagagtcatcaccaccagcacccgaacctgggccctgcccacctacaacaatcacctctacaagcaaatctccaacagcacatctggaggatcttcaaatgacaacgcctacttcggctacagcaccccctgggggtattttgacttcaacagattccactgccacttctcaccacgtgactggcagcgactcatcaacaacaactggggattccggcctaagcgactcaacttcaagctcttcaacattcaggtcaaagaggttacggacaacaatggagtcaagaccatcgccaataaccttaccagcacggtccaggtcttcacggactcagactatcagctcccgtacgtgctcgggtcggctcacgagggctgcctcccgccgttcccagcggacgttttcatgattcctcagtacgggtatctgacgcttaatgatggaagccaggccgtgggtcgttcgtccttttactgcctggaatatttcccgtcgcaaatgctaagaacgggtaacaacttccagttcagctacgagtttgagaacgtacctttccatagcagctacgctcacagccaaagcctggaccgactaatgaatccactcatcgaccaatacttgtactatctctcaaagactattaacggttctggacagaatcaacaaacgctaaaattcagtgtggccggacccagcaacatggctgtccagggaagaaactacatacctggacccagctaccgacaacaacgtgtctcaaccactgtgactcaaaacaacaacagcgaatttgcttggcctggagcttcttcttgggctctcaatggacgtaatagcttgatgaatcctggacctgctatggccagccacaaagaaggagaggaccgtttctttcctttgtctggatctttaatttttggcaaacaaggaactggaagagacaacgtggatgcggacaaagtcatgataaccaacgaagaagaaattaaaactactaacccggtagcaacggagtcctatggacaagtggccacaaaccaccagagtgcccaagcacaggcgcagaccggctgggttcaaaaccaaggaatacttccgggtatggtttggcaggacagagatgtgtacctgcaaggacccatttgggccaaaattcctcacacggacggcaactttcacccttctccgctgatgggagggtttggaatgaagcacccgcctcctcagatcctcatcaaaaacacacctgtacctgcggatcctccaacggccttcaacaaggacaagctgaactctttcatcacccagtattctactggccaagtcagcgtggagatcgagtgggaactgcagaaggaaaacagcaagcgctggaacccggagatccagtacacttccaactattacaagtctaataatgttgaatttgctgttaatactgaaggtgtatatagtgaaccccgccccattggcaccagatacctgactcgtaatctgtaattgcttgttaatcaataaaccgtttaatt

SEQ ID NO: 587 - DNA, 2601 bp, Artificial Sequence
  source: /note="Description of Artificial Sequence: Synthetic polynucleotide"
ccatcgacgtcagacgcggaagcttcgatcaactacgcggacaggtaccaaaacaaatgttctcgtcacgtgggcatgaatctgatgctgtttccctgcagacaatgcgagagactgaatcagaattcaaatatctgcttcactcacggtgtcaaagactgtttagagtgctttcccgtgtcagaatctcaacccgtttctgtcgtcaaaaaggcgtatcagaaactgtgctacattcatcacatcatgggaaaggtgccagacgcttgcactgcttgcgacctggtcaatgtggacttggatgactgtgtttctgaacaataaatgacttaaaccaggtatggctgccgatggttatcttccagattggctcgaggacaaccttagtgaaggaattcgcgagtggtgggctttgaaacctggagcccctcaacccaaggcaaatcaacaacatcaagacaacgctcgaggtcttgtgcttccgggttacaaataccttggacccggcaacggactcgacaagggggagccggtcaacgcagcagacgcggcggccctcgagcacgacaaggcctacgaccagcagctcaaggccggagacaacccgtacctcaagtacaaccacgccgacgccgagttccaggagcggctcaaagaagatacgtcttttgggggcaacctcgggcgagcagtctttcaggccaaaaagaggcttcttgaacctcttggtctggttgaggaagcggctaagacggctcctggaaagaagaggcctgtagagcagtctcctcaggaaccggactcctccgcgggtattggcaaatcgggtgcacagcccgctaaaaagagactcaatttcggtcagactggcgacacagagtcagtcccagaccctcaaccaatcggagaacctcccgcagccccctcaggtgtgggatctcttacaatggcttcatgtggtggcgcaccagtggcagacaataacgaaggtgccgatggagtgggtagttcctcgggaaattggcattgcgattcccaatggctgggggacagagtcatcaccaccagcacccgaacctgggccctgcccacctacaacaatcacctctacaagcaaatctccaacagcacatctggaggatcttcaaatgacaacgcctacttcggctacagcaccccctgggggtattttgacttcaacagattccactgccacttctcaccacgtgactggcagcgactcatcaacaacaactggggattccggcctaagcgactcaacttcaagctcttcaacattcaggtcaaagaggttacggacaacaatggagtcaagaccatcgccaataaccttaccagcacggtccaggtcttcacggactcagactatcagctcccgtacgtgctcgggtcggctcacgagggctgcctcccgccgttcccagcggacgttttcatgattcctcagtacgggtatctgacgcttaatgatggaagccaggccgtgggtcgttcgtccttttactgcctggaatatttcccgtcgcaaatgctaagaacgggtaacaacttccagttcagctacgagtttgagaacgtacctttccatagcagctacgctcacagccaaagcctggaccgactaatgaatccactcatcgaccaatacttgtactatctctcaaagactattaacggttctggacagaatcaacaaacgctaaaattcagtgtggccggacccagcaacatggctgtccagggaagaaactacatacctggacccagctaccgacaacaacgtgtctcaaccactgtgactcaaaacaacaacagcgaatttgcttggcctggagcttcttcttgggctctcaatggacgtaatagcttgatgaatcctggacctgctatggccagccacaaagaaggagaggaccgtttctttcctttgtctggatctttaatttttggcaaacaaggaactggaagagacaacgtggatgcggacaaagtcatgataaccaacgaagaagaaattaaaactactaacccggtagcaacggagtcctatggacaagtggccacaaaccaccagagtgcccaagcacaggcgcagaccggctgggttcaaaaccaaggaatacttccgggtatggtttggcaggacagagatgtgtacctgcaaggacccatttgggccaaaattcctcacacggacggcaactttcacccttctccgctgatgggagggtttggaatgaagcacccgcctcctcagatcctcatcaaaaacacacctgtacctgcggatcctccaacggccttcaacaaggacaagctgaactctttcatcacccagtattctactggccaagtcagcgtggagatcgagtgggagctgcagaaggaaaacagcaagcgctggaacccggagatccagtacacttccaactattacaagtctaataatgttgaatttgctgttaatactgaaggtgtatatagtgaaccccgccccattggcaccagatacctgactcgtaatctgtaattgcttgttaatcaataaaccgtttaattcgtttcagttgaactgcggcc

SEQ ID NO: 588 - DNA, 2601 bp, Artificial Sequence
  source: /note="Description of Artificial Sequence: Synthetic polynucleotide"
ccatcgacgtcagacgcggaagcttcgatcaactacgcggacaggtaccaaaacaaatgttctcgtcacgtgggcatgaatctgatgctgtttccctgcagacaatgcgagagactgaatcagaattcaaatatctgcttcactcacggtgtcaaagactgtttagagtgctttcccgtgtcagaatctcaacccgtttctgtcgtcaaaaaggcgtatcagaaactgtgctacattcatcacatcatgggaaaggtgccagacgcttgcactgcttgcgacctggtcaatgtggacttggatgactgtgtttctgaacaataaatgacttaaaccaggtatggctgccgatggttatcttccagattggctcgaggacaaccttagtgaaggaattcgcgagtggtgggctttgaaacctggagcccctcaacccaaggcaaatcaacaacatcaagacaacgctcgaggtcttgtgcttccgggttacaaataccttggacccggcaacggactcgacaagggggagccgatcaacgcagcagacgcggcggccctcgagcacgacaaggcctacgaccagcagctcaaggccggagacaacccgtacctcaagtacaaccacgccgacgccgagttccaggagcggctcaaagaagatacgtcttttgggggcaacctcgggcgagcagtcttccaggccaaaaagaggcttcttgaacctcttggtctggttgaggaagcggctaagacggctcctggaaagaagaggcctgtagagcagtctcctcaggaaccggactcctccgcgggtattggcaaatcgggtgcacagcccgctaaaaagagactcaatttcggtcagactggcgacacagagtcagtcccagaccctcaaccaatcggagaacctcccgcagccccctcaggtgtgggatctcttacaatggcttcaggtggtggcgcaccagtggcagacaataacgaaggtgccgatggagtgggtagttcctcgggaaattggcattgcgattcccaatggctgggggacagagtcatcaccaccagcacccgaacctgggccctgcccacctacaacaatcacctctacaagcaaatctccaacagcacatctggaggatcttcaaatgacaacgcctacttcggctacagcaccccctgggggtattttgacttcaacagattccactgccacttctcaccacgtgactggcagcgactcatcaacaacaactggggattccggcctaagcgactcaacttcaagctcttcaacattcaggtcaaagaggttacggacaacaatggagtcaagaccatcgccaataaccttaccagcacggtccaggtcttcacggactcagactatcagctcccgtacgtgctcgggtcggctcacgagggctgcctcccgccgttcccagcggacgttttcatgattcctcagtacgggtatctgacgcttaatgatggaagccaggccgtgggtcgttcgtccttttactgcctggaatatttcccgtcgcaaatgctaagaacgggtaacaacttccagttcagctacgagtttgagaacgtacctttccatagcagctacgctcacagccaaagcctggaccgactaatgaatccactcatcgaccaatacttgtactatctctcaaagactattaacggttctggacagaatcaacaaacgctaaaattcagtgtggccggacccagcaacatggctgtccagggaagaaactacatacctggacccagctaccgacaacaacgtgtctcaaccactgtgactcaaaacaacaacagcgaatttgcttggcctggagcttcttcttgggctctcaatggacgtaatagcttgatgaatcctggacctgctatggccagccacaaagaaggagaggaccgtttctttcctttgtctggatctttaatttttggcaaacaaggaactggaagagacaacgtggatgcggacaaagtcatgataaccaacgaagaagaaattaaaactactaacccggtagcaacggagtcctatggacaagtggccacaaaccaccagagtgcccaagcacaggcgcagaccggctgggttcaaaaccaaggaatacttccgggtatggtttggcaggacagagatgtgtacctgcaaggacccatttgggccaaaattcctcacacgtacggcaactttcacccttctccgctgatgggagggtttggaatgaagcacccgcctcctcagatcctcatcaaaaacacacctgtacctgcggatcctccaacggccttcaacaaggacaagctgaactctttcatcacccagtattctactggccaagtcagcgtggagatcgagtgggagctgcagaaggaaaacagcaagcgctggaacccggagatccagtacacttccaactattacaagtctaataatgttgaatttgctgttaatactgaaggtgtatatagtgaaccccgccccattggcaccagatacctgactcgtaatctgtaattgcttgttaatcaataaaccgtttaattcgtttcagttgaactgcggcc

SEQ ID NO: 589 - DNA, 2601 bp, Artificial Sequence
  source: /note="Description of Artificial Sequence: Synthetic polynucleotide"
ccatcgacgtcagacgcggaagcttcgatcaactacgcggacaggtaccaaaacaaatgttctcgccacgtgggcatgaatctgatgctgtttccctgcagacaatgcgagagactgaatcagaattcaaatatctgcttcactcacggtgtcaaagactgtttagagtgctttcccgtgtcagaatctcaacccgtttctgtcgtcaaaaaggcgtatcagaaactgtgctacattcatcacatcatgggaaaggtgccagacgcttgcactgcttgcgacctggtcaatgtggacttggatgactgtgtttctgaacaataaatgacttaaaccaggtatggctgccgatggttatcttccagattggctcgaggacaaccttagtgaaggaattcgcgagtggtgggctttgaaacctggagcccctcaacccaaggcaaatcaacaacatcaagacaacgctcgaggtcttgtgcttccgggttacaaataccttggacccggcaacggactcgacaagggggagccggtcaacgcagcagacgcggcggccctcgagcacgacaaggcctacgaccagcagctcaaggccggagacaacccgtacctcaagtacaaccacgccgacgccgagttccaggagcggctcaaagaagatacgtcttttgggggcaacctcgggcgagcagtcttccaggccaaaaagaggcttcttgaacctcttggtctggttgaggaagcggctaagacggctcctggaaagaagaggcctgtagagcagtctcctcaggaaccggactcctccgcgggtattggcaaatcgggtgcacagcccgctaaaaagagactcaatttcggtcagactggcgacacagagtcagtcccagaccctcaaccaatcggagaacctcccgctgccccctcaggtgtgggatctcttacaatggcttcaggtggtggcgcaccagtggcagacaataacgaaggtgccgatggagtgggtagttcctcgggaaattggcattgcgattcccaatggctgggggacagagtcatcaccaccagcacccgaacctgggccctgcccacctacaacaatcacctctacaagcaaatctccaacagcacatctggaggatcttcaaatgacaacgcctacttcggctacagcaccccctgggggtattttgacttcaacagattccactgccacttctcaccacatgactggcagcgactcatcaacaacaactggggattccggcctaagcgactcaacttcaagctcttcaacattcaggtcaaagaggttacggacaacaatggagtcaagaccatcgccaataaccttaccagcacggtccaggtcttcacggactcagactatcagctcccgtacgtgctcgggtcggctcacgagggctgcctcccgccgttcccagcggacgttttcatgattcctcagtacgggtatctgacgcttaatgatggaagccaggccgtgggtcgttcgtccttttactgcctggaatatttcccgtcgcaaatgctaagaacgggtaacaacttccagttcagctacgagtttgagaacgtacctttccatagcagctacgctcacagccaaagcctggaccgactaatgaatccactcatcgaccaatacttgtactatctctcaaagactattaacggttctggacagaatcaacaaacgctaaaattcaatgtggccggacccagcaacatggctgtccagggaagaaactacatacctggacccagctaccgacaacaacgtgtctcaaccactgtgactcaaaacaacaacagcgaatttgcctggcctagagcttcttcttgggctctcaatggacgtaatagcttgatgaatcctggacctgctatggccagccacaaagaaggagaggaccgtttctttcctttgtctggatctttaatttttggcaaacaaggaactggaagagacaacgtggatgcggacaaagtcatgataaccaacgaagaagaaattaaaactactaacccggtagcaacggagtcctatggacaagtggccacaaaccaccagagtgcccaagcacaggcgcagaccggctgggttcaaaaccaaggaatacttccgggtatggtttggcaggacagagatgtgtacctgcaaggacccatttgggccaaaattcctcacacggacggcaactttcacccttctccgctgatgggagggtttggaatgaagcacccgcctcctcagatcctcatcaaaaacacacctgtacctgcggatcctccaacggccttcaacaaggacaagctgaactctttcatcacccagtattctactggccaagtcagcatggagatcgagtgggagctgcagaaggaaaacagcaagcgctggaacccggagatccagtacacttccaactattacaagtctaataatgttgaatttgctgttaatactgaaggtgtatatagtgaaccccgccccattggcaccagatacctgactcgtaatctgtaattgcttgttaatcaataaaccgtttaattcgtttcagttgaactgcggcc

SEQ ID NO: 590 - DNA, 2601 bp, Artificial Sequence
  source: /note="Description of Artificial Sequence: Synthetic polynucleotide"
ccatcgacgtcagacgcggaagcttcgatcaactacgcggacaggtaccaaaacaaatgttctcgtcacgtgggcatgaatctgatgctgtttccctgcagacaatgcgagagactgaatcagaattcaaatatctgcttcactcacggtgtcaaagactgtttagagtgctttcccgtgtcagaatctcaacccgtttctgtcgtcaaaaaggcgtatcagaaactgtgctacattcatcacatcatgggaaaggtgccagacgcttgcactgcttgcgacctggtcaatgtggacttggatgactgtgtttctgaacaataaatgacttaaaccaggtatggctgccgatggttatcttccagattggctcgaggacaaccttagtgaaggaattcgcgagtggtgggctttgaaacctggagcccctcaacccaaggcaaatcaacaacatcaagacaacgctcgaggtcttgtgcttccgggttacaaataccttggacccggcaacggactcgacaagggggagccggtcaacgcagcagacgcggcggccctcgagcacgacaaggcctacgaccagcagctcaaggccggagacaacccgtacctcaagtacaaccacgccgacgccgagttccaggagcggctcaaagaagatacgtcttttgggggcaacctcgggcgagcagtcttccaggccaaaaagaggcttcttgaacctcttggtctggttgaggaagcggctaagacggctcctggaaagaagaggcctgtagagcagtctcctcaggaaccggactcctccgcgggtattggcaaatcgggtgcacagcccgctaaaaagagactcaatttcggtcagactggcgacacagagtcagtcccagaccctcaaccaatcggagaacctcccgcagccccctcaggtgtgggatctcttacaatggcttcaggtggtggcgcaccagtggcagacaataacgaaggtgccgatggagtgggtagttcctcgggaaattggcattgcgattcccaatggctgggggacagagtcatcaccaccagcacccgaacctgggccctgcccacctacaacaatcacctctacaagcaaatctccaacagcacatctggaggatcttcaaatgacaacgcctacttcggctacagcaccccctgggggtattttgacttcaacagattccactgccacttctcaccacgtgactggcagcgactcatcaacaacaactggggattccggcctaagcgactcaacttcaagctcttcaacattcaggtcaaagaggttacggacaacaatggagtcaagaccatcgccaataaccttaccagcacggtccaggtcttcacggactcagactatcagctcccgtacgtgctcgggtcggctcacgagggctgcctcccgccgttcccagcggacgttttcatgattcctcagtacgggtatctgacgcttaatgatggaagccaggccgtgggtcgttcgtccttttactgcctggaatatttcccgtcgcaaatgctaagaacgggtaacaacttccagttcagctacgagtttgagaacgtacctttccatagcagctacgctcacagccaaagcctggaccgactaatgaatccactcatcgaccaatacttgtactatctctcaaagactattaacggttctggacagaatcaacaaacgctaaaattcagtgtggccggacccagcaacatggctgtccagggaagaaactacatacctggacccagctaccgacaacaacgtgtctcaaccactgtgactcaaaacaacaacagcgaatttgcttggcctagagcttcttcttgggctctcaatggacgtaatagcttgatgaatcctggacctgctatggccagccacaaagaaggagaggaccgtttctttcctttgtctggatctttaatttttggcaaacaaggaactggaagagacaacgtggatgcggacaaagtcatgataaccaacgaagaagaaattaaaactactaacccggtagcaacggagtcctatggacaagtggccacaaaccaccagagtgcccaagcacaggcgcagaccggctgggttcaaaaccaaggaatacttccgggtatggtttggcaggacagagatgtgtacctgcaaggacccatttgggccaaaattcctcacacggacggcaactttcacccttctccgctgatgggagggtttggaatgaagcacccgcctcctcagatcctcatcaaaaacacacctgtacctgcggatcctccaacggccttcaacaaggacaagctgaactctttcatcacccagtattctactggccaagtcagcgtggagatcgagtgggagctgcagaaggaaaacagcaagcgctggaacccggagatccagtacacttccaactattacaagtctaataatgttgaatttgctgttaatactgaaggtgtatatagtgaaccccgccccattggcaccagatacctgactcgtaatctgtaattgcttgttaatcaataaaccgtttaattcgtttcagttgaactgcggcc

SEQ ID NO: 591 - DNA, 2601 bp, Artificial Sequence
  source: /note="Description of Artificial Sequence: Synthetic polynucleotide"
ccatcgacgtcagacgcggaagcttcgatcaactacgcggacaggtaccaaaacaaatgttctcgtcacgtgggcatgaatctgatgctgtttccctgcagacaatgcgagagactgaatcagaattcaaatatctgcttcactcacggtgtcaaagactgtttagagtgctttcccgtgtcagaatctcaacccgtttctgtcgtcaaaaaggcgtatcagaaactgtgctacattcatcacatcatgggaaaggtgccagacgcttgcactgcttgcgacctggtcaatgtggacttggatgactgtgtttctgaacaataaatgacttaaaccaggtatggctgccgatggttatcttccagattggctcgaggacaaccttagtgaaggaattcgcgagtggtgggctttgaaacctggagcccctcaacccaaggcaaatcaacaacatcaagacaacgctcgaggtcttgtgcttccgggttacaaataccttggacccggcaacggactcgacaagggggagccggtcaacgcagcagacgcggcggccctcgagcacgacaaggcctacgaccagcagctcaaggccggagacaacccgtacctcaagtacaaccacgccgacgccgagttccaggagcggctcaaagaagatacgtcttttgggggcaacctcgggcgagcagtcttccaggccaaaaagaggcttcttgaacctcttggtctggttgaggaagcggctaagacggctcctggaaagaagaggcctgtagagcagtctcctcaggaaccggactcctccgcgggtattggcaaatcgggtgcacagcccgctaaaaagagactcaatttcggtcagactggcgacacagagtcagtcccagaccctcaaccaatcggagaacctcccgcagccccctcaggtgtgggatctcttacaatggcttcaggtggtggcgcaccagtggcagacaataacgaaggtgccgatggagtgggtagttcctcgggaaattggcattgcgattcccaatggctgggggacagagtcatcaccaccagcacccgaacctgggccctgcccacctacaacaatcacctctacaagcaaatctccaacagcacatctggaggatcttcaaatgacaacgcctacttcggctacagcaccccctgggggtattttgacttcaacagattccactgccacttctcaccacgtgactggcagcgactcatcaacaacaactggggattccggcctaagcgactcaacttcaagctcttcaacattcaggtcaaagaggttacggacaacaatggagtcaagaccatcgccaataaccttaccagcacggtccaggtcttcacggactcagactatcagctcccgtacgtgctcgggtcggctcacgagggctgcctcccgccgttcccagcggacgttttcatgattcctcagtacgggtatctgacgcttaatgatggaagccaggccgtgggtcgttcgtccttttactgcctggaatatttcccgtcgcaaatgctaagaacgggtaacaacttccagttcagctacgagtttgagaacgtacctttccatagcagctacgctcacagccaaagcctggaccgactaatgaatccactcatcgaccaatacttgtactatctctcaaagactattaacggttctggacagaatcaacaaacgctaaaattcagtgtggccggacccagcaacatggctgtccagggaagaaactacatacctggacccagctaccgacaacaacgtgtctcaaccactgtgactcaaaacaacaacagcgaatttgcttggcctagagcttcttcttgggctctcaatggacgtaatagcttgatgaatcctggacctgctatggccagccacaaagaaggagaggaccgtttctttcctttgtctggatctttaatttttggcaaacaaggaactggaagagacaacgtggatgcggacaaagtcatgataaccaacgaagaagaaattaaaactactaacccggtagcaacggagtcctatggacaagtggccacaaaccaccagagtgcccaagcacaggcgcagaccggctgggttcaaaaccaaggaatacttccgggtatggtttggcaggacagagatgtgtacctgcaaggacccatttgggccaaaattcctcacacggacggcaactttcacccttctccgctgatgggagggtttggaatgaagcacccgcctcctcagatcctcatcaaaaacacacctgtacctgcggatcctccaacggccttcaacaaggacaagctgaactctttcatcacccagtattctactggccaagtcagcgtggagatcgagtgggagcggcagaaggaaaacagcaagcgctggaacccggagatccagtacacttccaactattacaagtctaataatgttgaatttgctgttaatactgaaggtgtatatagtgaaccccgccccattggcaccagatacctgactcgtaatctgtaattgcttgttaatcaataaaccgtttaattcgtttcagttgaactgcggcc

SEQ ID NO: 592 - DNA, 2601 bp, Artificial Sequence
  source: /note="Description of Artificial Sequence: Synthetic polynucleotide"
ccatcgacgtcagacgcggaagcttcgatcaactacgcggacaggtaccaaaacaaatgttctcgtcacgtgggcatgaatctgatgctgtttccctgcagacaatgcgagagactgaatcagaattcaaatatctgcttcactcacggtgtcaaagactgtttagagtgctttcccgtgtcagaatctcaacccgtttctgtcgtcaaaaaggcgtatcagaaactgtgctacattcatcacatcatgggaaaggtgccagacgcttgcactgcttgcgacctggtcaatgtggacttggatgactgtgtttctgaacaataaatgacttaaaccaggtatggctgccgatggttatcttccagattggctcgaggacaaccttagtgaaggaattcgcgagtggtgggctttgaaacctggagcccctcaacccaaggcaaatcaacaacatcaagacaacgctcgaggtcttgtgcttccgggttacaaataccttggacccggcaacggactcgacaagggggagccggtcaacgcagcagacgcggcggccctcgagcacgacaaggcctacgaccagcagctcaaggccggagacaacccgtacctcaagtacaaccacgccgacgccgagttccaggagcggctcaaagaagatacgtcttttgggggcaacctcgggcgagcagtcttccaggccaaaaagaggcttcttgaacctcttggtctggttgaggaagcggctaagacggctcctggaaagaagaggcctgtagagcagtctcctcaggaaccggactcctccgcgggtattggcaaatcgggtgcacagcccgctaaaaagagactcaatttcggtcagactggcgacacagagtcagtcccagaccctcaaccaatcggagaacctcccgcagccccctcaggtgtgggatctcttacaatggcttcaggtggtggcgcaccagtggcagacaataacgaaggtgccgatggagtgggtagttcctcgggaaattggcattgcgattcccaatggctgggggacagagtcatcaccaccagcacccgaacctgggccctgcccacctacaacaatcacctctacaagcaaatctccaacagcacatctggaggatcttcaaatgacaacgcctacttcggctacagcaccccctgggggtattttgacttcaacagattccactgccacttctcaccacgtgactggcagcgactcatcaacaacaactggggattccggcctaagcgactcaacttcaagctcttcaacattcaggtcaaagaggttacggacaacaatggagtcaagaccatcgccaataaccttaccagcacggtccaggtcttcgcggactcagactatcagctcccgtacgtgctcgggtcggctcacgagggctgcctcccgccgttcccagcggacgttttcatgattcctcagtacgggtatctgacgcttaatgatggaagccaggccgtgggtcgttcgtccttttactgcctggaatatttcccgtcgcaaatgctaagaacgggtaacaacttccagttcagctacgagtttgagaacgtacctttccatagcagctacgctcacagccaaagcctggaccgactaatgaatccactcatcgaccaatacttgtactatctctcaaagactattaacggttctggacagaatcaacaaacgctaaaattcagtgtggccggacccagcaacatggctgtccagggaagaaactacatacctggacccagctaccgacaacaacgtgtctcaaccactgtgactcaaaacaacaacagcgaatttgcttggcctagagcttcttcttgggctctcaatggacgtaatagcttgatgaatcctggacctgctatggccagccacaaagaaggagaggaccgtttctttcctttgtctggatctttaatttttggcaaacaaggaactggaagagacaacgtggatgcggacaaagtcatgataaccaacgaagaagaaattaaaactactaacccggtagcaacggagtcctatggacaagtggccacaaaccaccagagtgcccaagcacaggcgcagaccggctgggttcaaaaccaaggaatacttccgggtatggtttggcaggacagagatgtgtacctgcaaggacccatttgggccaaaattcctcacacggacggcaactttcacccttctccgctgatgggagggtttggaatgaagcacccgcctcctcagatcctcatcaaaaacacacctgtacctgcggatcctccaacggccttcaacaaggacaagctgaactctttcatcacccagtattctactggccaagtcagcgtggagatcgagtgggagctgcagaaggaaaacagcaagcgctggaacccggagatccagtacacttccaactattacaagtctaataatgttgaatttgctgttaatactgaaggtgtatatagtgaaccccgccccattggcaccagatacctgactcgtaatctgtaattgcttgttaatcaataaaccgtttaattcgtttcagttgaactgcggcc

SEQ ID NO: 593 - DNA, 2601 bp, Artificial Sequence
  source: /note="Description of Artificial Sequence: Synthetic polynucleotide"
ccatcgacgtcagacgcggaagcttcgatcaactacgcggacaggtaccaaaacaaatgttctcgtcacgtgggcatgaatctgatgctgtttccctgcagacaatgcgagagactgaatcagaattcaaatatctgcttcactcacggtgtcaaagactgtttagagtgctttcccgtgtcagaatctcaacccgtttctgtcgtcaaaaaggcgtatcagaaactgtgctacattcatcacatcatgggaaaggtgccagacgcttgcactgcttgcgacctggtcaatgtggacttggatgactgtgtttctgaacaataaatgacttaaaccaggtatggctgccgatggttatcttccagattggctcgaggacaaccttagtgaaggaattcgcgagtggtgggctttgaaacctggagcccctcaacccaaggcaaatcaacaacatcaagacaacgctcgaggtcttgtgcttccgggttacaaataccttggacccggcaacggactcgacaagggggagccggtcaacgcagcagacgcggcggccctcgagcacgacaaggcctacgaccagcagctcaaggccggagacaacccgtacctcaagtacaaccacgccgacgccgagttccaggagcggctcaaagaagatacgtcttttgggggcaacctcgggcgagcagtcttccaggccaaaaagaggcttcttgaacctcttggtctggttgaggaagcggctaagacggctcctggaaagaagaggcctgtagagcagtctcctcaggaaccggactcctccgcgggtattggcaaatcgggtgcacagcccgctaaaaagagactcaatttcggtcagactggcgacacagagtcagtcccagaccctcaaccaatcggagaacctcccgcagccccctcaggtgtgggatctcttacaatggcttcaggtggtggcgcaccagtggcagacaataacgaaggtgccgatggagtgggtagttcctcgggaaattggcattgcgattcccaatggctgggggacagagtcatcaccaccagcacccgaacctgggccctgcccacctacaacaatcacctctacaagcaaatctccaacagcacatctggaggatcttcaaatgacaacgcctacttcggctacagcaccccctgggggtattttgacttcaacagattccactgccacttctcaccacgtgactggcagcgactcatcaacaacaactggggattccggcctaagcgactcaacttcaagctcttcaacattcaggtcaaagaggttacggacaacaatggagtcaagaccatcgccaataaccttaccagcacggtccaggtcttcacggactcagactatcagctcccgtacgtgctcgggtcggctcacgagggctgcctcccgccgttcccagcggacgttttcatgattcctcagtacgggtatctgacgcttaatgatggaagccaggccgtgggtcgttcgtccttttactgcctggaatatttcccgtcgcaaatgctaagaacgggtaacaacttccagttcagctacgagtttgagaacgtacctttccatagcagctacgctcacagccaaagcctggaccgactaatgaatccactcatcgaccaatacttgtactatctctcaaagactattaacggttctggacagaatcaacaaacgctaaaattcagtgtggccggacccagcaacatggctgtccagggaagaaactacatacctggacccagctaccgacaacaacgtgtctcaaccactgtgactcaaaacaacaacagcgaaattgcttggcctagagcttcttcttgggctctcaatggacgtaatagcttgatgaatcctggacctgctatggccagccacaaagaaggagaggaccgtttctttcctttgtctggatctttaatttttggcaaacaaggaactggaagagacaacgtggatgcggacaaagtcatgataaccaacgaagaagaaattaaaactactaacccagtagcaacggagtcctatggacaagtggccacaaaccaccagagtgcccaagcacaggcgcagaccggctgggttcaaaaccaaggaatacttccgggtatggtttggcaggacagagatgtgtacctgcaaggacccatttgggccaaaattcctcacacggacggcaactttcacccttctccgctgatgggagggtttggaatgaagcacccgcctcctcagatcctcatcaaaaacacacctgtacctgcggatcctccaacggccttcaacaaggacaagctgaactctttcatcacccagtattctactggccaagtcagcgtggagatcgagtgggagctgcagaaggaaaacagcaagcgctggaacccggagatccagtacacttccaactattgcaagtctaataatgttgaatttgctgttaatactgaaggtgtatatagtgaaccccgccccattggcaccagatacctgactcgtaatctgtaattgcttgttaatcaataaaccgtttaattcgtttcagttgaactgcggcc

SEQ ID NO: 594 - DNA, 2601 bp, Artificial Sequence
  source: /note="Description of Artificial Sequence: Synthetic polynucleotide"
ccatcgacgtcagacgcggaagcttcgatcaactacgcggacaggtaccaaaacaaatgttctcgtcacgtgggcatgaatctgatgctgtttccctgcagacaatgcgagagactgaatcagaattcaaatatctgcttcactcacggtgtcaaagactgtttagagtgctttcccgtgtcagaatctcaacccgtttctgtcgtcaaaaaggcgtatcagaaactgtgctacattcatcacatcatgggaaaggtgccagacgcttgcactgcttgcgacctggtcaatgtggacttggatgtctgtgtttctgaacaataaatgacttaaaccaggtatggctgccgatggttatcttccagattggctcgaggacaaccttagtgaaggaattcgcgagtggtgggctttgaaacctggagcccctcaacccaaggcaaatcaacaacatcaagacaacgctcgaggtcttgtgcttccgggttacaaataccttggacccggcaacggactcgataagggggagccggtcaacgcagcagacgcggcggccctcgagcacgacaaggcctacgaccagcagctcaaggccggagacaacccgtacctcaagtacaaccacgccgacgccgagttccaggagcggctcaaagaagatacgtcttttgggggcaacctcgggcgagcagtcttccaggccaaaaagaggcttcttgaacctcttggtctggttgaggaagcggctaagacggctcctggaaagaagaggcctgtagagcagtctcctcaggaaccggactcctccgcgggtattggcaaatcgggtgcacagcccgctaaaaagagactcaatttcggtcagactggcgacacagagtcagtcccagaccctcaaccaatcggagaacctcccgcagccccctcaggtgtgggatctcttacaatggcttcaggtggtggcgcaccagtggcagacaataacgaaggtgccgatggagtgggtagttcctcgggaaattggcattgcgattcccaatggctgggggacagagtcatcaccaccagcacccgaacctgggccctgcccacctacaacaatcacctctacaagcaaatctccaacagcacatctggaggatcttcaaatgacaacgcctacttcggctacagcaccccctgggggtattttgacttcaacagattccactgccacttctcaccacgtgactggcagcgactcatcaacaacaactggggattccggcctaagcgactcaacttcaagctcttcaacattcaggtcaaagaggttacggacaacaatggagtcaagaccatcgccaataaccttaccagcacggtccaggtcttcacggactcagactatcagctcccgtacgtgctcgggtcggctcacgagggctgcctcccgccgttcccagcggacgttttcatgattcctcagtacgggtatctgacgcttaatgatggaagccaggccgtgggtcgttcgtccttttactgcctggaatatttcccgtcgcaaatgctaagaacgggtaacaacttccagttcagctacgagtttgagaacgtacctttccatagcagctacgctcacagccaaagcctggaccgactaatgaatccactcatcgaccaatacttgtactatctctcaaagactattaacggttctggacagaatcaacaaacgctaaaattcagtgtggccggacccagcaacatggctgtccagggaagaaactacatacctggacccagctaccgacaacaacgtgtctcaaccactgtgactcaaaacaacaacagcgaatttgcttggcctagagcttcttcttgggctctcaatggacgtaatagcttgatgaatcctggacctgctatggccagccacaaagaaggagaggaccgtttctttcctttgtctggatctttaatttttggcaaacaaggaactggaagagacaacgtggatgcggacaaagtcatgataaccaacgaagaagaaattaaaactactaacccggtagcaacggagtcctatggacaagtggccacaaaccaccagagtgcccaagcacaggcgcagaccggctgggttcaaaaccaaggaatacttccgggtatggtttggcaggacagagatgtgtacctgcaaggacccatttgggccaaaattcctcacacggacggcaactttcacccttctccgctgatgggagggtttggaatgaagcacccgcctcctcagatcctcatcaaaaacacacctgtacctgcggatcctccaacggccttcaacaaggacaagctgaactctttcatcacccagtattctactggccaagtcagcgtggagatcgagtgggagctgcagaaggaaaacagcaagcgctggaacccggagatccagtacacttccaactattacaagtctaataatgttgaatttgctgttaatactgaaggtgtatatagtgaaccccgccccattggcaccagatacctgactcgtaatctgtaattgcttgttaatcaataaaccgtttaattcgtttcagttgaactgcggcc

SEQ ID NO: 595 - protein, 736 aa, Artificial Sequence
  source: /note="Description of Artificial Sequence: Synthetic polypeptide"
MTADGYLPDWLEDNLSEGIREWWALKPGAPQPKANQQHQDNARGLVLPGYKYLGPGNGLDKGEPVNAADAAALEHDKAYDQQLKAGDNPYLKYNHADAEFQERLKEDTSFGGNLGRAVFQAKKRLLEPLGLVEEAAKTAPGKKRPVEQSPQEPDSSAGIGKSGAQPAKKRLNFGQTGDTESVPDPQPIGEPPAAPSGVGSLTMASGGGAPVADNNEGADGVGSSSGNWHCDSQWLGDRVITTSTRTWALPTYNNHLYKQISNSTSGGSSNDNAYFGYSTPWGYFDFNRFHCHFSPRDWQRLINNNWGFRPKQLNFKLFNIQVKEVTDNNGVKTIANNLTSTVQVFTDSDYQLPYVLGSAHEGCLPPFPADVFMIPQYGYLTLNDGSQAVGRSSFYCLEYFPSQMLRTGNNFQFSYEFENVPFHSSYAHSQSLDRLMNPLIDQYLYYLSKTINGSGQNQQTLKFSVAGPSNMAVQGRNYIPGPSYRQQRVSTTVTQNNNSEFAWPGASSWALNGRNSLMNPGPAMASHKEGEDRFFPLSGSLIFGKQGTGRDNVDADKVMITNEEEIKTTNPVATESYGQVATNHQSAQAQAQTGWVQNQGILPGMVWQDRDVYLQGPIWAKIPHTDGNFHPSPLMGGFGMKHPPPQILIKNTPVPADPPTAFNKDKLNSFITQYSTGQVSVEIEWELQKENSKRWNPEIQYTSNYYKSNNVEFAVNTEGVYSEPRPIGTRYLTRNL

SEQ ID NO: 596 - protein, 736 aa, Artificial Sequence
  source: /note="Description of Artificial Sequence: Synthetic polypeptide"
MAADGYLPDWLEDNLSEGIREWWALKPGAPQPKANQQHQDNARGLVLPGYKYLGPGNGLDKGEPVNAADAAALEHDKAYDQQLKAGDNPYLKYNHADAEFQERLKEDTSFGGNLGRAVFQAKKRLLEPLGLVEEAAKTAPGKKRPVEQSPQEPDSSAGIGKSGAQPAKKRLNFGQTGDTESVPDPQPIGEPPAAPSGVGSLTMASGGGAPVADNNEGADGVGSSSGNWHCDSQWLGDRVITTSTRTWALPTYNNHLYKQISNSTSGGSSNDNAYFGYSTPWGYFDFNRFHCHFSPRDWQRLINNNWGFRPKRLNFKLFNIQVKEVTDNNGVKTIANNLTSTVQVFTDSDYQLPYVLGSAHEGCLPPFPADVFMIPQYGYLTLNDGSQAVGRSSFYCLEYFPSQMLRTGNNFQFSYEFENVPFHSSYAHSQSLDRLMNPLIDQYLYYLSKTINGSGQNQQTLKFSVAGPSNMAVQGRNYIPGPSYRQQRVSTTVTQNNNSEFAWPGASSWALNGRNSLMNPGPAMASHKEGEDRFFPLSGSLIFGKQGTGRDNVDADKVMITNEEEIKTTNPVATESYGQVATNHQSAQAQAQTGWVQNQGILPGMVWQDRDVYLQGPIWAKIPHTGGNFHPSPLMGGFGMKHPPPQILIKNTPVPADPPTAFNKDKLNSFITQYSTGQVSVEIEWELQKENSKRWNPEIQYTSNYYKSNNVEFAVNTGGVYSEPRPIGTRYLTRNL

SEQ ID NO: 597 - protein, 736 aa, Artificial Sequence
  source: /note="Description of Artificial Sequence: Synthetic polypeptide"
MAADGYLPDWLEDNLSEGIREWWALKPGAPQPKANQQHQDNARGLVLPGYKYLGPGNGLDKGEPVNAADAAALEHDKAYDQQLKAGDNPYLKYNHADAEFQERLKEDTSFGGNLGRAVFQAKKRLLEPLGLVEEAAKTAPGKKRPVEQSPQEPDSSAGIDKSGAQPAKKRLNFGQTGDTESVPDPQPIGEPPAAPSGVGSLTMASGGGAPVADNNEGADGVGSSSGNWHCDSQWLGDRVITTSTRTWALPTYNNHLYKQISNSTSGGSSNDNAYFGYSTPWGYFDFNRFHCHFSPRDWQRLINNNWGFRPKRLNFKLFNIQVKEVTDNNGVKTIANNLTSTVQVFTDSDYQLPYVLGSAHEGCLPPFPADVFMIPQYGYLTLNDGSQAVGRSSFYCLEYFPSQMLRTGNNFQFSYEFENVPFHSSYAHSQSLDRLMNPLIDQYLYYLSKTINGSGQNQQTLKFSVAGPSNMAVQGRNYIPGPSYRQQRVSTTVTQNNNSEFAWPGASSWALNGRNSLMNPGPAMASHKEGEDRFFPLSGSLIFGKQGTGRDNVDADKVMITNEEEIKTTNPVATESYGQVATNHQSAQAQAQTGWVQNQGILPGMVWQDRDVYLQGPIWAKIPHTDGNFHPSPLMGGFGMKHPPPQILIKNTPVPADPPTAFNKDKLNSFITQYSTGQVSVEIEWELQKENSKRWNPEIQYTSNYYKSNNVEFAVNTEGVYSEPRPIGTRYLTRNL

SEQ ID NO: 598 - protein, 736 aa, Artificial Sequence
  source: /note="Description of Artificial Sequence: Synthetic polypeptide"
MAADGYLPDWLEDNLSEGIREWWALKPGAPQPKANQQHQDNARGLVLPGYKYLGPGNGLDKGEPVNAADAAALEHDKAYDQQLKAGDNPYLKYNHADAEFQERLKEDTSFGGNLGRAVLQAKKRLLEPLGLVEEAAKTAPGKKRPVEQSPQEPDSSAGIGKSGAQPAKKRLNFGQTGDTESVPDPQPIGEPPAAPSGVGSLTMASGGGAPVADNNEGADGVGSSSGNWHCDSQWLGDRVITTSTRTWALPTYNNHLYKQISNSTSGGSSNDNAYFGYSTPWGYFDFNRFHCHFSPRDWQRLINNNWGFRPKRLNFKLFNIQVKEVTDNNGVKTIANNLTSTVQVFTDSDYQLPYVLGSAHEGCLPPFPADVFMIPQYGYLTLNDGSQAVGRSSFYCLEYFPSQMLRTGNNFQFSYEFENVPFHSSYAHSQSLDRLMNPLIDQYLYYLSKTINGSGQNQQTLKFSVAGSSNMAVQGRNYIPGPSYRQQRVSTTVTQNNNSEFAWPGASSWALNGRNSLMNPGPAMASHKEGEDRFFPLSGSLIFGKQGTGRDNVDADKVMITNEEEIKTTNPVATESYGQVATNHQSAQAQAQTGWVQNQGILPGMVWQDRDVYLQGPIWAKIPHTDGNFHPSPLMGGFGMKHPPPQILIKNTPVPADPPTAFNKDKLNSFITQYSTGQVSVEIEWELQKENSKRWNPEIQYTSNYYKSNNVEFAVNTEGVYSEPRPIGTRYLTRNL

SEQ ID NO: 599 - protein, 736 aa, Artificial Sequence
  source: /note="Description of Artificial Sequence: Synthetic polypeptide"
MAADGYLPDWLEDNLSEGIREWWALKPGAPQPKANQQHQDNARGLVLPGYKYLGPGNGLDKGEPVNAADAAALEHDRAYDQQLKAGDNPYLKYNHADAEFQERLKEDTSFGGNLGRAVFQAKKRLLEPLGLVEEAAKTAPGKKRPVEQSPQEPDSSAGIGKSGAQPAKKRLNFGQTGDTESVPDPQPIGEPPAAPSGVGSLTMASGGGAPVADNNEGADGVGSSSGNWHCDSQWLGDRVITTSTRTWALPTYNNHLYKQISNSTSGGSSNDNAYFGYSTPWGYFDFNRFHCHFSPRDWQRLINNNWGFRPKRLNFKLFNIQVKEVTDNNGVKTIANNLTSTVQVFTDSDYQLPYVLGSAHEGCLPPFPADVFMIPQYGYLTLNDGSQAVGRSSFYCLEYFPSQMLRTGNNFQFSYEFENVPFHSSYAHSQSLDRLMNPLIDQYLYYLSKTINGSGQNQQTLKFSVAGPSNMAVQGRNYIPGPSYRQQRVSTTVTQNNNSEFAWPGASSWALNGRNSLMNPGPAMASHKEGEDRFFPLSGSLIFGKQGTGRDNVDADKVMITNEEEIKTTNPVATESYGQVATNHQSAQAQAQTGWVQNQGILPGMVWQDRDVYLQGPIWAKIPHTDGNFHPSPLMGGFGMKHPPPQILIKNTPVPADPPTAFNKDKLNSFITQYSTGQVSVEIEWELQKKNSKRWNPEIQYTSNYYKSNNVEFAVNTEGVYSEPRPIGTRYLTRNL

SEQ ID NO: 600 - protein, 736 aa, Artificial Sequence
  source: /note="Description of Artificial Sequence: Synthetic polypeptide"
MAADGYLPDWLEDNLSEGIREWWALKPGAPQPKANQQHQDNARGLVLPGYKYLGPGNGLDKGEPVNAADAAALEHDKAYDQQLKAGDNPYLKYNHADAEFQERLKEDTSFGGNLGRAVFQAKKRLLEPLGLVEEAAKTAPGKKRPVEQSPQEPDSSAGIGKSGAQPAKKRLNFGQTGDTESVPDPQPIGEPPAAPSGVGSLTMASGGGAPVADNNEGADGVGSSSGNWHCDSQWLGDRVITTSTRTWALPTYNNHLYKQISNSTSGGSSNDNAYFGYSTPWGYFDFNRFHCHFSPRDWQRLINNNWGFRPKRLNFKLFNIQVKEVTDNNGVKTIANNLTSTVQVFTDSDYQLPYVLGSAHEGCLPPFPADVFMIPQYGYLTLNDGSQAVGRSSFYCLEYFPSQMLRTGNNFQFSYEFENVPFHSSYAHSQSLDRLMNPLIDQYLYYLSKTINGSGQNQQTLKFSVAGPSNMAVQGRNYIPGPSYRQQRVSTTVTQNNNSEFAWPGASSWALNGRNSLMNPGPAMASHKEGEDRFFPLSGSLIFGKQGTGRDNVDADKVMITNEEEIKTTNPVATESYGQVATNHQSAQARAQTGWVQNQGILPGMVWQDRDVYLQGPIWAKIPHTDGNFHPSPLMGGFGMKHPPPQILIKNTPVPADPPTAFNKDKLNSFITQYSTGQVSVEIEWELQKENSKRWNPEIQYTSNYYKSNNVEFAVNTEGVYSEPRPIGTRYLTRNL

SEQ ID NO: 601 - protein, 736 aa, Artificial Sequence
  source: /note="Description of Artificial Sequence: Synthetic polypeptide"
MAADGYLPDWLEDNLSEGIREWWALKPGAPQPKANQQHQDNARGLVLPGYKYLGPGNGLDKGEPVNAVDAAALEHDKAYDQQLKAGDNPYLKYNHADAEFQERLKEDTSFGGNLGRAVFQAKKRLLEPLGLVEEAAKTAPGKKRPVEQSPQEPDSSAGIGKSGAQPAKKRLNFGQTGDTESVPDPQPIGEPPAAPSGVGSLTMASGGGAPVADNNEGADGVGSSSGNWHCDSQWLGDRVITTSTRTWALPTYNNHLYKQISNSTSGGSSNDNAYFGYSTPWGYFDFNRFHCHFSPRDWQRLINNNWGFRPKRLNFKLFNIQVKEVTDNNGVKTIANNLTSTVQVFTDSDYQLPYVLGSAHEGCLPPFPADVFMIPQYGYLTLNDGSQAVGRSSFYCLEYFPSQMLRTGNNFQFSYEFENVPFHSSYAHSQSLDRLMNPLIDQYLYYLSKTINGSGQNQQTLKFSVAGPSNMAVQGRNYIPGPSYRQQRVSTTVTQNNNSEFAWPGASSWALNGRNSLMNPGPAMASHKEGEDRFFPLSGSLIFGKQGTGRDNVDADKVMITNEEEIKTTNPVATESYGQVATNHQSAQAQAQTGWVQNQGILPGMVWQDRDVYLQGPIWAKIPHTDGNFHPSPLMGGFGMKHPPPQILIKNTPVPADPPTAFNKDKLNSFITQYSTGQVSVEIEWELQKENSKRWNPEIQYTSNYYKSNNVEFAVNTEGVYSEPRPIGTRYLTRNL

SEQ ID NO: 602 - protein, 736 aa, Artificial Sequence
  source: /note="Description of Artificial Sequence: Synthetic polypeptide"
MAADGYLPDWLEDNLSEGIREWWALKPGAPQPKANQQHQDNARGLVLPGYKYLGPGNGLDKGEPVNAADAAALEHDKAYDQQLKAGDNPYLKYNHADAEFQERLKEDTSFGGNLGRAVFQAKKRLLEPLGLVEEAAKTAPGKKRPVEQSPREPDSSAGIGKSGAQPAKKRLNFGQTGDTESVPDPQPIGEPPAAPSGVGSLTMASGGGAPVADNNEGADGVGSSSGNWHCDSQWLGDRVITTSTRTWALPTYNNHLYKQISNSTSGGSSNDNAYFGYSTPWGYFDFNRFHCHFSPRDWQRLINNNWGFRPKRLNFKLFNIQVKEVTDNNGVKTIANNLTSTVQVFTDSDYQLPYVLGSAHEGCLPPFPADVFMIPQYGYLTLNDGSQAVGRSSFYCLEYFPSQMLRTGNNFQFSYEFENVPFHSSYAHSQSLDRLMNPLIDQYLYYLSKTINGSGQNQQTLKFSVAGPSNMAVQGRNYIPGPSYRQQRVSTTVTQNNNSEFAWPGASSWALNGRNSLMNPGPAMASHKEGEDRFFPLSGSLIFGKQGTGRDNVDADKVMITNEEEIKTTNPVATESYGQVATNHQSAQAQAQTGWVQNQGILPGMVWQDRDVYLQGPIWAKIPHTDGNFHPSPLMGGFGMKHPPPQILIKNTPVPADPPTAFNKDKLNSFITQYSTGQVSVEIEWELQKENSKRWNPEIQYTSNYYKSNNVEFAVNTEGVYSEPRPIGTRYLTRNL

SEQ ID NO: 603 - protein, 736 aa, Artificial Sequence
  source: /note="Description of Artificial Sequence: Synthetic polypeptide"
MAADGYLPDWLEDNLSEGIREWWALKPGAPQPKANQQHQDNARGLVLPGYKYLGPGNGLDKGEPVNAADAAALEHDKAYDQQLKAGDNPYLKYNHADAEFQERLKEDTSFGGNLGRAVFQAKKRLLEPLGLVEEAAKTAPGKKRPVEQSPQEPDSSAGIGKSGAQPAKKRLNFGQTGDTESVPDPQPIGEPPAAPSGVGSLTMASCGGAPVADNNEGADGVGSSSGNWHCDSQWLGDRVITTSTRTWALPTYNNHLYKQISNSTSGGSSNDNAYFGYSTPWGYFDFNRFHCHFSPRDWQRLINNNWGFRPKRLNFKLFNIQVKEVTDNNGVKTIANNLTSTVQVFTDSDYQLPYVLGSAHEGCLPPFPADVFMIPQYGYLTLNDGSQAVGRSSFYCLEYFPSQMLRTGNNFQFSYEFENVPFHSSYAHSQSLDRLMNPLIDQYLYYLSKTINGSGQNQQTLKFSVAGPSNMAVQGRNYIPGPSYRQQRVSTTVTQNNNSEFAWPGASSWALNGRNSLMNPGPAMASHKEGEDRFFPLSGSLIFGKQGTGRDNVDADKVMITNEEEIKTTNPVATESYGQVATNHQSAQAQAQTGWVQNQGILPGMVWQDRDVYLQGPIWAKIPHTDGNFHPSPLMGGFGMKHPPPQILIKNTPVPADPPTAFNKDKLNSFITQYSTGQVSVEIEWELQKENSKRWNPEIQYTSNYYKSNNVEFAVNTEGVYSEPRPIGTRYLTRNL

SEQ ID NO: 604 - protein, 736 aa, Artificial Sequence
  source: /note="Description of Artificial Sequence: Synthetic polypeptide"
MAADGYLPDWLEDNLSEGIREWWALKPGAPQPKANQQHQDNARGLVLPGYKYLGPGNGLDKGEPINAADAAALEHDKAYDQQLKAGDNPYLKYNHADAEFQERLKEDTSFGGNLGRAVFQAKKRLLEPLGLVEEAAKTAPGKKRPVEQSPQEPDSSAGIGKSGAQPAKKRLNFGQTGDTESVPDPQPIGEPPAAPSGVGSLTMASGGGAPVADNNEGADGVGSSSGNWHCDSQWLGDRVITTSTRTWALPTYNNHLYKQISNSTSGGSSNDNAYFGYSTPWGYFDFNRFHCHFSPRDWQRLINNNWGFRPKRLNFKLFNIQVKEVTDNNGVKTIANNLTSTVQVFTDSDYQLPYVLGSAHEGCLPPFPADVFMIPQYGYLTLNDGSQAVGRSSFYCLEYFPSQMLRTGNNFQFSYEFENVPFHSSYAHSQSLDRLMNPLIDQYLYYLSKTINGSGQNQQTLKFSVAGPSNMAVQGRNYIPGPSYRQQRVSTTVTQNNNSEFAWPGASSWALNGRNSLMNPGPAMASHKEGEDRFFPLSGSLIFGKQGTGRDNVDADKVMITNEEEIKTTNPVATESYGQVATNHQSAQAQAQTGWVQNQGILPGMVWQDRDVYLQGPIWAKIPHTYGNFHPSPLMGGFGMKHPPPQILIKNTPVPADPPTAFNKDKLNSFITQYSTGQVSVEIEWELQKENSKRWNPEIQYTSNYYKSNNVEFAVNTEGVYSEPRPIGTRYLTRNL

SEQ ID NO: 605 - protein, 736 aa, Artificial Sequence
  source: /note="Description of Artificial Sequence: Synthetic polypeptide"
MAADGYLPDWLEDNLSEGIREWWALKPGAPQPKANQQHQDNARGLVLPGYKYLGPGNGLDKGEPVNAADAAALEHDKAYDQQLKAGDNPYLKYNHADAEFQERLKEDTSFGGNLGRAVFQAKKRLLEPLGLVEEAAKTAPGKKRPVEQSPQEPDSSAGIGKSGAQPAKKRLNFGQTGDTESVPDPQPIGEPPAAPSGVGSLTMASGGGAPVADNNEGADGVGSSSGNWHCDSQWLGDRVITTSTRTWALPTYNNHLYKQISNSTSGGSSNDNAYFGYSTPWGYFDFNRFHCHFSPHDWQRLINNNWGFRPKRLNFKLFNIQVKEVTDNNGVKTIANNLTSTVQVFTDSDYQLPYVLGSAHEGCLPPFPADVFMIPQYGYLTLNDGSQAVGRSSFYCLEYFPSQMLRTGNNFQFSYEFENVPFHSSYAHSQSLDRLMNPLIDQYLYYLSKTINGSGQNQQTLKFNVAGPSNMAVQGRNYIPGPSYRQQRVSTTVTQNNNSEFAWPRASSWALNGRNSLMNPGPAMASHKEGEDRFFPLSGSLIFGKQGTGRDNVDADKVMITNEEEIKTTNPVATESYGQVATNHQSAQAQAQTGWVQNQGILPGMVWQDRDVYLQGPIWAKIPHTDGNFHPSPLMGGFGMKHPPPQILIKNTPVPADPPTAFNKDKLNSFITQYSTGQVSMEIEWELQKENSKRWNPEIQYTSNYYKSNNVEFAVNTEGVYSEPRPIGTRYLTRNL

SEQ ID NO: 606 - protein, 736 aa, Artificial Sequence
  source: /note="Description of Artificial Sequence: Synthetic polypeptide"
MAADGYLPDWLEDNLSEGIREWWALKPGAPQPKANQQHQDNARGLVLPGYKYLGPGNGLDKGEPVNAADAAALEHDKAYDQQLKAGDNPYLKYNHADAEFQERLKEDTSFGGNLGRAVFQAKKRLLEPLGLVEEAAKTAPGKKRPVEQSPQEPDSSAGIGKSGAQPAKKRLNFGQTGDTESVPDPQPIGEPPAAPSGVGSLTMASGGGAPVADNNEGADGVGSSSGNWHCDSQWLGDRVITTSTRTWALPTYNNHLYKQISNSTSGGSSNDNAYFGYSTPWGYFDFNRFHCHFSPRDWQRLINNNWGFRPKRLNFKLFNIQVKEVTDNNGVKTIANNLTSTVQVFTDSDYQLPYVLGSAHEGCLPPFPADVFMIPQYGYLTLNDGSQAVGRSSFYCLEYFPSQMLRTGNNFQFSYEFENVPFHSSYAHSQSLDRLMNPLIDQYLYYLSKTINGSGQNQQTLKFSVAGPSNMAVQGRNYIPGPSYRQQRVSTTVTQNNNSEFAWPRASSWALNGRNSLMNPGPAMASHKEGEDRFFPLSGSLIFGKQGTGRDNVDADKVMITNEEEIKTTNPVATESYGQVATNHQSAQAQAQTGWVQNQGILPGMVWQDRDVYLQGPIWAKIPHTDGNFHPSPLMGGFGMKHPPPQILIKNTPVPADPPTAFNKDKLNSFITQYSTGQVSVEIEWELQKENSKRWNPEIQYTSNYYKSNNVEFAVNTEGVYSEPRPIGTRYLTRNL

SEQ ID NO: 607 - protein, 736 aa, Artificial Sequence
  source: /note="Description of Artificial Sequence: Synthetic polypeptide"
MAADGYLPDWLEDNLSEGIREWWALKPGAPQPKANQQHQDNARGLVLPGYKYLGPGNGLDKGEPVNAADAAALEHDKAYDQQLKAGDNPYLKYNHADAEFQERLKEDTSFGGNLGRAVFQAKKRLLEPLGLVEEAAKTAPGKKRPVEQSPQEPDSSAGIGKSGAQPAKKRLNFGQTGDTESVPDPQPIGEPPAAPSGVGSLTMASGGGAPVADNNEGADGVGSSSGNWHCDSQWLGDRVITTSTRTWALPTYNNHLYKQISNSTSGGSSNDNAYFGYSTPWGYFDFNRFHCHFSPRDWQRLINNNWGFRPKRLNFKLFNIQVKEVTDNNGVKTIANNLTSTVQVFTDSDYQLPYVLGSAHEGCLPPFPADVFMIPQYGYLTLNDGSQAVGRSSFYCLEYFPSQMLRTGNNFQFSYEFENVPFHSSYAHSQSLDRLMNPLIDQYLYYLSKTINGSGQNQQTLKFSVAGPSNMAVQGRNYIPGPSYRQQRVSTTVTQNNNSEFAWPRASSWALNGRNSLMNPGPAMASHKEGEDRFFPLSGSLIFGKQGTGRDNVDADKVMITNEEEIKTTNPVATESYGQVATNHQSAQAQAQTGWVQNQGILPGMVWQDRDVYLQGPIWAKIPHTDGNFHPSPLMGGFGMKHPPPQILIKNTPVPADPPTAFNKDKLNSFITQYSTGQVSVEIEWERQKENSKRWNPEIQYTSNYYKSNNVEFAVNTEGVYSEPRPIGTRYLTRNL

SEQ ID NO: 608 - protein, 736 aa, Artificial Sequence
  source: /note="Description of Artificial Sequence: Synthetic polypeptide"
MAADGYLPDWLEDNLSEGIREWWALKPGAPQPKANQQHQDNARGLVLPGYKYLGPGNGLDKGEPVNAADAAALEHDKAYDQQLKAGDNPYLKYNHADAEFQERLKEDTSFGGNLGRAVFQAKKRLLEPLGLVEEAAKTAPGKKRPVEQSPQEPDSSAGIGKSGAQPAKKRLNFGQTGDTESVPDPQPIGEPPAAPSGVGSLTMASGGGAPVADNNEGADGVGSSSGNWHCDSQWLGDRVITTSTRTWALPTYNNHLYKQISNSTSGGSSNDNAYFGYSTPWGYFDFNRFHCHFSPRDWQRLINNNWGFRPKRLNFKLFNIQVKEVTDNNGVKTIANNLTSTVQVFADSDYQLPYVLGSAHEGCLPPFPADVFMIPQYGYLTLNDGSQAVGRSSFYCLEYFPSQMLRTGNNFQFSYEFENVPFHSSYAHSQSLDRLMNPLIDQYLYYLSKTINGSGQNQQTLKFSVAGPSNMAVQGRNYIPGPSYRQQRVSTTVTQNNNSEFAWPRASSWALNGRNSLMNPGPAMASHKEGEDRFFPLSGSLIFGKQGTGRDNVDADKVMITNEEEIKTTNPVATESYGQVATNHQSAQAQAQTGWVQNQGILPGMVWQDRDVYLQGPIWAKIPHTDGNFHPSPLMGGFGMKHPPPQILIKNTPVPADPPTAFNKDKLNSFITQYSTGQVSVEIEWELQKENSKRWNPEIQYTSNYYKSNNVEFAVNTEGVYSEPRPIGTRYLTRNL

SEQ ID NO: 609 - protein, 736 aa, Artificial Sequence
  source: /note="Description of Artificial Sequence: Synthetic polypeptide"
MAADGYLPDWLEDNLSEGIREWWALKPGAPQPKANQQHQDNARGLVLPGYKYLGPGNGLDKGEPVNAADAAALEHDKAYDQQLKAGDNPYLKYNHADAEFQERLKEDTSFGGNLGRAVFQAKKRLLEPLGLVEEAAKTAPGKKRPVEQSPQEPDSSAGIGKSGAQPAKKRLNFGQTGDTESVPDPQPIGEPPAAPSGVGSLTMASGGGAPVADNNEGADGVGSSSGNWHCDSQWLGDRVITTSTRTWALPTYNNHLYKQISNSTSGGSSNDNAYFGYSTPWGYFDFNRFHCHFSPRDWQRLINNNWGFRPKRLNFKLFNIQVKEVTDNNGVKTIANNLTSTVQVFTDSDYQLPYVLGSAHEGCLPPFPADVFMIPQYGYLTLNDGSQAVGRSSFYCLEYFPSQMLRTGNNFQFSYEFENVPFHSSYAHSQSLDRLMNPLIDQYLYYLSKTINGSGQNQQTLKFSVAGPSNMAVQGRNYIPGPSYRQQRVSTTVTQNNNSEIAWPRASSWALNGRNSLMNPGPAMASHKEGEDRFFPLSGSLIFGKQGTGRDNVDADKVMITNEEEIKTTNPVATESYGQVATNHQSAQAQAQTGWVQNQGILPGMVWQDRDVYLQGPIWAKIPHTDGNFHPSPLMGGFGMKHPPPQILIKNTPVPADPPTAFNKDKLNSFITQYSTGQVSVEIEWELQKENSKRWNPEIQYTSNYCKSNNVEFAVNTEGVYSEPRPIGTRYLTRNL

SEQ ID NO: 610 - protein, 736 aa, Artificial Sequence; identical to SEQ ID NO: 606
  source: /note="Description of Artificial Sequence: Synthetic polypeptide"

SEQ ID NO: 611 - DNA, 2208 bp, Artificial Sequence
  source: /note="Description of Artificial Sequence: Synthetic polynucleotide"
atggctgccgatggttatcttccagattggctcgaggacaaccttagtgaaggaattcgcgagtggtgggctttgaaacctggagcccctcaacccaaggcaaatcaacaacatcaagacaacgctcgaggtcttgtgcttccgggttacaaataccttggacccggcaacggactcgacaagggggagccggtcaacgcagcagacgcggcggccctcgagcacgacaaggcctacgaccagcagctcaaggccggagacaacccgtacctcaagtacaaccacgccgacgccgagttccaggagcggctcaaagaagatacgtcttttgggggcaacctcgggcgagcagtcttccaggccaaaaagaggcttcttgaacctcttggtctggttgaggaagcggctaagacggctcctggaaagaagaggcctgtagagcagtctcctcaggaaccggactcctccgcgggtattggcaaatcgggtgcacagcccgctaaaaagagactcaatttcggtcagactggcgacacagagtcagtcccagaccctcaaccaatcggagaacctcccgcagccccctcaggtgtgggatctcttacaatggcttcaggtggtggcgcaccagtggcagacaataacgaaggtgccgatggagtgggtagttcctcgggaaattggcattgcgattcccaatggctgggggacagagtcatcaccaccagcacccgaacctgggccctgcccacctacaacaatcacctctacaagcaaatctccaacagcacatctggaggatcttcaaatgacaacgcctacttcggctacagcaccccctgggggtattttgacttcaacagattccactgccacttctcaccacgtgactggcagcgactcatcaacaacaactggggattccggcctaagcgactcaacttcaagctcttcaacattcaggtcaaagaggttacggacaacaatggagtcaagaccatcgccaataaccttaccagcacggtccaggtcttcacggactcagactatcagctcccgtacgtgctcgggtcggctcacgagggctgcctcccgccgttcccagcggacgttttcatgattcctcagtacgggtatctgacgcttaatgatggaagccaggccgtgggtcgttcgtccttttactgcctggaatatttcccgtcgcaaatgctaagaacgggtaacaacttccagttcggctacgagtttgagaacgtacctttccatagcagctacgctcacagccaaagcctggaccgactaatgaatccactcatcgaccaatacttgtactatctctcaaagactattaacggttctggacagaatcaacaaacgctaaaattcagtgtggccggacccagcaacatggctgtccagggaagaaactacatacctggacccagctaccgacaacaacgtgtctcaaccactgtgactcaaaacaacaacagcgaatttgcttggcctggagcttcttcttgggctctcaatggacgtaatagcttgatgaatcctggacctgctatggccagccacaaagaaggagaggaccgtttctttcctttgtctggatctttaatttttggcaaacaaggaactggaagagacaacgtggatgcggacaaagtcatgataaccaacgaagaagaaattaaaactactaacccggtagcaacggagtcctatggacaagtggccacaaaccaccagagtgcccaagcacaggcgcagaccggctgggttcaaaaccaaggaatacttccgggtatggtttggcaggacagagatgtgtacctgcaaggacccatttgggccaaaattcctcacacggacggcaactttcacccttctccgctgatgggagggtttggaatgaagcacccgcctcctcagatcctcatcaaaaacacacctgtacctgcggatcctccaacggccttcaacaaggacaagctgaactctttcatcacccagtattctactggccaagtcagcgtggagatcgagtgggagctgcagaaggaaaacagcaagcgctgggacccggagatccagtacacttccaactattacaagtctaataatgttgaatttgctgttaatactgaaggtgtatatagtgaaccccgccccattggcaccagatacctgactcgtaatctg

SEQ ID NO: 612 - DNA, 2208 bp, Artificial Sequence
  source: /note="Description of Artificial Sequence: Synthetic polynucleotide"
atggctgccgatggttatcttccagattggctcgaggacaaccttagtgaaggaattcgcgagtggtgggctttgaaacctggagcccctcaacccaaggcaaatcaacaacatcaagacaacgctcgaggtcttgtgcttccgggttacaaataccttggacccggcaacggactcgacaagggggagccggtcaacgcagcagacgcggcggccctcgagcacgacaaggcctacgaccagcagctcaaggccggagacaacccgtacctcaagtacaaccacgccgacgccgagttccaggagcggctcaaagaagatacgtcttttgggggcaacctcgggcgagcagtcttccaggccaaaaagaggcttcttgaacctcttggtctggttgaggaagcggctaagacggctcctggaaagaagaggcctgtagagcagtctcctcaggaaccggactcctccgcgggtattggcaaatcgggtgcacagcccgctaaaaagagactcaatttcggtcagactggcgacacagagtcagtcccagaccctcaaccaatcggagaacctcccgcagccccctcaggtgtgggatctcttacaatggcttcaggtggtggcgcaccagtggcagacaataacgaaggtgccgatggagtgggtagttcctcgggaaattggcattgcgattcccaatggctgggggacagagtcatcaccaccagcacccgaacctgggccctgcccacctacaacaatcacctctacaagcaaatctccaacagcacatctggaggatcttcaaatgacaacgcctacttcggctacagcaccccctgggggtattttgacttcaacagattccactgccgcttctcaccacgtgactggcagcgactcatcaacaacaactggggattccggcctaagcgactcaacttcaagctcttcaacattcaggtcaaagaggttacggacaacaatggagtcaagaccatcgccaataaccttaccagcacggtccaggtcttcacggactcagactatcagctcccgtacgtgctcgggtcggctcacgagggctgcctcccgccgttcccagcggacgttttcatgattcctcagtacgggtatctgacgcttaatgatggaagccaggccgtgggtcgttcgtccttttactgcctggaatatttcccgtcgcaaatgctaagaacgggtaacaacttccagttcagctacgagtttgagaacgtacctttccatagcagctacgctcacagccaaagcctggaccgactaatgaatccactcatcgaccaatacttgtactatctctcaaagactattaacggttctggacagaatcaacaaacgctaaaattcagtgtggccggacccagcaacatggctgtccagggaagaaactacatacctggacccagctaccgacaacaacgtgtctcaaccactgtgactcaaaacaacaacagcgaatttgcttggcctggagcttcttcttgggctctcaatggacgtaatagcttgatgaatcctggacctgctatggccagccacaaagaaggagaggaccgtttctttcctttgtctggatctttaatttttggcaaacaaggaactggaagagacaacgtggatgcggacaaagtcatgataaccaacgaagaagaaattaaaactactaacccggtagcaacggagtcctatggacaagtggccacaaaccaccagagtgcccaagcacaggcgcagaccggctgggttcaaaaccaaggaatacttccgggtatggtttggcaggacagagatgtgtacctgcaaggacccatttgggccaaaattcctcacacggacggcaactttcacccttctccgctgatgggagggtttggaatgaagcacccgcctcctcagatcctcatcaaaaacgcccctgtacctgcggatcctccaacggccttcaacaaggacaagctgaactctttcatcacccagtattctactggccaagtcagcgtggagatcgagtgggagctgcagaaggaaaacagcaagcgctggaacccggagatccagtacacttccaactattacaagtctaataatgttgaatttgctgttaatactgaaggtgtatatagtgaaccccgccccattggcaccagatacctgactcgtaatctg

SEQ ID NO: 613 - DNA, 2208 bp, Artificial Sequence
  source: /note="Description of Artificial Sequence: Synthetic polynucleotide"
atggctgccgatggttatcttccagattggctcgaggacaaccttagtgaaggaattcgcgagtggtgggctttgaaacctggagcccctcaacccaaggcaaatcaacaacatcaagacaacgctcgaggtcttgtgcttccgggttacaaataccttggacccggcaacggactcgacaagggggagccggtcagcgcagcagacgcggcggccctcgagcacgacaaggcctacgaccagcagctcaaggccggagacaacccgtacctcaagtacaaccacgccgacgccgagttccaggagcggctcaaagaagatacgtcttttgggggcaacctcgggcgagcagtcttccaggccaaaaagaggcttcttgaacctcttggtctggttgaggaagcggctaagacggctcctggaaagaagaggcctgtagagcagtctcctcaggaaccggactcctccgcgggtattggcaaatcgggtgcacagcccgctaaaaagagactcaatttcggtcagactggcgacacagagtcagtcccagaccctcaaccaatcggagaacctcccgcagccccctcaggtgtgggatctcttacaatggcttcaggtggtggcgcaccagtggcagacaataacgaaggtgccgatggagtgggtagttcctcgggaaattggcattgcgattcccaatggctgggggacagagtcatcaccaccagcacccgaacctgggccctgcccacctacaacaatcacctctacaagcaaatctccaacagcacatctggaggatcttcaaatgacaacgcctacttcggctacagcaccccctgggggtattttgacttcaacagattccactgccacttctcaccgcgtgactggcagcgactcatcaacaacaactggggattccggcctaagcgactcaacttcaagctcttcaacattcaggtcaaagaggttacggacaacaatggagtcaagaccatcgccaataaccttaccagcacggtccaggtcttcacggactcagactatcagctcccgtacgtgctcgggtcggctcacgagggctgcctcccgccgttcccagcggacgttttcatgattcctcagtacgggtatctgacgcttaatgatggaagccaggccgtgggtcgttcgtccttttactgcctggaatatttcccgtcgcaaatgctaagaacgggtaacaacttccagttcagctacgagtttgagaacgtacctttccatagcagctacgctcacagccaaagcctggaccgactaatgaatccactcatcgaccaatacttgtactatctctcaaagactattaacggttctggacagaatcaacaaacgctaaaattcagtgtggccggacccagcaacatggctgtccagggaagaaactacatacctggacccagctaccgacaacaacgtgtctcaaccactgtgactcaaaacaacaacagcgaatttgcttggcctggagcttcttcttgggctctcaatggacgtaatagcttgatgaatcctggacctgctatggccagccacaaagaaggagaggaccgtttctttcctttgtctggatctttaatttttggcaaacaaggaactggaagagacaacgtggatgcggacaaagtcatgataaccaacgaagaagaaattaaaactactaacccggtagcaacggagtcctatggacaagtggccacaaaccaccagagtgcccaagcacaggcgcagaccggctgggttcaaaaccaaggaatacttccgggtatggtttggcaggacagagatgtgtacctgcaaggacccatttgggccaaaattcctcacacggacggcaactttcacccttctccgctgatgggagggtttggaatgaagcacccgcctcctcagatcctcatcaaaaacacacctgtacctgcggatcctccaacggccttcaacaaggacaagctgaactctttcatcacccagtattctactggccaagtcagcgtggagatcgagtgggagctgcagaaggaaaacagcaagcgctggaacccggagatccagtacacttccaactattacaagtctaataatgttgaatttgctgttaatactgaaggtgtatatagtgaaccccgccccattggcaccagatacctgactcgtaatctg

SEQ ID NO: 614 - DNA, 2208 bp, Artificial Sequence
  source: /note="Description of Artificial Sequence: Synthetic polynucleotide"
atggctgccgatggttatcttccagattggctcgaggacaaccttagtgaaggaattcgcgagtggtgggctttgaaacctggagcccctcaacccaaggcaaatcaacaacatcaagacaacgctcgaggtcttgtgcttccgggttacaaataccttggacccggcaacggactcgacaagggggagccggtcaacgcagcagacgcggcggccctcgagcacgacaaggcctacgaccagcagctcaaggccggagacaacccgtacctcaagtacaaccacgccgacgccgagttccaggagcggctcaaagaagatacgtcttttgggggcaacctcgggcgagcagtcttccaggccaaaaagaggcttcttgaacctcttggtctggttgaggaagcggctaagacggctcctggaaagaagaggcctgtagagcagtctcctcaggaaccggactcctccgcgggtattggcaaatcgggtgcacagcccgctaaaaagagactcaatttcggtcagactggcgacacagagtcagtcccagaccctcaaccaatcggagaacctcccgcagccccctcaggtgtgggatctcttacaatggcttcaggtggtggcgcaccagtggcagacaataacgaaggtgccgatggagtgggtagttcctcgggaaattggcattgcgattcccaatggctgggggacagagtcatcaccaccagcacccgaacctgggccctgcccacctacaacaatcacctctacaagcaaatctccaacagcacatctggaggatcttcaaatgacaacgcctacttcggctacagcaccccctgggggtattttgacttcaacagattccactgccacttctcaccacgtgactggcagcgactcatcaacaacaactggggattccggcctaagcgactcaacttcaagctcttcaacattcaggtcaaagaggttacggacaacaatggagtcaagaccatcgccaataaccttaccagcacggtccaggtcttcacggactcagactatcagctcccgtacgtgctcgggtcggctcacgagggctgcctcccgccgttcccagcggacgttttcatgattcctcagtacgggtatctgacgcttaatgatggaagccaggccgtgggtcgttcgtccttttactgcctggaatatttcccgtcgcaaatgctaagaacgggtaacaacttccagttcagctacgagtttgagaacgtacctttccatagcagctacgctcacagccaaagcctggaccgactaatgaatccactcatcgaccaatacttgtactatctctcaaagactattaacggttctggacagaatcaacaaacgctaaaattcagtgtggccggacccagcaacacggctgtccagggaagaaactacatacctggacccagctaccgacaacaacgtgtctcaaccactgtgactcaaaacaacaacagcgaatttgcttggcctggagcttcttcttgggctctcaatggacgtaatagcttgatgaatcctggacctgctatggccagccacaaagaaggagaggaccgtttctttcctttgtctggatctttaatttttggcaaacaaggaactggaagagacaacgtggatgcggacaaagtcatgataaccaacgaagaagaaattaaaactactaacccggtagcaacggagtcctatggacaagtggccacaaaccaccagagtgcccaagcacaggcgcagaccggctgggttcaaaaccaaggaatacttccgggtatggtttggcaggacagagatgtgtacctgcaaggacccatttgggccaaaattcctcacacggacggcaactttcacccttctccgctgatgggagggtttggaatgaagcacccgcctcctcagatcctcatcaaaaacacacctgtacctgcggatcctccaacggccttcaacaaggacaagctgaactctttcatcacccagtattctactggccaagtcagcgtggagatcgagtgggagctgcagaaggaaaacagcaagcgctggaacccggagatccagtacacttccaactattacaagtctaataatgttgaatttgctgttaatactgaaggtgtatatagtgaaccccgccccattggcaccagatacctgactcgtaatctg

SEQ ID NO: 615 - DNA, 2208 bp, Artificial Sequence
  source: /note="Description of Artificial Sequence: Synthetic polynucleotide"
atggctgccgatggttatcttccagattggctcgaggacaaccttagtgaaggaattcgcgagtggtgggctttgaaacctggagcccctcaacccaaggcaaatcaacaacatcaagacaacgctcgaggtcttgtgcttccgggttacaaataccttggacccggcaacggactcgacaagggggagccggtcaacgcagcagacgcggcggccctcgagcacgacaaggcctacgaccagcagctcaaggccggagacaacccgtacctcaagtacaaccacgccgacgccgagttccaggagcggctcaaagaagatacgtcttttgggggcaacctcgggcgagcagtcttccaggccaaaaagaggcttcttgaacctcttggtctggttgaggaagcggctaagacggctcctggaaagaagaggcctgtagagcagtctcctcaggaaccggactcctccgcgggtattggcaaatcgggtgcacagcccgctaaaaagagactcaatttcggtcagactggcgacacagagtcagtcccagaccctcaaccaatcggagaacctcccgcagccccctcaggtgtgggatctcttacaatggcttcaggtggtggcgcaccagtggcagacaataacgaaggtgccgatggagtgggtagttcctcgggaaattggcattgcgattcccaatggctgggggacagagtcatcaccaccagcacccgaacctgggccctgcccacctacaacaatcacctctacaagcaaatctccaacagcacatctggaggatcttcaaatgacaacgcctacttcggctacagcaccccctgggggtattttgacttcaacagattccactgccacttctcaccacgtgactggcagcgactcatcaacaacaactggggattccggcctaagcggctcaacttcaagctcttcaacattcaggtcaaagaggttacggacaacaatggagtcaagaccatcgccaataaccttaccagcacggtccaggtcttcacggactcagactatcagctcccgtacgtgctcgggtcggctcacgagggctgcctcccgccgttcccagcggacgttttcatgattcctcagtacgggtatctgacgcttaatgatggaagccaggccgtgggtcgttcgtccttttactgcctggaatatttcccgtcgcaaatgctaagaacgggtagcaacttccagttcagctacgagtttgagaacgtacctttccatagcagctacgctcacagccaaagcctggaccgactaatgaatccactcatcgaccaatacttgtactatctctcaaagactattaacggttctggacagaatcaacaaacgctaaaattcagtgtggccggacccagcaacatggctgtccagggaagaaactacatacctggacccagctaccgacaacaacgtgtctcaaccactgtgactcaaaacaacaacagcgaatttgcttggcctggagcttcttcttgggctctcaatggacgtaatagcttgatgaatcctggacctgctatggccagccacaaagaaggagaggaccgtttctttcctttgtctggatctttaatttttggcaaacaaggaactggaagagacaacgtggatgcggacaaagtcatgataaccaacgaagaagaaattaaaactactaacccggcagcaacggagtcctatggacaagtggccacaaaccaccagagtgcccaagcacaggcgcagaccggctgggttcaaaaccaaggaatacttccgggtatggtttggcaggacagagatgtgtacctgcaaggacccatttgggccaaaattcctcacacggacggcaactttcacccttctccgctgatgggagggtttggaatgaagcacccgcctcctcagatcctcatcaaaaacacacctgtacctgcggatcctccaacggccttcaacaaggacaagctgaactctttcatcacccagtattctactggccaagtcagcgtggagatcgagtgggagctgcagaaggaaaacagcaagcgctggaacccggagatccagcacacttccaactattacaagtctaataatgttgaatttgctgttaatactgaaggtgtatatagtgaaccccgccccattggcaccagatacctgactcgtaatctg

SEQ ID NO: 616 - DNA, 2208 bp, Artificial Sequence
  source: /note="Description of Artificial Sequence: Synthetic polynucleotide"
atggctgccgatggttatcttccagattggctcgaggacaaccttagtgaaggaattcgcgagtggtgggctttgaaacctggagcccctcaacccaaggcaaatcaacaacatcaagacaacgctcgaggtcttgtgcttccgggttacaaataccttggacccggcaacggactcgacaagggggagccggtcaacgcagcagacgcggcggccctcgagcacgacaaggcctacgaccagcagctcaaggccggagacaacccgtacctcaagtacaaccacgccgacgccgagttccaggagcggctcaaagaagatacgtcttttgggggcaacctcgggcgagcagtcttccaggccaaaaagaggcttcttgaacctcttggtctggttgaggaagcggctaagacggctcctggaaagaagaggcctgtagagcagtctcctcaggaaccggactcctccgcgggtattggcaaatcgggtgcacagcccgctaaaaagagactcaatttcggtcagactggcgacacagagtcagtcccagaccctcaaccaatcggagaacctcccgcagccccctcaggtgtgggatctcttacaatggcttcaggtggtggcgcaccagtggcagacaataacgaaggtgccgatggagtgggtagttcctcgggaaattggcattgcgattcccaatggctgggggacagagtcatcaccaccagcacccgaacctgggccctgcccacctacaacaatcacctctacaagcaaatctccaacagcacatctggaggatcttcaaatgacaacgcctacttcggctacagcaccccctgggggtattttgacttcaacagattccactgccacttctcaccacgtgactggcagcgactcatcaacaacaactggggattccggcctaagcgactcaacttcaggctcttcaacattcaggtcaaagaggttacggacaacaatggagtcaagaccatcgccaataaccttaccagcacggtccaggtcttcacggactcagactatcagctcccgtacgtgctcgggtcggctcacgagggctgcctcccgccgttcccagcggacgttttcatgattcctcagtacgggtatctgacgcttaatgatggaagccaggccgtgggtcgttcgtccttttactgcctggaatatttcccgtcgcaaatgctaagaacgggtaacaacttccagttcagctacgagtttgagaacgtacctttccatagcagctacgctcacagccaaagcctggaccgactaatgaatccactcatcgaccaatacttgtactatctctcaaagactattaacggttctggacagaatcaacaaacgctaaaattcagtgtggccggacccagcaacatggctgtccagggaagaaactacatacctggacccagctaccgacaacaacgtgtctcaaccactgtgactcaaaacaacaacagcgaatttgcttggcctggagcttcttcttgggctctcaatggacgtaatagcttgatgaatcctggacctgctatggccagccacaaagaaggagaggaccgtttctttcctttgtctggatctttaatttttggcaaacaaggaactggaagagacaacgtggatgcggacaaagtcatgataaccaacgaagaagaaattaaaactactaacccggtagcaacggagtcctatggacaagtggccacaaaccaccagagtgcccaagcacaggcgcagaccggctgggttcaaagccaaggaatacttccgggtatggtttggcaggacagagatgtgtacctgcaaggacccatttgggccaaaattcctcacacggacggcaactttcacccttctccgctgatgggagggtttggaatgaagcacccgcctccccagatcctcatcaaaaacacacctgtacctgcggatcctccaacggccttcaacaaggacaagctgaactctttcatcacccagtattctactggccaagtcagcgtggagatcgagtgggagctgcagaaggaaaacagcaagcgctggaacccggagatccagtacacttccaactattacaagtctaataatgttgaatttgctgttaatactgaaggtgtatatagtgaaccccgccccattggcaccagatacctgactcgtaatctg

SEQ ID NO: 617 - DNA, 2205 bp, Artificial Sequence
  source: /note="Description of Artificial Sequence: Synthetic polynucleotide"
atggctgccgatggttatcttccagattggctcgaggacaaccttagtgaaggaattcgcgagtggtgggctttgaaacctggagcccctcaacccaaggcaaatcaacaacatcaagacaacgcccgaggtcttgtgcttccgggttacaaataccttggacccggcaacggactcgacaagggggagccggtcaacgcagcagacgcggcggccctcgagcacgacaaggcctacgaccagcagctcaaggccggagacaacccgtacctcaagtacaaccacgccgacgccgagttccaggagcggctcaaagaagatacgtcttttgggggcaacctcgggcgagcagtcttccaggccaaaaagaggcttcttgaacctcttggtctggttgaggaagcggctaagacggctcctggaaagaagaggcctgtagagcagtctcctcaggaaccggactcctccgcgggtattggcaaatcgggtgcacagcccgctaaaaagagactcaatttcggtcagactggcgacacagagtcagtcccagaccctcaaccaatcggagaacctcccgcagccccctcaggtgtgggatctcttacaatggcttcaggtggtggcgcaccagtggcagacaataacgaaggtgccgatggagtgggtagttcctcgggaaattggcattgcgattcccaatggctgggggacagagtcatcaccaccagcacccgaacctgggccctgcccacctacaacaatcacctctacaagcaaatctccaacagcacatctggaggatcttcaaatgacaacgcctacttcggctacagcaccccctggaggtattttgacttcaacagattccactgccacttctcaccacgtgactggcagcgactcatcaacaactggggattccggcctaagcgactcaacttcaagctcttcaacattcaggtcaaagaggttacggacaacaatggagtcaagaccatcgccaataaccttaccagcacggtccaggccttcacggactcagactatcagctcccgtacgtgctcgggtcggctcacgagggctgcctcccgccgttcccagcggacgttttcatgattcctcagtacgggtatctgacgcttaatgatggaagccaggccgtgggtcgttcgtccttttactgcctggaatatttcccgtcgcaaatgctaagaacgggtaacaacttccagttcagctacgagtttgagaacgtacctttccatagcagctacgctcacagccaaagcctggaccgactaatgaatccactcatcgaccaatacttgtactatctctcaaagactattaacggttctggacagaatcaacaaacgctaaaattcagtgtggccggacccagcaacatggctgtccagggaagaaactacatacctggacccagctaccgacaacaacgtgtctcaaccactgtgactcaaaacaacaacagcgaatttgcttggcctggagcttcttcttgggctctcaatggacgtaatagcttgatgaatcctggacctgctatggccagccacaaagaaggagaggaccgtttctttcctttgtctggatctttaatttttggcaaacaaggaactggaagagacaacgtggatgcggacaaagtcatgataaccaacgaagaagaaattaaaactactaacccggtagcaacggagtcctatggacaagtggccacaaaccaccagagtgcccaagcacaggcgcagaccggctgggttcaaaaccaaggaatacttccgggtatggtttggcaggacagagatgtgtacctgcaaggacccatttgggccaaaattcctcacacggacggcaactttcacccttctccgctgatgggagggtttggaatgaagcacccgcctcctcagatcctcatcaaaaacacacctgtacctgcggatcctccaacggccttcaacaaggacgagctgaactctttcatcacccagtattctactggccaagtcagcgtggagatcgagtgggagctgcagaaggaaaacagcaagcgctggaacccggagatccagtacacttccaactattacaagtctaataatgttgaatttgctgttaatactgaaggtgtatatagtgaaccccgccccattggcaccagatacctgactcgtaatctg

SEQ ID NO: 618 - DNA, 2205 bp, Artificial Sequence
  source: /note="Description of Artificial Sequence: Synthetic polynucleotide"
atggctgccgatggttatcttccagattggctcgaggacaaccttagtgaaggaattcgcgagtggtgggctttgaaacctggagcccctcaacccaaggcaaatcaacaacatcaagacaacgctcgaggtcttgtgcttccgggttacaaataccttggacccggcaacggactcgacaagggggagccggtcaacgcagcagacgcggcggccctcgagcacgacaaggcctacgaccagcagctcaaggccggagacaacccgtacctcaagtacaaccacgccgacgccgagttccaggagcggctcaaagaagatacgtcttttgggggcaacctcgggcgagcagtcttccaggacaaaaagaggcttcttgaacctcttggtctggttgaggaagcggctaagacggctcctggaaagaagaggcctgtagagcagtctcctcaggaaccggactcctccgcgggtattggcaaatcgggtgcacagcccgctaaaaagagactcaatttcggtcagactggcgacacagagtcagtcccagaccctcaaccaatcggagaacctcccgcagccccctcaggtgtgggatctcttacaatggcttcaggtggtggcgcaccagtggcagacaataacgaaggtgccgatggagtgggtagttcctcgggaaattggcattgcgattcccaatggctgggggacagagtcatcaccaccagcacccgaacctgggccctgcccacctacaacaatcacctctacaagcaaatctccaacagcacatctggaggatcttcaaatgacaacgcctacttcggctacagcaccccctgggggtattttgacttcaacagattccactgccacttctcaccacgtgactggcagcgactcatcaacaactggggattccggcctaagcgactcaacttcaagctcttcaacattcaggtcaaagaggttacggacaacaatggagtcaagaccatcgccaataaccttaccagcacggtccaggtcttcacggactcagactatcagctcccgtacgtgctcgggtcggctcacgagggctgcctcccgccgttcccagcggacgttttcatgattcctcagtacgggtatctgacgcttaatgatggaagccaggccgtgggtcgttcgtccttttactgcctggaatatttcccgtcgcaaatgctaagaacgggtaacaacttccaattcagctacgagtttgagaacgtacctttccatagcagctacgctcacagccaaagcctggaccgactaatgaatccactcatcgaccaatacttgtactatctctcaaagactattaacggttctggacagaatcaacaaacgctaaaattcagtgtggccggacccagcaacatggctgtccagggaagaaactacatacctggacccagctaccgacaacaacgtgtctcaaccactgtgactcaaaacaacaacagcgaatttgcttggcctggagcttcttcttgggctctcaatggacgtaatagcttgatgaatcctggacctgctatggccagccacaaagaaggagaggaccgtttctttcctttgtctggatctttaatttttggcaaacaaggaactggaagagacaacgtggatgcggacaaagtcatgataaccaacgaagaagaaattaaaactactaacccggtagcaacggagtcctatggacaagtggccacaaaccaccagagtgcccaagcacaggcgcagaccggctgggttcaaaaccaaggaatacttccgggtatggtttggcaggacagagatgtgtacctgcaaggacccatttgggccaaaattcctcacacggacggcaactttcacccttctccgctgatgggagggtttggaatgaagcacccgcctcctcagatcctcatcaaaaacacacctgtacctgcggatcctccaacggccttcaacaaggacaagctgaactctttcatcacccagtattctactggccaagtcagcgtggagatcgagtgggagctgcagaaggaaaacagcaagcgctggaacccggagatccagtacacttccaactattacaagtctaataatgttgaatttgctgttaatactgaaggtgtatatagtgaaccccgccccattggcaccagatacctgactcgtaatctg

SEQ ID NO: 619 - DNA, 2208 bp, Artificial Sequence
  source: /note="Description of Artificial Sequence: Synthetic polynucleotide"
atggctgccgatggttatcttccagattggctcgaggacaaccttagtgaaggaattcgcgagtggtgggctttgaaacctggagcccctcaacccaaggcaaatcaacaacatcaagacaacgctcgaggtcttgtgcttccgggttacaaataccttggacccggcaacggactcgacaagggggagccggtcaacgcagcagacgcggcggccctcgagcacgacaaggcctacgaccagcagctcaaggccggagacaacccgtacctcaagtacaaccacgccgacgccgagttccaggagcggctcaaagaagatacgtcttttgggggcaacctcgggcgagcagtcttccaggccaaaaagaggcttcttgaacctcttggtctggttgaggaagcggctaagacggctcctggaaagaagaggcctgtagagcagtctcctcaggaaccggactcctccgcgggtattggcaaatcgggtgcacagcccgctaaaaagagactcaatttcggtcagactggcgacacagagtcagtcccagaccctcaaccaatcggagaacctcccgcagccccctcaggtgtgggatctcttacaatggcttcaggtggtggcgcaccagtggcagacaataacgaaggtgccgatggagtgggtagttcctcgggaaattggcattgcgattcccaatggctgggggacagagccatcaccaccagcacccgaacctgggccctgcccacctacaacaatcacctctacaagcaaatctccaacagcacatctggaggatcttcaaatgacaacgcctacttcggctacagcaccccctgggggtattttgacttcaacagattccactgccacttctcaccacgtgactggcagcggctcatcaacaacaactggggattccggcctaagcgactcaacttcaagctcttcaacattcaggtcaaagaggttacggacaacaatggagtcaagaccatcgccaataaccttaccagcacggtccaggtcttcacggactcagactatcagctcccgtacgtgctcgggtcggctcacgagggctgcctcccgccgttcccagcggacgttttcatgattcctcagtacgggtatctgacgcttaatgatggaagccaggccgtgggtcgttcgtccttttactgcctggaatatttcccgtcgcaaatgctaagaacgggtaacaacttccagttcagctacgagtttgagaacgtacctttccatagcagctacgctcacagccaaagcctggaccgactaatgaatccactcatcgaccaatacttgtactatctctcaaagactattaacggttctggacagaatcaacaaacgctaaaattcagtgtggccggacccagcaacatggctgtccagggaagaaactacatacctggacccagctaccgacaacaacgtgtctcaaccactgtgactcaaaacaacaacagcgaatttgcttggcctggagcttcttcttgggctctcaatggacgtaatagcttgatgaatcctggacctgctatggccagccacaaagaaggagaggaccgtttctttcctttgtctggatctttaatttttggcaaacaaggaactggaagagacaacgtggatgcggacaaagtcatgacaaccaacgaagaagaaattaaaactactaacccggtagcaacggagtcctatggacaagtggccacaaaccaccagagtgcccaagcacaggcgcagaccggctgggttcaaaaccaaggaatacttccgggtatggtttggcaggacagagatgtgtacctgcaaggacccatttgggccaaaattcctcacacggacggcaactttcacccttctccgctgatgggagggtttggaatgaagcacccgcctcctcagatcctcatcaaaaacacacctgtacctgcggatcctccaacggccttcaacaaggacaagctgaactctttcatcacccagtattctactggccaagtcagcgtggagatcgagtgggagctgcagaaggaaaacagcaagcgctggaacccggagatccagtacacttccaactattacaagtctaataatgttgaatttgctgttaatactgaaggtgtatatagtgaaccccgccccattggcaccagatacctgactcgtaatctg

SEQ ID NO: 620 - DNA, 2208 bp, Artificial Sequence
  source: /note="Description of Artificial Sequence: Synthetic polynucleotide"
atggctgccgatggttatcttccagattggctcgaggacaaccttagtgaaggaattcgcgagtggtgggctttgaaacctggagcccctcaacccaaggcaaatcaacaacatcaagacaacgctcgaggtcttgtgcttccgggttacaaataccttggacccggcaacggactcgacaagggggagccggtcaatgcagcagacgcggcggccctcgagcacgacaaggcctacgaccagcagctcaaggccggagacaacccgtacctcaagtacaaccacgccgacgccgagttccaggagcggctcaaagaagatacgtcttttgggggcaacctcgggcgagcagtcttccagaccaaaaagaggcttcttgaacctcttggtctggttgaggaagcggctaagacggctcctggaaagaagaggcctgtagagcagtctcctcaggaaccgggctcctccgcgggtattggcaaatcgggtgcacagcccgctaaaaagagactcaatttcggtcagactggcgacacagagtcagtcccagaccctcaaccaatcggagaacctcccgcagccccctcaggtgtgggatctcttacaatggcttcaggtggtggcgcaccagtggcagacaataacgaaggtgccgatggagtgggtagttcctcgggaaattggcattgcgattcccaatggctgggggacagagtcatcaccaccagcacccgaacctgggccctgcccacctacaacaatcacctctacaagcaaatctccaacagcacatctggaggatcttcaaatgacaacgcctacttcggctacagcaccccctgggggtattttgacttcaacagattccactgccacttctcaccacgtgactggcagcgactcatcaacaacaactggggattccggcctaagcgactcaacttcaagctcttcaacattcaggtcaaagaggttacggacaacaatggagtcaagaccatcgccaataaccttaccagcacggtccaggtcttcacggactcagactatcagctcccgtacgtgctcgggtcggctcacgagggctgcctcccgccgttcccagcggacgttttcatgattcctcagtacgggtatctgacgcttaatgatggaagccaggccgtgggtcgttcgtccttttactgcctggaatatttcccgtcgcaaatgctaagaacgggtaacaacttccagttcagctacgagtttgagaacgtacctttccatagcagctacgctcacagccaaagcctggaccgactaatgaatccactcatcgaccaatacttgcactatctctcaaagactattaacggttctggacagaatcaacaaacgctaaaattcagtgtggccggacccagcaacatggctgtccagggaagaaactacatacctggacccagctaccgacaacaacgtgtctcaaccactgtgactcaaaacaacaacagcgaatttgcttggcctggagcttcttcttgggctctcaatggacgtaatagcttgatgaatcctggacctgctatggccagccacaaagaaggagaggaccgtttctttcctttgtctggatctttaatttttggcaaacaaggaactggaagagacaacgtggatgcggacaaagtcatgataaccaacgaagaagaaattaaaactactaacccggtagcaacggagtcctatggacaagtggccacaaaccaccagagtgcccaagcacaggcgcagaccggctgggttcaaaaccaaggaatacttccgggtatggtttggcaggacagagatgtgtacctgcaaggacccatttgggccaaaattcctcacacggacggcaactttcacccttctccgctgatgggagggtttggaatgaagcacccgcctcctcagatcctcatcaaaaacacacctgtacctgcggatcctccaacggccttcaacaaggacaagctgaactctttcatcacccagtattctactggccaagtcagcgtggagatcgagtgggagctgcagaaggaaaacagcaagcgctggaacccggagatccagtacacttccaactattacaagtctaataatgttgaatttgctgttaatactgaaggtgtatatagtgaaccccgccccattggcaccagatacctgactcgtaatctg

SEQ ID NO: 621 - DNA, 2208 bp, Artificial Sequence
  source: /note="Description of Artificial Sequence: Synthetic polynucleotide"
atggctgccgatggttattttccagattggctcgaggacaaccttagtgaaggaattcgcgagtggtgggctttgaaacctggagcccctcaacccaaggcaaatcaacaacatcaagacaacgctcgaggtcttgtgcttccgggttacaaataccttggacccggcaacggactcgacaagggggagccggtcaacgcagcagacgcggcggccctcgagcacgacaaggcctacgaccagcagctcaaggccggagacaacccgtacctcaagtacaaccacgccgacgccgagttccaggagcggctcaaagaagatacgtcttttgggggcaacctcgggcgagcagtcttccaggccaaaaagaggcttcttgaacctcttggtctggttgaggaagcggctaagacggctcctggaaagaagaggcctgtagagcagtctcctcaggaaccggactcctccgcgggtattggcaaatcgggtgcacagcccgctaaaaagagactcaatttcggtcagactggcgacacagagtcagtcccagaccctcaaccaatcggagaatctcccgcagccccctcaggtgtgggatctcttacaatggcttcaggtggtggcgcaccagtggcagacaataacgaaggtgccgatggagtgggtagttcctcgggaaattggcattgcgattcccaatggctgggggacagagtcatcaccaccagcacccgaacctgggccctgcccacctacaacaatcacctctacaagcaaatctccaacagcacatctggaggatcttcaaatgacaacgcctacttcggctacagcaccccctgggggtattttgacttcaacagattccactgccacttctcaccacgtgactggcagcgactcatcaacaacaactggggattccggcctaagcgactcaacttcaagctcttcaacattcaggtcaaagaggttacggacaacaatggagtcaagaccatcgccaataaccttaccagcacggtccaggtcttcacggactcagactatcagctcccgtacgtgctcgggtcggctcacgagggctgcctcccgccgttcccagcggacgttttcatgattcctcagtacgggtatctgacgcttaatgatggaagccaggccgtgggtcgttcgtccttttactgcctggaatatctcccgtcgcaaatgctaagaacgggtaacaacttccagttcagctacgagtttgagaacgtacctttccatagcagctacgctcacagccaaagcctggaccgactaatgaatccactcatcgaccaatacttgcactatctctcaaagactattaacggttctggacagaatcaacaaacgctaaaattcagtgtggccggacccagcaacatggctgtccagggaagaaactacatacctggacccagctaccgacaacaacgtgtctcaaccactgtgactcaaaacaacaacagcgaatttgcttggcctggagcttcttcttgggctctcaatggacgtaatagcttgatgaatcctggacctgctgtggccagccacaaagaaggagaggaccgtttctttcctttgtctggatctttaatttttggcaaacaaggaactggaagagacaacgtggatgcggacaaagtcatgataaccaacgaagaagaaattaaaactactaacccggtagcaacggagtcctatggacaagtggccacaaaccaccagagtgcccaagcacaggcgcagaccggctgggttcaaaaccaaggaatacttccgggtatggtttggcaggacagagatgtgtacctgcaaggacccatttgggccaaaattcctcacacggacggcaactttcacccttctccgctgatgggagggtttggaatgaagcacccgcctcctcagatcctcatcaaaaacacacctgtacctgcggatcctccaacggccttcaacaaggacaagctgaactctttcatcacccagtattctactggccaagtcagcgtggagatcgagtgggagctgcagaaggaaaacagcaagcgctggaacccggagatccagtacacttccaactattacaagtctaataatgttgaatttgctgttaatactgaaggtgtatatagtgaaccccgccccattggcaccagatacctgactcgtaatctg

SEQ ID NO: 622 - DNA, 2208 bp, Artificial Sequence
  source: /note="Description of Artificial Sequence: Synthetic polynucleotide"
atggctgccgatggttatcttccagattggctcgaggacaaccttagtgaaggaattcgcgagtggtgggctttgaaacctggagcccctcaacccaaggcaaatcaacaacatcaagacaacgctcgaggtcttgtgcttccgggttacaaataccttggacccggcaacggactcgacaagggggagccggtcaacgcagcagacgcggcggccctcgagcacgacaaggcctacgaccagcagctcaaggccggagacaacccgtacctcaagtacaaccacgccgacgccgagttccaggagcggctcaaagaagatacgtcttttgggggcaacctcgggcgagcagtcttccaggccaaaaagaggcttcttgaacctcttggtccggttgaggaagcggctaagacggctcctggaaagaagaggcctgtagagcagtctcctcaggaaccggactcctccgcgggtattggcaaatcgggtgcacagcccgctaaaaagagactcaatttcggtcagactggcgacacagagtcagtcccagaccctcaaccaatcggagaacctcccgcagccccctcaggtgtgggatctcttacaatggcttcaggtggtggcgcaccagtggcagacaataacgaaggtgccgatggagtgggtagttcctcgggaaattggcattgcgattcccaatggctgggggacagagtcatcaccaccagcacccgaacctgggccctgcccacctacaacaatcacctctacaagcaaatctccaacagcacatctggaggatcttcaaatgacaacgcctacttcggctacagcaccccctgggggtattttgacttcaacagattccactgccacttctcaccacgtgactggcagcgactcatcaacaacaactggggattccggcctaagcgactcaacttcaagctcttcaacattcaggtcaaagaggttacggacaacaatggagtcaagaccatcgccaataaccttaccagcacggtccaggtcttcacggactcagactatcagctcccgtacgtgctcgggtcggctcacgagggctgcctcccgccgttcccagcggacgttttcatgattcctcagtacgggtatctgacgcttaatgatggaagccaggccgtgggtcgttcgtccttttactgcctggaatatttcccgtcgcaaatgctaagaacgggtaacaacttccagttcagctacgagtttgagaacgtacctttccatagcagctacgctcacagccaaagcctggaccgactaatgaatccactcatcgaccaatacttgtactatctctcaaagactattaacggttctggacagaatcaacaaacgctaaaattcagtgtggccggacccagcaacatggctgtccagggaagaaactacatacctggacccagctaccgacaacaacgtgtctcaaccactgtgactcaaaacaacaacagcgaatttgcttggcctggagcttcttcttgggctctcaatggacgtaatagcttgatgaatcctggacctgctatggccagccacaaagaaggagaggaccgtttctttcctttgtctggatctttaatttttggcaaacaaggaactggaagagacaacgtggatgcggacaaagtcatgataaccaacgaagaagaaattaaaactactaacccggtagcaacggagtcctatggacaagcggccacaaaccaccagagtgcccaagcacaggcgcagaccggctgggttcaaaaccaaggaatacttccgggtatggtttggcaggacagagatgtgtacctgcaaggacccatttgggccaaaattcctcacacggacggcaactttcacccttctccgctgatgggagggtttggaatgaagcacccgcctcctcagatcctcatcaaaaacacacctgtacctgcggatcctccaacggccttcaacaaggacaagctgaactctttcatcacccagtattctactggccaagtcagcgtggagatcgagtgggagctgcagaaggaaaacagcaagcgctggaacccggagatccagtacacttccaactattacaagtctaataatgttgaatttgctgttaatactgaaggtgtatatagtgaaccccgccccattggcaccagatacctgactcgtaatctg

SEQ ID NO: 623 - DNA, 2208 bp, Artificial Sequence
  source: /note="Description of Artificial Sequence: Synthetic polynucleotide"
atggctgccgatggttatcttccagattggctcgaggacaaccttagtgaaggaattcgcgagtggtgggctttgaaacctggagcccctcaacccaaggcaaatcaacaacatcaagacaacgctcggggtcttgtgcttccgggttacaaataccttggacccggcaacggactcgacaagggggagccggtcaacgcagcagacgcggcggccctcgagcacgacaaggcctacgaccagcagctcaaggccggagacaacccgtacctcaagtacaaccacgccgacgccgagttccaggagcggctcaaagaagatacgtcttttgggggcaacctcgggcgagcagtcttccaggccaaaaagaggcttcttgaacctcttggtccggttgaggaagcggctaagacggctcctggaaagaagaggcctgtagagcagtctcctcaggaaccggactcctccgcgggtattggcaaatcgggtgcacagcccgctaaaaagagactcaatttcggtcagactggcgacacagagtcagtcccagaccctcaaccaatcggagaacctcccgcagccccctcaggtgtgggatctcttacaatggcttcaggtggtggcgcaccagtggcagacaataacgaaggtgccgatggagtgggtagttcctcgggaaattggcattgcgattcccaatggctgggggacagagtcatcaccaccagcacccgaacctgggccctgcccacctacaacaatcacctctacaagcaaatctccaacagcacatctggaggatcttcaaatgacaacgcctacttcggctacagcaccccctgggggtattttgacttcaacagattccactgccacttctcaccacgtgactggcggcgactcatcaacaacaactggggattccggcctaagcgactcaacttcaagctcttcaacattcaggtcaaagaggttacggacaacaatggagtcaagaccatcgccaataaccttaccagcacggtccaggtcttcacggactcagactatcagctcccgtacgtgctcgggtcggctcacgagggctgcctcccgccgttcccagcggacgttttcatgattcctcagtacgggtatctgacgcttaatgatggaagccaggccgtgggtcgttcgtccttttactgcctggaatatttcccgtcgcaaatgctaagaacgggtaacaacttccagttcagctacgagtttgagaacgtacctttccatagcagctacgctcacagccaaagcctggaccgactaatgaatccactcatcgaccaatacttgtactatctctcaaagactattaacggttctggacagaatcaacaaacgctaaaattcagtgtggccggacccagcaacatggctgtccagggaagaaactacatacctggacccagctaccgacaacaacgtgtctcaaccactgtgactcaaaacaacaacagcgaatttgcttggcctggagcttcttcttgggctctcaatggacgtaatagcttgatgaatcctggacctgctatggccagccacaaagaaggagaggaccgtttctttcctttgtctggatctttaatttttggcaaacaaggaactggaagagacaacgtggatgcggacaaagtcatgataaccaacgaagaagaaattaaaactactaacccggtagcaacggagtcctatggacaagtggccacaaaccaccagagtgcccaagcacaggcgcagaccggctgggttcaaaaccaaggaatacttccgggtatggtttggcaggacagagatgtgtacctgcaaggacccatttgggccaaaattcctcacacggacggcaactttcacccttctccgctgatgggagggtttggaatgaagcacccgcctcctcagatcctcatcaaaaacacacctgtacctgcggatcctccaacggccttcaacaaggacaagctgaactctttcatcacccagtattctactggccaagtcagcgtggagatcgagtgggagctgcagaaggaaaacagcaagcgctggaacccggagatccagtacacttccaactattacaagtctaataatgttgaatttgctgttaatactgaaggtgtatatagtgaaccccgccccattggcaccagatacctgactcgtaatctg

SEQ ID NO: 624 - DNA, 2208 bp, Artificial Sequence
  source: /note="Description of Artificial Sequence: Synthetic polynucleotide"
atggctgccgatggttatcttccagattggctcgaggacaaccttagtgaaggaattcgcgagtggtgggctttgaaacctggagcccctcaacccaaggcaaatcaacaacatcaagacaacgctcgaggtcttgtgcttccgggttacaaataccttggacccggcaacggactcgacaagggggagccggtcaacgcagcagacgcggcggccctcgagcacgacaaggcctacgaccagcagctcaaggccggagacaacctgtacctcaagtacaaccacgccgacgccgagttccaggagcggctcaaagaagatacgtcttttgggggcaacctcgggcgagcagtcttccaggccaaaaagaggcttcttgaacctcttggtctggttgaggaagcggctaagacggctcctggaaagaagaggcctgtagagcagtctcctcaggaaccggactcctccgcgggtattggcaaatcgggtgcacagcccgctaaaaagagactcaatttcggtcagactggcgacacagagtcagtcccagaccctcaaccaatcggagaacctcccgcagccccctcaggtgtgggatctcttacaatggcttcaggtggtggcgcaccagtggcagacaataacgaaggtgccgatggagtgggtagttcctcgggaaattggcattgcgattcccaatggctgggggacagagtcatcaccaccagcacccgaacctgggccctgcccacctacaacaatcacctctacaagcaaatctccaacagcacatctggaggatcttcaaatgacaacgcctacttcggctacagcaccccctgggggtattttgacttcaacagattccactgccacttctcaccacgtgactggcagcgactcatcaacaacaactggggattccggcctaagcgactcaacttcaagctcttcaacattcaggtcaaagaggttacggacaacaatggagtcaagaccatcgccaataaccttaccagcacggtccaggtcttcacggactcagactatcagctcccgtacgtgctcgggtcggctcacgagggctgcctcccgccgttcccagcggacgttttcatgattcctcagtacgggtatctgacgcttaatgatggaagccaggccgtgggtcgttcgtccttttactgcctggaatatttcccgtcgcaaatgctaagaacgggtaacaacttccagttcagctacgagtttgagaacgtacctttccatagcagctacgctcacagccaaagcctggaccgactaatgaatccactcatcgaccaatacttgcactatctctcaaagactattaacggttctggacagaatcaacaaacgctaaaattcagtgtggccggacccagcaacatggctgtccagggaagaaactacatacctggacccagctaccgacaacaacgtgtctcaaccactgtgactcaaaacaacaacagcgaatttgcttggcctggagcttcttcttgggctctcaatggacgtaatagcttgatgaatcctggacctgctatggccagccacaaagaaggagaggaccgtttctttcctttgtctggatctttaatttttggcaaacaaggaactggaagagacaacgtggatgcggacaaagtcatgataaccaacgaagaagaaattaaaactactaacccggtagcaacggagtcctatggacaagtggccacaaaccaccagagtgcccaagcacaggcgcagaccggctgggttcaaaaccaaggaatacttccgggtatggtttggcaggacagagatgtgtacctgcaaggacccatttgggccaaaattcctcacacggacggcaactttcacccttctccgctgatgggagggtttggaatgaagcacccgcctcctcagatcctcatcaaaaacacacctgtacctgcggatcctccaacggccttcaacaaggacaagctgaactctttcatcacccagtattctactggccaagtcagcgtggagatcgagtgggagctgcagaaggaaaacagcaagcgctggaacccggagatccagtacacttccaactattacaagtctaataatgttgaatttgctgttaatactgaaggtgtatatagtgaaccccgccccattggcaccagatacctgactcgtaatctg

SEQ ID NO: 625 - DNA, 2208 bp, Artificial Sequence
  source: /note="Description of Artificial Sequence: Synthetic polynucleotide"
atggctgccgatggttatcttccagattggctcgaggacaaccttagtgaaggaattcgcgagtggtgggctttgaaacctggagcccctcaacccaaggcaaatcaacaacatcaagacaacgctcgaggtcttgtgcttccgggttacaaataccttggacccggcaacggactcgacaagggggagccggtcaacgcagcagacgcggcggccctcgagcacgacaaggcctacgaccagcagctcaaggccggagacaacccgtacctcaagtacaaccacgccgacgccgagttccaggagcggctcaaagaagatacgtcttttgggggcaacctcgggcgagcagtcttccaggccaaaaagaggcttcttgaacctcttggtctggttgaggaagcggctaagacggctcctggaaagaagaggcctgtagagcagtctcctcaagaaccggactcctccgcgggtattggcaaatcgggtgcacagcccgctaaaaagagactcaatttcggtcagactggcgacacagagtcagtcccagaccctcaaccaatcggagaacctcccgcagccccctcaggtgtgggatctcttacaatggcttcaggtggtggcgcaccagtggcagacaataacgaaggtgccgatggagtgggtagttcctcgggaaattggcattgcgattcccaatggctgggggacagagtcatcaccaccagcacccgaacctgggccctgcccacctacaacaatcacctctacaagcaaatctccaacagcacatctggaggatcttcaaatgacaacgcctacttcggctacagcaccccctgggggtattttgacttcaacagattccactgccacttctcaccacgtgactggcagcgactcatcaacaacaactggggattccggcctaagcgactcaacttcaagctcttcaacattcaggtcaaagaggttacggacaacaatggagtcaagaccatcgccaataaccttaccagcacggtccaggtcttcacggactcagactatcagctcccgtacgtgctcgggtcggctcacgagggctgcctcccgccgttcccagcggacgttttcatgattcctcagtacgggtatctgacgcttaatgatggaagccaggccgtgggtcgttcgtccttttactgcctggaatatttcccgtcgcaaatgctaagaacgggtaacaacttccagttcagctacgagtttgagaacgtacctttccatagcagctacgctcacagccaaagcctggaccgactaatgaatccactcatcgaccaatacttgcactatctctcaaagactattaacggttctggacagaatcaacaaacgctaaaattcagtgtggccggacccagcaacatggctgtccagggaagaaactacatacctggacccagctaccgacaacaacgtgtctcaaccactgtgactcaaaacaacaacagcgaatttgcttggcctggagcttcttcttgggctctcaatggacgtaatagcttgatgaatcctggacctgctatggccagccacaaagaaggagaggaccgtttctttcctttgtctggatctttaatttttggcaaacaaggaactggaagagacaacgtggatgcggacaaagtcatgataaccaacgaagaagaaattaaaactactaacccggtagcaacggagtcctatggacaagtggccacaaaccaccagagtgcccaagcacaggcgcagaccggctgggttcaaaaccaaggaatacttccgggtatggtttggcaggacagagatgtgtacctgcaaggacccatttgggccaaaattcctcacacggacggcaactttcacccttctccgctgatgggagggtttggaatgaagcacccgcctcctcagatcctcatcaaaaacacacctgtacctgcggatcctccaacggccttcaacaaggacaagctgaactctttcatcacccagtattctactggccaagtcagcgtggagatcgagtgggagctgcagaaggaaaacagcaagcgctggaacccggagatccagtacacttccaactattacaagtctaataatgttgaatttgctgttaatactgaaggtgtatatagtgaaccccgccccattggcaccagatacctgactcgtaatctg

SEQ ID NO: 626 - DNA, 2208 bp, Artificial Sequence
  source: /note="Description of Artificial Sequence: Synthetic polynucleotide"
  modified_base (1325)..(1325): a, c, t, g, unknown or other
atggctgccgatggttatcttccagattggctcgaggacaaccttagtgaaggaattcgcgagtggtgggctttgaaacctggagcccctcaacccaaggcaaatcaacaacatcaagacaacgctcgaggtcttgtgcttccgggttacaaataccttggacccggcaacggactcgacaagggggagccggtcaacgcagcagacgcggcggccctcgagcacgacaaggcctacgaccagcagctcaaggccggagacaacccgtacctcaagtacaaccacgccgacgccgagttccaggagcggctcaaagaagatacgtcttttgggggcaacctcgggcgagcagtcttccaggccaaaaagaggcttcttgaacctcttggtctggttgaggaagcggctaagacggctcctggaaagaagaggcctgtagagcagtctcctcaggaaccggactcctccgcgggtattggcaaatcgggtgcacagcccgctaaaaagagactcaatttcggtcagactggcgacacagagtcagtcccagaccctcaaccaatcggagaacctcccgcagccccctcaggtgtgggatctcttacaatggcttcaggtggtggcgcaccagtggcagacaataacgaaggtgccgatggagtgggtagttcctcgggaaattggcattgcgattcccaatggctgggggacagagtcatcaccaccagcacccgaacctgggccctgcccacctacaacaatcacctctacaagcaaatctccaccagcacatctggaggatcttcaaatgacaacgcctacttcggctacagcaccccctgggggtattttgacttcaacagattccactgccacttctcaccacgtgactggcagcgactcatcaacaacaactggggattccggcctaagcgactcaacttcaagctcttcaacattcaggtcaaagaggttacggacaacaatggagtcaagaccatcgccaataaccttaccagcacggtccaggtcttcacggactcagactatcagctcccgtacgtgctcgggtcggctcacgagggctgcctcccgccgttcccagcggacgttttcatgattcctcagtacgggtatctgacgcttaatgatggaagccaggccgtgggtcgttcgtccttttactgcctggaatatttcccgtcgcaaatgctaagaacgggtaacaacttccagttcagctacgagtttgagaacgtacctttccatagcagctacgctcacagccaaagcctggaccgactaatgaatccactcatcgaccnatacttgcactatctctcaaagactattaacggttctggacagaatcaacaaacgctaaaattcagtgtggccggacccagcaacatggctgtccagggaagaaactacatacctggacccagctaccgacaacaacgtgtctcaaccactgtgactcaaaacaacaacagcgaatttgcttggcctggagcttcttcttgggctctcaatggacgtaatagcttgatgaatcctggacctgctatggccagccacaaagaaggagaggaccgtttctttcctttgtctggatctttaatttttggcaaacaaggaactggaagagacaacgtggatgcggacaaagtcatgataaccaacgaagaagaaattaaaactactaacccggtagcaacggagtcctatggacaagtggccacaaaccaccagagtgcccaagcacaggcgcagaccggctgggttcaaaaccaaggaatacttccggatatggtttggcaggacagagatgtgtacctgcaaggacccatttgggccaaaattcctcacacggacggcaactttcacccttctccgctgatgggagggtttggaatgaagcacccgcctcctcagatcctcatcaaaaacacacctgtacctgcggatcctccaacggccttcaacaaggacaagctgaactctttcatcacccagtattctactggccaagtcagcgtggagatcgagtgggagctgcagaaggaaaacagcaagcgctggaacccggagatccagtacacttccaactattacaagtctaataatgttgaatttgctgttaatactgaaggtgtatatagtgaaccccgccccattggcaccagatacctgactcgtaatctg

SEQ ID NO: 627 - DNA, 2208 bp, Artificial Sequence
  source: /note="Description of Artificial Sequence: Synthetic polynucleotide"
atggctgccgatggttatcttccagattggctcgaggacaaccttagtgaaggaattcgcgagtggtgggctttgaaacctggagcccctcaacccaaggcaaatcaacaacatcaagacaacgctcgaggtcttgtgcttccgggttacaaataccttggacccggcaacggactcgacaagggggagccggtcaacgcagcagacgcggcggccctcgagcacgacaaggcctacgaccagcagctcaaggccggagacaacccgtacctcaagtacaaccacgccgacgccgagttccaggagcggctcaaagaagatacgtcttttgggggcaacctcgggcgagcagtcttccaggccaaaaagaggcttcttgaacctcttggtctggttgaggaagcggctaagacggctcctggaaagaagaggcctgtagagcagtctcctcaggaaccggactcctccgcgggtattggcaaatcgggtgcacagcccgctaaaaagagactcaatttcggtcagactggcgacacagagtcagtcccagaccctcaaccaatcggagaacctcccgcagccccctcaggtgtgggatctcttacaatggcttcaggtggtggcgcaccagtggcagacaataacgaaggtgccgatggagtgggtagttcctcgggaaattggcattgcgattcccaatggctgggggacagagtcatcaccaccagcacccgaacctgggccctgcccacctacaacaatcacctctacaagcaaatctccaacagcacatctggaggatcttcaaatgacaacgcctacttcggctacagcaccccctgggggtattttgacttcaacagattccactgccacttctcaccacgtgactggcagcgactcatcaacaacaactggggattccggcctaagcgactcaacttcaagctcttcaacattcaggtcaaagaggttacggacaacaatggagtcaagaccatcgccaataaccttaccagcacggtccaggtcttcacggactcagactatcagctcccgtacgtgctcgggtcggctcacgagggctgcctcccgccgttcccagcggacgttttcatgattcctcagtacgggtatctgacgcttaatgatggaagccaggccgtgggtcgttcgtccttttactgcctggaatatttcccgtcgcaaatgctaagaacgggtaacaacttccagttcagctacgagtttgagaacgtacctttccatagcagctacgctcacagccaaagcctggaccgactaatgaatccactcatcgaccaatacttgcactatctctcaaagactattaacggttctggacagaatcaacaaacgctaaaattcagtgtggccggacccagcaacatggctgtccagggaagaaactacatacctggacccagctaccgacaacaacgtgtctcaaccactgtgactcaaaacaacaacagcgaatttgcttggcctggagcttcttcttgggctctcaatggacgtaatagcttgatgaatcctggacctgctatggccagctacaaagaaggagaggacagtttctttcctttgtctggatctttaatttttggcaaacaaggaactggaagagacaacgtggatgcggacaaagtcatgataaccaacgaagaagaaattaaaactactaacccggtagcaacggagtcctatggacaagtggccacaaaccaccagagtgcccaagcacaggcgcagaccggctgggttcaaaaccaaggaatacttccgggtatggtttggcaggacagagatgtgtacctgcaaggacccatttgggccaaaattcctcacacggacggcaactttcacccttctccgctgatgggagggtttggaatgaagcacccgcctcctcagaccctcatcaaaaacacacctgtacctgcggatcctccaacggccttcaacaaggacaagctgaactctttcatcacccagtattctactggccaagtcagcgtggagatcgagtgggagctgcagaaggaaaacagcaagcgctggaacccggagatccagtacacttccaactattacaagtctaataatgttgaatttgctgttaatactgaaggtgtatatagtgaaccccgccccattggcaccagatacctgactcgtaatctg

SEQ ID NO: 628 - DNA, 2208 bp, Artificial Sequence; identical to SEQ ID NO: 611
  source: /note="Description of Artificial Sequence: Synthetic polynucleotide"

SEQ ID NO: 629 - DNA, 2208 bp, Artificial Sequence
  source: /note="Description of Artificial Sequence: Synthetic polynucleotide"
atggctgccgatggttatcttccagattggctcgaggacaaccttagtgaaggaattcgcgagtggtgggctttgaaacctggagcccctcaacccagggcaaatcaacaacatcaagacaacgctcgaggtcttgtgcttccgggttacaaataccttggacccggcaacggactcgacaagggggagccggtcaacgcagccgacgcggcggccctcgagcacgacaaggcctacgaccagcagctcaaggccggagacaacccgtacctcaagtacaaccacgccgacgccgagttccaggagcggctcaaagaagatacgtcttttgggggcaacctcgggcgagcagtcttccaggccaaaaagaggcttcttgaacctcttggtctggttgaggaagcggctaagacggctcctggaaagaagaggcctgtagagcagtctcctcaggaaccggactcctccgcgggtattggcaaatcgggtgcacagcccgctaaaaagagactcaatttcggtcagactggcgacacagagtcagtcccagaccctcaaccaatcggagaacctcccgcagccccctcaggtgtgggatctcttacaatggcttcaggtggtggcgcaccagtggcagacaataacgaaggtgccgatggagtgggtagttcctcgggaaattggcattgcgattcccaatggctgggggacagagtcatcaccaccagcacccgaacctgggccctgcccacctacaacaatcacctctacaagcaaatctccaacagcacatctggaggatcttcaaatgacaacgcctacttcggctacagcaccccctgggggtattttgacttcaacagattccactgccacttctcaccacgtgactggcagcgactcatcaacaacaactggggattccggcctaagcgactcaacttcaagctcttcaacattcaggtcaaagaggttacggacaacaatggagtcaagaccatcgccaataaccttaccagcacggtccaggtcttcacggactcagactgtcagctcccgtacgtgctcgggtcggctcacgagggctgcctcccgccgttcccagcggacgttttcatgattcctcagtacgggtatctgacgcttaatgatggaagccaggccgtgggtcgttcgtccttttactgcctggaatatttcccgtcgcaaatgctaagaacgggtaacaacttccagttcagctacgagtttgagaacgtacctttccatagcagctacgctcacagccaaagcctggaccgactaacgaatccactcatcgaccaatacttgtactatctctcaaagactattaacggttctggacagaatcaacaaacgctaaaattcagtgtggccggacccagcaacatggctgtccagggaagaaactacatacctggacccagctaccgacaacaacgtgtctcaaccactgtgactcaaaacaacaacagcgaatttgcttggcctggagcttcttcttgggctctcaatggacgtaatagcttgatgaatcctggacctgctatggccagccacaaagaaggagaggaccgtttctttcctttgtctggatctttaatttttggcaaacaaggaactggaagagacaacgtggatgcggacaaagtcatgataaccaacgaagaagaaattaaaactactaacccggtagcaacggagtcccatggacaagtggccacaaaccaccagagtgcccaagcacaggcgcagaccggctgggttcaaaaccaaggaatacttccgggtatggtttggcaggacagagatgtgtacctgcaaggacccatttgggccaaaattcctcacacggacggcaactttcacccttctccgctgatgggagggtttggaatgaagcacccgcctcctcagatcctcatcaaaaacacacctgtacctgcggatcctccaacggccttcaacaaggacaagctgaactctttcatcacccagtattctactggccaagtcagcgtggagatcgagtgggagctgcagaaggaaaacagcaagcgctggaacccggagatccagtacacttccaactattacaagtctaataatgttgaatttgctgttaatactgaaggtgtatatagtgaaccccgccccattggcaccagatacctgactcgtaatctg

SEQ ID NO: 630 - DNA, 2208 bp, Artificial Sequence
  source: /note="Description of Artificial Sequence: Synthetic polynucleotide"
atggctgccgatggttatcttccagattggctcgaggacaaccttagtgaaggaattcgcgagtggtgggctttgaaacctggagcccctcaacccaaggcaaatcaacaacatcaagacaacgctcgaggtcttgtgcttccgggttacaaataccttggacccggcaacggactcgacaagggggagccggtcaacgcagcagacgcggcggccctcgagcacgacaaggcctacgaccagcagctcaaggccggagacaacccgtacctcaagtacaaccacgccgacgccgagttccaggagcggctcaaagaagatacgtcttttgggggcaacctcgggcgagcagtcttccaggccaaaaagaggcttcttgaacctcttggtctggttgaggaagcggctaagacggctcctggaaagaagaggcctgtagagcagtctcctcaggaaccggactcctccgcgggtattggcaaatcgggtgcacagcccgctaagaagagactcaatttcggtcagactggcgacacagagtcagtcccagaccctcaaccaatcggagaacctcccgcagccccctcaggtgtgggatctcttacaatggcttcaggtggtggcgcaccagtggcagacaataacgaaggtgccgatggagtgggtagttcctcgggaaattggcattgcgattcccaatggctgggggacagagtcatcaccaccagcacccgaacctgggccctgcccacctacaacaatcacctctacaagcaaatctccaacagcacatctggaggatcttcaaatgacaacgcctacttcggctacagcaccccctgggggtattttgacttcaacagattccactgccacttctcaccacgtgactggcagcgactcatcaacaacaactggggattccggcctaagcgactcaacttcaagctcttcaacattcaggtcaaagaggttacggacaacaatggagtcaagaccatcgccaataaccttaccagcacggtccaggtcttcacggactcagactatcagctcccgtacgtgctcgggtcggctcacgagggctgcctcccgccgttcccagcggacgttttcatgattcctcagtacgggtatctgacgcttaatgatggaagccaggccgtgggtcgttcgtccttttactgcctggaatatttcccgtcgcaaatgctaagaacgggtaacaacttccagttcagctacgagtttgagaacgtacctttccatagcagctacgctcacagccaaagcctggaccgactaatgaatccacccatcgaccaatacttgtactatctctcaaagactattaacggttctggacagaatcaacaaacgctaaaattcagtgtggccggacccagcaacatggctgtccagggaagaaactacatacctggacccagctaccgacaacaacgtgtctcaaccactgtgactcaaaacaacaacagcgaatttgcttggcctggagcttcttcttgggctctcaatggacgtaatagcttgatgaatcctggacctgctatggccagccacaaagaaggagaggaccgtttctttcctttgtctggatctttaatttttggcaaacaaggaactggaagagacaacgtggatgcggacaaagtcatgataaccaacgaagaagaaattaaaactactaacccggtagcaacggagtcctatggacaagtggccacaaaccaccagagtgcccaagcacaggcgcagaccggctgggttcaaaaccaaggaatacttccgggtatggtttggcaggacagagatgtgtacctgcaaggacccatttgggccaaaattcctcacacggacggcaactttcacccttctccgctgatgggagggtttggaatgaagcacccgcctcctcagatcctcatcaaaaacacacctgtacctgcggatcctccaacggccttcaacaaggacaagctgaactctttcatcacccagtattctactggccaagtcagcgtggagatcgagtgggagctgcagaaggaaaacagcaagcgctggaacccggagatccagtacacttccaactattacaagtctaataatgttgaatttgctgttaatactgaaggtgtatatggtgaaccccgccccattggcaccagatacctgactcgtaatctg

SEQ ID NO: 631 - DNA, 2208 bp, Artificial Sequence
  source: /note="Description of Artificial Sequence: Synthetic polynucleotide"
atggctgccgatggttatcttccagattggctcgaggacaaccttagtgaaggaattcgcgagtggtgggctttgaaacctggagcccctcaacccaaggcaaatcaacaacatcaagacaacgctcgaggtcttgtgcttccgggttacaaataccttggacccggcaacggactcgacaagggggagccggtcaacgcagcagacgcggcggccctcgagcacgacaaggcctacgaccagcagctcaaggccggagacaacccgtacctcaagtacaaccacgccgacgccgagttccaggagcggctcaaagaagatacgtcttttgggggcaacctcgggcgagcagtcttccaggccaaaaagaggcttcttgaacctcttggtctggttgaggaagcggctaagacggctcctggaaagaagaggcctgtagagcagtctcctcaggaaccggactcctccgcgggtattggcaaatcgggtgcacagcccgctaaaaagagactcaatttcggtcagactggcgacacagagtcagtcccagaccctcaaccaatcggagaacctcccgcagccccctcaggtgtgggatctcttacaatggcttcaggtggtggcgcaccagtggcagacaataacgaaggtgccgatggagtgggtagttcctcgggaaattggcattgcgattcccaatggctgggggacagagtcatcaccaccagcacccgaacctgggccctgcccacctacaacaatcacctctacaagcaaatctccaacagcacatctggaggatcttcaaatgacaacgcctacttcggctacagcaccccctgggggtattttgacttcaacagattccactgccacttctcaccacgtgaccggcagcgactcatcaacaacaactggggattccggcctaagcgactcaacttcaagctcttcaacattcaggtcaaagaggttacggacaacaatggagtcaagaccatcgccaataaccttaccagcacggtccaggtcttcacggactcagactatcagctcccgtacgtgctcgggtcggctcacgagggctgcctcccgccgttcccagcggacgttttcatgattcctcagtacgggtatctgacgcttaatgatggaagccaggccgtgggtcgttcgtccttttactgcctggaatatttcccgtcgcaaatgctaagaacgggtaacaacttccagttcagctacgagtttgagaacgtacctttccatagcagctacgctcacagccaaagcctggaccgactaatgaatccactcatcgaccaatacttgtactatctctcaaagactattaacggttctggacagaatcaacaaacgctaaaattcagtgtggccggacccagcaacatggctgtccagggaagaaactacatacctggacccagctaccgacaacaacgtgtctcaaccactgtgactcaaaacaacaacagcgaatttgcttggcctggagcttcttcttgggctctcaatggacgtaatagcttgatgaatcctggacctgctatggccagccacaaagaaggagaggaccgtttctttcctttgtctggatctttaatttttggcaaacaaggaactggaagagacaacgtggatgcggacaaagtcatgataaccaacgaagaagaaattaaaactactaacccggtagcaacggagtcctatggacaagtggccacaaaccaccagagtgcccaagcacaggcgcagaccggctgggttcaaaaccaaggaatacttccgggtatggtttggcaggacagagatgtgtacctgcaaggacccatttgggccaaaattcctcacacggacggcaactttcacccttctccgctgatgggagggtttggaatgaagcacccgcctcctcagatcctcatcaaaaacacacctgtacctgcggatcctccaacggccttcaacaaggacaagctgaactctttcatcacccagtattctactggccaagtcagcgtggagatcgagtgggagctgcagaaggaaaacagcaagcgctggaacccggagatccagtacacttccaactattacaagtctaataatgttgaatttgctgttaatactgaaggtgtatatagtgaaccccgccccattggcaccagatacctgactcgtaatctg

SEQ ID NO: 632 - DNA, 2208 bp, Artificial Sequence
  source: /note="Description of Artificial Sequence: Synthetic polynucleotide"
atggctgccgatggttatcttccagattggctcgaggacaaccttagtgaaggaattcgcgagtggtgggctttgaaacctggagcccctcaacccaaggcaaatcaacaacatcaagacaacgctcgaggtcttgtgcttccgggttacaaataccttggacccggcaacggactcgacaagggggagccggtcaacgcagcagacgcggcagccctcgagcacgacaaggcctacgaccagcagctcaaggccggagacaacccgtacctcaagtacaaccacgccgacgccgagttccaggagcggctcaaagaagatacgtcttttgggggcaacctcgggcgagcagtcttccaggccaaaaagaggcttcttgaacctcttggtctggttgaggaagcggctaagacggctcctggaaagaagaggcctgtagagcagtctcctcaggaaccggactcctccgcgggtattggcaaatcgggtgcacagcccgctaaaaagagactcaatttcggtcagactggcgacacagagtcagtcccagaccctcaaccaatcggagaacctcccgcagccccctcaggtgtgggatctcttacaatggcttcaggtggtggcgcaccagtggcagacaataacgaaggtgccgatggagtgggtagttcctcgggaaattggcattgcaattcccaatggctgggggacagagtcatcaccaccagcacccgaacctgggccctgcccacctacaacaatcacctctacaagcaaatctccaacagcacatctggaggatcttcaaatgacaacgcctacttcggctacagcaccccctgggggtattttgacttcaacagattccactgccacttctcaccacgtgactggcagcgactcatcaacaacaactggggattccggcctaagcgactcaacttcaagctcttcaacattcaggtcaaagaggttacggacaacaatggagtcaagaccatcgccaataaccttaccagcacggtccaggtcttcacggactcagactatcagctcccgtacgtgctcgggtcggctcacgagggctgcctcccgccgttcccagcggacgttttcatgattcctcagtacgggtatctgacgcttaatgatggaagccaggccgtgggtcgttcgtccttttactgcctggaatatttcccgtcgcaaatgctaagaacgggtaacaacttccagttcagctacgagtttgagaacgtacctttccatagcagctacgctcacagccaaagcctggaccgactaatgaatccactcatcgaccaatacttgtactatctctcaaagactattaacggttctggacagaatcaacaaacgctaaaattcagtgtggccggacccggcaacatggctgtccagggaagaaactacatacctggacccagctaccgacaacaacgtgtctcaaccactgtgactcaaaacaacaacagcgaatttgcttggcctggagcttcttcttgggctctcaatggacgtaatagcttgatgaatcctggacctgctatggccagccacaaagaaggagaggaccgtttctttcctttgtctggatctttaatttttggcaaacaaggaactggaagagacaacgtggatgcggacaaagtcatgataaccaacgaagaagaaattaaaactactaacccggtagcaacggagtcctatggacaagtggccacaaaccaccagagtgcccaagcacaggcgcagaccggctgggttcaaaaccaaggaatacttccgggtatggtttggcaggacagagatgtgtacctgcaaggacccatttgggccaaaattcctcacacggacggcaactttcacccttctccgctgatgggagggtttggaatgaagcacccgcctcctcagatcctcatcaagaacacacctgtacctgcggatcctccaacggccttcaacaaggacaagctgaactctttcatcacccagtattctactggccaagtcagcgtggagatcgagtgggagctgcagaaggaaaacagcaagcgctggaacccggagatccagtacacttccaactattacaagtctaataatgttgaatttgctgttaatactgaaggtgtatatagtgaaccccgccccattggcaccagatacctgactcgtaatctg

SEQ ID NO: 633 - DNA, 2208 bp, Artificial Sequence
  source: /note="Description of Artificial Sequence: Synthetic polynucleotide"
atggctgccgatggttatcttccagattggctcgaggacaaccttagtgaaggaattcgcgagtggtgggctttgaaacctggagcccctcaacccaaggcaaatcaacaacatcaagacaacgctcgaggtcttgtgcttccgggttacagataccttggacccggcaacggactcgacaagggggagccggtcaacgcagcagacgcggcggccctcgagcacgacaaggcctacgaccagcagctcaaggccggagacaacccgtacctcaagtacaaccacgccgacgccgagttccaggagcggctcaaagaagatacgtcttttgggggtaacctcgggcgagcagtcttccaggccaaaaagaggcttcttgaacctcttggtctggttgaggaagcggctaagacggctcctggaaagaagaggcctgtagagcagtctcctcaggaaccggactcctccgcgggtatcggcaaatcgggtgcacagcccgctaaaaagagactcaatttcggtcagactggcgacacagagtcagtcccagaccctcaaccaatcggagaacctcccgcagccccctcaggtgtgggatctcttacaatggcttcaggtggtggcgcaccagtggcagacaataacgaaggtgccgatggagtgggtagttcctcgggaaattggcattgcgattcccaatggctgggggacagagtcatcaccaccagcacccgaacctgggccctgcccacctacaacaatcacctctacaagcaaatctccaacagcacatctggaggatcttcaaatgacaacgcctacttcggctacagcaccccctgggggtattttgacttcaacagattccactgccacttctcaccacgtgactggcagcgactcatcaacaacaactggggattccggcctaagcgactcaacttcaagctcttcaacattcaggtcaaagaggttacggacaacaatggagtcaagaccgtcgccaataaccttaccagcacggtccaggtcttcacggactcagactatcagctcccgtacgtgctcgggtcggctcacgagggctgcctcccgccgttcccagcggacgttttcatgattcctcagtacgggtatctgacgcttaatgatggaagccaggccgtgggtcgttcgtccttttactgcctggaatatttcccgtcgcaaatgctaagaacgggtaacaacttccagttcagctacgagtttgagaacgtacctttccatagcagctacgctcacagccaaagcctggaccgactaatgaatccactcatcgaccaatacttgtactatctctcaaagactattaacggttctggacagaatcaacaaacgctaaaattcagtgtggccggacccagcaacatggctgtccagggaagaaactacatacctggacccagctaccgacaacaacgtgtctcaaccactgtgactcaaaacaacaacagcgaatttgcttggcctggagcttcttcttgggctctcaatggacgtaatagcttgatgaatcctggacctgctatggccagccacaaagaaggagaggaccgtttctttcctttgtctggatctttaatttttggcaaacaaggaactggaagagacaacgtggatgcggacaaagtcatgataaccaacgaagaagaaattaaaactactaacccggtagcaacggagtcctatggacaagtggccacaaaccaccagagtgcccaagcacaggcgcagaccggctgggttcaaaaccaaggaatacttccgggtatggtttggcaggacagagatgtgtacctgcaaggacccatttgggccaaaattcctcacacggacggcaactttcacccttctccgctgatgggagggtttggaatgaagcacccgcctcctcagatcctcatcaaaaacacacctgtacctgcggatcctccaacggccttcaacaaggacaagctgaactctttcatcacccagtattctactggccaagtcagcgtggagatcgagtgggagctgcagaaggaaaacagcaagcgctggaacccggagatccagtacacttccaactattacaagtctaataatgttgaatttgctgttaatactgaaggtgtatatagtggaccccgccccattggcaccagatacctgactcgtaatctg

SEQ ID NO: 634 - DNA, 2208 bp, Artificial Sequence
  source: /note="Description of Artificial Sequence: Synthetic polynucleotide"
atggctgccgatggttatcttccagattggctcgaggacaaccttagtgaaggaattcgcgagtggtgggctttgaaacctggagcccctcaacccaaggcaaatcaacaacatcaagacaacgctcgaggtcttgtgcttccgggttacaaataccttggacccggcaacggactcgacaagggggagccggtcaacgcagcagacgcggcggccctcgagcacgacaaggcctacgaccagcagctcaaggccggagacaacccgtacctcaagtacaaccacgccgacgccgagttccaggagcggctcaaagaagatacgtcttttgggggcaacctcgggcgagcagtcttccaggccaaaaagaggcttcttgaacctcttggtctggttgaggaagcggctaagacggctcctggaaagaagaggcctgtagagcagtctcctcaggaaccggactcctccgcgggtattggcaaatcgggtgcacagcccgctaaaaagagactcaatttcggtcagactggcgacacagagtcagtcccagaccctcaaccaatcggagaacctcccgcagccccctcaggtgtgggatctcttacaatggcttcaggtggtggcgcaccagtggcagacaataacgaaggtgccgatggagtgggtagttcctcgggaaattggcattgcgattcccaatggctgggggacagagtcatcaccaccagcacccgaacctgggccctgcccacctacaacaatcacctctacaagcaaatctccaacagcacatctggaggatcttcaaatgacaacgcctacttcggctacagcaccccctgggggtattttgacttcaacagattccactgccacttctcaccacgtgactggcagcgactcatcaacaacaactggggattccggcctaagcgactcaacttcaagctcttcaacattcaggtcaaagaggttacggacaacaatggagtcaagaccatcgccaataaccttaccagcacggtccaggtcttcacggactcagactatcagctcccgtacgtgctcgggtcggctcacgagggctgcctcccgccgttcccagcggacgttttcatgattcctcagtacgggtatctgacgcttaatgatggaagccaggccgtgggtcgttcgtccttttactgcctggaatatttcccgtcgcaaatgctaagaacgggtaacaacttccagttcagctacgagtttgagaacgtacctttccatagcagctacgctcacagccaaagcctggaccgactaatgaatccactcatcgaccaatacttgtactatctctcaaagactattaacggttctggacagaatcaacaaacgctaaaattcagtgtggccggacccagcaacatggctgtccagggaagaaactacatacctggacccagctaccgacaacaacgtgtctcaaccactgtgactcaaaacaacaacagcgaatttgcttggcctggagcttcttcttgggctctcaatggacgtaatagcttgatgaatcctggacctgctatggccagccacaaagaaggagaggaccgtttctttcctttgtctggatctttaatttttggcaaacaaggaactggaagagacaacgtggatgcggacaaagtcatgataaccaacgaagaagaaattaaaactactaacccggtagcaacggagtcctatggacaagtggccacaaaccaccagagtgcccaagcacaggcgcagaccggctgggttcaaaaccaaggaatacttccgggtatggtttggcaggacagagatgtgtacctgcaaggacccatttgggccaaaattcctcacacggacggcaactttcacccttctccgctgatgggagggtttggaatgaagcacccgcctcctcagatcctcatcaaaaacacacctgtacctgcggatcctccaacggccttcaacaaggacaagctgaactctttcatcacccagtattctactggccaagtcagcgtggagatcgagtgggagctgcagaaggaaaacagcaagcgctggaacccggagatccagtacacttccaactattacaagtctaataatgttgaatttgctgttaatactgaaggtgtatatagtgaaccccgccccattggcaccagatacctgactcgtaatctg

SEQ ID NO: 635 - DNA, 2208 bp, Artificial Sequence
  source: /note="Description of Artificial Sequence: Synthetic polynucleotide"
atggctgccgatggttatcttccagattggctcgaggacaaccttagtgaaggaattcgcgagtggtgggctttgaaacctggagcccctcaacccaaggcaaatcaacaacgtcaagacaacgctcgaggtcttgtgcttccgggttacaaataccttggacccggcaacggactcgacaagggggagccggtcaacgcagcagacgcggcggccctcgagcacgacaaggcctacgaccagcagctcaaggccggaggcaacccgtgcctcaagtacaaccacgccgacgccgagttccaggagcggctcaaagaagatacgtcttttgggggcaacctcgggcgagcagtcttccaggccaaaaagaggcttcttgaacctcttggtctggttgaggaagcggctaagacggctcctggaaagaagaggcctgtagagcagtctcctcaggaaccggactcctccgcgggtattggcagatcgggtgcacagcccgctaaaaagagactcaatttcggtcagactggcgacacagagtcagtcccagaccctcaaccaatcggagaacctcccgcagccccctcaggtgtgggatctcttacaatggcttcaggtggtggcgcaccagtggcagacaataacgaaggtgccgatggagtgggtagttcctcgggaaattggcattgcgattcccaatggctgggggacagagtcatcaccaccagcacccgaacctgggccctgcccacctacaacaatcacctctacaagcaaatctccaacagcacatctggaggatcttcaaatgacaacgcctacttcggctacagcaccccctgggggtattttgacttcaacagattccactgccacttctcaccacgtgactggcagcgactcatcaacaacaactggggattccggcctaagcgactcaacttcaagctcttcaacattcaggtcaaagaggttacggacaacaatggagtcaaggccatcgccaataaccttaccagcacggtccaggtcttcacggactcagactatcagctcccgtacgtgctcgggtcggctcacgagggctgcctcccgccgttcccagcggacgttttcatgattcctcagtacgggtatctgacgcttaatgatggaagccaggccgtgggtcgttcgtccttttactgcctggaatatttcccgtcgcaaatgctaagaacgggtaacaacttccagttcagctacgagtttgagaacgtacctttccatagcagctacgctcacagccaaagcctggaccgactaatgaatccactcatcgaccaatacttgtactatctctcaaagactattgacggttctggacagaatcaacaaacgctaaaattcagtgtggccggacccagcaacatggctgtccagggaagaaactacatacctggacccagctaccgacaacaacgtgtctcaaccactgtgactcaaaacaacaacagcgaatttgcttggcctggagcttcttcttgggctctcaatggacgtaatagcttgatggatcctggacctgctatggccagccacaaagaaggagaggaccgtttctttcctttgtctggatctttaatttttggcaaacaaggaactggaagagacaacgtggatgcggacaaagtcatgataaccaacgaagaagaaattaaaactactaacccggtagcaacggagtcctatggacaagtggccacaaaccaccagagtgcccaagcacaggcgcagaccggctgggttcaaaaccaaggaatacttccgggtatggtttggcaggacagagatgtgtacctgcaaggacccatttgggccaaaattcctcacacgggcggcaactttcacccttctccgctgatgggagggtttggaatgaagcacccgcctcctcagatcctcatcaaaaacacacctgtacctgcggatcctccaacggccttcaacaaggacaagctgaactctttcatcacccagtattctactggccaagtcagcgtggagatcgagtgggagctgcagaaggaaaacagcaagcgctggaacccggagatccagtacacttccaactattacaagtctaataatgttgaatttgctgttaatactgaaggtgtatatagtgaaccccgccccattggcaccagatacctgactcgtaatctg

SEQ ID NO: 636 - DNA, 2208 bp, Artificial Sequence
  source: /note="Description of Artificial Sequence: Synthetic polynucleotide"
atggctgccgatggttatcttccagattggctcgaggacaaccttagtgaaggaattcgcgagtggtgggctttgaaacctggagcccctcaacccaaggcaaatcaacaacatcaagacaacgctcgaggtcttgtgcttccgggttacaaataccttggacccggcaacggactcgacaagggggagccggtcaacgcagcagacgcggcggccctcgagcacgacaaggcctacgaccagcagctcaaggccggagacaacccgtacctcaagtacaaccacgccgacgccgagttccaggagcggctcaaagaagatacgtcttttgggggcaacctcgggcgagcagtcttccaggccaaaaagaggcttcttgaacctcttggtctggttgaggaagcggctaagacggctcctggaaagaagaggcctgtagagcagtctcctcaggaaccggactcctccgcgggtattggcaaatcgggtgcacagcccgctaaaaagagactcaatttcggtcagactggcgacacagagtcagtcccagaccctcaaccaatcggagaacctcccgcagccccctcaggtgtgggatctcttacaatggcttcaggtggtggcgcaccagtggcagacaataacgaaggtgccgatggagtgggtagttcctcgggaaattggcattgcgattcccaatggctgggggacagagtcatcaccaccagcacccgaacctgggccctgcccacctacaacaatcacctctacaagcaaatctccaacagcacatctggaggatcttcaaatgacaacgcctacttcggctacagcaccccctgggggtattttgacttcaacagattccactgccacttctcaccacgtgactggcagcgactcatcaacaacaactggggattccggcctaagcgactcaacttcaagctcttcaacattcaggtcaaagaggttacggacaacaatggagtcaagaccatcgccaataaccttaccagcacggtccaggtcttcacggactcagactatcagctcccgtacgtgctcgggtcggctcacgagggctgcctcccgccgttcccagcggacgttttcatgattcctcagtacgggtatctgacgcttaatgatggaagccaggccgtgggtcgttcgtccttttactgcctggaatatttcccgtcgcaaatgctaagaacgggtaacaacttccagttcagctacgagtttgagaacgtacctttccatagcagctacgctcacagccaaagcctggaccgactaatgaatccactcatcgaccaatacttgtactatctctcaaagactattaacggttctggacagaatcaacaaacgctaaaattcagtgtggccggacccagcaacatggctgtccagggaagaaactacatacctggacccagctaccgacaacaacgtgtctcaaccactgtgactcaaaacaacaacagcgaatttgcttggcctggagcttcttcttgggctctcaatggacgtaatagcttgatgaatcctggacctgctatggccagccacaaagaaggagaggaccgtttctttcctttgtctggatctttaatttttggcaaacaaggaactggaagagacaacgtggatgcggacaaagtcatgataaccaacgaagaagaaattaaaactactaacccggtagcaacggagtcctatggacaagtggccacaaaccaccagagtgcccaagcacaggcgcagaccggctgggttcaaaaccaaggaatacttccgggtatggtttggcaggacagagatgtgtacctgcaaggacccatttgggccaaaattcctcacacggacggcaactttcacccttctccgctgatgggagggtttggaatgaagcacccgcctcctcagatcctcatcaaaaacacacctgtacctgcggatcctccaacggccttcaacaaggacaagctgaactctttcatcacccagtattctactggccaagtcagcgtggagatcgagtgggagctgcagaaggaaaacagcaagcgctggaacccggagatccagtacacttccaactattacaagcctaataatgttgaatttgctgttaatactgaaggtgtatatagtgaaccccgccccattggcaccagatacctgactcgtaatctg

SEQ ID NO: 637 - DNA, 2208 bp, Artificial Sequence
  source: /note="Description of Artificial Sequence: Synthetic polynucleotide"
atggctgccgatggttatcttccagattggctcgaggacaaccttagtgaaggaattcgcgagtggtgggctttgaaacctggagcccctcaacccaaggcaaatcaacaacatcaagacaacgctcgaggtcttgtgcttccgggttacaaataccttggacccggcaacggactcgacaagggggagccggtcaacgcagcagacgcggcggccctcgagcacaacaaggcctacgaccagcagctcaaggccggagacaacccgtacctcaagtgcaaccacgccgacgccgagttccaggagcggctcaaagaagatacgtcttttgggggcaacctcgggcgagcagtcttccaggccaaaaagaggcctcttgaacctcttggtctggttgaggaagcggctaagacggctcctggaaagaagaggcctgtagagcagtctcctcaggaaccggactcctccgcgggtattggcaaatcgggtgcacagcccgctaaaaagagactcaatttcggtcagactggcgacacagagtcagtcccagaccctcaaccaatcggagaacctcccgcagccccctcaggtgtgagatctcttacaatggcttcaggtggtggcgcaccagtggcagacaataacgaaggtgccgatggagtgggtagttcctcgggaaattggcattgcgattcccaatggctgggggacagagtcatcaccaccagcacccgaacctgggccctgcccacctacaacaatcacctctacaagcaaatctccaacagcacatctggaggatcttcaaatgacaacgcctacctcggctacagcaccccctgggggtattttgacttcaacagattccactgccacttctcaccacgtgactggcagcgactcatcaacaacaactggggattccggcctaagcgactcaacttcaagctcttcaacattcaggtcaaagaggttacggacaacaatggagtcaagaccatcgccaataaccttaccagcacggtccaggtcttcacggactcagactatcagctcccgtacgtgctcgggtcggctcacgagggctgcctcccgccgttcccagcggacgttttcatgattcctcagtacgggtatctgacgcttaatgatggaagccaggccgtgggtcgttcgtccttttactgcctggaatatttcccgtcgcaaatgctaagaacgggtaacaacttccagttcagctacgagtttgagaacgtacctttccatagcagctacgctcacagccaaagcctggaccgactaatgaatccactcatcgaccaatacttgtactatctctcaaagactattaacggttctggacagaatcaacaaacgctaaaattcagtgtggccggacccagcaacatggctgtccagggaagaaactacatacctggacccagctaccgacaacaacgtgtctcaaccactgtgactcaaaacaacaacagcgaatttgcttggcctggagcttcttcttgggctctcaatggacgtaatagcttgatgaatcctggacctactatggccagccacaaagaaggagaggaccgtttctttcctttgtctggatctttaatttttggcaaacaaggaactggaagagacaacgtggatgcggacaaagtcatgataaccaacgaagaagaaattaaaactactaacccggtagcaacggagtcctatggacaagtggccacaaaccaccagagtgcccaagcacaggcgcagaccggctgggttcaaaaccaaggaatacttccgggtatggtttggcaggacagagatgtgtacctgcaaggacccatttgggccaaaattcctcacacggacggcaactttcacccttctccgctgatgggagggtttggaatgaagcacccgcctcctcagatcctcatcaaaaacacacctgtacctgcggatcctccaacggccttcaacaaggacaagctgaactctttcatcacccagtattctactggccaagtcagcgtggagatcgagtgggagctgcagaaggaaaacagcaagcgctggaacccggagatccagtacacttccaactattacaagtctaataatgttgaatttgctgttaatactgaaggtgtatatagtgaaccccgccccattggcaccagatacctgactcgtaatctg

SEQ ID NO: 638 - DNA, 2208 bp, Artificial Sequence
  source: /note="Description of Artificial Sequence: Synthetic polynucleotide"
atggctgccgatggttatcttccagattggctcgaggacaaccttagtgaaggaattcgcgagtggtgggctttgaaacctggagcccctcaacccaaggcaaatcaacaacatcaagacaacgctcgaggtcttgtgcttccgggttacaaataccttggacccggcaacggactcgacaagggggagccggtcaacgcagcagacgcggcggccctcgtgcacgacaaggcctacgaccagcagctcaaggccggagacaacccgtacctcaagtgcaaccacgccgacgccgagttccaggagcggctcaaagaagatacgtcttttgggggcaacctcgggcgagcagtcttccaggccaaaaagaggcttcttgaacctcttggtctggttgaggaagcggctaagacggctcctggaaagaagaggcctgtagagcagtctcctcaggaaccggactcctccgcgggtattggcaaatcgggtgcacagcccgctaaaaagagactcaatttcggtcagactggcgacacagagtcagtcccagaccctcaaccaatcggagaacctcccgcagccccctcaggtgtgggatctcttacaatggcttcaggtggtggcgcaccagtggcagacaataacgaaggtgccgatggagtgggtagttcctcgggaaattggcattgcgattcccaatggctgggggacagagtcatcaccaccagcacccgaacctgggccctgcccacctacaacaatcacctctacaagcaaatctccaacagcacatctggaggatcttcaaatgacaacgcctacctcggctacagcaccccctgggggtattttgacttcaacagattccactgccacttctcaccacgtgactggcagcgactcatcaacaacaactggggattccggcctaagcgactcaacttcaagctcttcaacattcaggtcaaagaggttacggacaacaatggagtcaagaccatcgccaataaccttaccagcacggtccaggtcttcacggactcagactatcagctcccgtacgtgctcgggtcggctcacgagggctgcctcccgccgttcccagcggacgttttcacgattcctcagtacgggtatctgacgcttaatgatggaagccaggccgtgggtcgttcgtccttttactgcctggaatatttcccgtcgcaaatgctaagaacgggtaacaacttccagttcagctacgagtttgagaacgtacctttccatagcagctacgctcacagccaaagcctggaccgactaatgaatccactcatcgaccaatacttgtactatctctcaaagactattaacggttctggacagaatcaacaaacgctaaaattcagtgtggccggacccagcaacatggctgtccagggaagaaactacatacctggacccagctaccgacaacaacgtgtctcaaccactgtgactcaaaacaacaacagcgaatttgcttggcctggagcttcttcttgggctctcaatggacgtaatagcttgatgaatcctggacctgctatggccagccacaaagaaggagaggaccgtttctttcctttgtctggatctttaatttttggcaaacaaggaactggaagagacaacgtggatgcggacaaagtcatgataaccaacgaagaagaaattaaaactactaacccggtagcaacggagtcctatggacaagtggccacaaaccaccagagtgcccaagcacaggcgcagaccggctgggttcaaaaccaaggaatacttccgggtatggtttggcaggacagagatgtgtacctgcaaggacccatttgggccaaaattcctcacacggacggcaactttcacccttctccgctgatgggagggtttggaatgaagcacccgcctcctcagatcctcatcaaaaacacacctgtacctgcggatcctccaacggccttcaacaaggacaagctgaactctttcatcacccagtattctactggccaagtcagcgtggagatcgagtgggagctgcagaaggaaaacagcaagcgctggaacccggagatccagtacacttccaactattacaagtctaataatgttgaatttgctgttaatactgaaggtgtatatagtgaaccccgccccattgggccccgatacctgactcgtaatttt

SEQ ID NO: 639 - DNA, 2208 bp, Artificial Sequence
  source: /note="Description of Artificial Sequence: Synthetic polynucleotide"
atggctgccgatggttatcttccagattggctcgaggacaaccttagtgaaggaattcgcgagtggtgggctttgaaacctggagcccctcaacccaaggcaaatcaacaacatcaagacaacgctcgaggtcttgtgcttccgggttacaaataccttggacccggcaacggactcgacaagggggagccggtcaacgcagcagacgcggcggccctcgagcacaacaaggcctacgaccagcagctcaaggccggagacaacccgtacctcaagtgcaaccacgccgacgccgagttccaggagcggctcaaagaagatacgtcttttgggggcaacctcgggcgagcagtcttccaggccaaaaagaggcttcttgaacctcttggtctggttgaggaagcggctaagacggctcctggaaagaagaggcctgtagagcagtctcctcaggaaccggactcctccgcgggtattggcaaatcgggtgcacagcccgctaaaaagagactcaatttcggtcagactggcgacacagagtcagtcccagaccctcaaccaatcggagaacctcccgcagccccctcaggtgtgagatctcttacaatggcttcaggtggtggcgcaccagtggcagacaataacgaaggtgccgatggagtgggtagttcctcgggaaattggcattgcgattcccaatggctgggggacagagtcatcaccaccagcacccgaacctgggccctgcccacctacaacaatcacctctacaagcaaatctccaacagcacatctggaggatcttcaaatgacaacgcctacctcggctacagcaccccctgggggtattttgacttcaacagattccactgccacttctcaccacgtgactggcagcgactcatcaacaacaactggggattccggcctaagcgactcaacttcaagctcttcaacattcaggtcaaagaggttacggacaacaatggagtcaagaccatcgccaataaccttaccagcacggtccaggtcttcacggactcagactatcagctcccgtacgtgctcgggtcggctcacgagggctgcctcccgccgttcccagcggacgttttcatgattcctcagtacgggtatctgacgcttaatgatggaagccaggccgtgggtcgttcgtccttttactgcctggaatatttcccgtcgcaaatgctaagaacgggtaacaacttccagttcagctacgagtttgagaacgtacctttccatagcagctacgctcacagccaaagcctggaccgactaatgaatccactcatcgaccaatacttgtactatctctcaaagactattaacggttctggacagaatcaacaaacgctaaaattcagtgtggccggacccagcaacatggctgtccagggaagaaactacatacctggacccagctaccgacaacaacgtgtctcaaccactgtgactcaaaacaacaacagcgaatttgcttggcctggagcttcttcttgggctctcaatggacgtaatagcttgatgaatcctggacctgctatggccagccacaaagaaggagaggaccgtttctttcctttgtctggatctttaatttttggcaaacaaggaactggaagagacaacgtggatgcggacaaagtcatgataaccaacgaagaagaaattaaaactactaacccggtagcaacggagtcctatggacaagtggccacaaaccaccagagtgcccaagcacaggcgcagaccggctgggttcaaaaccaaggaatacttccgggtatggtttggcaggacagagatgtgtacctgcaaggacccatttgggccaaaattcctcacacggacggcaactttcacccttctccgctgatgggagggtttggaatgaagcacccgcctcctcagatcctcatcaaaaacacacctgtacctgcggatcctccaacggccttcaacaaggacaagctgaactctttcatcacccagtattctactggccaagtcagcgtggagatcgagtgggagctgcagaaggaaaacagcaagcgctggaacccggagatccagtacacttccaactattacaagtctaataatgttgaatttgctgttaatactgaaggtgtatatagtgaaccccgccccattggcaccagatacctgactcgtaatctg

SEQ ID NO: 640 - DNA, 2208 bp, Artificial Sequence
  source: /note="Description of Artificial Sequence: Synthetic polynucleotide"
atggctgccgatggttatcttccagattggctcgaggacaaccttagtgaaggaattcgcgagtggtgggctttgaaacctggagcccctcaacccaaggcaaatcaacaacatcaagacaacgctcgaggtcttgtgcttccgggttacaaataccttggacccggcaacggactcgacaagggggagccggtcaacgcagcagacgcggcggccctcgagcacgacaaggcctacgaccagcagctcaaggccggagacaacccgtacctcaagtgcaaccacgccgacgccgagttccaggagcggctcaaagaagatacgtcttttgggggcaacctcgggcgagcagtcttccaggccaaaaagaggcttcttgaacctcttggtctggttgaggaagcggctaagacggctcctggaaagaagaggcctgtagagcagtctcctcaggaaccggactcctccgcgggtattggcaaatcgggtgcacagcccgctaaaaagagactcaatttcggtcagactggcgacacagagtcagtcccagaccctcaaccaatcggagaacctcccgcagccccctcaggtgtgggatctcttacaatggcttcaggcggtggcgcaccagtggcagacaataacgaaggtgccgatggagtgggtagttcctcgggaaattggcattgcgattcccaatggctgggggacagagtcatcaccaccagcacccgaacctgggccctgcccacctacaacaatcacctctacaagcaaatctccaacagcacatctggaggatcttcaaatgacaacgcctacctcggctacagcaccccctgggggtattttgacttcaacagattccactgccacttctcaccacgtgactggcagcgactcatcaacaacaactggggattccggcctaagcgactcaacttcgagctcttcaacattcaggtcaaagaggttacggacaacaatggagtcaagaccatcgccaataaccttaccagcacggtccaggtcttcacggactcagactatcagctcccgtacgtgctcgggtcggctcacgagggctgcctcccgccgttcccagcggacgttttcatgattcctcagtacgggtatctgacgcttaatgatggaagccaggccgtgggtcgttcgtccttttactgcctggaatatttcccgtcgcaaatgctaagaacgggtaacaacttccagtccagctacgagtttgagaacgtacctttccatagcagctacgctcacagccaaagcctggaccgactaatgaatccactcatcgaccaatacttgtactatctctcaaagactattaacggttctggacagaatcaacaaacgctaaaattcagtgtggccggacccagcaacatggctgtccagggaagaaactacatacctggacccagctaccgacaacaacgtgcctcaaccactgtgactcaaaacaacaacagcgaatttgcttggcctggagcttcttcttgggctctcaatggacgtaatagcttgatgaatcctggacctgctatggccagccacaaagaaggggaggaccgtttctttcctttgtctggatctttaatttttggcaaacaaggaactggaagagacaacgtggatgcggacaaagtcatgataaccaacgaagaagaaattaaaactactaacccggtagcaacggagtcctatggacaagtggccacaaaccaccagagtgcccaagcacaggcgcagaccggctgggttcaaaaccaaggaatacttccgggtatggtttggcaggacagagatgtgtacctgcaaggacccatttgggccaaaattcctcacacggacggcaactttcacccttctccgctgatgggagggtttggaatgaagcacccgcctcctcagatcctcatcaaaaacacacctgtacctgcggatcctccaacggccttcaacaaggacaagctgaactctttcatcacccagtattctactggccaagtcagcgtggagatcgagtgggagctgcagaaggaaaacagcaagcgctggaacccggagatccagtacacttccaactattacaagtctaataatgttgaatttgctgttaatactgaaggtgtatatagtgaaccccgccccattggcaccagatacctgactcgtaatctg

SEQ ID NO: 641 - DNA, 2208 bp, Artificial Sequence
  source: /note="Description of Artificial Sequence: Synthetic polynucleotide"
atggctgccgatggttatcttccagattggctcgaggacaaccttagtgaaggaattcgcgagtggtgggctttgaaacctggagcccctcaacccaaggcaaatcaacaacatcaagacaacgctcgaggtcttgtgcttccgggttacaaataccttggacccggcaacggactcgacaagggggagccggtcaacgcagcagacgcggcggccctcgagcacgacaaggcctacgaccagcagctcaaggccggagacaacccgtacctcaagtgcaaccacgccgacgccgagttccaggagcggctcaaagaagatacgtcttttgggggcaacctcgggcgagcagtcttccaggccaaaaagaggcttcttgaacctcttggtctggttgaggaagcggctaagacggctcctggaaagaagaggcctgtagagcagtctcctcaggaaccggactcctccgcgggtattggcaaatcgggtgcacagcccgctaaaaagagactcaatttcggtcagactggcgacacagagtcagtcccagaccctcaaccaatcggagaacctcccgcagcccccccaggtgtgggatctcttacaatggcttcaggtggtggcgcaccagtggcggacaataacgaaggtgccgatggagtgggtagttcctcgggaaattggcattgcgattcccaatggctgggggacagagtcatcaccaccagcacccgaacctgggccctgcccacctacaacaatcacctctacaagcaaatctccaacagcacatctggaggatcttcaaatgacaacgcctacctcggctacagcaccccctgggggtattttgacttcaacagattccactgccacttctcaccacgtgactggcagcgactcatcaacaacaactggggattccggcctaagcgactcaacttcaagctcttcaacattcaggtcaaagaggttacggacaacaatggagtcaagaccatcgccaataaccttaccagcacggtccaggtcttcacggactcagactatcagctcccgtacgtgctcgggtcggctcacgagggctgcctcccgccgttcccagcggacgttttcatgattcctcagtacgggtatctgacgcttaatgatggaagccaggccgtgggtcgttcgtccttttactgcctggaatatttcccgtcgcaaatgctaagaacgggtaacaacttccagttcagctacgagtttgagaacgtacctttccatagcagctacgctcacagccaaagcctggaccgactaatgaatccactcatcgaccaatacttgtactatctctcaaagactattagcggttctggacagaatcaacaaacgctaaaattcagtgtggccggacccagcaacatggctgtccagggaagaaactacatacctggacccagctaccgacaacaacgtgtctcaaccactgtgactcaaaacaacagcagcgaatttgcttggcctggagcttcttcttgggctctcaatggacgtaatagcttgatgaatcctggacctgctatggccagccacaaagaaggagaggaccgtttctttcctttgtctggatctttaatttttggcaaacaaggaactggaagagacaacgtggatgcggacaaagtcatgataaccaacgaagaagaaattaaaactactaacccggtagcaacggagtcctatggacaagtggccacaaaccaccagagtgcccaagcacaggcgcagaccggctgggttcaaaaccaaggaatactttcgggtatggtttggcaggacagagatgtgtacctgcaaggacccatttgggccaaaattcctcacacggacggcaactttcacccttctccgctgatgggagggtttggaatgaagcacccgcctcctcagatcctcatcaaaaacacacctgtacctgcggatcctccaacggccttcaacaaggacaagctgaactctttcatcacccagtattctactggccaagtcagcgtggagatcgagtgggagctgcagaaggaaaacagcaagcgctggaacccggagatccagtacacttccaactattacaagtctaataatgttgaatttgctgttaatactgaaggtgtatatagtgaaccccgccccattggcaccagatacctgactcgtaatctg

SEQ ID NO: 642 - DNA, 2208 bp, Artificial Sequence
  source: /note="Description of Artificial Sequence: Synthetic polynucleotide"
atggctgccgatggttatcttccagattggctcgaggacaaccttagtgaaggaattcgcgagtggtgggctttgaaacctggagcccctcaacccaaggcaaatcaacaacatcaagacaacgctcgaggtcttgtgcttccgggttacaaataccttggacccggcaacggactcgacaagggggagccggtcaacgcagcagacgcggcggccctcgagcacgacaaggcctacgaccagcagctcaaggccggagacaacccgtacctcaagtgcaaccacgccgacgccgagttccaggagcggctcaaagaagatacgtcttttgggggcaacctcgggcgagcagtcttccaggccaaaaagaggcttcttgaacctcttggtctggttgaggaagcggctaagacggctcctggaaagaagaggcctgtagagcagtctcctcaggaaccggactcctccgcgggtattggcaaatcgggtgcacagcccgctaaaaagagactcaatttcggtcagactggcgacacagagtcagtcccagaccctcaaccaatcggagaacctcccgcagccccctcaggtgtgggatctcttacaatggcttcaggtggtggcgcaccagtggcagacaataacgaaggtgccgatggagtgggtagttcctcgggaaattggcattgcgattcccaatggctgggggacagagtcatcaccaccagcacccgaacctgggccctgcccacctacaacaatcacctctacaagcaaatctccaacagcacatctggaggatcttcaaatgacaacgcctacctcggctacagcaccccctgggggtattttgacttcaacagattccactgccacttctcaccacgtgactggcagcgactcatcaacaacaactggggattccggcctaagcgactcaacttcaagctcttcaacattcaggtcaaagaggttacggacaacaatggagtcaagaccatcgccaataaccttaccagcacggtccaggtcttcacggactcagactatcagctcccgtacgtgctcgggtcggctcacgagggctgcctcccgccgttcccagcggacgttttcatgattcctcagtacgggtatctgacgcttaatgatggaagccaggccgtgggtcgttcgtccttttactgcctggaatatttcccgtcgcaaatgctaagaacgggtaacaacttccagttcagctacgagtttgagaacgtacctttccatagcagctacgctcacagccaaagcctggaccgactaatgaatccactcatcgaccaatacttgtactatctctcaaagactattaacggttctggacagaatcaacaaacgctaaaattcagtgtggccggacccagcaacatggctgtccagggaagaaactacatacctggacccagctaccgacaacaacgtgtctcaaccactgtgactcaaaacaacaacagcgaatttgcttggcctggagcttcttcttgggctctcaatggacgtaatagcttgatgaatcctggacctgctatggccagccacaaagaaggagaggaccgtttctttcctttgtctggatctttaatttttggcaaacaaggaactggaagagacaacgtggatgcggacaaagtcatgataaccaacgaagaagaaattaaaactactaacccggtagcaacggagtcctatggacaagtggccacaaaccaccagagtgcccaagcacaggcgcagaccggctgggttcaaaaccaaggaatacttccgggtatggtttggcaggacagagatgtgtacctgcaaggacccatttgggccaaaattcctcacacggacggcaactttcacccttctccgctgatgggagggtttggaatgaagcacccgcctcctcagatcctcatcaaaaacacacctgtacctgcggatcctccaacggccttcaacaaggacaagctgaactctttcatcacccagtattctactggccaagtcagcgtggagatcgagtgggagctgcagaaggaaaacagcaagcgctggaacccggagatccagtacacttccaactattacaagtctaataatgttgaatttgctgttaatactgaaggtgtatatagtgaaccccgccccattggcaccagatacctgactcgtaatctg

SEQ ID NO: 643 - DNA, 2208 bp, Artificial Sequence; identical to SEQ ID NO: 642
  source: /note="Description of Artificial Sequence: Synthetic polynucleotide"

SEQ ID NO: 644 - DNA, 2208 bp, Artificial Sequence
  source: /note="Description of Artificial Sequence: Synthetic polynucleotide"
atggctgccgatggttatcttccagattggctcgaggacaaccttagtgaaggaattcgcgagtggtgggctttgaaacctggagcccctcaacccaaggcaaatcaacaacatcaagacaacgctcgaggtcttgtgcttccgggttacaaataccttggacccggcaacggactcgacaagggggagccggtcaacgcagcagacgcggcggccctcgagcacgacaaggcctacgaccagcagctcaaggccggagacaacccgtacctcaagtgcaaccacgccgacgccgagttccaggagcggctcaaagaagatacgtcttttgggggcaacctcgggcgagcagtcttccaggccaaaaagaggcttcttgaacctcttggtctggttgaggaagcggctaagacggctcctggaaagaagaggcctgtagagcagtctcctcaggaaccggactcctccgcgggtattggcaaatcgggtgcacagcccgctaaaaagagactcaatttcggtcagactggcgacacagagtcagtcccagaccctcaaccaatcggagaacctcccgcagccccctcaggtgtgggatctcttacaatggcttcaggtggtggcgcaccagtggcagacaataacgaaggtgccgatggagtgggtagttcctcgggaaattggcattgcgattcccaatggctgggggacagagtcatcaccaccagcacccgaacctgggccctgcccacctacaacaatcacctctacaagcaaatctccaacagcacatctggaggatcttcaaatgacaacgcctacctcgactacagcaccccctgggggtattttgacttcaacagattccactgccacttctcaccacgtgactggcagcggctcatcaacaacaactggggattccggcctaagcgactcaacttcaagctcttcaacattcaggtcaaagaggttacggacaacaatggagtcaagaccatcgccaataaccttaccagcacggtccaggtcttcacggactcagactatcagctcccgtacgtgctcgggtcggctcacgagggctgcctcccgccgttcccagcggacgttttcatgattcctcagtacgggtatctgacgcttaatgatggaagccaggccgtgggtcgttcgtccttttactgcctggaatatttcccgtcgcaaatgctaagaacgggtaacaacttccagttcagctacgagtttgagaacgtacctttccatagcagctacgctcacagccaaagcctggaccgactaatgaatccactcatcgaccaatacttgtactatctctcaaagactattaacggttctggacagaatcaacaaacgctaaaattcagtgtggccggacccagcaacatggctgtccagggaagaaactacatacctggacccagctaccgacaacaacgtgtctcaaccactgtgactcaaaacaacaacagcgaatttgcttggcctggagcttcttcttgggctctcaatggacgtaatagcttgatgaatcctggacctgctatggccagccacaaagaaggagaggaccgtttctttcctttgtctggatctttaatttttggcaaacaaggaactggaagagacaacgtggatgcggacaaagtcatgataaccaacgaagaagaaattaaaactactaacccggtagcaacggagtcctatggacaagtggccacaaaccaccagagtgcccaagcacaggcgcagaccggctgggttcaaaaccaaggaatacttccgggtatggtttggcagggcagagatgtgtacctgcaaggacccatttgggccaaaattcctcacacggacggcaactttcacccttctccgctgatgggagggtttggaatgaagcacccgcctcctcagatcctcatcaaaaacacacctgtacctgcggatcctccaacggccttcaacaaggacaagctgaactctttcatcacccagtattctactggccaagtcagcgtggagatcgagtgggagctgcagaaggaaaacagcaagcgctggaacccggagatccagtacacttccaactattacaagtctaataatgttgaatttgctgttaatactgaaggtgtatatagtgaaccccgccccattggcaccagatacctgactcgtaatctg

SEQ ID NO: 645 - DNA, 2208 bp, Artificial Sequence; identical to SEQ ID NO: 642
  source: /note="Description of Artificial Sequence: Synthetic polynucleotide"

SEQ ID NO: 646 - DNA, 2208 bp, Artificial Sequence
  source: /note="Description of Artificial Sequence: Synthetic polynucleotide"
atggctgccgatggttatcctccagattggctcgaggacaaccttagtgaaggaattcgcgagtggtgggctttgaaacctggagcccctcaacccaaggcaaatcaacaacatcaagacaacgctcgaggtcttgtgcttccgggttacaaataccttggacccggcaacggactcgacaagggggagccggtcaacgcagcagacgcggcggccctcgagcacgacaaggcctacgaccagcagctcaaggccggggacaacccgcacctcaagtacaaccacgccgacgccgagttccaggagcggctcaaagaagatacgtcttttgggggcaacctcgggcgagcagtcttccaggccaaaaagaggcttcttgaacctcttggtctggttgaggaagcggctaagacggctcctggaaagaagaggcccgtagagcagtctcctcaggaaccggactcctccgcgggtattggcaaatcgggtgcacagcccgctaagaagagactcaatttcggtcagactggcgacactgagtcagtcccagaccctcaaccaatcggagaacctcccgcagccccctcaggtgtgggatctcttacaatggcttcaggtggtggcgcaccagtggcagacaataacgaaggtgccgatggagtgggtagttcctcgggaaattggcattgcgattcccaatggctgggggacagagtcatcaccaccagcacccgaacctgggccctgcccacctacaacaatcacctctacaagcaaatctccaacagcacatctggaggatcttcaaatgacaacgcctacttcggctacagcaccccctgggggtattttgacttcaacagattccactgccacttctcaccacgtgactggcagcgactcatcaacaacaactggggattccggcctaagcgactcaacttcaagctcttcaacattcaggtcaaagaggttacggacaacaatggagtcaagaccatcgccaataaccttaccagcacggtccaggtcttcacggactcagactatcagctcccgtacgtgctcgggtcggctcacgagggctgcctcccgccgttcccagcggacgttttcatgattcctcagtacgggtatctgacgcttaatgatggaagccaggccgtgggtcgttcgtccttttactgcctggaatatttcccgtcgcaaatgctaagaacgggtaacaacttccagttcagctacgagtttgagaacgtacctttccatagcagctacgctcacagccaaagcctggaccgactaatgaatccactcatcgaccaatacttgtactatctctcaaagactattaacggttctggacagaatcaacaaacgctaaaattcagtgtggccggacccagcaacatggctgtccagggaagaaactacatacctggacccagctaccgacaacaacgtgtctcaaccactgtgactcaaaacaacaacagcgaatttgcttggcctggagcttcttcttgggctctcaatggacgtaatagcttgatgaatcctggacctgctatggccagccacaaagaaggagaggaccgtttctttcctttgtctggatctttaatttttggcaaacaaggaactggaagagacaacgtggatgcggacaaagtcatgataaccaacgaagaagaaattaaaactactaacccggtagcaacggagtcctatggacaagtggccacaaaccaccagagtgcccaagcacaggcgcagaccggctgggttcaaaaccaaggaatacttccgggtatggtttggcaggacagagatgtgtacctgcaaggacccatttgggccaaaattcctcacacggacggcaactttcacccttctccgctgatgggagggtttggagtgaagcacccgcctcctcagatcctcatcaaaaacacacctgtacctgcggatcctccaacggccttcaacaaggacaggctgaactctttcatcacccagtattctactggccaagtcagcgtggagatcgagtgggagctgcagaaggaaaacagcaagcgctggaacccggagatccagtacacttccaactattacaagtctaataatgttgaatttgctgttaatactgaaggtgtatatagtgaaccccgccccattggcaccagatacctgactcgtaatctg

SEQ ID NO: 647 - DNA, 2208 bp, Artificial Sequence
  source: /note="Description of Artificial Sequence: Synthetic polynucleotide"
atggctgccgatggttatcttccagattggctcgaggacaaccttagtgaaggaattcgcgagtggtgggctttgaaacctggagcccctcaacccaaggcaaatcaacaacatcaagacaacgctcgaggtcttgtgcttccgggttacaaataccttggacccggcaacggactcgacaagggggagccggtcaacgcagcagacgcggcggccctcgagcacgacaaggcctacgaccagcagctcaaggccggagacaacccgtacctcaagtacaaccacgccgacgccgagttccaggagcggctcaaagaagatacgtcttttgggggcaacctcgggcgagcagtcttccaggccaaaaagaggcttcttgaacctcttggtctggttgaggaagcggctaagacggctcctggaaagaagaggcctgtagagcagtctcctcaggaaccggactcctccgcgggtattggcaaatcgggtgcacagcccgctaaaaagagactcaatttcggtcagactggcgacacagagtcagtcccagaccctcaaccaatcggagaacctcccgcagccccctcaggtgtgggatctcttacaatggcttcaggtggtggcgcaccagtggcggacaataacgaaggtgccgatggagtgggtagttcctcgggaaattggcattgcgattcccaatggctgggggacagagtcatcaccaccagcacccgaacctgggccctgcccacctacaacaatcacctctacaagcaaatctccaacagcacatctggaggatcttcaaatgacaacgcctacttcggctacagcaccccctgggggtattttgacttcaacagattccactgccacttctcaccacgtgactggcagcgactcatcaacaacaactggggattccggcctaagcgactcaacttcaagctcttcaacattcaggtcaaagaggttacggacaacaatggagtcaagaccatcgccaataaccttaccagcacggtccaggtcttcacggactcagactatcagctcccgtacgtgctcgggtcggctcacgagggctgcctcccgccgttcccagcggacgttttcatgattcctcagtacgggtatctgacgcttaatgatggaagccaggccgtgggtcgttcgtccttttactgcctggaatatttcccgtcgcaaatgctaagaacgggtaacaacttccagttcagctacgagtttgagaacgtacctttccatagcagctacgctcacagccaaagcctggaccgactaatgaatccactcatcgaccaatacttgtactatctctcaaagactattaacggttctggacagaatcaacaaacgctaaaattcagtgtggccggacccagcaacatggctgtccagggaagaaactacatacctggacccagctaccgacaacaacgtgtctcaaccactgtgactcaaaacaacaacagcgaatttgcttggcctggagcttcttcttgggctctcaatggacgtaatagtttgatgaatcctggacctgctatggccagccacaaagaaggagaggaccgtttctttcctttgtctggatctttaatttttggcaaacaaggaactggaagagacaacgtggatgcggacaaagtcatgataaccaacgaagaagaaattaaaactactaacccggtagcaacggagtcctatggacaagtggccacaaaccaccagagtgcccaagcacaggcgcagaccggctgggttcaaaaccaaggaatacttccgggtatggtttggcaggacagagatgtgtacctgcaaggacccatttgggccaaaattcctcacacggacggcaactttcacccttctccgctgatgggagggtttggagtgaagcacccgcctcctcagatcctcatcaaaaacacacctgtacctgcggatcctccaacggccttcaacaaggacaagctgaactctttcatcacccagtattctactggccaagtcagcgtggagatcgagtgggagctgcagaaggaaaacagcaagcgctggaacccggagatccagtacacttccaactattacaagtctaataatgttgaatttgctgttaatactgaaggtgtatatagtgaaccccgccccattggcaccagatacctgactcgtaatctg

SEQ ID NO: 648 - DNA, 2208 bp, Artificial Sequence
  source: /note="Description of Artificial Sequence: Synthetic polynucleotide"
atggctgccgatggttatcttccagattggctcgaggacaaccttagtgaaggaattcgcgagtggtgggctttgaaacctggagcccctcaacccaaggcaaatcaacaacatcaagacaacgctcgaggtcttgtgcttccgggttacaaataccttggacccggcaacggactcgacaagggggagccggtcaacgcagcagacgcggcggccctcgagcacgacaaggcctacgaccagcagctcaaggccggagacaacccgtacctcaagtacaaccacgccgacgccgagttccaggagcggctcaaagaagatacgtcttttgggggcaacctcgggcgagcagtcttccaggccaaaaagaggcttcttgaacctcttggtctggttgaggaagcggctaagacggctcctggaaagaagaggcctgtagagcagtctcctcaggaaccggactcctccgcgggtattggcaaatcgggtgcacagcccgctaaaaagagactcaatttcggtcagactggcgacacagagtcagtcccagaccctcaaccaatcggagaacctcccgcagccccctcaggtgtgggatctcttacaatggcttcaggtggtggcgcaccagtggcagacaataacgaaggtgccgatggagtgggtagttcctcgggaaattggcattgcgattcccaatggctgggggacagagtcatcaccaccagcacccgaacctgggccctgcccacttacaacaatcacctctacaagcaaatctccaacagcacatctggaggatcttcaaatgacaacgcctacttcggctacagcaccccctgggggtattttgacttcaacagattccactgccacttctcaccacgtgactggcagcgactcaccaacaacaactggggattccggcctaagcgactcaacttcaagctcttcaacattcaggtcaaagaggttacggacaacaatggagtcaagaccatcgccaataaccttaccagcacggtccaggtcttcacggactcagactatcagctcccgtacgtgctcgggtcggctcacgagggctgcctcccgccgttcccagcggacgttttcatgattcctcagtacgggtatctgacgcttaatgatggaagccaggccgtgggtcgttcgtccttttactgcctggaatatatcccgtcgcaaatgctaagaacgggtaacaacttccagttcagctacgagtttgagaacgtacctttccatagcagctacgctcacagccaaagcctggaccgactaatgaatccactcatcgaccaatacttgtactatctctcaaagactattaacggttctggacagaatcaacaaacgctaaaattcagtgtggccggacccagcaacatggctgtccagggaagaaactacatacctggacccagctaccgacaacaacgtgtctcaaccactgtgactcaaaacaacaacagcgaatttgcttggcctggagcttcttcttgggctctcaatggacgtaatagcttgatgaatcctggacctgctatggccagccacaaagaaggagaggaccgtttctttcctttgtctggatctttaatttttggcaaacaaggaactggaagagacaacgtggatgcggacaaagtcatgataaccaacgaagaagaaattaaaactactaacccggtagcaacggagtcctatggacaagtggccacaaaccaccagagtgcccaagcacaggcgcagaccggctgggttcaaaaccaaggaatacttccgggtatggtttggcaggacagagatgtgtacctgcaaggacccatttgggccaaaattcctcacacggacggcaactttcacccttctccgctgatgggagggtttggagtgaagcacccgcctcctcagatcctcatcaaaaacacacctgtacctgcggatcctccaacggccttcaacaaggacaagctgaactctttcatcacccagtattctactggccaagtcagcgtggagatcgagtgggagctgcagaaggaaaacagcaagcgctggaacccggagatccagtacacttccaactattacaagtctaataatgttgaatttgctgttaatactgaaggtgtatatagtgaaccccgccccattggcaccagatacctgactcgtaatctg

SEQ ID NO: 649 - DNA, 2208 bp, Artificial Sequence
  source: /note="Description of Artificial Sequence: Synthetic polynucleotide"
atggctgccgatggttatcttccagattggctcgaggacaaccttagtgaaggaattcgcgagtggtgggctttgaaacctggagcccctcaacccaaggcaaatcaacaacatcaagacaacgctcgaggtcttgtgcttccgggttacaaataccttggacccggcaacggactcgacaagggggagccggtcaacgcagcagacgcggcggccctcgagcacgacaaggcctacgaccagcagctcaaggccggagacaacccgtacctcaagtacaaccacgccgacgccgagttccaggagcggctcaaagaagatacgtcttttgggggcaacctcgggcgagcagtcttccaggccaaaaagaggcttcttgaacctcttggtctggttgaggaagcggctaagacggctcctggaaagaagaggcctgtagagcagtctcctcaggaaccggactcctccgcgggtattggcaaatcgggtgcacagcccgctaaaaagagactcaatttcggtcagactggcgacacagagtcagtcccagaccctcaaccaatcggagaacctcccgcagccccctcaggtgtgggatctcttacaatggcttcaggtggtggcgcaccagtggcagacaataacgaaggtgccgatggagtgggtagttcctcgggaaattggcattgcgattcccaatggctgggggacagagtcatcaccaccagcacccgaacctgggccctgcccacctacaacaatcacctctacaagcaaatctccaacagcacatctggaggatcttcaaatgacaacgcctacttcggctacagcaccccctgggggtattttgacttcaacagattccactgccacttctcaccacgtgactggcagcgactcatcaacaacaactggggattccggcctaagcgactcaacttcaagctcttcaacattcaggtcaaagaggttacggacaacaatggagtcaagaccatcgccaataaccttaccagcacggtccaggtcttcacggactcagactatcagctcccgtacgtgctcgggtcggctcacgagggctgcctcccgccgttcccagcggacgttttcatgattcctcagtacgggtatctgacgcttaatgatggaagccaggccgtgggtcgttcgtccttttactgcctggaatatttcccgtcgcaaatgctaagaacgggtaacaacttccagtttagctacgagtttgagaacgtacctttccatagcagctacgctcacagccaaagcctggaccgactaatgaatccactcatcgaccaatacttgtactatctctcaaagactattaacggttctggacagaatcaacaaacgctaaaattcagtgtggccggacccagcaacatggctgtccagggaagaaactacatacctggacccagctaccgacaacaacgtgtctcaaccactgtgactcaaaacaacaacagcgaatttgcttggcctggagcttcttcttgggctctcaatggacgtaatagcttgatgaatcctggacctgctatggccagccacaaagaaggagaggaccgtttctttcctttgtctggatctttaatttctggcaaacaaggaactggaagagacaacgtggatgcgaacaaagtcatgataaccaacgaagaagaaattaaaactactaacccggtagcaacggagtcctatggacaagtggccacaaaccaccagagtgcccaagcacaggcgcagaccggctgggttcaaaaccaaggaatacttccgggtatggtttggcaggacagagatgtgtacctgcaaggacccatttgggccaaaattcctcacacggacggcaactttcacccttctccgctgatgggagggtttgaaatgaagcacccgcctcctcagatcctcatcaaaaacacacctgtacctgcggatcctccaacggccttcaacaaggacaagctgaactctttcatcacccagtattctactggccaagtcagcgtggagatcgagtgggagctgcagaaggaaaacagcaagcgctggaacccggagatccagtacacttccaactattacaagtctaataatgttgaatttgctgttaatactgaaggtgtatatagtgaaccccgccccattggcaccagatacctgactcgtaatctg

SEQ ID NO: 650 - DNA, 2208 bp, Artificial Sequence
  source: /note="Description of Artificial Sequence: Synthetic polynucleotide"
atggctgccgatggttatcttccagattggctcgaggacaaccttagtgaaggaattcgcgagtggtgggctttgaaacctggagcccctcaacccaaggcaaatcaacaacatcaagacaacgctcgaggtcttgtgcttccgggttacaaataccttggacccggcaacggactcgacaagggggagccggtcaacgcagcagacgcggcggccctcgagcacgacaaggcctacgaccagcagctcaaggccggagacaacccgtacctcaagtacaaccacgccgacgccgagttccaggagcggctcaaagaagatacgtcttttgggggcaacctcgggcgagcagtcttccaggccaaaaagaggcttcttgaacctcttggtctggttgaggaagcggctaagacggctcctggaaagaagaggcctgtagagcagtctcctcaggaaccggactcctccgcgggtattggcaaatcgggtgcacagcccgctaaaaagagactcaatttcggtcagactggcgacacagagtcagtcccagaccctcaaccaatcggagaacctcccgcagccccctcaggtgtgggatctcttacaatagcttcaggtggtggcgcaccagtggcagacaataacgaaggtgccgatggagtgggtagttcctcgggaaattggcattgcgattcccaatggctgggggacagagtcatcaccaccagcacccgaacctgggccctgcccacctacaacaatcacctctacaagcgaatctccaacagcacatctggaggatcttcaaatgacaacgcctacttcggctacagcaccccctgggggtattttgacttcaacagattccactgccacttctcaccacgtgactggcagcgactcatcaacaacaactggggattccggcctaagcgactcaacttcaagcttttcaacattcgggtcaaagaggttacggacaacaatggagtcaagaccatcaccaataaccttaccagcacggtccaggtcttcacggactcagactatcagctcccgtacgtgcttgggtcggctcacgagggctgcctcccgccgttcccagcggacgttttcatgattcctcagtacgggtatctgacgcttaatgatggaagccaggccgtgggtcgttcgtccttttactgcctggaatatttcccgtcgcaaatgctaagaacgggtaacaacttccagttcagctacgagtttgagaacgtacctttccatagcagctacgctcacagccaaagcctggaccgactaatgaatccactcatcgaccaatacttgtactatctctcaaagactattaacggttctggacagaatcaacaaacgctaaaattcagtgtggccggacccagcaacatggctgtccagggaagaaactacatacctggacccagctaccgacaacaacgtgtctcaaccactgtgactcgaaacaacaacagcgaatttgcttggcctggagcttcttcttgggctctcaatggacgtaatagcttgatgaatcctggacctgctatggccagccacaaagaaggagaggaccgtttctttcctttgtctggatctttaatttttggcaaacaaggaactggaagagacaacgtggatgcggacaaagtcatgataaccaacgaagaagaaattaaaactactaacccggtagcaacggagtcctatggacaagtggccacaaaccaccagagtgcccaagcacaggcgcagaccggctgggttcaaaaccaaggaatacttccgggtatggtttggcaggacagagatgtgtacctgcaaggacccatttgggccaaaattcctcacacggacggcaactttcacccttctccgctgatgggagggtttggagtgaagcacccgcctcctcagatcctcatcaaaaacacacctgtacctgcggatcctccaacggccttcaacaaggacaagctgaactctttcatcacccagtattctactggccaagtcagcgtggagatcgagtgggagctgcagaaggaaaacagcaagcgctggaacccggagatccagtacacttccaactattacaagtctaataatgttgaatttgctgttaatactgaaggtgtatatagtgaaccccgccccattggcaccagatacctgactcgtaatctg

SEQ ID NO: 651 - DNA, 2208 bp, Artificial Sequence
  source: /note="Description of Artificial Sequence: Synthetic polynucleotide"
atggctgccgatggttatcttccagattggctcgaggacaaccttagtgaaggaattcgcgagtggtgggctttgaaacctggagcccctcaacccaaggcaaatcaacaacatcaagacaacgctcgaggtcttgtgcttccgggttacaaataccttggacccggcaacggactcgacaagggggagccggtcaacgcagcagacgcggcggccctcgagcacgacaaggcctacgaccagcagctcaaggccggagacaacccgtacctcaagtacaaccacgccgacgccgagttccaggagcggctcaaagaagatacgtcttttgggggcaacctcgggcgagcagtcttccaggccaaaaagaggcttcttgaacctcttggtctggttgaggaagcggctaagacggctcctggaaagaagaggcctgtagagcagtctcctcaggaaccggactcctccgcgggtattggcaaatcgggcgcacagcccgctaaaaagagactcaatttcggtcagactggcgacacagagccagtcccagaccctcaaccaatcggagaacctcccgcagccccctcaggtgtgggatctcttacaatggcttcaggtggtggcgcaccagtggcagacaataacgaaggtgccgatggagtgggtagttcctcgggaaattggcattgcgattcccaatggctgggggacagagtcatcaccaccagcacccgaacctgggccctgcccacctacaacaatcacctctacaagcaaatctccaacagcacatctggaggatcttcaaatgacaacgcctacttcggctacagcaccccctgggggtattttgacttcaacagattccactgccacttctcaccacgtgactggcagcgactcatcaacaacaactggggattccggcctaagcgactcaacttcaagctcttcaacattcaggtcaaagaggttacggacaacaatggagtcaagaccatcgccaataaccttaccagcacggtccaggtcttcacggactcagactatcagctcccgtacgtgctcgggtcggctcacgagggctgcctcccgccgttcccagcgggcgttttcatgattcctcagtacgggtatctgacgcttaatgatggaagccaggccgtgggtcgttcgtccttttactgcctggaatatttcccgtcgcaaatgctaagaacgggtaacaacttccagttcagctacgagtttgagaacgtacctttccatagcagctacgctcacagccaaagcctggaccgactaatgaatccactcatcgaccaatacttgtactatctctcaaagactattaacggttctggacagaatcaacaaacgctaaaattcagtgtggccggacccagcaacatggctgtccagggaagaaactacatacctggacccagctaccgacaacaacgtgtctcaaccactgcgactcaaaacaacaacagcgaatttgcttggcctggagcttcttcttgggctctcaatggacgtaatagcttgatgaatcctggacctgctatggccagccacaaagaaggagaggaccgtttctttcctttgtctggatctttaatttttggcaaacaaggaactggaagagacaacgtggatgcggacaaagtcatgataaccaacgaagaagaaattaaaactactaacccggtagcaacggagtcctatggacaagtggccacaaaccaccagagtgcccaagcacaggcgcagaccggctgggttcaaaaccaaggaatacttccgggtatggtttggcaggacagagatgtgtacctgcaaggacccatttgggccaaaattcctcacacggacggcaactttcacccttctccgctgatgggagggtttggaatgaagcacccgcctcctcagatcctcatcaaaaacacacctgtacctgcggatcctccaacggccttcaacaaggacaagctgaactctttcatcacccagtattctactggccaagtcagcgtggagatcgagtgggagctgcagaaggaaaacagcaagcgctggaacccggagatccagtacacttccaactattacaagtctaataatgttgaatttgctgttaatactgaaggtgtatatagtgaaccccgccccattggcaccagatacctgactcgtaatctg

SEQ ID NO: 652 - DNA, 2208 bp, Artificial Sequence
  source: /note="Description of Artificial Sequence: Synthetic polynucleotide"
atggctgccgatggttatcttccagattggctcgaggacaaccttagtgaaggaattcgcgagtggtgggctttgaaacctggagcccctcaacccaaggcaaatcaacaacatcaagacaacgctcgaggtcttgtgcttccgggttacaaataccttggacccggcaacggactcgacaagggggagccggtcaacgcagcagacgcggcggccctcgagcacgacaaggcctacgaccagcagctcaaggccggagacaacccgtacctcaagtacaaccacgccgacgccgggttccaggagcggctcaaagaagatacgtcttttgggggcaacctcgggcgagcagtcttccaggccaaaaagaggcttcttgaacctcttggtctggttgaggaagcggctaagacggctcctggaaagaagaggcctgtagagcagtctcctcaggaaccggactcctccgcgggtattggcaaatcgggtgcacagcccgctaaaaagagactcaatttcggtcagactggcgacacagagtcagtcccagtccctcaaccaatcggagaacctcccgcagccccctcaggtgtgggatctcttacaatggcttcaggtggtggcgcaccagtggcagacaataacgaaggtgccgatggagtgggtagttcctcgggaaattggcattgcgattcccaatggctgggggacagagtcatcaccaccagcacccgaacctgggccctgcccacctacaacaatcacctctacaagcaaatctccaacagcacatctggaggatcttcaaatgacaacgcctacttcggctacagcaccccctgggggtattttgacttcaacagattccactgccacttctcaccacgtgactggcagcgactcatcaacaacaactggggattccggcctaagcgactcaacttcaagctcttcaacattcaggtcaaagaggttacggacaacaatggagtcaagaccatcgccaataaccttaccagcacggtccaggtcttcacggactcagactatcagctcccgtacgtgctcgggtcggctcacgagggctgcctcccgccgttcccagcggacgttttcatgattcctcagtacgggtatctgacgcttaatgatggaagccaggccgtgggtcgttcgtccttttactgcctggaatatttcccgtcgcaaatgctaagaacgggtaacaacttccagttcagctacgagtttgagaacgtacctttccatagcagctacgctcacagccaaagcctggaccgactaatgaatccactcatcgaccaatacttgtactatctctcaaagactattaacggttctggacagaatcaacaaacgctaaaattcagtgtggccggacccagcaacatggctgtccagggaagaaactacatacctggacccagctaccgacaacaacgtgtctcaaccactgtgactcaaaacaacaacagcgaatttgcttggcctggagcttcttcttgggctctcaatggacgtaatagcttgatgaatcctggacctgctatggccagccacaaagaaggagaggaccgtttctttcctttgtctggatctttaatttttggcaaacaaggagctggaagagacaacgtggatgcggacaaagtcatgataaccaacgaagaagaaattaaaactactaacccggtagcaacggagtcctatggacaagtggccacaaaccaccagagtgcccaagcacaggcgcagaccggctgggttcaaaaccaaggaatacttccgggtatggtttggcaggacagagatgtgtacctgcaaggacccatttgggccaaaattcctcacacggacggcaactttcacccttctccgctgatgggagggtttggaatgaagcacccgcctcctcagatcctcatcaaaaacacacctgtacctgcggatcctccaacggccttcaacaaggacaagctgaactctttcatcacccagtattctactggccaagtcagcgtggagatcgagtgggagctgcagaaggaaaacagcaagcgctggaacccggagatccagtacacttccaactattacaagtctaataatgttgaatttgctgttaatactgaaggtgtatatagtgaaccccgccccattggcaccagatacctgactcgtaatctg

SEQ ID NO: 653 - DNA, 2208 bp, Artificial Sequence
  source: /note="Description of Artificial Sequence: Synthetic polynucleotide"
  modified_base (377)..(377): a, c, t, g, unknown or other
atggctgccgatggttatcttccagattggctcgaggacaaccttagtgaaggaattcgcgagaggtgggctttgaaacctggagcccctcaacccaaggcaaatcaacaacatcaagacaacgctcgaggtcttgtgcttccgggttacaaataccttggacccggcaacggactcgacaagggggagccggtcaacgcagcagacgcggcggccctcgagcacgacaaggcctacgaccagcagctcaaggccggagacaacccgtacctcaagtacaaccacgccgacgccgagttccaggagcggctcaaagaagatacgtcttttgggggcaacctcgggcgagcagtcttccaggccaaaaagaggcttcntgaacctcttggtctggttgaggaagcggctaagacggctcctggaaagaagaggcctgtagagcagtctcctcaggaaccggactcctccgcgggtattggcaaatcgggtgcacagcccgctaaaaagagactcaatttcggtcagactggcgacacagagtcagtcccagaccctcaaccaatcggagaacctcccgcagccccctcaggtgtgggatctcttacaatggcttcaggtggtggcgcaccagtggcagacaataacgaaggtgccgatggagtgggtagttcctcggggaattggcattgcgattcccaatggctgggggacagagtcatcaccaccagcacccgaacctgggccctgcccacctacaacaatcacctctacaagcaaatctccaacagcacatctggaggatcttcaaatgacaacgcctacttcggctacagcaccccctgggggtattttgacttcaacagattccactgccacttctcaccacgtgactggcagcgactcatcaacaacaactggggattccggcctaagcgactcaacttcaagctcttcaacattcaggtcaaagaggttacggacaacaatggagtcaagaccatcgccaataaccttaccagcacggtccaggtcttcacggactcagactatcagctcccgtacgtgctcgggtcggctcacgagggctgcctcccgccgttcccagcggacgttttcatgattcctcagtacgggtatctgacgcttaatgatggaagccaggccgtgggtcgttcgtccttttactgcctggaatatttcccgtcgcaaatgctaagaacgggtaacaacttccagttcagctacgagtttgagaacgtacctttccatagcagctacgctcacagccaaagcccggaccgactaatgaatccactcatcgaccaatacttgtactatctctcaaagactattaacggttctggacagaatcaacaaacgctaaaattcagtgtggccggacccagcaacatggctgtccagggaagaaactacatacctggacccagctaccgacaacaacgtgtctcaaccactgtgactcaaaacaacaacagcgaatttgcttggcctggagcttcttcttgggctctcaatggacgtaatagcttgatgaatcctggacctgctatggccagccacaaagaaggagaggaccgtttctttcctttgtctggatctttaatttttggcaaacaaggaactggaagagacaacgtggatgcggacaaagtcatgataaccaacgaagaagaaattaaaactactaacccggtagcaacggagtcctatggacaagtggccacaaaccaccagagtgcccaagcacaggcgcagaccggctgggttcaaaaccaaggaatacttccgggtatggtttggcaggacagagatgtgtacctgcaaggacccatttgggccaaaattcctcacacggacggcaactttcacccttctccgctgatgggagggtttggagtgaagcacccgcctcctcagatcctcatcaaaaacacacctgtacctgcggatcctccaacggccttcaacaaggacaagctgaactctttcatcacccagtattctactggccaagtcagcgtggagatcgagtgggagctgcagaaggaaaacagcaagcgctggaacccggagatccagtacacttccaactattacaagtctaataatgttgaatttgctgttaatactgaaggtgtatatagtgaaccccgccccattggcaccagatacctgactcgtaatctg

SEQ ID NO: 654 - DNA, 2208 bp, Artificial Sequence
  source: /note="Description of Artificial Sequence: Synthetic polynucleotide"
atggctgccgatggttatcttccagattggctcgaggacaaccttagtgaaggaattcgcgagtggtgggctttgaaacctggagcccctcaacccaaggcaaatcaacaacatcaagacaacgctcgaggtcttgtgcttccgggttacaaataccttggacccggcaacggactcgacaagggggagccggtcaacgcagcagacgcggcggccctcgagcacgacaaggcctacgaccagcagctcaaggccggagacaacccgtacctcaagtacaaccacgccgacgccgagttccaggagcggctcaaagaagatacgtcttttgggggcaacctcgggcgagcagtcttccaggccaaaaagaggcttcttgaacctcttggtctggttgaggaagcggctaagacggctcctggaaagaagaggcctgtagagcagtctcctcaggaaccggactcctccgcgggtattggcaaatcgggtgcacagcccgctaaaaagagactcaatttcggtcagactggcgacacagagtcagtcccagaccctcaaccaatcggagaacctcccgcagccccctcaggtgtgggatctcttacaatggcttcaggtggtggcgcaccagtggcagacaataacgaaggtgccgatggagtgggtagttcctcgggaaattggcattgcgattcccaatggctgggggacagagtcatcaccaccagcacccgaacctgggccctgcccacctacaacaatcacctctacaagcaaatctccaacagcacatctggaggatcttcaaatgacaacgcctacctcggctacagcaccccctgggggtattttgacttcaacagattccactgccacttctcaccacgtgactggcagcgactcatcaacaacaactggggattccggcctaagcgactcaacttcaagctcttcaacattcaggtcaaagaggttacggacaacaatggagtcaagaccatcgccaataaccttaccagcacggtccaggtcttcacggactcagactatcagctcccgtacgtgctcgggtcggctcacgagggctgcctcccgccgttcccagcggacgttttcatgattcctcagtacgggtatctgacgcttaatgatggaagccaggccgtgggtcgttcgtccttttactgcctggaatatttcccgtcgcaaatgctaagaacgggtaacaacttccagttcagctacgagtttgagaacgtacctttccatagcagctacgctcacagccaaagcctggaccgactaatgaatccactcatcgaccaatacttgtactatctctcaaagactattaacggttctggacagaatcaacaaacgctaaaattcagtgtggccggacccagcaacatggctgtccagggaagaaactacatacctggacccagctaccgacaacaacgtgtctcaaccactgtgactcaaaacaacaacagcgaatttgcttggcctggagcttcttcttgggctctcaatggacgtaatagcttgatgaatcctggacctgctatggccagccacaaagaaggagaggaccgtttctttcctttgtctggatctttaatttttggcaaacaaggaactggaagagacaacgtggatgcggacaaagtcatgataaccaacgaagaagaaattaaaactactaacccggtagcaacggagtcctatggacaagtggccacaaaccaccagagtgcccaagcacaggcgcagaccggctgggttcaaaaccaaggaatacttccgggtatggtttggcaggacagagatgtgtacctgcaaggacccatttgggccaaaattcctcacacggacggcaactttcacccttctccgctgatgggagggtttggaatgaagcacccgcctcctcagatcctcatcaaaaacacacctgtacctgcggatcctccaacggccttcaacaaggacaagctgaactctttcatcacccagtattctactggccaagtcagcgtggagatcgagtgggagctgcagaaggaaaacagcaagcgctggaacccggagatccagtacacttccaactattacaagtctaataatgttgaatttgctgttaatactgaaggtgtatatagtgaaccccgccccattggcaccagatacctgactcgtaatctg

SEQ ID NO: 655 - DNA, 2208 bp, Artificial Sequence
  source: /note="Description of Artificial Sequence: Synthetic polynucleotide"
atggctgccgatggttatcttccagattggctcgaggacaaccttagtgaaggaattcgcgagtggtgggctttgaaacctggagcccctcaacccaaggcaaatcaacaacatcaagacaacgctcgaggtcttgtgcttccgggttacaaataccttggacccggcaacggactcgacaagggggagccggtcaacgcagcagacgcggcggccctcgagcacgacaaggcctacgaccagcagctcaaggccggagacaacccgtacctcaagtacaaccacgccgacgccgagttccaggagcggctcaaagaagatacgtcttttgggggcaacctcgggcgagcagtcttccaggccaaaaagaggcttcttgaacctcttggtctggttgaggaagcggctaagacggctcctggaaagaagaggcctgtagagcagtctcctcaggaaccggactcctccgcgggtattggcaaatcgggtgcacagcccgctaaaaagagactcaatttcggtcagactggcgacacagagtcagtcccagaccctcaaccaatcggagaacctcccgcagccccctcaggtgtgggatctcttacaatggcttcaggtggtggcgcaccagtggcagacaataacgaaggtgccgatggagtgggtagttcctcgggaaattggcattgcgattcccaatggctgggggacagagtcatcaccaccagcacccgaacctgggccctgcccacctacaacaatcacctctacaagcaaatctccaacagcacatctggaggatcttcaaatgacaacgcctacttcggctacagcaccccctgggggtattttgacttcaacagattccactgccacttctcaccacgtgactggcagcgactcatcaacaacaactggggattccggcctaagcgactcaacttcaagctcttcaacattcaggtcaaagaggttacggacaacaatggagtcaagaccatcgccaataaccttaccagcacggtccaggtcttcacggactcagactatcagctcccgtacgtgctcgggtcggctcacgagggctgcctcccgccgttcccagcggacgttttcatgattcctcagtacgggtatctgacgcttaatgatggaagccaggccgtgggtcgttcgtccttttactgcctggaatatttcccgtcgcaaatgctaagaacgggtaacaacttccagttcagctacgagtttgagaacgtacctttccatagcagctacgctcacagccagagcctggaccgactaatgaatccactcatcgaccaatacttgtactatctctcaaagactattaacggttctggacagaatcaacaaacgctaaaattcagtgtggccggacccagcaacatggctgtccagggaagaaactacatacctggacccagctaccgacaacaacgtgtctcaaccactgtgactcaaaacaacaacagcgaatttgcttggcctggagcttcttcttgggctctcaatggacgtaatagcttgatgaatcctggacctgctatggccagccacaaagaaggagaggaccgtttctttcctttgtctggatctttaatttttggcaaacaaggaactggaagagacaacgtggatgcggacaaagtcatgataaccaacgaagaagaaattaaaactactaacccggtagcaacggagtcctatggacaagtggccacaaaccaccagagtgcccaagcacaggcgcagaccggctgggttcaaaaccaaggaatacttccgggtatggtttggcaggacagagatgtgtacctgcaaggacccatttgggccaaaattcctcacacggacggcaactttcacccttctccgctgatgggagggtttggaatgaagcacccgcctcctcagatcctcatcaaaaacacacctgtacctgcggatcctccaacggccttcaacaaggacaagctggactctttcatcacccagtattctactggccaagtcagcgtggagatcgagtgggagctgcagaaggaaaacagcaagcgctggaacccggtgatccagtacacttccaactattacaagtctaataatgttgaatttgctgttaatactgaaggtgtatatagtgaaccccgccccattggcaccagatacctgactcgtaatctg

SEQ ID NO: 656 - DNA, 2208 bp, Artificial Sequence
  source: /note="Description of Artificial Sequence: Synthetic polynucleotide"
atggctgccgatggttatcttccagattggctcgaggacaacctctctgagggcattcgcgagtggtgggacttgaaacctggagccccgaagcccaaagccaaccagcaaaagcaggacgacggccggggtctggtgcttcctggctacaagtacctcggacccttcaacggactcgacaagggggagcccgtcaacgcggcggacgcagcggccctcgagcacgacaaggcctacgaccagcagctcaaagcgggtgacaatccgtacctgcggtataaccacgccgacgccgagtttcaggagcgtctgcaagaagatacgtcttttgggggcaacctcgggcgagcagtcttccaggccaagaagcgggttctcgaacctctcggtctggttgaggaaggcgctaagacggctcctggaaagaaacgtccggtagagcagtcgccacaagagccagactcctcctcgggcatcggcaagacaggccagcagcccgctaaaaagagactcaattttggtcagactggcgactcagagtcagtccccgatccacaacctctcggagaacctccagcaacccccgctgctgtggggcctactacaatggcttcaggcggtggcgcaccaatggcagacaataacgaaggcgtcgacggagtgggtaatgcctcaggaaattggcattgcgattccacatggctgggcgacagagtcatcaccaccagcacccgcacctgggccttgcccacctacaataaccacctctacaagcaaatctccagtgcttcaacgggggccagcaacgacaaccactacttcggctacagcaccccctgggggtattttgatttcaacagattccactgccacttttcaccacgtgactggcagcgactcatcaacaacaattggggattccggcccaagagactcaacttcaaactcttcaacatccaagtcaaggaggtcacgacgaatgatggcgttacaaccatcgctaataaccttaccagcacggttcaagtcttctcggactcggagtaccagcttccgtacgtcctcggctctgcgcaccagggctgcctccctccgttcccggcggacgtgttcatgattccgcaatacggctacctgacgctcaacaatggcagccaagccgtgggacgttcatccttttactgcctggaatatttcccttctcagatgctgagaacgggcaacaactttaccttcagctacacctttgaggaagtgcctttccacagcagctacgcgcacagccagagcctggaccggctgatgaatcctctcatcgaccaatacctgtattacctgaacagaactcaaaatcagtccggaagtgcccaaaacaaggacttgctgtttagccgtgggtctccagctggcatgtctgttcagcccaaaaactggctacctggaccctgttatcggcagcagcgcgtttctaaaacaaaaacagacaacaacaacagcaattttacctggactggtgcttcaaaatataacctcaatgggcgtgaatccatcatcaaccctggcactgctatggcctcacacaaagacgacgaagacaagttctttcccatgagcggtgtcatgatttttggaaaagagagcgccggagcttcaaacactgcattggacaatgtcatgattacagacgaagaggaaattaaagccactaaccctgtggccaccgaaagatttgggaccgtggcagtcaatttccagagcagcagcacagaccctgcgaccggagatgtgcatgctatgggagcattacctggcatggtgtggcaagatagagacgtgtacctgcagggtcccatttgggccaaaattcctcacacagatggacactttcacccgtctcctcttatgggcggctttggactcaagaacccgcctcctcagatcctcatcaaaaacacgcctgttcctgcgaatcctccggcggagttttcagccacaaagcttgcttcattcatcacccaatactccacaggacaagtgagtgtggaaattgaatgggagctgcagaaagaaaacagcaagcgctggaatcccgaagtgcagtacacatccaattatgcaaaatctgccaacgttgattttactgtggacaacaatggactttatactgagcctcgccccattggcacccgttaccttacccgtcccctg

SEQ ID NO: 657 - DNA, 2208 bp, Artificial Sequence
  source: /note="Description of Artificial Sequence: Synthetic polynucleotide"
atggctgccgatggttatcttccagattggctcgaggacaacctctctgagggcattcgcgagtggtgggacttgaaacctggagccccgaagcccaaagccaaccagcaaaagcaggacgacggccggggtctggtgcttcctggctacaagtacctcggacccttcaacggactcgacaagggggagcccgtcaacgcggcggacgcagcggccctcgagcacgacaaggcctacgaccagcagctcaaagcgggtgacaatccgtacctgcggtataaccacgccgacgccgagtttcaggagcgtctgcaagaagatacgtcttttgggggcaacctcgggcgagcagtcttccaggccaagaagcgggttctcgaacctctcggtctggttgaggaaggcgctaagacggctcctggaaagagacgtccggtagagcagtcgccacaagagccagactcctcctcgggcatcggcaagacaggccagcagcccgctaaaaagagactcaattttggtcagactggcgactcagagtcagtccccgatccacaacctctcggagaacctccagcaacccccgctgctgtgggacctactacaatggcttcaggcggtggcgcaccaatggcagacaataacgaaggcgccgacggagtgggtaatgcctcaggaaattggcattgcgattccacatggctgggcgacagagtcatcaccaccagcacccgcacctgggccttgcccacctacaataaccacctctacaagcaaatctccagtgcttcaacgggggccagcaacgacaaccactacttcggctacagcaccccctgggggtattttgatttcaacagattccactgccacttttcaccacgtgactggcagcgactcatcaacaacaattggggattccggcccaagagactcaacttcaaactcttcaacatccaagtcaaggaggtcacgacgaatgatggcgtcacaaccatcgctaataaccttaccagcacggttcaagtcttctcggactcggagtaccagcttccgtacgtcctcggctctgcgcaccagggctgcctccctccgttcccggcggacgtgttcatgattccgcaatacggctacctgacgctcaacaatggcagccaagccgtgggacgttcatccttttactgcctggaatatttcccttctcagatgctgagaacgggcaacaactttaccttcagctacacctttgaggaagtgcctttccacagcagctacgcgcacagccagagcctggaccggctgatgaatcctctcatcgaccaatacctgtattacctgaacagaactcaaaatcagtccggaagtgcccaaaacaaggacttgctgtttagccgtgggtctccagctggcatgtctgttcagcccaaaaactggctacctggaccctgttatcggcagcagcgcgtttctaaaacaaaaacagacaacaacaacagcaattttacctggactggtgcttcaaaatataacctcaatgggcgtgaatccatcatcaaccctggcactgctatggcctcacacaaagacgacgaagacaagttctttcccatgagcggtgtcatgatttttggaaaagagagcgccggagcttcaaacactgcattggacaatgtcatgattacagacgaagaggaaattaaagccactaaccctgtggccaccgaaagatttgggaccgtggcagtcaatttccagagcagcagcacagaccctgcgaccggagatgtgcatgctatgggagcattacctggcatggtgtggcaagatagagacgtgtacctgcagggtcccatttgggccaaaattcctcacacagatggacactttcacccgtctcctcttatgggcggctttggactcaagaacccgcctcctcagatcctcatcaaaaacacgcctgttcctgcgaatcctccggcggagttttcagctacaaagtttgcttcgttcatcacccaatactccacaggacaagtgagtgtggaaattgaatgggagctgcagaaagaaaacagcaagcgctggaatcccgaagtgcagtacacatccaattatgcaaaatctgccaacgttgattttactgtggacaacaatggactttatactgagcctcgccccattggcacccgttaccttacccgtcccctg

SEQ ID NO: 658 - DNA, 2208 bp, Artificial Sequence
  source: /note="Description of Artificial Sequence: Synthetic polynucleotide"
atggctgccgatggttatcttccagattggctcgaggacaacctctctgagggcattcgcgagtggtgggacttgaaacctggagccccgaagcccaaagccaaccagcaaaagcaggacgacggccggggtctggtgcttcctggctacaagtacctcggacccttcaacggactcgacaagggggagcccgtcaacgcggcggacgcagcggccctcgagcacgacaaggcctacgaccagcagctcaaagcgggtgacaatccgtacccgcggtataaccacgccgacgccgagtttcaggagcgtctgcaagaagatacgtcttttgggggcaacctcgggcgagcagtcttccaggccaagaagcgggttctcgaacctctcggtctggttggggaaggcgctaagacggctcctggaaagaaacgtccggtagagcagtcgccacaagagccagactcctcctcgggcatcggcaagacaggccagcagcccgctaaaaagagactcaattttggtcagactggcgactcagagtcagtccccgatccacaacctctcggagaacctccagcaacccccgctgctgtgggacctactacaatggcttcaggcggtggcgcaccaatggcagacaataacgaaggcgccgacggagtgggtaatgcctcaggaaattggcattgcgattccacatggctgggcgacagagtcatcaccaccagcacccgcacctgggccttgcccacctacaataaccacctctacaagcaaatctccagtgcttcaacgggggccagcaacgacaaccactacttcggctacagcaccccctgggggtattttgatttcaacagattccactgccacttttcaccacgtgactggcagcgactcatcaacaacaattggggattccggcccaagagactcaacttcaaactcttcaacatccaagtcaaggaggtcacgacgaatgatggcgtcacaaccatcgctaataaccttaccagcacggttcaagtcttctcggactcggagtaccagcttccgtacgtcctcggctctgcgcaccagggctgcctccctccgttcccggcggacgtgttcatgattccgcaatacggctacctgacgctcaacaatggcagccaagccgtgggacgttcatccttttactgcctggaatatttcccttctcagatgctgagaacgggcaacaactttaccttcagctacacctttgaggaagtgcctttccacagcagctacgcgcacagccagagcctggaccggctgatgaatcctcccatcgaccaatacctgtattacctgaacagaactcaaaatcagtccggaagtgcccaaaacaaggacttgctgtttagccgtgggtctccagctggcatgtctgttcagcccaaaaactggctacctggaccctgttatcggcagcagcgcgtttctaaaacaaaaacagacaacaacaacagcaattttacctggactggtgcttcaaaatataacctcaatgggcgtgaatccatcatcaaccctggcactgctatggcctcacacaaagacgacgaagacaagttctttcccatgagcggtgtcatgatttttggaaaagagagcgccggagcttcaaacactgcattggacaatgtcatgattacagacgaagaggaaattaaagccactaaccctgtggccaccgaaagatttgggaccgtggcagtcaatttccagagcagcagcacagaccctgcgaccggagatgtgcatgctatgggagcattacctggcatggtgtggcaagatagagacgtgtacctgcagggtcccatttgggccaaaattcctcacacagatggacactttcacccgtctcctcttatgggcggctttggactcaagaacccgcctcctcagatcctcatcaaaaacacgcctgttcctgcgaatcctccggcggagttttcagctacaaagtttgcttcattcatcacccaatactccacaggacaagtgagtgtggaaattgaatgggagctgcagaaagaaaacagcaagcgctggaatcccgaagtgcagtacacatccaattatgcaaaatctgccaacgttgattttactgtggacaacaatggactttatactgagcctcgccccattggcacccgttaccttacccgtcccctg

SEQ ID NO: 659 - DNA, 2208 bp, Artificial Sequence
  source: /note="Description of Artificial Sequence: Synthetic polynucleotide"
atggctgccgatggttatcttccagattggctcgaggacaacctctctgagggcattcgcgagtggtgggacttgaaacctggagccccgaagcccaaagccaaccagcaaaagcaggacgacggccggggtctggtgcttcctggctacaagtacctcggacccttcaacggactcgacaagggggagcccgtcaacgcggcggacgcagcggccctcgagcacgacaaggcctacgaccagcagctcaaagcgggtgacaatccgtacctgcggtataaccacgccgacgccgagtttcaggagcgtctgcaagaagatacgtcttttgggggcaacctcgggcgagcagtcttccaggccaagaagcgggttctcgaacctctcggtctggttgaggaaggcgctaagacggctcctggaaagaaacgtccggtagagcagtcgccacaagagccagactcctcctcgggcatcggcaagacaggccagcagcccgctaaaaagagactcaattttggtcagactggcgactcagagtcagtccccgatccacgacctctcggagaacctccagcaacccccgctgctgtgggacctactacaatggcttcaggcggtggcgcaccaatggcagacaataacgaaggcgccgacggagtgggtaatgcctcaggaaattggcattgcgattccacatggctgggcgacagagtcatcaccaccagcacccgcacctgggccttgcccacctacaataaccacctctacaagcaaatctccagtgcttcaacgggggccagcaacgacaaccactacttcggctacagcaccccctgggggtattttgatttcaacagattccactgccacttttcaccacgcgactggcagcgactcatcaacaacaattggggattccggcccaagagactcaacttcaaactcttcaacatccaagtcaaggaggtcacgacgaatgatggcgtcacaaccatcgctaataaccttaccagcacggttcaagtcttctcggactcggagtaccagcttccgtacgtcctcggctctgcgcaccagggctgcctccctccgttcccggcggacgtgttcatgattccgcaatacggctacctgacgctcaacaatggcagccaagccgtgggacgttcatccttttactgcctggaatatttcccttctcagatgctgagaacgggcaacaactttaccttcagctacacctttgaggaagtgcctttccacagcagctacgcgcacagccagagcctggaccggctgatgaatcctctcatcgaccaatacctgtattacctgaacagaactcaaaatcagtccggaagtgcccaaaacaaggacttgctgtttagccgtgggcctccagctggcatgtctgttcagcccaaaaactggctacctggaccctgttatcggcagcagcgcgtttctaaaacaaaaacagacaacaacaacagcaattttacctggactggtgcttcaaaatataacctcaatgggcgtgaatccatcatcaaccctggcactgctatggcctcacacaaagacgacgaagacaagttctttcccatgagcggtgtcatgatttttggaaaagagagcgccggagcttcaaacactgcattggacaatgtcatgattacggacgaagaggaaattaaagccactaaccctgtggccaccgaaagatttgggaccgtggcagtcaatttccagagcagcagcacagaccctgcgaccggagatgtgcatgctatgggagcattacctggcatggtgtggcaagatagagacgtgtacctgcagggtcccatttgggccaaaattcctcacacagatggacactttcacccgtctcctcttatgggcggctttggactcaagaacccgcctcctcagatcctcatcaaaaacacgcctgttcctgcgaatcctccggcggagttttcagctacaaagtttgcttcattcatcacccaatactccacaggacaagtgagtgtggaaattgaatgggagctgcagaaagaaaacagcaagcgctggaatcccgaagtgcagtacacatccaattatgcaaaatctgccaacgttgattttactgtggacaacaatggactttatactgagcctcgccccattggcacccgttaccttacccgtcccctg

SEQ ID NO: 660 - DNA, 2208 bp, Artificial Sequence
  source: /note="Description of Artificial Sequence: Synthetic polynucleotide"
atggctgccgatggttatcttccagattggctcgaggacaacctctctgagggcattcgcgagtggtgggacttgaaacctggagccccgaagcccaaagccaaccagcaaaagcaggacgacggccggggtctggtgcttcctggctacaagtacctcggacccttcaacggactcgacaagggggagcccgtcaacgcggcggacgcagcggccctcgagcacgacaaggcctacgaccagcagctcaaagcgggtgacaatccgtacctgcggtataaccacgccgacgccgagtttcaggagcgtctgcaagaagatacgtcttttgggggcaacctcgggcgagcagtcttccaggccaagaagcgggttctcgaacctctcggtctggttgaggaaggcgctaagacggctcctggaaagaaacgtccggtagagcagtcgccacaagagccagactcctcctcgggcatcggcaagacaggccagcagcccgctaaaaagagactcaattttggtcagactggcggctcagagtcagtccccgatccacaacctctcggagaacctccagcaacccccgctgctgtgggacctactacaatggcttcaggcggtggcgcaccaatggcagacaataacgaaggcgccgacggagtgggtaatgcctcaggaaattggcattgcgattccacatggctgggcgacagagtcatcaccaccagcacccgcacctgggccttgcccacctacaataaccacctctacaagcaaatctccagtgcttcaacgggggccagcaacgacaaccactacttcggctacagcaccccctgggggtattttgatttcaacagattccactgccacttttcaccacgtgactggcagcgactcatcaacaacaattggggattccggcccaagagactcaacttcaaactcttcaacatccaagtcaaggaggtcacgacgaatgatggcgtcacaaccatcgctaataaccttaccagcacggttcaagtcttctcggactcggagtaccagcttccgtacgtcctcggctctgcgcaccagggctgcctccctccgttcccggcggacgtgttcatgattccgcaatacggctacctgacgctcaacaatggcagccaagccgtgggacgttcatccttttactgcctggaatatttcccttctcagatgctgagaacgggcaacaactttaccttcagctacacctttgaggaagtgcctttccacagcagctacgcgcacagccagagcctggaccggctgatgaatcctcccatcgaccaatacctgtattacctgaacagaactcaaaatcagtccgggagtgcccaaaacaaggacttgctgtttagccgtgggtctccagctggcatgtctgttcagcccaaaaactggctacctggaccctgttatcggcagcagcgcgtttctaaaacaaaaacagacaacaacaacagcaattttacctggactggtgcttcaaaatataacctcaatgggcgtgaatccatcatcaaccctggcactgctatggcctcacacaaagacgacgaagacaagttctttcccatgagcggtgtcatgatttttggaaaagagagcgccggagcttcaaacactgcattggacaatgtcatgattacagacgaagaggaaattaaagccactaaccctgtggccaccgaaagatttgggaccgtggcagtcaatttccagagcagcagcacagaccctgcgaccggagatgtgcatgctatgggagcattacctggcatggtgtggcaagatagagacgtgtacctgcagggtcccatttgggccaaaattcctcacacagatggacactttcacccgtctcctcttatgggcggctttggactcaagaacccgcctcctcagatcctcatcaaaaacacgcctgttcctgcgaatcctccggcggagttttcagctacaaagtttgcttcattcatcacccaatactccacaggacaagtgagtgtggaaattgaatgggagctgcagaaagaaaacagcaagcgctggaatcccgaagtgcagtacacatccaattatgcaaaatctgccaacgttgactttactgtggacaacaatggactttatactgagcctcgccccattggcacccgttaccttacccgtcccctg

SEQ ID NO: 661 - DNA, 2208 bp, Artificial Sequence
  source: /note="Description of Artificial Sequence: Synthetic polynucleotide"
atggctgccgatggttatcttccagattggctcgaggacaacctctctgagggcattcgcgagtggtgggacttgaaacctggagccccgaagcccaaagccaaccagcaaaagcaggacgacggccggggtctggtgcttcctggctacaagtacctcggacccttcaacggactcgacaagggggagcccgtcaacgcggcggacgcagcggccctcgagcacgacaaggcctacgaccagcagctcaaagcgggtgacaatccgtacctgcggtataaccacgccgacgccgagtttcaagagcgtctgcaagaagatacgtcttttgggggcaacctcgggcgagcagtcttccaggccaagaagcgggttctcgaacctctcggtctggttgaggaaggcgctaagacggctcctggaaagaaacgtccggtagagcagtcgccacaagagccagactcctcctcgggcatcggcaagacaggccagcagcccgctaaaaagagactcaattttggtcagactggcgactcagagtcagtccccgatccgcaacctctcggagaacctccagcaacccccgctgctgtgggacctactacaatggcttcaggcggtggcgcaccaatggcagacaataacgaaggcgccgacggagtgggtaatgcctcaggaaattggcattgcgattccacatggctgggcgacagagtcatcaccaccagcacccgcacctgggccttgcccacctacaataaccacctctacaagcaaatctccagtgcttcaacgggggccagcaacgacaaccactacttcggctacagcaccccctgggggtattttgatttcaacagattccactgccacttttcaccacgtgactggcagcgactcatcaacaacaattggggattccggcccaagagactcaacttcaaactcttcaacatccaagtcaaggaggtcacgacgaatgatggcgtcacaaccatcgctaataaccttaccagcacggttcaagtcttctcggactcggagtaccagcttccgtacgtcctcggctctgcgcaccagggctgcctccctccgttcccggcggacgtgttcatgattccgcaatacggctacctgacgctcaacaatggcagccaagccgtgggacgttcatccttttactgcctggaatatttcccttctcagatgctgagaacgggcaacaactttaccttcagctacacctttgaggaagtgcctttccacagcagctacgcgcacagccagagcctggaccggctgatgaatcctctcatcgaccaatacctgtattacctgaacagaactcaaaatcagtccggaagtgcccaaaacaaggacttgctgtttagccgtgggtctccagctggcatgtctgttcagcccaaaaactggctacctggaccctgttatcggcagcagcgcgtttctaaaacaaaaacagacaacaacaacagcaattttacctggactggtgcttcaaaatataacctcaatgggcgtgaatccatcatcaaccctggcactgctgtggcctcacacaaagacgacgaagacaagttctttcccatgagcggtgtcatgatttttggaaaagagagcgccggagcttcaaacactgcattggacaatgtcatgattacagacgaagaggaaattaaagccactaaccctgtggccaccgaaagatttgggaccgtggcagtcaatttccagagcagcagcacagaccctgcgaccggagatgtgcatgctatgggagcattacctggcatggtgtggcaagatagagacgtgtacctgcagggtcccatttgggccaaaattcctcacacagatggacactttcacccgtctcctcttatgggcggctttggactcaagaacccgcctcctcagatcctcatcaaaaacacgcctgttcctgcgaatcctccggcggagttttcagctacaaagtttgcttcattcatcacccaatactccacaggacaagtgagtgtggaaattgaatgggagctgcagaaagaaaacagcaagcgctggaatcccgaagtgcagtacacatccaattatgcaaaatctgccaacgttgattttactgtggacaacaatggactttatactgagcctcgccccattggcacccgttaccttacccgtcccctg

SEQ ID NO: 662 - DNA, 2208 bp, Artificial Sequence
  source: /note="Description of Artificial Sequence: Synthetic polynucleotide"
atggctgccgatggttatcttccagattggctcgaggacaacctctctgagggcattcgcgagtggtgggacttgaaacctggagccccgaagcccaaagccaaccagcaaaagcaggacgacggccggggtctggtgcttcctggctacaagtacctcggacccttcaacggactcgacaagggggagcccgtcaacgcggcggacgcagcggccctcgagcacgacaaggcctacgaccagcagctcaaagcgggtgacaatccgtacctgcggtataaccacgccgacgccgagtttcaggagcgtctgcaagaagatacgtcttttgggggcaacctcgggcgagcagtcttccaggccaagaagcgggttctcgaacctctcggtctggttgaggaaggcgctaagacggctcctggaaagaaacgtccggtagagcagtcgccacaagagccagactcctcctcgggcatcggcaagacaggccagcagcccgctaaaaagagactcaattttggtcagactggcgactcagagtcagtccccgatccacaacctctcggagaacctccagcaacccccgctgctgtgggacctactacaatggcttcaggcggtggcgcaccaatggcagacaataacgaaggcgccgacggagtgggtaatgcctcaggaaattggcattgcgattccacatggctgggcgacagagtcatcaccaccagcacccgcacctgggccttgcccacctacaataaccacctctacaagcaaatctccagtgcttcaacgggggccagcaacgacaaccactacttcggctacagcaccccctgggggtattttgatttcaacagattccactgccacttttcaccacgtgactggcagcaactcatcaacaacaattggggattccggcccaagagactcaacttcaaactcttcaacatccaagtcaaggaggtcacgacgaatgatggcgtcacaaccatcgctaataaccttaccagcacggttcaagtcttctcggactcggagtaccagcttccgtacgtcctcggctctgcgcaccagggctgcctccctccgttcccggcggacgtgttcatgattccgcaatacggctacctgacgctcaacaatggcagccaagccgtgggacgttcatccttttactgcctggaatatttcccttctcagatgctgagaacgggcaacaactttaccttcagctacacctttgaggaagtgcctttccacagcagctacgcgcacagccagagcctggaccggctgatgaatcctctcatcgaccaatacctgtattacctgaacagaactcaaaatcagtccggaagtgcccaaaacaaggacttgctgtttagccgtgggtctccagctggcatgtctgttcagcccaaaaactggctacctggaccctgttatcggcagcagcgcgtttctaaaacaaaaacagacaacaacaacagcaattttacctggactggtgcttcaaaatataacctcaatgggcgtgaatccatcatcaaccctggcactgctatggcctcacacaaagacgacgaagacaagttctttcccatgagcggtgtcatgatttttggaaaagagagcgccggagcttcaaacactgcattggacaatgtcatgattacagacgaagaggaaattaaagccactaaccctgtggccaccgaaagatttgggaccgtggcagtcaatttccagagcaccagcacagaccctgcgaccggagatgtgcatgctatgggagcattacctggcatggtgtggcaagatagagacgtgtacctgcagggtcccatttgggccaaaattcctcacacagatggacactttcacccgtctcctcttatgggcggctttggactcaagaacccgcctcctcagatcctcatcaaaaacacgcctgttcctgcgaatcctccggcggagttttcagctacaaagtttgcttcattcatcacccaatactccacaggacaagtgagtgtggaaattgaatgggagctgcagaaagaaaacagcaagcgctggaatcccgaagtgcagtacacatccaattatgcaaaatctgccgacgttgattttactgtggacaacaatggactttatactgagcctcgccccattggcacccgttaccttacccgtcccctg

SEQ ID NO: 663 - DNA, 2208 bp, Artificial Sequence
  source: /note="Description of Artificial Sequence: Synthetic polynucleotide"
atggctgccgatggttatcttccagattggctcgaggacaacctctctgagggcattcgcgagtggtgggacttgaaacctggagccccgaagcccaaagccaaccagcaaaagcaggacgacggccggggtctggtgcttcctggctacaagtacctcggacccttcaacggactcgacaagggggagcccgtcaacgcggcggacgcagcggccctcgagcacgacaaggcctacgaccagcagctcaaagcgggtgacaatccgtacctgcggtataaccacgccgacgccgagtttcaagagcgtctgcaagaagatacgtcttttgggggcaacctcgggcgagcagtcttccaggccaagaagcgggttctcgaacctctcggtctggttgaggaaggcgctaagacggctcctggaaagaaacgtccggtagagcagtcgccacaagagccagactcctcctcgggcatcggcaagacaggccagcagcccgctaaaaagagactcaattttggtcagactggcgactcagagtcagtccccgatccgcaacctctcggagaacctccagcaacccccgctgctgtgggacctactacaatggcttcaggcggtggcgcaccaatggcagacaataacgaaggcgccgacggagtgggtaatgcctcaggaaattggcattgcgattccacatggctgggcgacagagtcatcaccaccagcacccgcacctgggccttgcccacctacaataaccacctctacaagcaaatctccagtgcttcaacgggggccagcaacgacaaccactacttcggctacagcaccccctgggggtattttgatttcaacagattccactgccacttttcaccacgtgactggcagcgactcatcaacaacaattggggattccggcccaagagactcaacttcaaactcttcaacatccaagtcaaggaggtcacgacgaatgatggcgtcacaaccatcgctaataaccttaccagcacggttcaagtcttctcggactcggagtaccagcctccgtacgtcctcggctctgcgcaccagggctgcctccctccgttcccggcggacgtgttcatgattccgcaatacggccacctgacgctcaacaatggcagccaagccgtgggacgttcatccttttactgcctggaatatttcccttctcagatgctgagaacgggcaacaactttaccttcagctacacctttgaggaagtgcctttccacagcagctacgcgcacagccagagcctggaccggctgacgaatcctctcatcgaccaatacctgtattacctgaacagaactcaaaatcagtccggaagtgcccaaaacaaggacttgctgtttagccgtgggtctccagctggcatgtctgttcagcccaaaaactggctacctggaccctgttatcggcagcagcgcgtttctaaaacaaaaacagacaacaacaacagcaattttacctggactggtgcttcaaaatataacctcaatgggcgtgaatccatcatcaaccctggcactgctatggcctcacacaaagacgacgaagacaagttctttcccatgagcggtgtcatgatttttggaaaagagagcgccggagcttcaaacactgcattggacaatgtcatgattacagacgaagaggaaattaaagccactaaccctgtggccaccgaaagatttgggaccgtggcagtcaatttccagagcagcagcacagaccctgcgaccggagatgtgcatgctatgggagcattacctggcatggtgtggcaagatagagacgtgtacctgcagggtcccatttgggccaaaattcctcacacagatggacactttcacccgtctcctcttatgggcggctttggactcaagaacccgcctcctcagatcctcatcaaaaacacgcctgttcctgcgaatcctccggcggagttttcagctacaaagtttgcttcattcatcacccaatactccacaggacaagtgagtgtggaaattgaatgggagctgcagaaagaaaacagcaagcgctggaatcccgaagtgcagtacacatccaattatgcaaaatctgccaacgttgattttactgtggacaacaatggactttatactgagcctcgccccattggcacccgttaccttacccgtcccctg

SEQ ID NO: 664 - DNA, 2208 bp, Artificial Sequence
  source: /note="Description of Artificial Sequence: Synthetic polynucleotide"
atggctgccgatggttatcttccagattggctcgaggacaacctctctgagggcattcgcgagtggtgggacttgaaacctggagccccgaagcccaaagccaaccagcaagagcaggacgacggccggggtctggtgcttcctggctacaagtacctcggacccttcaacggactcgacaagggggagcccgtcaacgcggcggacgcagcggccctcgagcacgacaaggcctacgaccagcagctcaaagcgggtgacaatccgtacctgcggtataaccacgccgacgccgagtttcaggagcgtctgcaagaagatacgtcttttgggggcaacctcgggcgagcagtcttccaggccaagaagcgggttctcgaacctctcggtctggttgaggaaggcgctaagacggctcctggaaagaaacgtccggtagagcagtcgccacaagagccagactcctcctcgggcatcggcaagacaggccagcagcccgctaaaaagagactcaattttggtcagactggcgactcagagtcagtccccgatccacaacctctcggagaacctccagcaacccccgctgctgtgggacctactacaatggcttcaggcggtggcgcaccaatggcagacaataacgaaggcgccgacggagtgggtaatgcctcaggaaattggcattgcgattccacatggctgggcgacagagtcatcaccaccagcacccgcacctgggccttgcccacctacaataaccacctctacaagcaaatctccagtgcttcaacgggggccagcaacgacaaccactacttcggctacagcaccccctgggggtattttgatttcaacagattccactgccacttttcaccacgtgactggcagcgactcatcaacaacaattggggattccggcccaagagactcaacttcaaactcttcaacatccaagtcaaggaggtcacgacgaatgatggcgtcacaaccatcgctaataaccttaccagcacggttcaagtcttctcggactcggagtaccagcttccgtacgtcctcggctctgcgcaccagggctgcctccctccgttcccggcggacgtgttcatgattccgcaatacggctacctgacgctcaacaatggcagccaagccgtgggacgttcatccttttactgcctggaatatttcccttctcagatgctgagaacgggcaacaactttaccttcagctacacctttgaggaagtgcctttccacagcagctacgcgcacagccagagcctggaccggctgatgaatcctctcatcgaccaatacctgtattacctgaacagaactcaaaatcagtccggaagtgcccaaaacaaggacttgctgtttagccgtgggtctccagctggcatgtctgttcagcccaaaaactggctacctggaccctgttatcggcagcagcgcgtttctaaaacaaaaacagacaacaacaacagcaattttacctggactggtgcttcaaaatataacctcaatgggcgtgaatccatcatcaaccctggcactgctatggcctcacacaaagacgacgaagacaagttctttcccatgagcggtgtcatgatttttggaaaagagagcgccggagcttcaaacactgcattggacaatgtcatgattacagacgaagaggaaattaaagccactaaccctgtggccaccgaaagatttgggaccgtggcagtcaatttccagagcagcagcacagaccctgcgaccggagatgtgcatgctacgggaacattacctggcatggtgtggcaagatagagacgtgtacctgcagggtcccatttgggccaaaattcctcacacagatggacactttcacccgtctcctcttatgggcggctttggactcaagaacccgcctcctcagatcctcatcaaaaccacgcctgttcctgcgaatcctccggcggagttttcagctacaaagtttgcttcattcatcacccagtactccacaggacaagtgagtgtggaaattgaatgggagctgcagaaagaaaacagcaagcgctggaatcccgaagtgcagtacacatccaattatgcaaaatctgccaacgttgattttactgtggacgacaatggactttatactgagcctcgccccattggcacccgttaccttacccgtcccctg

SEQ ID NO: 665 - DNA, 2208 bp, Artificial Sequence
  source: /note="Description of Artificial Sequence: Synthetic polynucleotide"
atggctgccgatggttatcttccagattggctcgaggacaacctctctgagggcattcgcgagtggtgggacttgaaacctggagccccgaagcccaaagccaaccagcaaaagcaggacgacggccggggtctggtgcttcctggctacaagtacctcggacccttcaacggactcgacaagggggagcccgtcaacgcggcggacgcagcggccctcgagcacgacaaggcctacgaccagcagctcaaagcgggtgacaatccgtacctgcggtataaccacgccgacgccgagtttcaggagcgtctgcaagaagatacgtcttttgggggcaacctcgggcgagcagtcttccaggccaagaagcgggttctcgaacctctcggtctggttgaggaaggcgctaagacggctcctggaaagaaacgtccggtagagcagtcgctacaagagccagactcctcctcgggcatcggcaagacaggccagcagcccgctaaaaagagactcaattttggtcagactggcgactcagagtcagtccccgatccacaacctctcggagaacctccagcaacccccgctgctgtgggacctactacaatggcttcaggcggtggcgcaccaatggcagacaataacgaaggcgccgacggagtgggtaatgcctcaggaaattggcattgcgattccacatggctgggcgacagagtcatcaccaccagcacccgcacctgggccttgcccacctacaataaccacctctacaagcaaatctccagtgcttcaacgggggccagcaacgacaaccactacttcggctacagcaccccctgggggtattttgatttcaacagattccactgccacttttcaccacgtgactggcagcgactcatcaacaacaattggggattccggcccaagagactcaacttcaaactcttcaacatccaagtcaaggaggtcacgacgaatgatggcgtcacaaccatcgctaataaccttaccagcacggttcaagtcttctcggactcggagtaccagcttccgtacgtcctcggctctgcgcaccagggctgcctccctccgttcccggcggacgtgttcatgattccgcaatacggctacctgacgctcaacaatggcagccaagccgtgggacgttcatccttttactgcctggaatatttcccttctcagatgctgagaacgggcaacaactttaccttcagctacacctttgaggaagtgcctttccacagcagctacgcgcacagccagagcctggaccggctgatgaatcctctcatcgaccaatacctgtattacctgaacagaactcaaaatcagtccggaagtgcccaaaacaaggacttgctgtttagccgtgggtctccagctggcatgtctgttcagcccaaaaactggctacctggaccctgttatcggcagcagcgcgtttctaaaacaaaaacagacaacgacaacagcaattttacctggactggtgcttcaaaatataacctcaatgggcgtgaatccatcatcaaccctggcactgctatggcctcacacaaagacgacgaagacaagttctttcccatgagcggtgtcatgatttttggaaaagagagcgccggagcttcaaacactgcattggacaatgtcatgattacagacgaagaggaaattaaagccactaaccctgtggccaccgaaagatttgggaccgtggcagtcaatttccagagcagcagcacagaccctgcgaccggagatgtgcatgctatgggagcattacctggcatggtgtggcaagatagagacgtgtacctgcagggtcccatttgggccaaaattcctcacacagatggacactttcacccgtctcctcttatgggcggctttggactcaagaacccgcctcctcagatcctcatcaaaaacacgcctgttcctgcgaatcctccggcggagttttcagctacaaagtttgcttcattcatcacccaatactccacaggacaagtgagtgtggaaattgaatgggagctgcagaaagaaaacagcaagcgctggaatcccgaagtgcagtacacatccaattatgcaaaatctgccaacgttgattttactgtggacaacaatggactttatactgagcctcgccccattggcacccgttaccttacccgtcccctg

SEQ ID NO: 666 - DNA, 2208 bp, Artificial Sequence
  source: /note="Description of Artificial Sequence: Synthetic polynucleotide"
atggctgccgatggttatcttccagattggctcgaggacaacctctctgagggcattcgcgagtggtgggacttgaaacctggagctccgaagcccaaagccaaccagcaaaagcaggacgacggccggggtctggtgcttcctggctacaagtacctcggacccttcaacggactcgacaagggggagcccgtcaacgcggcggacgcagcggccctcgagcacgacaaggcctacgaccagcagctcaaagcgggtgacaatccgtacctgcggtataaccacgccgacgccgagtttcaggagcgtctgcaagaagatacgtcttttgggggcaacctcgggcgagcagtcttccaggccaagaagcgggttctcgaacctctcggtctggttgaggaaggcgctaagacggctcctggaaagaaacgtccggtagagcagtcgccacaagagccagactcctcctcgggcatcggcaagacaggccagcagcccgctaaaaagagactcaattttggtcagactggcgactcagagtcagtccccgatccacaacctctcggagaacctccagcaacccccgctgctgtgggacctactacaatggcttcaggcggtggcgcaccaatggcagacaataacgaaggcgccgacggagtgggtaatgcctcaggaaattggcattgcgattccacatggctgggcgacagagtcatcaccaccagcacccgcacctgggccttgcccacctacaataaccacctctacaagcaaatctccagtgcttcaacgggggccagcaacgacaaccactacttcggctacagcaccccctgggggtattttgatttcaacagattccactgccacttttcaccacgtgactggcagcgactcatcaacaacaattggggattccggcccaagagactcaacttcaaactcttcaacatccaagtcaaggaggtcacgacgaatgatggcgtcacaaccatcgctaataaccttaccagcacggttcaagtcttctcggactcggagtaccagcttccgtacgtcctcggctctgcgcaccagggctgcctccctccgttcccggcggacgtgttcatgattccgcaatacggctacctgacgctcaacaatggcagccaagccgtgggacgttcatccttttactgcctggaatatttcccttctcagatgctgagaacgggcaacaactttaccttcagctacacctttgaggaagcgcctttccacagcagctacgcgcacagccagagcctggaccggctgatgaatcctctcatcgaccaatacctgtattacctgaacagaactcaaaatcagtccggaagtgcccaaaacaaggacttgctgtttagccgtgggtctccagctggcatgtctgttcagcccaaaaactggctacctggaccctgttatcggcagcagcgcgtttctaaaacaaaaacagacaacaacaacagcaattttacctggactggtgcttcaaaatataacctcaatgggcgtgaatccatcatcaaccctggcactgctatggcctcacacaaagacgacgaagacaagttctttcccatgagcggtgtcatgatttttggaaaagagagcgccggagcttcaaacactgcattggacaatgtcatgattacagacgaagaggaaattaaagccactaaccctgtggccaccgaaagatttgggaccgtggcagtcaatttccagagcagcagcacagaccctgcgaccggagatgtgcatgctatgggagcattacctggcatggtgtggcaagatagagacgtgtacctgcagggtcccatttgggccaaaattcctcacacagatggacactttcacccgtctcctcttatgggcggctttggactcaagaacccgcctcctcagatcctcatcaaaaacacgcctgttcctgcgaatcctccggcggagttttcagctacaaagtttgcttcattcatcacccaatactccacaggacaagtgagtgtggaaattgaatgggagctgcagaaagaaaacagcaagcgctggaatcccgaagtgcagtacacatccaattatgcgaaatctgccaacgttgattttactgtggacaacaatggactttatactgagcctcgccccgttggcacccgttaccttacccgtcccctg

SEQ ID NO: 667 - DNA, 2208 bp, Artificial Sequence
  source: /note="Description of Artificial Sequence: Synthetic polynucleotide"
atggctgccgatggttatcttccagattggctcgaggacaacctctctgagggcattcgcgagtggtgggacttgaaacctggagccccgaagcccaaagccaaccagcaaaagcaggacgacggccggggtctggtgcttcctggctacaagtacctcggacccttcaacggactcgacaagggggagcccgtcaacgcggcggacgcagcggccctcgagcacgacaaggcctacgaccagcagctcaaagcgggtgacaatccatacctgcggtataaccacgccgacgccgagtttcaggagcgtctgcaagaaaatacgtcttttgggggcaacctcgggcgagcagtcttccaggccaagaagcgggttctcgaacctctcggtctggttgaggaaggcgctaagacggctcctggaaagaaacgtccggtagagcagtcgccacaagagccagactcctcctcgggcatcggcaagacaggccagcagcccgctaaaaagagactcaattttggtcagactggcgactcagagtcagtccccgatccacaacctctcggagaacctccagcaacccccgctgctgtgggacctactacaatggcttcaggcggtggcgcaccaatggcagacaataacgaaggcgccgacggagtgggtaatgcctcaggaaattggcattgcgattccacatggctgggcgacagagtcatcaccaccagcacccgcacctgggccttgcccacctacaataaccacctctacaagcaaatctccagtgcttcaacgggggccagcaacgacaaccactacttcggctacagcaccccctgggggtattttgatttcaacagattccactgccactttccaccacgtgactggcagcgactcatcaacaacaattggggattccggcccaagagactcaacttcaaactcttcaacatccaagtcaaggaggtcacgtcgaatgatggcgtcacaaccatcgctaataaccttaccagcacggttcaagtcttctcggactcggagtaccagcttccgtacgtcctcggctctgcgcaccagggctgcctccctccgttcccggcggacgtgttcatgattccgcaatacggctacctgacgctcaacaatggcagccaagccgtgggacgttcatccttttactgcctggaatatttcccttctcagatgctgagaacgggcaacaactttaccttcagctacacctttgaggaagtgcctttccacagcagctacgcgcacagccagagcctggaccggctgatgaatcctctcatcgaccaatacctgtattacctgaacagaactcaaaatcagtccggaagtgcccaaaacaaggacttgctgtttagccgtgggtctccagctggcatgtctgttcagcccaaaaactggctacctggtccctgttatcggcagcagcgcgtttctaaaacaaaaacagacaacaacaacagcaattttacctggactggtgcttcaaaatataacctcaatgggcgtgaatccatcatcaaccctggcactgctatggcctcacacaaagacgacgaagacaagttctttcccatgagcggtgtcatgatttttggaaaagagagcgccggagcttcaaacactgcattggacaatgtcatgattacagacgaagaggaaattaaagccactaaccctgtggccaccgaaagatttgggaccgtggcagtcaatttccagagcagcagcacagaccctgcgaccggagatgtgcatgctatgggagcattacctggcatggtgtggcaagatagagacgtgtacctgcagggtcccatttgggccaaaattcctcacacagatggacactttcacccgtctcctcttatgggcggctttggactcaagaacccgcctcctcagatcctcatcaaaaacacgcctgttcctgcgaatcctccggcggagttttcagctacaaagtttgcttcattcatcacccaatactccacaggacaagtgagtgtggaaattgaatgggagctgcagaaagaaaacagcaagcgctggaatcccgaagtgcagtacacatccaattatgcaaaatctgccaacgttgattttactgtggacaacaatggactttatactgagcctcgccccattggcacccgttaccttacccgtcccctg

SEQ ID NO: 668 - DNA, 2208 bp, Artificial Sequence
  source: /note="Description of Artificial Sequence: Synthetic polynucleotide"
atggctgccgatggttatcttccagattggctcgaggacaacctctctgagggcattcgcgagtggtgggacttgaaacctggagccccgaagcccaaagccaaccagcaaaagcaggacgacggccggggtctggtgcttcctggctacaagtacctcggacccttcaacggactcgacaagggggagcccgtcaacgcggcggacgcagcggccctcgagcacgacaaggcctacgaccagcagctcaaagcgggtgacaatccgtacctgcggtataaccacgccgacgccgagtttcaggagcgtctgcaagaagatacgtcttttgggggcaacctcgggcgagcagtcttccaggccaagaagcgggttctcgaacctctcggtctggttgaggaaggcgctaagacggctcctggaaagaaacgtccggtagagcagtcgccacaagagccagactcctcctcgggcatcggcaagacaggccagcagcccgctaaaaagagactcaattttggtcagactggcgactcagagtcagtccccgatccacaacctctcggagaacctccagcaacccccgctgctgtgggacctactacaatggcttcaggcggtggcgcaccaatggcagacaataacgaaggcgccgacggagtgggtaatgcctcaggaaattggcattgcgattccacatggctgggcgacagagtcatcaccaccagcacccgcacctgggccttgcccacctacaataaccacctctacaagcaaatctccagtgcttcaacgggggccagcaacgacaaccactacttcggctacagcaccccctgggggtattttgatttcaacagattccactgccacttttcaccacgtgactggcagcgactcatcaacaacaattggggattccggcccaagagactcaacttcaaactcttcaacatccaagtcaaggaggtcacgacgaatgatggcgtcacaaccatcgctaataaccttaccagcacggttcaagtcttctcggactcggagtaccagcttccgtacgtcctcggctctgcgcaccagggctgcctccctccgttcccggcggacgtgttcatgattccgcaatacggctacctgacgctcaacaatggcagccaagccgtgggacgttcatccttttactgcctggaatatttcccttctcagatgctgagaacgggcaacaactttaccttcagctacacctttgaggaagtgcctttccacagcagctacgcgcacagccagagcctggaccggctgatgaatcctctcatcgaccaatacctgtattacctgaacagaactcaaaatcagtccggaagtgcccaaaacaaggacttgctgtttagccgtgggtctccagctggcacgtctgttcagcccaaaaactggctacctggaccctgttatcggcagcagcgcgtttctaaaacaaaaacagacaacaacaacagcaattttacctggactggtgcttcaaaatataacctcaatgggcgtgaatccatcatcaaccctggcactgctatggcctcacacaaagacgacgaagacaagttctttcccatgagcggtgtcatgatttttggaaaagagagcgccggagcttcaaacactgcattggacaatgtcatgattacagacgaagaggaaattaaagccactaaccctgtggccaccgaaagatttgggaccgtggcagtcaatttccagagcagcagcacagaccctgcgaccggagatgtgcatgctatgggagcattacctggcatggtgtggcaagatagagacgtgtacctgcagggtcccatttgggccaaaattcctcacacagatggacactttcacccgtctcctcttatgggcggctttggactcaagaacccgcctcctcagatcctcatcaaaaacacgcctgttcctgcgaatcctccggcggagttttcagctacaaagtttgcttcattcatcacccaatactccacaggacaagtgagtgtggaaattgaatgggagctgcagaaagaaaacagcaagcgctggaatcccgaagtgcagtacacatccaattatgcaaaatctgccaacgttgattttactgtggacaacaatggactttatactgggcctcgccccattggcacccgttaccttacccgtcccctg

SEQ ID NO: 669 - DNA, 2208 bp, Artificial Sequence
  source: /note="Description of Artificial Sequence: Synthetic polynucleotide"
atggctgccgatggttatcttccagattggctcgaggacaacctctctgagggcattcgcgagtggtgggacttgaaacctggagccccgaagcccaaagccaaccagcaaaagcaggacgacggccggggtctggtgcttcctggctacaagtacctcggacccttcaacggactcgacaagggggagcccgtcaacgcggcggacgcagcggccctcgagcacgacaaggcctacgaccagcagctcaaagcgggtgacaatccgtacctgcggtataaccacgccgacgccgagtttcaggagcgtctgcaagaagatacgtcttttgggggcaacctcgggcgagcagtcttccaggccaagaagcgggttctcgaacctctcggtctggttgaggaaggcgctaagacggctcctggaaagaaacgtccggtagagcagtcgccacaagagccagactcctcctcgggcatcggcaagacaggccagcagcccgctaaaaagagactcaattttggtcagactggcgactcagagtcagtccccgatccacaacctctcggagaacctccagcaacccccgctgctgtgggacctactacaatggcttcaggcggtggcgcaccaatggcagacaataacgaaggcgccgacggagtgggtaatgccccaggaaattggcattgcgactccacatggctgggcgacagagtcatcaccaccagcacccgcacctgggccttgcccacctacaataaccacctctacaagcaaatctccagtgcttcaacgggggccagcaacgacaaccactacttcggctacagcaccccctgggggtattttgatttcaacagattccactgccacttttcaccacgtgactggcagcgactcatcaacaacaattggggattccggcccaagagactcaacttcaaactcttcaacatccaagtcaaggaggtcacgacgaatgatggcgtcacaaccatcgctaataaccttaccagcacggttcaagtcttctcggactcggagtaccagcttccgtacgtcctcggctctgcgcaccagggctgcctccctccgttcccggcggacgtgttcatgattccgcaatacggctacctgacgctcaacaatggcagccaagccgtgggacgttcatccttttactgcctggaatatttcccttctcagatgctgagaacgggcaacaactttaccttcagctacacctttgaggaagtgcctttccacagcagctacgcgcacagccagagcctggaccggctgatgaatcctctcatcgaccaatacctgtattacctgaacagaactcaaaatcagtccggaagtgcccaaaacaaggacttgctgtttagccgtgggtctccagctggcatgtctgttcagcccaaaaactggctacctggaccctgttatcggcagcagcgcgtttctaaaacaaaaacagacaacaacaacagcaattttacctggactggtgcttcaaaatataacctcaatgggcgtgaatccatcatcaaccctggcacagctatggcctcacacaaagacgacgaagacaagttctttcccatgagcggtgtcatgatttttggaaaagagagcgccggagcttcaaacactgcattggacaatgtcatgattacaggcgaagaggaaattaaagccactaaccctgtggccaccgaaagatttgggaccgtggcagtcaatttccagagcagcagcacagaccctgcgaccggagatgtgcatgctatgggagcattacctggcatggtgtggcaagatagagacgtgtacctgcagggtcccatttgggccaaaattcctcacacagatggacactttcacccgtctcctcttatgggcggctttggactcaagaacccgcctcctcagatcctcatcaaaaacacgcctgttcctgcgaatcctccggcggagttttcagctacaaagtttgcttcattcatcacccaatactccacaggacaagtgagtgtggaaattgaatgggagctgcagaaagaaaacagcaagcgctggaatcccgaagtgcagtacacatccaattatgcaaaatctgccaacgttgattttactgtggacaacaatggactttatactgagcctcgccccattggcacccgttaccttacccgtcccctg

SEQ ID NO: 670 - DNA, 2208 bp, Artificial Sequence
  source: /note="Description of Artificial Sequence: Synthetic polynucleotide"
atggctgccgatggttatcttccagattggctcgaggacaacctctctgagggcattcgcgagtggtgggacttgaaacctggagccccgaagcccaaagccaaccagcaaaagcaggacgacggccggggtctggtgcttcctggctacaagtacctcggacccttcaacagactcgacaagggggagcccgtcaacgcggcggacgcagcggccctcgagcacgacaaggcctacgaccagcagctcaaagcgggtgacaatccgtacctgcggtataaccacgccgacgccgagtttcaggagcgtctgcaagaagatacgtcttttgggggcaacctcgggcgagcagtcttccaggccaagaagcgggttctcgaacctctcggtctggttgaggaaggcgctaagacggctcctggaaggaaacgtccggtagagcagtcgccacaagagccagactcctcctcgggcatcggcaagacaggccagcagcccgctaaaaagagactcaattttggtcagactggcgactcagagtcagtccccgatccacaacctctcggagaacctccagcaacccccgctgctgtgggacctactacaatggcttcaggcggtggcgcgccaatggcagacaataacgaaggcgccgacggagtgggtaatgcctcaggaaattggcattgcgattccacatggctgggcgacagagtcatcaccaccagcacccgcacctgggccttgcccacctacaataaccacctctacaagcaaatctccagtgcttcaacgggggccagcaacgacaaccactacttcggctacagcaccccctgggggtattttgatttcaacagattccactgccacttttcaccacgtgactggcagcgactcatcaacaacaattggggattccggcccaagagactcaacttcaaactcttcaacatccaagtcaaggaggtcacgacgaatgatggcgtcacaaccatcgctaataaccttaccagcacggttcaagtcttctcggactcggagtaccagcttccgtacgtcctcggctctgcgcaccagggctgcctccctccgttcccggcggacgtgttcatgattccgcaatacggctacctgacgctcaacaatggcggccaagccgtgggacgttcatccttttactgcctggaatatttcccttctcagatgctgagaacgggcaacaactttaccttcagctacacctttgaggaagtgcctttccacagcagctacgcgcacagccagagcctggaccggctgatgaatcctctcatcgaccaatacctgtattacctgaacagaactcaaaatcagtccggaagtgcccaaaacaaggacttgctgtttagccgtgggtctccagctggcatgtctgttcagcccaaaaactggctacctggaccctgttatcggcagcagcgcgtttctaaaacaaaaacagacaacaacaacagcaattttacctggactggtgcttcaaaatatagcctcaatgggcgtgaatccatcatcaaccctggcactgctatggcctcacacaaagacgacgaagacaagttctttcccatgggcggtgtcatgatttttggaaaagagagcgccggagcttcaaacactgcattggacaatgccatgattacagacgaagaggaaattaaagccactaaccctgtggccaccgaaagatttgggaccgtggcagtcaatttccagagcagcagcacagaccctgcgaccggagatgtgcatgctatgggagcattacctggcatggtgtggcaagatagagacgtgtacctgcagggtcccatttgggccaaaattcctcacacagatggacactttcacccgtctcctcttatgggcggctttggactcaagaacccgcctcctcagatcctcatcaaaaacacgcctgttcctgcgaatcctccggcggagttttcagctacaaagtttgcttcattcatcacccaatactccacaggacaagtgagtgtggaaattgaatgggagctgcagaaagaaaacagcaagcgctggaatcccgaagtgcagtacacatccaattatgcaaaatctgccaacgttgattttactgtggacaacaatggactttatactgagcctcgccccattggcacccgttaccttacccgtcccctg

SEQ ID NO: 671 - DNA, 2208 bp, Artificial Sequence
  source: /note="Description of Artificial Sequence: Synthetic polynucleotide"
atggctgccgatggttatcttccagattggctcgaggacaacctctctgagggcattcgcgagtggtgggacttgaaacctggagccccgaagcccaaagccaaccagcaaaagcaggacgacggccggggtctggtgcttcctggctacaagtacctcggacccttcaacggactcgacaagggggagcccgtcaacgcggcggacgcagcggccctcgagcacgacaaggcctacgaccagcagctcaaagcgggtgacaatccgtacctgcggtataaccacgccgacgccgagtttcaggagcgtctgcaagaagatacgtcttttgggggcaacctcgggcgagcagtcttccaggccaagaagcgggttctcgaacctctcggtctggttgaggaaggcgctaagacggctcctggaaagaaacgtccggtagagcagtcgccacaagagccagactcctcctcgggcatcggcaagacaggccagcagcccgctaaaaagagactcaattttggtcagactggcgactcagagtcagtccccgatccacaacctctcggagaacctccagcaacccccgctgctgtgggacctactacaatggcttcaggcggtggcgcaccaatggcagacaataacgaaggcgccgacggagtgggtaatgcctcaggaaattggcattgcgattccacatggctgggcggcagagtcatcaccaccagcacccgcacctgggccttgcccacctacaataaccacctctacaagcaaatctccagtgcttcaacgggggccagcaacgacaaccactacttcggctacagcaccccctgggggtattttgatttcaacagattccactgccacttttcaccacgtgactggcagcgactcatcaacaacaattggggattccggcccaagagactcaacttcaaactcttcaacatccaagtcaaggaggtcacgacgaatgatggcgtcacaaccatcgctaataaccttaccagcacggttcaagtcttctcggactcggagtaccagcttccgtacgtcctcggctctgcgcaccagggctgcctccctccgttcccggcggacgtgttcatgattccgcaatacggctacctgacgctcaacaatggcagccaagccgtgggacgttcatccttttactgcctggaatatttcccttctcagatgctgagaacgggcaacaactctaccttcagctacacctttgaggaagtgcctttccacagcagctacgcgcacagccagagcctggaccggctgatgaatcctctcatcgaccaatacctgtattacctgaacagaactcaaaatcagtccggaagtgcccaaaacaaggacttgctgtttagccgtgggtctccagctggcatgtctgttcagcccaaaaactggctacctggaccctgttatcggcagcagcgcgtttctaaaacaaaaacagacaacaacaacagcaattttacctggactggtgcttcaaaatataacctcaatgggcgtgaatccatcatcaaccctggcactgctatggcctcacacaaagacgacgaagacaagttctttcccatgagcggtgtcatgatttttggaaaagagagcgccggagcttcaaacactgcattggacaatgtcatgattacagacgaagaggaaattaaagccactaaccctgtggccaccgaaagatttgggaccgtggcagtcaatttccagagcagcagcacagaccctgcgaccggagatgtgcatgctatgggaacattacctggcatggtgtggcaagatagagacgtgtacctgcagggtcccatttgggccaaaattcctcacacagatggacactttcacccgtctcctcttatgggcggctttggactcaagaacccgcctcctcagatcctcatcaaaaacacgcctgttcctgcgaatcctccggcggagttttcagctacaaagtttgcttcattcatcacccaatactccacaggacaagtgagtgtggaaattgaatgggagctgcagaaagaaaacagcaagcgctggaatcccgaagtgcagtacacatccaattatgcaaaatctgccaacgttgattttactgtggacaacaatggactttatactgagcctcgccccattggcacccgttaccttacccgtcccctg

SEQ ID NO: 672 - DNA, 2208 bp, Artificial Sequence
  source: /note="Description of Artificial Sequence: Synthetic polynucleotide"
atggctgccgatggttatctcccagattggctcgaggacaacctctctgagggcattcgcgagtggtgggacttgaaacctggagccccgaagcccaaagccaaccagcaaaagcaggacgacggccggggtctggtgcttcctggctacaagtacctcggacccttcaacggactcgacaagggggagcccgtcagcgcggcggacgcagcggccctcgagcacgacaaggcctacgaccagcagctcaaagcgggtgacaatccgtacctgcggtataaccacgccgacgccgagtttcaggagcgtctgcaagaagatacgtcttttgggggcaacctcgggcgagcagtcttccaggccaagaagcgggttctcgaacctctcggtctggttgaggaaggcgctaagacggctcctggaaagaaacgtccggtagagcagtcgccacaagagccagactcctcctcgggcatcggcaagacaggccagcagcccgctaaagagagactcaattttggtcagactggcgactcagagtcagtccccgatccacaacctctcggagaacctccagcaacccccgctgctgtgggacctactacaatggcttcaggcggtggcgcaccaatggcagacaataacgaaggcgccgacggagtgggtaatgcctcaggaaattggcattgcgattccacatggctgggcgacagagtcatcaccaccagcacccgcacctgggccttgcccacctacaataaccacctctacaagcaaatctccagtgcttcaacgggggccagcaacgacaaccactacttcggctacagcaccccctgggggtattttgatttcaacagattccactgccacttttcaccacgtgactggcagcgactcatcaacaacaattggggattccggcccaagagactcaacttcaaactcttcaacatccaagtcaaggaggtcacgacgaatgatggcgtcacaaccatcgccaataaccttaccagcacggttcaagtcttctcggactcggagtaccagcttccgtacgtcctcggctctgcgcaccagggctgcctccctccgttcccggcggacgtgttcatgattccgcaatacggctacctgacgctcaacaatggcagccaagccgtgggacgttcatccttttactgcctggaatatttcccttctcagatgctgagaacgggcaacaactttaccttcagctacacctttgaggaagtgcctttccacagcagctacgcgcacagccagagcctggaccggctgatgaatcctctcatcgaccaatacctgtattacctgaacagaactcaaaatcagtccggaagtgcccaaaacaaggacttgctgtttagccgtgggtctccagctggcatgtctgttcagcccaaaaactggctacctggaccctgttatcggcagcagcgcgtttctaaaacaaaaacagacaacaacaacagcaattttacctggactggtgcttcaaaatataacctcaatgggcgtgaatccatcatcaaccctggcactgctatggcctcacacaaagacgacgaagacaagttctttcccatgagcggtgtcatgatttttggaaaagagagcgccggagcttcaaacactgcattggacaatgtcatgattacagacgaagaggaaattaaagccactaaccctgtggccaccgaaagatttgggaccgtggcagtcaatttccagagcagcagcacagaccctgcgaccggagatgtgcatgctatgggagcattacctggcatggtgtggcaagatagagacgtgtacctgcagggtcccatttgggccaaaattcctcacacagatggacactttcacccgtctcctcttatgggcggctttggactcaagaacccgcctcctcagatcctcatcaaaaacacgcctgttcctgcgaatcctccggcggagttttcagctacaaagtttgcttcattcatcacccaatactccacaggacaagtgagtgtggaaattgaatgggagctgcagaaagaaaacagcaagcgctggaatcccgaagtgcagtacacatccaattatgcaaaatctgccaacgttgattttactgtggacaacaatggactttatactgagcctcgccccattggcacccgttaccttacccgtcccctg

SEQ ID NO: 673 - DNA, 2208 bp, Artificial Sequence
  source: /note="Description of Artificial Sequence: Synthetic polynucleotide"
atggctgccgatggttatcttccagattggctcgaggacaacctctctgagggcattcgcgagtggtgggacttgaaacctggagccccgaagcccaaagccaaccagcaaaagcaggacgacggccggggtctggtgcttcctggctacaagtacctcggacccttcaacggactcgacaagggggagcccgtcaacgcggcggacgcagcggccctcgagcacgacaaggcctacgaccagcagctcaaagcgggtgacaatccgtacctgcggtataaccacgccgacgccgagtttcaggagcgtctgcaagaagatacgtcttttgggggcaacctcgggcgagcagtcttccaggccaagaagcgggttctcgaacctctcggtctggttgaggaaggcgctaagacggctcctggaaagaaacgtccggtagagcagtcgccacaagagccagactcctcctcgggcatcggcaagacaggccagcagcccgctaaaaagagactcaattttggtcagactggcgactcagagtcagtccccgatccacaacctctcggagaacctccagcaacccccgctgctgtgggacctactacaatggcttcaggcggtggcgcaccaatggcagacaataacgaaggcgccgacggagtgggtaatgcctcaggaaattggcattgcgattccacatggctgggcgacagagtcatcaccaccagcacccgcacctgggccttgcccacctacaataaccacctctacaagcaaatctccagtgcttcaacgggggccagcaacgacaaccactacttcggctacagcaccccctgggggtattttgatttcaacagattccactgccacttttcaccacgtgactggcagcgactcatcaacaacaattggggattccggcccaagagactcaacttcaaactcttcaacatccaagtcaaggaggtcacgacgaatgatggcgtcacaaccatcgctaataaccttaccagcacggttcaagtcttctcggactcggagtaccagcttccgtacgtcctcggctctgcgcaccagggctgcctccctccgttcccggcggacgtgttcatgattccgcaatacggctacctgacgctcaacaatggcagccaagccgtgggacgttcatccttttactgcctggaatatttcccttctcagatgctgagaacgggcaacaactttaccttcagctacacctttgaggaagtgcctttccacagcagctacgcgcacagccagagcctggaccggctgatgaatcctctcatcgaccaatacctgtattacctgaacagaactcaaaatcagtccggaagtgcccaaaacaaggacttgctgtttagccgtgggtctccagctggcatgtctgttcagcccaaaaactggctacctggaccctgttatcggcagcagcgcgtttctaaaacaaaaacagacaacaacaacagcaattttacctggactggtgcttcaaaatataacctcaatgggcgtgaatccatcatcaaccctggcactgctatggcctcacacaaagacgacgaagacaagttctttcccatgagcggtgtcatgatttttggaaaagagagcgccggagcttcaaacactgcattggacaatgtcatgattacagacgaaggggaaattaaagccactaaccctgtggccaccgaaagatttgggaccgtggcagtcaatttccagagcagcagcacagaccctgcgaccggagatgtgcatgctatgggagcattacctggcatggtgtggcaagatagagacgtgtacctgcagggtcccatttgggccaaaattcctcacacagatggacactttcacccgtctcctcttatgggcggctttggactcaagaacccgcctcctcagatcctcatcaaaaacacgcctgttcctgcgaatcctccggcggagttttcagctacaaagtttgcttcattcatcacccaatactccacaggacaagtgagtgtggaaattgaatgggagctgcagaaagaaaacagcaagcgctggaatcccgaagtgcagtacacatccaattatgcaaaatctgccaacgttgattttactgtggacaacaatggactttatactgagcctcgccccattggcacccgttaccttacccgtcccctg

SEQ ID NO: 674 - DNA, 2208 bp, Artificial Sequence
  source: /note="Description of Artificial Sequence: Synthetic polynucleotide"
atggctgccgatggttatcttccagattggctcgaggacaacctctctgagggcattcgcgagtggtgggacttgaaacctggagccccgaaacctaaagccaaccagcaaaagcaggacgacggccggggtctggtgcttcctggctacaagtacctcggacccttcaacggactcgacaagggggagcccgtcaacgcggcggacgcagcggccctcgagcacgacaaggcctacgaccagcagctcaaagcgggtgacaatccgtacctgcggtataaccacgccgacgccgagtttcaggagcgtctgcaagaagatacgtcttttgggggcaacctcgggcgagcagtcttccaggccaagaagcgggttctcgaaccttttggtctggttgaggaaggcgctaagacggctcctggaaagaaacgtccggtagagcagtcgccacaagagccagactcctcctcgggcatcggcaagacaggccagcagcccgctaaaaagagactcaattttggtcagactggcgactcagagtcagtccccgacccacaacctctcggagaacctccagcaacccccgctgctgtgggacctactacaatggcttcaggcggtggcgcaccaatggcagacaataacgaaggcgccgacggagtgggtaatgcctcaggaaattggcattgcgattccacatggctgggcgacagagtcatcaccaccagcacccgcacctgggccttgcccacctacaataaccacctctacaagcaaatctccagtgcttcaacgggggccagcaacgacaaccactacttcggctacagcaccccctgggggtattttgatttcaacagattccactgccacttttcaccacgtgactggcagcgactcatcaacaacaattggggattccggcccaagagactcaacttcaagctcttcaacatccaagtcaaggaggtcacgacgaacgatggcgtcacgaccatcgctaataaccttaccagcacggttcaagtcttctcggattcagagtaccaactgccgtacgtcctcggctctgcgcaccagggctgcctccctccgttcccggcggacgtgtttatgattccgcagtacggctacctaacgctcaacaatggcagccaggccgtgggacgttcatccttttactgcccggaatatttcccttctcagatgctgagaacgggcaacaactttaccttcagctacacctttgaggaagtgcctttccacagcagctacgcgcacagccagagcctggaccggctgatgaatcctctcatcgaccaatacctgtattacctgaacagaactcaaaatcagtccggaagtgcccaaaacaaggacttgctgtttagccgtgggtctccagctggcatgtctgttcagcccaaaaactggctacctggaccctgttatcggcagcagcgcgtttctaaaacaaaaacagacaacaacaacagcaattttacctggactggtgcttcaaaatataacctcaatgggcgtgaatccatcatcaaccctggcactgctatggcctcacacaaagacgacaaagacaagttctttcccatgagcggtgtcatgatttttggaaaagagagcgccggagcttcaaatactgcattggacaatgtcatgatcacagatgaagaggaaattaaagccactaaccctgtggccaccgaaagatttgggaccgtggcagtcaatttccagagcagcaacacagaccccgcgaccggagatgtgcatgttatgggagccttacctggcatggtgtggcaagacagagacgtatacctgcagggtcccatttgggccaaaattcctcacacggatggacactttcacccgtctcctctcatgggcggctttggacttaagcacccgcctcctcaaatcctcatcaaaaacacgcctgttcctgcgaatcctccggcagagttttcggctacaaagtttgcttcattcatcacccagtactccacaggacaagtgagtgtggaaattgaatgggagctgcagaaagaaaacagcaagcgctggaatcccgaagtgcagtacacatccaattatgcaaaatctgccaacgttgatttcactgtggacaacaatggactttatactgagcctcgccccattggcacccgttaccttacccgtcccttg

SEQ ID NO: 675 - DNA, 2208 bp, Artificial Sequence
  source: /note="Description of Artificial Sequence: Synthetic polynucleotide"
atggctgccgatggttatcttccagattggctcgaggacaacctctctgagggcattcgcgagtggtgggacttgaaacctggagccccgaaacctaaagccaaccagcaaaagcaggacgacggccggggtctggtgcttcctggctacaagtacctcggacccttcaacggactcgacaagggggagcccgtcaacgcggcggacgcagcggccctcgagcacgacaaggcctacgaccagcagctcaaagcgggtgacaatccgtacctgcggtataaccacgccgacgccgagtttcaggagcgtctacaagaagatacgtcttttgggggcaacctcgggcgagcagtcttccaggccaagaagcgggttctcgaaccttttggtctggttgaggaaggcgctaagacggctcctggaaagaaacgtccggtagagcagtcgccacaagagccagactcctcctcgggcatcggcaagacaggccagcagcccgctaaaaagagactcaattttggtcagactggcgactcagagtcagtccccgacccacaacctctcggagaacctccagcaacccccgctgctgtgggacctactacaatggcttcaggcggtggcgcaccaatggcagacaataacgaaggcgccgacggagtgggtaatgcctcaggaaattggcattgcgattccacatggctgggcgacagagtcatcaccaccagcacccgcacctgggccttgcccacctacaataaccacctctacaagcaaatctccagtgcttcaacgggggccagcaacgacaaccactacttcggctacagcaccccctgggggtattttgatttcaacagattccactgccacttttcaccacgtgactggcagcgactcatcaacaacaattggggattccggcccaagagactcaacttcaagctcttcaacatccaagtcaaggaggtcacgacgaacgatggcgtcacgaccatcgctaataaccttaccagcacggttcaagtcttctcggattcagagtaccaactgccgtacgtcctcggctctgcgcaccagggctgcctccctccgttcccggcggacgtgttcatgattccgcagtacggctacctaacgctcaacaatggcagccaggccgtgggacgttcatccttttactgcctggaatatttcccttctcagatgctgagaacgggcaacaactttaccttcagctacacctttgaggaagtgcctttccacagcagctacgcgcacagccagagcctggaccggctgatgaatcctctcatcgaccaatacctgtattacctgaacagaactcaaaatcagtccggaagtgcccaaaacaaggacttgctgtttagccgtgggtctccagctggcatgtctgttcagcccaaaaactggctacctggaccctgttatcggcagcagcgcgtttctaaaacaaaaacagacaacaacaacagcaattttacctggactggtgcttcaaaatataacctcaatgggcgtgaatccatcatcaaccctggcactgctatggcctcacacaaagacgacaaagacaagttctttcccatgagcggtgtcatgatttttggaaaagagagcgccggagcttcaaatactgcattggacaatgtcatgatcacagatgaagaggaaattaaagccactaaccctgtggccaccgaaagatttgggaccgtggcagtcaatttccagagcagcgacacagaccccgcgaccggagatgtgcatgttatgggagccttacctggcatggtgtggcaagacagagacgtatacctgcagggtcccatttgggccaaaattcctcacacggatggacactttcacccgtctcctctcatgggcggctttggacttaagcacccgcctcctcaaatcctcatcaaaaacacgcctgttcctgcgaatcctccggcagagttttcggctacaaagtttgcttcattcatcacccagtactccacaggacaagtgagtgtggaaattgaatgggagctgcagaaagaaaacagcaagcgctggaatcccgaagtgcagtacacatccaattatgcaaaatctgccaacgttgatttcactgtggacaacaatggactttatactgagcctcgccccattggcacccgttaccttacccgtcccttg

SEQ ID NO: 676 - DNA, 2208 bp, Artificial Sequence
  source: /note="Description of Artificial Sequence: Synthetic polynucleotide"
atggctgccgatggttatcttccagattggctcgaggacaacctctctgagggcattcgcgagtggtgggacttgaaacctggagccccgaaacctaaagccaaccagcaaaagcagggcgacggccggggtctggtgcttcctggctacaagtacctcggacccttcaacggactcgacaagggggagcccgtcaacgcggcggacgcagcggccctcgagcacgacaaggcctacgaccagcagctcaaagcgggtgacaatccgtacctgcggtataaccacgccgacgccgagtttcaggagcgtctgcaagaagatacgtcttttgggggcaacctcgggcgagcagtcttccaggccaagaagcgggttctcgaaccttttggtctggttgaggaaggcgctaagacggctcctggaaagaaacgtccggtagagcagtcgccacaagagccagactcctcctcgggcatcggcaagacaggccagcagcccgctaaaaagagactcaattttggtcagactggcgactcagagtcagtccccgacccacaacctctcggagaacctccagcaacccccgctgctgtgggacctactacaatggcttcaggcggtggcgcaccaatggcagacaataacgaaggcgccgacggagtgggtaatgcctcaggaaattggcattgcgattccacatggctgggcgacagagtcatcaccaccaacactcgcacctgggccttgcccacctacaataaccacctctacaagcaaatctccagtgcttcaacgggggccagcaacgacaaccactacttcggctacagcaccccctgggggtattttgatttcaacagattccactgccacttttcaccacgtgactggcagcgactcatcaacaacaattggggattccggcccaagagactcaacttcaagctcttcaacatccaagtcaaggaggtcacgacgaacgatggcgtcacgaccatcgctaataaccttaccagcacggttcaagtcttctcggattcagagtaccaactgccgtacgtcctcggctctgcgcaccagggctgcctccctccgttcccggcggacgtgttcatgattccgcagtacggctacctaacgctcaacaatggcagccaggccgtgggacgttcatccttttactgcctggaatatttcccttctcagatgctgagaacgggcaacaactttaccttcagctacacctttgaggaagtgcctttccacagcagttacgggcacagccagagcctggaccggctgatgaatcttctcatcgaccaatacctgtattacctgaacagaactcaaaatcagtccggaagtgcccaaaacaaggacttgctgtttagccgtgggtctccagctggcatgtttgttcagcccaaaaactggctacctggaccctgttatcggcagcagcgcgtttctaaaacaaaaacagacaacaacaacagcaattttacctggactggtgcttcaaaatataacctcaatgggcgtgaatccatcatcaaccctggcactgctatggcctcacacaaagacgacgaagacaagttctttcccatgagcggtgtcatgatttttggaaaagagagcgccggagcttcaaatactgcattggacaatgtcatgatcacagatgaagaggaaattaaagccactaaccctgtggccaccgaaagatttgggaccgtggcagtcaatttccagagcagcagcacagaccccgcgaccggagatgtgcatgttatgggagccttacctggcatggtgtggcaagacagagacgtatacctgcagggtcccatttgggccaaaattcctcacacggatggacactttcacccgtctcctctcatgggcggctttggacttaagcacccgcctcctcaaatcctcatcaaaaacacgcctgttcctgcgaatcctccggcagagttttcggctacaaagtttgcttcattcatcacccagtactccacaggacaagtgagtgtggaaattgaatgggagctgcagaaagaaaacagcaagcgctggaatcccgaagtgcagtacacatccaattatgcaaaatctgccaacgttgatttcactgtggacaacaatggactttatactgagcctcgccccattggcacccgttaccttacccgtcccttg

SEQ ID NO: 677 - DNA, 2208 bp, Artificial Sequence
  source: /note="Description of Artificial Sequence: Synthetic polynucleotide"
atggctgccgatggttatcttccagattggctcgaggacaacctctctgagggcattcgcgagtggtgggacttgaaacctggagccccgaaacctaaagccaaccagcaaaagcaggacgacggccggggtctggtgcttcctggctacaagtacctcggacccttcaacggactcgacaagggggagcccgtcaacgcggcggacgcagcggccctcgagcacgacaaggcctacgaccagcagctcaaagcgggtgacaatccgtacctgcggtataaccacgccgacgccgagtttcaggagcgtctgcaagaagatacgtcttttgggggcaacctcgggcgagcagtcttccaggccaagaagcgggttctcgaaccttttggtctggttgaggaaggcgctaagacggctcctggaaagaaacgtccggtagagcagtcgccacaagagccagactcctcctcgggcatcggcaagacaggccagcagcccgctaaaaagagactcaattttggtcagactggcgactcagagtcagtccccgacccacaacctctcggagaacctccagcaacccccgctgctgtgggacctactacaatggcttcaggcggtggcgcaccaatggcagacaataacgaaggcgccgacggagtgggtaatgcctcaggaaattggcattgcgattccacatggctgggcgacagagtcatcaccaccaacacccgcacctgggccttgcccacctacaataaccacctctacaagcaaatctccagtgcttcaacgggggccagcaacgacaaccactacttcggctacagcaccccctgggggtattttgatttcaacagattccactgccacttttcaccacgtgactggcagcgactcatcaacaacaattggggattccggcccaagagactcaacttcaagctcttcaacatccaagtcaaggaggtcacgacgaacgatggcgtcacgaccatcgctaataaccttaccagcacggttcaagtcttctcggattcagagtaccaactgccgtacgtcctcggctctgcgcaccagggctgcctccctccgttcccggcggacgtgttcatgattccgcagtacggctacctaatgctcaacaatggcagccaggccgtgggacgttcatccttttactgcctggaatatttcccttctcagatgctgagaacgggcaacaactttaccttcagctacacctttgaggaagtgcctttccacagcagctacgcgcacagccagagcctggaccggctgatgaatcctctcatcgaccaatacctgtattacctgaacagaactcaaaatcagtccggaagtgcccaaaacaaggacttgctgtttagccgtgggtctccagctggcatgtctgttcagcccaaaaactggctacctggaccctgttatcggcagcagcgcgtttctaaaacaaaaacagacaacaacaacagcaattttacctggactggtgcttcaaaatataacctcaatgggcgtgaatccatcatcaaccctggcactgctatggcctcacacaaagacgacgaagacaagttctttcccatgagcggtgtcatgatttttggaaaagagagcgccggagcttcaaatactgcattggacaatgtcatgatcacagatgaagaggaaattaaagccactaaccctgcggccaccgaaagatttgggaccgtggcagtcaatttccagagcagcagcacagaccccgcgaccggagatgtgcatgttatgggagccttacctggcatggtgtggcaagacagagacgtatacctgcagggtcccatttgggccaaaattcctcacacggatggacactttcacccgtctcctctcatgggcggctttggacttaagcacccgcctcctcaaatcctcatcaaaaacacgcctgttcctgcgaatcctccggcagagttttcggctacaaagtttgcttcattcatcacccagtactccacaggacaagtgagtgtggaaattgaatgggagctgcagaaagaaaacagcaagcgctggaatcccgaagtgcagtacacatccaattatgcaaaatctgccaacgttgatttcactgtggacaacaatggactttatactgagcctcgccccattggcacccgttaccttacccgtcccttg

SEQ ID NO: 678 - DNA, 2208 bp, Artificial Sequence
  source: /note="Description of Artificial Sequence: Synthetic polynucleotide"
atggctgccgatggttatcttccagattggctcgaggacaacctctctgagggcattcgcgagtggtgggacttgaaacctggagccccgaaacctaaagccaaccagcaaaagcaggacgacggccggggtctggtgcttcctggctacaagtacctcggacccttcaacggactcgacaagggggagcccgtcaacgcggcggacgcagcggccctcgagcacgacaaggcctacgaccagcagctcaaagcgggtgacaatccgtacctgcggtataaccacgccgacgccgagtttcaggagcgtctgcaagaagatacgtcttttgggggcaacctcgggcgagcagtcttccaggccaagaagcgggttctcgaaccttttggtctggttgaggaaggcgctaagacggctcctggaaagaaacgtccggtagagcagtcgccacaagagccagactcctcctcgggcatcggcaagacgggccagcagcccgctaaaaagagactcaattttggtcagactggcgactcagagtcagtccccgacccacaacctctcggagaacctccagcaacccccgctgctgtgggacctactacaatggcttcaggcggtggcgcaccaatggcagacaataacgaaggcgccgacggagtgggtaatgcctcaggaaattggcattgcgattccacatggctgggcgacagagtcatcaccaccagcacccgcacctgggccttgcccacctacaataaccacctctacaagcaaatctccagtgcttcaacgggggccagcaacgacaaccactacttcggctacagcaccccctgggggtattttgatttcaacagattccactgccacttttcaccacgtgactggcagcgactcatcaacaacaattggggattccggcccaagagactcaacttcaagctcttcaacatccaagtcaaggaggtcacgacgaacgatggcgtcacgaccatcgctaataaccttaccagcacggttcaagtcttctcggattcagagtaccaactgccgtacgtcctcggctctgcgcaccagggctgcctccctccgttcccggcggacgtgttcatgattccgcagtacggctacctaacgctcaacaatggcagccaggccgtgggacgttcatccttttactgcctggaatatttcccttctcagatgctgagaacgggcaacaactttaccttcagctacacctttgaggaagtgcctttccacagcagctacgcgcacagccagagcctggaccggctgatgaatcctctcatcgaccaatacctgtattacctgaacagaactcaaaatcagtccggaagtgcccaaaacaaggacttgctgtttagccgtgggtctccagctggcatgtccgttcagcccaaaaactggctacctggaccctgttatcggcagcagcgcgtttctaaaacaaaaacagacaacaacaacagcaattttacctggactggtgcttcaaaatataacctcaatgggcgtgaatccatcatcaaccctggcactgctatggcctcacacaaagacgacgaagacaagttctttcccatgagcggtgtcatgatttttggaaaagagagcgccggagcttcaaatactgcattggacaatgtcatgatcacagatgaagaggaaattaaagccactaaccctgtggccaccgaaagatttgggaccgtggcagtcaatttccagagcagcagcacagaccccgcgaccggagatgtgcatgttatgggagccttacctggcatggtgtggcaagacagagacgtatacctgcagggtcccatttgggccaaaattcctcacacggatggacactttcacccgtctcctctcatgggcggctttggacttaagcacccgcctcctcaaatcctcatcaaaaacacgcctgttcctgcgaatcctccggcagagttttcggctacaaagtttgcttcattcatcacccagtactccacaggacaagtgagtgtggaaattgaatgggagctgcagaaagaaaacagcaagcgctggaatcccgaagtgcagtacacatccaattatgcaaaatctgccaacgttgatttcactgtggacaacaatggactttatactgagcctcgccccattggcacccgttaccttacccgtcccttg

SEQ ID NO: 679 - DNA, 2208 bp, Artificial Sequence
  source: /note="Description of Artificial Sequence: Synthetic polynucleotide"
  modified_base (305)..(305): a, c, t, g, unknown or other
atggctgccgatggttatcttccagattggctcgaggacaacctctctgagggcattcgcgagtggtgggacttgaaacctggagccccgaaacctaaagccaaccagcaaaagcaggacgacggccggggtctggtgcttcctggctacaagtacctcggacccttcaacggactcgacaagggggagcccgtcaacgcggcggacgcagcggccctcgagcacgacaaggcctacgaccagcagctcaaagcgggtgacaatccgtacctgcggtataaccacgccgacgccgagtttcaggngcgtctgcaagaagatacgtcttttgggggcaacctcgggcgagcagtcttccaggccaagaagcgggttctcgaaccttttggtctggttgaggaaggcgctaagacggctcctggaaagaaacgtccggtagagcagtcgccacaagagccagactcctcctcgggcatcggcaagacaggccagcagcccgctaaaaagagactcaattttggtcagactggcgactcagagtcagtccccgacccacaacctctcggagaacctccagcaacccccgctgctgtgggacctactacaatggcttcaggcggtggcgcaccaatggcagacaataacgaaggcgccgacggagtgggtaatgcctcaggaaattggcattgcgattccacatggctgggcggcagagtcatcaccaccagcacccgcacctgggccttgcccacctacaataaccacctctacaagcaaatctccagtgcttcaacgggggccagcaacgacaaccactacttcggccacagcaccccctgggggtattttgatttcaacagattccactgccacttttcaccacgtgactggcagcgactcatcaacaacaattggggattccggcccaagagactcaacttcaagctcttcaacatccaagtcaaggaggtcacgacgaacgatggcgtcacgaccatcgctaataaccttaccagcacggttcaagtcttctcggattcagagtaccaactgccgtacgtcctcggctctgcgcaccagggctgcctccctccgtccccggcggacgtgttcatgattccgcagtacggctacctaacactcaacaatggcagccaggccgtgggacgttcatccttttactgcctggaatatttcccttctcagatgctgagaacgggcaacaactttaccttcagctacacctttgaggaagtgcctttccacagcagctacgcgcacagccagagcctggaccggctgatgaatcctctcatcgaccaatacctgtattacctgaacagaactcaaaatcagtccggaagtgcccaaaacaaggacttgctgtttagccgtgggtctccagctggcatgtctgttcagcccaaaaactggctacctggaccctgttatcggcagcagcgcgtttctaaaacaaaaacagacaacaacaacagcaattttacctggactggtgcttcaaaatataacctcaatgggcgtgaatccatcatcaaccctggcactgctatggcctcacacaaagacgacaaagacaagttctttcccatgagcggtgtcatgatttttggaaaagagagcgccggagcttcaaatactgcattggacaatgtcatgatcacagatgaagaggaaattaaagccactaaccctgtggccaccgaaagatttgggaccgtggcagtcaatttccagagcagcaacacagaccccgcgaccggagatgtgcatgttatgggagccttacctggcatggtgtggcaagacagagacgtatacctgcagggtcccatttgggccaaaattcctcacacggatggacactttcacccgtctcctctcatgggcggctttggacttaagcacccgcctcctcaaatcctcatcaaaaacacgcctgttcctgcgaatcctccggcagagttttcggctacaaagtttgcttcattcatcacccagtactccacaggacaagtgagtgtggaaattgaatgggagctgcagaaagaaaacagcaagcgctggaatcccgaagtgcagtacacatccaattatgcaaaatctgccaacgttgatttcactgtggacaacaatggactttatactgagcctcgccccattggcacccgttaccttacccgtcccttg

SEQ ID NO: 680 - DNA, 2208 bp, Artificial Sequence
  source: /note="Description of Artificial Sequence: Synthetic polynucleotide"
atggctgccgatggttattttccagattggctcgaggacaacctttctgagggcattcgcgagtggtgggacttgaaacctggagccccgaaacctaaagccaaccagcaaaagcaggacgacggccggggtctggtgcttcctggctacaagtacctcggacccttcaacggactcgacaagggggagcccgtcaacgcggcggacgcagcggccctcgagcacgacaaggcctacgaccagcagctcaaagcgggtgacaatccgtacctgcggtataaccacgccgacgccgagtttcaggagcgtctgcaagaagatacgtcttttgggggcaacctcgggcgagcagtcttccaggccaagaagcgggttctcgaaccttttggtctggttgaggaaggcgctaagacggctcctggaaagaaacgtccggtagagcagtcgccacaagagccagactcctcctcgggcatcggcaggacaggccagcagcccgctaaaaagagactcaattttggtcagactggcgactcagagtcagtccccgacccacaacctctcggagaacctccagcgacccccgctgctgtgggacctactacaatggcttcaggcggtggcgcaccaatggcagacaataacgaaggtgccgacggagtgggtaatgcctcaggaaattggcattgcgattccacatggctgggcgacagagtcatcaccaccagcacccgcacctgggccttgcccacctacaataaccacctctacaagcaaatctccagtgcttcaacgggggccagcaacgacaaccactacttcggctacagcaccccctgggggtattttgatttcaacagattccactgccacttttcaccacgtgactggcagcgactcatcaacaacaattggggattccggcccaagagactcaacttcaagctcttcaacatccaagtcaaggaggtcacgacgaacgatggcgtcacgaccatcgctaataaccttaccagcacggttcaagtcttctcggattcagagtaccaactgccgtacgtcctcggctctgcgcaccagggctgcctccctccgttcccggcggacgtgttcatgattccgcagtacggctacctaacgctcaacaatggcagccaggccgtgggacgttcatccttttactgcctggaatatttcccttctcagatgctgagaacgggcaacaactttaccttcagctacacctttgaggaagtgcctttccacagcagctacgcgcacagccagagcctggaccggctgatgaatcctctcatcgaccaatacctgtattacctgaacagaactcaaaatcagtccggaagtgcccaaaacaaggacttgctgtttagccgtgggtctccagctggcatgtctgttcagcccaaaaactggctacctggaccctgttatcggcagcagcgcgtttctaaaacaaaaacagacaacaacaacagcaattttacctggactggtgcttcaaaatataacctcaatgggcgtgaatccatcatcaaccctggcactgctatggcctcacacaaagacgacgaagacaagttctttcccatgagcggtgtcatgatttttggaaaagagagcgccggagcttcaaatactgcattggacaatgtcatgatcacagatgaagaggaaattaaagccactaaccctgtggccaccgaaagatttgggaccgtggcagtcaatttccagagcagcagcccagaccccgcgaccggagatgtgcatgttatgggagccttacctggcatggtgtggcaagacagagacgtatacctgcagggtcccatttgggccaaaattcctcacacggatggacactttcacccgtctcctctcatgggcggctttggacttaagcacccgcctcctcaaatcctcatcaaaaacacgcctgttcctgcgaatcctccggcagagttttcggctacaaagtttgcttcattcatcacccagtactccacaggacaagtgagtgtggaaattgaatgggagctgcagaaagaaaacagcaagcgctggaatcccgaagtgcagtacacatccaattatgcaaaatctgccaacgttgatttcactgtggacaacaatggactttatagtgagcctcgccccattggcacccgttaccttacccgtcccttg

SEQ ID NO: 681 - DNA, 2208 bp, Artificial Sequence
  source: /note="Description of Artificial Sequence: Synthetic polynucleotide"
atggctgccgatggttatcttccagattggctcgaggacaacctctctgagggcattcgcgagtggtgggacttgaaacctggagccccgaaacctaaagccaaccagcaaaagcaggacgacggccggggtctggtgcttcctggctacaagtacctcggacccttcaacggactcgacaagggggagcccgtcaacgcggcggacgcagcggccctcgagcacgacaaggcctacgaccagcagctcaaagcgggtgacaatccgtacctgcggtataaccacgccgacgccgagtttcaggagcgtctgcaagaagatacgtcttttgggggcaacctcgggcgagcagtcttccaggccaagaagcgggttctcgaaccttttggtctggttgaggaaggcgctaagacggctcctggaaagaaacgtccggtagagcagtcgccacaagagccagactcctcctcgggcatcggcaagacaggccagcagcccgctaaaaagagactcaattttggtcagactggcgactcagagtcagtccccgacccacaacctctcggagaacctccagcaacccccgctgctgtgggacctactacaatggcttcaggcggtggcgcaccaatggcagacaataacgaaggcgccgacggagtgggtaatgcctcaggaaattggcattgcgattccacatggctgggcgacagagtcatcaccaccagcacccgcacctgggccttgcccacctacaataaccacctctacaagcaaacctccagtgcttcaacgggggccagcaacgacaaccactacttcggctacagcaccccctgggggtattttgatttcaacagattccactgccacttttcaccacgtgactggcagcgactcatcaacaacaattggggattccggcccaagagactcaacttcaagctcttcaacatccaagtcaaggaggtcacgacgaacgatggcgtcacgaccatcgctaataaccttaccagcacggttcaagtcttctcggattcagagtaccaactgccgtacgtcctcggctctgcgcaccagggctgcctccctccgttcccggcggacgtgttcatgattccgcagtacggctacctaacgctcaacaatggcagccaggccgtgggacgttcatccttttactgcctggaatatttcccttctcagatgctgagaacgggcaacaactttaccttcagctacacctttgaggaagtgcctttccacagcagctacgcgcacagccagagcctggaccggctgatgaatcctctcatcgaccaatacctgtattacctgaacagaactcaaaatcagtccggaagtgcccaaaacaaggacttgctgtttagccgtgggtctccagctggcatgtctgttcagcccaaaaactggctacctggaccctgttatcggcagcagcgcgtttctaaaacaaaaacagactacaacaacagcaattttacctggactggtgcttcaaaatataacctcaatgggcgtgaatccatcatcaaccctggcactgctatggcctcacacaaagacgacgaagacaagttctttcccatgagcggtgtcatgatttttggaaaagagagcgccggagcttcaaatactgcattggacaatgtcatgatcacagatgaagaggaaattaaagccactaaccctgtggccaccgaaagatttgggaccgtggcagtcaatttccagagcagcagcacagaccccgcgaccggagatgtgcatgttatgggagccttacctggcatggtgtggcaagacagagacgtatacctgcagggtcccatttgggccaaaattcctcacacggatggacactttcacccgtctcctctcatgggcggctttggacttaagcacccgcctcctcaaatcctcatcaaaaacacgcctgttcctgcgaatcctccggcagagttttcggctacaaagtttgcttcattcatcacccagtactccacaggacaagtgagtgtggaaattgaatgggagctgcagaaagaaaacagcaagcgctggaatcccgaagtgcagtacacatccaattatgcaaaatctgccaacgttgatttcactgtggacaacaatggactttatactgagcctcgccccattggcacccgttaccttacccgtcccttg

SEQ ID NO: 682 - DNA, 2208 bp, Artificial Sequence
  source: /note="Description of Artificial Sequence: Synthetic polynucleotide"
atggctgccgatggttatcctccagattggctcgaggacaacctctctgagggcattcgcgagtggtgggacttgaaacctggagtcccgaaacctaaagccaaccagcaaaagcaggacgacggccggggtctggtgcttcctggctacaagtacctcggacccttcaacggactcgacaagggggagcccgtcaacgcggcggacgcagcggccctcgagcacgacaaggcctacgaccagcagctcaaagcgggtgacaatccgtacctgcggtataaccacgccgacgccgagtttcaggagcgtctgcaagaagatacgtcttttgggggcaacctcgggcgagcagtcttccaggccaagaagcgggttctcgaaccttttggtctggttgaggaaggcgctaagacggctcctggaaagaaacgtccggtagagcagtcgccacaagagccagactcctcctcgggcatcggcaagacaggccagcagcccgctaaaaagagactcaattttggtcagactggcgactcagagtcagtccccgacccacaacctctcggagaacctccagcaacccccgctgctgtgggacctactacaatggcttcaggcggtggcgcaccaatggcagacaataacgaaggcgccgacggagtgggtaatgcctcaggaaattggcattgcgattccacatggctgggcgacagagtcatcaccaccagcacccgcacctgggccttgcccacctacaataaccacctctacaagcaaatctccagtgcttcaacgggggccagcaacgacaaccactacttcggctacagcaccccctgggggtattttgatttcaacagattccactgccacttttcaccacgtgactggcagcgactcatcaacaacaattggggattccggcccaagagactcaacttcaagctcttcaacatccaagtcaaggaggtcacgacgaacgatggcgtcacgaccatcgctaataaccttaccagcacggttcaagtcttctcggattcagagtaccaactgccgtacgtcctcggctctgcgcaccagggctgcctccctccgttcccggcggacgtgttcatgattccgcagtacggctacctaacgctcaacaatggcagccaggccgtgggacgttcatccttttactgcctggaatatttcccttctcagatgctgagaacgggcaacaactttaccttcagctacacctttgaggaagtgcctttccacagcagctacgcgcacagccagagcctggaccggctgatgaatcctctcatcgaccaatacctgtattacctgaacagaactcaaaatcagtccggaagtgcccaaaacaaggacttgctgtttagccgtgggtctccagctggcatgtctgttcagcccaaaaactggctacctggaccctgttatcggcagcagcgcgtttctaaaacaaaaacagacaacaacaacagcaattttacctggactggtgcttcaaaatataacctcaatgggcgtgaatccatcatcaaccctggcactgctatggcctcacacaaagacgacgaagacaagttctttcccatgagcggtgtcatgatttttggaaaagagagcgccggagcttcaaatactgcattggacaatgtcatgatcacagatgaagaggaaattaaagccactaaccctgtggccaccgaaagatttgggaccgtggcagtcaatttccagagcagcagcacagaccccgcgaccggagatgtgcatgttatgggagccttacctggcatggtgtggcaagacagagacgtatacctgcagggtcccatttgggccaaaattcctcacacggatggacactttcacccgtctcctctcatgggcggctttggacttaagcacccgcctcctcaaatcctcatcaaaaacacgcctgttcctgcgaatcctccggcagagttttcggctacaaagtttgcttcattcatcacccagtactccacaggacaagtgagtgtggaaattgaatgggagctgcagaaagaaaacagcaagcgctggaatcccgaagtgcagtacacatccaattatgcaaaatctgccaacgttgatttcactgtggacaacaatggactttatactgagcctcgccccattggcacccgttaccttacccgtcccttg

SEQ ID NO: 683 - DNA, 2196 bp, Artificial Sequence
  source: /note="Description of Artificial Sequence: Synthetic polynucleotide"
atggctgccgatggttatcttccagattggctcgaggacaacctctctgagggcattcgcgagtggtgggacttgaaacctggagccccgaaacctaaagccaaccagcaaaagcaggacgacggccggggtctggtgcttcctggctacaagtacctcggacccttcaacggactcgacaagggggagcccgtcaacgcggcggacgcagcggccctcgagcacgacaaggcctacgaccagcagctcaaagcgggtgacaatccgtacctgcggtataaccacgccgacgccgagtttcaggagcgtctgcaagaagatacgtcttttgggggcaacctcgggcgagcagtcttccaggccaagaagcgggttctcgaaccttttggtctggttgaggaaggcgctaagacggctcctggaaagaaacgtccggtagagcagtcgccacaagagccagactcctcctcgggcatcggcaagacaggccagcagcccgctaaaaagagactcaattttggtcagactggcgactcagagtcagtccccgacccacaacctctcggagaacctccagcaacccccgctgctgtgggacctactacaatggcttcaggcggtggcgcaccaatggcagacaataacgaaggcgccgacggagtgggtaatgcctcaggaaattggcattgcgattccacatggctgggcgacagagtcatcaccaccagcacccgcacctgggccttgcccacctacaataaccacctctacaagcaaatctccagtgcttcaacgggggccagcaacgacaaccactacttcggctacagcaccccctgggggtattttgatttcaacagattccactgccacttttcaccacgtgactggcagcgactcatcaacaacaattggggattccggcccaagagactcaacttcaagctcttcaacatccaagtcaaggaggtcacgacgaacgatggcgtcacgaccatcgctaataaccttaccagcacggttcaagccttctcggattcagagtaccaactgccgtacgtcctcggctctgcgcaccagggctgcctccctccgttcccggcggacgtgttcatgattccgcagtacggctacctaacgctcaacaatggcagccaggccgtgggacgttcatccttttactgcctggaatatttcccttctcagatgctgagaacgggcaacaactttaccttcagctacacctttgaggaagtgcctttccacagcagctacgcgcacagccagagcctggaccggctgatgaatcctctcatcgacccatacctgtattacctgaacagaactcaaaatcagtccggaagtgcccaaaacaaggacttgctgtttagccgtgggtctccagctggcatgtctgttcagcccaaaaactggctacctggaccctgttatcggcagcagcgcgtttctaaaacaaaaacagacaacaacaacagcaattttacctggactggtgcttcaaaatataacctcaatgggcgtgaatccatcatcaaccctggcactgctatggcctcacacaaagacgacgaagacaagttctttcccatgagcggtgtcatgatttttggaaaagagagcgccggagcttcaaatactgcattggacaatgtcatgatcacagatgaagaggaaattaaagccactaaccctgtggccaccgaaagatttgggaccgtggcagtcaatttccagagcagcagcacagaccccgcgaccggagatgtgcatgttatgggagccttacctggcatggtgtggcaagacagagacgtatacctgcagggtcccatttgggccaaaattcctcacacggatggacactttcacccgtctcctctcatgggcggctttggacttaagcacccgcctcctcaaatcctcatcaaaaacacgcctgttcctgcgaatcctccggcagagttttcggctacaaagtttgcttcattcatcacccagtactccacaggacaagtgagtgtggaaattgaatgggagctgcagaaagaaaacagcaagcgctggaatcccgaagtgcagtacacatccaattatgcaaaatctgccaacgttgatttcactgtggacaacaatggactttatactgagcctcgccccattggcacccgttacctt

SEQ ID NO: 684 - DNA, 2208 bp, Artificial Sequence
  source: /note="Description of Artificial Sequence: Synthetic polynucleotide"
atggctgccgatggttatcttccagattggctcgaggacaacctctctgagggcattcgcgagtggtgggacttgaaacctggagccccgaaacctaaagccaaccagcaaaagcaggacgacggccggggtctggtgcttcctggctacaagtacctcggacccttcaacggactcgacaagggggagcccgtcaacgcggcggacgcagcggccctcgagcacgacaaggcctacgaccagcagctcaaagcgggtgacaatccgtacctgcggtataaccacgccgacgccgagtttcaggagcgtctgcaagaagatacgtcttttgggggcaacctcgggcgagcagtcttccaggccaagaagcgggttctcgaaccttttggtctggttgaggaaggcgctaagacggctcctggaaagaaacgtccggtagagcagtcgccacaagagccagactcctcctcgggcatcggcaagacaggccagcagcccgctaaaaagagactcaattttggtcagactggcgactcagagtcagtccccgacccacaacctctcggagaacctccagcaacccccgctgctgtgggacctactacaatggcttcaggcggtggcgcaccaatggcagacaataacgaaggcgccgacggagtgggtaatgcctcaggaaattggcattgcgattccacatggctgggcgacagagtcatcaccaccagcacccgcacctgggccttgcccacctacaataaccacctctacaagcaaatctccagtgcttcaacgggggccagcaacgacaaccactacttcggctacagcaccccctgggggtattttgatttcaacagattccactgccacttttcaccacgtgactggcagcgactcatcaacaacaattggggattccggcccaagagactcaacttcaagctcttcaacatccaagtcaaggaggtcacgacgaacgatggcgtcacgaccatcgctaataaccttaccagcacggttcaagtcttctcggattcagagtaccaactgccgtacgtcctcggctctgcgcaccagggctgcctccctccgttcccggcggacgtgttcatgattccgcagtacggctacctaacgctcaacaatggcagccaggccgtgggacgttcatccttttactgcctggaatatttcccttctcagatgctgagaacgggcaacaactttaccttcagctacacctttgaggaagtgcctttccacagcagctacgcgcacagccagagcctggaccggctgatgaatcctctcatcgaccaatacctgtattacctgaacagaactcaaaatcagtccggaagtgcccaaaacaaggacttgctgtttagccgtgggtctccagctggcatgtctgttcagcccaaaaactggctacctggaccctgttatcggcagcagcgcgtttctaaaacaaaaacagacaacaacaacagcaattttacctggactggtgcttcaaaatataacctcaatgggcgtgaatccatcatcaaccctggcactgctatggcctcacacaaagacgacgaagacaagttctttcccatgagcggtgtcatgatttttggaaaagagagcgccggagcttcaaatactgcattggacaatgtcatgatcacagatgaagaggaaattaaagccactaaccctgtggccaccgaaagatttgggaccgtggcagtcaatttccagagcagcagcacagaccccgcgaccggagatgtgcatgttatgggagccttacctggcatggtgtggcaagacagagacgtatacctgcagggtcccatttgggccaaaattcctcacacggatggacactctcacccgtctcctctcatgggcggctttggacttaagcacccgcctcctcaaatcctcatcaaaaacacgcctgttcctgcgaatcctccggcagagttttcggctacaaagtttgcttcattcatcacccagtactccacaggacaagtgagtgtggaaattgaatgggagctgcagaaagaaaacagcaagcgctggaatcccgaagtgcagtacacatccaattatgcaaaatctgccaacgttgatttcactgtggacaacaatggactttatactgagcctcgccccattggcacccgttaccttacccgtcccttg

SEQ ID NO: 685 - DNA, 2208 bp, Artificial Sequence
  source: /note="Description of Artificial Sequence: Synthetic polynucleotide"
atggctgccgatggttatcttccagattggctcgaggacaacctctctgagggcattcgcgagtggtgggacttgaaacctggagccccgaaacctaaagccaaccagcaaaagcaggacgacggccggggtctggtgcttcctggctacaagtacctcggacccttcaacggactcgacaagggggagcccgtcaacgcggcggacgcagcggccctcgagcacgacaaggcctacgaccagcagctcaaagcgggtgacaatccgtacctgcggtataaccacgccgacgccgagtttcaggagcgtctgcaagaagatacgtcttttgggggcaacctcgggcgagcagtcttccaggccaagaagcgggttctcgaaccttttggtctggttgaggaaggcgctaagacggctcctggaaagaaacgtccggtagagcagtcgccacaagagccagactcctcctcgggcatcggcaagacaggccagcagcccgctaaaaagagactcaattttggtcagactggcgactcagagtcagtccccgacccacaacctctcggagaacctccagcaacccccgctgctgtgggacctactacaatggcttcaggcggtggcgcaccaatggcagacaataacgaaggcgccgacggagtgggtaatgcctcaggaaattggcattgcgattccacatggctgggcgacagagtcatcaccaccagcacccgcacctgggccttgcccacctacaataaccacctctacaagcaaatctccagtgcttcaacgggggccagcaacgacaaccactacttcggctacagcaccccctgggggtattttgatttcaacagattccactgccacttttcaccacgtgactggcagcgactcatcaacaacaattggggattccggcccaagagactcaacttcaagctcttcaacatccaagtcaaggaggtcacgacgaacgatggcgtcacgaccatcgctaataaccttaccagcacggttcaagtcttctcggattcagagtaccaactgccgtacgtcctcggctctgcgcaccagggctgcctccctccgttcccggcggacgtgttcatgattccgcagtacggctacctaacgctcaacaatggcagccaggccgtgggacgttcatccttttactgcctggaatatttcccttctcagatgctgagaacgggcaacaactttaccttcagctacacctttgaggaagtgcctttccacagcagctacgcgcacagccagagcctggaccggctgatgaatcctctcatcgacctatacctgtattacctgaacagaactcaaaatcagtccggaagtgcccaaaacaaggacttgctgtttagccgtgggtctccagctggcatgtctgttcagcccaaaaactggctacctggaccctgttatcggcagcagcgcgtttctaaaacaaaaacagacaacaacaacagcaattttacctggactggtgcttcaaaatataacctcaatgggcgtgaatccatcatcaaccctggcactgctatggcctcacacaaagacgacgaagacaagttctttcccatgagcggtgtcatgatttttggaaaagagagcgccggaacttcaaatactgcattggacaatgtcatgatcacagatgaagaggaaattaaagccactaaccctgtggccaccgaaagatttgggaccgtggcagtcaatttccagagcagcagcacagaccccgcgaccggagatgtgcatgttatgggagccttacctggcatggtgtggcaagacagagacgtatacctgcagggtcccatttgggccaaaattcctcacacggatggacactttcacccgtctcctctcatgggcggctttggacttaagcacccgcctcctcaaatcctcatcaaaaacacgcctgttcctgcgaatcctccggcagagttttcggctacaaagtttgcttcattcatcacccagtactccacaggacaagtgagtgtggaaattgaatgggagctgcagaaagaaaacagcaagcgctggaatcccgaagtgcagtacacatccaattatgcaaaatctgccaacgttgatttcactgtggacaacaatggactttatactgagcctcgccccattggcacccgttaccttacccgtcccttg

SEQ ID NO: 686 - DNA, 2208 bp, Artificial Sequence
  source: /note="Description of Artificial Sequence: Synthetic polynucleotide"
atggctgccgatggttatcttccagattggctcgaggacagcctctctgagggcattcgcgagtggtgggacttgaaacctggagccccgaaacctaaagccaaccagcaaaagcaggacgacggccggggtctggtgcttcctggctacaagtacctcggacccttcaacggactcgacaagggggagcccgtcaacgcggcggacgcagcggccctcgagcacgacaaggcctacgaccagcagctcaaagcgggtgacaatccgtacctgcggtataaccacgccgacgccgagtttcaggagcgtctgcaagaagatacgtcttttgggggcaacctcgggcgagcagtcttccaggccaagaagcgggttctcgaaccttttggtctggttgaggaaggcgctaagacggctcctggaaagaaacgtccggtagagcagtcgccacaagagccagactcctcctcgggcatcggcaagacaggccagcagcccgctaaaaagagactcaattttggtcagactggcgactcagagtcagtccccgacccacaacctctcggagaacctccagcaacccccgctgctgtgggacctactacgatggcttcaggcggtggcgcaccaatggcagacaataacgaaggcgccgacggagtgggtaatgcctcaggaaattggcattgcgattccacatggctgggcgacagagtcatcaccaccagcacccgcacctgggccttgcccacctacaataaccacctctacaagcaaatctccagtgcttcaacgggggccagcaacgacaaccactacttcggctacagcaccccctgggggtattttgatttcaacagattccactgccacttttcaccacgtgactggcagcgactcatcaacaacaattggggattccggcccaagagactcaacttcaagctcttcaacatccaagtcaaggaggtcacgacgaacgatggcgtcacgaccatcgctaataaccttaccagcacggttcaagtcttctcggattcagagtaccaactgccgtacgtcctcggctctgcgcaccagggctgcctccctccgttcccggcggacgtgttcatgattccgcagtacggctacctaacgcccaacaatggcagccaggccgtgggacgttcatccttttactgcctggaatatttcccttctcagatgctgagaacgggcaacaactttaccttcagctacacctttgaggaagtgcctttccacagcagctacgcgcacagccagagcctggaccggctgatgaatcctctcatcgaccaataccagtattacctgaacagaactcaaaatcagtccggaagtgcccaaaacaaggacttgctgtttagccgtgggtctccagctggcatgtctgttcagcccaaaaactggctacctggaccctgttatcggcagcagcgcgtttctaaaacaaaaacagacaacaacaacagcaattttacctggactggtgcttcaaaatataacctcaatgggcgtgaatccatcatcaaccctggcactgctatggcctcacacaaagacgacgaagacaagttctttcccatgagcggtgtcatgatttttggaaaagagagcgccggagcttcaaatactgcattggacaatgtcatgatcacagatgaagaggaaattaaagccactaaccctgtggccaccgaaagatttgggaccgtggcagtcaatttccagagcagcagcacagaccccgcgaccggagatgtgcatgttatgggagccttacctggcatggtgtggcaagacagagacgtatacctgcagggtcccatttgggccaaaattcctcacacggatggacactttcacccgtctcctctcatgggcggctttggacttaagcacccgcctcctcaaatcctcatcaaaaacacgcctgttcctgcgaatcctccggcagagttttcggctacaaagtttgcttcattcatcacccagtactccacaggacaagtgagtgtggaaattgaatgggagctgcagaaagaaaacagcaagcgctggaatcccgaagtgcagtacacatccaattatgcaaaatctgccaacgttgatttcactgtggacaacaatggactttatactgagcctcgccccattggcacccgttaccttacccgtcccttg

SEQ ID NO: 687 - DNA, 2208 bp, Artificial Sequence; identical to SEQ ID NO: 678
  source: /note="Description of Artificial Sequence: Synthetic polynucleotide"

SEQ ID NO: 688 - DNA, 2205 bp, Artificial Sequence
  source: /note="Description of Artificial Sequence: Synthetic polynucleotide"
atggctgccgatggttatcttccagattggctcgaggacactctctctgaaggaataagacagtggtggaagctcaaacctggcccaccaccaccaaagcccgcagagcggcataaggacgacagcaggggtcttgtgcttcctgggtacaagtacctcggacccttcaacggactcgacaagggagagccggtcaacgaggcagacgccgcggccctcgagcacgacaaagcctacgaccggcagctcgacagcggagacaacccgtacctcaagtacaaccacgccgacgcggagtttcaggagcgccttaaagaagatacgtcttttgggggcaacctcggacgagcagtcttccaggcgaaaaagagggttcttgaacctctgggcctggttgaggaacctgttaagacggctccgggaaaaaagaggccggtagagcactctcctgtggagccagactcctcctcgggaaccggaaaggcgggccagcagcctgcaagaaaaagattgaattttggtcagactggagacgcagactcagtacctgacccccagcctctcggacagccaccagcagccccctctggtctgggaactaatacgatggctacaggcagtggcgcaccaatggcagacaataacgagggcgccgacggagtgggtaattcctcgggaaattggcattgcgattccacatggatgggcgacagagtcatcaccaccagcacccgaacctgggccctgcccacctacaacaaccacctctacaaacaaatttccagccaatcaggagcctcgaacgacaatcactactttggctacagcaccccttgggggtattttgacttcaacagattccactgccacttttcaccacgtgactggcaaagactcatcaacaacaactggggattccgacccaagagactcaacttcaagctctttaacattcaagtcaaagaggtcacgcagaatgacggtacgacgacgattgccaataaccttaccagcacggttcaggtgtttactgactcggagtaccagctcccgtacgtcctcggctcggcgcatcaaggatgcctcccgccgttcccagcagacgtcttcatggtgccacagtatggatacctcaccctgaacaacgggagtcaggcagtaggacgctcttcattttactgcctggagtactttccttctcagatgctgcgtaccggaaacaactttaccttcagctacacttttgaggacgttcctttccacagcagctacgctcacagccagagtctggaccgtctcatgaatcctctcatcgaccagtacctgtattacttgagcagaacaaacactccaagtggaaccaccacgcagtcaaggcttcagttttctcgggccggagcgagtgacattcgggaccagtctaggaactggcttcctggaccctgttaccgccagcagcgagtatcaaagacatctgcggataacaacaacagtgaatactcgtggactggagctaccaagtaccacctcaatggcagagactctctggtgaatccgggcccggccatggcaagccacaaggacgatgaagaaaagttttttcctcagagcggggttctcatctttgggaagcaaggctcagagaaaacaaatgtggacattgaaaaggtcatgattacagacgaagaggaaatcaggacaaccaatcccgtggctacggagcagtatggttctgtatctaccaacctccagagaggcaacagacaagcagctaccgcagatgtcaacacacaaggcgttcttccaggcatggtctggcaggacagagatgtgtaccttcaggggcccatctgggcaaagattccacacacggacggacattttcacccctctcccctcatgggtggattcggacttaaacaccctcctccacagattctcatcaagaacaccccggtacctgcgaatccttcgaccaccttcagtgcggcaaagtttgcttccttcatcacacagtactccacgggacaggtcagcgtggagatcgagtgggagctgcagaaggaaaacagcaaacgctggaatcccgaaattcagtacacttccaactacaacaagtctgttaatgtggactttactgtggacactaatggcgtgtattcagagcctcgccccattggcaccagatacctgactcgtaatctg

SEQ ID NO: 689 - protein, 736 aa, Artificial Sequence
  source: /note="Description of Artificial Sequence: Synthetic polypeptide"
MAADGYLPDWLEDNLSEGIREWWALKPGAPQPKANQQHQDNARGLVLPDYKYLGPGNGLDKGEPVNAADVAALEHDKAYDQQLKAGDNPYLKYNHADAEFQERLKEDTSFGGNLGRAVFQAKKRLLEPLGLVEEAAKTAPGKKRPVEQSPQEPDSSAGIGKSGAQPAKKRLNFGQTGDTESVPDPQPIGEPPAAPSGVGSLTMASGGGAPVADNNEGADGVGSSSGNWHCDSQWLGDGVITTSTRTWALPTYNNHLYKQISNSTSGGSSNDNAYFGYSTPWGYFDFNRFHCHFSPRDWQRLINNNWGFRPKRLNFKLFNIQVKEVTDNNGVKTIANNLTSTVQVFTDSDYQLPYVLGSAHEGCLPPFPADVFMIPQYGYLTLNDGSQAVGRSSFYCLEYFPSQMLRTGNNFQFSYEFENVPFHSSYAHSQSLDRLMNPLIDQYLHYLPKTINGSGQNQQTLKFSVAGPSNMAVQGRNYIPGPSYRQQRVSTTVTQNNNSEFAWPGASSWALNGRNSLMNPGPAMASYKEGEDSFFPLSGSLIFGKQGTGRDNVDADKVMITNEEEIKTTNPVATESYGQVATNHQSAQAQAQTGWVQNQGILPGMVWQDRDVYLQGPIWAKIPHTDGNFHPSPLMGGFGMKHPPPQTLIKNTPVPADPPTAFNKDKLNSFITQYSTGQVSVEIEWELQKENSKRWNPEIQYTSNYYKSNNVEFAVNTEGVYSEPRPIGTRYLTRNL

SEQ ID NO: 690 - protein, 736 aa, Artificial Sequence
  source: /note="Description of Artificial Sequence: Synthetic polypeptide"
MAADGYLPDWLEDNLSEGIREWWALKPGAPQPKANQQHQDNARGLVLPGYKYLGPGNGLDKGEPVNAADAAALEHDKAYDQQLKAGDNPYLKYNHADAEFQERLKEDTSFGGNLGRAVFQAKRRLLEPLGLVEEAAKTAPGKKRPVEQSPQEPDSSAGIGKSGAQPAKKRLNFGQTGDTESVPDPQPIGEPPAAPSGVGSLTMASGGGAPVADNNEGADGVGSSSGNWHCDSQWLGDRVITTSTRTWALPTYNNHLYKQISNSTSGGSSNDNAYFGYSTPWGYFDFNRFHCHFSPRDWQRLINNNWGFRPKRLNFKLFNIQIKEVTDNNGVKTIANNLTSTVQVFTDLDYQLPYVLGSAHEGCLPPFPADVFMIPQYGYLTLNDGSQAVGRSSFYCLEYFPSQMLRTGNNFQFSYEFENVPFHSSYAHSQSLDRLMNPLIDQYLHYLSKTINGSGQNQQTLKFSVAGPSNMAVQGRNYIPGPSYRQQRVSTTVTQNNNSEFAWPGASSWALNGRNSLMNPGPAMASYKEGEDSFFPLSGSLIFGKQGTGRDNVDADKVMITNEEEIKTTNPVATESYGQVATNHQSAQAQAQTGWVQNQGILPGMVWQDRDVYLQGPIWAKIPHTDGNFHPSPLMGGFGMKHPPPQTLIKNTPVPADPPTAFNKDKLNSFITQYSTGQVSVEIEWELQKENSKRWNPEIQYTSNYYKSNNVEFAVNTEGVYSEPRPIGTRYLTRNL

SEQ ID NO: 691 - protein, 736 aa, Artificial Sequence
  source: /note="Description of Artificial Sequence: Synthetic polypeptide"
MAADGYLPDWLEDNLSEGIREWWALKPGAPQPKANQQHQDNARGLVLPGYKYLGPGNGLDKGEPVSAADAAALEHDKAYDQQLKAGDNPYLKYNHADAEFQERLKEDTSFGGNLGRAVFQAKKRLLEPLGLVEEAAKTAPGKKRPVEQSPQEPDSSAGIGKSGAQPAKKRLNFGQTGDTESVSDPQPIGEPPAAPSGVGSLTMASGGGAPVADNNEGADGVGSSSGNWHCDSQWLGDRVITTSTRTWALPTYNNHLYKQISNSTSGGSSNDNAYFGYSTPWGYFDFNRFHCHFSPRDWQRLINNNWGFRPKRLNFKLFNIQVKEVTDNNGVKTIANNLTSTVQVFTDSDYQLPYVLGSAHEGCLPPSPADVFMIPQYGYLTLNDGSQAVGRSSFYCLEYFPSQMLRTGNNFQFSYEFENVPFHSSYAHSQSLDRLMNPLIDQYLHYLSKTINGSGQNQQTLKFSVAGPSNMAVQGRNYIPGPSYRQQRVSTTVTQNNNSEFAWPGASSWALNGRNSLMNPGPAMASYKEGEDSFFPLSGSLIFGKQGTGRDDVDADKVIITNEEEIKTTNPVATESYGQVATNHQSAQAQAQTGWVQNQGILPGMVWQDRDVYLQGPIWAKIPHTDGNFHPSPLMGGFGMKHPPPQTLIKNTPVPADPPTAFNKDKLNSFITQYSTGQVSVEIEWELQKENSKRWNPEIQYTSNYYKSNNVEFAVNTEGVYSEPRPIGTRYLTRNL

SEQ ID NO: 692 - protein, 736 aa, Artificial Sequence
  source: /note="Description of Artificial Sequence: Synthetic polypeptide"
MAADGYLPDWLEDNLSEGIREWWALKPGAPQPKANQQHQDNARGLVLPGYKYLGPGNGLDKGEPVNAADAAALEHDKAYDQQLKAGDNPYLKYNHAGAEFQERLKEDTSFGGNLGRAVFQAKKRLLEPLGLVEEAAKTAPGKKRPVEQSPQEPDSSAGIGKSGAQPAKKRLNFGQTGDTESVPDPQPIGEPPAAPSGVGSLTMASGGGAPVADNNEGAGGVGSSSGNWHCDSQWLGDRVVTTSTRTWALPTYNNHLYKQISNSTSGGSSNDNAYFGYSTPWGYFDFNRFHCHFSPRDWQRLINNNWGFRPKRLNFKLFNIQVKEVTDNNGVKTIANNLTSTVQVFTDSDYQLPYVLGSAHGGCLPPFPADVFMIPQYGYLTLNDGSQAVGRSSFYCLEYFPSQMLRTGNNFQFSYEFENVPFHSSYAHSQSLDRLMNPLIDQYLHYLSKTINGSGQNQQTLKFSVAGPSNMAVQGRSYIPGPSYRQQRVSTTVTQNNNSEFAWPGASSWALNGRNSLMNPGPAMASYKEGEDSFFPLSGSLIFGKQGTGRDNVDADKVMITNEEEIKTTNPVATESYGQVATNHQSAQAQAQTGWVQNQGILPGMVWQDRDVYLQGPIWAKIPHTDGNFHPSPLMGGFGMKHPPPQTLIKNTPVPADPPTAFNKDKLNSFITQYSTGQVSVEIEWELQKENSKRWNPEIQYTSNYYKSNNVEFAVNTEGVYSEPRPIGTRYLTRNL

SEQ ID NO: 693 - protein, 736 aa, Artificial Sequence
  source: /note="Description of Artificial Sequence: Synthetic polypeptide"
MAADGYLPDWLEDNLSEGIREWWALKPGAPQPKANQQHQDNARGLVLPGYKYLGPGNGLDKGEPVNAADAAALEHDKAYDQQLKAGDNPYLKYNHADAEFQERLKEDTSFGGNLGRAVFQAKKRLLEPLGLVEEAAKTAPGKKRPVEQSPQEPDSSAGIGKSGAQPAKKRLNFGQTGDTESVPDPQPIGEPPAAPSGVGSLTMASGGGAPVADNNEGADGVGSSSGNWHCDSQWLGDRVVTTSTRTWALPTYNNHLYKQISNSTSGGSSNDNAYFGYSTPWGYFDFNRFHCHFSPRDWQRLINNNWGFRPKRLNFKLFNIQVKEVTDNNGVKTIANNLTSTVQVFTDSDYQLPYVLGSAHEGCLPPFPADVFMIPQYGYLTLNDGSQAVGRSSFYCLEYFPSQMLRTGNNFQFSYEFENVPFHSSHAHSQSLDRLMNPLIDQYLHYLSKTINGSGQNQQTLKFSVAGHSNMAVQGRNYIPGPSYRQQRVSTTVTQNNNSEFAWPGASSWALNGRNSLMNPGPAMASYKEGEDSFFPLSGSLIFGKQGTGRDNVDADKVMITNEEEIKTTNPVATESYGQVATNHQSAQAQAQTGWVQNQGILPGMVWQDRDVYLQGPIWAKIPHTDGNFHPSPLMGGFGMKHPPPQTLIKNTPVPADPPTAFNKDKLNSFITQYSTGQVSVEIGWELQKENSKRWNPEIQYTSNYYKSNNVEFAVNTEGVYSEPRPIGTRYLTRNL

SEQ ID NO: 694 - protein, 736 aa, Artificial Sequence
  source: /note="Description of Artificial Sequence: Synthetic polypeptide"
MAADGYLPDWLEDNLSEGIREWWALKPGAPQPKANQQHQDNARGLVLPGYKYLGPGNGLDKGEPVNAADAAALEHDKAYDQQLKAGDNPYLKYNHADAEFQERLKEDTSFGGNLGRAVFQAKKRLLEPLGLVEEAAKTAPGKKRPVEQSPQEPDSSAGIGKSGAQPAKKRLNFGQTGDTESVPDPQPIGEPPAAPSGVGSLTMASGGGAPVADNNEGADGVGSSSGNWHCDSQWLGDRVITTSTRTWALPTYNNRLYKQISNSTSGGSSNDNAYFGYSTPWGYFDFNRFHCHFSPRDWQRLINNNWGFRPKRLNFKPFNIQVKEVTDNNGVKTIANNLTSTVQVFTDSDYQLPYVLGSAHEGCLPPFPADVFMIPQYGYLTLNDGSQAVGRSSFYCLEYFPSQMLRTGNNFQFSYEFENVPFHSSYAHSQSLDRLMNPLIDQYLHYLSKTINGSGQNQQTLKFSVAGPSNMAVQGRNYIPGPSYRQQRVSTTVTQNNNSEFAWPGASSWALNGRNSLMNPGPAMASYKEGEDSFFPLSGSLIFGKQGTGRDNVDADKVMITNEEEIKTTNPVATESYGQVATNHQSAQAQAQTGWVQNQGILPGMVWQDRDVYLQGPIWAKIPHTDGNFHPSPLMGGFGMKHPPPQTLIKNTPVPADPPTAFNKDKLNSFITQYSTGQVSVEIEWELQKENSKRWNPEIQYTSNYYKSNNVEFAVNTEGVYSEPRPIGTRYLTRNL

SEQ ID NO: 695 - protein, 736 aa, Artificial Sequence
  source: /note="Description of Artificial Sequence: Synthetic polypeptide"
MAADGYLPDWLEDNLSEGIREWWALKPGAPQPKANQQHQDNARGLVLPGYKYLGPGNGLDKGEPVNAADAAALEHDKAYDQQLKAGDNPYLKYNHADAEFQERLKEDTSFGGNLGRAVFQAKKRLLEPLGLVEEAAKTAPGKKRPVEQSPQEPDSSAGIGKSGAQPAKKRLNFGQTGDTESVPDPQPIGEPPAAPSGVGSLTMASGGGAPVADNNEGADGVGSSSGNWHCDSQWLGDRVITTSTRTWALPTYNNHLYKQISNSTSGGSSNDNAYFGYSTPWGYFDFNRFHCHFSPRDWQRLINNNWGFRPKRLNFKLFNIQVKEVTDNNGVKTIANNLTSTVQVFTDSDYQLPYVLGSAHEGCLPPFPADVFMIPQYGYLTLNDGSQAVGRSSFYCLEYFPSQMLRTGNNFQFSYEFENVPFHSSYAHSQSLDRLMNPLIDQYLHYLSKTINGSGQNQQTLKFSVAGPSNMAVQGRNYIPGPSYRQQRVSTTVTQNNNSEFAWPGASSWALNGRNSLMNPGPAMASYKEGEDSFFPLSGSLIFGKQGTGRDNVDADKVMITNEEEIKTTNPVATESYGQVATNHQSAQAQAQTGWVQNQGILPGMVWQDRDVYLQGPIWAKIPHTDGNFHPSPLMGGFGMKHPPPQTLIKNTPVPADPPTAFNKDKLNSFITQYSTGQVSVEIEWELQKENSKRWNPEIQYTSNYYKSNNVEFAVNTEGVYSEPRPIGTRYLTRNL

SEQ ID NO: 696 - protein, 736 aa, Artificial Sequence; identical to SEQ ID NO: 695
  source: /note="Description of Artificial Sequence: Synthetic polypeptide"

SEQ ID NO: 697 - protein, 736 aa, Artificial Sequence
  source: /note="Description of Artificial Sequence: Synthetic polypeptide"
MAADGYLPDWLEDNLSEGIREWWDLKPGAPKPKANQQKQDDGRGLVLPGYKYLGPFNGLDKGEPVNAADAAALEHDKAYDQQLKAGDNPYLRYNHADAEFQERLQEDTSFGGNLGRAVFQAKKRVLEPFGLVEEGAKTAPGKKRPVEQSPQEPDSSSGIGKSGQQPAKKRLNFGQTGDSESVPDPQPLGEPPATPAALGPTTMASGGGAPMADNNEGADGVGNASGNWHCDSTWLGDRVITTSTRTWALPTYNNHLYKQISSASTGASNDNHYFGYSTPWGYFDFNRFHCHFSPRDWQRLINNNWGFRPKRLNFKLFNIQVKEVTTNDGVTTIANNLTSTVQVFSDSEYQLPYVLGSAHQGCLPPFPADVFMIPQYGYLTLNNGSKAVGRSSFYCLEYFPSQMLRTGNNFTFSYTFEEVPFHSSYAHSQSLDRLMNPLIDQYLYYLNRTQNQSGSAQNKDLLFSRGSPAGMSVQPKNWLPGPCYRQQRVSKTKTDNNNSNFTWTGASKYNLNGRESIINPGTAMASHKDDEDKFFPMSGVMIFGKESAGASNTALDNVMITDEEEIKATNPVATERFGTVAVNFQSSSTDPATGDVHVMGALPGMVWQDRDVYLQGPIWAKIPHTDGHFHPSPLMGGFGLKHPPPQILIKNTPVPANPPAEFSATKFASFITQYSTGQVSVEIEWELQKENSKRWNPEVQYTSNYAKSANVDFTVDNNGLYTEPRPIGTRYLTRPL

SEQ ID NO: 698 - protein, 736 aa, Artificial Sequence
  source: /note="Description of Artificial Sequence: Synthetic polypeptide"
MAADGYLPDWLEDNLSEGIREWWDLKPGAPKPKANQQKQDDGRGLVLPGYKYLGPFNGLDKGEPVNAADAAALEHDKAYDQQLKAGDNPYLRYNHADAEFQERLQEDTSFGGNLGRAVFQAKKRVLEPLGLVEEGAKTAPGKKRPVEQSPQEPDSSSGIGKTGQQPAKKRLNFGQTGDSESVPDPQPLGEPPATPAAVGPTTMASGGGAPMADNNEGADGVGNASGNWHCDSTWLGDRVITTSTRTWALPTYNNHLYKQISSTSTGASNDNHYFGYSTPWGYFDFNRFHCHFSPRDWQRLINNNWGFRPKRLNFKLFNIQVKEVTTNDGVTTIANNLTSTVQVFSDSEYQLPYVLGSAHQGCLPPFPADVFMIPQYGYLTLNNGSQAVGRSSFYCLEYFPSQMLRTGNNFTFSYTFEEVPFHSSYAHSQSLDRLMNPLIDQYLYYLNRTQNQSGSAQNKDLLFSRGSPAGMSVQPKNWLPGPCYRQQRVSKTKTDNNNSNFTWTGASKYNLNGRESIINPGTAVASHKDDEDKFFPMSGVMIFGKESAGASNTALDNVMITDEEEIKATNPVATERFGTVAVNFQSSSTDPATGDVHAMGALPGMVWQDRDVYLQGPIWAKIPHTDGHFHPSPLMGGFGLKNPPPQILIKNTPVPANPPAEFSATKFASFITQYSTGQVSVEIEWELQKENSKRWNPEVQYTSNYAKSANVDFTVDNNGLYTEPRPIGTRYLTRPL

SEQ ID NO: 699 - protein, 736 aa, Artificial Sequence
  source: /note="Description of Artificial Sequence: Synthetic polypeptide"
MAADGYLPDWLEDNLSEGIREWWALKPGAPQPKANQQHQDNARGLVLPGYKYLGPGNGLDKGEPVNAADAAALEHDKAYDQQLKAGDNPYLKYNHADAEFQERLKEDTSFGGNLGRAVFQAKKRLLEPLGLVEEAAKTAPGKKRPVEQSPQEPDSSAGIGKSGAQPAKKRLNFGQTGDTESVPDPQPIGEPPAAPSGVGSLTMASGGGAPVADNNEGADGVGSSSGNWHCDSQWLGDRVITTSTRTWALPTYNNHLYKQISNSTSGGSSNDNAYFGYSTPWGYFDFNRFHCHFSPRDWQRLINNNWGFRPKRLNFKLFNIQVKEVTDNNGVKTIANNLTSTVQVFTDSDYQLPYVLGSAHEGCLPPFPADVFMIPQYGYLTLNDGSQAVGRSSFYCLEYFPSQMLRTGNNFQFGYEFENVPFHSSYAHSQSLDRLMNPLIDQYLYYLSKTINGSGQNQQTLKFSVAGPSNMAVQGRNYIPGPSYRQQRVSTTVTQNNNSEFAWPGASSWALNGRNSLMNPGPAMASHKEGEDRFFPLSGSLIFGKQGTGRDNVDADKVMITNEEEIKTTNPVATESYGQVATNHQSAQAQAQTGWVQNQGILPGMVWQDRDVYLQGPIWAKIPHTDGNFHPSPLMGGFGMKHPPPQILIKNTPVPADPPTAFNKDKLNSFITQYSTGQVSVEIEWELQKENSKRWDPEIQYTSNYYKSNNVEFAVNTEGVYSEPRPIGTRYLTRNL

SEQ ID NO: 700 - protein, 736 aa, Artificial Sequence
  source: /note="Description of Artificial Sequence: Synthetic polypeptide"
MAADGYLPDWLEDNLSEGIREWWALKPGAPQPKANQQHQDNARGLVLPGYKYLGPGNGLDKGEPVNAADAAALEHDKAYDQQLKAGDNPYLKYNHADAEFQERLKEDTSFGGNLGRAVFQAKKRLLEPLGLVEEAAKTAPGKKRPVEQSPQEPDSSAGIGKSGAQPAKKRLNFGQTGDTESVPDPQPIGEPPAAPSGVGSLTMASGGGAPVADNNEGADGVGSSSGNWHCDSQWLGDRVITTSTRTWALPTYNNHLYKQISNSTSGGSSNDNAYFGYSTPWGYFDFNRFHCRFSPRDWQRLINNNWGFRPKRLNFKLFNIQVKEVTDNNGVKTIANNLTSTVQVFTDSDYQLPYVLGSAHEGCLPPFPADVFMIPQYGYLTLNDGSQAVGRSSFYCLEYFPSQMLRTGNNFQFSYEFENVPFHSSYAHSQSLDRLMNPLIDQYLYYLSKTINGSGQNQQTLKFSVAGPSNMAVQGRNYIPGPSYRQQRVSTTVTQNNNSEFAWPGASSWALNGRNSLMNPGPAMASHKEGEDRFFPLSGSLIFGKQGTGRDNVDADKVMITNEEEIKTTNPVATESYGQVATNHQSAQAQAQTGWVQNQGILPGMVWQDRDVYLQGPIWAKIPHTDGNFHPSPLMGGFGMKHPPPQILIKNAPVPADPPTAFNKDKLNSFITQYSTGQVSVEIEWELQKENSKRWNPEIQYTSNYYKSNNVEFAVNTEGVYSEPRPIGTRYLTRNL

SEQ ID NO: 701 - protein, 736 aa, Artificial Sequence
  source: /note="Description of Artificial Sequence: Synthetic polypeptide"
MAADGYLPDWLEDNLSEGIREWWALKPGAPQPKANQQHQDNARGLVLPGYKYLGPGNGLDKGEPVSAADAAALEHDKAYDQQLKAGDNPYLKYNHADAEFQERLKEDTSFGGNLGRAVFQAKKRLLEPLGLVEEAAKTAPGKKRPVEQSPQEPDSSAGIGKSGAQPAKKRLNFGQTGDTESVPDPQPIGEPPAAPSGVGSLTMASGGGAPVADNNEGADGVGSSSGNWHCDSQWLGDRVITTSTRTWALPTYNNHLYKQISNSTSGGSSNDNAYFGYSTPWGYFDFNRFHCHFSPRDWQRLINNNWGFRPKRLNFKLFNIQVKEVTDNNGVKTIANNLTSTVQVFTDSDYQLPYVLGSAHEGCLPPFPADVFMIPQYGYLTLNDGSQAVGRSSFYCLEYFPSQMLRTGNNFQFSYEFENVPFHSSYAHSQSLDRLMNPLIDQYLYYLSKTINGSGQNQQTLKFSVAGPSNMAVQGRNYIPGPSYRQQRVSTTVTQNNNSEFAWPGASSWALNGRNSLMNPGPAMASHKEGEDRFFPLSGSLIFGKQGTGRDNVDADKVMITNEEEIKTTNPVATESYGQVATNHQSAQAQAQTGWVQNQGILPGMVWQDRDVYLQGPIWAKIPHTDGNFHPSPLMGGFGMKHPPPQILIKNTPVPADPPTAFNKDKLNSFITQYSTGQVSVEIEWELQKENSKRWNPEIQYTSNYYKSNNVEFAVNTEGVYSEPRPIGTRYLTRNL

SEQ ID NO: 702 - protein, 736 aa, Artificial Sequence
  source: /note="Description of Artificial Sequence: Synthetic polypeptide"
MAADGYLPDWLEDNLSEGIREWWALKPGAPQPKANQQHQDNARGLVLPGYKYLGPGNGLDKGEPVNAADAAALEHDKAYDQQLKAGDNPYLKYNHADAEFQERLKEDTSFGGNLGRAVFQAKKRLLEPLGLVEEAAKTAPGKKRPVEQSPQEPDSSAGIGKSGAQPAKKRLNFGQTGDTESVPDPQPIGEPPAAPSGVGSLTMASGGGAPVADNNEGADGVGSSSGNWHCDSQWLGDRVITTSTRTWALPTYNNHLYKQISNSTSGGSSNDNAYFGYSTPWGYFDFNRFHCHFSPRDWQRLINNNWGFRPKRLNFKLFNIQVKEVTDNNGVKTIANNLTSTVQVFTDSDYQLPYVLGSAHEGCLPPFPADVFMIPQYGYLTLNDGSQAVGRSSFYCLEYFPSQMLRTGNNFQFSYEFENVPFHSSYAHSQSLDRLMNPLIDQYLYYLSKTINGSGQNQQTLKFSVAGPSNTAVQGRNYIPGPSYRQQRVSTTVTQNNNSEFAWPGASSWALNGRNSLMNPGPAMASHKEGEDRFFPLSGSLIFGKQGTGRDNVDADKVMITNEEEIKTTNPVATESYGQVATNHQSAQAQAQTGWVQNQGILPGMVWQDRDVYLQGPIWAKIPHTDGNFHPSPLMGGFGMKHPPPQILIKNTPVPADPPTAFNKDKLNSFITQYSTGQVSVEIEWELQKENSKRWNPEIQYTSNYYKSNNVEFAVNTEGVYSEPRPIGTRYLTRNL

SEQ ID NO: 703 - protein, 736 aa, Artificial Sequence
  source: /note="Description of Artificial Sequence: Synthetic polypeptide"
MAADGYLPDWLEDNLSEGIREWWALKPGAPQPKANQQHQDNARGLVLPGYKYLGPGNGLDKGEPVNAADAAALEHDKAYDQQLKAGDNPYLKYNHADAEFQERLKEDTSFGGNLGRAVFQAKKRLLEPLGLVEEAAKTAPGKKRPVEQSPQEPDSSAGIGKSGAQPAKKRLNFGQTGDTESVPDPQPIGEPPAAPSGVGSLTMASGGGAPVADNNEGADGVGSSSGNWHCDSQWLGDRVITTSTRTWALPTYNNHLYKQISNSTSGGSSNDNAYFGYSTPWGYFDFNRFHCHFSPRDWQRLINNNWGFRPKRLNFKLFNIQVKEVTDNNGVKTIANNLTSTVQVFTDSDYQLPYVLGSAHEGCLPPFPADVFMIPQYGYLTLNDGSQAVGRSSFYCLEYFPSQMLRTGSNFQFSYEFENVPFHSSYAHSQSLDRLMNPLIDQYLYYLSKTINGSGQNQQTLKFSVAGPSNMAVQGRNYIPGPSYRQQRVSTTVTQNNNSEFAWPGASSWALNGRNSLMNPGPAMASHKEGEDRFFPLSGSLIFGKQGTGRDNVDADKVMITNEEEIKTTNPAATESYGQVATNHQSAQAQAQTGWVQNQGILPGMVWQDRDVYLQGPIWAKIPHTDGNFHPSPLMGGFGMKHPPPQILIKNTPVPADPPTAFNKDKLNSFITQYSTGQVSVEIEWELQKENSKRWNPEIQHTSNYYKSNNVEFAVNTEGVYSEPRPIGTRYLTRNL

SEQ ID NO: 704 - protein, 736 aa, Artificial Sequence
  source: /note="Description of Artificial Sequence: Synthetic polypeptide"
MAADGYLPDWLEDNLSEGIREWWALKPGAPQPKANQQHQDNARGLVLPGYKYLGPGNGLDKGEPVNAADAAALEHDKAYDQQLKAGDNPYLKYNHADAEFQERLKEDTSFGGNLGRAVFQAKKRLLEPLGLVEEAAKTAPGKKRPVEQSPQEPDSSAGIGKSGAQPAKKRLNFGQTGDTESVPDPQPIGEPPAAPSGVGSLTMASGGGAPVADNNEGADGVGSSSGNWHCDSQWLGDRVITTSTRTWALPTYNNHLYKQISNSTSGGSSNDNAYFGYSTPWGYFDFNRFHCHFSPRDWQRLINNNWGFRPKRLNFRLFNIQVKEVTDNNGVKTIANNLTSTVQVFTDSDYQLPYVLGSAHEGCLPPFPADVFMIPQYGYLTLNDGSQAVGRSSFYCLEYFPSQMLRTGNNFQFSYEFENVPFHSSYAHSQSLDRLMNPLIDQYLYYLSKTINGSGQNQQTLKFSVAGPSNMAVQGRNYIPGPSYRQQRVSTTVTQNNNSEFAWPGASSWALNGRNSLMNPGPAMASHKEGEDRFFPLSGSLIFGKQGTGRDNVDADKVMITNEEEIKTTNPVATESYGQVATNHQSAQAQAQTGWVQSQGILPGMVWQDRDVYLQGPIWAKIPHTDGNFHPSPLMGGFGMKHPPPQILIKNTPVPADPPTAFNKDKLNSFITQYSTGQVSVEIEWELQKENSKRWNPEIQYTSNYYKSNNVEFAVNTEGVYSEPRPIGTRYLTRNL

SEQ ID NO: 705 - protein, 735 aa, Artificial Sequence
  source: /note="Description of Artificial Sequence: Synthetic polypeptide"
MAADGYLPDWLEDNLSEGIREWWALKPGAPQPKANQQHQDNARGLVLPGYKYLGPGNGLDKGEPVNAADAAALEHDKAYDQQLKAGDNPYLKYNHADAEFQERLKEDTSFGGNLGRAVFQAKKRLLEPLGLVEEAAKTAPGKKRPVEQSPQEPDSSAGIGKSGAQPAKKRLNFGQTGDTESVPDPQPIGEPPAAPSGVGSLTMASGGGAPVADNNEGADGVGSSSGNWHCDSQWLGDRVITTSTRTWALPTYNNHLYKQISNSTSGGSSNDNAYFGYSTPWRYFDFNRFHCHFSPRDWQRLINNWGFRPKRLNFKLFNIQVKEVTDNNGVKTIANNLTSTVQAFTDSDYQLPYVLGSAHEGCLPPFPADVFMIPQYGYLTLNDGSQAVGRSSFYCLEYFPSQMLRTGNNFQFSYEFENVPFHSSYAHSQSLDRLMNPLIDQYLYYLSKTINGSGQNQQTLKFSVAGPSNMAVQGRNYIPGPSYRQQRVSTTVTQNNNSEFAWPGASSWALNGRNSLMNPGPAMASHKEGEDRFFPLSGSLIFGKQGTGRDNVDADKVMITNEEEIKTTNPVATESYGQVATNHQSAQAQAQTGWVQNQGILPGMVWQDRDVYLQGPIWAKIPHTDGNFHPSPLMGGFGMKHPPPQILIKNTPVPADPPTAFNKDELNSFITQYSTGQVSVEIEWELQKENSKRWNPEIQYTSNYYKSNNVEFAVNTEGVYSEPRPIGTRYLTRNL

SEQ ID NO: 706 - protein, 735 aa, Artificial Sequence
  source: /note="Description of Artificial Sequence: Synthetic polypeptide"
MAADGYLPDWLEDNLSEGIREWWALKPGAPQPKANQQHQDNARGLVLPGYKYLGPGNGLDKGEPVNAADAAALEHDKAYDQQLKAGDNPYLKYNHADAEFQERLKEDTSFGGNLGRAVFQDKKRLLEPLGLVEEAAKTAPGKKRPVEQSPQEPDSSAGIGKSGAQPAKKRLNFGQTGDTESVPDPQPIGEPPAAPSGVGSLTMASGGGAPVADNNEGADGVGSSSGNWHCDSQWLGDRVITTSTRTWALPTYNNHLYKQISNSTSGGSSNDNAYFGYSTPWGYFDFNRFHCHFSPRDWQRLINNWGFRPKRLNFKLFNIQVKEVTDNNGVKTIANNLTSTVQVFTDSDYQLPYVLGSAHEGCLPPFPADVFMIPQYGYLTLNDGSQAVGRSSFYCLEYFPSQMLRTGNNFQFSYEFENVPFHSSYAHSQSLDRLMNPLIDQYLYYLSKTINGSGQNQQTLKFSVAGPSNMAVQGRNYIPGPSYRQQRVSTTVTQNNNSEFAWPGASSWALNGRNSLMNPGPAMASHKEGEDRFFPLSGSLIFGKQGTGRDNVDADKVMITNEEEIKTTNPVATESYGQVATNHQSAQAQAQTGWVQNQGILPGMVWQDRDVYLQGPIWAKIPHTDGNFHPSPLMGGFGMKHPPPQILIKNTPVPADPPTAFNKDKLNSFITQYSTGQVSVEIEWELQKENSKRWNPEIQYTSNYYKSNNVEFAVNTEGVYSEPRPIGTRYLTRNL

SEQ ID NO: 707 - protein, 736 aa, Artificial Sequence
  source: /note="Description of Artificial Sequence: Synthetic polypeptide"
MAADGYLPDWLEDNLSEGIREWWALKPGAPQPKANQQHQDNARGLVLPGYKYLGPGNGLDKGEPVNAADAAALEHDKAYDQQLKAGDNPYLKYNHADAEFQERLKEDTSFGGNLGRAVFQAKKRLLEPLGLVEEAAKTAPGKKRPVEQSPQEPDSSAGIGKSGAQPAKKRLNFGQTGDTESVPDPQPIGEPPAAPSGVGSLTMASGGGAPVADNNEGADGVGSSSGNWHCDSQWLGDRAITTSTRTWALPTYNNHLYKQISNSTSGGSSNDNAYFGYSTPWGYFDFNRFHCHFSPRDWQRLINNNWGFRPKRLNFKLFNIQVKEVTDNNGVKTIANNLTSTVQVFTDSDYQLPYVLGSAHEGCLPPFPADVFMIPQYGYLTLNDGSQAVGRSSFYCLEYFPSQMLRTGNNFQFSYEFENVPFHSSYAHSQSLDRLMNPLIDQYLYYLSKTINGSGQNQQTLKFSVAGPSNMAVQGRNYIPGPSYRQQRVSTTVTQNNNSEFAWPGASSWALNGRNSLMNPGPAMASHKEGEDRFFPLSGSLIFGKQGTGRDNVDADKVMTTNEEEIKTTNPVATESYGQVATNHQSAQAQAQTGWVQNQGILPGMVWQDRDVYLQGPIWAKIPHTDGNFHPSPLMGGFGMKHPPPQILIKNTPVPADPPTAFNKDKLNSFITQYSTGQVSVEIEWELQKENSKRWNPEIQYTSNYYKSNNVEFAVNTEGVYSEPRPIGTRYLTRNL

SEQ ID NO: 708 - protein, 736 aa, Artificial Sequence
  source: /note="Description of Artificial Sequence: Synthetic polypeptide"
MAADGYLPDWLEDNLSEGIREWWALKPGAPQPKANQQHQDNARGLVLPGYKYLGPGNGLDKGEPVNAADAAALEHDKAYDQQLKAGDNPYLKYNHADAEFQERLKEDTSFGGNLGRAVFQTKKRLLEPLGLVEEAAKTAPGKKRPVEQSPQEPGSSAGIGKSGAQPAKKRLNFGQTGDTESVPDPQPIGEPPAAPSGVGSLTMASGGGAPVADNNEGADGVGSSSGNWHCDSQWLGDRVITTSTRTWALPTYNNHLYKQISNSTSGGSSNDNAYFGYSTPWGYFDFNRFHCHFSPRDWQRLINNNWGFRPKRLNFKLFNIQVKEVTDNNGVKTIANNLTSTVQVFTDSDYQLPYVLGSAHEGCLPPFPADVFMIPQYGYLTLNDGSQAVGRSSFYCLEYFPSQMLRTGNNFQFSYEFENVPFHSSYAHSQSLDRLMNPLIDQYLHYLSKTINGSGQNQQTLKFSVAGPSNMAVQGRNYIPGPSYRQQRVSTTVTQNNNSEFAWPGASSWALNGRNSLMNPGPAMASHKEGEDRFFPLSGSLIFGKQGTGRDNVDADKVMITNEEEIKTTNPVATESYGQVATNHQSAQAQAQTGWVQNQGILPGMVWQDRDVYLQGPIWAKIPHTDGNFHPSPLMGGFGMKHPPPQILIKNTPVPADPPTAFNKDKLNSFITQYSTGQVSVEIEWELQKENSKRWNPEIQYTSNYYKSNNVEFAVNTEGVYSEPRPIGTRYLTRNL

SEQ ID NO: 709 - protein, 736 aa, Artificial Sequence
  source: /note="Description of Artificial Sequence: Synthetic polypeptide"
MAADGYFPDWLEDNLSEGIREWWALKPGAPQPKANQQHQDNARGLVLPGYKYLGPGNGLDKGEPVNAADAAALEHDKAYDQQLKAGDNPYLKYNHADAEFQERLKEDTSFGGNLGRAVFQAKKRLLEPLGLVEEAAKTAPGKKRPVEQSPQEPDSSAGIGKSGAQPAKKRLNFGQTGDTESVPDPQPIGESPAAPSGVGSLTMASGGGAPVADNNEGADGVGSSSGNWHCDSQWLGDRVITTSTRTWALPTYNNHLYKQISNSTSGGSSNDNAYFGYSTPWGYFDFNRFHCHFSPRDWQRLINNNWGFRPKRLNFKLFNIQVKEVTDNNGVKTIANNLTSTVQVFTDSDYQLPYVLGSAHEGCLPPFPADVFMIPQYGYLTLNDGSQAVGRSSFYCLEYLPSQMLRTGNNFQFSYEFENVPFHSSYAHSQSLDRLMNPLIDQYLHYLSKTINGSGQNQQTLKFSVAGPSNMAVQGRNYIPGPSYRQQRVSTTVTQNNNSEFAWPGASSWALNGRNSLMNPGPAVASHKEGEDRFFPLSGSLIFGKQGTGRDNVDADKVMITNEEEIKTTNPVATESYGQVATNHQSAQAQAQTGWVQNQGILPGMVWQDRDVYLQGPIWAKIPHTDGNFHPSPLMGGFGMKHPPPQILIKNTPVPADPPTAFNKDKLNSFITQYSTGQVSVEIEWELQKENSKRWNPEIQYTSNYYKSNNVEFAVNTEGVYSEPRPIGTRYLTRNL

SEQ ID NO: 710 - protein, 736 aa, Artificial Sequence
  source: /note="Description of Artificial Sequence: Synthetic polypeptide"
MAADGYLPDWLEDNLSEGIREWWALKPGAPQPKANQQHQDNARGLVLPGYKYLGPGNGLDKGEPVNAADAAALEHDKAYDQQLKAGDNPYLKYNHADAEFQERLKEDTSFGGNLGRAVFQAKKRLLEPLGPVEEAAKTAPGKKRPVEQSPQEPDSSAGIGKSGAQPAKKRLNFGQTGDTESVPDPQPIGEPPAAPSGVGSLTMASGGGAPVADNNEGADGVGSSSGNWHCDSQWLGDRVITTSTRTWALPTYNNHLYKQISNSTSGGSSNDNAYFGYSTPWGYFDFNRFHCHFSPRDWQRLINNNWGFRPKRLNFKLFNIQVKEVTDNNGVKTIANNLTSTVQVFTDSDYQLPYVLGSAHEGCLPPFPADVFMIPQYGYLTLNDGSQAVGRSSFYCLEYFPSQMLRTGNNFQFSYEFENVPFHSSYAHSQSLDRLMNPLIDQYLYYLSKTINGSGQNQQTLKFSVAGPSNMAVQGRNYIPGPSYRQQRVSTTVTQNNNSEFAWPGASSWALNGRNSLMNPGPAMASHKEGEDRFFPLSGSLIFGKQGTGRDNVDADKVMITNEEEIKTTNPVATESYGQAATNHQSAQAQAQTGWVQNQGILPGMVWQDRDVYLQGPIWAKIPHTDGNFHPSPLMGGFGMKHPPPQILIKNTPVPADPPTAFNKDKLNSFITQYSTGQVSVEIEWELQKENSKRWNPEIQYTSNYYKSNNVEFAVNTEGVYSEPRPIGTRYLTRNL

SEQ ID NO: 711 - protein, 736 aa, Artificial Sequence
  source: /note="Description of Artificial Sequence: Synthetic polypeptide"
MAADGYLPDWLEDNLSEGIREWWALKPGAPQPKANQQHQDNARGLVLPGYKYLGPGNGLDKGEPVNAADAAALEHDKAYDQQLKAGDNPYLKYNHADAEFQERLKEDTSFGGNLGRAVFQAKKRLLEPLGPVEEAAKTAPGKKRPVEQSPQEPDSSAGIGKSGAQPAKKRLNFGQTGDTESVPDPQPIGEPPAAPSGVGSLTMASGGGAPVADNNEGADGVGSSSGNWHCDSQWLGDRVITTSTRTWALPTYNNHLYKQISNSTSGGSSNDNAYFGYSTPWGYFDFNRFHCHFSPRDWRRLINNNWGFRPKRLNFKLFNIQVKEVTDNNGVKTIANNLTSTVQVFTDSDYQLPYVLGSAHEGCLPPFPADVFMIPQYGYLTLNDGSQAVGRSSFYCLEYFPSQMLRTGNNFQFSYEFENVPFHSSYAHSQSLDRLMNPLIDQYLYYLSKTINGSGQNQQTLKFSVAGPSNMAVQGRNYIPGPSYRQQRVSTTVTQNNNSEFAWPGASSWALNGRNSLMNPGPAMASHKEGEDRFFPLSGSLIFGKQGTGRDNVDADKVMITNEEEIKTTNPVATESYGQVATNHQSAQAQAQTGWVQNQGILPGMVWQDRDVYLQGPIWAKIPHTDGNFHPSPLMGGFGMKHPPPQILIKNTPVPADPPTAFNKDKLNSFITQYSTGQVSVEIEWELQKENSKRWNPEIQYTSNYYKSNNVEFAVNTEGVYSEPRPIGTRYLTRNL

SEQ ID NO: 712 - protein, 736 aa, Artificial Sequence
  source: /note="Description of Artificial Sequence: Synthetic polypeptide"
MAADGYLPDWLEDNLSEGIREWWALKPGAPQPKANQQHQDNARGLVLPGYKYLGPGNGLDKGEPVNAADAAALEHDKAYDQQLKAGDNLYLKYNHADAEFQERLKEDTSFGGNLGRAVFQAKKRLLEPLGLVEEAAKTAPGKKRPVEQSPQEPDSSAGIGKSGAQPAKKRLNFGQTGDTESVPDPQPIGEPPAAPSGVGSLTMASGGGAPVADNNEGADGVGSSSGNWHCDSQWLGDRVITTSTRTWALPTYNNHLYKQISNSTSGGSSNDNAYFGYSTPWGYFDFNRFHCHFSPRDWQRLINNNWGFRPKRLNFKLFNIQVKEVTDNNGVKTIANNLTSTVQVFTDSDYQLPYVLGSAHEGCLPPFPADVFMIPQYGYLTLNDGSQAVGRSSFYCLEYFPSQMLRTGNNFQFSYEFENVPFHSSYAHSQSLDRLMNPLIDQYLHYLSKTINGSGQNQQTLKFSVAGPSNMAVQGRNYIPGPSYRQQRVSTTVTQNNNSEFAWPGASSWALNGRNSLMNPGPAMASHKEGEDRFFPLSGSLIFGKQGTGRDNVDADKVMITNEEEIKTTNPVATESYGQVATNHQSAQAQAQTGWVQNQGILPGMVWQDRDVYLQGPIWAKIPHTDGNFHPSPLMGGFGMKHPPPQILIKNTPVPADPPTAFNKDKLNSFITQYSTGQVSVEIEWELQKENSKRWNPEIQYTSNYYKSNNVEFAVNTEGVYSEPRPIGTRYLTRNL

SEQ ID NO: 713 - protein, 736 aa, Artificial Sequence
  source: /note="Description of Artificial Sequence: Synthetic polypeptide"
MAADGYLPDWLEDNLSEGIREWWALKPGAPQPKANQQHQDNARGLVLPGYKYLGPGNGLDKGEPVNAADAAALEHDKAYDQQLKAGDNPYLKYNHADAEFQERLKEDTSFGGNLGRAVFQAKKRLLEPLGLVEEAAKTAPGKKRPVEQSPQEPDSSAGIGKSGAQPAKKRLNFGQTGDTESVPDPQPIGEPPAAPSGVGSLTMASGGGAPVADNNEGADGVGSSSGNWHCDSQWLGDRVITTSTRTWALPTYNNHLYKQISNSTSGGSSNDNAYFGYSTPWGYFDFNRFHCHFSPRDWQRLINNNWGFRPKRLNFKLFNIQVKEVTDNNGVKTIANNLTSTVQVFTDSDYQLPYVLGSAHEGCLPPFPADVFMIPQYGYLTLNDGSQAVGRSSFYCLEYFPSQMLRTGNNFQFSYEFENVPFHSSYAHSQSLDRLMNPLIDQYLHYLSKTINGSGQNQQTLKFSVAGPSNMAVQGRNYIPGPSYRQQRVSTTVTQNNNSEFAWPGASSWALNGRNSLMNPGPAMASHKEGEDRFFPLSGSLIFGKQGTGRDNVDADKVMITNEEEIKTTNPVATESYGQVATNHQSAQAQAQTGWVQNQGILPGMVWQDRDVYLQGPIWAKIPHTDGNFHPSPLMGGFGMKHPPPQILIKNTPVPADPPTAFNKDKLNSFITQYSTGQVSVEIEWELQKENSKRWNPEIQYTSNYYKSNNVEFAVNTEGVYSEPRPIGTRYLTRNL

SEQ ID NO: 714 - protein, 736 aa, Artificial Sequence
  source: /note="Description of Artificial Sequence: Synthetic polypeptide"
  MOD_RES (442)..(442): Any amino acid
MAADGYLPDWLEDNLSEGIREWWALKPGAPQPKANQQHQDNARGLVLPGYKYLGPGNGLDKGEPVNAADAAALEHDKAYDQQLKAGDNPYLKYNHADAEFQERLKEDTSFGGNLGRAVFQAKKRLLEPLGLVEEAAKTAPGKKRPVEQSPQEPDSSAGIGKSGAQPAKKRLNFGQTGDTESVPDPQPIGEPPAAPSGVGSLTMASGGGAPVADNNEGADGVGSSSGNWHCDSQWLGDRVITTSTRTWALPTYNNHLYKQISTSTSGGSSNDNAYFGYSTPWGYFDFNRFHCHFSPRDWQRLINNNWGFRPKRLNFKLFNIQVKEVTDNNGVKTIANNLTSTVQVFTDSDYQLPYVLGSAHEGCLPPFPADVFMIPQYGYLTLNDGSQAVGRSSFYCLEYFPSQMLRTGNNFQFSYEFENVPFHSSYAHSQSLDRLMNPLIDXYLHYLSKTINGSGQNQQTLKFSVAGPSNMAVQGRNYIPGPSYRQQRVSTTVTQNNNSEFAWPGASSWALNGRNSLMNPGPAMASHKEGEDRFFPLSGSLIFGKQGTGRDNVDADKVMITNEEEIKTTNPVATESYGQVATNHQSAQAQAQTGWVQNQGILPDMVWQDRDVYLQGPIWAKIPHTDGNFHPSPLMGGFGMKHPPPQILIKNTPVPADPPTAFNKDKLNSFITQYSTGQVSVEIEWELQKENSKRWNPEIQYTSNYYKSNNVEFAVNTEGVYSEPRPIGTRYLTRNL

SEQ ID NO: 715 - protein, 736 aa, Artificial Sequence; identical to SEQ ID NO: 695
  source: /note="Description of Artificial Sequence: Synthetic polypeptide"

SEQ ID NO: 716 - protein, 736 aa, Artificial Sequence; identical to SEQ ID NO: 699
  source: /note="Description of Artificial Sequence: Synthetic polypeptide"

SEQ ID NO: 717 - protein, 736 aa, Artificial Sequence
  source: /note="Description of Artificial Sequence: Synthetic polypeptide"
MAADGYLPDWLEDNLSEGIREWWALKPGAPQPRANQQHQDNARGLVLPGYKYLGPGNGLDKGEPVNAADAAALEHDKAYDQQLKAGDNPYLKYNHADAEFQERLKEDTSFGGNLGRAVFQAKKRLLEPLGLVEEAAKTAPGKKRPVEQSPQEPDSSAGIGKSGAQPAKKRLNFGQTGDTESVPDPQPIGEPPAAPSGVGSLTMASGGGAPVADNNEGADGVGSSSGNWHCDSQWLGDRVITTSTRTWALPTYNNHLYKQISNSTSGGSSNDNAYFGYSTPWGYFDFNRFHCHFSPRDWQRLINNNWGFRPKRLNFKLFNIQVKEVTDNNGVKTIANNLTSTVQVFTDSDCQLPYVLGSAHEGCLPPFPADVFMIPQYGYLTLNDGSQAVGRSSFYCLEYFPSQMLRTGNNFQFSYEFENVPFHSSYAHSQSLDRLTNPLIDQYLYYLSKTINGSGQNQQTLKFSVAGPSNMAVQGRNYIPGPSYRQQRVSTTVTQNNNSEFAWPGASSWALNGRNSLMNPGPAMASHKEGEDRFFPLSGSLIFGKQGTGRDNVDADKVMITNEEEIKTTNPVATESHGQVATNHQSAQAQAQTGWVQNQGILPGMVWQDRDVYLQGPIWAKIPHTDGNFHPSPLMGGFGMKHPPPQILIKNTPVPADPPTAFNKDKLNSFITQYSTGQVSVEIEWELQKENSKRWNPEIQYTSNYYKSNNVEFAVNTEGVYSEPRPIGTRYLTRNL

SEQ ID NO: 718 - protein, 736 aa, Artificial Sequence
  source: /note="Description of Artificial Sequence: Synthetic polypeptide"
MAADGYLPDWLEDNLSEGIREWWALKPGAPQPKANQQHQDNARGLVLPGYKYLGPGNGLDKGEPVNAADAAALEHDKAYDQQLKAGDNPYLKYNHADAEFQERLKEDTSFGGNLGRAVFQAKKRLLEPLGLVEEAAKTAPGKKRPVEQSPQEPDSSAGIGKSGAQPAKKRLNFGQTGDTESVPDPQPIGEPPAAPSGVGSLTMASGGGAPVADNNEGADGVGSSSGNWHCDSQWLGDRVITTSTRTWALPTYNNHLYKQISNSTSGGSSNDNAYFGYSTPWGYFDFNRFHCHFSPRDWQRLINNNWGFRPKRLNFKLFNIQVKEVTDNNGVKTIANNLTSTVQVFTDSDYQLPYVLGSAHEGCLPPFPADVFMIPQYGYLTLNDGSQAVGRSSFYCLEYFPSQMLRTGNNFQFSYEFENVPFHSSYAHSQSLDRLMNPPIDQYLYYLSKTINGSGQNQQTLKFSVAGPSNMAVQGRNYIPGPSYRQQRVSTTVTQNNNSEFAWPGASSWALNGRNSLMNPGPAMASHKEGEDRFFPLSGSLIFGKQGTGRDNVDADKVMITNEEEIKTTNPVATESYGQVATNHQSAQAQAQTGWVQNQGILPGMVWQDRDVYLQGPIWAKIPHTDGNFHPSPLMGGFGMKHPPPQILIKNTPVPADPPTAFNKDKLNSFITQYSTGQVSVEIEWELQKENSKRWNPEIQYTSNYYKSNNVEFAVNTEGVYGEPRPIGTRYLTRNL

SEQ ID NO: 719 - protein, 736 aa, Artificial Sequence
  source: /note="Description of Artificial Sequence: Synthetic polypeptide"
MAADGYLPDWLEDNLSEGIREWWALKPGAPQPKANQQHQDNARGLVLPGYKYLGPGNGLDKGEPVNAADAAALEHDKAYDQQLKAGDNPYLKYNHADAEFQERLKEDTSFGGNLGRAVFQAKKRLLEPLGLVEEAAKTAPGKKRPVEQSPQEPDSSAGIGKSGAQPAKKRLNFGQTGDTESVPDPQPIGEPPAAPSGVGSLTMASGGGAPVADNNEGADGVGSSSGNWHCDSQWLGDRVITTSTRTWALPTYNNHLYKQISNSTSGGSSNDNAYFGYSTPWGYFDFNRFHCHFSPRDRQRLINNNWGFRPKRLNFKLFNIQVKEVTDNNGVKTIANNLTSTVQVFTDSDYQLPYVLGSAHEGCLPPFPADVFMIPQYGYLTLNDGSQAVGRSSFYCLEYFPSQMLRTGNNFQFSYEFENVPFHSSYAHSQSLDRLMNPLIDQYLYYLSKTINGSGQNQQTLKFSVAGPSNMAVQGRNYIPGPSYRQQRVSTTVTQNNNSEFAWPGASSWALNGRNSLMNPGPAMASHKEGEDRFFPLSGSLIFGKQGTGRDNVDADKVMITNEEEIKTTNPVATESYGQVATNHQSAQAQAQTGWVQNQGILPGMVWQDRDVYLQGPIWAKIPHTDGNFHPSPLMGGFGMKHPPPQILIKNTPVPADPPTAFNKDKLNSFITQYSTGQVSVEIEWELQKENSKRWNPEIQYTSNYYKSNNVEFAVNTEGVYSEPRPIGTRYLTRNL

SEQ ID NO: 720 - protein, 736 aa, Artificial Sequence
  source: /note="Description of Artificial Sequence: Synthetic polypeptide"
MAADGYLPDWLEDNLSEGIREWWALKPGAPQPKANQQHQDNARGLVLPGYKYLGPGNGLDKGEPVNAADAAALEHDKAYDQQLKAGDNPYLKYNHADAEFQERLKEDTSFGGNLGRAVFQAKKRLLEPLGLVEEAAKTAPGKKRPVEQSPQEPDSSAGIGKSGAQPAKKRLNFGQTGDTESVPDPQPIGEPPAAPSGVGSLTMASGGGAPVADNNEGADGVGSSSGNWHCNSQWLGDRVITTSTRTWALPTYNNHLYKQISNSTSGGSSNDNAYFGYSTPWGYFDFNRFHCHFSPRDWQRLINNNWGFRPKRLNFKLFNIQVKEVTDNNGVKTIANNLTSTVQVFTDSDYQLPYVLGSAHEGCLPPFPADVFMIPQYGYLTLNDGSQAVGRSSFYCLEYFPSQMLRTGNNFQFSYEFENVPFHSSYAHSQSLDRLMNPLIDQYLYYLSKTINGSGQNQQTLKFSVAGPGNMAVQGRNYIPGPSYRQQRVSTTVTQNNNSEFAWPGASSWALNGRNSLMNPGPAMASHKEGEDRFFPLSGSLIFGKQGTGRDNVDADKVMITNEEEIKTTNPVATESYGQVATNHQSAQAQAQTGWVQNQGILPGMVWQDRDVYLQGPIWAKIPHTDGNFHPSPLMGGFGMKHPPPQILIKNTPVPADPPTAFNKDKLNSFITQYSTGQVSVEIEWELQKENSKRWNPEIQYTSNYYKSNNVEFAVNTEGVYSEPRPIGTRYLTRNL

SEQ ID NO: 721 - protein, 736 aa, Artificial Sequence
  source: /note="Description of Artificial Sequence: Synthetic polypeptide"
MAADGYLPDWLEDNLSEGIREWWALKPGAPQPKANQQHQDNARGLVLPGYRYLGPGNGLDKGEPVNAADAAALEHDKAYDQQLKAGDNPYLKYNHADAEFQERLKEDTSFGGNLGRAVFQAKKRLLEPLGLVEEAAKTAPGKKRPVEQSPQEPDSSAGIGKSGAQPAKKRLNFGQTGDTESVPDPQPIGEPPAAPSGVGSLTMASGGGAPVADNNEGADGVGSSSGNWHCDSQWLGDRVITTSTRTWALPTYNNHLYKQISNSTSGGSSNDNAYFGYSTPWGYFDFNRFHCHFSPRDWQRLINNNWGFRPKRLNFKLFNIQVKEVTDNNGVKTVANNLTSTVQVFTDSDYQLPYVLGSAHEGCLPPFPADVFMIPQYGYLTLNDGSQAVGRSSFYCLEYFPSQMLRTGNNFQFSYEFENVPFHSSYAHSQSLDRLMNPLIDQYLYYLSKTINGSGQNQQTLKFSVAGPSNMAVQGRNYIPGPSYRQQRVSTTVTQNNNSEFAWPGASSWALNGRNSLMNPGPAMASHKEGEDRFFPLSGSLIFGKQGTGRDNVDADKVMITNEEEIKTTNPVATESYGQVATNHQSAQAQAQTGWVQNQGILPGMVWQDRDVYLQGPIWAKIPHTDGNFHPSPLMGGFGMKHPPPQILIKNTPVPADPPTAFNKDKLNSFITQYSTGQVSVEIEWELQKENSKRWNPEIQYTSNYYKSNNVEFAVNTEGVYSGPRPIGTRYLTRNL

SEQ ID NO: 722 - protein, 736 aa, Artificial Sequence; identical to SEQ ID NO: 132
  source: /note="Description of Artificial Sequence: Synthetic polypeptide"

SEQ ID NO: 723 - protein, 736 aa, Artificial Sequence
  source: /note="Description of Artificial Sequence: Synthetic polypeptide"
MAADGYLPDWLEDNLSEGIREWWALKPGAPQPKANQQRQDNARGLVLPGYKYLGPGNGLDKGEPVNAADAAALEHDKAYDQQLKAGGNPCLKYNHADAEFQERLKEDTSFGGNLGRAVFQAKKRLLEPLGLVEEAAKTAPGKKRPVEQSPQEPDSSAGIGRSGAQPAKKRLNFGQTGDTESVPDPQPIGEPPAAPSGVGSLTMASGGGAPVADNNEGADGVGSSSGNWHCDSQWLGDRVITTSTRTWALPTYNNHLYKQISNSTSGGSSNDNAYFGYSTPWGYFDFNRFHCHFSPRDWQRLINNNWGFRPKRLNFKLFNIQVKEVTDNNGVKAIANNLTSTVQVFTDSDYQLPYVLGSAHEGCLPPFPADVFMIPQYGYLTLNDGSQAVGRSSFYCLEYFPSQMLRTGNNFQFSYEFENVPFHSSYAHSQSLDRLMNPLIDQYLYYLSKTIDGSGQNQQTLKFSVAGPSNMAVQGRNYIPGPSYRQQRVSTTVTQNNNSEFAWPGASSWALNGRNSLMDPGPAMASHKEGEDRFFPLSGSLIFGKQGTGRDNVDADKVMITNEEEIKTTNPVATESYGQVATNHQSAQAQAQTGWVQNQGILPGMVWQDRDVYLQGPIWAKIPHTGGNFHPSPLMGGFGMKHPPPQILIKNTPVPADPPTAFNKDKLNSFITQYSTGQVSVEIEWELQKENSKRWNPEIQYTSNYYKSNNVEFAVNTEGVYSEPRPIGTRYLTRNL

SEQ ID NO: 724 - protein, 736 aa, Artificial Sequence
  source: /note="Description of Artificial Sequence: Synthetic polypeptide"
MAADGYLPDWLEDNLSEGIREWWALKPGAPQPKANQQHQDNARGLVLPGYKYLGPGNGLDKGEPVNAADAAALEHDKAYDQQLKAGDNPYLKYNHADAEFQERLKEDTSFGGNLGRAVFQAKKRLLEPLGLVEEAAKTAPGKKRPVEQSPQEPDSSAGIGKSGAQPAKKRLNFGQTGDTESVPDPQPIGEPPAAPSGVGSLTMASGGGAPVADNNEGADGVGSSSGNWHCDSQWLGDRVITTSTRTWALPTYNNHLYKQISNSTSGGSSNDNAYFGYSTPWGYFDFNRFHCHFSPRDWQRLINNNWGFRPKRLNFKLFNIQVKEVTDNNGVKTIANNLTSTVQVFTDSDYQLPYVLGSAHEGCLPPFPADVFMIPQYGYLTLNDGSQAVGRSSFYCLEYFPSQMLRTGNNFQFSYEFENVPFHSSYAHSQSLDRLMNPLIDQYLYYLSKTINGSGQNQQTLKFSVAGPSNMAVQGRNYIPGPSYRQQRVSTTVTQNNNSEFAWPGASSWALNGRNSLMNPGPAMASHKEGEDRFFPLSGSLIFGKQGTGRDNVDADKVMITNEEEIKTTNPVATESYGQVATNHQSAQAQAQTGWVQNQGILPGMVWQDRDVYLQGPIWAKIPHTDGNFHPSPLMGGFGMKHPPPQILIKNTPVPADPPTAFNKDKLNSFITQYSTGQVSVEIEWELQKENSKRWNPEIQYTSNYYKPNNVEFAVNTEGVYSEPRPIGTRYLTRNL

SEQ ID NO: 725 - protein, 736 aa, Artificial Sequence
  source: /note="Description of Artificial Sequence: Synthetic polypeptide"
MAADGYLPDWLEDNLSEGIREWWALKPGAPQPKANQQHQDNARGLVLPGYKYLGPGNGLDKGEPVNAADAAALEHNKAYDQQLKAGDNPYLKCNHADAEFQERLKEDTSFGGNLGRAVFQAKKRPLEPLGLVEEAAKTAPGKKRPVEQSPQEPDSSAGIGKSGAQPAKKRLNFGQTGDTESVPDPQPIGEPPAAPSGVRSLTMASGGGAPVADNNEGADGVGSSSGNWHCDSQWLGDRVITTSTRTWALPTYNNHLYKQISNSTSGGSSNDNAYLGYSTPWGYFDFNRFHCHFSPRDWQRLINNNWGFRPKRLNFKLFNIQVKEVTDNNGVKTIANNLTSTVQVFTDSDYQLPYVLGSAHEGCLPPFPADVFMIPQYGYLTLNDGSQAVGRSSFYCLEYFPSQMLRTGNNFQFSYEFENVPFHSSYAHSQSLDRLMNPLIDQYLYYLSKTINGSGQNQQTLKFSVAGPSNMAVQGRNYIPGPSYRQQRVSTTVTQNNNSEFAWPGASSWALNGRNSLMNPGPTMASHKEGEDRFFPLSGSLIFGKQGTGRDNVDADKVMITNEEEIKTTNPVATESYGQVATNHQSAQAQAQTGWVQNQGILPGMVWQDRDVYLQGPIWAKIPHTDGNFHPSPLMGGFGMKHPPPQILIKNTPVPADPPTAFNKDKLNSFITQYSTGQVSVEIEWELQKENSKRWNPEIQYTSNYYKSNNVEFAVNTEGVYSEPRPIGTRYLTRNL

SEQ ID NO: 726 - protein, 736 aa, Artificial Sequence
  source: /note="Description of Artificial Sequence: Synthetic polypeptide"
MAADGYLPDWLEDNLSEGIREWWALKPGAPQPKANQQHQDNARGLVLPGYKYLGPGNGLDKGEPVNAADAAALVHDKAYDQQLKAGDNPYLKCNHADAEFQERLKEDTSFGGNLGRAVFQAKKRLLEPLGLVEEAAKTAPGKKRPVEQSPQEPDSSAGIGKSGAQPAKKRLNFGQTGDTESVPDPQPIGEPPAAPSGVGSLTMASGGGAPVADNNEGADGVGSSSGNWHCDSQWLGDRVITTSTRTWALPTYNNHLYKQISNSTSGGSSNDNAYLGYSTPWGYFDFNRFHCHFSPRDWQRLINNNWGFRPKRLNFKLFNIQVKEVTDNNGVKTIANNLTSTVQVFTDSDYQLPYVLGSAHEGCLPPFPADVFTIPQYGYLTLNDGSQAVGRSSFYCLEYFPSQMLRTGNNFQFSYEFENVPFHSSYAHSQSLDRLMNPLIDQYLYYLSKTINGSGQNQQTLKFSVAGPSNMAVQGRNYIPGPSYRQQRVSTTVTQNNNSEFAWPGASSWALNGRNSLMNPGPAMASHKEGEDRFFPLSGSLIFGKQGTGRDNVDADKVMITNEEEIKTTNPVATESYGQVATNHQSAQAQAQTGWVQNQGILPGMVWQDRDVYLQGPIWAKIPHTDGNFHPSPLMGGFGMKHPPPQILIKNTPVPADPPTAFNKDKLNSFITQYSTGQVSVEIEWELQKENSKRWNPEIQYTSNYYKSNNVEFAVNTEGVYSEPRPIGPRYLTRNF

SEQ ID NO: 727 - protein, 736 aa, Artificial Sequence
  source: /note="Description of Artificial Sequence: Synthetic polypeptide"
MAADGYLPDWLEDNLSEGIREWWALKPGAPQPKANQQHQDNARGLVLPGYKYLGPGNGLDKGEPVNAADAAALEHNKAYDQQLKAGDNPYLKCNHADAEFQERLKEDTSFGGNLGRAVFQAKKRLLEPLGLVEEAAKTAPGKKRPVEQSPQEPDSSAGIGKSGAQPAKKRLNFGQTGDTESVPDPQPIGEPPAAPSGVRSLTMASGGGAPVADNNEGADGVGSSSGNWHCDSQWLGDRVITTSTRTWALPTYNNHLYKQISNSTSGGSSNDNAYLGYSTPWGYFDFNRFHCHFSPRDWQRLINNNWGFRPKRLNFKLFNIQVKEVTDNNGVKTIANNLTSTVQVFTDSDYQLPYVLGSAHEGCLPPFPADVFMIPQYGYLTLNDGSQAVGRSSFYCLEYFPSQMLRTGNNFQFSYEFENVPFHSSYAHSQSLDRLMNPLIDQYLYYLSKTINGSGQNQQTLKFSVAGPSNMAVQGRNYIPGPSYRQQRVSTTVTQNNNSEFAWPGASSWALNGRNSLMNPGPAMASHKEGEDRFFPLSGSLIFGKQGTGRDNVDADKVMITNEEEIKTTNPVATESYGQVATNHQSAQAQAQTGWVQNQGILPGMVWQDRDVYLQGPIWAKIPHTDGNFHPSPLMGGFGMKHPPPQILIKNTPVPADPPTAFNKDKLNSFITQYSTGQVSVEIEWELQKENSKRWNPEIQYTSNYYKSNNVEFAVNTEGVYSEPRPIGTRYLTRNL

SEQ ID NO: 728 - protein, 736 aa, Artificial Sequence
  source: /note="Description of Artificial Sequence: Synthetic polypeptide"
MAADGYLPDWLEDNLSEGIREWWALKPGAPQPKANQQHQDNARGLVLPGYKYLGPGNGLDKGEPVNAADAAALEHDKAYDQQLKAGDNPYLKCNHADAEFQERLKEDTSFGGNLGRAVFQAKKRLLEPLGLVEEAAKTAPGKKRPVEQSPQEPDSSAGIGKSGAQPAKKRLNFGQTGDTESVPDPQPIGEPPAAPSGVGSLTMASGGGAPVADNNEGADGVGSSSGNWHCDSQWLGDRVITTSTRTWALPTYNNHLYKQISNSTSGGSSNDNAYLGYSTPWGYFDFNRFHCHFSPRDWQRLINNNWGFRPKRLNFELFNIQVKEVTDNNGVKTIANNLTSTVQVFTDSDYQLPYVLGSAHEGCLPPFPADVFMIPQYGYLTLNDGSQAVGRSSFYCLEYFPSQMLRTGNNFQSSYEFENVPFHSSYAHSQSLDRLMNPLIDQYLYYLSKTINGSGQNQQTLKFSVAGPSNMAVQGRNYIPGPSYRQQRASTTVTQNNNSEFAWPGASSWALNGRNSLMNPGPAMASHKEGEDRFFPLSGSLIFGKQGTGRDNVDADKVMITNEEEIKTTNPVATESYGQVATNHQSAQAQAQTGWVQNQGILPGMVWQDRDVYLQGPIWAKIPHTDGNFHPSPLMGGFGMKHPPPQILIKNTPVPADPPTAFNKDKLNSFITQYSTGQVSVEIEWELQKENSKRWNPEIQYTSNYYKSNNVEFAVNTEGVYSEPRPIGTRYLTRNL

SEQ ID NO: 729 - protein, 736 aa, Artificial Sequence
  source: /note="Description of Artificial Sequence: Synthetic polypeptide"
MAADGYLPDWLEDNLSEGIREWWALKPGAPQPKANQQHQDNARGLVLPGYKYLGPGNGLDKGEPVNAADAAALEHDKAYDQQLKAGDNPYLKCNHADAEFQERLKEDTSFGGNLGRAVFQAKKRLLEPLGLVEEAAKTAPGKKRPVEQSPQEPDSSAGIGKSGAQPAKKRLNFGQTGDTESVPDPQPIGEPPAAPPGVGSLTMASGGGAPVADNNEGADGVGSSSGNWHCDSQWLGDRVITTSTRTWALPTYNNHLYKQISNSTSGGSSNDNAYLGYSTPWGYFDFNRFHCHFSPRDWQRLINNNWGFRPKRLNFKLFNIQVKEVTDNNGVKTIANNLTSTVQVFTDSDYQLPYVLGSAHEGCLPPFPADVFMIPQYGYLTLNDGSQAVGRSSFYCLEYFPSQMLRTGNNFQFSYEFENVPFHSSYAHSQSLDRLMNPLIDQYLYYLSKTISGSGQNQQTLKFSVAGPSNMAVQGRNYIPGPSYRQQRVSTTVTQNNSSEFAWPGASSWALNGRNSLMNPGPAMASHKEGEDRFFPLSGSLIFGKQGTGRDNVDADKVMITNEEEIKTTNPVATESYGQVATNHQSAQAQAQTGWVQNQGILSGMVWQDRDVYLQGPIWAKIPHTDGNFHPSPLMGGFGMKHPPPQILIKNTPVPADPPTAFNKDKLNSFITQYSTGQVSVEIEWELQKENSKRWNPEIQYTSNYYKSNNVEFAVNTEGVYSEPRPIGTRYLTRNL

SEQ ID NO: 730 - protein, 736 aa, Artificial Sequence
  source: /note="Description of Artificial Sequence: Synthetic polypeptide"
MAADGYLPDWLEDNLSEGIREWWALKPGAPQPKANQQHQDNARGLVLPGYKYLGPGNGLDKGEPVNAADAAALEHDKAYDQQLKAGDNPYLKCNHADAEFQERLKEDTSFGGNLGRAVFQAKKRLLEPLGLVEEAAKTAPGKKRPVEQSPQEPDSSAGIGKSGAQPAKKRLNFGQTGDTESVPDPQPIGEPPAAPSGVGSLTMASGGGAPVADNNEGADGVGSSSGNWHCDSQWLGDRVITTSTRTWALPTYNNHLYKQISNSTSGGSSNDNAYLGYSTPWGYFDFNRFHCHFSPRDWQRLINNNWGFRPKRLNFKLFNIQVKEVTDNNGVKTIANNLTSTVQVFTDSDYQLPYVLGSAHEGCLPPFPADVFMIPQYGYLTLNDGSQAVGRSSFYCLEYFPSQMLRTGNNFQFSYEFENVPFHSSYAHSQSLDRLMNPLIDQYLYYLSKTINGSGQNQQTLKFSVAGPSNMAVQGRNYIPGPSYRQQRVSTTVTQNNNSEFAWPGASSWALNGRNSLMNPGPAMASHKEGEDRFFPLSGSLIFGKQGTGRDNVDADKVMITNEEEIKTTNPVATESYGQVATNHQSAQAQAQTGWVQNQGILPGMVWQDRDVYLQGPIWAKIPHTDGNFHPSPLMGGFGMKHPPPQILIKNTPVPADPPTAFNKDKLNSFITQYSTGQVSVEIEWELQKENSKRWNPEIQYTSNYYKSNNVEFAVNTEGVYSEPRPIGTRYLTRNL

SEQ ID NO: 731 - protein, 736 aa, Artificial Sequence; identical to SEQ ID NO: 730
  source: /note="Description of Artificial Sequence: Synthetic polypeptide"

SEQ ID NO: 732 - protein, 736 aa, Artificial Sequence
  source: /note="Description of Artificial Sequence: Synthetic polypeptide"
MAADGYLPDWLEDNLSEGIREWWALKPGAPQPKANQQHQDNARGLVLPGYKYLGPGNGLDKGEPVNAADAAALEHDKAYDQQLKAGDNPYLKCNHADAEFQERLKEDTSFGGNLGRAVFQAKKRLLEPLGLVEEAAKTAPGKKRPVEQSPQEPDSSAGIGKSGAQPAKKRLNFGQTGDTESVPDPQPIGEPPAAPSGVGSLTMASGGGAPVADNNEGADGVGSSSGNWHCDSQWLGDRVITTSTRTWALPTYNNHLYKQISNSTSGGSSNDNAYLDYSTPWGYFDFNRFHCHFSPRDWQRLINNNWGFRPKRLNFKLFNIQVKEVTDNNGVKTIANNLTSTVQVFTDSDYQLPYVLGSAHEGCLPPFPADVFMIPQYGYLTLNDGSQAVGRSSFYCLEYFPSQMLRTGNNFQFSYEFENVPFHSSYAHSQSLDRLMNPLIDQYLYYLSKTINGSGQNQQTLKFSVAGPSNMAVQGRNYIPGPSYRQQRVSTTVTQNNNSEFAWPGASSWALNGRNSLMNPGPAMASHKEGEDRFFPLSGSLIFGKQGTGRDNVDADKVMITNEEEIKTTNPVATESYGQVATNHQSAQAQAQTGWVQNQGILPGMVWQGRDVYLQGPIWAKIPHTDGNFHPSPLMGGFGMKHPPPQILIKNTPVPADPPTAFNKDKLNSFITQYSTGQVSVEIEWELQKENSKRWNPEIQYTSNYYKSNNVEFAVNTEGVYSEPRPIGTRYLTRNL

SEQ ID NO: 733 - protein, 736 aa, Artificial Sequence; identical to SEQ ID NO: 730
  source: /note="Description of Artificial Sequence: Synthetic polypeptide"

SEQ ID NO: 734 - protein, 736 aa, Artificial Sequence
  source: /note="Description of Artificial Sequence: Synthetic polypeptide"
MAADGYPPDWLEDNLSEGIREWWALKPGAPQPKANQQHQDNARGLVLPGYKYLGPGNGLDKGEPVNAADAAALEHDKAYDQQLKAGDNPHLKYNHADAEFQERLKEDTSFGGNLGRAVFQAKKRLLEPLGLVEEAAKTAPGKKRPVEQSPQEPDSSAGIGKSGAQPAKKRLNFGQTGDTESVPDPQPIGEPPAAPSGVGSLTMASGGGAPVADNNEGADGVGSSSGNWHCDSQWLGDRVITTSTRTWALPTYNNHLYKQISNSTSGGSSNDNAYFGYSTPWGYFDFNRFHCHFSPRDWQRLINNNWGFRPKRLNFKLFNIQVKEVTDNNGVKTIANNLTSTVQVFTDSDYQLPYVLGSAHEGCLPPFPADVFMIPQYGYLTLNDGSQAVGRSSFYCLEYFPSQMLRTGNNFQFSYEFENVPFHSSYAHSQSLDRLMNPLIDQYLYYLSKTINGSGQNQQTLKFSVAGPSNMAVQGRNYIPGPSYRQQRVSTTVTQNNNSEFAWPGASSWALNGRNSLMNPGPAMASHKEGEDRFFPLSGSLIFGKQGTGRDNVDADKVMITNEEEIKTTNPVATESYGQVATNHQSAQAQAQTGWVQNQGILPGMVWQDRDVYLQGPIWAKIPHTDGNFHPSPLMGGFGVKHPPPQILIKNTPVPADPPTAFNKDRLNSFITQYSTGQVSVEIEWELQKENSKRWNPEIQYTSNYYKSNNVEFAVNTEGVYSEPRPIGTRYLTRNL

SEQ ID NO: 735 - protein, 736 aa, Artificial Sequence
  source: /note="Description of Artificial Sequence: Synthetic polypeptide"
MAADGYLPDWLEDNLSEGIREWWALKPGAPQPKANQQHQDNARGLVLPGYKYLGPGNGLDKGEPVNAADAAALEHDKAYDQQLKAGDNPYLKYNHADAEFQERLKEDTSFGGNLGRAVFQAKKRLLEPLGLVEEAAKTAPGKKRPVEQSPQEPDSSAGIGKSGAQPAKKRLNFGQTGDTESVPDPQPIGEPPAAPSGVGSLTMASGGGAPVADNNEGADGVGSSSGNWHCDSQWLGDRVITTSTRTWALPTYNNHLYKQISNSTSGGSSNDNAYFGYSTPWGYFDFNRFHCHFSPRDWQRLINNNWGFRPKRLNFKLFNIQVKEVTDNNGVKTIANNLTSTVQVFTDSDYQLPYVLGSAHEGCLPPFPADVFMIPQYGYLTLNDGSQAVGRSSFYCLEYFPSQMLRTGNNFQFSYEFENVPFHSSYAHSQSLDRLMNPLIDQYLYYLSKTINGSGQNQQTLKFSVAGPSNMAVQGRNYIPGPSYRQQRVSTTVTQNNNSEFAWPGASSWALNGRNSLMNPGPAMASHKEGEDRFFPLSGSLIFGKQGTGRDNVDADKVMITNEEEIKTTNPVATESYGQVATNHQSAQAQAQTGWVQNQGILPGMVWQDRDVYLQGPIWAKIPHTDGNFHPSPLMGGFGVKHPPPQILIKNTPVPADPPTAFNKDKLNSFITQYSTGQVSVEIEWELQKENSKRWNPEIQYTSNYYKSNNVEFAVNTEGVYSEPRPIGTRYLTRNL

SEQ ID NO: 736 - protein, 736 aa, Artificial Sequence
  source: /note="Description of Artificial Sequence: Synthetic polypeptide"
MAADGYLPDWLEDNLSEGIREWWALKPGAPQPKANQQHQDNARGLVLPGYKYLGPGNGLDKGEPVNAADAAALEHDKAYDQQLKAGDNPYLKYNHADAEFQERLKEDTSFGGNLGRAVFQAKKRLLEPLGLVEEAAKTAPGKKRPVEQSPQEPDSSAGIGKSGAQPAKKRLNFGQTGDTESVPDPQPIGEPPAAPSGVGSLTMASGGGAPVADNNEGADGVGSSSGNWHCDSQWLGDRVITTSTRTWALPTYNNHLYKQISNSTSGGSSNDNAYFGYSTPWGYFDFNRFHCHFSPRDWQRLTNNNWGFRPKRLNFKLFNIQVKEVTDNNGVKTIANNLTSTVQVFTDSDYQLPYVLGSAHEGCLPPFPADVFMIPQYGYLTLNDGSQAVGRSSFYCLEYIPSQMLRTGNNFQFSYEFENVPFHSSYAHSQSLDRLMNPLIDQYLYYLSKTINGSGQNQQTLKFSVAGPSNMAVQGRNYIPGPSYRQQRVSTTVTQNNNSEFAWPGASSWALNGRNSLMNPGPAMASHKEGEDRFFPLSGSLIFGKQGTGRDNVDADKVMITNEEEIKTTNPVATESYGQVATNHQSAQAQAQTGWVQNQGILPGMVWQDRDVYLQGPIWAKIPHTDGNFHPSPLMGGFGVKHPPPQILIKNTPVPADPPTAFNKDKLNSFITQYSTGQVSVEIEWELQKENSKRWNPEIQYTSNYYKSNNVEFAVNTEGVYSEPRPIGTRYLTRNL

SEQ ID NO: 737 - protein, 736 aa, Artificial Sequence
  source: /note="Description of Artificial Sequence: Synthetic polypeptide"
MAADGYLPDWLEDNLSEGIREWWALKPGAPQPKANQQHQDNARGLVLPGYKYLGPGNGLDKGEPVNAADAAALEHDKAYDQQLKAGDNPYLKYNHADAEFQERLKEDTSFGGNLGRAVFQAKKRLLEPLGLVEEAAKTAPGKKRPVEQSPQEPDSSAGIGKSGAQPAKKRLNFGQTGDTESVPDPQPIGEPPAAPSGVGSLTMASGGGAPVADNNEGADGVGSSSGNWHCDSQWLGDRVITTSTRTWALPTYNNHLYKQISNSTSGGSSNDNAYFGYSTPWGYFDFNRFHCHFSPRDWQRLINNNWGFRPKRLNFKLFNIQVKEVTDNNGVKTIANNLTSTVQVFTDSDYQLPYVLGSAHEGCLPPFPADVFMIPQYGYLTLNDGSQAVGRSSFYCLEYFPSQMLRTGNNFQFSYEFENVPFHSSYAHSQSLDRLMNPLIDQYLYYLSKTINGSGQNQQTLKFSVAGPSNMAVQGRNYIPGPSYRQQRVSTTVTQNNNSEFAWPGASSWALNGRNSLMNPGPAMASHKEGEDRFFPLSGSLISGKQGTGRDNVDANKVMITNEEEIKTTNPVATESYGQVATNHQSAQAQAQTGWVQNQGILPGMVWQDRDVYLQGPIWAKIPHTDGNFHPSPLMGGFEMKHPPPQILIKNTPVPADPPTAFNKDKLNSFITQYSTGQVSVEIEWELQKENSKRWNPEIQYTSNYYKSNNVEFAVNTEGVYSEPRPIGTRYLTRNL

SEQ ID NO: 738 - protein, 736 aa, Artificial Sequence
  source: /note="Description of Artificial Sequence: Synthetic polypeptide"
MAADGYLPDWLEDNLSEGIREWWALKPGAPQPKANQQHQDNARGLVLPGYKYLGPGNGLDKGEPVNAADAAALEHDKAYDQQLKAGDNPYLKYNHADAEFQERLKEDTSFGGNLGRAVFQAKKRLLEPLGLVEEAAKTAPGKKRPVEQSPQEPDSSAGIGKSGAQPAKKRLNFGQTGDTESVPDPQPIGEPPAAPSGVGSLTIASGGGAPVADNNEGADGVGSSSGNWHCDSQWLGDRVITTSTRTWALPTYNNHLYKRISNSTSGGSSNDNAYFGYSTPWGYFDFNRFHCHFSPRDWQRLINNNWGFRPKRLNFKLFNIRVKEVTDNNGVKTITNNLTSTVQVFTDSDYQLPYVLGSAHEGCLPPFPADVFMIPQYGYLTLNDGSQAVGRSSFYCLEYFPSQMLRTGNNFQFSYEFENVPFHSSYAHSQSLDRLMNPLIDQYLYYLSKTINGSGQNQQTLKFSVAGPSNMAVQGRNYIPGPSYRQQRVSTTVTRNNNSEFAWPGASSWALNGRNSLMNPGPAMASHKEGEDRFFPLSGSLIFGKQGTGRDNVDADKVMITNEEEIKTTNPVATESYGQVATNHQSAQAQAQTGWVQNQGILPGMVWQDRDVYLQGPIWAKIPHTDGNFHPSPLMGGFGVKHPPPQILIKNTPVPADPPTAFNKDKLNSFITQYSTGQVSVEIEWELQKENSKRWNPEIQYTSNYYKSNNVEFAVNTEGVYSEPRPIGTRYLTRNL

SEQ ID NO: 739 - protein, 736 aa, Artificial Sequence
  source: /note="Description of Artificial Sequence: Synthetic polypeptide"
MAADGYLPDWLEDNLSEGIREWWALKPGAPQPKANQQHQDNARGLVLPGYKYLGPGNGLDKGEPVNAADAAALEHDKAYDQQLKAGDNPYLKYNHADAEFQERLKEDTSFGGNLGRAVFQAKKRLLEPLGLVEEAAKTAPGKKRPVEQSPQEPDSSAGIGKSGAQPAKKRLNFGQTGDTEPVPDPQPIGEPPAAPSGVGSLTMASGGGAPVADNNEGADGVGSSSGNWHCDSQWLGDRVITTSTRTWALPTYNNHLYKQISNSTSGGSSNDNAYFGYSTPWGYFDFNRFHCHFSPRDWQRLINNNWGFRPKRLNFKLFNIQVKEVTDNNGVKTIANNLTSTVQVFTDSDYQLPYVLGSAHEGCLPPFPAGVFMIPQYGYLTLNDGSQAVGRSSFYCLEYFPSQMLRTGNNFQFSYEFENVPFHSSYAHSQSLDRLMNPLIDQYLYYLSKTINGSGQNQQTLKFSVAGPSNMAVQGRNYIPGPSYRQQRVSTTATQNNNSEFAWPGASSWALNGRNSLMNPGPAMASHKEGEDRFFPLSGSLIFGKQGTGRDNVDADKVMITNEEEIKTTNPVATESYGQVATNHQSAQAQAQTGWVQNQGILPGMVWQDRDVYLQGPIWAKIPHTDGNFHPSPLMGGFGMKHPPPQILIKNTPVPADPPTAFNKDKLNSFITQYSTGQVSVEIEWELQKENSKRWNPEIQYTSNYYKSNNVEFAVNTEGVYSEPRPIGTRYLTRNL

SEQ ID NO: 740 - protein, 736 aa, Artificial Sequence
  source: /note="Description of Artificial Sequence: Synthetic polypeptide"
MAADGYLPDWLEDNLSEGIREWWALKPGAPQPKANQQHQDNARGLVLPGYKYLGPGNGLDKGEPVNAADAAALEHDKAYDQQLKAGDNPYLKYNHADAGFQERLKEDTSFGGNLGRAVFQAKKRLLEPLGLVEEAAKTAPGKKRPVEQSPQEPDSSAGIGKSGAQPAKKRLNFGQTGDTESVPVPQPIGEPPAAPSGVGSLTMASGGGAPVADNNEGADGVGSSSGNWHCDSQWLGDRVITTSTRTWALPTYNNHLYKQISNSTSGGSSNDNAYFGYSTPWGYFDFNRFHCHFSPRDWQRLINNNWGFRPKRLNFKLFNIQVKEVTDNNGVKTIANNLTSTVQVFTDSDYQLPYVLGSAHEGCLPPFPADVFMIPQYGYLTLNDGSQAVGRSSFYCLEYFPSQMLRTGNNFQFSYEFENVPFHSSYAHSQSLDRLMNPLIDQYLYYLSKTINGSGQNQQTLKFSVAGPSNMAVQGRNYIPGPSYRQQRVSTTVTQNNNSEFAWPGASSWALNGRNSLMNPGPAMASHKEGEDRFFPLSGSLIFGKQGAGRDNVDADKVMITNEEEIKTTNPVATESYGQVATNHQSAQAQAQTGWVQNQGILPGMVWQDRDVYLQGPIWAKIPHTDGNFHPSPLMGGFGMKHPPPQILIKNTPVPADPPTAFNKDKLNSFITQYSTGQVSVEIEWELQKENSKRWNPEIQYTSNYYKSNNVEFAVNTEGVYSEPRPIGTRYLTRNL

SEQ ID NO: 741 - protein, 736 aa, Artificial Sequence
  source: /note="Description of Artificial Sequence: Synthetic polypeptide"
  MOD_RES (126)..(126): Any amino acid
MAADGYLPDWLEDNLSEGIRERWALKPGAPQPKANQQHQDNARGLVLPGYKYLGPGNGLDKGEPVNAADAAALEHDKAYDQQLKAGDNPYLKYNHADAEFQERLKEDTSFGGNLGRAVFQAKKRLXEPLGLVEEAAKTAPGKKRPVEQSPQEPDSSAGIGKSGAQPAKKRLNFGQTGDTESVPDPQPIGEPPAAPSGVGSLTMASGGGAPVADNNEGADGVGSSSGNWHCDSQWLGDRVITTSTRTWALPTYNNHLYKQISNSTSGGSSNDNAYFGYSTPWGYFDFNRFHCHFSPRDWQRLINNNWGFRPKRLNFKLFNIQVKEVTDNNGVKTIANNLTSTVQVFTDSDYQLPYVLGSAHEGCLPPFPADVFMIPQYGYLTLNDGSQAVGRSSFYCLEYFPSQMLRTGNNFQFSYEFENVPFHSSYAHSQSPDRLMNPLIDQYLYYLSKTINGSGQNQQTLKFSVAGPSNMAVQGRNYIPGPSYRQQRVSTTVTQNNNSEFAWPGASSWALNGRNSLMNPGPAMASHKEGEDRFFPLSGSLIFGKQGTGRDNVDADKVMITNEEEIKTTNPVATESYGQVATNHQSAQAQAQTGWVQNQGILPGMVWQDRDVYLQGPIWAKIPHTDGNFHPSPLMGGFGVKHPPPQILIKNTPVPADPPTAFNKDKLNSFITQYSTGQVSVEIEWELQKENSKRWNPEIQYTSNYYKSNNVEFAVNTEGVYSEPRPIGTRYLTRNL

SEQ ID NO: 742 - protein, 736 aa, Artificial Sequence
  source: /note="Description of Artificial Sequence: Synthetic polypeptide"
MAADGYLPDWLEDNLSEGIREWWALKPGAPQPKANQQHQDNARGLVLPGYKYLGPGNGLDKGEPVNAADAAALEHDKAYDQQLKAGDNPYLKYNHADAEFQERLKEDTSFGGNLGRAVFQAKKRLLEPLGLVEEAAKTAPGKKRPVEQSPQEPDSSAGIGKSGAQPAKKRLNFGQTGDTESVPDPQPIGEPPAAPSGVGSLTMASGGGAPVADNNEGADGVGSSSGNWHCDSQWLGDRVITTSTRTWALPTYNNHLYKQISNSTSGGSSNDNAYLGYSTPWGYFDFNRFHCHFSPRDWQRLINNNWGFRPKRLNFKLFNIQVKEVTDNNGVKTIANNLTSTVQVFTDSDYQLPYVLGSAHEGCLPPFPADVFMIPQYGYLTLNDGSQAVGRSSFYCLEYFPSQMLRTGNNFQFSYEFENVPFHSSYAHSQSLDRLMNPLIDQYLYYLSKTINGSGQNQQTLKFSVAGPSNMAVQGRNYIPGPSYRQQRVSTTVTQNNNSEFAWPGASSWALNGRNSLMNPGPAMASHKEGEDRFFPLSGSLIFGKQGTGRDNVDADKVMITNEEEIKTTNPVATESYGQVATNHQSAQAQAQTGWVQNQGILPGMVWQDRDVYLQGPIWAKIPHTDGNFHPSPLMGGFGMKHPPPQILIKNTPVPADPPTAFNKDKLNSFITQYSTGQVSVEIEWELQKENSKRWNPEIQYTSNYYKSNNVEFAVNTEGVYSEPRPIGTRYLTRNL

SEQ ID NO: 743 - protein, 736 aa, Artificial Sequence
  source: /note="Description of Artificial Sequence: Synthetic polypeptide"
MAADGYLPDWLEDNLSEGIREWWALKPGAPQPKANQQHQDNARGLVLPGYKYLGPGNGLDKGEPVNAADAAALEHDKAYDQQLKAGDNPYLKYNHADAEFQERLKEDTSFGGNLGRAVFQAKKRLLEPLGLVEEAAKTAPGKKRPVEQSPQEPDSSAGIGKSGAQPAKKRLNFGQTGDTESVPDPQPIGEPPAAPSGVGSLTMASGGGAPVADNNEGADGVGSSSGNWHCDSQWLGDRVITTSTRTWALPTYNNHLYKQISNSTSGGSSNDNAYFGYSTPWGYFDFNRFHCHFSPRDWQRLINNNWGFRPKRLNFKLFNIQVKEVTDNNGVKTIANNLTSTVQVFTDSDYQLPYVLGSAHEGCLPPFPADVFMIPQYGYLTLNDGSQAVGRSSFYCLEYFPSQMLRTGNNFQFSYEFENVPFHSSYAHSQSLDRLMNPLIDQYLYYLSKTINGSGQNQQTLKFSVAGPSNMAVQGRNYIPGPSYRQQRVSTTVTQNNNSEFAWPGASSWALNGRNSLMNPGPAMASHKEGEDRFFPLSGSLIFGKQGTGRDNVDADKVMITNEEEIKTTNPVATESYGQVATNHQSAQAQAQTGWVQNQGILPGMVWQDRDVYLQGPIWAKIPHTDGNFHPSPLMGGFGMKHPPPQILIKNTPVPADPPTAFNKDKLDSFITQYSTGQVSVEIEWELQKENSKRWNPVIQYTSNYYKSNNVEFAVNTEGVYSEPRPIGTRYLTRNL

SEQ ID NO: 744 - protein, 736 aa, Artificial Sequence
  source: /note="Description of Artificial Sequence: Synthetic polypeptide"
MAADGYLPDWLEDNLSEGIREWWDLKPGAPKPKANQQKQDDGRGLVLPGYKYLGPFNGLDKGEPVNAADAAALEHDKAYDQQLKAGDNPYLRYNHADAEFQERLQEDTSFGGNLGRAVFQAKKRVLEPLGLVEEGAKTAPGKKRPVEQSPQEPDSSSGIGKTGQQPAKKRLNFGQTGDSESVPDPQPLGEPPATPAAVGPTTMASGGGAPMADNNEGVDGVGNASGNWHCDSTWLGDRVITTSTRTWALPTYNNHLYKQISSASTGASNDNHYFGYSTPWGYFDFNRFHCHFSPRDWQRLINNNWGFRPKRLNFKLFNIQVKEVTTNDGVTTIANNLTSTVQVFSDSEYQLPYVLGSAHQGCLPPFPADVFMIPQYGYLTLNNGSQAVGRSSFYCLEYFPSQMLRTGNNFTFSYTFEEVPFHSSYAHSQSLDRLMNPLIDQYLYYLNRTQNQSGSAQNKDLLFSRGSPAGMSVQPKNWLPGPCYRQQRVSKTKTDNNNSNFTWTGASKYNLNGRESIINPGTAMASHKDDEDKFFPMSGVMIFGKESAGASNTALDNVMITDEEEIKATNPVATERFGTVAVNFQSSSTDPATGDVHAMGALPGMVWQDRDVYLQGPIWAKIPHTDGHFHPSPLMGGFGLKNPPPQILIKNTPVPANPPAEFSATKLASFITQYSTGQVSVEIEWELQKENSKRWNPEVQYTSNYAKSANVDFTVDNNGLYTEPRPIGTRYLTRPL

SEQ ID NO: 745 - protein, 736 aa, Artificial Sequence
  source: /note="Description of Artificial Sequence: Synthetic polypeptide"
MAADGYLPDWLEDNLSEGIREWWDLKPGAPKPKANQQKQDDGRGLVLPGYKYLGPFNGLDKGEPVNAADAAALEHDKAYDQQLKAGDNPYLRYNHADAEFQERLQEDTSFGGNLGRAVFQAKKRVLEPLGLVEEGAKTAPGKRRPVEQSPQEPDSSSGIGKTGQQPAKKRLNFGQTGDSESVPDPQPLGEPPATPAAVGPTTMASGGGAPMADNNEGADGVGNASGNWHCDSTWLGDRVITTSTRTWALPTYNNHLYKQISSASTGASNDNHYFGYSTPWGYFDFNRFHCHFSPRDWQRLINNNWGFRPKRLNFKLFNIQVKEVTTNDGVTTIANNLTSTVQVFSDSEYQLPYVLGSAHQGCLPPFPADVFMIPQYGYLTLNNGSQAVGRSSFYCLEYFPSQMLRTGNNFTFSYTFEEVPFHSSYAHSQSLDRLMNPLIDQYLYYLNRTQNQSGSAQNKDLLFSRGSPAGMSVQPKNWLPGPCYRQQRVSKTKTDNNNSNFTWTGASKYNLNGRESIINPGTAMASHKDDEDKFFPMSGVMIFGKESAGASNTALDNVMITDEEEIKATNPVATERFGTVAVNFQSSSTDPATGDVHAMGALPGMVWQDRDVYLQGPIWAKIPHTDGHFHPSPLMGGFGLKNPPPQILIKNTPVPANPPAEFSATKFASFITQYSTGQVSVEIEWELQKENSKRWNPEVQYTSNYAKSANVDFTVDNNGLYTEPRPIGTRYLTRPL

SEQ ID NO: 746 - protein, 736 aa, Artificial Sequence
  source: /note="Description of Artificial Sequence: Synthetic polypeptide"
MAADGYLPDWLEDNLSEGIREWWDLKPGAPKPKANQQKQDDGRGLVLPGYKYLGPFNGLDKGEPVNAADAAALEHDKAYDQQLKAGDNPYPRYNHADAEFQERLQEDTSFGGNLGRAVFQAKKRVLEPLGLVGEGAKTAPGKKRPVEQSPQEPDSSSGIGKTGQQPAKKRLNFGQTGDSESVPDPQPLGEPPATPAAVGPTTMASGGGAPMADNNEGADGVGNASGNWHCDSTWLGDRVITTSTRTWALPTYNNHLYKQISSASTGASNDNHYFGYSTPWGYFDFNRFHCHFSPRDWQRLINNNWGFRPKRLNFKLFNIQVKEVTTNDGVTTIANNLTSTVQVFSDSEYQLPYVLGSAHQGCLPPFPADVFMIPQYGYLTLNNGSQAVGRSSFYCLEYFPSQMLRTGNNFTFSYTFEEVPFHSSYAHSQSLDRLMNPPIDQYLYYLNRTQNQSGSAQNKDLLFSRGSPAGMSVQPKNWLPGPCYRQQRVSKTKTDNNNSNFTWTGASKYNLNGRESIINPGTAMASHKDDEDKFFPMSGVMIFGKESAGASNTALDNVMITDEEEIKATNPVATERFGTVAVNFQSSSTDPATGDVHAMGALPGMVWQDRDVYLQGPIWAKIPHTDGHFHPSPLMGGFGLKNPPPQILIKNTPVPANPPAEFSATKFASFITQYSTGQVSVEIEWELQKENSKRWNPEVQYTSNYAKSANVDFTVDNNGLYTEPRPIGTRYLTRPL

SEQ ID NO: 747 - protein, 736 aa, Artificial Sequence
  source: /note="Description of Artificial Sequence: Synthetic polypeptide"
MAADGYLPDWLEDNLSEGIREWWDLKPGAPKPKANQQKQDDGRGLVLPGYKYLGPFNGLDKGEPVNAADAAALEHDKAYDQQLKAGDNPYLRYNHADAEFQERLQEDTSFGGNLGRAVFQAKKRVLEPLGLVEEGAKTAPGKKRPVEQSPQEPDSSSGIGKTGQQPAKKRLNFGQTGDSESVPDPRPLGEPPATPAAVGPTTMASGGGAPMADNNEGADGVGNASGNWHCDSTWLGDRVITTSTRTWALPTYNNHLYKQISSASTGASNDNHYFGYSTPWGYFDFNRFHCHFSPRDWQRLINNNWGFRPKRLNFKLFNIQVKEVTTNDGVTTIANNLTSTVQVFSDSEYQLPYVLGSAHQGCLPPFPADVFMIPQYGYLTLNNGSQAVGRSSFYCLEYFPSQMLRTGNNFTFSYTFEEVPFHSSYAHSQSLDRLMNPLIDQYLYYLNRTQNQSGSAQNKDLLFSRGPPAGMSVQPKNWLPGPCYRQQRVSKTKTDNNNSNFTWTGASKYNLNGRESIINPGTAMASHKDDEDKFFPMSGVMIFGKESAGASNTALDNVMITDEEEIKATNPVATERFGTVAVNFQSSSTDPATGDVHAMGALPGMVWQDRDVYLQGPIWAKIPHTDGHFHPSPLMGGFGLKNPPPQILIKNTPVPANPPAEFSATKFASFITQYSTGQVSVEIEWELQKENSKRWNPEVQYTSNYAKSANVDFTVDNNGLYTEPRPIGTRYLTRPL

SEQ ID NO: 748 - protein, 736 aa, Artificial Sequence
  source: /note="Description of Artificial Sequence: Synthetic polypeptide"
MAADGYLPDWLEDNLSEGIREWWDLKPGAPKPKANQQKQDDGRGLVLPGYKYLGPFNGLDKGEPVNAADAAALEHDKAYDQQLKAGDNPYLRYNHADAEFQERLQEDTSFGGNLGRAVFQAKKRVLEPLGLVEEGAKTAPGKKRPVEQSPQEPDSSSGIGKTGQQPAKKRLNFGQTGGSESVPDPQPLGEPPATPAAVGPTTMASGGGAPMADNNEGADGVGNASGNWHCDSTWLGDRVITTSTRTWALPTYNNHLYKQISSASTGASNDNHYFGYSTPWGYFDFNRFHCHFSPRDWQRLINNNWGFRPKRLNFKLFNIQVKEVTTNDGVTTIANNLTSTVQVFSDSEYQLPYVLGSAHQGCLPPFPADVFMIPQYGYLTLNNGSQAVGRSSFYCLEYFPSQMLRTGNNFTFSYTFEEVPFHSSYAHSQSLDRLMNPPIDQYLYYLNRTQNQSGSAQNKDLLFSRGSPAGMSVQPKNWLPGPCYRQQRVSKTKTDNNNSNFTWTGASKYNLNGRESIINPGTAMASHKDDEDKFFPMSGVMIFGKESAGASNTALDNVMITDEEEIKATNPVATERFGTVAVNFQSSSTDPATGDVHAMGALPGMVWQDRDVYLQGPIWAKIPHTDGHFHPSPLMGGFGLKNPPPQILIKNTPVPANPPAEFSATKFASFITQYSTGQVSVEIEWELQKENSKRWNPEVQYTSNYAKSANVDFTVDNNGLYTEPRPIGTRYLTRPL

SEQ ID NO: 749 - protein, 736 aa, Artificial Sequence
  source: /note="Description of Artificial Sequence: Synthetic polypeptide"
MAADGYLPDWLEDNLSEGIREWWDLKPGAPKPKANQQKQDDGRGLVLPGYKYLGPFNGLDKGEPVNAADAAALEHDKAYDQQLKAGDNPYLRYNHADAEFQERLQEDTSFGGNLGRAVFQAKKRVLEPLGLVEEGAKTAPGKKRPVEQSPQEPDSSSGIGKTGQQPAKKRLNFGQTGDSESVPDPQPLGEPPATPAAVGPTTMASGGGAPMADNNEGADGVGNASGNWHCDSTWLGDRVITTSTRTWALPTYNNHLYKQISSASTGASNDNHYFGYSTPWGYFDFNRFHCHFSPRDWQRLINNNWGFRPKRLNFKLFNIQVKEVTTNDGVTTIANNLTSTVQVFSDSEYQLPYVLGSAHQGCLPPFPADVFMIPQYGYLTLNNGSQAVGRSSFYCLEYFPSQMLRTGNNFTFSYTFEEVPFHSSYAHSQSLDRLMNPLIDQYLYYLNRTQNQSGSAQNKDLLFSRGSPAGMSVQPKNWLPGPCYRQQRVSKTKTDNNNSNFTWTGASKYNLNGRESIINPGTAVASHKDDEDKFFPMSGVMIFGKESAGASNTALDNVMITDEEEIKATNPVATERFGTVAVNFQSSSTDPATGDVHAMGALPGMVWQDRDVYLQGPIWAKIPHTDGHFHPSPLMGGFGLKNPPPQILIKNTPVPANPPAEFSATKFASFITQYSTGQVSVEIEWELQKENSKRWNPEVQYTSNYAKSANVDFTVDNNGLYTEPRPIGTRYLTRPL

SEQ ID NO: 750 - protein, 736 aa, Artificial Sequence
  source: /note="Description of Artificial Sequence: Synthetic polypeptide"
MAADGYLPDWLEDNLSEGIREWWDLKPGAPKPKANQQKQDDGRGLVLPGYKYLGPFNGLDKGEPVNAADAAALEHDKAYDQQLKAGDNPYLRYNHADAEFQERLQEDTSFGGNLGRAVFQAKKRVLEPLGLVEEGAKTAPGKKRPVEQSPQEPDSSSGIGKTGQQPAKKRLNFGQTGDSESVPDPQPLGEPPATPAAVGPTTMASGGGAPMADNNEGADGVGNASGNWHCDSTWLGDRVITTSTRTWALPTYNNHLYKQISSASTGASNDNHYFGYSTPWGYFDFNRFHCHFSPRDWQQLINNNWGFRPKRLNFKLFNIQVKEVTTNDGVTTIANNLTSTVQVFSDSEYQLPYVLGSAHQGCLPPFPADVFMIPQYGYLTLNNGSQAVGRSSFYCLEYFPSQMLRTGNNFTFSYTFEEVPFHSSYAHSQSLDRLMNPLIDQYLYYLNRTQNQSGSAQNKDLLFSRGSPAGMSVQPKNWLPGPCYRQQRVSKTKTDNNNSNFTWTGASKYNLNGRESIINPGTAMASHKDDEDKFFPMSGVMIFGKESAGASNTALDNVMITDEEEIKATNPVATERFGTVAVNFQSTSTDPATGDVHAMGALPGMVWQDRDVYLQGPIWAKIPHTDGHFHPSPLMGGFGLKNPPPQILIKNTPVPANPPAEFSATKFASFITQYSTGQVSVEIEWELQKENSKRWNPEVQYTSNYAKSADVDFTVDNNGLYTEPRPIGTRYLTRPL

SEQ ID NO: 751 - protein, 736 aa, Artificial Sequence
  source: /note="Description of Artificial Sequence: Synthetic polypeptide"
MAADGYLPDWLEDNLSEGIREWWDLKPGAPKPKANQQKQDDGRGLVLPGYKYLGPFNGLDKGEPVNAADAAALEHDKAYDQQLKAGDNPYLRYNHADAEFQERLQEDTSFGGNLGRAVFQAKKRVLEPLGLVEEGAKTAPGKKRPVEQSPQEPDSSSGIGKTGQQPAKKRLNFGQTGDSESVPDPQPLGEPPATPAAVGPTTMASGGGAPMADNNEGADGVGNASGNWHCDSTWLGDRVITTSTRTWALPTYNNHLYKQISSASTGASNDNHYFGYSTPWGYFDFNRFHCHFSPRDWQRLINNNWGFRPKRLNFKLFNIQVKEVTTNDGVTTIANNLTSTVQVFSDSEYQPPYVLGSAHQGCLPPFPADVFMIPQYGHLTLNNGSQAVGRSSFYCLEYFPSQMLRTGNNFTFSYTFEEVPFHSSYAHSQSLDRLTNPLIDQYLYYLNRTQNQSGSAQNKDLLFSRGSPAGMSVQPKNWLPGPCYRQQRVSKTKTDNNNSNFTWTGASKYNLNGRESIINPGTAMASHKDDEDKFFPMSGVMIFGKESAGASNTALDNVMITDEEEIKATNPVATERFGTVAVNFQSSSTDPATGDVHAMGALPGMVWQDRDVYLQGPIWAKIPHTDGHFHPSPLMGGFGLKNPPPQILIKNTPVPANPPAEFSATKFASFITQYSTGQVSVEIEWELQKENSKRWNPEVQYTSNYAKSANVDFTVDNNGLYTEPRPIGTRYLTRPL

SEQ ID NO: 752 - protein, 736 aa, Artificial Sequence
  source: /note="Description of Artificial Sequence: Synthetic polypeptide"
MAADGYLPDWLEDNLSEGIREWWDLKPGAPKPKANQQEQDDGRGLVLPGYKYLGPFNGLDKGEPVNAADAAALEHDKAYDQQLKAGDNPYLRYNHADAEFQERLQEDTSFGGNLGRAVFQAKKRVLEPLGLVEEGAKTAPGKKRPVEQSPQEPDSSSGIGKTGQQPAKKRLNFGQTGDSESVPDPQPLGEPPATPAAVGPTTMASGGGAPMADNNEGADGVGNASGNWHCDSTWLGDRVITTSTRTWALPTYNNHLYKQISSASTGASNDNHYFGYSTPWGYFDFNRFHCHFSPRDWQRLINNNWGFRPKRLNFKLFNIQVKEVTTNDGVTTIANNLTSTVQVFSDSEYQLPYVLGSAHQGCLPPFPADVFMIPQYGYLTLNNGSQAVGRSSFYCLEYFPSQMLRTGNNFTFSYTFEEVPFHSSYAHSQSLDRLMNPLIDQYLYYLNRTQNQSGSAQNKDLLFSRGSPAGMSVQPKNWLPGPCYRQQRVSKTKTDNNNSNFTWTGASKYNLNGRESIINPGTAMASHKDDEDKFFPMSGVMIFGKESAGASNTALDNVMITDEEEIKATNPVATERFGTVAVNFQSSSTDPATGDVHATGTLPGMVWQDRDVYLQGPIWAKIPHTDGHFHPSPLMGGFGLKNPPPQILIKTTPVPANPPAEFSATKFASFITQYSTGQVSVEIEWELQKENSKRWNPEVQYTSNYAKSANVDFTVDDNGLYTEPRPIGTRYLTRPL

SEQ ID NO: 753 - protein, 736 aa, Artificial Sequence
  source: /note="Description of Artificial Sequence: Synthetic polypeptide"
MAADGYLPDWLEDNLSEGIREWWDLKPGAPKPKANQQKQDDGRGLVLPGYKYLGPFNGLDKGEPVNAADAAALEHDKAYDQQLKAGDNPYLRYNHADAEFQERLQEDTSFGGNLGRAVFQAKKRVLEPLGLVEEGAKTAPGKKRPVEQSLQEPDSSSGIGKTGQQPAKKRLNFGQTGDSESVPDPQPLGEPPATPAAVGPTTMASGGGAPMADNNEGADGVGNASGNWHCDSTWLGDRVITTSTRTWALPTYNNHLYKQISSASTGASNDNHYFGYSTPWGYFDFNRFHCHFSPRDWQRLINNNWGFRPKRLNFKLFNIQVKEVTTNDGVTTIANNLTSTVQVFSDSEYQLPYVLGSAHQGCLPPFPADVFMIPQYGYLTLNNGSQAVGRSSFYCLEYFPSQMLRTGNNFTFSYTFEEVPFHSSYAHSQSLDRLMNPLIDQYLYYLNRTQNQSGSAQNKDLLFSRGSPAGMSVQPKNWLPGPCYRQQRVSKTKTDNDNSNFTWTGASKYNLNGRESIINPGTAMASHKDDEDKFFPMSGVMIFGKESAGASNTALDNVMITDEEEIKATNPVATERFGTVAVNFQSSSTDPATGDVHAMGALPGMVWQDRDVYLQGPIWAKIPHTDGHFHPSPLMGGFGLKNPPPQILIKNTPVPANPPAEFSATKFASFITQYSTGQVSVEIEWELQKENSKRWNPEVQYTSNYAKSANVDFTVDNNGLYTEPRPIGTRYLTRPL

SEQ ID NO: 754 - protein, 736 aa, Artificial Sequence
  source: /note="Description of Artificial Sequence: Synthetic polypeptide"
MAADGYLPDWLEDNLSEGIREWWDLKPGAPKPKANQQKQDDGRGLVLPGYKYLGPFNGLDKGEPVNAADAAALEHDKAYDQQLKAGDNPYLRYNHADAEFQERLQEDTSFGGNLGRAVFQAKKRVLEPLGLVEEGAKTAPGKKRPVEQSPQEPDSSSGIGKTGQQPAKKRLNFGQTGDSESVPDPQPLGEPPATPAAVGPTTMASGGGAPMADNNEGADGVGNASGNWHCDSTWLGDRVITTSTRTWALPTYNNHLYKQISSASTGASNDNHYFGYSTPWGYFDFNRFHCHFSPRDWQRLINNNWGFRPKRLNFKLFNIQVKEVTTNDGVTTIANNLTSTVQVFSDSEYQLPYVLGSAHQGCLPPFPADVFMIPQYGYLTLNNGSQAVGRSSFYCLEYFPSQMLRTGNNFTFSYTFEEAPFHSSYAHSQSLDRLMNPLIDQYLYYLNRTQNQSGSAQNKDLLFSRGSPAGMSVQPKNWLPGPCYRQQRVSKTKTDNNNSNFTWTGASKYNLNGRESIINPGTAMASHKDDEDKFFPMSGVMIFGKESAGASNTALDNVMITDEEEIKATNPVATERFGTVAVNFQSSSTDPATGDVHAMGALPGMVWQDRDVYLQGPIWAKIPHTDGHFHPSPLMGGFGLKNPPPQILIKNTPVPANPPAEFSATKFASFITQYSTGQVSVEIEWELQKENSKRWNPEVQYTSNYAKSANVDFTVDNNGLYTEPRPVGTRYLTRPL

SEQ ID NO: 755 - protein, 736 aa, Artificial Sequence
  source: /note="Description of Artificial Sequence: Synthetic polypeptide"
MAADGYLPDWLEDNLSEGIREWWDLKPGAPKPKANQQKQDDGRGLVLPGYKYLGPFNGLDKGEPVNAADAAALEHDKAYDQQLKAGDNPYLRYNHADAEFQERLQENTSFGGNLGRAVFQAKKRVLEPLGLVEEGAKTAPGKKRPVEQSPQEPDSSSGIGKTGQQPAKKRLNFGQTGDSESVPDPQPLGEPPATPAAVGPTTMASGGGAPMADNNEGADGVGNASGNWHCDSTWLGDRVITTSTRTWALPTYNNHLYKQISSASTGASNDNHYFGYSTPWGYFDFNRFHCHFPPRDWQRLINNNWGFRPKRLNFKLFNIQVKEVTSNDGVTTIANNLTSTVQVFSDSEYQLPYVLGSAHQGCLPPFPADVFMIPQYGYLTLNNGSQAVGRSSFYCLEYFPSQMLRTGNNFTFSYTFEEVPFHSSYAHSQSLDRLMNPLIDQYLYYLNRTQNQSGSAQNKDLLFSRGSPAGMSVQPKNWLPGPCYRQQRVSKTKTDNNNSNFTWTGASKYNLNGRESIINPGTAMASHKDDEDKFFPMSGVMIFGKESAGASNTALDNVMITDEEEIKATNPVATERFGTVAVNFQSSSTDPATGDVHAMGALPGMVWQDRDVYLQGPIWAKIPHTDGHFHPSPLMGGFGLKNPPPQILIKNTPVPANPPAEFSATKFASFITQYSTGQVSVEIEWELQKENSKRWNPEVQYTSNYAKSANVDFTVDNNGLYTEPRPIGTRYLTRPL

SEQ ID NO: 756 - protein, 736 aa, Artificial Sequence
  source: /note="Description of Artificial Sequence: Synthetic polypeptide"
MAADGYLPDWLEDNLSEGIREWWDLKPGAPKPKANQQKQDDGRGLVLPGYKYLGPFNGLDKGEPVNAADAAALEHDKAYDQQLKAGDNPYLRYNHADAEFQERLQEDTSFGGNLGRAVFQAKKRVLEPLGLVEEGAKTAPGKKRPVEQSPQEPDSSSGIGKTGQQPAKKRLNFGQTGDSESVPDPQPLGEPPATPAAVGPTTMASGGGAPMADNNEGADGVGNASGNWHCDSTWLGDRVITTSTRTWALPTYNNHLYKQISSASTGASNDNHYFGYSTPWGYFDFNRFHCHFSPRDWQRLINNNWGFRPKRLNFKLFNIQVKEVTTNDGVTTIANNLTSTVQVFSDSEYQLPYVLGSAHQGCLPPFPADVFMIPQYGYLTLNNGSQAVGRSSFYCLEYFPSQMLRTGNNFTFSYTFEEVPFHSSYAHSQSLDRLMNPLIDQYLYYLNRTQNQSGSAQNKDLLFSRGSPAGTSVQPKNWLPGPCYRQQRVSKTKTDNNNSNFTWTGASKYNLNGRESIINPGTAMASHKDDEDKFFPMSGVMIFGKESAGASNTALDNVMITDEEEIKATNPVATERFGTVAVNFQSSSTDPATGDVHAMGALPGMVWQDRDVYLQGPIWAKIPHTDGHFHPSPLMGGFGLKNPPPQILIKNTPVPANPPAEFSATKFASFITQYSTGQVSVEIEWELQKENSKRWNPEVQYTSNYAKSANVDFTVDNNGLYTGPRPIGTRYLTRPL

SEQ ID NO: 757 - protein, 736 aa, Artificial Sequence
  source: /note="Description of Artificial Sequence: Synthetic polypeptide"
MAADGYLPDWLEDNLSEGIREWWDLKPGAPKPKANQQKQDDGRGLVLPGYKYLGPFNGLDKGEPVNAADAAALEHDKAYDQQLKAGDNPYLRYNHADAEFQERLQEDTSFGGNLGRAVFQAKKRVLEPLGLVEEGAKTAPGKKRPVEQSPQEPDSSSGIGKTGQQPAKKRLNFGQTGDSESVPDPQPLGEPPATPAAVGPTTMASGGGAPMADNNEGADGVGNAPGNWHCDSTWLGDRVITTSTRTWALPTYNNHLYKQISSASTGASNDNHYFGYSTPWGYFDFNRFHCHFSPRDWQRLINNNWGFRPKRLNFKLFNIQVKEVTTNDGVTTIANNLTSTVQVFSDSEYQLPYVLGSAHQGCLPPFPADVFMIPQYGYLTLNNGSQAVGRSSFYCLEYFPSQMLRTGNNFTFSYTFEEVPFHSSYAHSQSLDRLMNPLIDQYLYYLNRTQNQSGSAQNKDLLFSRGSPAGMSVQPKNWLPGPCYRQQRVSKTKTDNNNSNFTWTGASKYNLNGRESIINPGTAMASHKDDEDKFFPMSGVMIFGKESAGASNTALDNVMITGEEEIKATNPVATERFGTVAVNFQSSSTDPATGDVHAMGALPGMVWQDRDVYLQGPIWAKIPHTDGHFHPSPLMGGFGLKNPPPQILIKNTPVPANPPAEFSATKFASFITQYSTGQVSVEIEWELQKENSKRWNPEVQYTSNYAKSANVDFTVDNNGLYTEPRPIGTRYLTRPL

SEQ ID NO: 758 - protein, 736 aa, Artificial Sequence
  source: /note="Description of Artificial Sequence: Synthetic polypeptide"
MAADGYLPDWLEDNLSEGIREWWDLKPGAPKPKANQQKQDDGRGLVLPGYKYLGPFNRLDKGEPVNAADAAALEHDKAYDQQLKAGDNPYLRYNHADAEFQERLQEDTSFGGNLGRAVFQAKKRVLEPLGLVEEGAKTAPGRKRPVEQSPQEPDSSSGIGKTGQQPAKKRLNFGQTGDSESVPDPQPLGEPPATPAAVGPTTMASGGGAPMADNNEGADGVGNASGNWHCDSTWLGDRVITTSTRTWALPTYNNHLYKQISSASTGASNDNHYFGYSTPWGYFDFNRFHCHFSPRDWQRLINNNWGFRPKRLNFKLFNIQVKEVTTNDGVTTIANNLTSTVQVFSDSEYQLPYVLGSAHQGCLPPFPADVFMIPQYGYLTLNNGGQAVGRSSFYCLEYFPSQMLRTGNNFTFSYTFEEVPFHSSYAHSQSLDRLMNPLIDQYLYYLNRTQNQSGSAQNKDLLFSRGSPAGMSVQPKNWLPGPCYRQQRVSKTKTDNNNSNFTWTGASKYSLNGRESIINPGTAMASHKDDEDKFFPMGGVMIFGKESAGASNTALDNAMITDEEEIKATNPVATERFGTVAVNFQSSSTDPATGDVHAMGALPGMVWQDRDVYLQGPIWAKIPHTDGHFHPSPLMGGFGLKNPPPQILIKNTPVPANPPAEFSATKFASFITQYSTGQVSVEIEWELQKENSKRWNPEVQYTSNYAKSANVDFTVDNNGLYTEPRPIGTRYLTRPL

SEQ ID NO: 759 - protein, 736 aa, Artificial Sequence
  source: /note="Description of Artificial Sequence: Synthetic polypeptide"
MAADGYLPDWLEDNLSEGIREWWDLKPGAPKPKANQQKQDDGRGLVLPGYKYLGPFNGLDKGEPVNAADAAALEHDKAYDQQLKAGDNPYLRYNHADAEFQERLQEDTSFGGNLGRAVFQAKKRVLEPLGLVEEGAKTAPGKKRPVEQSPQEPDSSSGIGKTGQQPAKKRLNFGQTGDSESVPDPQPLGEPPATPAAVGPTTMASGGGAPMADNNEGADGVGNASGNWHCDSTWLGGRVITTSTRTWALPTYNNHLYKQISSASTGASNDNHYFGYSTPWGYFDFNRFHCHFSPRDWQRLINNNWGFRPKRLNFKLFNIQVKEVTTNDGVTTIANNLTSTVQVFSDSEYQLPYVLGSAHQGCLPPFPADVFMIPQYGYLTLNNGSQAVGRSSFYCLEYFPSQMLRTGNNSTFSYTFEEVPFHSSYAHSQSLDRLMNPLIDQYLYYLNRTQNQSGSAQNKDLLFSRGSPAGMSVQPKNWLPGPCYRQQRVSKTKTDNNNSNFTWTGASKYNLNGRESIINPGTAMASHKDDEDKFFPMSGVMIFGKESAGASNTALDNVMITDEEEIKATNPVATERFGTVAVNFQSSSTDPATGDVHAMGTLPGMVWQDRDVYLQGPIWAKIPHTDGHFHPSPLMGGFGLKNPPPQILIKNTPVPANPPAEFSATKFASFITQYSTGQVSVEIEWELQKENSKRWNPEVQYTSNYAKSANVDFTVDNNGLYTEPRPIGTRYLTRPL

SEQ ID NO: 760 - protein, 736 aa, Artificial Sequence
  source: /note="Description of Artificial Sequence: Synthetic polypeptide"
MAADGYLPDWLEDNLSEGIREWWDLKPGAPKPKANQQKQDDGRGLVLPGYKYLGPFNGLDKGEPVSAADAAALEHDKAYDQQLKAGDNPYLRYNHADAEFQERLQEDTSFGGNLGRAVFQAKKRVLEPLGLVEEGAKTAPGKKRPVEQSPQEPDSSSGIGKTGQQPAKERLNFGQTGDSESVPDPQPLGEPPATPAAVGPTTMASGGGAPMADNNEGADGVGNASGNWHCDSTWLGDRVITTSTRTWALPTYNNHLYKQISSASTGASNDNHYFGYSTPWGYFDFNRFHCHFSPRDWQRLINNNWGFRPKRLNFKLFNIQVKEVTTNDGVTTIANNLTSTVQVFSDSEYQLPYVLGSAHQGCLPPFPADVFMIPQYGYLTLNNGSQAVGRSSFYCLEYFPSQMLRTGNNFTFSYTFEEVPFHSSYAHSQSLDRLMNPLIDQYLYYLNRTQNQSGSAQNKDLLFSRGSPAGMSVQPKNWLPGPCYRQQRVSKTKTDNNNSNFTWTGASKYNLNGRESIINPGTAMASHKDDEDKFFPMSGVMIFGKESAGASNTALDNVMITDEEEIKATNPVATERFGTVAVNFQSSSTDPATGDVHAMGALPGMVWQDRDVYLQGPIWAKIPHTDGHFHPSPLMGGFGLKNPPPQILIKNTPVPANPPAEFSATKFASFITQYSTGQVSVEIEWELQKENSKRWNPEVQYTSNYAKSANVDFTVDNNGLYTEPRPIGTRYLTRPL

SEQ ID NO: 761 - protein, 736 aa, Artificial Sequence
  source: /note="Description of Artificial Sequence: Synthetic polypeptide"
MAADGYLPDWLEDNLSEGIREWWDLKPGAPKPKANQQKQDDGRGLVLPGYKYLGPFNGLDKGEPVNAADAAALEHDKAYDQQLKAGDNPYLRYNHADAEFQERLQEDTSFGGNLGRAVFQAKKRVLEPLGLVEEGAKTAPGKKRPVEQSPQEPDSSSGIGKTGQQPAKKRLNFGQTGDSESVPDPQPLGEPPATPAAVGPTTMASGGGAPMADNNEGADGVGNASGNWHCDSTWLGDRVITTSTRTWALPTYNNHLYKQISSASTGASNDNHYFGYSTPWGYFDFNRFHCHFSPRDWQRLINNNWGFRPKRLNFKLFNIQVKEVTTNDGVTTIANNLTSTVQVFSDSEYQLPYVLGSAHQGCLPPFPADVFMIPQYGYLTLNNGSQAVGRSSFYCLEYFPSQMLRTGNNFTFSYTFEEVPFHSSYAHSQSLDRLMNPLIDQYLYYLNRTQNQSGSAQNKDLLFSRGSPAGMSVQPKNWLPGPCYRQQRVSKTKTDNNNSNFTWTGASKYNLNGRESIINPGTAMASHKDDEDKFFPMSGVMIFGKESAGASNTALDNVMITDEGEIKATNPVATERFGTVAVNFQSSSTDPATGDVHAMGALPGMVWQDRDVYLQGPIWAKIPHTDGHFHPSPLMGGFGLKNPPPQILIKNTPVPANPPAEFSATKFASFITQYSTGQVSVEIEWELQKENSKRWNPEVQYTSNYAKSANVDFTVDNNGLYTEPRPIGTRYLTRPL

SEQ ID NO: 762 - protein, 736 aa, Artificial Sequence
  source: /note="Description of Artificial Sequence: Synthetic polypeptide"
MAADGYLPDWLEDNLSEGIREWWDLKPGAPKPKANQQKQDDGRGLVLPGYKYLGPFNGLDKGEPVNAADAAALEHDKAYDQQLKAGDNPYLRYNHADAEFQERLQEDTSFGGNLGRAVFQAKKRVLEPFGLVEEGAKTAPGKKRPVEQSPQEPDSSSGIGKTGQQPAKKRLNFGQTGDSESVPDPQPLGEPPATPAAVGPTTMASGGGAPMADNNEGADGVGNASGNWHCDSTWLGDRVITTSTRTWALPTYNNHLYKQISSASTGASNDNHYFGYSTPWGYFDFNRFHCHFSPRDWQRLINNNWGFRPKRLNFKLFNIQVKEVTTNDGVTTIANNLTSTVQVFSDSEYQLPYVLGSAHQGCLPPFPADVFMIPQYGYLTLNNGSQAVGRSSFYCPEYFPSQMLRTGNNFTFSYTFEEVPFHSSYAHSQSLDRLMNPLIDQYLYYLNRTQNQSGSAQNKDLLFSRGSPAGMSVQPKNWLPGPCYRQQRVSKTKTDNNNSNFTWTGASKYNLNGRESIINPGTAMASHKDDKDKFFPMSGVMIFGKESAGASNTALDNVMITDEEEIKATNPVATERFGTVAVNFQSSNTDPATGDVHVMGALPGMVWQDRDVYLQGPIWAKIPHTDGHFHPSPLMGGFGLKHPPPQILIKNTPVPANPPAEFSATKFASFITQYSTGQVSVEIEWELQKENSKRWNPEVQYTSNYAKSANVDFTVDNNGLYTEPRPIGTRYLTRPL

SEQ ID NO: 763 - protein, 736 aa, Artificial Sequence
  source: /note="Description of Artificial Sequence: Synthetic polypeptide"
MAADGYLPDWLEDNLSEGIREWWDLKPGAPKPKANQQKQDDGRGLVLPGYKYLGPFNGLDKGEPVNAADAAALEHDKAYDQQLKAGDNPYLRYNHADAEFQERLQEDTSFGGNLGRAVFQAKKRVLEPFGLVEEGAKTAPGKKRPVEQSPQEPDSSSGIGKTGQQPAKKRLNFGQTGDSESVPDPQPLGEPPATPAAVGPTTMASGGGAPMADNNEGADGVGNASGNWHCDSTWLGDRVITTSTRTWALPTYNNHLYKQISSASTGASNDNHYFGYSTPWGYFDFNRFHCHFSPRDWQRLINNNWGFRPKRLNFKLFNIQVKEVTTNDGVTTIANNLTSTVQVFSDSEYQLPYVLGSAHQGCLPPFPADVFMIPQYGYLTLNNGSQAVGRSSFYCLEYFPSQMLRTGNNFTFSYTFEEVPFHSSYAHSQSLDRLMNPLIDQYLYYLNRTQNQSGSAQNKDLLFSRGSPAGMSVQPKNWLPGPCYRQQRVSKTKTDNNNSNFTWTGASKYNLNGRESIINPGTAMASHKDDKDKFFPMSGVMIFGKESAGASNTALDNVMITDEEEIKATNPVATERFGTVAVNFQSSDTDPATGDVHVMGALPGMVWQDRDVYLQGPIWAKIPHTDGHFHPSPLMGGFGLKHPPPQILIKNTPVPANPPAEFSATKFASFITQYSTGQVSVEIEWELQKENSKRWNPEVQYTSNYAKSANVDFTVDNNGLYTEPRPIGTRYLTRPL

SEQ ID NO: 764 - protein, 736 aa, Artificial Sequence
  source: /note="Description of Artificial Sequence: Synthetic polypeptide"
MAADGYLPDWLEDNLSEGIREWWDLKPGAPKPKANQQKQGDGRGLVLPGYKYLGPFNGLDKGEPVNAADAAALEHDKAYDQQLKAGDNPYLRYNHADAEFQERLQEDTSFGGNLGRAVFQAKKRVLEPFGLVEEGAKTAPGKKRPVEQSPQEPDSSSGIGKTGQQPAKKRLNFGQTGDSESVPDPQPLGEPPATPAAVGPTTMASGGGAPMADNNEGADGVGNASGNWHCDSTWLGDRVITTNTRTWALPTYNNHLYKQISSASTGASNDNHYFGYSTPWGYFDFNRFHCHFSPRDWQRLINNNWGFRPKRLNFKLFNIQVKEVTTNDGVTTIANNLTSTVQVFSDSEYQLPYVLGSAHQGCLPPFPADVFMIPQYGYLTLNNGSQAVGRSSFYCLEYFPSQMLRTGNNFTFSYTFEEVPFHSSYGHSQSLDRLMNLLIDQYLYYLNRTQNQSGSAQNKDLLFSRGSPAGMFVQPKNWLPGPCYRQQRVSKTKTDNNNSNFTWTGASKYNLNGRESIINPGTAMASHKDDEDKFFPMSGVMIFGKESAGASNTALDNVMITDEEEIKATNPVATERFGTVAVNFQSSSTDPATGDVHVMGALPGMVWQDRDVYLQGPIWAKIPHTDGHFHPSPLMGGFGLKHPPPQILIKNTPVPANPPAEFSATKFASFITQYSTGQVSVEIEWELQKENSKRWNPEVQYTSNYAKSANVDFTVDNNGLYTEPRPIGTRYLTRPL

SEQ ID NO: 765 - protein, 736 aa, Artificial Sequence
  source: /note="Description of Artificial Sequence: Synthetic polypeptide"
MAADGYLPDWLEDNLSEGIREWWDLKPGAPKPKANQQKQDDGRGLVLPGYKYLGPFNGLDKGEPVNAADAAALEHDKAYDQQLKAGDNPYLRYNHADAEFQERLQEDTSFGGNLGRAVFQAKKRVLEPFGLVEEGAKTAPGKKRPVEQSPQEPDSSSGIGKTGQQPAKKRLNFGQTGDSESVPDPQPLGEPPATPAAVGPTTMASGGGAPMADNNEGADGVGNASGNWHCDSTWLGDRVITTNTRTWALPTYNNHLYKQISSASTGASNDNHYFGYSTPWGYFDFNRFHCHFSPRDWQRLINNNWGFRPKRLNFKLFNIQVKEVTTNDGVTTIANNLTSTVQVFSDSEYQLPYVLGSAHQGCLPPFPADVFMIPQYGYLMLNNGSQAVGRSSFYCLEYFPSQMLRTGNNFTFSYTFEEVPFHSSYAHSQSLDRLMNPLIDQYLYYLNRTQNQSGSAQNKDLLFSRGSPAGMSVQPKNWLPGPCYRQQRVSKTKTDNNNSNFTWTGASKYNLNGRESIINPGTAMASHKDDEDKFFPMSGVMIFGKESAGASNTALDNVMITDEEEIKATNPAATERFGTVAVNFQSSSTDPATGDVHVMGALPGMVWQDRDVYLQGPIWAKIPHTDGHFHPSPLMGGFGLKHPPPQILIKNTPVPANPPAEFSATKFASFITQYSTGQVSVEIEWELQKENSKRWNPEVQYTSNYAKSANVDFTVDNNGLYTEPRPIGTRYLTRPL

SEQ ID NO: 766 - protein, 736 aa, Artificial Sequence
  source: /note="Description of Artificial Sequence: Synthetic polypeptide"
MAADGYLPDWLEDNLSEGIREWWDLKPGAPKPKANQQKQDDGRGLVLPGYKYLGPFNGLDKGEPVNAADAAALEHDKAYDQQLKAGDNPYLRYNHADAEFQERLQEDTSFGGNLGRAVFQAKKRVLEPFGLVEEGAKTAPGKKRPVEQSPQEPDSSSGIGKTGQQPAKKRLNFGQTGDSESVPDPQPLGEPPATPAAVGPTTMASGGGAPMADNNEGADGVGNASGNWHCDSTWLGDRVITTSTRTWALPTYNNHLYKQISSASTGASNDNHYFGYSTPWGYFDFNRFHCHFSPRDWQRLINNNWGFRPKRLNFKLFNIQVKEVTTNDGVTTIANNLTSTVQVFSDSEYQLPYVLGSAHQGCLPPFPADVFMIPQYGYLTLNNGSQAVGRSSFYCLEYFPSQMLRTGNNFTFSYTFEEVPFHSSYAHSQSLDRLMNPLIDQYLYYLNRTQNQSGSAQNKDLLFSRGSPAGMSVQPKNWLPGPCYRQQRVSKTKTDNNNSNFTWTGASKYNLNGRESIINPGTAMASHKDDEDKFFPMSGVMIFGKESAGASNTALDNVMITDEEEIKATNPVATERFGTVAVNFQSSSTDPATGDVHVMGALPGMVWQDRDVYLQGPIWAKIPHTDGHFHPSPLMGGFGLKHPPPQILIKNTPVPANPPAEFSATKFASFITQYSTGQVSVEIEWELQKENSKRWNPEVQYTSNYAKSANVDFTVDNNGLYTEPRPIGTRYLTRPL

SEQ ID NO: 767 - protein, 736 aa, Artificial Sequence
  source: /note="Description of Artificial Sequence: Synthetic polypeptide"
  MOD_RES (102)..(102): Any amino acid
MAADGYLPDWLEDNLSEGIREWWDLKPGAPKPKANQQKQDDGRGLVLPGYKYLGPFNGLDKGEPVNAADAAALEHDKAYDQQLKAGDNPYLRYNHADAEFQXRLQEDTSFGGNLGRAVFQAKKRVLEPFGLVEEGAKTAPGKKRPVEQSPQEPDSSSGIGKTGQQPAKKRLNFGQTGDSESVPDPQPLGEPPATPAAVGPTTMASGGGAPMADNNEGADGVGNASGNWHCDSTWLGGRVITTSTRTWALPTYNNHLYKQISSASTGASNDNHYFGHSTPWGYFDFNRFHCHFSPRDWQRLINNNWGFRPKRLNFKLFNIQVKEVTTNDGVTTIANNLTSTVQVFSDSEYQLPYVLGSAHQGCLPPSPADVFMIPQYGYLTLNNGSQAVGRSSFYCLEYFPSQMLRTGNNFTFSYTFEEVPFHSSYAHSQSLDRLMNPLIDQYLYYLNRTQNQSGSAQNKDLLFSRGSPAGMSVQPKNWLPGPCYRQQRVSKTKTDNNNSNFTWTGASKYNLNGRESIINPGTAMASHKDDKDKFFPMSGVMIFGKESAGASNTALDNVMITDEEEIKATNPVATERFGTVAVNFQSSNTDPATGDVHVMGALPGMVWQDRDVYLQGPIWAKIPHTDGHFHPSPLMGGFGLKHPPPQILIKNTPVPANPPAEFSATKFASFITQYSTGQVSVEIEWELQKENSKRWNPEVQYTSNYAKSANVDFTVDNNGLYTEPRPIGTRYLTRPL

SEQ ID NO: 768 - protein, 736 aa, Artificial Sequence
  source: /note="Description of Artificial Sequence: Synthetic polypeptide"
MAADGYFPDWLEDNLSEGIREWWDLKPGAPKPKANQQKQDDGRGLVLPGYKYLGPFNGLDKGEPVNAADAAALEHDKAYDQQLKAGDNPYLRYNHADAEFQERLQEDTSFGGNLGRAVFQAKKRVLEPFGLVEEGAKTAPGKKRPVEQSPQEPDSSSGIGRTGQQPAKKRLNFGQTGDSESVPDPQPLGEPPATPAAVGPTTMASGGGAPMADNNEGADGVGNASGNWHCDSTWLGDRVITTSTRTWALPTYNNHLYKQISSASTGASNDNHYFGYSTPWGYFDFNRFHCHFSPRDWQRLINNNWGFRPKRLNFKLFNIQVKEVTTNDGVTTIANNLTSTVQVFSDSEYQLPYVLGSAHQGCLPPFPADVFMIPQYGYLTLNNGSQAVGRSSFYCLEYFPSQMLRTGNNFTFSYTFEEVPFHSSYAHSQSLDRLMNPLIDQYLYYLNRTQNQSGSAQNKDLLFSRGSPAGMSVQPKNWLPGPCYRQQRVSKTKTDNNNSNFTWTGASKYNLNGRESIINPGTAMASHKDDEDKFFPMSGVMIFGKESAGASNTALDNVMITDEEEIKATNPVATERFGTVAVNFQSSSPDPATGDVHVMGALPGMVWQDRDVYLQGPIWAKIPHTDGHFHPSPLMGGFGLKHPPPQILIKNTPVPANPPAEFSATKFASFITQYSTGQVSVEIEWELQKENSKRWNPEVQYTSNYAKSANVDFTVDNNGLYSEPRPIGTRYLTRPL

SEQ ID NO: 769 - protein, 736 aa, Artificial Sequence
  source: /note="Description of Artificial Sequence: Synthetic polypeptide"
MAADGYLPDWLEDNLSEGIREWWDLKPGAPKPKANQQKQDDGRGLVLPGYKYLGPFNGLDKGEPVNAADAAALEHDKAYDQQLKAGDNPYLRYNHADAEFQERLQEDTSFGGNLGRAVFQAKKRVLEPFGLVEEGAKTAPGKKRPVEQSPQEPDSSSGIGKTGQQPAKKRLNFGQTGDSESVPDPQPLGEPPATPAAVGPTTMASGGGAPMADNNEGADGVGNASGNWHCDSTWLGDRVITTSTRTWALPTYNNHLYKQTSSASTGASNDNHYFGYSTPWGYFDFNRFHCHFSPRDWQRLINNNWGFRPKRLNFKLFNIQVKEVTTNDGVTTIANNLTSTVQVFSDSEYQLPYVLGSAHQGCLPPFPADVFMIPQYGYLTLNNGSQAVGRSSFYCLEYFPSQMLRTGNNFTFSYTFEEVPFHSSYAHSQSLDRLMNPLIDQYLYYLNRTQNQSGSAQNKDLLFSRGSPAGMSVQPKNWLPGPCYRQQRVSKTKTDYNNSNFTWTGASKYNLNGRESIINPGTAMASHKDDEDKFFPMSGVMIFGKESAGASNTALDNVMITDEEEIKATNPVATERFGTVAVNFQSSSTDPATGDVHVMGALPGMVWQDRDVYLQGPIWAKIPHTDGHFHPSPLMGGFGLKHPPPQILIKNTPVPANPPAEFSATKFASFITQYSTGQVSVEIEWELQKENSKRWNPEVQYTSNYAKSANVDFTVDNNGLYTEPRPIGTRYLTRPL

SEQ ID NO: 770 - protein, 736 aa, Artificial Sequence
  source: /note="Description of Artificial Sequence: Synthetic polypeptide"
MAADGYPPDWLEDNLSEGIREWWDLKPGVPKPKANQQKQDDGRGLVLPGYKYLGPFNGLDKGEPVNAADAAALEHDKAYDQQLKAGDNPYLRYNHADAEFQERLQEDTSFGGNLGRAVFQAKKRVLEPFGLVEEGAKTAPGKKRPVEQSPQEPDSSSGIGKTGQQPAKKRLNFGQTGDSESVPDPQPLGEPPATPAAVGPTTMASGGGAPMADNNEGADGVGNASGNWHCDSTWLGDRVITTSTRTWALPTYNNHLYKQISSASTGASNDNHYFGYSTPWGYFDFNRFHCHFSPRDWQRLINNNWGFRPKRLNFKLFNIQVKEVTTNDGVTTIANNLTSTVQVFSDSEYQLPYVLGSAHQGCLPPFPADVFMIPQYGYLTLNNGSQAVGRSSFYCLEYFPSQMLRTGNNFTFSYTFEEVPFHSSYAHSQSLDRLMNPLIDQYLYYLNRTQNQSGSAQNKDLLFSRGSPAGMSVQPKNWLPGPCYRQQRVSKTKTDNNNSNFTWTGASKYNLNGRESIINPGTAMASHKDDEDKFFPMSGVMIFGKESAGASNTALDNVMITDEEEIKATNPVATERFGTVAVNFQSSSTDPATGDVHVMGALPGMVWQDRDVYLQGPIWAKIPHTDGHFHPSPLMGGFGLKHPPPQILIKNTPVPANPPAEFSATKFASFITQYSTGQVSVEIEWELQKENSKRWNPEVQYTSNYAKSANVDFTVDNNGLYTEPRPIGTRYLTRPL

SEQ ID NO: 771 - protein, 732 aa, Artificial Sequence
  source: /note="Description of Artificial Sequence: Synthetic polypeptide"
MAADGYLPDWLEDNLSEGIREWWDLKPGAPKPKANQQKQDDGRGLVLPGYKYLGPFNGLDKGEPVNAADAAALEHDKAYDQQLKAGDNPYLRYNHADAEFQERLQEDTSFGGNLGRAVFQAKKRVLEPFGLVEEGAKTAPGKKRPVEQSPQEPDSSSGIGKTGQQPAKKRLNFGQTGDSESVPDPQPLGEPPATPAAVGPTTMASGGGAPMADNNEGADGVGNASGNWHCDSTWLGDRVITTSTRTWALPTYNNHLYKQISSASTGASNDNHYFGYSTPWGYFDFNRFHCHFSPRDWQRLINNNWGFRPKRLNFKLFNIQVKEVTTNDGVTTIANNLTSTVQAFSDSEYQLPYVLGSAHQGCLPPFPADVFMIPQYGYLTLNNGSQAVGRSSFYCLEYFPSQMLRTGNNFTFSYTFEEVPFHSSYAHSQSLDRLMNPLIDPYLYYLNRTQNQSGSAQNKDLLFSRGSPAGMSVQPKNWLPGPCYRQQRVSKTKTDNNNSNFTWTGASKYNLNGRESIINPGTAMASHKDDEDKFFPMSGVMIFGKESAGASNTALDNVMITDEEEIKATNPVATERFGTVAVNFQSSSTDPATGDVHVMGALPGMVWQDRDVYLQGPIWAKIPHTDGHFHPSPLMGGFGLKHPPPQILIKNTPVPANPPAEFSATKFASFITQYSTGQVSVEIEWELQKENSKRWNPEVQYTSNYAKSANVDFTVDNNGLYTEPRPIGTRYL

SEQ ID NO: 772 - protein, 736 aa, Artificial Sequence
  source: /note="Description of Artificial Sequence: Synthetic polypeptide"
MAADGYLPDWLEDNLSEGIREWWDLKPGAPKPKANQQKQDDGRGLVLPGYKYLGPFNGLDKGEPVNAADAAALEHDKAYDQQLKAGDNPYLRYNHADAEFQERLQEDTSFGGNLGRAVFQAKKRVLEPFGLVEEGAKTAPGKKRPVEQSPQEPDSSSGIGKTGQQPAKKRLNFGQTGDSESVPDPQPLGEPPATPAAVGPTTMASGGGAPMADNNEGADGVGNASGNWHCDSTWLGDRVITTSTRTWALPTYNNHLYKQISSASTGASNDNHYFGYSTPWGYFDFNRFHCHFSPRDWQRLINNNWGFRPKRLNFKLFNIQVKEVTTNDGVTTIANNLTSTVQVFSDSEYQLPYVLGSAHQGCLPPFPADVFMIPQYGYLTLNNGSQAVGRSSFYCLEYFPSQMLRTGNNFTFSYTFEEVPFHSSYAHSQSLDRLMNPLIDQYLYYLNRTQNQSGSAQNKDLLFSRGSPAGMSVQPKNWLPGPCYRQQRVSKTKTDNNNSNFTWTGASKYNLNGRESIINPGTAMASHKDDEDKFFPMSGVMIFGKESAGASNTALDNVMITDEEEIKATNPVATERFGTVAVNFQSSSTDPATGDVHVMGALPGMVWQDRDVYLQGPIWAKIPHTDGHSHPSPLMGGFGLKHPPPQILIKNTPVPANPPAEFSATKFASFITQYSTGQVSVEIEWELQKENSKRWNPEVQYTSNYAKSANVDFTVDNNGLYTEPRPIGTRYLTRPL

SEQ ID NO: 773 - protein, 736 aa, Artificial Sequence
  source: /note="Description of Artificial Sequence: Synthetic polypeptide"
MAADGYLPDWLEDNLSEGIREWWDLKPGAPKPKANQQKQDDGRGLVLPGYKYLGPFNGLDKGEPVNAADAAALEHDKAYDQQLKAGDNPYLRYNHADAEFQERLQEDTSFGGNLGRAVFQAKKRVLEPFGLVEEGAKTAPGKKRPVEQSPQEPDSSSGIGKTGQQPAKKRLNFGQTGDSESVPDPQPLGEPPATPAAVGPTTMASGGGAPMADNNEGADGVGNASGNWHCDSTWLGDRVITTSTRTWALPTYNNHLYKQISSASTGASNDNHYFGYSTPWGYFDFNRFHCHFSPRDWQRLINNNWGFRPKRLNFKLFNIQVKEVTTNDGVTTIANNLTSTVQVFSDSEYQLPYVLGSAHQGCLPPFPADVFMIPQYGYLTLNNGSQAVGRSSFYCLEYFPSQMLRTGNNFTFSYTFEEVPFHSSYAHSQSLDRLMNPLIDLYLYYLNRTQNQSGSAQNKDLLFSRGSPAGMSVQPKNWLPGPCYRQQRVSKTKTDNNNSNFTWTGASKYNLNGRESIINPGTAMASHKDDEDKFFPMSGVMIFGKESAGTSNTALDNVMITDEEEIKATNPVATERFGTVAVNFQSSSTDPATGDVHVMGALPGMVWQDRDVYLQGPIWAKIPHTDGHFHPSPLMGGFGLKHPPPQILIKNTPVPANPPAEFSATKFASFITQYSTGQVSVEIEWELQKENSKRWNPEVQYTSNYAKSANVDFTVDNNGLYTEPRPIGTRYLTRPL

SEQ ID NO: 774 - protein, 736 aa, Artificial Sequence
  source: /note="Description of Artificial Sequence: Synthetic polypeptide"
MAADGYLPDWLEDSLSEGIREWWDLKPGAPKPKANQQKQDDGRGLVLPGYKYLGPFNGLDKGEPVNAADAAALEHDKAYDQQLKAGDNPYLRYNHADAEFQERLQEDTSFGGNLGRAVFQAKKRVLEPFGLVEEGAKTAPGKKRPVEQSPQEPDSSSGIGKTGQQPAKKRLNFGQTGDSESVPDPQPLGEPPATPAAVGPTTMASGGGAPMADNNEGADGVGNASGNWHCDSTWLGDRVITTSTRTWALPTYNNHLYKQISSASTGASNDNHYFGYSTPWGYFDFNRFHCHFSPRDWQRLINNNWGFRPKRLNFKLFNIQVKEVTTNDGVTTIANNLTSTVQVFSDSEYQLPYVLGSAHQGCLPPFPADVFMIPQYGYLTPNNGSQAVGRSSFYCLEYFPSQMLRTGNNFTFSYTFEEVPFHSSYAHSQSLDRLMNPLIDQYQYYLNRTQNQSGSAQNKDLLFSRGSPAGMSVQPKNWLPGPCYRQQRVSKTKTDNNNSNFTWTGASKYNLNGRESIINPGTAMASHKDDEDKFFPMSGVMIFGKESAGASNTALDNVMITDEEEIKATNPVATERFGTVAVNFQSSSTDPATGDVHVMGALPGMVWQDRDVYLQGPIWAKIPHTDGHFHPSPLMGGFGLKHPPPQILIKNTPVPANPPAEFSATKFASFITQYSTGQVSVEIEWELQKENSKRWNPEVQYTSNYAKSANVDFTVDNNGLYTEPRPIGTRYLTRPL

SEQ ID NO: 775 - protein, 736 aa, Artificial Sequence; identical to SEQ ID NO: 766
  source: /note="Description of Artificial Sequence: Synthetic polypeptide"

SEQ ID NO: 776 - protein, 735 aa, Artificial Sequence
  source: /note="Description of Artificial Sequence: Synthetic polypeptide"
MAADGYLPDWLEDTLSEGIRQWWKLKPGPPPPKPAERHKDDSRGLVLPGYKYLGPFNGLDKGEPVNEADAAALEHDKAYDRQLDSGDNPYLKYNHADAEFQERLKEDTSFGGNLGRAVFQAKKRVLEPLGLVEEPVKTAPGKKRPVEHSPVEPDSSSGTGKAGQQPARKRLNFGQTGDADSVPDPQPLGQPPAAPSGLGTNTMATGSGAPMADNNEGADGVGNSSGNWHCDSTWMGDRVITTSTRTWALPTYNNHLYKQISSQSGASNDNHYFGYSTPWGYFDFNRFHCHFSPRDWQRLINNNWGFRPKRLNFKLFNIQVKEVTQNDGTTTIANNLTSTVQVFTDSEYQLPYVLGSAHQGCLPPFPADVFMVPQYGYLTLNNGSQAVGRSSFYCLEYFPSQMLRTGNNFTFSYTFEDVPFHSSYAHSQSLDRLMNPLIDQYLYYLSRTNTPSGTTTQSRLQFSRAGASDIRDQSRNWLPGPCYRQQRVSKTSADNNNSEYSWTGATKYHLNGRDSLVNPGPAMASHKDDEEKFFPQSGVLIFGKQGSEKTNVDIEKVMITDEEEIRTTNPVATEQYGSVSTNLQRGNRQAATADVNTQGVLPGMVWQDRDVYLQGPIWAKIPHTDGHFHPSPLMGGFGLKHPPPQILIKNTPVPANPSTTFSAAKFASFITQYSTGQVSVEIEWELQKENSKRWNPEIQYTSNYNKSVNVDFTVDTNGVYSEPRPIGTRYLTRNL

SEQ ID NO: 777 - DNA, 2211 bp, Artificial Sequence
  source: /note="Description of Artificial Sequence: Synthetic polynucleotide"
atggctgctgacggttatcttccagattggctcgaggacaacctttctgaaggcattcgtgagtggtgggctctgaaacctggagtccctcaacccaaagcgaaccaacaacaccaggacaaccgtcggggtcttgtgcttccgggttacaaatacctcggacccggtaacggactcgacaaaggagagccggtcaacgaggcggacgcggcagccctcgaacacgacaaagcttacgaccagcagctcaaggccggtgacaacccgtacctcaagtacaaccacgccgacgccgagtttcaggagcgtcttcaagaagatacgtcttttgggggcaaccttggcagagcagtcttccaggccaaaaagaggatccttgagcctcttggtctggttgaggaagcagctaaaacggctcctggaaagaagaggcctgtagatcagtctcctcaggaaccggactcatcatctggtgttggcaaatcgggcaaacagcctgccagaaaaagactaaatttcggtcagactggcgactcagagtcagtcccagaccctcaacctctcggagaaccaccagcagcccccacaagtttgggatctaatacaatggcttcaggcggtggcgcaccaatggcagacaataacgagggtgccgatggagtgggtaattcctcaggaaattggcattgcgattcccaatggctgggcgacagagtcatcaccaccagcaccagaacctgggccctgcccacttacaacaaccatctctacaagcaaatctccagccaatcaggagcttcaaacgacaaccactactttggctacagcaccccttgggggtattttgactttaacagattccactgccacttctcaccacgtgactggcagcgactcattaacaacaactggggattccggcccaagaaactcagcttcaagctcttcaacatccaagttaaagaggtcacgcagaacgatggcacgacgactattgccaataaccttaccagcacggttcaagtgtttacggactcggagtatcagctcccgtacgtgctcgggtcggcgcaccaaggctgcctcccgccgtttccagcggacgtcttcatggtccctcagtatggatacctcaccctgaacaacggaagtcaagcggtgggacgctcatccttttactgcccggagtacttcccttcgcagatgctaaggactggaaataacttccaattcagctataccttcgaggatgtaccttttcacagcagctacgctcacagccagagtttggatcgcttgatgaatcctcttattgatcagtatctgtactacctgaacagaacgcaaggaacaacctctggaacaaccaaccaatcacggctgctttttagccaggctgggcctcagtctatgtctttgcaggccagaaattggctacctgggccctgctaccggcaacagagactttcaaagactgctaacgacaacaacaacagtaactttccttggacagcggccagcaaatatcatctcaatggccgcgactcgctggtgaatccaggaccagctatggccagtcacaaggacgatgaagaaaaatttttccctatgcacggcaatctaatatttggcaaagaagggacaacggcaagtaacgcagaattagataatgtaatgattacggatgaagaagagattcgtaccaccaatcctgtggcaacagagcagtatggaactgtggcaaataacttgcagagctcaaatacagctcccacgactagaactgtcaatgatcagggggccttacctggcatggtgtggcaagatcgtgacgtgtaccttcaaggacctatctgggcaaagattcctcacacggatggacactttcatccttctcctctgatgggaggctttggactgaaacatccgcctcctcaaatcatgatcaaaaatactccggtaccggcaaatcctccgacgactttcagcccggccaagtttgcttcatttatcactcagtactccactggacaggtcagcgtggaaattgagtgggagctacagaaagaaaacagcaaacgttggaatccagagattcagtacacttccaactacaacaagtctgttaatgtggactttactgtagacactaatggtgtttatagtgaacctcaccctattggaacccggtatctcacacgaaacttgtaa

SEQ ID NO: 778 - DNA, 2211 bp, Artificial Sequence
  source: /note="Description of Artificial Sequence: Synthetic polynucleotide"
atggctgctgatggttatcttccagattggctcgaggacaacctttctgaaggcattcgtgagtggtgggctctgaaacctggagtccctcaacccaaagcgaaccaacaacaccaggacaaccgtcggggtcttgtgcttccgggttacaaatacctcggacccggtaacggactcgacaaaggagagccggtcaacgaggcggacgcggcagccctcgaacacgacaaagcttacgaccagcagctcaaggccggtgacaacccgtacctcaagtacaaccacgccgacgccgagtttcaggagcgtcttcaagaagatacgtcttttgggggcaaccttggcagagcagtcttccaggccaaaaagaggatccttgagcctcttggtctggttgaggaagcagctaaaacggctcctggaaagaagaggcctgtagatcagtctcctcaggaaccggactcatcatctggtgttggcaaatcgggcaaacagcctgccagaaaaagactaaatttcggtcagactggcgactcagagtcagtcccagaccctcaacctctcggagaaccaccagcagcccccacaagtttgggatctaatacaatggcttcaggcggtggcgcaccaatggcagacaataacgagggtgccgatggagtgggtaattcctcaggaaattggcattgcgattcccaatggctgggcgacagagtcatcaccaccagcaccagaacctgggccctgcccacttacaacaaccatctctacaagcaaatctccagccaatcaggagcttcaaacgacaaccactactttggctacagcaccccttgggggtattttgactttaacagattccactgccacttctcaccacgtgactggcagcgactcattaacaacaactggggattccggcccaagaaactcagcttcaagctcttcaacatccaagttaaagaggtcacgcagaacgatggcacgacgactgttgccaataaccttaccagcacggttcaagtgtttacggactcggagtatcaactcccgtacgtgctcgggtcggcgcaccaaggctgtctcccgccgtttccagcggacgtcttcatggtccctcagtatggatacctcaccctgaacaacggaagtcaagcggtgggacgctcatccttttactgcctggagtacttcccttcgcagatgctaaggactggaaataacttccaattcagctataccttcgaggatgtaccttttcacagcagctacgctcacagccagagtttggatcgcttgatgaatcctcttattgatcagtatctgtactacctgaacagaacgcaaggaacaacctctggaacaaccaaccaatcacggctgctttttagccaggctgggcctcagtctatgtctttgcaggccagaaattggctacctgggccctgctaccggcaacagagactttcaaagactgctaacgacaacaacaacagtaactttccttggacagcggccagcaaatatcatctcaatggccgcgactcgctggtgaatccaggaccagctatggccagtcacaaggacgatgaagaaaaatttttccctatgcacggcaatctaatatttggcaaagaagggacaacggcaagtaacgcagaattagataatgtaatgattacggatgaagaagagattcgtaccaccaatcctgtggcaacagagcagtatggaactgtggcaaataacttgcagagctcaaatacagctcccacgactagaactgtcaatgatcagggggccttacctggcatggtgtggcaagatcgtgacgtgtaccttcaaggacctatctgggcaaagattcctcacacggatggacactttcatccttctcctctgatgggaggctttggactgaaacatccgcctcctcaaatcatgatcaaaaatactccggtaccggcaaatcctccgacgactttcagcccggccaagtttgcttcatttatcactcagtactccactggacaggtcagcgtggaaattgagtgggagctacagaaagaaaacagcaaacgttggaatccagagattcagtacacttccaactacaacaagtctgttaatgtggactttactgtagacactaatggtgtttatagtgaacctcgccctattggaacccggtatctcacacgaaacttgtaa

SEQ ID NO: 779 - DNA, 2211 bp, Artificial Sequence
  source: /note="Description of Artificial Sequence: Synthetic polynucleotide"
atggctgctgacggttatcttccagattggctcgaggacaacctttctgaaggcattcgtgagtggtgggctctgaaacctggagtccctcaacccaaagcgaaccaacaacaccaggacaaccgtcggggtcttgtgcttccgggttacaaatacctcggacccggtaacggactcgacaaaggagagccggtcaacgaggcggacgcggcagccctcgaacacgacaaagcttacgaccagcagctcaaggccggtgacaacccgtacctcaagtacaaccacgccgacgccgagtttcaggagcgtcttcaagaagatacgtcttttgggggcaaccttggcagagcagtcttccaggccaaaaagaggatccttgagcctcttggtctggttgaggaagcagctaaaacggctcctggaaagaagaggcctgtagatcagtctcctcaggaaccggactcatcatctggtgttggcaaatcgggcaaacagcctgccagaaaaagactaaatttcggtcagactggcgactcagagtcagtcccagaccctcaacctctcggagaaccaccagcagcccccacaagtttgggatctaatacaatggcttcaggcggtggcgcaccaatggcagacaataacgagggtgccgatggagtgggtaattcctcaggaaattggcattgcgattcccaatggctgggcgacagagtcatcaccaccagcaccagaacctgggccctgcccacttacaacaaccatctctacaagcaaatctccggccaatcaggagcttcaaacgacaaccactactttggctacagcaccccttgggggtattttgactttaacagattccactgccacttctcaccacgtgactggcagcgactcattaacaacaactggggattccggcccaagaaactcagcttcaagctcttcaacatccaagttaaagaggtcacgcagaacgatggcacgacgactattgccaataaccttaccagcacggttcaagtgtttacggactcggagtatcagctcccgtacgtgctcgggtcggcgcaccaaggctgtctcccgccgtttccagcggacgtcttcatggtccctcagtatggatacctcaccctgaacaacggaagtcaagcggtgggacgctcatccttttactgcctggagtacttcccttcgcagatgctaaggactggaaataacttccaattcagctataccttcgaggatgtaccttttcacagcagctacgctcacagccagagtttggatcgcttgatgaatcctcttattgatcagtatctgtactacctgaacagaacgcaaggaacaacctctggaacaaccaaccaatcacggctgctttttagccaggctgggcctcagtctatgtctttgcaggccagaaattggctacctgggccctgctaccggcaacagagactttcaaagactgctaacggcaacaacaacagtaactttccttggacagcggccagcaaatatcatctcaatggccgcgactcgctggtgaatccaggaccagctatggccagtcacaaggacgatgaagaaaaatttttccctatgcacggcaatctaatatttggcaaagaagggacaacggcaagtaacgcagaattagataatgtaatgattacggatgaagaagagattcgtaccaccaatcctgtggcaacagagcagtgtggaactgtggcaaataacttgcagagctcaaatacagctcccacgactagaactgtcaatgatcagggggccttacctggcatggtgtggcaagatcgtgacgtgtaccttcaaggacctatctgggcaaagattcctcacacggatggacactttcatccttctcctctgatgggaggctttggactgaaacatccgcctcctcaaatcatgatcaaaaatactccggtaccggcaaatcctccgacgactttcagcccggccaagtttgcttcatttatcactcagtactccactggacaggtcagcgtggaaattgagtgggagctacagaaagaaaacagcaaacgttggaatccagagattcagtacacttccaactacaacaagtctgttaatgtggactttactgtagacactaatggtgtttatagtgaacctcgccctattggaacccggtatctcacacgaaacttgtaa

SEQ ID NO: 780 - DNA, 2212 bp, Artificial Sequence
  source: /note="Description of Artificial Sequence: Synthetic polynucleotide"
  modified_base (1283)..(1283): a, c, t, g, unknown or other
atggctgctgacggttatcttccagattggctcgaggacaacctttctgaaggcattcgtgagtggtgggctctgaaacctggagtccctcaacccaaagcgaaccaacaacaccaggacaaccgtcggggtcttgtgcttccgggttacaaatacctcggaccgggtaacggactcgacaaaggagagccggtcaacgaggcggacgcggcagccctcgaacacgacaaagcttacgaccagcagctcaaggccggtgacaacccgtacctcaagtacaaccacgccgacgccgagtttcaggagcgtcttcaagaagatacgtcttttgggggcaaccttggcagagcagtcttccaggccaaaaagaggatccttgagcctcttggtctggttgagggagcagctaaaacggctcctggaaagaagaggcctgtagatcagtctcctcaggaaccggactcatcatctggtgttggcaaatcgggcaaacagcctgccagaaaaagactaaatttcggtcagactggcgactcagagtcagtcccagaccctcaacctctcggagaaccaccagcagcccccacaagtttgggatctaatacaatggcttcaggcggtggcgcaccaatggcagacaataacgagggtgccgatggagtgggtaattcctcaggaaattggcattgcgattcccaatggctgggcgacagagtcatcaccaccagcaccagaacctgggccctgcccacttacaacagccatctctacaagcaaatctccagccaatcaggagcttcaaacgacaaccactactttggctacagcaccccttgggggtattttgactttaacagattccactgccacttctcaccacgtgactggcagcgactcattaacaacaactggggattccggcccaagaaactcagcttcaagctcttcaacatccaagttaaagaggtcacgcagaacgatggcacgacgactattgccaataaccttaccagcacggtccaagtgtttacggactcggagtatcagctcccgtacgtgctcgggtcggcgcaccaaggctgtctcccgccgtttccagcggacgccttcatggtccctcagtatggatacctcaccctgaacaacggaagtcaagcggtgggacgctcatccttttactgcctggagtacttcccttcgcagatgctaaggactggaaataacttccaattcagctataccttcgaggatgtaccttttcacggcagctacgctcacagccngagtttggatcgcttgatgaatcctcttattgatcagtatctgtactacctgaacagaacgcaaggaacaacctctggaacaaccaaccaatcacggctgctttttagccaggctgggcctcagtctatgtctttgcaggccagaaattggctacctgggccctgctaccggcaacagagacttttcaaagactgctaacgacaacaacaacagtaactttccttggacagcggccagcaaatatcatctcaatggccgcgactcgctggtgaatccaggaccagctatggccagtcacaaggacgatgaagaaaaatttttccctatgcacggcaatctaatatttggcaaagaagggacaacggcaagtaacgcagaattagataatgtaatgattacggatgaagaagagattcgtaccaccaatcctgtggcaacagagcagtatggaactgtggcaaataacttgcagagctcaaatacagctcccacgactagaactgtcaatgatcagggggccttacctggcatggtgtggcaagatcgtgacgtgtaccttcaaggacctatctgggcaaagattcctcacacggatggacactttcatccttctcctctgatgggaggctttggactgaaacatccgcctcctcaaatcatgatcaaaaatactccggtaccggcaaatcctccgacgactttcagcccggccaagtttgcttcatttatcactcagtactccactggacaggtcagcgtggaaattgagtgggagctacagaaagaaaacagcaaacgttggaatccagagattcagtacacttccaactacaacaagtctgttaatgtggactttactgtagacactaatggtgtttatagtgaacctcgccctattggaacccggtatctcacacgaaactcgtaa

SEQ ID NO: 781 - DNA, 2212 bp, Artificial Sequence
  source: /note="Description of Artificial Sequence: Synthetic polynucleotide"
atggctgctgacggttatcttccagattggctcgaggacaacctttctgaaggcattcgtgagtggtgggctctgaaacctggagtccctcaacccaaagcgaaccaacaacaccaggacaaccgtcggggtcttgtgcttccgggttacaaatacctcggacccggtaacggactcgacaaaggagagccggtcaacgaggcggacgcggcagccctcgaacacgacaaagcttacgaccagcagctcaaggccggtgacaacccgtacctcaagtacaaccacgccgacgccgagtttcaggagcgtcttcaagaagatacgtcttttgggggcaaccttggcagagcagtcttccaggccaaaaagaggatccttgagcctcttggtctggttgagggagcagctaaaacggctcctggaaagaagaggcctgtagatcagtctcctcaggaaccggactcatcatctggtgttggcaaatcgggcaaacagcttgccagaaaaagactaaatttcggtcagactggcgactcagagtcagtcccagaccctcaacctctcggagaaccaccagcagcccccacaagtttgggatctaatacaatggcttcaggcggtggcgcaccaatggcagacaataacgagggtgccgatggagtgggtaattcctcaggaaattggcattgcgattcccaatggctgggcgacagagtcatcaccaccagcaccagaacctgggccctgcccacttacaacagccatctctacaagcaaatctccggccaatcaggagcttcaaacgacaaccactactttggctacagcaccccctgggggtattttgactttaacagattccactgccacttctcaccacgtgactggcagcgactcattaacaacaactggggattccggcccaagaaactcagcttcaagctcttcaacatccaagttaaagaggtcacgcagaacgatggcacgacgactattgccaataaccttaccagcacggttcaagtgtttacggactcggagtatcagctcccgtacgtgctcgggtcggcgcaccaaggctgtctcccgccgtttccagcggacgtcttcatggtccctcagtatggatacctcaccctgaacaacggaagtcaagcggtgggacgctcatccttttactgcctggagtacttcccttcgcagatgctaaggactggaaataacttccaattcagctataccttcgaggatgtaccttttcacagcagctacgctcacagccagagtttggatcgcttgatgaatcctcttattgatcagtatctgtactacctgaacagaacgcaaggaacaacctctggaacaaccaaccaatcacggctgctttttagccaggctgggcctcagtctatgtctttgcaggccagaaattggctacctgggccctgctaccggcaacagagactttcaaagactgctaacgacaacaacaacagtaactttccttggacagcggccagcaaatatcatctcaatggccgcgactcgctggtgaatcccaggaccagctatggccagtcacaaggacgatgaagaaaaatttttccctatgcacggcaatctaatatttggcaaagaagggacaacggcaagtaacgcagaattagataatgtaatgattacggatgaagaagagattcgtaccaccaatcctgtggcaacagagcagtatggaactgtggcaaataacttgcagagctcaaatacagctcccacgactagaactgtcaatgatcagggggccttacctggcatggtgtggcaagatcgtgacgtgtaccttcaaggacctatctgggcaaagattcctcacacggatggacactttcatccttctcctctgatgggaggctttggactgaaacatccgcctcctcaaatcatgatcaaaaatactccggtaccggcaaatcctccgacgactttcagcccggccaagtttgcttcatttatcactcagtactccactggacaggtcagcgtggaaattgagtgggagctacagaaagaaaacagcaaacgttggaatccagagattcagtacacttccaactacaacaagtctgttaatgtggactttactgtagacactaatggtgtttatagtgaacctcgccctattggaacccggtatctcacacgaaacttgtaa

SEQ ID NO: 782 - DNA, 2212 bp, Artificial Sequence
  source: /note="Description of Artificial Sequence: Synthetic polynucleotide"
atggctgctgacggttatcttccagattggctcgaggacaacctttctgaaggcattcgtgagtggtgggctctgaaacctggagtccctcaacccaaagcgaaccaacaacaccaggacgaccgtcggggtcttgtgcttccgggttacaaatacctcggacccggtaacggactcgacaaaggagagccggtcaacgaggcggacgcggcagccctcgaacacgacaaagcttacgaccagcagctcaaggccggtgacaacccgtgcctcaagtacaaccacgccgacgccgagtttcaggagcgtcttcaagaagatacgtcttttgggggcaaccttggcagagcagtcttccaggccaaaaagaggatccttgagcctcttggtctggttgaggaagcagctaaaacggctcctggaaagaagaggcctgtagatcagtctcctcaggaaccggactcatcatctggtgttggcaaatcgggcaaacagcctgccagaaaaagactaaatttcggtcagactggcgactcagagtcagtcccagaccctcaacctctcggagaaccaccagcagcccccacaagtttgggatctaatacaatggcttcaggcggtagcgcaccaatggcagacaataacgagggtgccgatggagtgggtaattcctcaggaaattggcattgcgattcccaatggctgggcgacagagtcatcaccaccagcaccagaacctgggccctgcccacttacaacaaccatctctacaagcaaatctccagccaatcaggagcttcaaacgacaaccactactttggctacagcaccccttgggggtattttgactttaacagattccactgccacttctcaccacgtgactggcagcgactcattaacaacaactggggattccggcccaagaaactcagcttcaagctcttcaacatccaagttaaagaggtcacgcagaacgatggcacgacgactattgccaataaccttaccagcacggttcaagtgtttacggactcggagtatcagctcccgtacgtgctcgggtcggcgcaccaaggctgtctcccgccgtttccagcggacgtcttcatggtccctcagtatggatacctcaccctgaacaacggaagtcaagcggtgggacgctcatccttttactgcctggagtacttcccttcgcagatgctaaggactggaaataacttccaattcagctataccttcgaggatgtaccttttcacagcagctacgctcacagccagagtttggatcgcttgatggatcctcttattgatcagtatctgtactacctgaacagaacgcaaggaacaacctctggaacaaccaaccaatcacggctgctttttagccaggctgggcctcagtctatgtctttgcaggccagaaattggctacctgggccctgctaccggcaacagagactttcaaagactgctaacgacaacaacaacagtaactttccttggacagcggccagcaaatatcatctcaatggccgcgactcgctggtgaatccaggaccagctatggccagtcacaaaggacgatgaagaaaaatttttccctatgcacggcaatctaatatttggcaaagaagggacaacggcaagtaacgcagaattagataatgtaatgattacggatgaagaagagattcgtaccaccaatcctgtggcaacagagcagtatggaactgtggcaaataacttgcagagctcaaatacagctcccacgactagaactgtcaatgatcagggggccttacctggcatggtgtggcaagatcgtgacgtgtaccttcaaggacctatctgggcaaagattcctcacacggatggacactttcatccttctcctctgatgggaggctttggactgaaacatccgcctcctcaaatcatgatcaaaaatactccggtaccggcaaatcctccgacgactttcagcccggccaagtttgcttcatttatcactcagtactccactggacaggtcagcgtggaaattgagtgggagctacagaaagaaaacagcaaacgttggaatccagagattcagtacacttccaactacaacaagtctgttaatgtggactttactgtagacactaatggtgtttatagtgaacctcgccctattggaacccggtatctcacacgaaacctgtaa

SEQ ID NO: 783 - DNA, 2211 bp, Artificial Sequence
  source: /note="Description of Artificial Sequence: Synthetic polynucleotide"
atggctgctgacggttatcttccagattggctcgaggacaacctttctgaaggcattcgtgagtggtgggctctgaaacctggagtccctcaacccaaagcgaaccaacaacaccaggacgaccgtcggggtcttgtgcttccgggttacaaatacctcggacccggtaacggactcgacaaaggagagccggtcaacgaggcggacgcggcagccctcgaacacgacaaagcttacgaccagcagctcaaggccggtgacaacccgtacctcaagtacaaccacgccgacgccgagtttcaggagcgtcttcaagaagatacgtcttttgggggcaaccttggcagagcagtcttccaggccaaaaagaggatccttgagcctcttggtctggttgaggaagcagctaaaacggctcctggaaagaagaggcctgtagatcagtctcctcaggaaccggactcatcatctggtgttggcaaatcgggcaaacagcctgccagaaaaagactaaatttcggtcagactggcgactcagagtcagtcccagaccctcaacctctcggagaaccaccagcagcccccacaagtttgggatctaatacaatggcttcaggcggtggcgcaccaatggcagacaataacgagggtgccgatggagtgggtaattcctcaggaaattggcattgcgattcccaatggctgggcaacagagtcatcaccaccagcaccagaacctgggccctgcccacttacaacaaccatctctacaagcaaatctccagccaatcaggagcttcaaacgacaaccactactttggctacagcaccccttgggggtattttgactttaacagattccactgccacttctcaccacgtgactggcagcgactcattaacaacaactggggattccggcccaagaaactcagcttcaagctcttcaacatccaagttaaagaggtcacgcagaacgatggcacgacgactattgccaataaccttaccagcacggttcaagtgtttacggactcggagtatcagctcccgtacgtgctcgggtcggcgcaccaaggctgtctcccgccgtttccagcggacgtcttcatggtccctcagtatggatacctcaccctgaacaacggaagtcaagcggtgggacgctcatccttttactgcctggagtacttcccttcgcagatgctaaggactggaaataacttccaattcagctataccttcgaggatgtaccttttcacagcagctacgctcacagccagagtttggatcgcttgatgaatcctcttattgatcagtatctgtactacctgaacagaacgcaaggaacaacctctggaacaaccaaccaatcacggctgctttttagccaggctgggcctcagtctatgtctttgcaggccagaaattggctacctgggccctgctaccggcaacagagactttcaaagactgctaacgacaacaacaacagtaactttccttggacagcggccagcaaatatcatctcaatggccgcgactcgctggtgaatccaggaccagctatggccagtcacaaggacgatgaagaaaaatttttccctatgcacggcaatctaatatttggcaaagaagggacaacggcaagtaacgcagaattagataatgtaatgattacggatgaagaagagattcgtaccaccaatcctgtggcaacagagcagtatggaactgtggcaaataacttgcagagctcaaatacagctcccacgactagaactgtcaatgatcagggggccttacctggcatggtgtggcaagatcgtgacgtgtaccttcaaggacctatctgggcaaagattcctcacacggatggacactttcatccttctcctctgatgggaggctttggactgaaacatccgcctcctcaaatcatgatcaaaaatactccggtaccggcaaatcctccgacgactttcagcccggccaagtttgcttcatttatcactcagtactccactggacaggtcagcgtggaaattgagtgggagctacagaaagaaaacagcaaacgttggaatccagagattcagtacacttccaactacaacaagtctgttaatgtggactttactgtagacactaatggtgtttatagtgaacctcgccctattggaacccggtatctcacacgaaacttgtaa

SEQ ID NO: 784 - DNA, 2211 bp, Artificial Sequence
  source: /note="Description of Artificial Sequence: Synthetic polynucleotide"
atggctgctgacggttatcttccagattggctcgaggacaacctttctgaaggcattcgtgagtggtgggctctgaaacctggagtccctcaacccaaagcgaaccaacaacaccaggacgaccgtcggggtcttgtgcttccgggttacaaatacctcggacccggtaacggactcgacaaaggagagccggtcaacgaggcggacgcggcagccctcgaacacgacaaagcttacgaccagcagctcaaggccggtgacaacccgtacctcaagtacaaccacgccgacgccgagtttcaggagcgtcttcaagaagatacgtcttttgggggcaaccttggcagagcagtcttccaggccaaaaagaggatccttgagcctcttggtctggttgaggaagcagctaaaacggctcctggaaagaagaggcctgtagatcagtctcctcaggaaccggactcatcatctggtgttggcaaatcgggcaaacagcctgccagaaaaagactaaatttcggtcagactggcgactcagagtcagtcccagaccctcaacctctcggagaaccaccagcagcccccacaagtttgggatctaatacaatggcttcaggcggtggcgcaccaatggcggacaataacgagggtgccgatggagtgggtaattcctcaggaaattggcattgcgattcccaatggctgggcgacagagtcatcaccaccagcaccagaacctgggccctgcccacttacaacaaccatctctacaagcaaatctccagccaatcaggagcttcaaacgacaaccactactttggctacagcaccccttgggggtattttgactttaacagattccactgccacttctcaccacgtgactggcagcgactcattaacaacaactggggattccggcccaagaaactcagcttcaagctcttcaacatccaagttaaagaggtcacgcagaacgatggcacgacgactattgccaataaccttaccagcacggttcaagtgtttacggactcggagtatcagctcccgtacgtgctcgggtcggcgcaccaaggctgtctcccgccgtttccagcggacgtcttcatggtccctcagtatggatacctcaccctgaacaacggaagtcaagcggtgggacgctcatccttttactgcctggagtacttcccttcgcagatgctaaggactggaaataacttccaattcagctataccttcgaggatgtaccttttcacagcagctacgctcacagccagagtttggatcgcttgatgaatcctcttattgatcagtatctgtactacctgaacagaacgcaaggaacaacctctggaacaaccaaccaatcacggctgctttttagccaggctgggcctcagtctatgtctttgcaggccagaaattggctacctgggccctgctaccggcaacagagactttcaaagactgctaacgacaacaacaacagtaactttccttggacagcggccagcaaatatcatctcaatggccgcgactcgctggtgaatccaggaccagctatggccagtcacaaggacgatgaagaaaaatttttccctatgcacggcaatctaatatttggcaaagaagggacaacggcaagtaacgcagaattagataatgtaatgattacggatgaagaagagattcgtaccaccaatcctgtggcaacagtgcagtatggaactgtggcaaataacttgcagagctcaaatacagctcccacgactagaactgtcaatgatcagggggccttacctggcatggtgtggcaagatcgtgacgtgtaccttcaaggacctatctgggcaaagattcctcacacggatggacactttcatccttctcctctgatgggaggctttggactgaaacatccgcctcctcaaatcatgatcaaaaatactccggtaccggcaaatcctccgacgactttcagcccggccaagtttgcttcatttatcactcagtactccactggacaggtcagcgtggaaattgagtgggagctacagaaagaaaacagcaaacgttggaatccagagattcagtacacttccaactacaacaagtctgttaatgtggactttactgtagacactaatggtgtttatagtgaacctcgccctattggaacccggtatctcacacgaaacttgtaa

SEQ ID NO: 785 - DNA, 2211 bp, Artificial Sequence
  source: /note="Description of Artificial Sequence: Synthetic polynucleotide"
atggctgctgacggttatcttccagattggctcgaggacaacctttctgaaggcattcgtgagtggtgggctctgaaacctggagtccctcaacccaaagcgaaccaacaacaccaggacaaccgtcggggtcttgtgcttccgggttacaaatacctcggacccggtaacggactcgacaaaggagagccggtcaacgaggcggacgcggcagccctcgaacacgacaaagcttacgaccagcagctcaaggccggtgacaacccgtacctcaagtacaaccacgccgacgccgagtttcaggagcgtcttcaagaagatacgtcttttgggggcaaccttggcagagcagtcttccaggccaaaaaggggatccttgagcctcttggtctggttgaggaagcagctaaaacggctcctggaaagaagaggcctgtagatcagtctcctcaggaaccggactcatcatctggtgttggcaaatcgggcaaacagcctgccagaaaaagactaaatttcggtcagactggcgactcagagtcagtcccagaccctcaacctctcggagaaccaccagcagcccccacaagtttgggatctaatacaatggcttcaggcggtggcgcaccaatggcagacaataacgagggtgccgatggagtgggtaattcctcaggaaattggcattgcgattcccaatggctgggcgacagagtcatcaccaccagcaccagaacctgggccctgcccacttacaacaaccatctctacaagcaaatctccagccaatcaggagcttcaaacgacaaccactactttggctacagcaccccttgggggtattttgactttaacagattccactgccacttctcaccacgtgactggcagcgactcattaacaacaactggggattccggcccaagaaactcagcttcaagctcttcaacatccaagttaaagaggtcacgcagaacgatggcacgacgactattgccaataaccttaccagcacggttcaagtgtttacggactcggagtatcagctcccgtacgtgttcgggtcggcgcaccaaggctgtctcccgccgtttccagcggacgtcttcatggtccctcagtatggatacctcaccctgaacaacggaagtcaagcggtgggacgctcatccttttactgcctggagtacttcccttcgcagatgctaaggactggaaataacttccaattcagctataccttcgaggatgtaccttttcacagcagctacgctcacagccagagttcggatcgcttgatgaatcctcttattgatcagtatctgtactacctgaacagaacgcaaggaacaacctctggaacaaccaaccaatcacggctgctttttagccaggctgggcctcagtctatgtctttgcaggccagaaattggctacctgggccctgctaccggcaacagagactttcaaagactgctaacgacaacaacaacagtaactttccttgaacagcggccagcaaatatcatctcaatggccgcgactcgctggtgaatccaggaccagctatggccagtcacaaggacgatgaagaaaaatttttccctatgcacggcaatctaatatttggcaaagaagggacaacggcaagtaacgcagaattagataatgtaatgattacggatgaagaagagattcgtaccaccaatcctgtggcaacagagcagtatggaactgtggcaaataacttgcagagctcaaatacagctcccacgactagaactgtcaatgatcagggggccttacctggcatggtgtggcaagatcgtgacgtgtaccttcaaggacctatctgggcaaagattcctcacacggatggacactttcatccttctcctctgatgggaggctttggactgaaacatccgcctcctcaaatcatgatcaaaaatactccggtaccggcaaatcctccgacgactttcagcccggccaagtttgcttcatttatcactcagtactccactggacaggtcagcgtggaaattgagtgggagctacagaaagaaaacagcaaacgttggaatccagagattcagtacacttccaactacaacaagtctgttaatgtggactttactgtagacactaatggtgtttatagtgaacctcgccctattggaacccggtatctcacacgaaacttgtaa

SEQ ID NO: 786 - DNA, 2211 bp, Artificial Sequence
  source: /note="Description of Artificial Sequence: Synthetic polynucleotide"
atggctgctgacggttatcttccagattggctcgaggacaacctttctgaaggcattcgtgagtggtgggctctgaaacctggagtccctcaacccaaagcgaaccaacaacaccaggacaaccgtcggggtcttgtgcttccgggttacaaatacctcggacccggtaacggactcgacgaaggagagccggtcaacgaggcggacgcggcagccctcgaacacgacaaagcttacgaccagcagctcaaggccggtgacaacccgtacctcaagtacaaccacgccgacgccgagtttcaggagcgtcttcaagaagatacgtcttttgggggcaaccttggcagagcagtcttccaggccaaaaagaggatccttgagcctcttggtctggttgagggagcagctaaaacggctcctggaaagaagaggcctgtagatcagtctcctcaggaaccggactcatcatctggtgttggcaaatcgggcaaacagcctgccagaaaaagactaaatttcggtcagactggcgactcagagtcagtcccagaccctcaacctctcggagaaccaccagcagcccccacaagtttgggatctaatacaatggcttcaggcggtggcgcaccaatggcagacaataacgagggtgccgatggagtgggtaattcctcaggaaattggcattgcgattcccaatggctgggcgacagagtcatcaccaccagcaccagaacctgggccctgcccacttacaacagccacctctacaagcaaatctccagccaatcaggagcttcaaacgacaaccactactttggctacagcaccccttgggggtattttgactttaacagattccactgccacttctcaccacgtgactggcagcgactcattaacaacaactggggattccggcccaagaaactcagcttcaagctcttcaacatccaagttaaagaggtcacgcagaacgatggcacgacgactattgccaataaccttaccagcacggttcaagtgtttacggactcggagtatcagctcccgtacgtgctcgggtcggcgcaccaaggctgtctcccgccgtttccagcggacgtcttcatggtccctcagtatggatacctcaccctgaacaacggaagtcaagcggtgggacgctcatccttttactgcctggagtacttcccttcgcagatgctaaggactggaaataacttccaattcagctataccttcgaggatgtaccttttcacagcagctacgctcacagccagagtttggatcgcttgatgaatcctcttattgatcagtatctgtactacctgaacagaacgcaaggaacaacctctggaacaaccaaccaatcacggctgctttttagccaggctgggcctcagtctatgtctttgcaggccagaaattggctacctgggccctgctaccggcaacagagactttcaaagactgctaacgacaacaacaacagtaactttccttggacagcggccagcaaatatcatctcaatggccgcgactcgctggtgaatccaggaccagctatggccagtcacaaggacgatgaagaaaaatttttccctatgcacggcaatctaatatttggcaaagaagggacaacggcaagtaacgcagaattagataatgtaatgattacggatgaagaagagattcgtaccaccaatcctgtggcaacagagcagtatggaactgtggcaaataacttgcagagctcaaatacagctcccacgactagaactgtcaatgatcagggggccttacctggcatggtgtggcaagatcgtgacgtgtaccttcaaggacctatctgggcaaagattcctcacacggatggacactttcatccttctcctctgatgggaggctttggactgaaacatccgcctcctcaaatcatgatcaaaaatactccggtaccggcaaatcctccgacgactttcagcccggccaagtttgcttcatttatcactcagtactccactggacaggtcagcgtggaaattgagtgggagctacagaaagaaaacagcaaacgttggaatccagagattcagtacacttccaactacaacaagtctgttaatgtggactttactgtagacactaatggtgtttatagtgaacctcgccctattggaacccggtatctcacacgaaacttgtaa

SEQ ID NO: 787 - DNA, 2211 bp, Artificial Sequence
  source: /note="Description of Artificial Sequence: Synthetic polynucleotide"
atggctgctgacggttatcttccagattggctcgaggacaacctttctgaaggcattcgtgagtggtgggctctgaaacctggagtccctcaacccaaagcgaaccaacaacaccaggacaaccgtcggggtcttgtgcttccgggttacaaatacctcggacccggtaacggactcgacaaaggagagccggtcaacgaggcggacgcggcagccctcgaacacgacaaagcttacgaccagcagctcaaggccggtgacaacccgtacctcaagtacaaccacgccgacgccgagtttcaggagcgtcttcaagaagatacgtcttttgggggcaaccttggcagagcagtcttccaggccaaaaagaggatccttgagcctcttggtctggttgagggagcagctaaaacggctcctggaaagaagaggcctgtagatcagtctcctcaggaaccggactcatcatctggtgttggcaaatcgggcaaacagcctgccagaaaaagactaaatttcggtcagactggcgactcagagtcagtcccagaccctcaacctctcggagaaccaccagcagcccccacaagtttgggatctaatacaatggcttcaggcggtggcgcaccaatggcagacaataacgagggtgccgatggagtgggtaattcctcaggaaattggcattgcgattcccaatggctgggcgacagagtcatcaccaccagcaccagaacctgggccctgcccacttacaacagccatctctacaagcaaatctccagccaatcaggagcttcaaacgacaaccactactttggctacagcaccccttggggtattttgactttaacagattccactgccacttctcaccacgtgactggcagcgactcattaacaacaactggggattccggcccaagaaactcagcttcaagctcttcaacatccaagttaaagaggtcacgcagaacgatggcacgacgactattgccaataaccttaccagcacggttcaagtgtttacggactcggagtatcagctcccgtacgtgctcgggtcggcgcaccaaggctgtctcccgccgtttccagcggacgccttcatggtccctcagtatggatacctcaccctgaacaacggaagtcaagcggtgggacgctcatccttttactgcctggagtacttcccttcgcagatgctaaggactggaaataacttccaattcagctataccctcgaggatgtaccttttcacagcagctacgctcacagccagagtttggatcgcttgatgaatcctcttattgatcagtatctgtactacctgaacagaacgcaaggaacaacctctggaacaaccaaccaatcacggctgctttttagccaggctgggcctcagtctatgtctttgcaggccagaaattggctacctgggccctgctaccggcaacagagactttcaaagactgctaacgacaacaacaacagtaactttccttggacagcggccagcaaatatcatctcaatggccgcgactcgctggtgaatccaggaccagctatggccagtcacaaaggacgatgaagaaaaatttttccctatgcacggcaatctaatatttggcaaagaagggacaacggcaagtaacgcagaattagatagtgtaatgattacggatgaagaagagattcgtaccaccaatcctgtggcaacagagcagtatggaactgtggcaaataacttgcagagctcaaatacagctcccacgactagaactgtcaatgatcagggggccttacctggcatggtgtggcaagatcgtgacgtgtaccttcaaggacctatctgggcaaagattcctcacacggatggacactttcatccttctcctctgatgggaggctttggactgaaacatccgcctcctcaaatcatgatcaaaaatactccggtaccggcaaatcctccgacgactttcagcccggccaagtttgcttcatttatcactcagtactccactggacaggtcagcgtggaaattgagtgggagctacagaaagaaaacagcaaacgttggaatccagagattcagtacacttccaactacaacaagtctgttaatgtggactttactgtagacactaatggtgtttatagtgaacctcgccctattggaacccggtatctcacacgaaacttgtaa

SEQ ID NO: 788 - DNA, 2205 bp, Artificial Sequence
  source: /note="Description of Artificial Sequence: Synthetic polynucleotide"
atgactgacggttaccttccagattggctagaggacaacctctctgagggcgttcgagagtggtgggcgctgcaacctggagcccctaaacccaaggcaaatcaacaacatcaggacaacgctcggggtcttgtgcttccgggttacaaatacctcggacccggcaacggactcgacaagggggaacccgtcaacgcagcggacgcggcagccctcgagcacgacaaggcctacgaccagcagctcaaggccggtgacaacccctacctcaagtacaaccacgccgacgcggagttccagcagcggcttcagggcgacacatcgtttgggggcaacctcggcagagcagtcttccaggccaaaaagagggttcttgaacctcttggtctggttgagcaagcgggtgagacggctcctggaaagaagagaccgttgattgaatccccccagcagcccgactcctccacgggtatcggcaaaaaaggcaagcagccggctaaaaagaagctcgttttcgaagacgaaactggagcaggcgacggaccccctgagggatcaacttccggagccatgtctgatgacagtgagatgcgtgcagcaactggcggagctgcagtcgagggcggacaaggtgccgatggagtgggtaatgcctcgggtgattggcattgcgattccacctggtctgagggccacgtcacgaccaccagcaccagaacctgggtcttgcccacctacaacaaccacctctacaagcgactcggagagagcctgcagtccaacacctacaacggattctccaccccctggggatactttgacttcaaccgcttccactgccacttctcaccacgtgactggcagcgactcatcaacaacaactggggcatgcgacccaaagccatgcgggtcaaaatcttcaacatccaggtcaaggaggtcacgacgtcgaacggcgagacaacggtggctaataaccttaccagcacggttcagatctttgcggactcgtcgtacgaactgccgtacgtgatggatgcgggtcaagagggcagcctgcctccttttcccaacgacgtctttatggtgccccagtacggctactgtggactggtgaccggcaacacttcgcagcaacagactgacagaaatgccttctactgcctggagtactttccttcgcagatgctgcggactggcaacaactttgaaattacgtacagttttgagaaggtgcctttccactcgatgtacgcgcacagccagagcctggaccggctgatgaaccctctcatcgaccagtacctgtggggactgcaatcgaccaccaccggaaccaccctgaatgccgggactgccaccaccaactttaccaagctgcggcctaccaacctttccaactttaaaaagaactggctgcccgggccttcaatcaagcagcagggcttctcaaagactgccaatcaaaactacaagatccctgccaccgggtcagacagtctcatcaaatacgagacgcacagcactctggacggaagatggagtgccctgacccccggacctccaatggccacggctggacctgcggacagcaagttcagcaacagccagctcatctttgcggggcctaaacagaacggcaacacggccaccgtacccgggactctgatcttcacctctgaggaggagctggcagccaccaacgctaccgatacggacatgtggggcaacctacctggcggtgaccagagcaacagcaacctgccgaccgtggacagactgacagccttgggagccgtgcctggaatggtctggcaaaacagagacatttactaccagggtcccatttgggccaagattcctcataccgatggacactttcacccctcaccgctgattggtgggtttgggctgaaacacccgcctcctcaaatttttatcaagaacaccccggtacctgcgaatcctgcgacgaccttcagctctactccggtaaactccttcattactcagtacagcactggccaggtgtcggtgcagattgactgggagatccagaaggagcggtccaaacgctggaaccccgaggtccagtttacctccaactacggacagcaaaactctctgttgtgggctcccgatgcggctgggaaatacactgagcctagggctatcggtacccgctacctcacccaccacctgtaa

SEQ ID NO: 789 - DNA, 2205 bp, Artificial Sequence
  source: /note="Description of Artificial Sequence: Synthetic polynucleotide"
atgactgacggttaccttccagattggctagaggacaacctctctgaaggcgttcgagagtggtgggcgctgcaacctggagcccctaaacccaaggcaaatcaacaacatcaggacaacgctcggggtcttgtgcttccgggttacaaatacctcggacccggcaacggactcgacaagggggaacccgtcaacgcagcggacgcggcagccctcgagcacgacaaggcctacgaccagcagctcaaggccggtgacaacccctacctcaagtacaaccacgccgacgcggagttccagcagcggcttcagggcgacacatcgtttgggggcaacctcggcagagcagtcttccaggccaaaaagagggttcttgaacctcttggtctggttgagcaagcgggtgagacggctcctggaaagaagagaccgttgattgaatccccccagcagcccgactcctccacgggtatcggcaaaaaaggcaagcagccggctaaaaagaagctcgttttcgaagacgaaactggagcaggcgacggaccccctgagggatcaacttccggagccatgtctgatgacagtgagatgcgtgcagcagctggcggagctgcagtcgagggcggacaaggtgccgatggagtgggtaatgcctcgggtgattggcattgcgattccacctggtctgagggccacgtcacgaccaccagcaccagaacctgggtcttgcccacctacaacaaccacctctacaagcgactcggagagagcctgcagtccaacacctacaacggattctccaccccctggggatactttgacttcaaccgcttccactgccacttcttaccacgtgactggcagcgactcatcaacaacaactggggcgtgcgacccaaagccatgcgggtcaaaatcttcaacatccaggtcaaggaggtcacgacgtcgaacggcgagacaacggtggctaataaccttaccagcacggttcagatctttgcggactcgtcgtacgaactgccgtacgtgatggatgcgggtcaagagggcagcctgcctccttttcccaacgacgtctttatggtgccccagtacggctactgtggactggtgaccggcgacacttcgcagcaacagactgacagaaatgccttctactgcctggagtactttccttcgcagatgctgcggactggcaacaactttgaaattacgtacagttttgagaaggtgcctttccactcgatgtacgcgcacagccagagcctggaccggctgatgaaccctctcatcgaccagtacctgtggggactgcaatcgaccaccaccggaaccaccctgaatgccgggactgccaccaccaactttaccaagctgcggcctaccaacttttccaactttaaaaagaactggctgcccgggccttcaatcaagcagcagggcttctcaaagactgccaatcaaaactacaagatccctgccaccgggtcagacagtctcatcaaatacgagacgcacagcactctggacggaagatggagtgccctgacccccggacctccaatggccacggctggacctgcggacagcaagttcagcaacagccagctcatctttgcggggcctaaacagaacggcaacacggccaccgtacccgggactctgatcttcacctctgaggaggagctggcagccaccaacgccaccgatacggacatgtggggcaacctacctggcggtgaccagagcaacagcaacctgccgaccgtggacagactgacagccttgggagccgtgcctggaatggtctggcaaaacagagacatttactaccagggtcccatttgggccaagattcctcataccgatggacactttcacccctcaccgctgattggtgggtttgggctgaaacacccgcctcctcaaatttttatcaagaacaccccggtacctgcgaatcctgcgacgaccttcagctctactccggtaaactccttcattactcagtacagcactggccaggtgtcggtgcagattgactgggagatccagaaggagcggtccaaacgctggaaccccgaggtccagtttacctccaactacggacagcaaaactctctgttgtgggctcccgatgcggctgggaaatacactgagcctagggctatcggtacccgctacctcacccaccacctgtaa

SEQ ID NO: 790 - DNA, 2205 bp, Artificial Sequence
  source: /note="Description of Artificial Sequence: Synthetic polynucleotide"
atgactgacggttaccttccagattggctagaggacaacctctctgaaggcgttcgagagtggtgggcgctgcaacctggagcccctaaacccaaggcaaatcaacaacatcaggacaacgctcggggtcttgtgcttccgggttacaaatacctcggacccggcaacggactcgacgagggggaacccgtcaacgcagcggacgcggcagccctcgagcacgacaaggcctacgaccagcagctcaaggccggtgacaacccctacctcaagtacaaccacgccgacgcggagttccagcagcggcttcagggcgacacatcgtttgggggcaacctcggcagagcagtcttccaggccaaaaagagggttcttgaacctcttggtctggttgagcaagcgggtgagacggctcctggaaagaagagaccgttgattgaatccccccagcagcccgactcctccacgggtatcggcaaaaaaggcaagcagccggctaaaaagaagctcgttttcgaagacgaaactggagcaggcgacggaccccctgagggatcaacttccggagccatgtctgatgacagtgagatgcgtgcagcagctggcggagctgcagtcgagggcggacaaggtgccgatggagtgggtaatgcctcgggtgattggcattgcgattccacctggtctgagggccacgtcacgaccaccagcaccagaacctgggtcttgcccacctacaacaaccacctctacaagcgactcggagagagcctgcagtccaacacctacaacggattctccaccccctggggatactttgacttcaaccgcttccactgccacttctcaccacgtgactggcagcgactcatcaacaacaactggggcatgcgacccaaagccatgcgggtcaaaatcttcaacatccaggtcaaggaggtcacgacgtcgaacggcgagacaacggtggctaataaccttaccagcacggttcagatctttgcggactcgtcgtacgaactgccgtacgtgatggatgcgggtcaagagggcagcctgcctccttttcccaacgacgtctttatggtgccccagtacggctactgtggactggtgaccggcaacacttcgcagcaacagactgacagaaatgccttctactgcctggagtactttccttcgcagatgctgcggactggcaacaactttgaaattacgtacagttttgagaaggtgcctttccactcgatgtacgcgcacagccagagcctggaccggctgatgaaccctctcatcgaccagtacctgtggggactgcaatcgaccaccaccggaaccaccctgaatgccgggactgccaccaccaactttaccaagctgcggcctaccaacttttccaactttaaaaagaactggctgcccgggccttcaatcaagcagcagggcttctcaaagactgccaatcaaaactacaagatccctgccaccgggtcagacagtctcatcaaatacgagacgcacagcactctggacggaagatggagtgccctgacccccggacctccaatggccacggctggacctgcggacagcaagttcagcaacagccagctcatctttgcggggcctaaacagaacggcaacacggccaccgtacccgggactctgatcttcacctctgaggaggagctggcagccaccaacgctaccgatacggacatgtggggcaacctacctggcggtgaccagagcaacagcaacctgccgaccgtggacagactgacagccttgggagccgtgcctggaatggtctggcaaaacagagacatttactaccagggtcccatttgggccaagattcctcataccgatggacactttcacccctcaccgctgattggtgggtttgggctgaaacacccgcctcctcaaatttttatcaagaacaccccggtacctgcgaatcctgcgacgaccttcagctctactccggtaaactccttcattactcagtacagcactggccaggtgtcggtgcagattgactgggagatccagaaggagcggtccaaacgctggaaccccgaggtccagtttacctccaactacggacagcaaaactctctgttgtgggctcccgatgcggctgggaaatacactgagcctagggctatcggtacccgctacctcacccaccacctgtaa

SEQ ID NO: 791 - DNA, 2205 bp, Artificial Sequence
  source: /note="Description of Artificial Sequence: Synthetic polynucleotide"
atgactgacggttaccttccagattggctagaggacaacctctctgaaggcgttcgagagtggtgggcgctgcaacctggagcccctaaacccaaggcaaatcaacaacatcaggacaacgctcggggtcttgtgcttccgggttacaaatacctcggacccggcaacggactcgacaagggggaacccgtcaacgcagcggacgcggcagccctcgagcacgacaaggcctacgaccagcagctcaaggccggtgacaacccctacctcaagtacaaccacgccgacgcggagttccagcagcggcttcagggcgacacatcgtttgggggcaacctcggcagagcagtcttccaggccaaaaagagggttcttgaacctcttggtctggttgagcaagcgggtgagacggctcctggaaagaagagaccgttgattgaatccccccagcagcccgactcctccacgggtatcggcaaaaaaggcaagcagccggctaaaaagaagctcgttttcgaagacggaactggagcaggcgacggaccccctgagggatcaacttccggagccatgtctgatgacagtgagatgcgtgcagcagctggcggagctgcagtcgagggcggacaaggtgccgatggagtgggtaatgcctcgggtgattggcattgcgattccacctggtctgagggccacgtcacgaccaccagcaccagaacctgggtcttgcccacctacaacaaccacctctacaagcgactcggagagagcctgcagtccaacacctacaacggattccccaccccctggggatactttgacttcaaccgcttccactgccacttctcaccacgtgactggcagcgactcatcaacaacaactggggcatgcgacccaaagccatgcgggtcaaaatcttcaacatccaggtcaaggaggtcacgacgtcgaacggcgagacaacggcggctaataaccttaccagcacggttcagatctttgcggactcgtcgtacgaactgccgtacgtgatggatgcgggtcaagagggcagcctgcctccttttcccaacgacgtctttatggtgccccagtacggctactgtggactggtgaccggcaacacttcgcagcaacagactgacagaaatgccttctactgcctggagtactttccttcgcagatgctgcggactggcaacaactttgaaattacgtacagttttgagaaggtgcctttccactcgatgtacgcgcacagccagagcctggaccggctgatgaaccctctcatcgaccagtacctgtggggactgcaatcgaccaccaccggaaccaccctgaatgccgggactgccaccaccaactttaccaagctgcggcctaccaacttttccaactttaaaaagaactggctgcccgggccttcaatcaagcagcagggcttctcaaagactgccaatcaaaactacaagatccctgccaccgggtcagacagtctcatcaaatacgagacgcacagcactctggacggaagatggagtgccctgacccccggacctccaatggccacggctggacctgcggacagcaagttcagcaacagccagctcatctttgcggggcctaaacagaacggcaacacggccaccgtacccgggactctgatcttcacctctgaggaggagctggcagccaccaacgccaccgatacggacatgtggggcaacctacctggcggtgaccagagcaacagcaacctgccgaccgtggacagactgacagccttgggagccgtgcctggaatggtctggcaaaacagagacatttactaccagggtcccatttgggccaagattcctcataccgatggacactttcacccctcaccgctgattggtgggtttgggctgaaacacccgcctcctcaaatttttatcaagaacaccccggtacctgcgaatcctgcgacgaccttcagctctactccggtaaactccttcattactcagtacagcactggccaggtgtcggtgcagattgactgggagatccagaaggagcggtccaaacgctggaaccccgaggtccagtttacctccaactacggacagcaaaactctctgttgtgggctcccgatgcggctgggaaatacactgagcctagggctatcggtacccgctacctcacccaccacctgtaa

SEQ ID NO: 792 - DNA, 2205 bp, Artificial Sequence
  source: /note="Description of Artificial Sequence: Synthetic polynucleotide"
atgactgacggttaccttccagattggctagaggacaacctctctgaaggcgttcgagagtggtgggcgctgcaacctggagcccctaaacccaaggcaaatcaacaacatcaggacaacgctcggggtcttgtgcttccgggttacaaatacctcggacccggcaacggactcgacaagggggaacccgtcaacgcagcggacgcggcagccctcgagcacgacaaggcctacgaccagcagctcaaggccggtgacaacccctacctcaagtacaaccacgccgacgcggagttccagcagcggcttcagggcgacacatcgtttgggggcaacctcggcagagcagtcttccaggccaaaaagagggttcttgaacctcttggtctggttgagcaagcgggtgagacggctcctggaaagaagagaccgttgattgaatccccccagcagcccgactcctccacgggtatcggcaaaaaaggcaagcagccggctaaaaagaagctcgttttcgaagacgaaactggagcaggcgacggaccccctgagggatcaacttccggagccatgtctgatgacagtgagatgcgtgcagcagctggcggagctgcagtcgagggcggacaaggtgccgatggagtgggtaatgcctcgggtgattggcattgcgattccacctggtctgagggccacgtcacgaccaccagcaccagaacctgggtcttgcccacctacaacaaccacctctacaagcgactcggagagagcctgcagtccaacacctacaacggattctccaccccctggggatactttgacttcaaccgcttccactgccacttctcaccacgtgactggcagcgactcatcaacaacaactggggcatgcgacccaaagccatgcgggtcaaaatcttcaacatccaggtcaaggaggtcacgacgtcgaacggcgagacaacggtggctaataaccttaccagcacggttcagatctttgcggactcgtcgtacgaactgccgtacgtgatggatgcgggtcaagagggcagcctgcctccttttcccaacgacgtctttatggtgccccagtacggctaccgtggactggtgaccggcaacacttcgcagcaacagactgacagaaatgccttctactgcctggagtactttccttcgcagatgctgcggactggcaacaactttgaaattacgtacagttttgagaaggtgcctttccactcgatgtacgcgcacagccagagcctggaccggctgatgaaccctctcatcgaccagtacctgtggggactgcaatcgaccaccaccggaaccaccctgaatgccgggactgccaccaccaactttaccaagctgcggcctaccaacttttccaactttaaaaagaactggctgcccgggccttcaatcaagcagcagggcttctcaaagactgccaatcaaaactacaagatccctgccaccgggtcagacagtctcatcaaatacgagacgcacagcactctggacggaagatggagtgccctgacccccggacctccaatggccacggctggacctgcggacagcaagttcagcaacagccagctcatctttgcggggcctaaacagaacggcaacacggccaccgtacccgggactctgatcttcacctctgaggaggagctggcagccaccaacgccaccgatacggacatgtggggcaacctacctggcggtgaccagagcaacagcaacctgccgaccgtggacagactgacagccttgggagccgtgcctggaatggtctggcaaaacagagacatttactaccagggtcccatttgggccaagattcctcataccgatggacactttcacccctcaccgctgattggtgggtttgggctgaaacacccgcctcctcaaatttttatcaagaacaccccggtacctgcgaatcctgcgacgaccttcagctctactccggtaaactccttcattactcagtacagcactggccaggtgtcggtgcagattgactgggagatccagaaggagcggtccaaacgctggaaccccgaggtccagtttacctccaactacggacagcaaaactctctgttgtgggctcccgatgcggctgggaaatacactgagcctagggctatcggtacccgctacctcacccaccacctgtaa

SEQ ID NO: 793 - DNA, 2205 bp, Artificial Sequence
  source: /note="Description of Artificial Sequence: Synthetic polynucleotide"
atgactgacggttaccttccagattggctagaggacaacctctctgaaggcgttcgagagtggtgggcgctgcaacctggagcccctaaacccaaggcaaatcaacaacatcaggacaacgctcggggtcttgtgcttcagggttacaaatacctcggacccggcaacggactcgacaagggggaacccgtcaacgcagcggacgcggcagccctcgagcacgacaaggcctacgaccagcagctcaaggccggtgacaacccctacctcaagtacaaccacgccgacgcggagttccagcagcggcttcagggcgacacatcgtttgggggcaacctcggcagagcagtcttccaggccaaaaagagggttcttgaaccccttggtctggttgagcaagcgggtgagacggctcctggaaagaagagaccgttgattgaatccccccagcagcccgactcctccacgggtatcggcaaaaaaggcaagcagccggctaaaaagaagctcgttttcgaagacgaaactggagcaggcgacggaccccctgagggatcaacttccggagccatgtctgatgacagtgagatgcgtgcagcagctggcggagctgcagtcgagggcggacaaggtgccgatggagtgggtaatgcctcgggtgattggcattgcgattccacccggtctgagggccacgtcacgaccaccagcaccagaacctgggtcttgcccacctacaacaaccacctctacaagcgactcggagagagcctgcagtccaacacctacaacggattctccaccccctggggatactttgacttcaaccgcttccactgccacttctcaccacgtgactggcagcgactcatcaacaataactggggcatgcgacccaaagccatgcgggtcaaaatcttcaacatccaggtcaaggaggtcacgacgtcgaacggcgagacaacggtggctaataaccttaccagcacggttcagatctttgcggactcgtcgtacgaactgccgtacgtgatggatgcgggtcaagagggcagcctgcctccttttcccaacgacgtctttatggtgccccagtacggctactgtggactggtgaccggcaacacttcgcagcaacagactgacagaaatgccttctactgcctggagtactttccttcgcagatgctgcggactggcaacaactttgaaattacgtacagttttgagaaggtgcctttccactcgatgtacgcgcacagccagagcctggaccggctgatgaaccctctcatcgaccagtacctgtggggactgcaatcgaccaccaccggaaccaccctgaatgccgggactgccaccaccaactttaccaagctgcggcctaccaacttttccaactttaaaaagaactggctgcccgggccttcaatcaagcagcagggcttctcaaagactgccaatcaaaactacaagatccctgccaccgggtcagacagtctcatcaaatacgagacgcacagcactctggacggaagatggagtgcccggacccccggacctccaatggccacggctggacctgcggacagcaagttcagcaacagccagctcatctttgcggggcctaaacagaacggcaacacggccaccgtacccgggactctgatcttcacctctgaggaggagctggcagccaccaacgccaccgatacggacatgtggggcaacctacctggcggtgaccagagcaacagcaacctgccgaccgtggacagactgacagccttgggagccgtgcctggaatggtctggcaaaacagagacatttactaccagggtcccatttgggccaagattcctcataccgatggacactttcacccctcaccgctgattggtgggtttgggctgaaacacccgcctcctcaaatttttatcaagaacaccccggtacctgcgaatcctgcgacgaccttcagctctactccggtaaactccttcattactcagtacagcactggccaggtgtcggtgcagattgactgggagatccagaaggagcggtccaaacgctggaaccccgaggtccagtttacctccaactacggacagcaaaactctctgttgtgggctcccgatgcggctgggaaatacactgagcctagggctatcggtacccgctacctcacccaccacctgtaa

SEQ ID NO: 794 - DNA, 2175 bp, Artificial Sequence
  source: /note="Description of Artificial Sequence: Synthetic polynucleotide"
atgtcttttgttgatcaccctccagattggttggaagaagttggtgaaggtcttcgcgagtttttgggccttgaagcgggcccaccgaaaccaaaacccaatcagcagcatcaagatcaagcccgtggtcttgtgctgcctggttataactatctcggacccggaaacggtctcgatcgaggagagcctgtcaacagggcagacgaggtcgcgcgagagcacgacatctcgtacaacgagcagcttgaggcgggagacaacccctacctcaagtacaaccacgcggacgccgagtttcaggagaggctcgccgacgacacatccttcgggggaaacctcggaaaggcagtctttcaggccaagaaaagggttctcgaaccttttggcctggttgaagagggtgctaagacggcccctaccggaaagcggatagacgaccactttccaaaaagaaagaaggcccggaccgaagaggactccaagccttccacctcgtcagacgccgaagctggacccagcggatcccagcagctgcaaatcccagcccaaccagcctcaagtttgggagctgatacaatgtctgcgggaggtggcggcccattgggcgacaataaccaaggtgccgatggagtgggcaatgcctcgggagattggcattgcgattccacgtggatgggggacagagtcgtcaccaagtccacccgaacctgggtgctgcccagctacaacaaccaccagtaccgagagatcaaaagcggctccgtcgacggaagcaacgccaacgcctactttggatacagcaccccctgggggtactttgactttaaccgcttccacagccactggagcccccgagactggcaaagactcatcaacaactactggggcttcagaccccggtccctcagagtcaaaatcttcaacattcaagtcaaagaggtcacggtgcaggactccaccaccaccatcgccaacaacctcacctccaccgtccaagtgtttacggacgacgactaccagctgccctacgtcgtcggcaacgggaccgagggatgcctgccggccttccctccgcaggtctttacgctgccgcagtacggttacgcgacgctgaaccgcgacaacacagaaaatcccaccgagaggagcagcttcttctgcctagagtactttcccagcaagatgctgagaacgggcaacaactttgagtttacctacaactttgaggaggtgcccttccactccagcttcgctcccagtcagaacctcttcaagctggccaacccgctggtggaccagtacttgtaccgcttcgtgagcacaaataacactggcggagtccagttcaacaagaacctggccgggagatacgccaacacctacaaaaactggttcccggggcccatgggccgaacccagggctggaacctgggctccggggtcaaccgcgccagtgtcagcgccttcgccacgaccaataggatggagctcgagggcgcgagttaccaggtgcccccgcagccgaacggcatgaccaacaacctccagggcagcaacacctatgccctggagaacactatgatcttcaacagccagccggcgaacccgggcaccaccgccacgtacctcgagggcaacatgctcatcaccagcgagagcgagacgcagccggtgaaccgcgtggcgtacaacgtcggcgggcagatggccaccaacaaccagagctccaccactgcccccgcgaccggcacgtacaacctccaggaaatcgtgcccggcagcgtgtggatggagagggacgtgtacctccaaggacccatctgggccaagatcccagagacggaggcgcactttcacccctctccggccatgggcggattcggactcaaacacccaccgcccatgatgctcatcaagaacacgcctgtgcccggaaatatcaccagcttctcggacgtgcccgtcagcagcttcatcacccagtacagcaccgggcaggtcaccgtggagatggagtgggagctcaagaaggaaaactccaagaggtggaacccagagatccagtacacaaacaactacaacgacccccagtttgtggactttgccccggacagcaccggggaatacagaaccaccagacctatcggaacccgataccttacccgacccctttaa

SEQ ID NO: 795 - DNA, 2175 bp, Artificial Sequence
  source: /note="Description of Artificial Sequence: Synthetic polynucleotide"
atgtcttttgttgatcaccctccagattggttggaagaagttggtgaaggtcttcgcgagtttttgggccttgaagcgggcccaccgaaaccaaaacccaatcagcagcatcaagatcaagcccgtggtcttgtgctgcctggttataactatctcggacccggaaacggtctcgatcgaggagagcctgtcaacagggcagacgaggtcgcgcgagagcacgacatctcgtacaacgagcagcttgaggcgggagacaacccctacctcaagtacaaccacgcggacgccgagtttcaggagaagctcgccgacgacacatcctccgggggaaacctcggaaaggcagtctttcaggccaagaaaagggttctcgaaccttttggcctggttgaagagggtgctaagacggcccctaccggaaagcggatagacgaccactttccaaaaagaaagaaggcccggaccgaagaggactccaagccttccacctcgtcagacgccgaagctggacccagcggatcccagcagctgcaaatcccagcccaaccagcctcaagtttgggagctgatacaatgtctgcgggaggtggcggcccattgggcgacaataaccaaggtgccgatggagtgggcaatgcctcgggagattggcattgcgattccacgtggatgggggacagagtcgtcaccaagtccacccgaacctgggtgctgcccagctacaacaaccaccagtaccgagagatcaaaagcggctccgtcgacggaagcaacgccaacgcctactttggatacagcaccccctgggggtactttgactttaaccgcttccacagccactggagcccccgagactggcaaagactcatcaacaactactggggcttcagaccccggtccctcagagtcaaaatcttcaacattcaagtcaaagaggtcacggtgcaggactccaccaccaccatcgccaacaacctcacctccaccgtccaagtgtttacggacgacgactaccagctgccctacgtcgtcggcaacgggaccgagggatgcctgccggccttccctccgcaggtctttacgctgccgcagtacggttacgcgacgctgaaccgcgacaacacagaaaatcccaccgagaggagcagcttcttctgcctagagtactttcccagcaagatgctgagaacgggcaacaactttgagtttacctacaactttgaggaggtgcccttccactccagcttcgctcccagtcagaacctcttcaagctggccaacccgctagtggaccagtacttgtaccgcttcgtgagcacaaataacactggcggagtccagttcaacaagaacctggccgggagatacgccaacacctacaaaaactggttcccggggcccatgggccgaacccagggctggaacctgggctccggggtcaaccgcgccagtgtcagcgccttcgccacgaccaataggatggagctcgagggcgcgagttaccaggtgcccccgcagccgaacggcatgaccaacaacctccagggcagcaacacctatgccctggagaacactatgatcttcaacagccagccggcgaacccgggcaccaccgccacgtacctcgagggcaacatgctcatcaccagcgagagcgagacgcagccggtgaaccgcgtggcgtacaacgtcggcgggcagatggccaccaacaaccagagctccaccactgcccccgcgaccggcacgtacaacctccaggaaatcgtgcccggcagcgtgtggatggagagggacgtgtacctccaaggacccatctgggccaagatcccagagacgggggcgcactttcacccctctccggccatgggcggattcggactcaaacacccaccgcccatgatgctcatcaagaacacgcctgtgcccggaaatatcaccagcttctcggacgtgcccgtcagcagcttcatcacccagtacagcaccgggcaggtcaccgtggagatggagtgggagctcaagaaggaaaactccaagaggtggaacccagagatccagtacacaaacaactacaacgacccccagtttgtggactttgccccggacagcaccggggaatacagaaccaccagacctatcggaacccgataccttacccgacccctttaa

SEQ ID NO: 796 - DNA, 2175 bp, Artificial Sequence
  source: /note="Description of Artificial Sequence: Synthetic polynucleotide"
atgtcttttgttgatcaccctccagattggttggaagaagttggtgaaggtcttcgcgagtttttgggccttgaagcgggcccaccgaaaccaaaacccaatcagcagcatcaagatcaagcccgtggtcttgtgctgcctggttataactatctcggacccggaaacggtctcgatcgaggagagcctgtcaacagggcagacgaggtcgcgcgagagcacgacatctcgtacaacgagcagcttgaggcgggagacaacccctacctcaagtacaaccacgcggacgccgagtttcaggagaagctcgccgacgacacatccttcgggggaaacctcggaaaggcagtctttcaggccaagaaaagggttctcgaaccttttggcctggttgaagagggtgctaagacggcccctaccggaaagcggatagacgaccactttccaaaaagaaagaaggcccggaccgaagaggactccaagccttccacctcgtcagacgccgaagctggacccagcggatcccagcagctgcaaatcccagcccaaccagcctcaagtttgggagctgatacaatgtctgcgggaggtggcggcccattgggcgacaataaccaaggtgccgatggagtgggcaatgcctcgggagattggcattgcgattccacgtggatgggggacagagtcgtcaccaagtccacccgaacctgggtgctgcccagctacaacaaccaccagtaccgagagatcaaaagcggctccgtcgacggaagcaacgccaacgcctactttggatacagcaccccctgggggtactttgactttaaccgcttccacagccactggagcccccgagactggcaaagactcatcaacaactactggggcttcagaccccggtccctcagagtcaaaatcttcaacattcaagtcaaagaggtcacggtgcaggactccaccaccaccatcgccaacaacctcacctccaccgtccaagtgtttacggacgacgactaccagctgccctacgtcgtcggcaacgggaccgagggatgcctgccggccttccctccgcaggtctttacgctgccgcagtacggttacgcgacactgaaccgcgacaacacagaaaatcccaccgagaggagcagcttcttctgcctagagtactttcccagcaagatgctgagaacgggcaacaactttgagtttacctacaactttgaggaggtgcccttccactccagcttcgctcccagtcagaacctcttcaagctggccaacccgctggtggaccagtacttgtaccgcttcgtgagcacaaataacactggcggagtccagttcaacaagaacctggccgggagatacgccaacacctacaaaaactggttcccggggcccatgggccgaacccagggctggaacctgggctccggggtcaaccgcgccagtgtcagcgccttcgccacgaccaataggatggagctcgagggcgcgagttaccaggtgcccccgcagccgaacggcatgaccaacaacctccagggcagcaacacctatgccctggagaacactatgatcttcaacagccagccggcgaacccgggcaccaccgccacgtacctcgagggcaacatgctcatcaccagcgagagcgagacgcagccggtgaaccgcgtggcgtacaacgtcggcgggcagatggccaccaacaaccagagctccaccactgcccccgcgaccggcacgtacaacctccaggaaatcgtgcccggcagcgtgtggatggagagggacgtgtacctccaaggacccatctgggccaagatcccagagacgggggcgcactttcacccctctccggccatgggcggattcggactcaaacacccaccgcccatgatgctcatcaagagcacgcctgtgcccggaaatatcaccagcttctcggacgtgcccgtcagcagcttcatcacccagtacagcaccgggcaggtcaccgtggagatggagtgggagctcaagaaggaaaactccaagaggtggaacccagagatccagtacacaaacaactacaacgacccccagtttgtggactttgccccggacagcaccggggaatacagaaccaccagacctatcggaacccgataccttacccgacccctttaa

SEQ ID NO: 797 - DNA, 2175 bp, Artificial Sequence
  source: /note="Description of Artificial Sequence: Synthetic polynucleotide"
atgtcttttgttgatcaccctccagattggttggaagaagttggtgaaggtcttcgcgagtttttgggccctgaagcgggcccaccgaaaccaaaacccaatcagcagcatcaagatcaagcccgtggtcttgtgctgcctggttataactatctcggacccggaaacggtctcgatcgaggagagcctgtcaacagggcagacgaggtcgcgcgagagcacgacatctcgtacaacgagcagcttgaggcgggagacaacccctacctcaagtacaaccacgcggacgccgagtttcaggagaagctcgccgacgacacatccttcgggggaaacctcggaaaggcagtctttcaggccaagaaaagggttctcgaaccttttggcctggttgaagagggtgctaagacggcccctaccggaaagcggatagacgaccactttccaaaaagaaagaaggtccggaccgaagaggactccaagccttccacctcgtcagacgccgaagctggacccagcggatcccagcagctgcaaatcccagcccaaccagcctcaagtttgggagctgatacaatgtctgcgggaggtggcggcccattgggcgacaataaccaaggtgccgatggagtgggcaatgcctcgggagattggcattgcgattccacgtggatgggggacagagtcgtcaccaagtccacccgaacctgggtgccgcccagctacaacaaccaccagtaccgagagatcaaaagcggctccgtcgacggaagcaacgccaacgcctactttggatacagcaccccctgggggtactttgactttaaccgcttccacagccactggagcccccgagactggcaaagactcatcaacaactactggggcttcagaccccggtccctcagagtcaaaatcttcaacattcaagtcaaagaggtcacggtgcaggactccaccaccaccatcgccaacaacctcacctccaccgtccaagtgtttacggacgacgactaccagctgccctacgtcgtcggcaacgggaccgagggatgcctgccggccttccctccgcaggtctttacgctgccgcagtacggttacgcgacgctgaaccgcgacaacacagaaaatcccaccgagaggagcagcttcttctgcctagagtactttcccagcaagatgctgagaacgggcaacaactttgagtttacctacaactttgaggaggtgcccttccactccagcttcgctcccagtcagaacctcttcaagctggccaacccgctggtggaccagtacttgtaccgcttcgtgagcacaaataacactggcggagtccagttcaacaagaacctggccgggagatacgccaacacctacaaaaactggttcccggggcccatgggccgaacccagggctggaacctgggctccggggtcaaccgcgccagtgtcagcgccttcgccacgaccaataggatggagctcgagggcgcgagttaccaggtgcccccgcagccgaacggcatgaccaacaacctccagggcagcaacacctatgccctggagaacactatgatcttcaacagccagccggcgaacccgggcaccaccgccacgtacctcgagggcaacatgctcatcaccagcgagagcgagacgcagccggtgaaccgcgtggcgtgcaacgtcggcgggcagatggccaccaacaaccagagctccaccactgcccccgcgaccggcacgtacaacctccaggaaatcgtgcccggcagcgtgtggatggagagggacgtgtacctccaaggacccatctgggccaagatcccagagacgggggcgcactttcacccctctccggccatgggcggattcggactcaaacacccaccgcccatgatgctcatcaagaacacgcctgtgcccggaaatatcaccagcttctcggacgtgcccgtcagcagcttcatcacccagtacagcaccgggcaggtcaccgtggagatggagtgggagctcaagaaggaaaactccaagaggtggaacccagagatccagtacacaaacaactacaacgacccccagtttgtggactttgccccggacagcaccggggaatacagaaccaccagacctattggaacccgataccttacccgacccctttaa

SEQ ID NO: 798 - DNA, 2175 bp, Artificial Sequence
  source: /note="Description of Artificial Sequence: Synthetic polynucleotide"
atgtcttttgttgatcaccctccagattggttggaagaagttggtgaaggtcttcgcgagtttttgggccttgaagcgggcccaccgaaaccaaaacccaatcagcagcatcaagatcaagcccgtggtcttgtgctgcctggttataactatctcggacccggaaacggtctcgatcgaggagagcctgtcaacagggcagacgaggtcgcgcgagagcacgacatctcgtacaacgagcagcttgaggcgggagacaacccctacctcaagtacaaccacgcggacgccgagtttcaggagaagctcgccgacgacacatccttcgggggaaacctcggaaaggcagtctttcaggccaagaaaagggttctcgaaccttttggcctggttgaagagggtgctaagacggcccctaccggaaagcggatagacgaccactttccaaaaagaaagaaggcccggaccgaagaggactccaagccttccacctcgtcagacgccgaagctggacccagcggatcccagcagctgcaaatcccagcccaaccagcctcaagtttgggagctgatacaatgtctgcgggaggtggcggcccattgggcgacaataaccaaggtgccgatggagtgggcaatgcctcgggagattggcattgcgattccacgtggatgggggacagagtcgtcaccaagtccacccgaacctgggtgctgcccagctacaacaaccaccagtaccgagagatcaaaagcggctccgtcgacggaagcaacgccaacgcctactttggatacagcaccccctgggggtactttgactttaaccgcttccacagccactggagcccccgagactggcaaagactcatcaacaactactggggcttcagaccccggtccctcagagtcaaaatcttcaacattcaagtcaaagaggtcacggtgcaggactccaccaccaccatcgccaacaacctcacctccaccgtccaagtgtttacggacgacgactaccagctgccctacgtcgtcggcaacgggaccgagggatgcctgccggccttccctccgcaggtctttacgctgccgcagtacggttacgcgacgctgaaccgcgacaacaccgaaaatcccaccgagaggagcagcttcttctgcctagagtactttcccagcaagatgctgagaacgggcaacaactttgagtttacctacaactttgaggaggtgcccttccactccagcttcgctcccagtcagaacctcttcaagctggccaacccgctggtggaccagtacttgtaccgcttcgtgagcacaaataacactggcggagtccagttcaacaagaacctggccgggagatacgccaacacctacaaaaactggttcccggggcccatgggccgaacccagggctggaacctgggctccggggtcaaccgcgccagtgtcagcgccttcgccacgaccaataggatggagctcgagggcgcgagttaccaggtgcccccgcagccgaacggcatgaccaacaacctccagggcagcaacacctatgccctggagaacactatgatcttcaacagccagccggcgaacccgggcaccaccgccacgtacctcgagggcaacatgctcatcaccagcgagagcgagacgcagccggtgaaccgcgtggcgtacaacgtcggcgggcagatggccaccaacaaccagagctccaccactgcccccgcgaccggcgcgtacaacctccaggaaatcgtgcccggcagcgtgtggatggagagggacgtgtacctccaaggacccatctgggccaagatcccagagacgggggcgcactttcacccctctccggccatgggcggattcggactcaaacacccaccgcccatgatgctcatcaagaacacgcctgtgcccggaaatatcaccagcttctcggacgtgcccgtcagcagcttcatcacccagtacagcaccgggcaggtcaccgtggagatggagtgggagctcaagaaggaaaactccaagaggtggaacccagagatccagtacacaaacaactacaacgacccccagtttgtggactttgccccggacagcaccggggaatacagaaccaccagacctatcggaacccgataccttacccgacccctttaa

SEQ ID NO: 799 - DNA, 2175 bp, Artificial Sequence
  source: /note="Description of Artificial Sequence: Synthetic polynucleotide"
atgtcttttgttgatcaccctccagattggttggaagaagttggtgaaggtcttcgcgagtttttgggccttgaagcgggcccaccgaaaccaaaacccaatcagcagcatcaagatcaagcccgtggtcttgtgctgcctggttataactatctcggacccggaaacggtctcgatcgaggagagcctgtcaacagggcagacggggtcgcgcgagagcacgacatctcgtacaacgagcagcttgaggcgggagacaacccctacctcaagtacaaccacgcggacgccgagtttcaggagaagctcgccgacgacacatccttcgggggaaacctcggaaaggcagtctttcaggccaagaaaagggttctcgaaccttttggcctggttgaagagggtgctaagacggcccctaccggaaagcggatagacgaccactttccaaaaagaaagaaggcccggaccgaagaggactccaagccttccacctcgtcagacgccgaagctggacccagcggatcccagcagctgcaaatcccagcccaaccagcctcaagtttgggagctgatacaatgtctgcgggaggtggcggcccattgggcgacaataaccaaggtgccgatggagtgggcaatgcctcgggagattggcattgcgattccacgtggatgggggacagagtcgtcaccaagtccacccgaacctgggtgctgcccagctacaacaaccaccagtaccgagagatcaaaagcggctccgtcgacggaagcaacgccaacgcctactttggatacagcaccccctgggggtactttgactttaaccgcttccacagccactggagcccccgagactggcaaagactcatcaacaactactggggcttcagaccccggtccctcagagtcaaaatcttcaacattcaagtcaaagaggtcacggtgcaggactccaccaccaccatcgccaacaacctcacctccaccgtccaagcgtttacggacgacgactaccagctgccctacgtcgtcggcaacgggaccgagggatgcctgccggccttccctccgcaggtctttacgctgccgcagtacggttacgcgacgctgaaccgcgacaacacagaaaatcccaccgagaggagcagcttcttctgcctagagtactttcccagcaagatgctgagaacgggcaacaactttgagtttacctacaactttgaggaggtgcccttccactccagcttcgctcccagtcagaacctcttcaagctggccaacccgctggtggaccagtacttgtaccgcttcgtgagcacaaataacactggcggagtccagttcaacaagaacctggccgggagatacgccaacacctacaaaaactggttcccggggcccatgggccgaacccagggctggaacctgggctccggggtcaaccgcgccagtgtcagcgccttcgccacgaccaataggatggagctcgagggcgcgagttaccaggtgcccccgcagccgaacggcatgaccaacaacctccagggcagcaacacctatgccctggagaacactatgatcttcaacagccagccggcgaacccgggcaccaccgccacgtacctcgagggcaacatgctcatcaccagcgagagcgagacgcagccggtgaaccgcgtggcgtacaacgtcggcgggcagatggccaccaacaaccagagctccaccactgcccccgcgaccggcacgtacaacctccaggaaatcgtgcccggcagcgtgtggatggagagggacgtgtacctccaaggacccatctgggccaagatcccagagacgggggcgcactttcacccctctccggccatgggcggattcggactcaaacacccaccgcccatgatgctcatcaagaacacgcctgtgcccggaaatatcaccagcttctcggacgtgcccgtcagcagcttcatcacccagtacagcaccgggcaggtcaccgtggagatggagtgggagctcaagaaggaaaactccaagaggtggaacccagagatccagtacacaaacaactacaacgacccccagtttgtggactttgccccggacagcaccggggaatacagaaccaccagacctatcggaacccgataccttacccgacccctttaa

SEQ ID NO: 800 - DNA, 2175 bp, Artificial Sequence
  source: /note="Description of Artificial Sequence: Synthetic polynucleotide"
atgtcttttgttgatcaccctccagattggttggaagaagttggtgaaggtcttcgcgagtttttgggccttgaagcgggcccaccgaaaccaaaacccaatcagcagcatcaagatcaagcccgtggtcttgtgctgcctggttataactatctcggacccggaaacggtctcgatcgaggagagcctgtcaacagggcagacgaggtcgcgcgagagcacgacatctcgtacaacgagcagcttgaggcgggagacaacccctacctcaagtacaaccacgcggacgccgagtttcaggagaagctcgccgacgacacatccttcgggggaaacctcggaaaggcagtctttcaggccaagaaaagggttctcgaaccttttggcctggttgaagagggtgctaagacggcccctaccggaaagcggatagacgaccactttccaaaaagaaagaaggcccggaccgaagaggactccaagccttccacctcgtcagacgccgaagctggacccagcggatcccagcagctgcaaatcccagcccaaccagcctcaagtttgggagctgatacaatgtctgcgggaggtggcggcccattgggcgacaataaccaaggtgccgatggagtgggcaatgcctcgggagattggcattgcgattccacgtggatgggggacagagtcgtcaccaagtccacccgaacctgggtgctgcccagctacaacaaccaccagtaccgagagatcaaaagcggctccgtcgacggaagcaacgccaacgcctactttggatacagcaccccctgggggtactttgactttaaccgcttccacagccactggagcccccgagactggcaaagactcatcaacaactactggggcttcagaccccggtccctcagagtcaaaatcttcaacattcaagtcaaagaggtcacggtgcaggactccaccaccaccatcgccaacaacctcacctccaccgtccaagtgtttacggacgacgactaccagctgccctacgtcgtcggcaacgggaccgagggatgcctgccggccttccctccgcaggtctttacgctgccgcagtacggttacgcgacgctgaaccgcgacaacacagaaaatcccaccgagaggagcagcttcttctgcctagagtactttcccagcaagatgctgagaacgggcaacaactttgagtttacctacaactttgaggaggtgcccttccactccagcttcgctcccagtcagaacctcttcaagctggccaacccgctggtggaccagtacttgtaccgcttcgtgagcacaaataacactggcggagtccagttcaacaagaacctggccgggagatacgccaacacctacaaaaactggttcccggggcccatgggccgaacccagggctggaacctgggctccggggtcaaccgcgccagtgtcagcgccttcgccacgaccaataggatggagctcgagggcgcgagttactaggtgcccccgcagccgaacggcatgaccaacaacctccagggcagcaacacctatgccctggagaacactatgatcttcaacagccagccggcgaacccgggcaccaccgccacgtacctcgagggcaacatgctcatcaccagcgagagcgagacgcagccggtgaaccgcgtggcgtacaacgtcggcgggcagatggccaccaacaaccagagctccaccactgcccccgcgaccggcacgtacaacctccaggaaatcgtgcccggcagcgtgtggatggagggggacgtgtacctccaaggacccatctgggccaagatcccagagacgggggcgcactttcacccctctccggccatgggcggattcggactcaagcacccaccgcccatgatgctcatcaagaacacgcctgtgcccggaaatatcaccagcttctcggacgtgcccgtcagcagcttcatcacccagtacagcaccgggcaggtcaccgtggagatggagtgggagctcaagaaggaaaactccaagaggtggaacccagagatccagtacacaaacaactacaacgacccccagtttgtggactttgccccggacagcaccggggaatacagaaccaccagacctatcggaacccgataccttacccgacccctttaa

SEQ ID NO: 801 - DNA, 2175 bp, Artificial Sequence
  source: /note="Description of Artificial Sequence: Synthetic polynucleotide"
atgtcttttgttgatcaccctccagattggttggaagaagttggtgaaggtcttcgcgagtttttgggccttgaagcgggcccaccgaaaccaaaacccaatcagcagcatcaagatcaagcccgtggtcttgtgctgcctggttataactatctcggacccggaaacggtctcgatcgaggagagcctgtcaacagggcagacgaggtcgcgcgagagcacgacatctcgtacaacgagcagcttgaggcgggagacaacccctacctcaagtacaaccacgcggacgccgagtttcaggagaagctcgccgacgacacatccttcgggggaaacctcggaaaggcagtctttcaggccaagaaaagggttctcgaaccttttggcctggttgaagagggtgctaagacggcccctaccggaaagcggatagacgaccactttccaaaaagaaagaaggtccggaccgaagaggactccaagccttccacctcgtcagacgccgaagctggacccagcggatcccagcagctgcaaatcccagcccaaccagcctcaagtttgggagctgatacaatgtctgcgggaggtggcggcccattgggcgacaataaccaaggtgccgatggagtgggcaatgcctcgggagattggcattgcgattccacgtggatgggggacagagtcgtcaccaagtccacccgaacctgggtgctgcccagctacaacaaccaccagtaccgagagatcaaaagcggctccgtcgacggaagcaacgccaacgcctactttggatacagcaccccctgggggtactttgactttaaccgcttccacagccactggagcccccgagactggcaaagactcatcaacaactactggggcttcagaccccggtccctcagagtcaaaatcttcaacattcaagtcaaagaggtcacggtgcaggactccaccaccaccatcgccaacaacctcacctccaccgtccaagtgtttacggacgacgactaccagctgccctacgtcgtcggcaacgggaccgagggatgcctgccggccttccctccgcaggtctttacgctgccgcagtacggttacgcgacgctgaaccgcgacaacacagaaaatcccaccgagaggagcagcttcttctgcctagagtactttcccagcaagatgctgagaacgggcaacaactttgagtttacctacaactttgaggaggtgcccttccactccagcttcgctcccagtcagaacctcttcaagctggccaacccgctggtggaccagtacttgtaccgcttcgtgagcacaaataacactggcggagtccagttcaacaagaacctggccgggagatacgccaacacctacaaaaactggttcccggggcccatgggccgaacccagggctggaacctgggctccggggtcaaccgcgccagtgtcagcgccttcgccacgaccaataggatggagctcgagggcgcgagttaccaggtgcccccgcagccgaacggcatgaccaacaacctccagggcagcaacacctatgccctggagaacactatgatcttcaacagccagccggcgaacccgggcaccaccgccacgtacctcgagggcaacatgctcatcaccagcgagagcgagacgcagccggtgaaccgcgtggcgtacaacgtcggcgggcagatggccaccaacaaccagagctccaccactgcccccgcgaccggcacgtacaacctccaggaaatcgtgcccggcagcgtgtggatggagagggacgtgtacctccaaggacccatctgggccaagatcccagagacgggggcgcactttcacccctctccggccatgggcggattcggactcaaacacccaccgcccatgatgctcatcaagaacacgcctgtgcccggaaatatcaccagcttctcggacgtgcccgtcagcagcttcatcacccagtacagcaccgggcaggtcaccgtggagatggagtgggagctcaagaaggaaaactccgagaggtggaacccagagatccagtacacaaacaactacaacgacccccagtttgtggactttgccccggacagcaccggggaatacagaaccaccagacctattggaacccgataccttacccgacccctttaa

SEQ ID NO: 802 - DNA, 2175 bp, Artificial Sequence
  source: /note="Description of Artificial Sequence: Synthetic polynucleotide"
atgtcttttgttgatcaccctccagattggttggaagaagttggtgaaggtcttcgcgagtttttgggccttgaagcgggcccaccgaaaccaaaacccaatcagcagcatcaagatcaagcccgtggtcttgtgctgcctggttataactatctcggacccggaaacggtctcgatcgaggagagcctgtcaacagggcagacgaggtcgcgcgagagcacgacatctcgtacagcgagcagcttgaggcgggagacaacccctacctcaagtacaaccacgcggacgccgagtttcaggagaagctcgccgacgacacatccttcgggggaaacctcggaaaggcagtctttcaggccaagaaaagggttctcgaaccttttggcctggttgaagagggtgctaagacggcccctaccggaaagcggatagacgaccactttccaaaaagaaagaaggcccggaccgaagaggactccaagccttccacctcgtcagacgccgaagctggacccagcggatcccagcagctgcaaatcccagcccaaccagcctcaagtttgggagctgatacaatgtctgcgggaggtggcggcccattgggcgacaataaccaaggtgccgatggagtgggcaatgcctcgggagattggcattgcgattccacgtggatgggggacagagtcgtcaccaagtccacccgaacctgggtgctgcccagctacaacaaccaccagtaccgagagatcaaaagcggctccgtcgacggaagcaacgccaacgcctactttggatacagcaccccctgggggtactttgactttaaccgcttccacagccactggagcccccgagactggcaaagactcatcaacaactactggggcttcagaccccggtccctcagagtcaaaatcttcaacattcaagtcaaagaggtcacggtgcaggactccaccaccaccatcgccaacaacctcacctccaccgtccaagtgtttacggacgacgactaccagctgccctacgtcgtcggcaacgggaccgagggatgcctgccggccttccctccgcaggtctttacgctgccgcagtacggttacgcgacgctgaaccgcgacaacacagaaaatcccaccgagaggagcagcttcttctgcctagagtactttcccagcaagatgctgagaacgggcaacaactttgagtttacctacaactttgaggaggtgcccttccactccagcttcgctcccagtcagaacctcttcaagctggccaacccgctggtggaccagtacttgtaccgcttcgtgagcacaaataacactggcggagtccagttcaacaagaacctggccgggagatacgccaacacctacaaaaactggttcccggggcccatgggccgaacccagggctggaacctgggctccggggtcaaccgcgccagtgtcagcgccttcgccacgaccaataggatggagctcgagggcgcgagttaccaggtgcccccgcagccgaacggcatgaccaacaacctccagggcagcaacacctatgccctggagaacactatgatcttcaacagccagccggcgaacccgggcaccaccgccacgtacctcgagggcaacatgctcatcaccagcgagagcgagacgcagccggtgaaccgcgtggcgtacaacgtcggcgggcagatggccaccaacaaccagagctccaccactgcccccgcgaccggcacgtacaacctccaggaaatcgtgcccggcagcgtgtggatggagagggacgtgtacctccaaggacccatctgggccaagatcccagagacgggggcgcactttcacccctctccggccatgggcggattcggactcaaacacccaccgcccatgatgctcatcaagaacacgcctgtgcccggaaatatcaccagcttctcggacgtgcccgtcagcagcttcatcacccagtacagcaccgggcaggtcaccgtggagatggagtgggagctcaagaaggaaaactccaagaggtggaacccagagatccagtacacaaacaactacaacgacccccagtttgtggactttgccccggacagcaccggggaatacagaaccgccagacctatcggaacccgataccttacccgacccctttaa

SEQ ID NO: 803 - DNA, 2175 bp, Artificial Sequence
  source: /note="Description of Artificial Sequence: Synthetic polynucleotide"
atgtcttttgttgatcaccctccagattggttggaagaagttggtgaaggtcttcgcgagtttttgggccctgaagcgggcccaccgaaaccaaaacccaatcagcagcatcaagatcaagcccgtggtcttgtgctgcctggttataactatctcggacccggaaacggtctcgatcgaggagagcctgtcaacagggcagacgaggtcgcgcgagagcacgacatctcgtacaacgagcagcttgaggcgggagacaacccctacctcaagtacaaccacgcggacgccgagtttcaggagaagctcgccgacgacacatccttcgggggaaacctcggaaaggcagtctttcaggccaagaaaagggttctcgaaccttttggcctggttgaagagggtgctaagacggcccctaccggaaagcggatagacgaccactttccaaaaagaaagaaggcccggaccgaagaggactccaagccttccacctcgtcagacgccgaagctggacccagcggatcccagcagctgcaaatcccagcccaaccagcctcaagtttgggagctgatacaatgtctgcgggaggtggcggcccattgggcgacaataaccaaggtgccgatggagtgggcaatgcctcgggagattggcattgcgattccacgtggatgggggacagagtcgtcaccaagtccacccgaacctgggtgctgcccagctacaacaaccaccagtaccgagagatcaaaagcggctccgtcgacggaagcaacgccaacgcctactttggatacagcaccccctgggggtactttgactttaaccgcttccacagccactggagcccccgagactggcaaagactcatcaacaactactggggcttcagaccccggtccctcagagtcaaaatcttcaacattcaagtcaaagaggtcacggtgcaggactccaccaccaccatcgccaacaacctcacctccaccgtccaagtgtttacggacgacgactaccagctgccctacgtcgtcggcaacgggaccgagggatgcctgccggccttccctccgcaggtctttacgctgccgcagtacggttacgcgacgctgaaccgcgacaacacagaaaatcccaccgagaggagcagcttcttctgcctagagtactttcccagcaagatgctgagaacgggcaacaactttgagtttacctacaactttgaggaggtgcccttccactccagcttcgctcccagtcagaacctcttcaagctggccaacccgctggtggaccagtacttgtaccgcttcgtgagcacaaataacactggcggagtccagttcaacaagaacctggccgggagatacgccaacacctacaaaaactggttcccggggcccatgggccgaacccagggctggaacctgggctccggggtcaaccgcgccagtgtcagcgccttcgccacgaccaataggatggagctcgagggcgcgagttaccaggtgcccccgcagccgaacggcatgaccaacaacctccagggcagcaacacctatgccctggagaacactatgatcttcaacagccagccggcgaacccgggcaccaccgccacgtacctcgagggcaacatgctcatcaccagcgagagcgagacgcagccggtgaaccgcgtggcgtacaacgtcggcgggcagatgaccaccaacaaccagagctccaccactgcccccgcgaccggcacgtacaacctccaggaaatcgtgcccggcagcgtgtggatggagagggacgtgtacccccaaggacccatctgggccaagatcccagagacgggggcgcactttcacccctctccggccatgggcggattcggactcaaacacccaccgcccatgatgctcatcaagaacacgcctgtgcccggaaatatcaccagcttctcggacgtgcccgtcagcagcttcatcacccagtacagcaccgggcaggtcaccgtggagatggagtgggagctcaagaaggaaaactccaagaggtggaacccagagatccagtacacaaacaactacaacgacccccagtttgtggactttgccccggacagcaccggggaatacaggaccaccagacctatcggaacccgataccttacccgacccctttaa

SEQ ID NO: 804 - DNA, 2175 bp, Artificial Sequence
  source: /note="Description of Artificial Sequence: Synthetic polynucleotide"
atgtcttttgttgatcaccctccagattggttggaagaagttggtgaaggtcttcgcgagtttttgggccttgaagcgggcccaccgaaaccaaaacccaatcagcagcatcaagatcaagcccgtggtcttgtgctgcctggttataactatctcggacccggaaacggtctcgatcgaggagagcctgtcaacagggcagacgaggtcgcgcgagagcacgacatctcgtacaacgagcagcttgaggcgggagacaacccctacctcaagtacaaccacgcggacgccgagtttcaggagaagctcgccgacgacacatccttcgggggaaacctcggaaaggcagtctttcaggccaagaaaagggttctcgaaccttttggcctggttgaagagggtgctaagacggcccctaccggaaagcggatagacgaccactttccaaaaagaaagaaggcccggaccgaagaggactccaagccttccacctcgtcagacgccgaagctggacccagcggatcccagcagctgcaaatcccagcccaaccagcctcaagtttgggagctgatacaatgtctgcgggaggtggcggcccattgggcgacaataaccaaggtgccgatggagtgggcaatgcctcgggagattggcattgcgattccacgtggatgggggacagagtcgtcaccaagtccacccgaacctgggtgctgcccagctacaacaaccaccagtaccgagagatcaaaagcggctccgtcgacggaagcaacgccaacgcctactttggatacagcaccccctgggggtactttgactttaaccgcttccacagccactggagcccccgagactggcaaagactcatcaacaactactggggcttcagaccccggtccctcagagtcaaaatcttcaacattcaagtcaaagaggtcacggtgcaggactccaccaccaccatcgccaacaacctcacctccaccgtccaagtgtttacggacgacgactaccagctgccctacgtcgtcggcaacgggaccgagggatgcctgccggccttccctccgcaggtctttacgctgccgcagtacggttacgcgacgctgaaccgcgacaacacagaaaatcccaccgagaggagcagcttcctctgcctagagtactttcccagcaagatgctgagaacgggcaacaactttgagtttacctacaactttgaggaggtgcccttccactccagcttcgctcccagtcagaacctcttcaagctggccaacccgctggtggaccagtacttgtaccgcttcgtgagcacaaataacactggcggagtccagttcaacaagaacctggccgggagatacgccaacacctacaaaaactggttcccggggcccatgggccgaacccagggctggaacctgggctccggggtcaaccgcgccagtgtcagcgccttcgccacgaccaataggatggagctcgagggcgcgagttaccaggtgcccccgcagccgaacggcatgaccaacaacctccagggcagcaacacctatgccctggagaacactatgatcttcaacagccagccggcgaacccgggcaccaccgccacgtacctcgagggcaacatgctcatcaccagcgagagcgagacgcagccggtgaaccgcgtggcgtacaacgtcggcgggcagatggccaccaacaaccagagctccaccactgcccccgcgaccggcacgtacaacctccaggaaatcgtgcccggcagcgtgtggatgaagagggacgtgtacctccaaggacccatctgggccaagatcccagagacgggggcgcactttcacccctctccggccatgggcggattcggactcaaacacccaccgcccatgatgctcatcaagaacacgcctgtgcccggaaatatcaccagcttctcggacgtgcccgtcagcagcttcatcacccagtacagcaccgggcaggtcaccgtggagatggagtgggagctcaagaaggaaaactccaagaggtggaacccagagatccagtacacaaacaactacaacgacccccagtttgtggactttgccccggacagcaccggggaatacagaaccaccagacctatcggaacccgataccttacccgacccctttaa

SEQ ID NO: 805 - DNA, 2175 bp, Artificial Sequence
  source: /note="Description of Artificial Sequence: Synthetic polynucleotide"
atgtcttttgttgatcaccctccagattggttggaagaagttggtgaaggtcttcgcgagtttttgggccttgaggcgggcccaccgaaaccaaaacccaatcagcagcatcaagatcaagcccgtggtcttgtgctgcctggttataactatctcggacccggaaacggtctcgatcgaggagagcctgtcaacagggcagacgaggtcgcgcgagagcacgacatctcgtacaacgagcagcttgaggcgggagacaacccctacctcaagtacaaccacgcggacgccgagtttcaggagaagctcgccgacgacacatccttcgggggaaacctcggaaaggcagtctttcaggccaagaaaagggttctcgaaccttttggcctggttgaagagggtgctaagacggcccctaccggaaagcggatagacgaccactttccaaaaagaaagaaggcccggaccgaagaggactccaagccttccaccccgtcagacgccgaagctggacccagcggatcccagcagctgcaaatcccagcccaaccagcctcaagtttgggagctgatacaatgtctgcgggaggtggcggcccattgggcgacaataaccaaggtgccgatggagtgggcaatgcctcgggagattggcattgcgattccacgtggatgggggacagagtcgtcaccaagtccacccgaacctgggtgctgcccagctacaacaaccaccagtaccgagagatcaaaagcggctccgtcgacggaagcaacgccaacgcctactttggatacagcaccccctgggggtactttgactttaaccgcttccacagccactggagcccccgagactggcaaagactcatcaacaactactggggcttcagaccccggtccctcagagtcaaaatcttcaacattcaagtcaaagaggtcacggtgcaggactccaccaccaccatcgccaacaacctcacctccaccgtccaagtgtttacggacgacgactaccagctgccctacgtcgtcggcaacgggaccgagggatgcctgccggccttccctccgcaggtctttacgctgccgcagtacggttacgcgacgctgaaccgcgacaacacagaaaatcccaccgagaggagcagcttcttctgcctagagtactttcccagcaagatgctgagaacgggcaacaactttgagtttacctacaactttgaggaggtgcccttccactccagcttcgctcccagtcagaacctcttcaagctggccaacccgctggtggaccagtacttgtaccgcttcgtgagcacaaataacactggcggagtccagttcaacaagaacctggccgggagatacgccaacacctacaaaaactggttcccggggcccatgggccgaacccagggctggaacctgggctccggggtcaaccgcgccagtgtcagcgccttcgccacgaccaataggatggagctcgagggcgcgagttaccaggtgcccccgcagccgaacggcatgaccaacaacctccagggcagcaacacctatgccctggagaacactatgatcttcaacagccagccggcgaacccgggcaccaccgccacgtacctcgagggcaacatgctcatcaccagcgagagcgagacgcagccggtgaaccgcgtggcgtacaacgtcggcgggcagatggccaccaacaaccagagctccaccactgcccccgcgaccggcacgtacaacctccaggaaatcgtgcccggcagcgtgtggatggagagggacgtgtacctccaaggacccatctgggccaagatcccagagacgggggcgcactttcacccctctccggccatgggcggattcggactcaaacacccaccgcccatgatgctcatcaagaacacgcctgtgcccggaaatatcaccagcttctcggacgtgcccgtcagcagcttcatcacccagtacagcaccgggcaggtcaccgtggagatggagtgggagctcaagaaggaaaactccaagaggtggaacccagagatccagtacacaaacaactacaacgacccccagtttgtggactttgccccggacagcaccggggaatacagaaccaccagacctatcggaacccgataccttacccgacccctttaa

SEQ ID NO: 806 - DNA, 2175 bp, Artificial Sequence
  source: /note="Description of Artificial Sequence: Synthetic polynucleotide"
atgtcttttgttgatcaccctccagattggttggaagaagttggtgaaggtcttcgcgagtttttgggccttgaagcgggcccaccgaaaccaaaacccaatcagcagcatcaagatcaagcccgtggtcttgtgctgcctggttataactatctcggacccggaaacggtctcgatcgaggagagcctgtcaacagggcagacgaggtcgcgcgagagcacgacatctcgtacaacgagcagcttgaggcgggagacaacccctacctcaagtacaaccacgcggacgccgagtttcaggagaagctcgccgacgacacatccttcgggggaaacctcggaaaggcagtctttcaggccaagaaaagggttctcgaaccttttggcctggttgaagagggtgctaagacggcccctaccggaaagcggatagacgaccactttccaaaaagaaagaaggcccggaccgaagaggactccaagccttccacctcgtcagacgccgaagctggacccagcggatcccagcagctgcaaatcccagcccaaccagcctcaagtttgggagctgatacaatgtctgcgggaggtggcggcccattgggcgacaataaccaaggtgccgatggagtgggcaatgcctcgggagattggcattgcgattccacgtggatgggggacagagtcgtcaccaagtccacccgaacctgggtgctgcccagctacaacaaccaccagtaccgagagatcaaaagcggctccgtcgacggaagcaacgccaacgcctactttggatacagcaccccctgggggtactttgactttaaccgcttccacagccactggagcccccgagactggcaaagactcatcaacaactactggggcttcagaccccggtccctcagagtcaaaatcttcaacattcaagtcaaagaggtcacggtgcaggactccaccaccaccatcgccaacaacctcacctccaccgtccaagtgtttacggacgacgactaccagctgccctacgtcgtcggcaacgggaccgagggatgcctgccggccttccctccgcaggtctttacgctgccgcagtacggttacgcgacgctgaaccgcgacaacacagaaaatcccaccgagaggagcagcttcttctgcctagagtactttcccagcaagatgctgagaacgggcaacaactttgagtttacctacaactttgaggaggtgcccttccactccagcttcgctcccagtcagaacctcttcaagctggccaacccgctggtggaccagtacttgtaccgcttcgtgagcacaaataacactggcggagtccagttcaacaagaacctggccgggagatacgccaacacccacaaaaactggttcccggggcccatgggccgaacccagggctggaacctgggctccggggtcaaccgcgccagtgtcagcgccttcgccacgaccaataggatggagctcgagggcgcgagttaccaggtgcccccgcagtcgaacggcatgaccaacaacctccggggcagcaacacctatgccctggagaacactatgatcttcaacagccagccggcgaacccgggcaccaccgccacgtacctcgagggcaacatgctcatcaccagcgagagcgagacgcagccggtgaaccgcgtggcgtacaacgtcggcgggcagatggccaccaacaaccagagctccaccactgcccccgcgaccggcacgtacaacctccaggaaatcgtgcccggcagcgtgtggatggagagggacgtgtacctccaaggacccatctgggccaagatcccagagacgggggcgcactttcacccctctccggccatgggcggattcggactcaaacacccaccgcccatgatgctcatcaagaacacgcctgtgcccggaaatatcaccagcttctcggacgtgcccgtcagcagcttcatcacccagtacagcaccgggcaggtcaccgtggagatggagtgggagctcaagaaggaaaactccaagaggtggaacccagagatccagtacacaaacaactacaacgacccccagtttgtggactttgccccggacagcaccggggaatacagaaccaccagacctatcggaacccgataccttacccgacccctttaa

SEQ ID NO: 807 - DNA, 2175 bp, Artificial Sequence
  source: /note="Description of Artificial Sequence: Synthetic polynucleotide"
atgtcttttgttgatcaccctccagattggttggaagaagttggtgaaggtcttcgcgagtttttgggccttgaagcgggcccaccgaaaccaaaacccaatcagcagcatcaagatcaagcccgtggtcttgtgctgcctggttataactatctcggacccggaaacggtctcgatcgaggagagcctgtcaacagggcagacgaggtcgcgcgagagcacgacatctcgtacaacgagcagcttgaggcgggagacaacccctacctcaagtacaaccacgcggacgccgagtttcaggagaagctcgccgacgacacatccttcgggggaaacctcggaaaggcagtctttcaggccaagaaaagggttctcgaaccttttggcctggttgaagagggtgctaagacggcccctaccggaaagcggatagacgaccactttccaaaaagaaagaaggcccggaccgaagaggactccaagccttccacctcgtcagacgccgaagctggacccagcggatcccagcagctgcaaatcccagcccaaccagcctcaagtttgggagctgatacaatgtctgcgggaggtggcggcccattgggcgacaataaccaaggtgccgatggagtgggcaatgcctcgggagattggcattgcgattccacgtggatgggggacagagtcgtcaccaagtccacccgaacctgggtgctgcccagctacaacaaccaccagtaccgagagatcaaaagcggctccgtcgacggaagcaacgccaacgcctactttggatacagcaccccctgggggtactttgactttaaccgcttccacagccactggagcccccgagactggcaaagactcatcaacaactactggggcttcagaccccggtccctcagagtcaaaatcttcaacattcaagtcaaagaggtcacggtgcaggactccaccaccaccatcgccaacaacctcacctccaccgtccaagtgtttacggacgacgactaccagctgccctacgtcgtcggcaacgggaccgagggatgcctgccggccttccctccgcaggtctttacgctgccgcagtacggttacgcgacgctgaaccgcgacaacacagaaaatcccaccgagaggagcagcttcttctgcctagagtactttcccagcaagatgctgagaacgggcaacaactttgagtttacctacaactttgaggaggtgcccttccactccagcttcgctcccagtcagaacctcttcaagctggccaacccgctggtggaccagtacttgtaccgcttcgtgagcacaaataacactggcggagtccagttcaacaagaacctggccgggagatacgccaacacctacaaaaactggttcccggggcccatgggccgaacccagggctggaacctgggctccggggtcaaccgcgccagtgtcagcgccttcgccacgaccaataggatggagctcgagggcgcgagttaccaggtgcccccgcagccgaacggcatgaccaacaacctccagggcagcaacacctatgccctggagaacactatgatcttcaacagccagccggcgaacccgggcaccaccgccacgtacctcgagggcaacatgctcatcaccagcgagagcgagacgcagccggtgaaccgcgtggcgtacagcgtcggcgggcagatggccaccaacaaccagagctccaccactgcccccacgaccggcacgtacaacctccaggaaatcgtgcccggcagcgtgtggatggagagggacgtgtacctccaaggacccatctgggccaagatcccagagacgggggcgcactttcacccctctccggccatgggcggattcagactcaaacacccaccgcccatgatgctcatcaagaacacgcctgtgcccggaaatatcaccagcttctcggacgtgcccgtcagcagcttcatcacccagtacagcaccgggcaggtcaccgtggagatggagtgggagctcaagaaggaaaactccaagaggtggaacccagagatccagtacacaaacaactacaacgacccccagtttgtggactttgccccggacagcaccggggaatacagaaccaccagacctatcggaacccgataccttacccgacccctttaa

SEQ ID NO: 808 - DNA, 2175 bp, Artificial Sequence
  source: /note="Description of Artificial Sequence: Synthetic polynucleotide"
atgtcttttgttgatcaccctccagattggttggaagaagttggtgaaggtcttcgcgagtttttgggccttgaagcgggcccaccgaaaccaaaacccaatcagcagcatcaagatcaagcccgtggtcttgtgctgcctggttataactatctcggacccggaaacggtctcgatcgaggagagcctgtcaacagggcagacgaggtcgcgcgagagcacgacatctcgtacaacgagcagcttgaggcgggagacaacccctacctcaagtacaaccacgcggacgccgagtttcaggagaagctcgccgacgacacatccttcgggggaaacctcggaaaggcagtctttcaggccaagaaaagggttctcgaaccttttggcctggttgaagagggtgctaagacggcccctaccggaaagcggatagacgaccactttccaaaaagaaagaaggcccggaccgaagaggactccaagccttccacctcgtcagacgccgaagctggacccagcggatcccagcagctgcaaatcccagcccaaccagcctcaagtttgggagctgatacaatgtctgcgggaggtggcggcccattgggcgacaataaccaaggtgccgatggagtgggcaatgcctcgggagattggcattgcgattccacgtggatgggggacagagtcgtcaccaagtccacccgaacctgggtgctgcccagctacaacaaccaccagtaccgagagatcaaaagcggctccgtcgacggaagcaacgccaacgcctactttggatacagcaccccctgggggtactttgactttaaccgcttccacagccactggagcccccgagactggcaaagactcatcaacaactactggggcttcagaccccggtccctcagagtcaaaatcttcaacattcaagtcaaagaggtcacggtgcaggactccaccaccaccatcgccaacaacctcacctccaccgtccaagtgtttacggacgacgactaccagctgccctacgtcgtcggcaacgggaccgagggatgcctgccggccttccctccgcaggtctttacgctgccgcagtacggttacgcgacgctgaaccgcgacaacacagaaaatcccaccgagaggagcagcttcttctgcctagagtactttcccagcaagatgctgagaacgggcaacaactttgagtttacctacaactttgaggaggtgcccttccactccagcttcgctcccagtcagaacctcttcaagctggccaacccgctggtggaccagtacttgtaccgcttcgtgagcacaaataacactggcggagtccagttcaacaagaacctggccgggagatacgccaacacctacaaaaactggttcccggggcccatgggccgaacccagggctggaacctgggctccggggtcaaccgcgccagtgtcagcgccttcgccgcgaccaataggatggagctcgagggcgcgagttaccaggtgcccccgcagccgaacggcatgaccaacaacctccagggcagcaacacctatgccctggagaacactatgatcttcaacagccagccggcgaacccgggcaccaccgccacgtacctcgagggcaacatgctcatcaccagcgagagcgagacgcagccggtgaaccgcgtggcgtacaacgtcggcgggcagatggccaccaacaaccagagctccaccactgcccccgcgaccggcacgtacaacctccaggaaatcgtgcccggcggcgtgtggatggagagggacgtgtacctccaaggacccatctgggccaagatcccagagacgggggcgcactttcacccctctccggccatgggcggattcggactcaaacacccaccgcccatgatgctcatcaagaacacgcctgtgcccggaaataccaccagcttctcggacgtgcccgtcagcagcttcatcacccagtacagcaccgggcaggtcaccgtggagatggagtgggagctcaagaaggaaaactccaagaggtggaacccagagatccagtacacaaacaactacaacgacccccagtttgtggactttgccccggacagcaccggggaatacagaaccaccagacctatcggaacccgataccttacccgacccctttaa

SEQ ID NO: 809 - DNA, 2175 bp, Artificial Sequence
  source: /note="Description of Artificial Sequence: Synthetic polynucleotide"
atgtcttttgttgatcaccctccagattggttggaagaagttggtgaaggtcttcgcgagtttttgggccttgaagcgggcccaccgaaaccaaaacccaatcagcagcatcaagatcaagcccgtggtcttgtgctgcctggttataactatctcggacccggaaacggtctcgatcgaggagagcctgtcaacagggcagacgaggtcgcgcgagagcacgacatctcgtacaacgagcagcttgaggcgggagacaacccctacctcaagtacaaccacgcggacgccgagtttcaggagaagctcgccgacgacacatccttcgggggaaacctcggaaaggtagtctttcaggccaagaaaagggttctcgaaccttttggcctggttgaagagggtgctaagacggcccctaccggaaagcggatagacgaccactttccaaaaagaaagaaggcccggaccgaagaggactccaagccttccacctcgtcagacgccgaagctggacccagcggatcccagcagctgcaaatcccagcccaaccagcctcaagtttgggagctgatacaatgtctgcgggaggtggcggcccattgggcggcaataaccaaggtgccgatggagtgggcaatgcctcgggagattggcattgcgattccacgtggatgggggacagagtcgtcaccaagtccacccgaacctgggtgctgcccagctacaacaaccaccagtaccgagagatcaaaagcggctccgtcgacggaagcaacgccaacgcctactttggatacagcaccccctgggggtactttgactttaaccgcttccacagccactggggcccccgagactggcaaagactcatcaacaactactggggcttcagaccccggtccctcagagtcaaaatcttcaacattcaagtcaaagaggtcacggtgcaggactccaccaccaccatcgccaacaacctcacctccaccgtccaagtgtttacggacgacgactaccagctgccctacgtcgtcggcaacgggaccgagggatgcctgccggccttccctccgcaggtctttacgctgccgcagtacggttacgcgacgctgaaccgcgacaacacagaaaatcccaccgagaggagcagcttcttctgcctagagtactttcccagcaagatgctgagaacgggcaacaactttgagtttacctacaactttgaggaggtgcccttccactccagcttcgctcccagtcagaacctcttcaagctggccaacccgctggtggaccagtacttgtaccgcttcgtgagcacaaataacactggcggagtccagttcaacaagaacctggccgggagatacgccaacacctacaaaaactggttcccggggcccatgggccgaacccagggctggaacctgggctccggggtcaaccgcgccagtgtcagcgccctcgccacgaccaataggatggagctcgagggcgcgagttaccaggtgcccccgcagccgaacggcatgaccaacaacctccagggcagcaacacctatgccctggagaacactatgatcttcaacagccagccggcgaacccgggcaccaccgccacgtacctcgagggcaacatgctcatcaccagcgagagcgagacgcagccggtgaaccgcgtggcgtacaacgtcggcgggcagatggccaccaacaaccagagctccaccactgcccccgcgaccggcacgtacaacctccaggaaatcgtgcccggcagcgtgtggatggagagggacgtgtacctccaaggacccatctgggccaagatcccagagacgggggcgcactttcacccctctccggccatgggcggattcggactcaaacacccaccgcccatgatgctcatcaagaacacgcctgtgcccggaaatatcaccagcttctcggacgtgcccgtcagcagcttcatcacccagtacagcaccgggcaggtcaccgtggagatggagtgggagctcaagaaggaaaactccaagaggtggaacccagagatccagtacacaaacaactacaacgacccccagtttgtggactttgccccggacagcaccggggaatacagaaccaccagacctatcggaacccgataccttacccgacccctttaa

SEQ ID NO: 810 - DNA, 2175 bp, Artificial Sequence
  source: /note="Description of Artificial Sequence: Synthetic polynucleotide"
atgtcttttgttgatcaccctccagattggttggaagaagttggtgaaggtcttcgcgagtttttgggccttgaagcgggcccaccgaaaccaaaacccaatcagcagcatcaagatcaagcccgtggtcttgtgctgcctggttataactatctcggacccggaaacggtctcgatcgaggagagcctgtcaacagggcagacgaggtcgcgcgagagcacgacatctcgtacaacgagcagcttgaggcgggagacaacccctacctcaagtacaaccacgcggacgccgagtttcaggagaagctcgccgacgacacatccttcgggggaaacctcggaaaggcagtctttcaggccaagaaaagggttctcgaaccttttggcctggttgaagagggtgctaagacggcccctaccggaaagcggatagacgaccactttccaaaaagaaagaaggcccggaccgaagaggactccaagccttccacctcgtcagacgccgaagctggacccagcggatcccagcagctgcaaatcccagcccaaccagcctcaagtttgggagctgatacaatgtctgcgggaggtggcggcccattgggcgacaataaccaaggtgccgatggagtgggcaatgcctcgggagattggcattgcgattccacgtggatgggggacagagtcgtcaccaagtccacccgaacctgggtgctgcccagctacaacaaccaccagtaccgagagatcaaaagcggctccgtcgacggaagcaacgccaacgcctactttggatacagcaccccctgggggtactttgactttaaccgcttccacagccactggagcccccgagactggcaaagactcatcaacaactactggggcttcagaccccggtccctcagagtcaaaatcttcaacattcaagtcaaagaggtcacggtgcaggactccaccaccaccatcgccaacaacctcacctccaccgtccaagtgtttacggacgacgactaccagctgccctacgtcgtcggcaacgggaccgagggatgcctgccggccttccctccgcaggtctttacgctgccgcagtacggttacgcgacgctgaaccgcgacaacacagaaaatcccaccgagaggagcagcttcttctgcctagagtactttcccagcaagatgctgagaacgggcaacaactttgagtttacctacaactttgaggaggtgcccttccactccagcttcgctcccagtcagaacctcttcaagctggccaacccgctggtggaccagtacttgtaccgcttcgtgagcacaaataacactggcggagtccagttcaacaagaacctggccgggagatacgccaacacctacaaaaactggttcccggggcccatgggccgaacccagggctggaacctgggctccggggtcaaccgcgccagtgtcagcgccttcgccacgaccaataggatggagctcgagggcgcgagttaccaggtgcccccgcagccgaacggcatgaccaacaacctccagggcagcaacacctatgccctggagaacactatgatcttcaacagccagccggcgaacccgggcaccaccgccacgtacctcgagggcaacatgctcatcaccagcgagagcgagacgcagccggtgaaccgcgtggcgtacaacgtcggcgggcagatggccaccaacaaccagagctccaccactgcccccgcgaccggcacgtacaacctccaggaaatcgtgcccggcagcgtgtggatggagagggacgtgtacctccaaggacccatctgagccaagatcccagagacgggggcgcactttcacccctctccggccatgggcggattcggactcaaacacccaccgcccatgatgctcatcaagaacacgcctgtgcccggaaatatcaccagcttctcggacgtgcccgtcagcagcttcatcacccagtacagcaccgggcaggtcaccgtggagatggagtgggagctcaagaaggaaaactccaagaggtggaacccagagatccagtacacaaacaactacaacgacccccagtttgtggactttgccccggacagcaccggggaatgcagaaccaccagacctatcggaacccgataccttacccgacccctttaa

SEQ ID NO: 811 - DNA, 2175 bp, Artificial Sequence
  source: /note="Description of Artificial Sequence: Synthetic polynucleotide"
atgtcttttgttgatcaccctccagattggttggaagaagttggtgaaggtcttcgcgagtttttgggccttgaagcgggcccaccgaaaccaaaacccaatcagcagcatcaagatcaagcccgtggtcttgtgctgcctggttataactatctcggacccggaaacggtctcgatcgaggagagcctgtcaacagggcagacgaggtcgcgcgagagcacgacatctcgtacaacgagcagcttgaggcgggagacaacccctacctcaagtacaaccacgcggacgccgagtttcaggagaagctcgccgacgacacatccttcgggggaaacctcggaaaggcagtctttcaggccaagaaaagggttctcgaaccttttggcctggttgaagagggtgctaagacggcccctaccggaaagcggatagacgaccactttccaaaaagaaagaaggcccggaccgaagaggactccaagccttccacctcgtcagacgccgaagctggacccagcggatcccagcagctgcaaatcccagcccaaccagcctcaagtttgggagctgatacaatgtctgcgggaggtggcggcccattgggcgacaataaccaaggtgccgatggagtgggcaatgcctcgggagattggcattgcgattccacgtggatgggggacagagtcgtcaccaagtccacccgaacctgggtgctgcccagctacaacaaccaccagtaccgagagatcaaaagcggctccgtcgacggaagcaacgccaacgcctactttggatacagcaccccctgggggtactttgactttaaccgcttccacagccactggagcccccgagactggcaaagactcatcaacaactactggggcttcagaccccggtccctcagagtcaaaatcctcaacattcaagtcaaagaggtcacggtgcaggactccaccaccaccatcgccaacaacctcacctccaccgtccaagtgtttacggacgacgactaccagctgccctacgtcgtcggcaacgggaccgagggatgcctgccggccttccctccgcaggtctttacgctgccgcagtacggttacgcgacgctgaaccgcgacaacacagaaaatcccaccgagaggagcagcttcttctgcctagagtactttcccagcaagatgctgagaacgggcaacaactttgagtttacctacaactttgaggaggtgcccttccactccagcttcgctcccagtcagaacctcttcaagctggccaacccgctggtgggccagtacttgtaccgcttcgtgagcacaaataacactggcggagtccagttcaacgagaacctggccgggagatacgccaacacctacaaaaactggttcccggggcccatgggccgaacccagggctggaacctgggctccggggtcaaccgcgccagtgtcagcgccttcgccacgaccaataggatggagctcgagggcgcgagttaccaggtgcccccgcagccgaacggcatgaccaacaacctccagggcagcaacacctatgccctggagaacactatgatcttcaacagccagccggcgaacccgggcaccaccgccacgtacctcgagggcaacatgctcatcaccagcgagagcgagacgcagccggtgaaccgcgtggcgtacaacgtcggcgggcagatggccaccaacaaccagagctccaccactgcccccgcgaccggcacgtacaacctccaggaaatcgtgcccggcagcgtgtggatggagagggacgtgtacctccaaggacccatctgggccaagatcccagagacgggggcgcactttcacccctctccggccatgggcggattcggactcaaacacccaccgcccatgatgctcatcaagaacacgcctgtgcccggaaatatcaccagcttctcggacgtgcccgtcagcagcttcatcacccagtacagcaccgggcaggccaccgtggagatggagtgggagctcaagaaggaaaactccaagaggtggaacccagagatccagtacacaaacaactacaacgacccccagtttgtggactttgccccggacagcaccggggaatacagaaccaccagacctatcggaacccgataccttacccgacccctttaa

SEQ ID NO: 812 - DNA, 2175 bp, Artificial Sequence
  source: /note="Description of Artificial Sequence: Synthetic polynucleotide"
atgtcttttgttgatcaccctccagattggttggaagaagttggtgaaggtcttcgcgagtttttgggccttgaagcgggcccaccgaaaccaaaacccaatcagcagcatcaagatcaagcccgtggtcttgtgctgcctggttataactatctcggacccggaaacggcctcgatcgaggagagcctgtcaacagggcagacgaggtcgcgcgagagcacgacatctcgtacaacgagcagcttgaggcgggagacaacccctacctcaagtacaaccacgcggacgccgagtttcaggagaagctcgccgacgacacatccttcgggggaaacctcggaaaggcagtctttcaggccaagaaaagggttctcgaaccttttggcctggttgaagagggtgctaagacggcccctaccggaaagcggatagacgaccactttccaaaaagaaagaaggcccggaccgaagaggactccaagccttccacctcgtcagacgccgaagctggacccagcggatcccagcagctgcaaatcccagcccaaccagcctcaagtttgggagctgatacaatgtctgcgggaggtggcggcccattgggcgacaataaccaaggtgccgatggagtgggcaatgcctcgggagattggcattgcgattccacgtggatgggggacagagtcgtcaccaagtccacccgaacctgggtgctgcccagctacaacaaccaccagtaccgagagatcaaaagcggctccgtcgacggaagcaacgccaacgcctactttggatacagcaccccctgggggtactttgactttaaccgcttccacagccactggagcccccgagactggcaaagactcatcaacaactactggggcttcagaccccggtccctcagagtcaaaatcttcaacattcaagtcaaagaggtcacggtgcaggactccaccaccatcatcgccaacaacctcacctccaccgtccaagtgtttacggacgacgactaccagctgccctacgtcgtcggcaacgggaccgagggatgcctgccggccttccctccgcaggtctttacgctgccgcagtacggttacgcgacgctgaaccgcgacaacacagaaaatcccaccgagaggagcagcttcttctgcctagagtactttcccagcaagatgctgagaacgggcaacaactttgagtttacctacaactttgaggaggtgcccttccactccagcttcgcccccagtcagaacctcttcaagctggccaacccgctggtggaccagtacttgtaccgcttcgtgagcacaaataacactggcggagtccagttcaacaagaacctggccgggagatacgccaacacctacaaaaactggttcccggggcccatgggccgaacccagggctggaacctgggctccggggtcaaccgcgccagtgtcagcgccttcgccacgaccaataggatggagctcgagggcgcgagttaccaggtgcccccgcagccgaacggcatgaccaacaacctccagggcagcaacacctatgccctggagaacactatgatcttcaacagccagccggcgaacccgggcaccaccgccacgtacctcgagggcaacatgctcatcaccagcgagagcgagacgcagccggtgaaccgcgtggcgtacaacgtcggcgggcagatggccaccaacaaccagagctccaccactgcccccgcgaccggcacgtacaacctccaggaaatcgtgcccggcagcgtgtggatggagagggacgtgtacctccaaggacccatctgggccaagatcccagagacgggggcgcactttcacccctctccggccatgggcggattcggactcaaacacccaccgcccatgatgctcatcaagaacacgcctgtgcccggaaatatcaccagcttctcggacgtgcccgtcagcagcttcatcacccagtacagcaccgggcaggtcaccgtggagatggagtgggagctcaagaaggaaaactccaagaggtggaacccagagatccagtacacaaacaactacaacgacccccagtttgtggactttgccccggacagcaccggggaatacagaaccaccagacctatcggaacccgataccttacccgacccctttaa

SEQ ID NO: 813 - DNA, 2175 bp, Artificial Sequence
  source: /note="Description of Artificial Sequence: Synthetic polynucleotide"
atgtcttttgttgatcaccctccagattggttggaagaagttggtgaaggtcttcgcgagtttttgggccttgaagcgggcccaccgaaaccaaaacccaatcagcagcatcaagatcaagcccgtggtcttgtgctgcctggttataactatctcggacccggaaacggtctcgatcgaggagagcctgtcaacagggcagacgaggtcgcgcgagagcacgacatctcgtacaacgagcagcttgaggcgggagacaacccctacctcaagtacaaccacgcggacgccgagtttcaggagaagctcgccgacgacacatccttcgggggaaacctcggaaaggcagtctttcaggccaagaaaagggttctcgaaccttttggcctggttgaagagggtgctaagacggcccctaccggaaagcggatagacgaccactttccaaaaagaaagaaggcccggaccgaagaggactccaagccttccacctcgtcagacgccgaagctggacccagcggatcccagcagctgcaaatcccagcccaaccagcctcaagtttgggagctgatacaatgtctgcgggaggtggcggcccattgggcgacaataaccaaggtgccgatggagtgggcaatgcctcgggagattggcattgcgattccacgtggatgggggacagagtcgtcaccaagtccacccgaacctgggtgctgcccagctacaacaaccaccagtaccgagagatcaaaagcggctccgtcgacggaagcaacgccaacgcctactttggatacagcaccccctgggggtactttgactttaaccgcttccacagccactggagcccccgagactggcaaagactcatcaacaactactggggcttcagaccccggtccctcagagtcaaaatcttcaacattcaagtcaaagaggtcacggtgcaggactccaccaccaccatcgccaacaacctcacctccaccgtccaagtgtttacggacgacgactaccagctgccctacgtcgtcggcaacgggaccgagggatgcctgccggccttccctccgcaggtctttacgctgccgcagtacggttacgcgacgctgaaccgcgacaacacagaaaatcccaccgagaggagcagcttcttctgcctagagtactttcccagcaagatgctgagaacgggcaacaactttgagtttacctacaactttgaggaggtgcccttccactccagcttcgctcccagtcagaacctcttcaagctggccaacccgctggtggaccagtacttgtaccgcttcgtgagcacaaataacactggcggagtccagttcaacaagaacctggccgggagatacgccaacacctacaaaaactggttcccggggcccatgggccgaacccagggctggaacctgggctccggggtcaaccgcgccagtgtcagcgccttcgccacgaccaataggatggagctcgagggcgcgagttaccaggtgcccccgcagccgaacggcatgaccaacaacctccagggcagcaacacctatgccctggagaacactatgatcttcaacagccagccggcgaacccgggcaccaccgccacgtacctcgagggcaacatgctcatcaccagcgagagcgagacgcagccggtgaaccgcgtggcgtacaacgtcggcgggcagatggccaccaacaaccagagctccaccactgcccccgcgaccggcacgtacaacctccaggaaatcgtgcccggcagcgtgtggatggagagggacgtgtacctccaaggacccatctgggccaagatcccagagacgggggcgcactttcacccctctccggccatgggcggattcggactcaaacacccaccgcccatgatgctcatcaagaacacgcctgtgcccggaaatatcaccagcctctcggacgtgcccgtcagcagcttcatcacccagtacagcaccgggcaggtcaccgtggagatggagtgggagctcaagaaggaaaactccaagaggtggaacccagagatccagtacacaaacaactacaacgacccccagtttgtggactttgccccggacagcaccggggaatacagaaccaccagacctatcggaacccgataccttacccgacccctttaa

SEQ ID NO: 814 - DNA, 2175 bp, Artificial Sequence
  source: /note="Description of Artificial Sequence: Synthetic polynucleotide"
atgtcttttgttgatcaccctccagattggttggaagaagttggtgaaggtcttcgcgagtttttgggccttgaagcgggcccaccgaaaccaaaacccaatcagcagcatcaagatcaagcccgtggtcttgtgctgcctggttataactatctcggacccggaaacggtctcgatcgaggagagcctgccaacagggcagacgaggtcgcgcgagagcacgacatctcgtacaacgagcagcttgaggcgggagacaacccctacctcaagtacaaccacgcgggcgccgagtttcaggagaagctcgccgacgacacatccttcgggggaaacctcggaaaggcagtctttcaggccaagaaaagggttctcgaaccttttggcctggttgaagagggtgctaagacggcccctaccggaaagcggatagacgaccactttccaaaaagaaagaaggcccggaccgaagaggactccaagccttccacctcgtcagacgccgaagctggacccagcggatcccagcagctgcaaatcccagcccaaccagcctcaagtttgggagctgatacaatgtctgcgggaggtggcggcccattgggcgacaataaccaaggtgccgatggagtgggcaatgcctcgggagattggcattgcgattccacgtggatgggggacagagtcgtcaccaagtccacccgaacctgggtgctgcccggctacaacaaccaccagtaccgagagatcaaaagcggctccgtcgacggaagcaacgccaacgcctactttggatacagcaccccctgggggtactttgactttaaccgcttccacagccactggagcccccgagactggcaaagactcatcaacaactactggggcttcagaccccggtccctcagagtcaaaatcttcaacattcaagtcaaagaggtcacggtgcaggactccaccaccaccatcgccaacaacctcacctccaccgtccaagtgtttacggacgacgactaccagctgccctacgtcgtcggcaacgggaccgagggatgcctgccggccttccctccgcaggtctttacgctgccgcagtacggttacgcgacgctgaaccgcgacaacacagaaaatcccaccgagaggagcagcttcttctgcctagagtactttcccagcaagatgctgagaacgggcaacaactttgagtttacctacaactttgaggaggtgcccttccactccagcttcgctcccagtcagaacctcttcaagctggccaacccgctggtggaccagtacttgtaccgcttcgtgagcacaaataatactggcggagtccagttcaacaagaacctggccgggagatacgccaacacctacaaaaactggttcccggggcccatgggccgaacccagggctggaacctgggctccggggtcaaccgcgccagtgtcagcgccttcgccacgaccaataggatggagctcgagggcgcgagttaccaggtgcccccgcagccgaacggcatgaccaacaacctccagggcagcaacacctatgccctggagaacactatgatcttcaacagccagccggcgaacccgggcaccaccgccacgtacctcgagggcaacatgctcatcaccagcgagagcgagacgcagccggtgaaccgcgtggcgtacaacgtcggcgggcagatggccaccaacaaccagagctccaccactgcccccgcgaccggcacgtacaacctccaggaaatcgtgcccggcagcgtgtggatggagagggacgtgtacctccaaggacccatctgggccaagatcccagagacgggggcgcactttcacccctctccggccatgggcggattcggactcaaacacccaccgcccatgatgctcatcaagaacacgcctgtgcccggaaatatcaccagcttctcggacgtgcccgtcagcagcttcatcacccagtacagcaccgggcaggtcaccgtggagatggagtgggagctcaagaaggaaaactccaagaggtggaacccagagatccagtacacaaacaactacaacgacccccagtttgtggactttgccccggacagcaccggggaatacagaaccaccagacctatcggaacccgataccttacccgacccctttaa

SEQ ID NO: 815 - DNA, 2175 bp, Artificial Sequence
  source: /note="Description of Artificial Sequence: Synthetic polynucleotide"
atgtcttttgttgatcaccctccagattggttggaagaagttggtgaaggtcttcgcgagtttttgggccttgaagcgggcccaccgaaaccaaaacccaatcagcagcatcaagatcaagcccgtggtcttgtgctgcctggttataactatctcggacccggaaacggtctcgatcgaggagagcctgtcaacagggcagacgaggtcgcgcgagagcacgacatctcgtacaacgagcagcttgaggcgggagacaacccctacctcaagtacaaccacgcggacgccgagtttcaggagaagctcgccgacgacacatccttcgggggaaacctcggaaaggcagtctttcaggccaagaaaagggttctcgaaccttttggcctggttgaagagggtgctaagacggcccctaccggaaagcggatagacgaccactttccaaaaagaaagaaggcccggaccgaagaggactccaagcctcccacctcgtcagacgccgaagctggacccagcggatcccagcagctgcaaatcccagcccaaccagcctcaagtttgggagctgatacaatgtctgcgggaggtggcggcccattgggcgacaataaccaaggtgccgatggagtgggcaatgcctcgggagattggcattgcgattccacgtggatgggggacagagtcgtcaccaagtccacccgaacctgggtgctgcccagctacaacaaccaccagtaccgagagatcaaaagcggctccgtcgacggaagcaacgccaacgcctactttggatacagcaccccctgggggtactttgactttaaccgcttccacagccactggagcccccgagactggcaaagactcatcaacaactactggggcttcagaccccggtccctcagagtcaaaatcttcaacattcaagtcaaagaggtcacggtgcaggactccgccaccaccatcgccaacaacctcacctccaccgtccaagtgtttacggacgacgactaccagctgccctacgtcgtcggcaacgggaccgagggatgcctgccggccttccctccgcaggtctttacgctgccgcagtacggttacgcgacgctgaaccgcgacaacacagaaaatcccaccgagaggagcagcttcttctgcctagagtactttcccagcaagatgctgagaacgggcaacaactttgagtttacctacaactttgaggaggtgcccttccactccagcttcgctcccagtcagaacctcttcaagctggccaacccgctggtggaccagtacttgtaccgcttcgtgagcacaaataacactggcggagtccagttcaacaagaacctggccgggagatacgccaacacctacaaaaactggttcccggggcccatgggccgaacccagggctggaacctgggctccggggtcaaccgcgccagtgtcagcgccttcgccacgaccaataggatggagctcgagggcgcgagttaccaggtgcccccgcagccgaacggcatgaccaacaacctccagggcagcaacacctatgccctggagaacactatgatcttcaacagccagccggcgaacccgggcaccaccgccacgtacctcgagggcaacatgctcatcaccagcgagagcgagacgcagccggtgaaccgcgtggcgtacaacgtcggcgggcagatggccaccaacaaccagagctccaccactgcccccgcgaccggcacgtacaacctccaggaaatcgtgcccggcagcgtgtggatggagagggacgtgtacctccaaggacccatctgggccaagatcccagagacgggggcgcactttcacccctctccggccatgggcggattcggactcaaacacccaccgcccatgatgctcatcaagaacacgcctgtgcccggaaatatcaccagcttctcggacgtgcccgtcagcagcttcatcacccagtacagcaccgggcaggtcaccgtggagatggagtgggagctcaagaaggaaaactccaagaggtggaacccagagatccagtacacaaacaactacaacgacccccagtttgtggactttgccccggacagcaccggggaatacagaaccaccagacctatcggaacccgataccttacccgacccctttaa

SEQ ID NO: 816 - DNA, 2175 bp, Artificial Sequence
  source: /note="Description of Artificial Sequence: Synthetic polynucleotide"
atgtcttttgttgatcaccctccagattggttggaagaagttggtgaaggtcttcgcgagtttttgggccttgaagcgggcccaccgaaaccaaaacccaatcagcagcatcaagatcaagcccgtggtcttgtgctgcctggttataactatctcggacccggaaacggtctcgatcgaggagagcctgtcaacagggcagacgaggtcgcgcgagagcacgacatctcgtacaacgagcagcttgaggcgggagacaacccctacctcaagtacaaccacgcggacgccgagtttcaggagaagctcgccgacgacacatccttcgggggaaacctcggaaaggcagtctttcaggccaagaaaagggttctcgaaccttttggcctggttgaagagggtgctaagacggcccctaccggaaagcggatagacgaccactttccaaaaagaaagaaggcccggaccgaagaggactccaagccttccacctcgtcagacgccgaagctggacccagcggatcccagcagccgcaaatcccagcccaaccagcctcaagtttgggagctgatacaatgtctgcgggaggtggcggcccattgggcgacaataaccaaggtgccgatggagtgggcaatgcctcgggagattggcattgcgattccacgtggatgggggacagagtcgtcaccaagtccacccgaacctgggtgctgcccagctacaacaaccaccagtaccgagagatcaaaagcggctccgtcgacggaagcaacgccaacgcctactttggatacagcaccccctgggggtactttgactttaaccgcttccacagccactggagcccccgagactggcaaagactcatcaacaactactggggcttcagaccccggtccctcagagtcaaaatcttcaacattcaagtcaaagaggtcacggtgcaggactccaccaccaccatcgccaacaacctcacctccaccgtccaagtgtttacggacgacgactaccagctgccctacgtcgtcggcaacgggaccgagggatgcctgccggccttccctccgcaggtctttacgctgccgcagtacggttacgcgacgctgaaccgcgacaacacagaaaatcccaccgagaggagcagcttcttctgcctagagtactttcccagcaagatgctgagaacgggcaacaactttgagtttacctacaactttgaggaggtgcccttccactccagcttcgctcccagtcagaacctcttcaagctggccaacccgctggtggaccagtacttgtaccgcttcgtgagcacaaataacactggcggagtccagttcaacaagaacctggccgggagatacgccaacacctacaaaaactggttcccggggcccatgggccgaacccagggctggaacctgggctccggggtcaaccgcgccagtgtcagcgccttcgccacgaccaataggatggagctcgagggcgcgagttaccaggtgcccccgcagccgaacggcatgaccaacaacctccagggcagcaacacctatgccctggagaacactatgatcttcaacagccagccggcgaacccgggcaccaccgccacgtacctcgagggcaacatgctcatcaccagcgagagcgagacgcagccggtgaaccgcgtggcgtacaacgtcggcgggcagatggccaccaacaaccagagctccaccactgcccccgcgaccggcacgtacaacctccaggaaatcgtgcccggcagcgtgtggatggagagggacgtgtacctccaaggacccatctgggccaagatcccagagacgggggcgcactttcacccctctccggccatgggcggattcggactcaaacacccaccgcccatgatgctcatcaagaacacgcctgcgcccggaaatatcaccagcttctcggacgtgcccgtcagcagcttcatcacccagtacagcaccgggcaggtcaccgtggagatggagtgggagctcaagaaggaaaactccaagaggtggaacccagagatccagtacacaaacaactacaacgacccccagtttgtggactttgccccggacagcaccggggaatacagaaccaccagacctatcggaacccgataccttacccgacccctttaa

SEQ ID NO: 817 - DNA, 2175 bp, Artificial Sequence
  source: /note="Description of Artificial Sequence: Synthetic polynucleotide"
atgtcttttgttgatcaccctccagattggttggaagaagttggtgaaggtcttcgcgagtttttgggccttgaagcgggcccaccgaaaccaaaacccaatcagcagcatcaagatcaagcccgtggtcttgtgctgcctggttataactatctcggacccggaaacggtctcgatcgaggagagcctgtcaacagggcagacgaggtcgcgcgagagcacgacatctcgtacaacgagcagcttgaggcgggagacaacccctacctcaagtacaaccacgcggacgccgagtttcaggagaagctcgccgacgacacatccttcgggggaaacctcggaaaggcagtctttcaggccaagaaaagggttctcgaaccttttggcctggttgaagagggtgctaagacggcccctaccggaaagcggatagacgaccactttccaaaaagaaagaaggcccggaccgaagaggactccaagcctcccacctcgtcagacgccgaagctggacccagcggatcccagcagctgcaaatcccagcccaaccagcctcaagtttgggagctgatacaatgtctgcgggaggtggcggcccattgggcgacaataaccaaggtgccgatggagtgggcaatgcctcgggagattggcattgcgattccacgtggatgggggacagagtcgtcaccaagtccacccgaacctgggtgctgcccagctacaacaaccaccagtaccgagagatcaaaagcggctccgtcgacggaagcaacgccaacgcctactttggatacagcaccccctgggggtactttgactttaaccgcttccacagccactggagcccccgagactggcaaagactcatcaacaactactggggcttcagaccccggtccctcagagtcaaaatcttcaacattcaagtcaaagaggtcacggtgcaggactccaccaccaccatcgccaacaacctcacctccaccgtccaagtgtttacggacgacgactaccagctgccctacgtcgtcggcaacgggaccgagggatgcctgccggccttccctccgcaggtctttacgctgccgcagtacggttacgcgacgctgaaccgcgacaacacagaaaatcccaccgagaggagcagcttcttctgcctagagtactttcccagcaagatgctgagaacgggcaacaactttgagtttacctacaactttgaggaggtgcccttccactccagcttcgctcccagtcagaacctcttcaagctggccaacccgctggtggaccagtacttgtaccgcttcgtgagcacaaataacactggcggagtccagttcaacaagaacctggccgggagatacgccaacacctacaaaaactggttcccggggcccatgggccgaacccagggctggaacctgggctccggggtcaaccgcgccagtgtcagcgccttcgccacgaccaataggatggagctcgagggcgcgagttaccaggtgcccccgcagccgaacggcatgaccaacaacctccagggcagcaacacctatgccctggagaacactatgatcttcaacagccagccggcgaacccgggcaccaccgccacgtacctcgagggcaacatgctcatcaccagcgagagcgagacgcagccggtgaaccgcgtggcgtacaacgtcggcgggcagatggccaccaacaaccagagctccaccactgcccccgcgaccggcacgtacaacctccaggaaatcgtgcccggcagcgtgtggatggagagggacgtgtacctccaaggacccatctgggccaagatcccagagacgggggcgcactttcacccctctccggccatgggcggattcggactcaaacacccaccgcccatgatgctcatcaagaacacgcctgtgcccggaaatatcaccagcttctcggacgtgcccgtcagcagcttcatcacccagtacagcaccgggcaggtcaccgtggagatggagtgggagctcaagaaggaaaactccaagaggtggaacccagagatccagtacacaaacaactacaacgacccccagtttgtggactttgccccggacagcaccggggaatacagaaccaccagacctatcggaacccgataccttacccgacccctttaa

SEQ ID NO: 818 - DNA, 2175 bp, Artificial Sequence
  source: /note="Description of Artificial Sequence: Synthetic polynucleotide"
atgtcttttgttgatcaccctccagattggttggaagaagttggtgaaggtcttcgcgagtttttgggccttgaagcgggcccaccgaaaccaaaacccaatcagcagcatcaagatcaagcccgtggtcttgtgctgcctggttataactatctcggacccggaaacggtctcgatcgaggagagcctgtcaacagggcagacgaggtcgcgcgagagcacgacatctcgtacaacgagcagcttgaggcgggagacaacccctacctcaagtacaaccacgcggacgccgagtttcaggagaagctcgccgacgacacatccttcgggggaaacctcggaaaggcagtctttcaggccaagaaaagggttctcgaaccttttggcctggttgaagagggtgctaagacggcccctaccggaaagcggatagacgaccactttccaaaaagaaagaaggcccggaccgaagaggactccaagcctcccacctcgtcagacgccgaagctggacccagcggatcccagcagctgcaaatcccagcccaaccagcctcaagtttgggagctgatacaatgtctgcgggaggtggcggcccattgggcgacaataaccaaggtgccgatggagtgggcaatgcctcgggagattggcattgcgattccacgtggatgggggacagagtcgtcaccaagtccacccgaacctgggtgccgcccagctacaacaaccaccagtaccgagagatcaaaagcggctccgtcgacggaagcaacgccaacgcctactttggatacagcaccccctgggggtactttgactttaaccgcttccacagccactggagcccccgagactggcaaagactcatcaacaactactggggcttcagaccccggtccctcagagtcaaaatcttcaacattcaagtcaaagaggtcacggtgcaggactccaccaccaccatcgccaacaacctcacctccaccgtccaagtgtttacggacgacgactaccagctgccctacgtcgtcggcaacgggaccgagggatgcctgccggccttccctccgcaggtctttacgctgccgcagtacggttacgcgacgctgaaccgcgacaacacagaaaatcccaccgagaggagcagcttcttctgcctagagtactttcccagcaagatgctgagaacgggcaacaactttgagtttacctacaactttgaggaggtgcccttccactccagcttcgctcccagtcagaacctcttcaagctggccaacccgctggtggaccagtacttgtaccgcttcgtgagcacaaataacactggcggagtccagttcaacaagaacctggccgggagatacgccaacacctacaaaaactggttcccggggcccatgggccgaacccagggctggaacctgggctccggggtcaaccgcgccagtgtcagcgccttcgccacgaccaataggatggagctcgagggcgcgagttaccaggtgcccccgcagccgaacggcatgaccaacaacctccagggcagcaacacctatgccctggagaacactatgatcttcaacagccagccggcgaacccgggcaccaccgccacgtacctcgagggcaacatgctcatcaccagcgagagcgagacgcagccggtgaaccgcgtggcgtacaacgtcggcgggcagatggccaccaacaaccagagctccaccactgcccccgcgaccggcacgtacaacctccaggaaatcgtgcccggcagcgtgtggatggagagggacgtgtacctccaaggacccatctgggccaagatcccagagacgggggcgcactttcacccctctccggccatgggcggattcggactcaaacacccaccgcccatgatgctcatcaagaacacgcctgtgcccggaaatatcaccagcttctcggacgtgcccgtcagcagcttcatcacccagtacagcaccgggcaggtcgccgtggagatggagtgggagctcaagaaggaaaactccaagaggtggaacccagagatccagtacacaaacaactacaacgacccccagtttgtggactttgccccggacagcaccggggaatacagaaccaccagacctatcggaacccgataccttacccgacccctttaa

SEQ ID NO: 819 - DNA, 2175 bp, Artificial Sequence
  source: /note="Description of Artificial Sequence: Synthetic polynucleotide"
atgtcttttgttgatcaccctccagattggttggaagaagttggtgaaggtcttcgcgagtttttgggccttgaagcgggcccaccgaaaccaaaacccaatcagcagcatcaagatcaagcccgtggtcttgtgctgcctggttataactatctcggacccggaaacggtctcgatcgaggagagcctgtcaacagggcagacgaggtcgcgcgagagcacgacatctcgtacaacgagcagcttgaggcgggagacaacccctacctcaagtacaaccacgcggacgccgagtttcaggagaagctcgccgacgacacatccttcgggggaaacctcggaaaggcagtctttcaggccaagaaaagggttctcgaaccttttggcctggttgaagagggtgctaagacggcccctaccggaaagcggatagacgaccactttccaaaaagaaagaaggcccggaccgaagaggactccaagccttccacctcgtcagacgccgaagctggacccagcggatcccagcagctgcaaatcccagcccaaccagcctcaagtttgggagctgatacaatgtctgcgggaggtggcggcccattgggcgacaataaccaaggtgccgatggagtgggcaatgcctcgggagattggcattgcgattccacgtggatgggggacagagtcgtcaccaagtccacccgaacctgggtgctgcccagctacaacaaccaccagtaccgagagatcaaaagcggctccgtcgacggaagcaacgccaacgcctactttggatacagcaccccctgggggtactttgactttaaccgcttccacagccactggagcccccgagactggcaaagactcatcaacaactactggggcttcagaccccggtccctcagagtcaaaatcttcaacattcaagtcaaagaggtcacggtgcaggactccaccaccaccatcgccaacaacctcacctccaccgtccaagtgtttacggacgacgactaccagctgccctacgtcgtcggcaacgggaccgagggatgcctgccggccttccctccgcaggtctttacgctgccgcagtacggttacgcgacgctgaaccgcgacaacacagaaaatcccaccgagaggagcagcttcttctgcctagagtactttcccagcaagatgctgagaacgggcaacaactttgagtttacctacaactttgaggaggtgcccttccactccagcttcgctcccagtcagaacctcttcaagctggccaacccgctggtggaccagtacttgtaccgcttcgtgagcacaaataacactggcggagtccagttcaacaagaacctggccgggagatacgccaacacctacaaaaactggttcccggggcccatgggccgaacccagggctggaacctgggctccggggtcaaccgcgccagtgtcagcgccttcgccacgaccaataggatggagctcgagggcgcgagttaccaggtgcccccgcagccgaacggcatgaccaacaacctccagggcagcaacacctatgccctggagaacactatgatcttcaacagccagccggcgaacccgggcaccaccgccacgtacctcgagggcaacatgctcatcaccagcgagagcgagacgcagccggtgaaccgcgtggcgtacaacgtcggcgggcagatggccaccaacaaccagagctccaccactgcccccgcgaccggcacgtacaacctccaggaaatcgtgcccggcagcgtgtggatggagagggacgtgtacctccaaggacccatctgggccaagatcccagagacgggggcgcactttcacccctctccggccatgggcggattcggactcaaacacccaccgcccatgatgctcatcaagaacacgcctgcgcccggaaatatcaccagcttctcggacgtgcccgtcagcagcttcatcacccagtacagcaccgggcaggtcaccgtggagatggagtgggagctcaagaaggaaaactccaagaggtggaacccagagatccagtacacaaacaactacaacgacccccagtttgtggactttgccccggacagcaccggggaatacagaaccaccagacctatcggaacccgataccttacccgacccctttaa

SEQ ID NO: 820 - DNA, 2175 bp, Artificial Sequence
  source: /note="Description of Artificial Sequence: Synthetic polynucleotide"
atgtcttttgttgatcaccctccagattggttggaagaagttggtgaaggtcttcgcgagtttttgggccttgaagcgggcccaccgaaaccaaaacccaatcagcagcatcaagatcaagcccgtggtcttgtgctgcctggttataactatctcggacccggaaacggtctcgatcgaggagagcctgtcaacagggcagacgaggtcgcgcgagagcacgacatctcgtacaacgagcagcttgaggcgggagacaacccctacctcaagtacaaccacgcggacgccgagtttcaggagaagctcgccgacgacacatccttcgggggaaacctcggaaaggcagtctttcaggccaagaaaagggttctcgaaccttttggcctggctgaagagggtgctaagacggcccctaccggaaagcggatagacgaccactttccaaaaagaaagaaggcccggaccgaagaggactccaagccttccacctcgtcagacgccgaagctggacccagcggatcccagcagctgcaaatcccagcccaaccagcctcaagtttgggagctgatacaatgtctgcgggaggtggcggcccattgggcgacaataaccaaggtgccgatggagtgggcaatgcctcgggagattggcattgcgattccacgtggatgggggacagagtcgtcaccaagtccacccgaacctgggtgctgcccagctacaacaaccaccagtaccgagagatcaaaagcggctccgtcgacggaagcaacgccaacgcctactttggatacagcaccccctgggggtactttgactttaaccgcttccacagccactggagcccccgagactggcaaagactcatcaacaactactggggcttcagaccccggtccctcagagccaaaatcttcaacattcaagtcaaagaggtcacggtgcaggactccaccaccaccatcgccaacaacctcacctccaccgtccaagtgtttacggacgacgactaccagctgccctacgtcgtcggcaacgggaccgagggatgcctgccggccttccctccgcaggtctttacgctgccgcagtacggttacgcgacgctgaaccgcgacaacacagaaaatcccaccgagaggagcagcttcttctgcctagagtactttcccagcaagatgctgagaacgggcaacaaccttgagtttacctacaactttgaggaggtgcccttccactccagcttcgctcccagtcagaacctcttcaagctggccaacccgctggtggaccagtacttgtaccgcttcgtgagcacaaataacactggcggagtccagttcaacaagaacctggccgggagatacgccaacacctacaaaaactggttcccggggcccatgggccgaacccagggctggaacctgggctccggggtcaaccgcgccagtgtcagcgccttcgccacgaccaataggatggagctcgagggcgcgagttaccaggtgcccccgcagccgaacggcatgaccaacaacctccagggcagcaacacctatgccctggagaacactatgatcttcaacagccagccggcgaacccgggcaccaccgccacgtacctcgagggcaacatgctcatcaccagcgagagcgagacgcagccggtgaaccgcgtggtgcacaacgtcggcgggcagatggccaccaacaaccagagctccaccactgcccccgcgaccggcacgtacaacctccaggaaatcgtgcccggcagcgtgtggatggagagggacgtgtacctccaaggacccatctgggccaagatcccagagacgggggcgcactttcacccctctccggccatgggcggattcggactcaaacacccaccgcccatgatgctcatcaagaacacgcctgtgcccggaaatatcaccagcttctcggacgtgcccgtcagcagcttcatcacccagtacagcaccgggcaggtcaccgtggagatggagtgggagctcaagaaggaaaactccaagaggtggaacccggagatccagtacacaaacaactacaacgacccccagtttgtggactttgccccggacagcaccggggaatacagaaccaccagacctatcggaacccgataccttacccgacccctttaa

SEQ ID NO: 821 - DNA, 2175 bp, Artificial Sequence
  source: /note="Description of Artificial Sequence: Synthetic polynucleotide"
atgtcttttgttgatcaccctccagattggttggaagaagttggtgaaggtcttcgcgagtttttgggccttgaagcgggcccaccgaaaccaaaacccaatcagcagcatcaagatcaagcccgtggtcttgtgctgcctggttataactatctcggacccggaaacggtctcgatcgaggagagcctgtcaacagggcagacgaggtcgcgcgagagcacgacatctcgtacaacgagcagcttgaggcgggagacaacccctacctcaagtacaaccacgcggacgccgagtttcaggagaagctcgccgacgacacatccttcgggggaaacctcggaaaggcagtctttcaggccaagaaaagggttctcgaaccttttggcctggttgaagagggtgctaagacggcccctaccggaaagcggatagacgaccactttccaaaaagaaagaaggcccggaccgaagaggactccaagccttccacctcgtcagacgccgaagctggacccagcggatcccagcagctgcaaatcccagcccaaccagcctcaagtttgggagctgatacaatgtctgcgggaggtggcggcccattgggcgacaataaccaaggtgccgatggagtgggcaatgcctcgggagattggcattgcgattccacgtggatgggggacagagtcgtcaccaagtccacccgaacctgggtgctgcccagctacaacaaccaccagtaccgagagatcaaaagcggctccgtcgacggaggcaacgccaacgcctactttggatacagcaccccctgggggtactttgactttaaccgcttccacagccactggagcccccgggactggcaaagactcatcaacaactactggggcttcagaccccggtccctcagagtcaaaatcttcaacattcaagtcaaagaggtcacggtgcaggactccaccaccaccatcgccaacaacctcacctccaccgtccaagtgtttacggacgacgactaccagctgccctacgtcgtcggcaacgggaccgagggatgcctgccggccttccctccgcaggtctttacgctgccgcagtacggttacgcgacgctgaaccgcgacaacacagaaaatcccaccgagaggagcagcttcttctgcctagagtactttcccagcaagatgctgagaacgggcaacaactttgagtttacctacaactttgaggaggtgcccttccactccagcttcgctcccagtcagaacctcttcaagctggccaacccgctggtggaccagtacttgtaccgcttcgtgagcacaaataacactggcggagtccagttcaacaagaacctggccgggagatacgccaacacctacaaaaactggttcccggggcccatgggccgaacccagggctggaacctgggctccggggtcaaccgcgccagtgtcagcgccttcgccacgaccaataggatggagctcgagggcgcgagttaccaggtgcccccgcagccgaacggcatgaccaacaacctccagggcagcaacacctatgccctggagaacactatgatcttcaacagccagccggcgaacccgggcaccaccgccacgtacctcgagggcaacatgctcatcaccagcgagagcgagacgcagccggtgaaccgcgtggcgtacaacgtcggcgggcagatggccaccaacaaccagagctccaccactgcccccgcgaccggcacgtacaacctccaggaaatcgtgcccggcagcgtgtggatggagagggacgtgtacctccaaggacccatctgggccaagatcccagagacgggggcgcactttcacccctctccggccatgggcggattcggactcaaacacccaccgcccatgatgctcatcaagaacacgcctgcgcccggaaatatcaccagcttctcggacgtgcccgtcagcagcttcatcacccagtacagcaccgggcaggtcaccgtggagatggagtgggagctcaagaagggaaactccaagaggtggaacccagagatccagtacacaaacaactacaacgacccccagtttgtggactttgccccggacagcaccggggaatacagaaccaccagacctatcggaacccgataccttacccgacccctttaa

SEQ ID NO: 822 - DNA, 2175 bp, Artificial Sequence
  source: /note="Description of Artificial Sequence: Synthetic polynucleotide"
atgtcttttgttgatcaccctccagattggttggaagaagttggtgaaggtcttcgcgagtttttgggccttgaagcgggcccaccgaaaccaaaacccaatcagcagcatcaagatcaagcccgtggtcttgtgctgcctggttataactatctcggacccggaaacggtctcgatcgaggagagcctgtcaacagggcagacgaggtcgcgcgagagcacgacatctcgtacaacgagcagcttgaggcgggagacaacccctacctcaagtacaaccacgcggacgccgagtttcaggagaagctcgccgacgacacgtccttcgggggaaacctcggaaaggcagtctttcaggccaagaaaagggttctcgaaccttttggcctggttgaagagggtgctaagacggcccctaccggaaagcggatagacgaccactttccaaaaagaaagaaggcccggaccgaagaggactccaagccttccacctcgtcagacgccgaagctggacccagcggatcccagcagctgcaaatcccagcccaaccagcctcaagtttgggagctgatacaatgtctgcgggaggtggcggcccattgggcgacaataaccaaggtgccgatggagtgggcaatgcctcgggagattggcattgcgattccacgtggatgggggacagagtcgtcaccaagtccacccgaacctgggtgctgcccagctacaacaaccaccagtaccgagagatcaaaagcggctccgtcgacggaagcaacgccaacgcctactttggatacagcaccccctgggggtactttgactttaaccgcttccacagccactggagcccccgagactggcaaagactcatcaacaactactggggcttcagaccccggtccctcagagtcaaaatcttcaacattcaagtcaaagaggtcacggtgcaggactccaccaccaccatcgccaacaacctcacctccaccgtccaagtgtttacggacgacgactaccagctgccctacgtcgtcggcaacgggaccgagggatgcctgccggccttccctccgcaggtctttacgctgccgcagtacggttacgcgacgctgaaccgcgacaacacagaaaatcccaccgagaggagcagcttcttctgcctagagtactttcccagcaagatgctgagaacgggcaacaactttgagtttacctacaactttgaggaggtgcccttccactccagcttcgctcccagtcagaacctcttcaagctggccaacccgctggtggaccagtacttgtaccgcttcgtgagcacaaataacactggcggagtccagttcaacaagaacctggccgggagatacgccaacacctacaaaaactggttcccggggcccatgggccgaacccagggctggaacctgggctccggggtcaaccgcgccagtgtcagcgccttcgccacgaccaataggatggagctcgagggcgcgagttaccaggtgcccccgcagccgaacggcatgaccaacaacctccagggcagcaacacctatgccctggagaacactatgatcttcaacagccagccggcgaacccgggcaccaccgccacgtacctcgagggcaacatgctcatcaccagcgagagcgagacgcagccggtgaaccgcgtggcgtacaacgtcggcgggcagatggccaccaacaaccagagctccaccactgcccccgcgaccggcacgtacaacctccaggaaatcgtgcccggcagcgtgtggatggagagggacgtgtacctccaaggacccatctgggccaagatcccagagacgggggtgcactttcacccctctccggccatgggcggattcggactcaaacacccaccgcccatgatgctcatcaagaacacgcctgtgcccggaaatatcaccagcttctcggacgtgcccgtcagcagcttcatcacccagtacagcaccgggcaggtcaccgtggagatggagtgggagctcaagaaggaaaactccaagaggtggaacccagagatccagtacacaaacaactacaacgacccccagtttgtggactttgccccggacagcaccggggaatacagaaccaccagacctatcggaacccgataccttacccgacccctttaa

SEQ ID NO: 823 - DNA, 2175 bp, Artificial Sequence
  source: /note="Description of Artificial Sequence: Synthetic polynucleotide"
  modified_base (1652)..(1652): a, c, t, g, unknown or other
atgtcttttgttgatcaccctccagattggttggaagaagttggtgaaggtcttcgcgagtttttgggccttgaagcgggcccaccgaaaccaaaacccaatcagcagcatcaagatcaagcccgtggtcttgtgctgcctggttataactatctcggacccggaaacggtctcgatcgaggagagcctgtcaacagggcagacgaggtcgcgcgagagcacgacatctcgtacaacgagcagcttgaggcgggagacaacccctacctcaagtacaaccacgcggacgccgagtttcaggagaagctcgccgacgacacatccttcgggggaaacctcggaaaggcagtctttcaggccaagaaaagggttctcgaaccttttggcctggttgaagagggtgctaagacggcccctaccggaaagcggatagacgaccactttccaaaaagaaagaaggcccggaccgaggaggactccaagccttccacctcgtcagacgccgaagctggacccagcggatcccagcagctgcaaatcccagcccaaccagcctcaagtttgggagctgatacaatgtctgcgggaggtggcggcccattgggcgacaataaccaaggtgccgatggagtgggcaatgcctcgggagattggcattgcgattccacgtggatgggggacagagtcgtcaccaagtccacccgaacctgggtgctgcccagctacaacaaccaccagtaccgagagatcaaaagcggctccgtcgacggaagcaacgccaacgcctactttggatacagcaccccctgggggtactttgactttaaccgcttccacagccactggagcccccgagactggcaaagactcatcaacaactactggggcttcagaccccggtccctcagagtcaaaatcttcaacattcaagtcaaagaggtcacggtgcaggactccaccaccaccatcgccaacaacctcacctccaccgtccaagtgtttacggacgacgactaccagctgccctacgtcgtcggcaacgggaccgagggatgcctgccggccttccctccgcaggtctttacgctgccgcagtacggttacgcgacgctgaaccgcgacaacacagaaaatcccaccgagaggagcagcttcttctgcctagagtactttcccagcaagatgctgagaacgggcaacaactttgagtttacctacaactttgaggaggtgcccttccactccagcttcgctcccagtcagaacctcttcaagctggccaacccgctggtggaccagtacttgtaccgcttcgtgagcacaaataacactggcggagtccagttcaacaagaacctggccgggagatacgccaacacctacaaaaactggttcccggggcccatgggccgaacccagggctggaacctgggctccggggtcaaccgcgccagtgtcagcgccttcgccacgaccaataggatggagctcgagggcgcgagttaccaggtgcccccgcagccgaacggcatgaccaacaacctccagggcagcaacacctatgccctggagaacactatgatcttcaacagccagccggcgaacccgggcaccaccgccacgtacctcgagggcagcatgctcatcaccancgagagcgagacgcagccggtgaaccgcgtggcgtacaacgtcggcgggcagatggccaccaacaaccagagctccaccactgcccccgcgaccggcacgtacaacctccaggaaatcgtgcccggcagcgtgtggatggagagggacgtgtacctccaaggacccatctgggccaagatcccagagacgggggcgcactttcacccctctccggccatgggcggattcggactcaaacacccaccgcccatgatgctcatcaagaacacgcctgtgcccggaaatatcaccagcttctcggacgtgcccgtcagcagcttcatcacccagtacagcaccgggcaggtcaccgtggagatggagtgggagctcaagaaggaaaactccaagaggtggaacccagagatccagtacacaaacaactacaacgacccccagtttgtggactttgccccggacagcaccggggaatacagaaccaccagacctatcggaacccgataccttacccgacccctttaa

SEQ ID NO: 824 - DNA, 2211 bp, Artificial Sequence
  source: /note="Description of Artificial Sequence: Synthetic polynucleotide"
atggctgctgacggttatcttccagattggctcgaggacaacctttctgaaggcattcgtgagtggtgggctctgaaacctggagtccctcaacccaaagcgaaccaacaacaccaggacaaccgtcggggtcttgtgcttccgggttacaaatacctcggacccggtaacggactcgacaaaggagagccggtcaacgaggcggacgcggcagccctcgaacacgacaaagcttacgaccagcagctcaaggccggtgacaacccgtacctcaagtacaaccacgccgacgccgagtttcaggagcgtcttcaagaagatacgtcttttgggggcaaccttggcagagcagtcttccaggccaaaaagaggatccttgagcctcttggtctggttgaggaagcagctaaaacggctcctggaaagaagaggcctgtagatcagtctcctcaggaaccggactcatcatctggtgttggcaaatcgggcaaacagcctgccagaaaaagactaaatttcggtcagactggcgactcagagtcagtcccagaccctcaacctctcggagaaccaccagcagcccccacaagtttgggatctaatacaatggcttcaggcggtggcgcaccaatggcagacaataacgagggtgccgatggagtgggtaattcctcaggaaattggcattgcgattcccaatggctgggcgacagagtcatcaccaccagcaccagaacctgggccctgcccacttacaacaaccatctctacaagcaaatctccagccaatcaggagcttcaaacgacaaccactactttggctacagcaccccttgggggtattttgactttaacagattccactgccacttctcaccacgtgactggcagcgactcattaacaacaactggggattccggcccaagaaactcagcttcaagctcttcaacatccaagttaaagaggtcacgcagaacgatggcacgacgactattgccaataaccttaccagcacggttcaagtgtttacggactcggagtatcagctcccgtacgtgctcgggtcggcgcaccaaggctgtctcccgccgtttccagcggacgtcttcatggtccctcagtatggatacctcaccctgaacaacggaagtcaagcggtgggacgctcatccttttactgcctggagtacttcccttcgcagatgctaaggactggaaataacttccaattcagctataccttcgaggatgtaccttttcacagcagctacgctcacagccagagtttggatcgcttgatgaatcctcttattgatcagtatctgtactacctgaacagaacgcaaggaacaacctctggaacaaccaaccaatcacggctgctttttagccaggctgggcctcagtctatgtctttgcaggccagaaattggctacctgggccctgctaccggcaacagagactttcaaagactgctaacgacaacaacaacagtaactttccttggacagcggccagcaaatatcatctcaatggccgcgactcgctggtgaatccaggaccagctatggccagtcacaaggacgatgaagaaaaatttttccctatgcacggcaatctaatatttggcaaagaagggacaacggcaagtaacgcagaattagataatgtaatgattacggatgaagaagagattcgtaccaccaatcctgtggcaacagagcagtatggaactgtggcaaataacttgcagagctcaaatacagctcccacgactagaactgtcaatgatcagggggccttacctggcatggtgtggcaagatcgtgacgtgtaccttcaaggacctatctgggcaaagattcctcacacggatggacactttcatccttctcctctgatgggaggctttggactgaaacatccgcctcctcaaatcatgatcaaaaatactccggtaccggcaaatcctccgacgactttcagcccggccaagtttgcttcatttatcactcagtactccactggacaggtcagcgtggaaattgagtgggagctacagaaagaaaacagcaaacgttggaatccagagattcagtacacttccaactacaacaagtctgttaatgtggactttactgtagacactaatggtgtttatagtgaacctcgccctattggaacccggtatctcacacgaaacttgtaa

SEQ ID NO: 825 - DNA, 2205 bp, Artificial Sequence; identical to SEQ ID NO: 93
  source: /note="Description of Artificial Sequence: Synthetic polynucleotide"

SEQ ID NO: 826 - DNA, 2234 bp, Artificial Sequence
  source: /note="Description of Artificial Sequence: Synthetic polynucleotide"
atgtcttttgttgatcaccctccagattggttggaagaagttggtgaaggtcttcgcgagtttttgggccttgaagcgggcccaccgaaaccaaaacccaatcagcagcatcaagatcaagcccgtggtcttgtgctgcctggttataactatctcggacccggaaacggtctcgatcgaggagagcctgtcaacagggcagacgaggtcgcgcgagagcacgacatctcgtacaacgagcagcttgaggcgggagacaacccctacctcaagtacaaccacgcggacgccgagtttcaggagaagctcgccgacgacacatccttcgggggaaacctcggaaaggcagtctttcaggccaagaaaagggttctcgaaccttttggcctggttgaagagggtgctaagacggcccctaccggaaagcggatagacgaccactttccaaaaagaaagaaggctcggaccgaagaggactccaagccttccacctcgtcagacgccgaagctggacccagcggatcccagcagctgcaaatcccagcccaaccagcctcaagtttgggagctgatacaatgtctgcgggaggtggcggcccattgggcgacaataaccaaggtgccgatggagtgggcaatgcctcgggagattggcattgcgattccacgtggatgggggacagagtcgtcaccaagtccacccgaacctgggtgctgcccagctacaacaaccaccagtaccgagagatcaaaagcggctccgtcgacggaagcaacgccaacgcctactttggatacagcaccccctgggggtactttgactttaaccgcttccacagccactggagcccccgagactggcaaagactcatcaacaactactggggcttcagaccccggtccctcagagtcaaaatcttcaacattcaagtcaaagaggtcacggtgcaggactccaccaccaccatcgccaacaacctcacctccaccgtccaagtgtttacggacgacgactaccagctgccctacgtcgtcggcaacgggaccgagggatgcctgccggccttccctccgcaggtctttacgctgccgcagtacggttacgcgacgctgaaccgcgacaacacagaaaatcccaccgagaggagcagcttcttctgcctagagtactttcccagcaagatgctgagaacgggcaacaactttgagtttacctacaactttgaggaggtgcccttccactccagcttcgctcccagtcagaacctgttcaagctggccaacccgctggtggaccagtacttgtaccgcttcgtgagcacaaataacactggcggagtccagttcaacaagaacctggccgggagatacgccaacacctacaaaaactggttcccggggcccatgggccgaacccagggctggaacctgggctccggggtcaaccgcgccagtgtcagcgccttcgccacgaccaataggatggagctcgagggcgcgagttaccaggtgcccccgcagccgaacggcatgaccaacaacctccagggcagcaacacctatgccctggagaacactatgatcttcaacagccagccggcgaacccgggcaccaccgccacgtacctcgagggcaacatgctcatcaccagcgagagcgagacgcagccggtgaaccgcgtggcgtacaacgtcggcgggcagatggccaccaacaaccagagctccaccactgcccccgcgaccggcacgtacaacctccaggaaatcgtgcccggcagcgtgtggatggagagggacgtgtacctccaaggacccatctgggccaagatcccagagacgggggcgcactttcacccctctccggccatgggcggattcggactcaaacacccaccgcccatgatgctcatcaagaacacgcctgtgcccggaaatatcaccagcttctcggacgtgcccgtcagcagcttcatcacccagtacagcaccgggcaggtcaccgtggagatggagtgggagctcaagaaggaaaactccaagaggtggaacccagagatccagtacacaaacaactacaacgacccccagtttgtggactttgccccggacagcaccggggaatacagaaccaccagacctatcggaacccgataccttacccgacccctttaacccattcatgtcgcataccctcaataaaccgtgtattcgtgtcagtaaaatactgcctc

SEQ ID NO: 827 - protein, 736 aa, Artificial Sequence
  source: /note="Description of Artificial Sequence: Synthetic polypeptide"
MAADGYLPDWLEDNLSEGIREWWALKPGVPQPKANQQHQDNRRGLVLPGYKYLGPGNGLDKGEPVNEADAAALEHDKAYDQQLKAGDNPYLKYNHADAEFQERLQEDTSFGGNLGRAVFQAKKRILEPLGLVEEAAKTAPGKKRPVDQSPQEPDSSSGVGKSGKQPARKRLNFGQTGDSESVPDPQPLGEPPAAPTSLGSNTMASGGGAPMADNNEGADGVGNSSGNWHCDSQWLGDRVITTSTRTWALPTYNNHLYKQISSQSGASNDNHYFGYSTPWGYFDFNRFHCHFSPRDWQRLINNNWGFRPKKLSFKLFNIQVKEVTQNDGTTTIANNLTSTVQVFTDSEYQLPYVLGSAHQGCLPPFPADVFMVPQYGYLTLNNGSQAVGRSSFYCPEYFPSQMLRTGNNFQFSYTFEDVPFHSSYAHSQSLDRLMNPLIDQYLYYLNRTQGTTSGTTNQSRLLFSQAGPQSMSLQARNWLPGPCYRQQRLSKTANDNNNSNFPWTAASKYHLNGRDSLVNPGPAMASHKDDEEKFFPMHGNLIFGKEGTTASNAELDNVMITDEEEIRTTNPVATEQYGTVANNLQSSNTAPTTRTVNDQGALPGMVWQDRDVYLQGPIWAKIPHTDGHFHPSPLMGGFGLKHPPPQIMIKNTPVPANPPTTFSPAKFASFITQYSTGQVSVEIEWELQKENSKRWNPEIQYTSNYNKSVNVDFTVDTNGVYSEPHPIGTRYLTRNL

SEQ ID NO: 828 - protein, 736 aa, Artificial Sequence
  source: /note="Description of Artificial Sequence: Synthetic polypeptide"
MAADGYLPDWLEDNLSEGIREWWALKPGVPQPKANQQHQDNRRGLVLPGYKYLGPGNGLDKGEPVNEADAAALEHDKAYDQQLKAGDNPYLKYNHADAEFQERLQEDTSFGGNLGRAVFQAKKRILEPLGLVEEAAKTAPGKKRPVDQSPQEPDSSSGVGKSGKQPARKRLNFGQTGDSESVPDPQPLGEPPAAPTSLGSNTMASGGGAPMADNNEGADGVGNSSGNWHCDSQWLGDRVITTSTRTWALPTYNNHLYKQISSQSGASNDNHYFGYSTPWGYFDFNRFHCHFSPRDWQRLINNNWGFRPKKLSFKLFNIQVKEVTQNDGTTTVANNLTSTVQVFTDSEYQLPYVLGSAHQGCLPPFPADVFMVPQYGYLTLNNGSQAVGRSSFYCLEYFPSQMLRTGNNFQFSYTFEDVPFHSSYAHSQSLDRLMNPLIDQYLYYLNRTQGTTSGTTNQSRLLFSQAGPQSMSLQARNWLPGPCYRQQRLSKTANDNNNSNFPWTAASKYHLNGRDSLVNPGPAMASHKDDEEKFFPMHGNLIFGKEGTTASNAELDNVMITDEEEIRTTNPVATEQYGTVANNLQSSNTAPTTRTVNDQGALPGMVWQDRDVYLQGPIWAKIPHTDGHFHPSPLMGGFGLKHPPPQIMIKNTPVPANPPTTFSPAKFASFITQYSTGQVSVEIEWELQKENSKRWNPEIQYTSNYNKSVNVDFTVDTNGVYSEPRPIGTRYLTRNL

SEQ ID NO: 829 - protein, 736 aa, Artificial Sequence
  source: /note="Description of Artificial Sequence: Synthetic polypeptide"
MAADGYLPDWLEDNLSEGIREWWALKPGVPQPKANQQHQDNRRGLVLPGYKYLGPGNGLDKGEPVNEADAAALEHDKAYDQQLKAGDNPYLKYNHADAEFQERLQEDTSFGGNLGRAVFQAKKRILEPLGLVEEAAKTAPGKKRPVDQSPQEPDSSSGVGKSGKQPARKRLNFGQTGDSESVPDPQPLGEPPAAPTSLGSNTMASGGGAPMADNNEGADGVGNSSGNWHCDSQWLGDRVITTSTRTWALPTYNNHLYKQISGQSGASNDNHYFGYSTPWGYFDFNRFHCHFSPRDWQRLINNNWGFRPKKLSFKLFNIQVKEVTQNDGTTTIANNLTSTVQVFTDSEYQLPYVLGSAHQGCLPPFPADVFMVPQYGYLTLNNGSQAVGRSSFYCLEYFPSQMLRTGNNFQFSYTFEDVPFHSSYAHSQSLDRLMNPLIDQYLYYLNRTQGTTSGTTNQSRLLFSQAGPQSMSLQARNWLPGPCYRQQRLSKTANGNNNSNFPWTAASKYHLNGRDSLVNPGPAMASHKDDEEKFFPMHGNLIFGKEGTTASNAELDNVMITDEEEIRTTNPVATEQCGTVANNLQSSNTAPTTRTVNDQGALPGMVWQDRDVYLQGPIWAKIPHTDGHFHPSPLMGGFGLKHPPPQIMIKNTPVPANPPTTFSPAKFASFITQYSTGQVSVEIEWELQKENSKRWNPEIQYTSNYNKSVNVDFTVDTNGVYSEPRPIGTRYLTRNL

SEQ ID NO: 830 - protein, 736 aa, Artificial Sequence
  source: /note="Description of Artificial Sequence: Synthetic polypeptide"
MAADGYLPDWLEDNLSEGIREWWALKPGVPQPKANQQHQDNRRGLVLPGYKYLGPGNGLDKGEPVNEADAAALEHDKAYDQQLKAGDNPYLKYNHADAEFQERLQEDTSFGGNLGRAVFQAKKRILEPLGLVEGAAKTAPGKKRPVDQSPQEPDSSSGVGKSGKQPARKRLNFGQTGDSESVPDPQPLGEPPAAPTSLGSNTMASGGGAPMADNNEGADGVGNSSGNWHCDSQWLGDRVITTSTRTWALPTYNSHLYKQISSQSGASNDNHYFGYSTPWGYFDFNRFHCHFSPRDWQRLINNNWGFRPKKLSFKLFNIQVKEVTQNDGTTTIANNLTSTVQVFTDSEYQLPYVLGSAHQGCLPPFPADAFMVPQYGYLTLNNGSQAVGRSSFYCLEYFPSQMLRTGNNFQFSYTFEDVPFHGSYAHSQSLDRLMNPLIDQYLYYLNRTQGTTSGTTNQSRLLFSQAGPQSMSLQARNWLPGPCYRQQRLSKTANDNNNSNFPWTAASKYHLNGRDSLVNPGPAMASHKDDEEKFFPMHGNLIFGKEGTTASNAELDNVMITDEEEIRTTNPVATEQYGTVANNLQSSNTAPTTRTVNDQGALPGMVWQDRDVYLQGPIWAKIPHTDGHFHPSPLMGGFGLKHPPPQIMIKNTPVPANPPTTFSPAKFASFITQYSTGQVSVEIEWELQKENSKRWNPEIQYTSNYNKSVNVDFTVDTNGVYSEPRPIGTRYLTRNS

SEQ ID NO: 831 - protein, 736 aa, Artificial Sequence
  source: /note="Description of Artificial Sequence: Synthetic polypeptide"
MAADGYLPDWLEDNLSEGIREWWALKPGVPQPKANQQHQDNRRGLVLPGYKYLGPGNGLDKGEPVNEADAAALEHDKAYDQQLKAGDNPYLKYNHADAEFQERLQEDTSFGGNLGRAVFQAKKRILEPLGLVEGAAKTAPGKKRPVDQSPQEPDSSSGVGKSGKQLARKRLNFGQTGDSESVPDPQPLGEPPAAPTSLGSNTMASGGGAPMADNNEGADGVGNSSGNWHCDSQWLGDRVITTSTRTWALPTYNSHLYKQISGQSGASNDNHYFGYSTPWGYFDFNRFHCHFSPRDWQRLINNNWGFRPKKLSFKLFNIQVKEVTQNDGTTTIANNLTSTVQVFTDSEYQLPYVLGSAHQGCLPPFPADVFMVPQYGYLTLNNGSQAVGRSSFYCLEYFPSQMLRTGNNFQFSYTFEDVPFHSSYAHSQSLDRLMNPLIDQYLYYLNRTQGTTSGTTNQSRLLFSQAGPQSMSLQARNWLPGPCYRQQRLSKTANDNNNSNFPWTAASKYHLNGRDSLVNPGPAMASHKDDEEKFFPMHGNLIFGKEGTTASNAELDNVMITDEEEIRTTNPVATEQYGTVANNLQSSNTAPTTRTVNDQGALPGMVWQDRDVYLQGPIWAKIPHTDGHFHPSPLMGGFGLKHPPPQIMIKNTPVPANPPTTFSPAKFASFITQYSTGQVSVEIEWELQKENSKRWNPEIQYTSNYNKSVNVDFTVDTNGVYSEPRPIGTRYLTRNL

SEQ ID NO: 832 - protein, 736 aa, Artificial Sequence
  source: /note="Description of Artificial Sequence: Synthetic polypeptide"
MAADGYLPDWLEDNLSEGIREWWALKPGVPQPKANQQHQDDRRGLVLPGYKYLGPGNGLDKGEPVNEADAAALEHDKAYDQQLKAGDNPCLKYNHADAEFQERLQEDTSFGGNLGRAVFQAKKRILEPLGLVEEAAKTAPGKKRPVDQSPQEPDSSSGVGKSGKQPARKRLNFGQTGDSESVPDPQPLGEPPAAPTSLGSNTMASGGSAPMADNNEGADGVGNSSGNWHCDSQWLGDRVITTSTRTWALPTYNNHLYKQISSQSGASNDNHYFGYSTPWGYFDFNRFHCHFSPRDWQRLINNNWGFRPKKLSFKLFNIQVKEVTQNDGTTTIANNLTSTVQVFTDSEYQLPYVLGSAHQGCLPPFPADVFMVPQYGYLTLNNGSQAVGRSSFYCLEYFPSQMLRTGNNFQFSYTFEDVPFHSSYAHSQSLDRLMDPLIDQYLYYLNRTQGTTSGTTNQSRLLFSQAGPQSMSLQARNWLPGPCYRQQRLSKTANDNNNSNFPWTAASKYHLNGRDSLVNPGPAMASHKDDEEKFFPMHGNLIFGKEGTTASNAELDNVMITDEEEIRTTNPVATEQYGTVANNLQSSNTAPTTRTVNDQGALPGMVWQDRDVYLQGPIWAKIPHTDGHFHPSPLMGGFGLKHPPPQIMIKNTPVPANPPTTFSPAKFASFITQYSTGQVSVEIEWELQKENSKRWNPEIQYTSNYNKSVNVDFTVDTNGVYSEPRPIGTRYLTRNL

SEQ ID NO: 833 - protein, 736 aa, Artificial Sequence
  source: /note="Description of Artificial Sequence: Synthetic polypeptide"
MAADGYLPDWLEDNLSEGIREWWALKPGVPQPKANQQHQDDRRGLVLPGYKYLGPGNGLDKGEPVNEADAAALEHDKAYDQQLKAGDNPYLKYNHADAEFQERLQEDTSFGGNLGRAVFQAKKRILEPLGLVEEAAKTAPGKKRPVDQSPQEPDSSSGVGKSGKQPARKRLNFGQTGDSESVPDPQPLGEPPAAPTSLGSNTMASGGGAPMADNNEGADGVGNSSGNWHCDSQWLGNRVITTSTRTWALPTYNNHLYKQISSQSGASNDNHYFGYSTPWGYFDFNRFHCHFSPRDWQRLINNNWGFRPKKLSFKLFNIQVKEVTQNDGTTTIANNLTSTVQVFTDSEYQLPYVLGSAHQGCLPPFPADVFMVPQYGYLTLNNGSQAVGRSSFYCLEYFPSQMLRTGNNFQFSYTFEDVPFHSSYAHSQSLDRLMNPLIDQYLYYLNRTQGTTSGTTNQSRLLFSQAGPQSMSLQARNWLPGPCYRQQRLSKTANDNNNSNFPWTAASKYHLNGRDSLVNPGPAMASHKDDEEKFFPMHGNLIFGKEGTTASNAELDNVMITDEEEIRTTNPVATEQYGTVANNLQSSNTAPTTRTVNDQGALPGMVWQDRDVYLQGPIWAKIPHTDGHFHPSPLMGGFGLKHPPPQIMIKNTPVPANPPTTFSPAKFASFITQYSTGQVSVEIEWELQKENSKRWNPEIQYTSNYNKSVNVDFTVDTNGVYSEPRPIGTRYLTRNL

SEQ ID NO: 834 - protein, 736 aa, Artificial Sequence
  source: /note="Description of Artificial Sequence: Synthetic polypeptide"
MAADGYLPDWLEDNLSEGIREWWALKPGVPQPKANQQHQDDRRGLVLPGYKYLGPGNGLDKGEPVNEADAAALEHDKAYDQQLKAGDNPYLKYNHADAEFQERLQEDTSFGGNLGRAVFQAKKRILEPLGLVEEAAKTAPGKKRPVDQSPQEPDSSSGVGKSGKQPARKRLNFGQTGDSESVPDPQPLGEPPAAPTSLGSNTMASGGGAPMADNNEGADGVGNSSGNWHCDSQWLGDRVITTSTRTWALPTYNNHLYKQISSQSGASNDNHYFGYSTPWGYFDFNRFHCHFSPRDWQRLINNNWGFRPKKLSFKLFNIQVKEVTQNDGTTTIANNLTSTVQVFTDSEYQLPYVLGSAHQGCLPPFPADVFMVPQYGYLTLNNGSQAVGRSSFYCLEYFPSQMLRTGNNFQFSYTFEDVPFHSSYAHSQSLDRLMNPLIDQYLYYLNRTQGTTSGTTNQSRLLFSQAGPQSMSLQARNWLPGPCYRQQRLSKTANDNNNSNFPWTAASKYHLNGRDSLVNPGPAMASHKDDEEKFFPMHGNLIFGKEGTTASNAELDNVMITDEEEIRTTNPVATVQYGTVANNLQSSNTAPTTRTVNDQGALPGMVWQDRDVYLQGPIWAKIPHTDGHFHPSPLMGGFGLKHPPPQIMIKNTPVPANPPTTFSPAKFASFITQYSTGQVSVEIEWELQKENSKRWNPEIQYTSNYNKSVNVDFTVDTNGVYSEPRPIGTRYLTRNL

SEQ ID NO: 835 - protein, 735 aa, Artificial Sequence
  source: /note="Description of Artificial Sequence: Synthetic polypeptide"
MAADGYLPDWLEDNLSEGIREWWALKPGVPQPKANQQHQDNRRGLVLPGYKYLGPGNGLDKGEPVNEADAAALEHDKAYDQQLKAGDNPYLKYNHADAEFQERLQEDTSFGGNLGRAVFQAKKGILEPLGLVEEAAKTAPGKKRPVDQSPQEPDSSSGVGKSGKQPARKRLNFGQTGDSESVPDPQPLGEPPAAPTSLGSNTMASGGGAPMADNNEGADGVGNSSGNWHCDSQWLGDRVITTSTRTWALPTYNNHLYKQISSQSGASNDNHYFGYSTPWGYFDFNRFHCHFSPRDWQRLINNNWGFRPKKLSFKLFNIQVKEVTQNDGTTTIANNLTSTVQVFTDSEYQLPYVFGSAHQGCLPPFPADVFMVPQYGYLTLNNGSQAVGRSSFYCLEYFPSQMLRTGNNFQFSYTFEDVPFHSSYAHSQSSDRLMNPLIDQYLYYLNRTQGTTSGTTNQSRLLFSQAGPQSMSLQARNWLPGPCYRQQRLSKTANDNNNSNFPTAASKYHLNGRDSLVNPGPAMASHKDDEEKFFPMHGNLIFGKEGTTASNAELDNVMITDEEEIRTTNPVATEQYGTVANNLQSSNTAPTTRTVNDQGALPGMVWQDRDVYLQGPIWAKIPHTDGHFHPSPLMGGFGLKHPPPQIMIKNTPVPANPPTTFSPAKFASFITQYSTGQVSVEIEWELQKENSKRWNPEIQYTSNYNKSVNVDFTVDTNGVYSEPRPIGTRYLTRNL

SEQ ID NO: 836 - protein, 736 aa, Artificial Sequence
  source: /note="Description of Artificial Sequence: Synthetic polypeptide"
MAADGYLPDWLEDNLSEGIREWWALKPGVPQPKANQQHQDNRRGLVLPGYKYLGPGNGLDEGEPVNEADAAALEHDKAYDQQLKAGDNPYLKYNHADAEFQERLQEDTSFGGNLGRAVFQAKKRILEPLGLVEGAAKTAPGKKRPVDQSPQEPDSSSGVGKSGKQPARKRLNFGQTGDSESVPDPQPLGEPPAAPTSLGSNTMASGGGAPMADNNEGADGVGNSSGNWHCDSQWLGDRVITTSTRTWALPTYNSHLYKQISSQSGASNDNHYFGYSTPWGYFDFNRFHCHFSPRDWQRLINNNWGFRPKKLSFKLFNIQVKEVTQNDGTTTIANNLTSTVQVFTDSEYQLPYVLGSAHQGCLPPFPADVFMVPQYGYLTLNNGSQAVGRSSFYCLEYFPSQMLRTGNNFQFSYTFEDVPFHSSYAHSQSLDRLMNPLIDQYLYYLNRTQGTTSGTTNQSRLLFSQAGPQSMSLQARNWLPGPCYRQQRLSKTANDNNNSNFPWTAASKYHLNGRDSLVNPGPAMASHKDDEEKFFPMHGNLIFGKEGTTASNAELDNVMITDEEEIRTTNPVATEQYGTVANNLQSSNTAPTTRTVNDQGALPGMVWQDRDVYLQGPIWAKIPHTDGHFHPSPLMGGFGLKHPPPQIMIKNTPVPANPPTTFSPAKFASFITQYSTGQVSVEIEWELQKENSKRWNPEIQYTSNYNKSVNVDFTVDTNGVYSEPRPIGTRYLTRNL

SEQ ID NO: 837 - protein, 668 aa, Artificial Sequence
  source: /note="Description of Artificial Sequence: Synthetic polypeptide"
MAADGYLPDWLEDNLSEGIREWWALKPGVPQPKANQQHQDNRRGLVLPGYKYLGPGNGLDKGEPVNEADAAALEHDKAYDQQLKAGDNPYLKYNHADAEFQERLQEDTSFGGNLGRAVFQAKKRILEPLGLVEGAAKTAPGKKRPVDQSPQEPDSSSGVGKSGKQPARKRLNFGQTGDSESVPDPQPLGEPPAAPTSLGSNTMASGGGAPMADNNEGADGVGNSSGNWHCDSQWLGDRVITTSTRTWALPTYNSHLYKQISSQSGASNDNHYFGYSTPWGILTLTDSTATSHHVTGSDSLTTTGDSGPRNSASSSSTSKLKRSRRTMARRLLPITLPARFKCLRTRSISSRTCSGRRTKAVSRRFQRTPSWSLSMDTSPTTEVKRWDAHPFTAWSTSLRRCGLEITSNSAIPSRMYLFTAATLTARVWIAILLLISICTTTERKEQPLEQPTNHGCFLARLGLSLCLCRPEIGYLGPATGNRDFQRLLTTTTTVTFLGQRPANIISMAATRWIQDQLWPVTRTMKKNFSLCTAIRGPYLAWCGKIVTCTFKDLSGQRFLTRMDTFILLLWEALDNIRLLKSSKILRYRQILRRLSARPSLLHLSLSTPLDRSAWKLSGSYRKKTANVGIQRFSTLPTTTSLLMWTLLTLMVFIVNLALLEPGISHETC

SEQ ID NO: 838 - protein, 734 aa, Artificial Sequence
  source: /note="Description of Artificial Sequence: Synthetic polypeptide"
MTDGYLPDWLEDNLSEGVREWWALQPGAPKPKANQQHQDNARGLVLPGYKYLGPGNGLDKGEPVNAADAAALEHDKAYDQQLKAGDNPYLKYNHADAEFQQRLQGDTSFGGNLGRAVFQAKKRVLEPLGLVEQAGETAPGKKRPLIESPQQPDSSTGIGKKGKQPAKKKLVFEDETGAGDGPPEGSTSGAMSDDSEMRAATGGAAVEGGQGADGVGNASGDWHCDSTWSEGHVTTTSTRTWVLPTYNNHLYKRLGESLQSNTYNGFSTPWGYFDFNRFHCHFSPRDWQRLINNNWGMRPKAMRVKIFNIQVKEVTTSNGETTVANNLTSTVQIFADSSYELPYVMDAGQEGSLPPFPNDVFMVPQYGYCGLVTGNTSQQQTDRNAFYCLEYFPSQMLRTGNNFEITYSFEKVPFHSMYAHSQSLDRLMNPLIDQYLWGLQSTTTGTTLNAGTATTNFTKLRPTNLSNFKKNWLPGPSIKQQGFSKTANQNYKIPATGSDSLIKYETHSTLDGRWSALTPGPPMATAGPADSKFSNSQLIFAGPKQNGNTATVPGTLIFTSEEELAATNATDTDMWGNLPGGDQSNSNLPTVDRLTALGAVPGMVWQNRDIYYQGPIWAKIPHTDGHFHPSPLIGGFGLKHPPPQIFIKNTPVPANPATTFSSTPVNSFITQYSTGQVSVQIDWEIQKERSKRWNPEVQFTSNYGQQNSLLWAPDAAGKYTEPRAIGTRYLTHHL

SEQ ID NO: 839 - protein, 734 aa, Artificial Sequence
  source: /note="Description of Artificial Sequence: Synthetic polypeptide"
MTDGYLPDWLEDNLSEGVREWWALQPGAPKPKANQQHQDNARGLVLPGYKYLGPGNGLDKGEPVNAADAAALEHDKAYDQQLKAGDNPYLKYNHADAEFQQRLQGDTSFGGNLGRAVFQAKKRVLEPLGLVEQAGETAPGKKRPLIESPQQPDSSTGIGKKGKQPAKKKLVFEDETGAGDGPPEGSTSGAMSDDSEMRAAAGGAAVEGGQGADGVGNASGDWHCDSTWSEGHVTTTSTRTWVLPTYNNHLYKRLGESLQSNTYNGFSTPWGYFDFNRFHCHFLPRDWQRLINNNWGVRPKAMRVKIFNIQVKEVTTSNGETTVANNLTSTVQIFADSSYELPYVMDAGQEGSLPPFPNDVFMVPQYGYCGLVTGDTSQQQTDRNAFYCLEYFPSQMLRTGNNFEITYSFEKVPFHSMYAHSQSLDRLMNPLIDQYLWGLQSTTTGTTLNAGTATTNFTKLRPTNFSNFKKNWLPGPSIKQQGFSKTANQNYKIPATGSDSLIKYETHSTLDGRWSALTPGPPMATAGPADSKFSNSQLIFAGPKQNGNTATVPGTLIFTSEEELAATNATDTDMWGNLPGGDQSNSNLPTVDRLTALGAVPGMVWQNRDIYYQGPIWAKIPHTDGHFHPSPLIGGFGLKHPPPQIFIKNTPVPANPATTFSSTPVNSFITQYSTGQVSVQIDWEIQKERSKRWNPEVQFTSNYGQQNSLLWAPDAAGKYTEPRAIGTRYLTHHL

SEQ ID NO: 840 - protein, 734 aa, Artificial Sequence
  source: /note="Description of Artificial Sequence: Synthetic polypeptide"
MTDGYLPDWLEDNLSEGVREWWALQPGAPKPKANQQHQDNARGLVLPGYKYLGPGNGLDEGEPVNAADAAALEHDKAYDQQLKAGDNPYLKYNHADAEFQQRLQGDTSFGGNLGRAVFQAKKRVLEPLGLVEQAGETAPGKKRPLIESPQQPDSSTGIGKKGKQPAKKKLVFEDETGAGDGPPEGSTSGAMSDDSEMRAAAGGAAVEGGQGADGVGNASGDWHCDSTWSEGHVTTTSTRTWVLPTYNNHLYKRLGESLQSNTYNGFSTPWGYFDFNRFHCHFSPRDWQRLINNNWGMRPKAMRVKIFNIQVKEVTTSNGETTVANNLTSTVQIFADSSYELPYVMDAGQEGSLPPFPNDVFMVPQYGYCGLVTGNTSQQQTDRNAFYCLEYFPSQMLRTGNNFEITYSFEKVPFHSMYAHSQSLDRLMNPLIDQYLWGLQSTTTGTTLNAGTATTNFTKLRPTNFSNFKKNWLPGPSIKQQGFSKTANQNYKIPATGSDSLIKYETHSTLDGRWSALTPGPPMATAGPADSKFSNSQLIFAGPKQNGNTATVPGTLIFTSEEELAATNATDTDMWGNLPGGDQSNSNLPTVDRLTALGAVPGMVWQNRDIYYQGPIWAKIPHTDGHFHPSPLIGGFGLKHPPPQIFIKNTPVPANPATTFSSTPVNSFITQYSTGQVSVQIDWEIQKERSKRWNPEVQFTSNYGQQNSLLWAPDAAGKYTEPRAIGTRYLTHHL

SEQ ID NO: 841 - protein, 734 aa, Artificial Sequence
  source: /note="Description of Artificial Sequence: Synthetic polypeptide"
MTDGYLPDWLEDNLSEGVREWWALQPGAPKPKANQQHQDNARGLVLPGYKYLGPGNGLDKGEPVNAADAAALEHDKAYDQQLKAGDNPYLKYNHADAEFQQRLQGDTSFGGNLGRAVFQAKKRVLEPLGLVEQAGETAPGKKRPLIESPQQPDSSTGIGKKGKQPAKKKLVFEDGTGAGDGPPEGSTSGAMSDDSEMRAAAGGAAVEGGQGADGVGNASGDWHCDSTWSEGHVTTTSTRTWVLPTYNNHLYKRLGESLQSNTYNGFPTPWGYFDFNRFHCHFSPRDWQRLINNNWGMRPKAMRVKIFNIQVKEVTTSNGETTAANNLTSTVQIFADSSYELPYVMDAGQEGSLPPFPNDVFMVPQYGYCGLVTGNTSQQQTDRNAFYCLEYFPSQMLRTGNNFEITYSFEKVPFHSMYAHSQSLDRLMNPLIDQYLWGLQSTTTGTTLNAGTATTNFTKLRPTNFSNFKKNWLPGPSIKQQGFSKTANQNYKIPATGSDSLIKYETHSTLDGRWSALTPGPPMATAGPADSKFSNSQLIFAGPKQNGNTATVPGTLIFTSEEELAATNATDTDMWGNLPGGDQSNSNLPTVDRLTALGAVPGMVWQNRDIYYQGPIWAKIPHTDGHFHPSPLIGGFGLKHPPPQIFIKNTPVPANPATTFSSTPVNSFITQYSTGQVSVQIDWEIQKERSKRWNPEVQFTSNYGQQNSLLWAPDAAGKYTEPRAIGTRYLTHHL

SEQ ID NO: 842 - protein, 734 aa, Artificial Sequence
  source: /note="Description of Artificial Sequence: Synthetic polypeptide"
MTDGYLPDWLEDNLSEGVREWWALQPGAPKPKANQQHQDNARGLVLPGYKYLGPGNGLDKGEPVNAADAAALEHDKAYDQQLKAGDNPYLKYNHADAEFQQRLQGDTSFGGNLGRAVFQAKKRVLEPLGLVEQAGETAPGKKRPLIESPQQPDSSTGIGKKGKQPAKKKLVFEDETGAGDGPPEGSTSGAMSDDSEMRAAAGGAAVEGGQGADGVGNASGDWHCDSTWSEGHVTTTSTRTWVLPTYNNHLYKRLGESLQSNTYNGFSTPWGYFDFNRFHCHFSPRDWQRLINNNWGMRPKAMRVKIFNIQVKEVTTSNGETTVANNLTSTVQIFADSSYELPYVMDAGQEGSLPPFPNDVFMVPQYGYRGLVTGNTSQQQTDRNAFYCLEYFPSQMLRTGNNFEITYSFEKVPFHSMYAHSQSLDRLMNPLIDQYLWGLQSTTTGTTLNAGTATTNFTKLRPTNFSNFKKNWLPGPSIKQQGFSKTANQNYKIPATGSDSLIKYETHSTLDGRWSALTPGPPMATAGPADSKFSNSQLIFAGPKQNGNTATVPGTLIFTSEEELAATNATDTDMWGNLPGGDQSNSNLPTVDRLTALGAVPGMVWQNRDIYYQGPIWAKIPHTDGHFHPSPLIGGFGLKHPPPQIFIKNTPVPANPATTFSSTPVNSFITQYSTGQVSVQIDWEIQKERSKRWNPEVQFTSNYGQQNSLLWAPDAAGKYTEPRAIGTRYLTHHL

SEQ ID NO: 843 - protein, 734 aa, Artificial Sequence
  source: /note="Description of Artificial Sequence: Synthetic polypeptide"
MTDGYLPDWLEDNLSEGVREWWALQPGAPKPKANQQHQDNARGLVLQGYKYLGPGNGLDKGEPVNAADAAALEHDKAYDQQLKAGDNPYLKYNHADAEFQQRLQGDTSFGGNLGRAVFQAKKRVLEPLGLVEQAGETAPGKKRPLIESPQQPDSSTGIGKKGKQPAKKKLVFEDETGAGDGPPEGSTSGAMSDDSEMRAAAGGAAVEGGQGADGVGNASGDWHCDSTRSEGHVTTTSTRTWVLPTYNNHLYKRLGESLQSNTYNGFSTPWGYFDFNRFHCHFSPRDWQRLINNNWGMRPKAMRVKIFNIQVKEVTTSNGETTVANNLTSTVQIFADSSYELPYVMDAGQEGSLPPFPNDVFMVPQYGYCGLVTGNTSQQQTDRNAFYCLEYFPSQMLRTGNNFEITYSFEKVPFHSMYAHSQSLDRLMNPLIDQYLWGLQSTTTGTTLNAGTATTNFTKLRPTNFSNFKKNWLPGPSIKQQGFSKTANQNYKIPATGSDSLIKYETHSTLDGRWSARTPGPPMATAGPADSKFSNSQLIFAGPKQNGNTATVPGTLIFTSEEELAATNATDTDMWGNLPGGDQSNSNLPTVDRLTALGAVPGMVWQNRDIYYQGPIWAKIPHTDGHFHPSPLIGGFGLKHPPPQIFIKNTPVPANPATTFSSTPVNSFITQYSTGQVSVQIDWEIQKERSKRWNPEVQFTSNYGQQNSLLWAPDAAGKYTEPRAIGTRYLTHHL

SEQ ID NO: 844 - protein, 724 aa, Artificial Sequence
  source: /note="Description of Artificial Sequence: Synthetic polypeptide"
MSFVDHPPDWLEEVGEGLREFLGLEAGPPKPKPNQQHQDQARGLVLPGYNYLGPGNGLDRGEPVNRADEVAREHDISYNEQLEAGDNPYLKYNHADAEFQERLADDTSFGGNLGKAVFQAKKRVLEPFGLVEEGAKTAPTGKRIDDHFPKRKKARTEEDSKPSTSSDAEAGPSGSQQLQIPAQPASSLGADTMSAGGGGPLGDNNQGADGVGNASGDWHCDSTWMGDRVVTKSTRTWVLPSYNNHQYREIKSGSVDGSNANAYFGYSTPWGYFDFNRFHSHWSPRDWQRLINNYWGFRPRSLRVKIFNIQVKEVTVQDSTTTIANNLTSTVQVFTDDDYQLPYVVGNGTEGCLPAFPPQVFTLPQYGYATLNRDNTENPTERSSFFCLEYFPSKMLRTGNNFEFTYNFEEVPFHSSFAPSQNLFKLANPLVDQYLYRFVSTNNTGGVQFNKNLAGRYANTYKNWFPGPMGRTQGWNLGSGVNRASVSAFATTNRMELEGASYQVPPQPNGMTNNLQGSNTYALENTMIFNSQPANPGTTATYLEGNMLITSESETQPVNRVAYNVGGQMATNNQSSTTAPATGTYNLQEIVPGSVWMERDVYLQGPIWAKIPETEAHFHPSPAMGGFGLKHPPPMMLIKNTPVPGNITSFSDVPVSSFITQYSTGQVTVEMEWELKKENSKRWNPEIQYTNNYNDPQFVDFAPDSTGEYRTTRPIGTRYLTRPL

SEQ ID NO: 845 - protein, 724 aa, Artificial Sequence
  source: /note="Description of Artificial Sequence: Synthetic polypeptide"
MSFVDHPPDWLEEVGEGLREFLGLEAGPPKPKPNQQHQDQARGLVLPGYNYLGPGNGLDRGEPVNRADEVAREHDISYNEQLEAGDNPYLKYNHADAEFQEKLADDTSSGGNLGKAVFQAKKRVLEPFGLVEEGAKTAPTGKRIDDHFPKRKKARTEEDSKPSTSSDAEAGPSGSQQLQIPAQPASSLGADTMSAGGGGPLGDNNQGADGVGNASGDWHCDSTWMGDRVVTKSTRTWVLPSYNNHQYREIKSGSVDGSNANAYFGYSTPWGYFDFNRFHSHWSPRDWQRLINNYWGFRPRSLRVKIFNIQVKEVTVQDSTTTIANNLTSTVQVFTDDDYQLPYVVGNGTEGCLPAFPPQVFTLPQYGYATLNRDNTENPTERSSFFCLEYFPSKMLRTGNNFEFTYNFEEVPFHSSFAPSQNLFKLANPLVDQYLYRFVSTNNTGGVQFNKNLAGRYANTYKNWFPGPMGRTQGWNLGSGVNRASVSAFATTNRMELEGASYQVPPQPNGMTNNLQGSNTYALENTMIFNSQPANPGTTATYLEGNMLITSESETQPVNRVAYNVGGQMATNNQSSTTAPATGTYNLQEIVPGSVWMERDVYLQGPIWAKIPETGAHFHPSPAMGGFGLKHPPPMMLIKNTPVPGNITSFSDVPVSSFITQYSTGQVTVEMEWELKKENSKRWNPEIQYTNNYNDPQFVDFAPDSTGEYRTTRPIGTRYLTRPL

SEQ ID NO: 846 - protein, 724 aa, Artificial Sequence
  source: /note="Description of Artificial Sequence: Synthetic polypeptide"
MSFVDHPPDWLEEVGEGLREFLGLEAGPPKPKPNQQHQDQARGLVLPGYNYLGPGNGLDRGEPVNRADEVAREHDISYNEQLEAGDNPYLKYNHADAEFQEKLADDTSFGGNLGKAVFQAKKRVLEPFGLVEEGAKTAPTGKRIDDHFPKRKKARTEEDSKPSTSSDAEAGPSGSQQLQIPAQPASSLGADTMSAGGGGPLGDNNQGADGVGNASGDWHCDSTWMGDRVVTKSTRTWVLPSYNNHQYREIKSGSVDGSNANAYFGYSTPWGYFDFNRFHSHWSPRDWQRLINNYWGFRPRSLRVKIFNIQVKEVTVQDSTTTIANNLTSTVQVFTDDDYQLPYVVGNGTEGCLPAFPPQVFTLPQYGYATLNRDNTENPTERSSFFCLEYFPSKMLRTGNNFEFTYNFEEVPFHSSFAPSQNLFKLANPLVDQYLYRFVSTNNTGGVQFNKNLAGRYANTYKNWFPGPMGRTQGWNLGSGVNRASVSAFATTNRMELEGASYQVPPQPNGMTNNLQGSNTYALENTMIFNSQPANPGTTATYLEGNMLITSESETQPVNRVAYNVGGQMATNNQSSTTAPATGTYNLQEIVPGSVWMERDVYLQGPIWAKIPETGAHFHPSPAMGGFGLKHPPPMMLIKSTPVPGNITSFSDVPVSSFITQYSTGQVTVEMEWELKKENSKRWNPEIQYTNNYNDPQFVDFAPDSTGEYRTTRPIGTRYLTRPL

SEQ ID NO: 847 - protein, 724 aa, Artificial Sequence
  source: /note="Description of Artificial Sequence: Synthetic polypeptide"
MSFVDHPPDWLEEVGEGLREFLGPEAGPPKPKPNQQHQDQARGLVLPGYNYLGPGNGLDRGEPVNRADEVAREHDISYNEQLEAGDNPYLKYNHADAEFQEKLADDTSFGGNLGKAVFQAKKRVLEPFGLVEEGAKTAPTGKRIDDHFPKRKKVRTEEDSKPSTSSDAEAGPSGSQQLQIPAQPASSLGADTMSAGGGGPLGDNNQGADGVGNASGDWHCDSTWMGDRVVTKSTRTWVPPSYNNHQYREIKSGSVDGSNANAYFGYSTPWGYFDFNRFHSHWSPRDWQRLINNYWGFRPRSLRVKIFNIQVKEVTVQDSTTTIANNLTSTVQVFTDDDYQLPYVVGNGTEGCLPAFPPQVFTLPQYGYATLNRDNTENPTERSSFFCLEYFPSKMLRTGNNFEFTYNFEEVPFHSSFAPSQNLFKLANPLVDQYLYRFVSTNNTGGVQFNKNLAGRYANTYKNWFPGPMGRTQGWNLGSGVNRASVSAFATTNRMELEGASYQVPPQPNGMTNNLQGSNTYALENTMIFNSQPANPGTTATYLEGNMLITSESETQPVNRVACNVGGQMATNNQSSTTAPATGTYNLQEIVPGSVWMERDVYLQGPIWAKIPETGAHFHPSPAMGGFGLKHPPPMMLIKNTPVPGNITSFSDVPVSSFITQYSTGQVTVEMEWELKKENSKRWNPEIQYTNNYNDPQFVDFAPDSTGEYRTTRPIGTRYLTRPL

SEQ ID NO: 848 - protein, 724 aa, Artificial Sequence
  source: /note="Description of Artificial Sequence: Synthetic polypeptide"
MSFVDHPPDWLEEVGEGLREFLGLEAGPPKPKPNQQHQDQARGLVLPGYNYLGPGNGLDRGEPVNRADEVAREHDISYNEQLEAGDNPYLKYNHADAEFQEKLADDTSFGGNLGKAVFQAKKRVLEPFGLVEEGAKTAPTGKRIDDHFPKRKKARTEEDSKPSTSSDAEAGPSGSQQLQIPAQPASSLGADTMSAGGGGPLGDNNQGADGVGNASGDWHCDSTWMGDRVVTKSTRTWVLPSYNNHQYREIKSGSVDGSNANAYFGYSTPWGYFDFNRFHSHWSPRDWQRLINNYWGFRPRSLRVKIFNIQVKEVTVQDSTTTIANNLTSTVQVFTDDDYQLPYVVGNGTEGCLPAFPPQVFTLPQYGYATLNRDNTENPTERSSFFCLEYFPSKMLRTGNNFEFTYNFEEVPFHSSFAPSQNLFKLANPLVDQYLYRFVSTNNTGGVQFNKNLAGRYANTYKNWFPGPMGRTQGWNLGSGVNRASVSAFATTNRMELEGASYQVPPQPNGMTNNLQGSNTYALENTMIFNSQPANPGTTATYLEGNMLITSESETQPVNRVAYNVGGQMATNNQSSTTAPATGAYNLQEIVPGSVWMERDVYLQGPIWAKIPETGAHFHPSPAMGGFGLKHPPPMMLIKNTPVPGNITSFSDVPVSSFITQYSTGQVTVEMEWELKKENSKRWNPEIQYTNNYNDPQFVDFAPDSTGEYRTTRPIGTRYLTRPL

SEQ ID NO: 849 - protein, 724 aa, Artificial Sequence
  source: /note="Description of Artificial Sequence: Synthetic polypeptide"
MSFVDHPPDWLEEVGEGLREFLGLEAGPPKPKPNQQHQDQARGLVLPGYNYLGPGNGLDRGEPVNRADGVAREHDISYNEQLEAGDNPYLKYNHADAEFQEKLADDTSFGGNLGKAVFQAKKRVLEPFGLVEEGAKTAPTGKRIDDHFPKRKKARTEEDSKPSTSSDAEAGPSGSQQLQIPAQPASSLGADTMSAGGGGPLGDNNQGADGVGNASGDWHCDSTWMGDRVVTKSTRTWVLPSYNNHQYREIKSGSVDGSNANAYFGYSTPWGYFDFNRFHSHWSPRDWQRLINNYWGFRPRSLRVKIFNIQVKEVTVQDSTTTIANNLTSTVQAFTDDDYQLPYVVGNGTEGCLPAFPPQVFTLPQYGYATLNRDNTENPTERSSFFCLEYFPSKMLRTGNNFEFTYNFEEVPFHSSFAPSQNLFKLANPLVDQYLYRFVSTNNTGGVQFNKNLAGRYANTYKNWFPGPMGRTQGWNLGSGVNRASVSAFATTNRMELEGASYQVPPQPNGMTNNLQGSNTYALENTMIFNSQPANPGTTATYLEGNMLITSESETQPVNRVAYNVGGQMATNNQSSTTAPATGTYNLQEIVPGSVWMERDVYLQGPIWAKIPETGAHFHPSPAMGGFGLKHPPPMMLIKNTPVPGNITSFSDVPVSSFITQYSTGQVTVEMEWELKKENSKRWNPEIQYTNNYNDPQFVDFAPDSTGEYRTTRPIGTRYLTRPL

SEQ ID NO: 850 - protein, 723 aa, Artificial Sequence
  source: /note="Description of Artificial Sequence: Synthetic polypeptide"
MSFVDHPPDWLEEVGEGLREFLGLEAGPPKPKPNQQHQDQARGLVLPGYNYLGPGNGLDRGEPVNRADEVAREHDISYNEQLEAGDNPYLKYNHADAEFQEKLADDTSFGGNLGKAVFQAKKRVLEPFGLVEEGAKTAPTGKRIDDHFPKRKKARTEEDSKPSTSSDAEAGPSGSQQLQIPAQPASSLGADTMSAGGGGPLGDNNQGADGVGNASGDWHCDSTWMGDRVVTKSTRTWVLPSYNNHQYREIKSGSVDGSNANAYFGYSTPWGYFDFNRFHSHWSPRDWQRLINNYWGFRPRSLRVKIFNIQVKEVTVQDSTTTIANNLTSTVQVFTDDDYQLPYVVGNGTEGCLPAFPPQVFTLPQYGYATLNRDNTENPTERSSFFCLEYFPSKMLRTGNNFEFTYNFEEVPFHSSFAPSQNLFKLANPLVDQYLYRFVSTNNTGGVQFNKNLAGRYANTYKNWFPGPMGRTQGWNLGSGVNRASVSAFATTNRMELEGASYVPPQPNGMTNNLQGSNTYALENTMIFNSQPANPGTTATYLEGNMLITSESETQPVNRVAYNVGGQMATNNQSSTTAPATGTYNLQEIVPGSVWMEGDVYLQGPIWAKIPETGAHFHPSPAMGGFGLKHPPPMMLIKNTPVPGNITSFSDVPVSSFITQYSTGQVTVEMEWELKKENSKRWNPEIQYTNNYNDPQFVDFAPDSTGEYRTTRPIGTRYLTRPL

SEQ ID NO: 851 - protein, 724 aa, Artificial Sequence
  source: /note="Description of Artificial Sequence: Synthetic polypeptide"
MSFVDHPPDWLEEVGEGLREFLGLEAGPPKPKPNQQHQDQARGLVLPGYNYLGPGNGLDRGEPVNRADEVAREHDISYNEQLEAGDNPYLKYNHADAEFQEKLADDTSFGGNLGKAVFQAKKRVLEPFGLVEEGAKTAPTGKRIDDHFPKRKKVRTEEDSKPSTSSDAEAGPSGSQQLQIPAQPASSLGADTMSAGGGGPLGDNNQGADGVGNASGDWHCDSTWMGDRVVTKSTRTWVLPSYNNHQYREIKSGSVDGSNANAYFGYSTPWGYFDFNRFHSHWSPRDWQRLINNYWGFRPRSLRVKIFNIQVKEVTVQDSTTTIANNLTSTVQVFTDDDYQLPYVVGNGTEGCLPAFPPQVFTLPQYGYATLNRDNTENPTERSSFFCLEYFPSKMLRTGNNFEFTYNFEEVPFHSSFAPSQNLFKLANPLVDQYLYRFVSTNNTGGVQFNKNLAGRYANTYKNWFPGPMGRTQGWNLGSGVNRASVSAFATTNRMELEGASYQVPPQPNGMTNNLQGSNTYALENTMIFNSQPANPGTTATYLEGNMLITSESETQPVNRVAYNVGGQMATNNQSSTTAPATGTYNLQEIVPGSVWMERDVYLQGPIWAKIPETGAHFHPSPAMGGFGLKHPPPMMLIKNTPVPGNITSFSDVPVSSFITQYSTGQVTVEMEWELKKENSERWNPEIQYTNNYNDPQFVDFAPDSTGEYRTTRPIGTRYLTRPL

SEQ ID NO: 852 - protein, 724 aa, Artificial Sequence
  source: /note="Description of Artificial Sequence: Synthetic polypeptide"
MSFVDHPPDWLEEVGEGLREFLGLEAGPPKPKPNQQHQDQARGLVLPGYNYLGPGNGLDRGEPVNRADEVAREHDISYSEQLEAGDNPYLKYNHADAEFQEKLADDTSFGGNLGKAVFQAKKRVLEPFGLVEEGAKTAPTGKRIDDHFPKRKKARTEEDSKPSTSSDAEAGPSGSQQLQIPAQPASSLGADTMSAGGGGPLGDNNQGADGVGNASGDWHCDSTWMGDRVVTKSTRTWVLPSYNNHQYREIKSGSVDGSNANAYFGYSTPWGYFDFNRFHSHWSPRDWQRLINNYWGFRPRSLRVKIFNIQVKEVTVQDSTTTIANNLTSTVQVFTDDDYQLPYVVGNGTEGCLPAFPPQVFTLPQYGYATLNRDNTENPTERSSFFCLEYFPSKMLRTGNNFEFTYNFEEVPFHSSFAPSQNLFKLANPLVDQYLYRFVSTNNTGGVQFNKNLAGRYANTYKNWFPGPMGRTQGWNLGSGVNRASVSAFATTNRMELEGASYQVPPQPNGMTNNLQGSNTYALENTMIFNSQPANPGTTATYLEGNMLITSESETQPVNRVAYNVGGQMATNNQSSTTAPATGTYNLQEIVPGSVWMERDVYLQGPIWAKIPETGAHFHPSPAMGGFGLKHPPPMMLIKNTPVPGNITSFSDVPVSSFITQYSTGQVTVEMEWELKKENSKRWNPEIQYTNNYNDPQFVDFAPDSTGEYRTARPIGTRYLTRPL

SEQ ID NO: 853 - protein, 724 aa, Artificial Sequence
  source: /note="Description of Artificial Sequence: Synthetic polypeptide"
MSFVDHPPDWLEEVGEGLREFLGPEAGPPKPKPNQQHQDQARGLVLPGYNYLGPGNGLDRGEPVNRADEVAREHDISYNEQLEAGDNPYLKYNHADAEFQEKLADDTSFGGNLGKAVFQAKKRVLEPFGLVEEGAKTAPTGKRIDDHFPKRKKARTEEDSKPSTSSDAEAGPSGSQQLQIPAQPASSLGADTMSAGGGGPLGDNNQGADGVGNASGDWHCDSTWMGDRVVTKSTRTWVLPSYNNHQYREIKSGSVDGSNANAYFGYSTPWGYFDFNRFHSHWSPRDWQRLINNYWGFRPRSLRVKIFNIQVKEVTVQDSTTTIANNLTSTVQVFTDDDYQLPYVVGNGTEGCLPAFPPQVFTLPQYGYATLNRDNTENPTERSSFFCLEYFPSKMLRTGNNFEFTYNFEEVPFHSSFAPSQNLFKLANPLVDQYLYRFVSTNNTGGVQFNKNLAGRYANTYKNWFPGPMGRTQGWNLGSGVNRASVSAFATTNRMELEGASYQVPPQPNGMTNNLQGSNTYALENTMIFNSQPANPGTTATYLEGNMLITSESETQPVNRVAYNVGGQMTTNNQSSTTAPATGTYNLQEIVPGSVWMERDVYPQGPIWAKIPETGAHFHPSPAMGGFGLKHPPPMMLIKNTPVPGNITSFSDVPVSSFITQYSTGQVTVEMEWELKKENSKRWNPEIQYTNNYNDPQFVDFAPDSTGEYRTTRPIGTRYLTRPL

SEQ ID NO: 854 - protein, 724 aa, Artificial Sequence
  source: /note="Description of Artificial Sequence: Synthetic polypeptide"
MSFVDHPPDWLEEVGEGLREFLGLEAGPPKPKPNQQHQDQARGLVLPGYNYLGPGNGLDRGEPVNRADEVAREHDISYNEQLEAGDNPYLKYNHADAEFQEKLADDTSFGGNLGKAVFQAKKRVLEPFGLVEEGAKTAPTGKRIDDHFPKRKKARTEEDSKPSTSSDAEAGPSGSQQLQIPAQPASSLGADTMSAGGGGPLGDNNQGADGVGNASGDWHCDSTWMGDRVVTKSTRTWVLPSYNNHQYREIKSGSVDGSNANAYFGYSTPWGYFDFNRFHSHWSPRDWQRLINNYWGFRPRSLRVKIFNIQVKEVTVQDSTTTIANNLTSTVQVFTDDDYQLPYVVGNGTEGCLPAFPPQVFTLPQYGYATLNRDNTENPTERSSFLCLEYFPSKMLRTGNNFEFTYNFEEVPFHSSFAPSQNLFKLANPLVDQYLYRFVSTNNTGGVQFNKNLAGRYANTYKNWFPGPMGRTQGWNLGSGVNRASVSAFATTNRMELEGASYQVPPQPNGMTNNLQGSNTYALENTMIFNSQPANPGTTATYLEGNMLITSESETQPVNRVAYNVGGQMATNNQSSTTAPATGTYNLQEIVPGSVWMKRDVYLQGPIWAKIPETGAHFHPSPAMGGFGLKHPPPMMLIKNTPVPGNITSFSDVPVSSFITQYSTGQVTVEMEWELKKENSKRWNPEIQYTNNYNDPQFVDFAPDSTGEYRTTRPIGTRYLTRPL

SEQ ID NO: 855 - protein, 724 aa, Artificial Sequence
  source: /note="Description of Artificial Sequence: Synthetic polypeptide"
MSFVDHPPDWLEEVGEGLREFLGLEAGPPKPKPNQQHQDQARGLVLPGYNYLGPGNGLDRGEPVNRADEVAREHDISYNEQLEAGDNPYLKYNHADAEFQEKLADDTSFGGNLGKAVFQAKKRVLEPFGLVEEGAKTAPTGKRIDDHFPKRKKARTEEDSKPSTPSDAEAGPSGSQQLQIPAQPASSLGADTMSAGGGGPLGDNNQGADGVGNASGDWHCDSTWMGDRVVTKSTRTWVLPSYNNHQYREIKSGSVDGSNANAYFGYSTPWGYFDFNRFHSHWSPRDWQRLINNYWGFRPRSLRVKIFNIQVKEVTVQDSTTTIANNLTSTVQVFTDDDYQLPYVVGNGTEGCLPAFPPQVFTLPQYGYATLNRDNTENPTERSSFFCLEYFPSKMLRTGNNFEFTYNFEEVPFHSSFAPSQNLFKLANPLVDQYLYRFVSTNNTGGVQFNKNLAGRYANTYKNWFPGPMGRTQGWNLGSGVNRASVSAFATTNRMELEGASYQVPPQPNGMTNNLQGSNTYALENTMIFNSQPANPGTTATYLEGNMLITSESETQPVNRVAYNVGGQMATNNQSSTTAPATGTYNLQEIVPGSVWMERDVYLQGPIWAKIPETGAHFHPSPAMGGFGLKHPPPMMLIKNTPVPGNITSFSDVPVSSFITQYSTGQVTVEMEWELKKENSKRWNPEIQYTNNYNDPQFVDFAPDSTGEYRTTRPIGTRYLTRPL

SEQ ID NO: 856 - protein, 724 aa, Artificial Sequence
  source: /note="Description of Artificial Sequence: Synthetic polypeptide"
MSFVDHPPDWLEEVGEGLREFLGLEAGPPKPKPNQQHQDQARGLVLPGYNYLGPGNGLDRGEPVNRADEVAREHDISYNEQLEAGDNPYLKYNHADAEFQEKLADDTSFGGNLGKAVFQAKKRVLEPFGLVEEGAKTAPTGKRIDDHFPKRKKARTEEDSKPSTSSDAEAGPSGSQQLQIPAQPASSLGADTMSAGGGGPLGDNNQGADGVGNASGDWHCDSTWMGDRVVTKSTRTWVLPSYNNHQYREIKSGSVDGSNANAYFGYSTPWGYFDFNRFHSHWSPRDWQRLINNYWGFRPRSLRVKIFNIQVKEVTVQDSTTTIANNLTSTVQVFTDDDYQLPYVVGNGTEGCLPAFPPQVFTLPQYGYATLNRDNTENPTERSSFFCLEYFPSKMLRTGNNFEFTYNFEEVPFHSSFAPSQNLFKLANPLVDQYLYRFVSTNNTGGVQFNKNLAGRYANTHKNWFPGPMGRTQGWNLGSGVNRASVSAFATTNRMELEGASYQVPPQSNGMTNNLRGSNTYALENTMIFNSQPANPGTTATYLEGNMLITSESETQPVNRVAYNVGGQMATNNQSSTTAPATGTYNLQEIVPGSVWMERDVYLQGPIWAKIPETGAHFHPSPAMGGFGLKHPPPMMLIKNTPVPGNITSFSDVPVSSFITQYSTGQVTVEMEWELKKENSKRWNPEIQYTNNYNDPQFVDFAPDSTGEYRTTRPIGTRYLTRPL

SEQ ID NO: 857 - protein, 724 aa, Artificial Sequence
  source: /note="Description of Artificial Sequence: Synthetic polypeptide"
MSFVDHPPDWLEEVGEGLREFLGLEAGPPKPKPNQQHQDQARGLVLPGYNYLGPGNGLDRGEPVNRADEVAREHDISYNEQLEAGDNPYLKYNHADAEFQEKLADDTSFGGNLGKAVFQAKKRVLEPFGLVEEGAKTAPTGKRIDDHFPKRKKARTEEDSKPSTSSDAEAGPSGSQQLQIPAQPASSLGADTMSAGGGGPLGDNNQGADGVGNASGDWHCDSTWMGDRVVTKSTRTWVLPSYNNHQYREIKSGSVDGSNANAYFGYSTPWGYFDFNRFHSHWSPRDWQRLINNYWGFRPRSLRVKIFNIQVKEVTVQDSTTTIANNLTSTVQVFTDDDYQLPYVVGNGTEGCLPAFPPQVFTLPQYGYATLNRDNTENPTERSSFFCLEYFPSKMLRTGNNFEFTYNFEEVPFHSSFAPSQNLFKLANPLVDQYLYRFVSTNNTGGVQFNKNLAGRYANTYKNWFPGPMGRTQGWNLGSGVNRASVSAFATTNRMELEGASYQVPPQPNGMTNNLQGSNTYALENTMIFNSQPANPGTTATYLEGNMLITSESETQPVNRVAYSVGGQMATNNQSSTTAPTTGTYNLQEIVPGSVWMERDVYLQGPIWAKIPETGAHFHPSPAMGGFRLKHPPPMMLIKNTPVPGNITSFSDVPVSSFITQYSTGQVTVEMEWELKKENSKRWNPEIQYTNNYNDPQFVDFAPDSTGEYRTTRPIGTRYLTRPL

SEQ ID NO: 858 - protein, 724 aa, Artificial Sequence
  source: /note="Description of Artificial Sequence: Synthetic polypeptide"
MSFVDHPPDWLEEVGEGLREFLGLEAGPPKPKPNQQHQDQARGLVLPGYNYLGPGNGLDRGEPVNRADEVAREHDISYNEQLEAGDNPYLKYNHADAEFQEKLADDTSFGGNLGKAVFQAKKRVLEPFGLVEEGAKTAPTGKRIDDHFPKRKKARTEEDSKPSTSSDAEAGPSGSQQLQIPAQPASSLGADTMSAGGGGPLGDNNQGADGVGNASGDWHCDSTWMGDRVVTKSTRTWVLPSYNNHQYREIKSGSVDGSNANAYFGYSTPWGYFDFNRFHSHWSPRDWQRLINNYWGFRPRSLRVKIFNIQVKEVTVQDSTTTIANNLTSTVQVFTDDDYQLPYVVGNGTEGCLPAFPPQVFTLPQYGYATLNRDNTENPTERSSFFCLEYFPSKMLRTGNNFEFTYNFEEVPFHSSFAPSQNLFKLANPLVDQYLYRFVSTNNTGGVQFNKNLAGRYANTYKNWFPGPMGRTQGWNLGSGVNRASVSAFAATNRMELEGASYQVPPQPNGMTNNLQGSNTYALENTMIFNSQPANPGTTATYLEGNMLITSESETQPVNRVAYNVGGQMATNNQSSTTAPATGTYNLQEIVPGGVWMERDVYLQGPIWAKIPETGAHFHPSPAMGGFGLKHPPPMMLIKNTPVPGNTTSFSDVPVSSFITQYSTGQVTVEMEWELKKENSKRWNPEIQYTNNYNDPQFVDFAPDSTGEYRTTRPIGTRYLTRPL

SEQ ID NO: 859 - protein, 724 aa, Artificial Sequence
  source: /note="Description of Artificial Sequence: Synthetic polypeptide"
MSFVDHPPDWLEEVGEGLREFLGLEAGPPKPKPNQQHQDQARGLVLPGYNYLGPGNGLDRGEPVNRADEVAREHDISYNEQLEAGDNPYLKYNHADAEFQEKLADDTSFGGNLGKVVFQAKKRVLEPFGLVEEGAKTAPTGKRIDDHFPKRKKARTEEDSKPSTSSDAEAGPSGSQQLQIPAQPASSLGADTMSAGGGGPLGGNNQGADGVGNASGDWHCDSTWMGDRVVTKSTRTWVLPSYNNHQYREIKSGSVDGSNANAYFGYSTPWGYFDFNRFHSHWGPRDWQRLINNYWGFRPRSLRVKIFNIQVKEVTVQDSTTTIANNLTSTVQVFTDDDYQLPYVVGNGTEGCLPAFPPQVFTLPQYGYATLNRDNTENPTERSSFFCLEYFPSKMLRTGNNFEFTYNFEEVPFHSSFAPSQNLFKLANPLVDQYLYRFVSTNNTGGVQFNKNLAGRYANTYKNWFPGPMGRTQGWNLGSGVNRASVSALATTNRMELEGASYQVPPQPNGMTNNLQGSNTYALENTMIFNSQPANPGTTATYLEGNMLITSESETQPVNRVAYNVGGQMATNNQSSTTAPATGTYNLQEIVPGSVWMERDVYLQGPIWAKIPETGAHFHPSPAMGGFGLKHPPPMMLIKNTPVPGNITSFSDVPVSSFITQYSTGQVTVEMEWELKKENSKRWNPEIQYTNNYNDPQFVDFAPDSTGEYRTTRPIGTRYLTRPL

SEQ ID NO: 860 - protein, 723 aa, Artificial Sequence
  source: /note="Description of Artificial Sequence: Synthetic polypeptide"
MSFVDHPPDWLEEVGEGLREFLGLEAGPPKPKPNQQHQDQARGLVLPGYNYLGPGNGLDRGEPVNRADEVAREHDISYNEQLEAGDNPYLKYNHADAEFQEKLADDTSFGGNLGKAVFQAKKRVLEPFGLVEEGAKTAPTGKRIDDHFPKRKKARTEEDSKPSTSSDAEAGPSGSQQLQIPAQPASSLGADTMSAGGGGPLGDNNQGADGVGNASGDWHCDSTWMGDRVVTKSTRTWVLPSYNNHQYREIKSGSVDGSNANAYFGYSTPWGYFDFNRFHSHWSPRDWQRLINNYWGFRPRSLRVKIFNIQVKEVTVQDSTTTIANNLTSTVQVFTDDDYQLPYVVGNGTEGCLPAFPPQVFTLPQYGYATLNRDNTENPTERSSFFCLEYFPSKMLRTGNNFEFTYNFEEVPFHSSFAPSQNLFKLANPLVDQYLYRFVSTNNTGGVQFNKNLAGRYANTYKNWFPGPMGRTQGWNLGSGVNRASVSAFATTNRMELEGASYQVPPQPNGMTNNLQGSNTYALENTMIFNSQPANPGTTATYLEGNMLITSESETQPVNRVAYNVGGQMATNNQSSTTAPATGTYNLQEIVPGSVWMERDVYLQGPIAKIPETGAHFHPSPAMGGFGLKHPPPMMLIKNTPVPGNITSFSDVPVSSFITQYSTGQVTVEMEWELKKENSKRWNPEIQYTNNYNDPQFVDFAPDSTGECRTTRPIGTRYLTRPL

SEQ ID NO: 861 - protein, 724 aa, Artificial Sequence
  source: /note="Description of Artificial Sequence: Synthetic polypeptide"
MSFVDHPPDWLEEVGEGLREFLGLEAGPPKPKPNQQHQDQARGLVLPGYNYLGPGNGLDRGEPVNRADEVAREHDISYNEQLEAGDNPYLKYNHADAEFQEKLADDTSFGGNLGKAVFQAKKRVLEPFGLVEEGAKTAPTGKRIDDHFPKRKKARTEEDSKPSTSSDAEAGPSGSQQLQIPAQPASSLGADTMSAGGGGPLGDNNQGADGVGNASGDWHCDSTWMGDRVVTKSTRTWVLPSYNNHQYREIKSGSVDGSNANAYFGYSTPWGYFDFNRFHSHWSPRDWQRLINNYWGFRPRSLRVKILNIQVKEVTVQDSTTTIANNLTSTVQVFTDDDYQLPYVVGNGTEGCLPAFPPQVFTLPQYGYATLNRDNTENPTERSSFFCLEYFPSKMLRTGNNFEFTYNFEEVPFHSSFAPSQNLFKLANPLVGQYLYRFVSTNNTGGVQFNENLAGRYANTYKNWFPGPMGRTQGWNLGSGVNRASVSAFATTNRMELEGASYQVPPQPNGMTNNLQGSNTYALENTMIFNSQPANPGTTATYLEGNMLITSESETQPVNRVAYNVGGQMATNNQSSTTAPATGTYNLQEIVPGSVWMERDVYLQGPIWAKIPETGAHFHPSPAMGGFGLKHPPPMMLIKNTPVPGNITSFSDVPVSSFITQYSTGQATVEMEWELKKENSKRWNPEIQYTNNYNDPQFVDFAPDSTGEYRTTRPIGTRYLTRPL

SEQ ID NO: 862 - protein, 724 aa, Artificial Sequence
  source: /note="Description of Artificial Sequence: Synthetic polypeptide"
MSFVDHPPDWLEEVGEGLREFLGLEAGPPKPKPNQQHQDQARGLVLPGYNYLGPGNGLDRGEPVNRADEVAREHDISYNEQLEAGDNPYLKYNHADAEFQEKLADDTSFGGNLGKAVFQAKKRVLEPFGLVEEGAKTAPTGKRIDDHFPKRKKARTEEDSKPSTSSDAEAGPSGSQQLQIPAQPASSLGADTMSAGGGGPLGDNNQGADGVGNASGDWHCDSTWMGDRVVTKSTRTWVLPSYNNHQYREIKSGSVDGSNANAYFGYSTPWGYFDFNRFHSHWSPRDWQRLINNYWGFRPRSLRVKIFNIQVKEVTVQDSTTIIANNLTSTVQVFTDDDYQLPYVVGNGTEGCLPAFPPQVFTLPQYGYATLNRDNTENPTERSSFFCLEYFPSKMLRTGNNFEFTYNFEEVPFHSSFAPSQNLFKLANPLVDQYLYRFVSTNNTGGVQFNKNLAGRYANTYKNWFPGPMGRTQGWNLGSGVNRASVSAFATTNRMELEGASYQVPPQPNGMTNNLQGSNTYALENTMIFNSQPANPGTTATYLEGNMLITSESETQPVNRVAYNVGGQMATNNQSSTTAPATGTYNLQEIVPGSVWMERDVYLQGPIWAKIPETGAHFHPSPAMGGFGLKHPPPMMLIKNTPVPGNITSFSDVPVSSFITQYSTGQVTVEMEWELKKENSKRWNPEIQYTNNYNDPQFVDFAPDSTGEYRTTRPIGTRYLTRPL

SEQ ID NO: 863 - protein, 724 aa, Artificial Sequence
  source: /note="Description of Artificial Sequence: Synthetic polypeptide"
MSFVDHPPDWLEEVGEGLREFLGLEAGPPKPKPNQQHQDQARGLVLPGYNYLGPGNGLDRGEPVNRADEVAREHDISYNEQLEAGDNPYLKYNHADAEFQEKLADDTSFGGNLGKAVFQAKKRVLEPFGLVEEGAKTAPTGKRIDDHFPKRKKARTEEDSKPSTSSDAEAGPSGSQQLQIPAQPASSLGADTMSAGGGGPLGDNNQGADGVGNASGDWHCDSTWMGDRVVTKSTRTWVLPSYNNHQYREIKSGSVDGSNANAYFGYSTPWGYFDFNRFHSHWSPRDWQRLINNYWGFRPRSLRVKIFNIQVKEVTVQDSTTTIANNLTSTVQVFTDDDYQLPYVVGNGTEGCLPAFPPQVFTLPQYGYATLNRDNTENPTERSSFFCLEYFPSKMLRTGNNFEFTYNFEEVPFHSSFAPSQNLFKLANPLVDQYLYRFVSTNNTGGVQFNKNLAGRYANTYKNWFPGPMGRTQGWNLGSGVNRASVSAFATTNRMELEGASYQVPPQPNGMTNNLQGSNTYALENTMIFNSQPANPGTTATYLEGNMLITSESETQPVNRVAYNVGGQMATNNQSSTTAPATGTYNLQEIVPGSVWMERDVYLQGPIWAKIPETGAHFHPSPAMGGFGLKHPPPMMLIKNTPVPGNITSLSDVPVSSFITQYSTGQVTVEMEWELKKENSKRWNPEIQYTNNYNDPQFVDFAPDSTGEYRTTRPIGTRYLTRPL

SEQ ID NO: 864 - protein, 724 aa, Artificial Sequence
  source: /note="Description of Artificial Sequence: Synthetic polypeptide"
MSFVDHPPDWLEEVGEGLREFLGLEAGPPKPKPNQQHQDQARGLVLPGYNYLGPGNGLDRGEPANRADEVAREHDISYNEQLEAGDNPYLKYNHAGAEFQEKLADDTSFGGNLGKAVFQAKKRVLEPFGLVEEGAKTAPTGKRIDDHFPKRKKARTEEDSKPSTSSDAEAGPSGSQQLQIPAQPASSLGADTMSAGGGGPLGDNNQGADGVGNASGDWHCDSTWMGDRVVTKSTRTWVLPGYNNHQYREIKSGSVDGSNANAYFGYSTPWGYFDFNRFHSHWSPRDWQRLINNYWGFRPRSLRVKIFNIQVKEVTVQDSTTTIANNLTSTVQVFTDDDYQLPYVVGNGTEGCLPAFPPQVFTLPQYGYATLNRDNTENPTERSSFFCLEYFPSKMLRTGNNFEFTYNFEEVPFHSSFAPSQNLFKLANPLVDQYLYRFVSTNNTGGVQFNKNLAGRYANTYKNWFPGPMGRTQGWNLGSGVNRASVSAFATTNRMELEGASYQVPPQPNGMTNNLQGSNTYALENTMIFNSQPANPGTTATYLEGNMLITSESETQPVNRVAYNVGGQMATNNQSSTTAPATGTYNLQEIVPGSVWMERDVYLQGPIWAKIPETGAHFHPSPAMGGFGLKHPPPMMLIKNTPVPGNITSFSDVPVSSFITQYSTGQVTVEMEWELKKENSKRWNPEIQYTNNYNDPQFVDFAPDSTGEYRTTRPIGTRYLTRPL

SEQ ID NO: 865 - protein, 724 aa, Artificial Sequence
  source: /note="Description of Artificial Sequence: Synthetic polypeptide"
MSFVDHPPDWLEEVGEGLREFLGLEAGPPKPKPNQQHQDQARGLVLPGYNYLGPGNGLDRGEPVNRADEVAREHDISYNEQLEAGDNPYLKYNHADAEFQEKLADDTSFGGNLGKAVFQAKKRVLEPFGLVEEGAKTAPTGKRIDDHFPKRKKARTEEDSKPPTSSDAEAGPSGSQQLQIPAQPASSLGADTMSAGGGGPLGDNNQGADGVGNASGDWHCDSTWMGDRVVTKSTRTWVLPSYNNHQYREIKSGSVDGSNANAYFGYSTPWGYFDFNRFHSHWSPRDWQRLINNYWGFRPRSLRVKIFNIQVKEVTVQDSATTIANNLTSTVQVFTDDDYQLPYVVGNGTEGCLPAFPPQVFTLPQYGYATLNRDNTENPTERSSFFCLEYFPSKMLRTGNNFEFTYNFEEVPFHSSFAPSQNLFKLANPLVDQYLYRFVSTNNTGGVQFNKNLAGRYANTYKNWFPGPMGRTQGWNLGSGVNRASVSAFATTNRMELEGASYQVPPQPNGMTNNLQGSNTYALENTMIFNSQPANPGTTATYLEGNMLITSESETQPVNRVAYNVGGQMATNNQSSTTAPATGTYNLQEIVPGSVWMERDVYLQGPIWAKIPETGAHFHPSPAMGGFGLKHPPPMMLIKNTPVPGNITSFSDVPVSSFITQYSTGQVTVEMEWELKKENSKRWNPEIQYTNNYNDPQFVDFAPDSTGEYRTTRPIGTRYLTRPL

SEQ ID NO: 866 - protein, 724 aa, Artificial Sequence
  source: /note="Description of Artificial Sequence: Synthetic polypeptide"
MSFVDHPPDWLEEVGEGLREFLGLEAGPPKPKPNQQHQDQARGLVLPGYNYLGPGNGLDRGEPVNRADEVAREHDISYNEQLEAGDNPYLKYNHADAEFQEKLADDTSFGGNLGKAVFQAKKRVLEPFGLVEEGAKTAPTGKRIDDHFPKRKKARTEEDSKPSTSSDAEAGPSGSQQPQIPAQPASSLGADTMSAGGGGPLGDNNQGADGVGNASGDWHCDSTWMGDRVVTKSTRTWVLPSYNNHQYREIKSGSVDGSNANAYFGYSTPWGYFDFNRFHSHWSPRDWQRLINNYWGFRPRSLRVKIFNIQVKEVTVQDSTTTIANNLTSTVQVFTDDDYQLPYVVGNGTEGCLPAFPPQVFTLPQYGYATLNRDNTENPTERSSFFCLEYFPSKMLRTGNNFEFTYNFEEVPFHSSFAPSQNLFKLANPLVDQYLYRFVSTNNTGGVQFNKNLAGRYANTYKNWFPGPMGRTQGWNLGSGVNRASVSAFATTNRMELEGASYQVPPQPNGMTNNLQGSNTYALENTMIFNSQPANPGTTATYLEGNMLITSESETQPVNRVAYNVGGQMATNNQSSTTAPATGTYNLQEIVPGSVWMERDVYLQGPIWAKIPETGAHFHPSPAMGGFGLKHPPPMMLIKNTPAPGNITSFSDVPVSSFITQYSTGQVTVEMEWELKKENSKRWNPEIQYTNNYNDPQFVDFAPDSTGEYRTTRPIGTRYLTRPL

SEQ ID NO: 867 - protein, 724 aa, Artificial Sequence
  source: /note="Description of Artificial Sequence: Synthetic polypeptide"
MSFVDHPPDWLEEVGEGLREFLGLEAGPPKPKPNQQHQDQARGLVLPGYNYLGPGNGLDRGEPVNRADEVAREHDISYNEQLEAGDNPYLKYNHADAEFQEKLADDTSFGGNLGKAVFQAKKRVLEPFGLVEEGAKTAPTGKRIDDHFPKRKKARTEEDSKPPTSSDAEAGPSGSQQLQIPAQPASSLGADTMSAGGGGPLGDNNQGADGVGNASGDWHCDSTWMGDRVVTKSTRTWVLPSYNNHQYREIKSGSVDGSNANAYFGYSTPWGYFDFNRFHSHWSPRDWQRLINNYWGFRPRSLRVKIFNIQVKEVTVQDSTTTIANNLTSTVQVFTDDDYQLPYVVGNGTEGCLPAFPPQVFTLPQYGYATLNRDNTENPTERSSFFCLEYFPSKMLRTGNNFEFTYNFEEVPFHSSFAPSQNLFKLANPLVDQYLYRFVSTNNTGGVQFNKNLAGRYANTYKNWFPGPMGRTQGWNLGSGVNRASVSAFATTNRMELEGASYQVPPQPNGMTNNLQGSNTYALENTMIFNSQPANPGTTATYLEGNMLITSESETQPVNRVAYNVGGQMATNNQSSTTAPATGTYNLQEIVPGSVWMERDVYLQGPIWAKIPETGAHFHPSPAMGGFGLKHPPPMMLIKNTPVPGNITSFSDVPVSSFITQYSTGQVTVEMEWELKKENSKRWNPEIQYTNNYNDPQFVDFAPDSTGEYRTTRPIGTRYLTRPL

SEQ ID NO: 868 - protein, 724 aa, Artificial Sequence
  source: /note="Description of Artificial Sequence: Synthetic polypeptide"
MSFVDHPPDWLEEVGEGLREFLGLEAGPPKPKPNQQHQDQARGLVLPGYNYLGPGNGLDRGEPVNRADEVAREHDISYNEQLEAGDNPYLKYNHADAEFQEKLADDTSFGGNLGKAVFQAKKRVLEPFGLVEEGAKTAPTGKRIDDHFPKRKKARTEEDSKPPTSSDAEAGPSGSQQLQIPAQPASSLGADTMSAGGGGPLGDNNQGADGVGNASGDWHCDSTWMGDRVVTKSTRTWVPPSYNNHQYREIKSGSVDGSNANAYFGYSTPWGYFDFNRFHSHWSPRDWQRLINNYWGFRPRSLRVKIFNIQVKEVTVQDSTTTIANNLTSTVQVFTDDDYQLPYVVGNGTEGCLPAFPPQVFTLPQYGYATLNRDNTENPTERSSFFCLEYFPSKMLRTGNNFEFTYNFEEVPFHSSFAPSQNLFKLANPLVDQYLYRFVSTNNTGGVQFNKNLAGRYANTYKNWFPGPMGRTQGWNLGSGVNRASVSAFATTNRMELEGASYQVPPQPNGMTNNLQGSNTYALENTMIFNSQPANPGTTATYLEGNMLITSESETQPVNRVAYNVGGQMATNNQSSTTAPATGTYNLQEIVPGSVWMERDVYLQGPIWAKIPETGAHFHPSPAMGGFGLKHPPPMMLIKNTPVPGNITSFSDVPVSSFITQYSTGQVAVEMEWELKKENSKRWNPEIQYTNNYNDPQFVDFAPDSTGEYRTTRPIGTRYLTRPL

SEQ ID NO: 869 - protein, 724 aa, Artificial Sequence
  source: /note="Description of Artificial Sequence: Synthetic polypeptide"
MSFVDHPPDWLEEVGEGLREFLGLEAGPPKPKPNQQHQDQARGLVLPGYNYLGPGNGLDRGEPVNRADEVAREHDISYNEQLEAGDNPYLKYNHADAEFQEKLADDTSFGGNLGKAVFQAKKRVLEPFGLVEEGAKTAPTGKRIDDHFPKRKKARTEEDSKPSTSSDAEAGPSGSQQLQIPAQPASSLGADTMSAGGGGPLGDNNQGADGVGNASGDWHCDSTWMGDRVVTKSTRTWVLPSYNNHQYREIKSGSVDGSNANAYFGYSTPWGYFDFNRFHSHWSPRDWQRLINNYWGFRPRSLRVKIFNIQVKEVTVQDSTTTIANNLTSTVQVFTDDDYQLPYVVGNGTEGCLPAFPPQVFTLPQYGYATLNRDNTENPTERSSFFCLEYFPSKMLRTGNNFEFTYNFEEVPFHSSFAPSQNLFKLANPLVDQYLYRFVSTNNTGGVQFNKNLAGRYANTYKNWFPGPMGRTQGWNLGSGVNRASVSAFATTNRMELEGASYQVPPQPNGMTNNLQGSNTYALENTMIFNSQPANPGTTATYLEGNMLITSESETQPVNRVAYNVGGQMATNNQSSTTAPATGTYNLQEIVPGSVWMERDVYLQGPIWAKIPETGAHFHPSPAMGGFGLKHPPPMMLIKNTPAPGNITSFSDVPVSSFITQYSTGQVTVEMEWELKKENSKRWNPEIQYTNNYNDPQFVDFAPDSTGEYRTTRPIGTRYLTRPL

SEQ ID NO: 870 - protein, 724 aa, Artificial Sequence
  source: /note="Description of Artificial Sequence: Synthetic polypeptide"
MSFVDHPPDWLEEVGEGLREFLGLEAGPPKPKPNQQHQDQARGLVLPGYNYLGPGNGLDRGEPVNRADEVAREHDISYNEQLEAGDNPYLKYNHADAEFQEKLADDTSFGGNLGKAVFQAKKRVLEPFGLAEEGAKTAPTGKRIDDHFPKRKKARTEEDSKPSTSSDAEAGPSGSQQLQIPAQPASSLGADTMSAGGGGPLGDNNQGADGVGNASGDWHCDSTWMGDRVVTKSTRTWVLPSYNNHQYREIKSGSVDGSNANAYFGYSTPWGYFDFNRFHSHWSPRDWQRLINNYWGFRPRSLRAKIFNIQVKEVTVQDSTTTIANNLTSTVQVFTDDDYQLPYVVGNGTEGCLPAFPPQVFTLPQYGYATLNRDNTENPTERSSFFCLEYFPSKMLRTGNNLEFTYNFEEVPFHSSFAPSQNLFKLANPLVDQYLYRFVSTNNTGGVQFNKNLAGRYANTYKNWFPGPMGRTQGWNLGSGVNRASVSAFATTNRMELEGASYQVPPQPNGMTNNLQGSNTYALENTMIFNSQPANPGTTATYLEGNMLITSESETQPVNRVVHNVGGQMATNNQSSTTAPATGTYNLQEIVPGSVWMERDVYLQGPIWAKIPETGAHFHPSPAMGGFGLKHPPPMMLIKNTPVPGNITSFSDVPVSSFITQYSTGQVTVEMEWELKKENSKRWNPEIQYTNNYNDPQFVDFAPDSTGEYRTTRPIGTRYLTRPL

SEQ ID NO: 871 - protein, 724 aa, Artificial Sequence
  source: /note="Description of Artificial Sequence: Synthetic polypeptide"
MSFVDHPPDWLEEVGEGLREFLGLEAGPPKPKPNQQHQDQARGLVLPGYNYLGPGNGLDRGEPVNRADEVAREHDISYNEQLEAGDNPYLKYNHADAEFQEKLADDTSFGGNLGKAVFQAKKRVLEPFGLVEEGAKTAPTGKRIDDHFPKRKKARTEEDSKPSTSSDAEAGPSGSQQLQIPAQPASSLGADTMSAGGGGPLGDNNQGADGVGNASGDWHCDSTWMGDRVVTKSTRTWVLPSYNNHQYREIKSGSVDGGNANAYFGYSTPWGYFDFNRFHSHWSPRDWQRLINNYWGFRPRSLRVKIFNIQVKEVTVQDSTTTIANNLTSTVQVFTDDDYQLPYVVGNGTEGCLPAFPPQVFTLPQYGYATLNRDNTENPTERSSFFCLEYFPSKMLRTGNNFEFTYNFEEVPFHSSFAPSQNLFKLANPLVDQYLYRFVSTNNTGGVQFNKNLAGRYANTYKNWFPGPMGRTQGWNLGSGVNRASVSAFATTNRMELEGASYQVPPQPNGMTNNLQGSNTYALENTMIFNSQPANPGTTATYLEGNMLITSESETQPVNRVAYNVGGQMATNNQSSTTAPATGTYNLQEIVPGSVWMERDVYLQGPIWAKIPETGAHFHPSPAMGGFGLKHPPPMMLIKNTPAPGNITSFSDVPVSSFITQYSTGQVTVEMEWELKKGNSKRWNPEIQYTNNYNDPQFVDFAPDSTGEYRTTRPIGTRYLTRPL

SEQ ID NO: 872 - protein, 724 aa, Artificial Sequence
  source: /note="Description of Artificial Sequence: Synthetic polypeptide"
MSFVDHPPDWLEEVGEGLREFLGLEAGPPKPKPNQQHQDQARGLVLPGYNYLGPGNGLDRGEPVNRADEVAREHDISYNEQLEAGDNPYLKYNHADAEFQEKLADDTSFGGNLGKAVFQAKKRVLEPFGLVEEGAKTAPTGKRIDDHFPKRKKARTEEDSKPSTSSDAEAGPSGSQQLQIPAQPASSLGADTMSAGGGGPLGDNNQGADGVGNASGDWHCDSTWMGDRVVTKSTRTWVLPSYNNHQYREIKSGSVDGSNANAYFGYSTPWGYFDFNRFHSHWSPRDWQRLINNYWGFRPRSLRVKIFNIQVKEVTVQDSTTTIANNLTSTVQVFTDDDYQLPYVVGNGTEGCLPAFPPQVFTLPQYGYATLNRDNTENPTERSSFFCLEYFPSKMLRTGNNFEFTYNFEEVPFHSSFAPSQNLFKLANPLVDQYLYRFVSTNNTGGVQFNKNLAGRYANTYKNWFPGPMGRTQGWNLGSGVNRASVSAFATTNRMELEGASYQVPPQPNGMTNNLQGSNTYALENTMIFNSQPANPGTTATYLEGNMLITSESETQPVNRVAYNVGGQMATNNQSSTTAPATGTYNLQEIVPGSVWMERDVYLQGPIWAKIPETGVHFHPSPAMGGFGLKHPPPMMLIKNTPVPGNITSFSDVPVSSFITQYSTGQVTVEMEWELKKENSKRWNPEIQYTNNYNDPQFVDFAPDSTGEYRTTRPIGTRYLTRPL

SEQ ID NO: 873 - protein, 724 aa, Artificial Sequence
  source: /note="Description of Artificial Sequence: Synthetic polypeptide"
  MOD_RES (551)..(551): Any amino acid
MSFVDHPPDWLEEVGEGLREFLGLEAGPPKPKPNQQHQDQARGLVLPGYNYLGPGNGLDRGEPVNRADEVAREHDISYNEQLEAGDNPYLKYNHADAEFQEKLADDTSFGGNLGKAVFQAKKRVLEPFGLVEEGAKTAPTGKRIDDHFPKRKKARTEEDSKPSTSSDAEAGPSGSQQLQIPAQPASSLGADTMSAGGGGPLGDNNQGADGVGNASGDWHCDSTWMGDRVVTKSTRTWVLPSYNNHQYREIKSGSVDGSNANAYFGYSTPWGYFDFNRFHSHWSPRDWQRLINNYWGFRPRSLRVKIFNIQVKEVTVQDSTTTIANNLTSTVQVFTDDDYQLPYVVGNGTEGCLPAFPPQVFTLPQYGYATLNRDNTENPTERSSFFCLEYFPSKMLRTGNNFEFTYNFEEVPFHSSFAPSQNLFKLANPLVDQYLYRFVSTNNTGGVQFNKNLAGRYANTYKNWFPGPMGRTQGWNLGSGVNRASVSAFATTNRMELEGASYQVPPQPNGMTNNLQGSNTYALENTMIFNSQPANPGTTATYLEGSMLITXESETQPVNRVAYNVGGQMATNNQSSTTAPATGTYNLQEIVPGSVWMERDVYLQGPIWAKIPETGAHFHPSPAMGGFGLKHPPPMMLIKNTPVPGNITSFSDVPVSSFITQYSTGQVTVEMEWELKKENSKRWNPEIQYTNNYNDPQFVDFAPDSTGEYRTTRPIGTRYLTRPL

SEQ ID NO: 874 - protein, 736 aa, Artificial Sequence; identical to SEQ ID NO: 48
  source: /note="Description of Artificial Sequence: Synthetic polypeptide"

SEQ ID NO: 875 - protein, 734 aa, Artificial Sequence; identical to SEQ ID NO: 66
  source: /note="Description of Artificial Sequence: Synthetic polypeptide"

SEQ ID NO: 876 - protein, 723 aa, Artificial Sequence
  source: /note="Description of Artificial Sequence: Synthetic polypeptide"
MSFVDHPPDWLEEVGEGLREFLGLEAGPPKPKPNQQHQDQARGLVLPGYNYLGPGNGLDRGEPVNRADEVAREHDISYNEQLEAGDNPYLKYNHADAEFQEKLADDTSFGGNLGKAVFQAKKRVLEPFGLVEEGAKTAPTGKRIDDHFPKRKKARTEEDSKPSTSSDAEAGPSGSQQLQIPAQPASSLGADTMSAGGGPLGDNNQGADGVGNASGDWHCDSTWMGDRVVTKSTRTWVLPSYNNHQYREIKSGSVDGSNANAYFGYSTPWGYFDFNRFHSHWSPRDWQRLINNYWGFRPRSLRVKIFNIQVKEVTVQDSTTTIANNLTSTVQVFTDDDYQLPYVVGNGTEGCLPAFPPQVFTLPQYGYATLNRDNTENPTERSSFFCLEYFPSKMLRTGNNFEFTYNFEEVPFHSSFAPSQNLFKLANPLVDQYLYRFVSTNNTGGVQFNKNLAGRYANTYKNWFPGPMGRTQGWNLGSGVNRASVSAFATTNRMELEGASYQVPPQPNGMTNNLQGSNTYALENTMIFNSQPANPGTTATYLEGNMLITSESETQPVNRVAYNVGGQMATNNQSSTTAPATGTYNLQEIVPGSVWMERDVYLQGPIWAKIPETGAHFHPSPAMGGFGLKHPPPMMLIKNTPVPGNITSFSDVPVSSFITQYSTGQVTVEMEWELKKENSKRWNPEIQYTNNYNDPQFVDFAPDSTGEYRTTRPIGTRYLTRPL

SEQ ID NO: 877 - protein, 534 aa, Artificial Sequence
  source: /note="Description of Artificial Sequence: Synthetic polypeptide"
MAEGGGGAMGDSSGGADGVGNASGNWHCDSQWMGNTVITKTTRTWVLPSYNNHIYKAITSGTSQDANVQYAGYSTPWGYFDFNRFHCHFSPRDWQRLINNHWGIRPKSLKFKIFNVQVKEVTTQDQTKTIANNLTSTIQVFTDDEHQLPYVLGSATEGTMPPFPSDVYALPQYGYCTMHTNQNGARFNDRSAFYCLEYFPSQMLRTGNNFEFTFDFEEVPFHSMFAHSQDLDRLMNPLVDQYLWNFNEVDSSRNAQFKKAVKGAYGTMGRNWLPGPKFLDQRVRAYTGGTDNYANWNIWSNGNKVNLKDRQYLLQPGPVSATYTEGEASSLPAQNILGIAKDPYRSGSTTAGISDIMVTEEQEVAPTNGVGWKPYGRTVTNEQNTTTAPTSSDLDVLGALPGMVWQNRDIYLQGPIGAKIPKTDGKFHPSPNLGGFGLHNPPPQVFIKNTPVPADPPVEYVHQKWNSYITQYSTGQCTVEMVWELRKENSKRWNPEIQFTSNFSNRTSIMFAPNETGGYVEDRLIGTRYLTQNL

SEQ ID NO: 878 - protein, 554 aa, Artificial Sequence
  source: /note="Description of Artificial Sequence: Synthetic polypeptide"
MTSVNSAEASTGAGGGGSNPVKSMWSEGATFSANSVTCTFSRQFLIPYDPEHHYKVFSPAASSCHNASGKEAKVCTISPIMGYSTPWRYLDFNALNLFFSPLEFQHLIENYGSIAPDALTVTISEIAVKDVTDKTGGGVQVTDSTTGRLCMLVDHEYKYPYVLGQGQDTLAPELPIWVYFPPQYAYLTVGDVNTQGISGDSKKLASEESAFYVLEHSSFQLLGTGGTATMSYKFPPVPPENLEGCSQHFYEMYNPLYGSRLGVPDTLGGDPKFRSLTHEDHAIQPQNFMPGPLVNSVSTKEGDSFNTGAGKALTGLSTGTSQNTRISLRPGPVSQPYHHWDTDKYVTGINAISHGQTTYGNAEDKEYQQGVGRFPNEKEQLKQLQGLNMHTYFPNKGTQQYTDQIERPLMVGSVWNRRALHYESQLWSKIPNLDDSFKTQFAALGGWGLHQPPPQIFLKILPQSGPIGGIKSMGITTLVQYAVGIMTVTMTFKLGPRKATGRWNPQPGVYPPHAAGHLPYVLYDPTATDAKQHHRHGYEKPEELWTAKSRVHPL

SEQ ID NO: 879 - protein, 587 aa, Artificial Sequence
  source: /note="Description of Artificial Sequence: Synthetic polypeptide"
MSDGTSQPDGGNAVHSAARVERAADGPGGSGGGGSGGGGVGVSTGSYDNQTHYRFLGDGWVEITALATRLVHLNMPKSENYCRIRVHNTTDTSVKGNMAKDDAHEQIWTPWSLVDANAWGVWLQPSDWQYICNTMSQLNLVSLDQEIFNVVLKTVTEQDSGGQAIKIYNNDLTACMMVAVDSNNILPYTPAANSMETLGFYPWKPTIASPYRYYFCVDRDLSVTYENQEGTIEHNVMGTPKGMNSQFFTIENTQQITLLRTGDEFATGTYYFDTNPVKLTHTWQTNRQLGQPPLLSTFPEADTDAGTLTAQGSRHGATQMEVNWVSEAIRTRPAQVGFCQPHNDFEASRAGPFAAPKVPADVTQGMDREANGSVRYSYGKQHGENWAAHGPAPERYTWDETNFGSGRDTRDGFIQSAPLVVPPPLNGILTNANPIGTKNDIHFSNVFNSYGPLTTFSHPSPVYPQGQIWDKELDLEHKPRLHITAPFVCKNNAPGQMLVRLGPNLTDQYDPNGATLSRIVTYGTFFWKGKLTMRAKLRANTTWNPVYQVSVEDNGNSYMSVTKWLPTATGNMQSVPLITRPVARNTY

SEQ ID NO: 880 - protein, 584 aa, Artificial Sequence
  source: /note="Description of Artificial Sequence: Synthetic polypeptide"
MSDGAVQPDGGQPAVRNERATGSGNGSGGGGGGGSGGVGISTGTFNNQTEFKFLENGWVEITANSSRLVHLNMPESENYKRVVVNNMDKTAVKGNMALDDIHVEIVTPWSLVDANAWGVWFNPGDWQLIVNTMSELHLVSFEQEIFNVVLKTVSESATQPPTKVYNNDLTASLMVALDSNNTMPFTPAAMRSETLGFYPWKPTIPTPWRYYFQWDRTLIPSHTGTSGTPTNVYHGTDPDDVQFYTIENSVPVHLLRTGDEFATGTFFFDCKPCRLTHTWQTNRALGLPPFLNSLPQSEGATNFGDIGVQQDKRRGVTQMGNTDYITEATIMRPAEVGYSAPYYSFEASTQGPFKTPIAAGRGGAQTDENQAADGDPRYAFGRQHGQKTTTTGETPERFTYIAHQDTGRYPEGDWIQNINFNLPVTNDNVLLPTDPIGGKTGINYTNIFNTYGPLTALNNVPPVYPNGQIWDKEFDTDLKPRLHINAPFVCQNNCPGQLFVKVAPNLTNQYDPDASANMSRIVTYSDFWWKGKLVFKAKLRASHTWNPIQQMSINVDNQFNYVPNNIGAMKIVYEKSQLAPRKLY

SEQ ID NO: 881 - protein, 548 aa, Artificial Sequence
  source: /note="Description of Artificial Sequence: Synthetic polypeptide"
GVGISTGTFNNQTEFKFLENGWVEITANSSRLVHLNMPESENYRRVVVNNMDKTAVNGNMALDDIHAQIVTPWSLVDANAWGVWFNPGDWQLIVNTMSELHLVSFEQEIFNVVLKTVSESATQPPTKVYNNDLTASLMVALDSNNTMPFTPAAMRSETLGFYPWKPTIPTPWRYYFQWDRTLIPSHTGTSGTPTNIYHGTDPDDVQFYTIENSVPVHLLRTGDEFATGTFFFDCKPCRLTHTWQTNRALGLPPFLNSLPQSEGATNFGDIGVQQDKRRGVTQMGNTNYITEATIMRPAEVGYSAPYYSFEASTQGPFKTPIAAGRGGAQTDENQAADGNPRYAFGRQHGQKTTTTGETPERFTYIAHQDTGRYPEGDWIQNINFNLPVTNDNVLLPTDPIGGKTGINYTNIFNTYGPLTALNNVPPVYPNGQIWDKEFDTDLKPRLHVNAPFVCQNNCPGQLFVKVAPNLTNEYDPDASANMSRIVTYSDFWWKGKLVFKAKLRASHTWNPIQQMSINVDNQFNYVPSNIGGMKIVYEKSQLAPRKLY

SEQ ID NO: 882 - protein, 736 aa, Artificial Sequence; identical to SEQ ID NO: 110
  source: /note="Description of Artificial Sequence: Synthetic polypeptide"

SEQ ID NO: 883 - protein, 736 aa, Artificial Sequence; identical to SEQ ID NO: 105
  source: /note="Description of Artificial Sequence: Synthetic polypeptide"

SEQ ID NO: 884 - protein, 736 aa, Artificial Sequence
  source: /note="Description of Artificial Sequence: Synthetic polypeptide"
MAADGYLPDWLEDTLSEGIRQWWKLKPGPPPPKPAERHKDDSRGLVLPGYKYLGPFNGLDKGEPVNEADAAALEHDKAYDRQLDSGDNPYLKYNHADAEFQERLKEDTSFGGNLGRAVFQAKKRVLEPLGLVEEPVKTAPGKKRPVEHSPVEEPDSSSGTGKAGQQPARKRLNFGQTGDADSVPDPQPLGQPPAAPSGLGTNTMATGSGAPMADNNEGADGVGNSSGNWHCDSTWMGDRVITTSTRTWALPTYNNHLYKQISSQSGASNDNHYFGYSTPWGYFDFNRFHCHFSPRDWQRLINNNWGFRPKRLNFKLFNIQVKEVTQNDGTTTIANNLTSTVQVFTDSEYQLPYVLGSAHQGCLPPFPADVFMVPQYGYLTLNNGSQAVGRSSFYCLEYFPSQMLRTGNNFTFSYTFEDVPFHSSYAHSQSLDRLMNPLIDQYLYYLSRTNTPSGTTTQSRLQFSQAGASDIRDQSRNWLPGPCYRQQRVSKTSADNNNSEYSWTGATKYHLNGRDSLVNPGPAMASHKDDEEKFFPQSGVLIFGKQGSEKTNVDIEKVMITDEEEIRTTNPVATEQYGSVSTNLQRGNRQAATADVNTQGVLPGMVWQDRDVYLQGPIWAKIPHTDGHFHPSPLMGGFGLKHPPPQILIKNTPVPANPSTTFSAAKFASFITQYSTGQVSVEIEWELQKENSKRWNPEIQYTSNYNKSVNVDFTVDTNGVYSEPRPIGTRYLTRNL

SEQ ID NO: 885 - protein, 736 aa, Artificial Sequence
  source: /note="Description of Artificial Sequence: Synthetic polypeptide"
MAADGYLPDWLEDNLSEGIREWWDLKPGAPKPKANQQKQDDGRGLVLPGYKYLGPFNGLDKGEPVNAADAAALEHDKAYDQQLKAGDNPYLRYNHADAEFQERLQEDTSFGGNLGRAVFQAKKRVLEPFGLVEEGAKTAPGKKRPVEQSPQEPDSSSGIGKTGQQPAKKRLNFGQTGDSESVPDPQPLGEPPATPAAVGPTTMASGGGAPMADNNEGADGVGNASGNWHCDSTWLGDRVITTSTRTWALPTYNNHLYKQISSASTGASNDNHYFGYSTPWGYFDFNRFHCHFSPRDWQRLINNNWGFRPKRLNFKLFNVQVKEVTTNDGVTTIANNLTSTVQVFSDSEYQLPYVLGSAHQGCLPPFPADVFMIPQYGYLTLNNGSQAVGRSSFYCLEYFPSQMLRTGNNFTFSYTFEDVPFHSSYAHSQSLDRLMNPLIDQYLYYLNRTQDQSGSAQNKDLLFSRGSPAGMSVQPKNWLPGPCYRQQRVSKTKTDNNNSNFTWTGASKYNLNGRESIINPGTAMASHKDDKNKFFPMSGVMIFGKESAGASNTALDNVMITDEEEIKATNPVATERFGTVAVNLQSSSTDPATGDVHVMGALPGMVWQDRDVYLQGPIWAKIPHTDGHFHPSPLMGGFGLKNPPPQILIKNTPVPANPPAEFSATKFASFITQYSTGQVSVEIEWELQKENSKRWNPEVQYTSNYAKSANVDFTVDNNGLYTEPRPIGTRYLTRPL

SEQ ID NO: 886 - protein, 737 aa, Artificial Sequence
  source: /note="Description of Artificial Sequence: Synthetic polypeptide"
MAADGYLPDWLEDTLSEGIRQWWKLKPGPPPPKPAERHKDDSRGLVLPGYKYLGPGNGLDKGEPVNAADAAALEHDKAYDQQLKAGDNPYLKYNHADAEFQERLKEDTSFGGNLGRAVFQAKKRVLEPLGLVEEGAKTAPGKKRPVEPSPQRSPDSSTGIGKKGQQPARKRLNFGQTGDSESVPDPQPLGEPPATPAAVGPTTMASGGGAPMADNNEGADGVGNASGNWHCDSTWLGDRVITTSTRTWALPTYNNHLYKQISSASTGASNDNHYFGYSTPWGYFDFNRFHCHFSPRDWQRLINNNWGFRPKRLNFKLFNIQVKEVTTNDGVTTIANNLTSTVQVFSDSEYQLPYVLGSAHQGCLPPFPADVFMIPQYGYLTLNNGSQAVGRSSFYCLEYFPSQMLRTGNNFTFSYTFEDVPFHSSYAHSQSLDRLMNPLIDQYLYYLNRTQNQSGSAQNKDLLFSRGSPAGMSVQPKNWLPGPCYRQQRVSKTKTDNNNSNFTWTGASKYNLNGRESIINPGTAMASHKDDKDKFFPMSGVMIFGKESAGASNTALDNVMITDEEEIKATNPVATERFGTVAVNLQSSSTDPATEDVHVMGALPGMVWQDRDVYLQGPIWAKIPHTDGHFHPSPLMGGFGLKNPPPQILIKNTPVPANPPAEFSATKFASFITQYSTGQVSVEIEWELQKENSKRWNPEVQYTSNYAKSANVDFTVDNNGLYTEPRPIGTRYLTRNL

SEQ ID NO: 887 - protein, 736 aa, Artificial Sequence
  source: /note="Description of Artificial Sequence: Synthetic polypeptide"
MAADGYLPDWLEDNLSEGIREWWDLKPGAPKPKANQQKQDDGRGLVLPGYKYLGPFNGLDKGEPVNAADAAALEHDKAYDQQLKAGDNPYLRYNHADAEFQERLQEDTSFGGNLGRAVFQAKKRVLEPFGLVEEGAKTAPGKKRPVEQSPQEPDSSSGIGKTGQQPAKKRLNFGQTGDSESVPDPQPLGEPPATPAAVGPTTMASGGGAPMADNNEGADGVGNASGNWHCDSTWLGDRVITTSTRTWALPTYNNHLYKQISSASTGASNDNHYFGYSTPWGYFDFNRFHCHFSPRDWQRLINNNWGFRPKRLNFKLFNVQVKEVTTNDGVTTIANNLTSTVQVFSDSEYQLPYVLGSAHQGCLPPFPADVFMIPQYGYLTLNNGSQAVGRSSFYCLEYFPSQMLRTGNNFTFSYTFEDVPFHSSYAHSQSLDRLMNPLIDQYLYYLNRTQDQSGSAQNKDLLFSRGSPAGMSVQPKNWLPGPCYRQQRVSKTKTDNNNSNFTWTGASKYNLNGRESIINPGTAMASHKDDKNKFFPMSGVMIFGKESAGASNTALDNVMITDEEEIKATNPVATERFGTVAVNLQSSSTDPATGDVHVMGALPGMVWQDRDVYLQGPIWAKIPHTDGHFHPSPLMGGFGLKHPPPQILIKNTPVPANPPAEFSATKFASFITQYSTGQVSVEIEWELQKENSKRWNPEVQYTSNYAKSANVDFTVDNNGLYTEPRPIGTRYLTRPL

SEQ ID NO: 888 - protein, 736 aa, Artificial Sequence
  source: /note="Description of Artificial Sequence: Synthetic polypeptide"
MAADGYLPDWLEDNLSEGIREWWDLKPGAPKPKANQQKQDDGRGLVLPGYKYLGPFNGLDKGEPVNAADAAALEHDKAYDQQLKAGDNPYLRYNHADAEFQERLQEDTSFGGNLGRAVFQAKKRVLEPFGLVEEGAKTAPGKKRPVEQSPQEPDSSSGIGKTGQQPAKKRLNFGQTGDSESVPDPQPLGEPPATPAAVGPTTMASGGGAPMADNNEGADGVGNASGNWHCDSTWLGDRVITTSTRTWALPTYNNHLYKQISSASTGASNDNHYFGYSTPWGYFDFNRFHCHFSPRDWQRLINNNWGFRPKRLNFKLFNVQVKEVTTNDGVTTIANNLTSTVQVFSDSEYQLPYVLGSAHQGCLPPFPADVFMIPQYGYLTLNNGSQAVGRSSFYCLEYFPSQMLRTGNNFTFSYTFEDVPFHSSYAHSQSLDRLMNPLIDQYLYYLNRTQDQSGSAQNKDLLFSRGSPAGMSVQPKNWLPGPCYRQQRVSKTKTDNNNSNFTWTGASKYNLNGRESIINPGTAMASHKDDKDKFFPMSGVMIFGKESAGASNTALDNVMITDEEEIKATNPVATERFGTVAVNLQSSSTDPATGDVHVMGALPGMVWQDRDVYLQGPIWAKIPHTDGHFHPSPLMGGFGLKHPPPQILIKNTPVPANPPAEFSATKFASFITQYSTGQVSVEIEWELQKENSKRWNPEVQYTSNYAKSANVDFTVDNNGLYTEPRPIGTRYLTRPL

SEQ ID NO: 889 - protein, 736 aa, Artificial Sequence
  source: /note="Description of Artificial Sequence: Synthetic polypeptide"
MAADGYLPDWLEDNLSEGIREWWDLKPGAPKPKANQQKQDDGRGLVLPGYKYLGPFNGLDKGEPVNAADAAALEHDKAYDQQLKAGDNPYLRYNHADAEFQERLQEDTSFGGNLGRAVFQAKKRVLEPFGLVEEGAKTAPGKKRPVEQSPQEPDSSSGIGKTGQQPAKKRLNFGQTGDSESVPDPQPLGEPPATPAAVGPTTMASGGGAPMADNNEGADGVGNASGNWHCDSTWLGDRVITTSTRTWALPTYNNHLYKQISSASTGASNDNHYFGYSTPWGYFDFNRFHCHFSPRDWQRLINNNWGFRPKRLNFKLFNIQVKEVTTNDGVTTIANNLTSTVQVFSDSEYQLPYVLGSAHQGCLPPFPADVFMIPQYGYLTLNNGSQAVGRSSFYCLEYFPSQMLRTGNNFTFSYTFEDVPFHSSYAHSQSLDRLMNPLIDQYLYYLNRTQDQSGSAQNKDLLFSRGSPAGMSVQPKNWLPGPCYRQQRVSKTKTDNNNSNFTWTGASKYNLNGRESIINPGTAMASHKDDKNKFFPMSGVMIFGKESAGASNTALDNVMITDEEEIKATNPVATERFGTVAVNLQSSSTDPATGDVHVMGALPGMVWQDRDVYLQGPIWAKIPHTDGHFHPSPLMGGFGLKHPPPQILIKNTPVPANPPAEFSATKFASFITQYSTGQVSVEIEWELQKENSKRWNPEVQYTSNYAKSANVDFTVDNNGLYTEPRPIGTRYLTRPL

SEQ ID NO: 890 - protein, 736 aa, Artificial Sequence
  source: /note="Description of Artificial Sequence: Synthetic polypeptide"
MAADGYLPDWLEDNLSEGIREWWDLKPGAPKPKANQQKQDDGRGLVLPGYKYLGPFNGLDKGEPVNAADAAALEHDKAYDQQLKAGDNPYLRYNHADAEFQERLQEDTSFGGNLGRAVFQAKKRVLEPFGLVEEGAKTAPGKKRPVEQSPQEPDSSSGIGKTGQQPAKKRLNFGQTGDSESVPDPQPLGEPPATPAAVGPTTMASGGGAPMADNNEGADGVGNASGNWHCDSTWLGDRVITTSTRTWALPTYNNHLYKQISSASTGASNDNHYFGYSTPWGYFDFNRFHCHFSPRDWQRLINNNWGFRPKRLNFKLFNVQVKEVTTNDGVTTIANNLTSTVQVFSDSEYQLPYVLGSAHQGCLPPFPADVFMIPQYGYLTLNNGSQAVGRSSFYCLEYFPSQMLRTGNNFTFSYTFEDVPFHSSYAHSQSLDRLMNPLIDQYLYYLNRTQNQSGSAQNKDLLFSRGSPAGMSVQPKNWLPGPCYRQQRVSKTKTDNNNSNFTWTGASKYNLNGRESIINPGTAMASHKDDKDKFFPMSGVMIFGKESAGASNTALDNVMITDEEEIKATNPVATERFGTVAVNLQSSSTDPATGDVHVMGALPGMVWQDRDVYLQGPIWAKIPHTDGHFHPSPLMGGFGLKHPPPQILIKNTPVPANPPAEFSATKFASFITQYSTGQVSVEIEWELQKENSKRWNPEVQYTSNYAKSANVDFTVDNNGLYTEPRPIGTRYLTRPL

SEQ ID NO: 891 - protein, 736 aa, Artificial Sequence
  source: /note="Description of Artificial Sequence: Synthetic polypeptide"
MAADGYLPDWLEDNLSEGIREWWDLKPGAPKPKANQQKQDDGRGLVLPGYKYLGPFNGLDKGEPVNAADAAALEHDKAYDQQLKAGDNPYLRYNHADAEFQERLQEDTSFGGNLGRAVFQAKKRVLEPFGLVEEGAKTAPGKKRPVEQSPQEPDSSSGIGKTGQQPAKKRLNFGQTGDSESVPDPQPLGEPPATPAAVGPTTMASGGGAPMADNNEGADGVGNASGNWHCDSTWLGDRVITTSTRTWALPTYNNHLYKQISSASTGASNDNHYFGYSTPWGYFDFNRFHCHFSPRDWQRLINNNWGFRPKRLNFKLFNVQVKEVTTNDGVTTIANNLTSTVQVFSDSEYQLPYVLGSAHQGCLPPFPADVFMIPQYGYLTLNNGSQAVGRSSFYCLEYFPSQMLRTGNNFTFSYTFEDVPFHSSYAHSQSLDRLMNPLIDQYLYYLNRTQNQSGSAQNKDLLFSRGSPAGMSVQPKNWLPGPCYRQQRVSKTKTDNNNSNFTWTGASKYNLNGRESIINPGTAMASHKDDKNKFFPMSGVMIFGKESAGASNTALDNVMITDEEEIKATNPVATERFGTVAVNLQSSSTDPATGDVHVMGALPGMVWQDRDVYLQGPIWAKIPHTDGHFHPSPLMGGFGLKHPPPQILIKNTPVPANPPAEFSATKFASFITQYSTGQVSVEIEWELQKENSKRWNPEVQYTSNYAKSANVDFTVDNNGLYTEPRPIGTRYLTRPL

SEQ ID NO: 892 - DNA, 2217 bp, Artificial Sequence
  source: /note="Description of Artificial Sequence: Synthetic polynucleotide"
atggctgccgatggttatcttccagattggctcgaggacaacctctctgagggcattcgcgagtggtgggacctgaaacctggagccccgaaacccaaagccaaccagcaaaagcaggacaacggccggggtctggtgcttcctggctacaagtacctcggacccttcaacggactcgacaagggggagcccgtcaacgcggcggacgcagcggccctcgagcacgacaaggcctacgaccagcagctccaagcgggtgacaatccgtacctgcggtataatcacgccgacgccgagtttcaggagcgtctgcaagaagatacgtcttttgggggcaacctcgggcgcgcagtcttccaggccaaaaagcgggttctcgaacctctgggcctggttgaatcgccggttaagacggctcctggaaagaagagaccggtagagccatcaccccagcgctctccagactcctctacgggcatcggcaagaaaggccagcagcccgcaaaaaagagactcaattttgggcagactggcgactcagagtcagtccccgaccctcaaccaatcggagaaccaccagcaggcccctctggtctgggatctggtacaatggctgcaggcggtggcgctccaatggcagacaataacgaaggcgccgacggagtgggtagttcctcaggaaattggcattgcgattccacatggctgggcgacagagtcatcaccaccagcacccgcacctgggccctgcccacctacaacaaccacctctacaagcaaatctccaacgggacctcgggaggaagcaccaacgacaacacctacttcggctacagcaccccctgggggtattttgacttcaacagattccactgccacttttcaccacgtgactggcagcgactcatcaacaacaactggggattccggcccaagaggctcaacttcaagctcttcaacatccaagtcaaggaggtcacgcagaatgaaggcaccaagaccatcgccaataaccttaccagcacgattcaggtctttacggactcggaataccagctcccgtacgtgctcggctcggcgcaccagggctgcctgcctccgttcccggcggacgtcttcatgattcctcagtacgggtacctgactctgaacaatggcagtcaggctgtgggccggtcgtccttctactgcctggagtactttccttctcaaatgctgagaacgggcaacaactttgaattcagctacaacttcgaggacgtgcccttccacagcagctacgcgcacagccagagcctggaccggctgatgaaccctctcatcgaccagtacttgtactacctgtcccggactcaaagcacgggcggtactgcaggaactcagcagttgctattttctcaggccgggcctaacaacatgtcggctcaggccaagaactggctacccggtccctgctaccggcagcaacgcgtctccacgacactgtcgcagaacaacaacagcaactttgcctggacgggtgccaccaagtatcatctgaatggcagagactctctggtgaatcctggcgttgccatggctacccacaaggacgacgaagagcgattttttccatccagcggagtcttaatgtttgggaaacagggagctggaaaagacaacgtggactatagcagcgtgatgctaaccagcgaggaagaaataaagaccaccaacccagtggccacagaacagtacggcgtggtggccgataacctgcaacagcaaaacgccgctcctattgtaggggccgtcaatagtcaaggagccttacctggcatggtgtggcagaaccgggacgtgtacctgcagggtcccatctgggccaagattcctcatacggacggcaactttcatccctcgccgctgatgggaggctttggactgaagcatccgcctcctcagatcctgattaaaaacacacctgttcccgcggatcctccgaccaccttcaatcaggccaagctggcttctttcatcacgcagtacagtaccggccaggtcagcgtggagatcgagtgggagctgcagaaggagaacagcaaacgctggaacccagagattcagtacacttccaactactacaaatctacaaatgtggactttgctgtcaatactgagggtacttattccgagcctcgccccattggcacccgttacctcacccgtaatctgtaa

SEQ ID NO: 893 - protein, 738 aa, Artificial Sequence
  source: /note="Description of Artificial Sequence: Synthetic polypeptide"
MAADGYLPDWLEDNLSEGIREWWDLKPGAPKPKANQQKQDNGRGLVLPGYKYLGPFNGLDKGEPVNAADAAALEHDKAYDQQLQAGDNPYLRYNHADAEFQERLQEDTSFGGNLGRAVFQAKKRVLEPLGLVESPVKTAPGKKRPVEPSPQRSPDSSTGIGKKGQQPAKKRLNFGQTGDSESVPDPQPIGEPPAGPSGLGSGTMAAGGGAPMADNNEGADGVGSSSGNWHCDSTWLGDRVITTSTRTWALPTYNNHLYKQISNGTSGGSTNDNTYFGYSTPWGYFDFNRFHCHFSPRDWQRLINNNWGFRPKRLNFKLFNIQVKEVTQNEGTKTIANNLTSTIQVFTDSEYQLPYVLGSAHQGCLPPFPADVFMIPQYGYLTLNNGSQAVGRSSFYCLEYFPSQMLRTGNNFEFSYNFEDVPFHSSYAHSQSLDRLMNPLIDQYLYYLSRTQSTGGTAGTQQLLFSQAGPNNMSAQAKNWLPGPCYRQQRVSTTLSQNNNSNFAWTGATKYHLNGRDSLVNPGVAMATHKDDEERFFPSSGVLMFGKQGAGKDNVDYSSVMLTSEEEIKTTNPVATEQYGVVADNLQQQNAAPIVGAVNSQGALPGMVWQNRDVYLQGPIWAKIPHTDGNFHPSPLMGGFGLKHPPPQILIKNTPVPADPPTTFNQAKLASFITQYSTGQVSVEIEWELQKENSKRWNPEIQYTSNYYKSTNVDFAVNTEGTYSEPRPIGTRYLTRNL

SEQ ID NO: 894 - protein, 738 aa, Artificial Sequence; identical to SEQ ID NO: 893
  source: /note="Description of Artificial Sequence: Synthetic polypeptide"

SEQ ID NO: 895 - DNA, 4472 bp, Artificial Sequence
  source: /note="Description of Artificial Sequence: Synthetic polynucleotide"
ctccatcactaggggtaaccgcgaagcgcctcccacgctgccgcgtcagcgctgacgtaaattacgtcataggggagtggtcctgtattagctgtcacgtgagtgcttttgcgacattttgcgacaccacgtggccattcatggtatatatggccgagtgagcgagcaggatctccattttgaccgcgaaatttgaacgagcagcagccatgccgggcttctacgagatcgtgcttaaggtgccgagcgacctggacgagcacctgccgggcatttctgactcgtttgtgaactgggtggcagagaaggaatgggagctgcccccggattctgacatggatcggaatctgattgagcaggcacccctgaccgtggccgagaagctacagcgcgacttcctggtccaatggcgccgcgtgagtaaggccccggaggccctcttctttgttcagttcgagaagggcgagtcctacttccacctccatattctggtagagaccacgggggtcaaatccatggtgctgggccgcttcctgagtcagattcgggacaagctggtgcagaccatctaccgcgggatcgagccgaccctgcccaactggttcgcggtgacaaagacgcgtaatggcgccggaggggggaacaaggtggtggacgagtgctacatccccaactacctgctgcccaagactcagcccgagctgcagtgggcgtggactaacatggaggagtatataagcgcgtgcttgaacctggccgagcgcaaacggctcgtggcgcagcacctgacccacgtcagccagacccaggagcagaacaaggagaatctgaacccgaattctgacgcgcctgtcatccggtcaaaaacctccgcgcgctacatggagctggtcgggtggctggtggaccggggcatcacctccgagaagcagtggatccaggaggaccaggcctcgtacatctccttcaacgccgcctccaactcgcggtctcagatcaaggccgcgctggacaatgccggcaagatcatggcgctgaccaaatccgcgcccgactacctggtaggccccgctctgcccgcggacattaaatccaaccgcatctaccgcatcctggagctgaatggctacgaccctgcctacgccggttccgtctttctcggctgggcccagaaaaagtttggcaaaaggaacaccatctggctgtttgggccggccaccacgggcaagaccaacatcgcggaagccatcgcccacgccgtgcccttctacggctgcgtcaactggaccaatgagaactttcccttcaacgattgcgtcgacaagatggtgatctggtgggaggagggcaagatgacggccaaggtcgtggagtccgccaaggccattctcggcggcagcaaggtgcgcgtggaccaaaagtgcaagtcgtccgcccagatcgatcccacccccgtgatcgtcacctccaacaccaacatgtgcgccgtgattgacgggaacagcaccaccttcgagcaccagcagccgttgcaggaccggatgttcaaatttgaacttacccgccgtctggagcacgactttggcaaggtgacaaagcaggaagtcaaagagttcttccgctgggcgcaggatcacgtgaccgaggtggcgcatgagttctacgtcagaaagggtggagctaacaaaagacccgcccccgatgacgcggatataagcgagcccaagcgggcctgcccctcagtcgcggatccatcgacgtcagacgcggaaggagctccggtggactttgccgacaggtaccaaaacaaatgttctcgtcacgcgggcatgcttcagatgctgtttccctgcaaaacatgcgagagaatgaatcagaatttcaacatttgcttcacgcacgggaccagagactgttcagaatgtttccctggcgtgtcagaatctcaaccggtcgtcagaaaaaagacgtatcggaaactctgtgcgattcatcatctgctggggcgggcacccgagattgcttgctcggcctgcgacctggtcaacgtggacctggatgactgtgtttctgagcaataaatgacttaaaccaggtatggctgccgatggttatcttccagattggctcgaggacaacctctctgagggcattcgcgagtggtgggacctgaaacctggagccccgaaacccaaagccaaccagcaaaagcaggacaacggccggggtctggtgcttcctggctacaagtacctcggacccttcaacggactcgacaagggggagcccgtcaacgcggcggacgcagcggccctcgagcacgacaaggcctacgaccagcagctccaagcgggtgacaatccgtacctgcggtataatcacgccgacgccgagtttcaggagcgtctgcaagaagatacgtcttttgggggcaacctcgggcgcgcagtcttccaggccaaaaagcgggttctcgaacctctgggcctggttgaatcgccggttaagacggctcctggaaagaagagaccggtagagccatcaccccagcgctctccagactcctctacgggcatcggcaagaaaggccagcagcccgcaaaaaagagactcaattttgggcagactggcgactcagagtcagtccccgaccctcaaccaatcggagaaccaccagcaggcccctctggtctgggatctggtacaatggctgcaggcggtggcgctccaatggcagacaataacgaaggcgccgacggagtgggtagttcctcaggaaattggcattgcgattccacatggctgggcgacagagtcatcaccaccagcacccgcacctgggccctgcccacctacaacaaccacctctacaagcaaatctccaacgggacctcgggaggaagcaccaacgacaacacctacttcggctacagcaccccctgggggtattttgacttcaacagattccactgccacttttcaccacgtgactggcagcgactcatcaacaacaactggggattccggcccaagaggctcaacttcaagctcttcaacatccaagtcaaggaggtcacgcagaatgaaggcaccaagaccatcgccaataaccttaccagcacgattcaggtctttacggactcggaataccagctcccgtacgtgctcggctcggcgcaccagggctgcctgcctccgttcccggcggacgtcttcatgattcctcagtacgggtacctgactctgaacaatggcagtcaggctgtgggccggtcgtccttctactgcctggagtactttccttctcaaatgctgagaacgggcaacaactttgaattcagctacaacttcgaggacgtgcccttccacagcagctacgcgcacagccagagcctggaccggctgatgaaccctctcatcgaccagtacttgtactacctgtcccggactcaaagcacgggcggtactgcaggaactcagcagttgctattttctcaggccgggcctaacaacatgtcggctcaggccaagaactggctacccggtccctgctaccggcagcaacgcgtctccacgacactgtcgcagaacaacaacagcaactttgcctggacgggtgccaccaagtatcatctgaatggcagagactctctggtgaatcctggcgttgccatggctacccacaaggacgacgaagagcgattttttccatccagcggagtcttaatgtttgggaaacagggagctggaaaagacaacgtggactatagcagcgtgatgctaaccagcgaggaagaaataaagaccaccaacccagtggccacagaacagtacggcgtggtggccgataacctgcaacagcaaaacgccgctcctattgtaggggccgtcaatagtcaaggagccttacctggcatggtgtggcagaaccgggacgtgtacctgcagggtcccatctgggccaagattcctcatacggacggcaactttcatccctcgccgctgatgggaggctttggactgaagcatccgcctcctcagatcctgattaaaaacacacctgttcccgcggatcctccgaccaccttcaatcaggccaagctggcttctttcatcacgcagtacagtaccggccaggtcagcgtggagatcgagtgggagctgcagaaggagaacagcaaacgctggaacccagagattcagtacacttccaactactacaaatctacaaatgtggactttgctgtcaatactgagggtacttattccgagcctcgccccattggcacccgttacctcacccgtaatctgtaattacatgttaatcaataaaccggttaattcgtttcagttgaactttggtctcctgtccttcttatcttatcggttaccatagaaactggttacttattaactgcttggtgcgcttcgcgataaaagacttacgtcatcgggttacccctagtgatgga

SEQ ID NO: 896 - protein, 738 aa, Artificial Sequence
  source: /note="Description of Artificial Sequence: Synthetic polypeptide"
MAADGYLPDWLEDNLSEGIREWWDLKPGAPKPKANQQKQDNGRGLVLPGYKYLGPFNGLDKGEPVNAADAAALEHDKAYDQQLQAGDNPYLRYNHADAEFQERLQEDTSFGGNLGRAVFQAKKRVLEPLGLVESPVKTAPGKKRPVEPSPQRSPDSSTGIGKKGQQPAKKRLNFGQTGDSESVPDPQPIGEPPAAPSGVGPNTMAAGGGAPMADNNEGADGVGSSSGNWHCDSTWLGDRVITTSTRTWALPTYNNHLYKQISNGTSGGSTNDNTYFGYSTPWGYFDFNRFHCHFSPRDWQRLINNNWGFRPKRLNFKLFNIQVKEVTQNEGTKTIANNLTSTIQVFTDSEYQLPYVLGSAHQGCLPPFPADVFMIPQYGYLTLNNGSQAVGRSSFYCLEYFPSQMLRTGNNFEFSYNFEDVPFHSSYAHSQSLDRLMNPLIDQYLYYLSRTQSTGGTAGTQQLLFSQAGPNNMSAQAKNWLPGPCYRQQRVSTTLSQNNNSNFAWTGATKYHLNGRDSLVNPGVAMATHKDDEERFFPSSGVLMFGKQGAGKDNVDYSSVMLTSEEEIKTTNPVATEQYGVVADNLQQQNAAPIVGAVNSQGALPGMVWQNRDVYLQGPIWAKIPHTDGNFHPSPLMGGFGLKHPPPQILIKNTPVPADPPTTFNQAKLASFITQYSTGQVSVEIEWELQKENSKRWNPEIQYTSNYYKSTNVDFAVNTEGTYSEPRPIGTRYLTRNL

SEQ ID NO: 897 - protein, 738 aa, Artificial Sequence
  source: /note="Description of Artificial Sequence: Synthetic polypeptide"
MAADGYLPDWLEDNLSEGIREWWDLKPGAPKPKANQQRQDNGRGLVLPGYRYLGPFNGLDKGEPVNAADAAALEHDRAYDQQLQAGDNPYLRYNHADAEFQERLQEDTSFGGNLGRAVFQAKKRVLEPLGLVESPVRTAPGKKRPVEPSPQRSPDSSTGIGKKGQQPARKRLNFGQTGDSESVPDPQPIGEPPAAPSGVGPNTMAAGGGAPMADNNEGADGVGSSSGNWHCDSTWLGDRVITTSTRTWALPTYNNHLYRQISNGTSGGSTNDNTYFGYSTPWGYFDFNRFHCHFSPRDWQRLINNNWGFRPKRLNFKLFNIQVKEVTQNEGTRTIANNLTSTIQVFTDSEYQLPYVLGSAHQGCLPPFPADVFMIPQYGYLTLNNGSQAVGRSSFYCLEYFPSQMLRTGNNFEFSYNFEDVPFHSSYAHSQSLDRLMNPLIDQYLYYLSRTQSTGGTAGTQQLLFSQAGPNNMSAQAKNWLPGPCYRQQRVSTTLSQNNNSNFAWTGATKYHLNGRDSLVNPGVAMATHRDDEERFFPSSGVLMFGRQGAGRDNVDYSSVMLTSEEEIRTTNPVATEQYGVVADNLQQQNAAPIVGAVNSQGALPGMVWQNRDVYLQGPIWAKIPHTDGNFHPSPLMGGFGLKHPPPQILIKNTPVPADPPTTFNQAKLASFITQYSTGQVSVEIEWELQKENSKRWNPEIQYTSNYYKSTNVDFAVNTEGTYSEPRPIGTRYLTRNL

SEQ ID NO: 898 - protein, 738 aa, Artificial Sequence
  source: /note="Description of Artificial Sequence: Synthetic polypeptide"
MAADGYLPDWLEDNLSEGIREWWDLKPGAPKPKANQQRQDNGRGLVLPGYRYLGPFNGLDKGEPVNAADAAALEHDRAYDQQLQAGDNPYLRYNHADAEFQERLQEDTSFGGNLGRAVFQAKKRVLEPLGLVESPVRTAPGKKRPVEPSPQRSPDSSTGIGKRGQQPARKRLNFGQTGDSESVPDPQPIGEPPAAPSGVGPNTMAAGGGAPMADNNEGADGVGSSSGNWHCDSTWLGDRVITTSTRTWALPTYNNHLYRQISNGTSGGSTNDNTYFGYSTPWGYFDFNRFHCHFSPRDWQRLINNNWGFRPKRLNFKLFNIQVKEVTQNEGTRTIANNLTSTIQVFTDSEYQLPYVLGSAHQGCLPPFPADVFMIPQYGYLTLNNGSQAVGRSSFYCLEYFPSQMLRTGNNFEFSYNFEDVPFHSSYAHSQSLDRLMNPLIDQYLYYLSRTQSTGGTAGTQQLLFSQAGPNNMSAQAKNWLPGPCYRQQRVSTTLSQNNNSNFAWTGATKYHLNGRDSLVNPGVAMATHRDDEERFFPSSGVLMFGKQGAGRDNVDYSSVMLTSEEEIRTTNPVATEQYGVVADNLQQQNAAPIVGAVNSQGALPGMVWQNRDVYLQGPIWAKIPHTDGNFHPSPLMGGFGLKHPPPQILIKNTPVPADPPTTFNQAKLASFITQYSTGQVSVEIEWELQKENSKRWNPEIQYTSNYYKSTNVDFAVNTEGTYSEPRPIGTRYLTRNL

SEQ ID NO: 899 - protein, 738 aa, Artificial Sequence
  source: /note="Description of Artificial Sequence: Synthetic polypeptide"
MAADGYLPDWLEDNLSEGIREWWDLKPGAPKPKANQQRQDNGRGLVLPGYRYLGPFNGLDKGEPVNAADAAALEHDRAYDQQLQAGDNPYLRYNHADAEFQERLQEDTSFGGNLGRAVFQAKKRVLEPLGLVESPVRTAPGKKRPVEPSPQRSPDSSTGIGKRGQQPAKKRLNFGQTGDSESVPDPQPIGEPPAAPSGVGPNTMAAGGGAPMADNNEGADGVGSSSGNWHCDSTWLGDRVITTSTRTWALPTYNNHLYRQISNGTSGGSTNDNTYFGYSTPWGYFDFNRFHCHFSPRDWQRLINNNWGFRPKRLNFKLFNIQVKEVTQNEGTRTIANNLTSTIQVFTDSEYQLPYVLGSAHQGCLPPFPADVFMIPQYGYLTLNNGSQAVGRSSFYCLEYFPSQMLRTGNNFEFSYNFEDVPFHSSYAHSQSLDRLMNPLIDQYLYYLSRTQSTGGTAGTQQLLFSQAGPNNMSAQAKNWLPGPCYRQQRVSTTLSQNNNSNFAWTGATKYHLNGRDSLVNPGVAMATHRDDEERFFPSSGVLMFGRQGAGRDNVDYSSVMLTSEEEIRTTNPVATEQYGVVADNLQQQNAAPIVGAVNSQGALPGMVWQNRDVYLQGPIWAKIPHTDGNFHPSPLMGGFGLKHPPPQILIKNTPVPADPPTTFNQAKLASFITQYSTGQVSVEIEWELQKENSKRWNPEIQYTSNYYKSTNVDFAVNTEGTYSEPRPIGTRYLTRNL

SEQ ID NO: 900 - protein, 738 aa, Artificial Sequence
  source: /note="Description of Artificial Sequence: Synthetic polypeptide"
MAADGYLPDWLEDNLSEGIREWWDLKPGAPKPKANQQRQDNGRGLVLPGYRYLGPFNGLDKGEPVNAADAAALEHDRAYDQQLQAGDNPYLRYNHADAEFQERLQEDTSFGGNLGRAVFQAKKRVLEPLGLVESPVRTAPGKKRPVEPSPQRSPDSSTGIGKRGQQPAKKRLNFGQTGDSESVPDPQPIGEPPAAPSGVGPNTMAAGGGAPMADNNEGADGVGSSSGNWHCDSTWLGDRVITTSTRTWALPTYNNHLYRQISNGTSGGSTNDNTYFGYSTPWGYFDFNRFHCHFSPRDWQRLINNNWGFRPKRLNFKLFNIQVKEVTQNEGTRTIANNLTSTIQVFTDSEYQLPYVLGSAHQGCLPPFPADVFMIPQYGYLTLNNGSQAVGRSSFYCLEYFPSQMLRTGNNFEFSYNFEDVPFHSSYAHSQSLDRLMNPLIDQYLYYLSRTQSTGGTAGTQQLLFSQAGPNNMSAQAKNWLPGPCYRQQRVSTTLSQNNNSNFAWTGATKYHLNGRDSLVNPGVAMATHRDDEERFFPSSGVLMFGKQGAGRDNVDYSSVMLTSEEEIRTTNPVATEQYGVVADNLQQQNAAPIVGAVNSQGALPGMVWQNRDVYLQGPIWAKIPHTDGNFHPSPLMGGFGLKHPPPQILIKNTPVPADPPTTFNQARLASFITQYSTGQVSVEIEWELQKENSKRWNPEIQYTSNYYKSTNVDFAVNTEGTYSEPRPIGTRYLTRNL

SEQ ID NO: 901 - protein, 738 aa, Artificial Sequence
  source: /note="Description of Artificial Sequence: Synthetic polypeptide"
MAADGYLPDWLEDNLSEGIREWWDLKPGAPKPKANQQRQDNGRGLVLPGYRYLGPFNGLDKGEPVNAADAAALEHDRAYDQQLQAGDNPYLRYNHADAEFQERLQEDTSFGGNLGRAVFQAKKRVLEPLGLVESPVRTAPGKKRPVEPSPQRSPDSSTGIGKKGQQPAKKRLNFGQTGDSESVPDPQPIGEPPAAPSGVGPNTMAAGGGAPMADNNEGADGVGSSSGNWHCDSTWLGDRVITTSTRTWALPTYNNHLYRQISNGTSGGSTNDNTYFGYSTPWGYFDFNRFHCHFSPRDWQRLINNNWGFRPKRLNFKLFNIQVKEVTQNEGTRTIANNLTSTIQVFTDSEYQLPYVLGSAHQGCLPPFPADVFMIPQYGYLTLNNGSQAVGRSSFYCLEYFPSQMLRTGNNFEFSYNFEDVPFHSSYAHSQSLDRLMNPLIDQYLYYLSRTQSTGGTAGTQQLLFSQAGPNNMSAQAKNWLPGPCYRQQRVSTTLSQNNNSNFAWTGATKYHLNGRDSLVNPGVAMATHRDDEERFFPSSGVLMFGRQGAGRDNVDYSSVMLTSEEEIRTTNPVATEQYGVVADNLQQQNAAPIVGAVNSQGALPGMVWQNRDVYLQGPIWAKIPHTDGNFHPSPLMGGFGLKHPPPQILIKNTPVPADPPTTFNQARLASFITQYSTGQVSVEIEWELQKENSKRWNPEIQYTSNYYKSTNVDFAVNTEGTYSEPRPIGTRYLTRNL

SEQ ID NO: 902 - DNA, 2214 bp, Artificial Sequence
  source: /note="Description of Artificial Sequence: Synthetic polynucleotide"
atggctgccgatggttatcttccagattggctcgaggacaacctctctgagggcattcgcgagtggtgggacctgaaacctggagccccgaaacccaaagccaaccagcaaaagcaggacaacggccggggtctggtgcttcctggctacaagtacctcggacccttcaacggactcgacaagggggagcccgtcaacgcggcggacgcagcggccctcgagcacgacaaggcctacgaccagcagctccaagcgggtgacaatccgtacctgcggtataatcacgccgacgccgagtttcaggagcgtctgcaagaagatacgtcttttgggggcaacctcgggcgcgcagtcttccaggccaaaaagcgggttctcgaacctctgggcctggttgaatcgccggttaagacggctcctggaaagaagagaccggtagagccatcaccccagcgctctccagactcctctacgggcatcggcaagaaaggccagcagcccgcaaaaaagagactcaattttgggcagactggcgactcagagtcagtccccgaccctcaaccaatcggagaaccaccagcagccccctctggtgtgggacctaatacaatggctgcaggcggtggcgctccaatggcagacaataacgaaggcgccgacggagtgggtagttcctcaggaaattggcattgcgattccacatggctgggcgacagagtcatcaccaccagcacccgcacctgggccctgcccacctacaacaaccacctctacaagcaaatctccaacgggacctcgggaggaagcaccaacgacaacacctacttcggctacagcaccccctgggggtattttgacttcaacagattccactgccacttttcaccacgtgactggcagcgactcatcaacaacaactggggattccggcccaagaggctcaacttcaagctcttcaacatccaagtcaaggaggtcacgcagaatgaaggcaccaagaccatcgccaataaccttaccagcacgattcaggtctttacggactcggaataccagctcccgtacgtgctcggctcggcgcaccagggctgcctgcctccgttcccggcggacgtcttcatgattcctcagtacgggtacctgactctgaacaatggcagtcaggctgtgggccggtcgtccttctactgcctggagtactttccttctcaaatgctgagaacgggcaacaactttgaattcagctacaacttcgaggacgtgcccttccacagcagctacgcgcacagccagagcctggaccggctgatgaaccctctcatcgaccagtacttgtactacctgtcccggactcaaagcacgggcggtactgcaggaactcagcagttgctattttctcaggccgggcctaacaacatgtcggctcaggccaagaactggctacccggtccctgctaccggcagcaacgcgtctccacgacactgtcgcagaacaacaacagcaactttgcctggacgggtgccaccaagtatcatctgaatggcagagactctctggtgaatcctggcgttgccatggctacccacaaggacgacgaagagcgattttttccatccagcggagtcttaatgtttgggaaacagggagctggaaaagacaacgtggactatagcagcgtgatgctaaccagcgaggaagaaataaagaccaccaacccagtggccacagaacagtacggcgtggtggccgataacctgcaacagcaaaacgccgctcctattgtaggggccgtcaatagtcaaggagccttacctggcatggtgtggcagaaccgggacgtgtacctgcagggtcccatctgggccaagattcctcatacggacggcaactttcatccctcgccgctgatgggaggctttggactgaagcatccgcctcctcagatcctgattaaaaacacacctgttcccgcggatcctccgaccaccttcaatcaggccaagctggcttctttcatcacgcagtacagtaccggccaggtcagcgtggagatcgagtgggagctgcagaaggagaacagcaaacgctggaacccagagattcagtacacttccaactactacaaatctacaaatgtggactttgctgtcaatactgagggtacttattccgagcctcgccccattggcacccgttacctcacccgtaatctg

SEQ ID NO: 903 - DNA, 2217 bp, Artificial Sequence
  source: /note="Description of Artificial Sequence: Synthetic polynucleotide"
atggctgccgatggttatcttccagattggctcgaggacaacctctctgagggcattcgcgagtggtgggacctgaaacctggagccccgaaacccaaagccaaccagcaaaggcaggacaacggccggggtctggtgcttcctggctacaggtacctcggacccttcaacggactcgacaagggggagcccgtcaacgcggcggacgcagcggccctcgagcacgacagggcctacgaccagcagctccaagcgggtgacaatccgtacctgcggtataatcacgccgacgccgagtttcaggagcgtctgcaagaagatacgtcttttgggggcaacctcgggcgcgcagtcttccaggccaaaaagcgggttctcgaacctctgggcctggttgaatcgccggttaggacggctcctggaaagaagagaccggtagagccatcaccccagcgctctccagactcctctacgggcatcggcaagaaaggccagcagcccgcaagaaagagactcaattttgggcagactggcgactcagagtcagtccccgaccctcaaccaatcggagaaccaccagcagccccctctggtgtgggacctaatacaatggctgcaggcggtggcgctccaatggcagacaataacgaaggcgccgacggagtgggtagttcctcaggaaattggcattgcgattccacatggctgggcgacagagtcatcaccaccagcacccgcacctgggccctgcccacctacaacaaccacctctacaggcaaatctccaacgggacctcgggaggaagcaccaacgacaacacctacttcggctacagcaccccctgggggtattttgacttcaacagattccactgccacttttcaccacgtgactggcagcgactcatcaacaacaactggggattccggcccaagaggctcaacttcaagctcttcaacatccaagtcaaggaggtcacgcagaatgaaggcaccaggaccatcgccaataaccttaccagcacgattcaggtctttacggactcggaataccagctcccgtacgtgctcggctcggcgcaccagggctgcctgcctccgttcccggcggacgtcttcatgattcctcagtacgggtacctgactctgaacaatggcagtcaggctgtgggccggtcgtccttctactgcctggagtactttccttctcaaatgctgagaacgggcaacaactttgaattcagctacaacttcgaggacgtgcccttccacagcagctacgcgcacagccagagcctggaccggctgatgaaccctctcatcgaccagtacttgtactacctgtcccggactcaaagcacgggcggtactgcaggaactcagcagttgctattttctcaggccgggcctaacaacatgtcggctcaggccaagaactggctacccggtccctgctaccggcagcaacgcgtctccacgacactgtcgcagaacaacaacagcaactttgcctggacgggtgccaccaagtatcatctgaatggcagagactctctggtgaatcctggcgttgccatggctacccacagggacgacgaagagcgattttttccatccagcggagtcttaatgtttgggagacagggagctggaagagacaacgtggactatagcagcgtgatgctaaccagcgaggaagaaataaggaccaccaacccagtggccacagaacagtacggcgtggtggccgataacctgcaacagcaaaacgccgctcctattgtaggggccgtcaatagtcaaggagccttacctggcatggtgtggcagaaccgggacgtgtacctgcagggtcccatctgggccaagattcctcatacggacggcaactttcatccctcgccgctgatgggaggctttggactgaagcatccgcctcctcagatcctgattaaaaacacacctgttcccgcggatcctccgaccaccttcaatcaggccaagctggcttctttcatcacgcagtacagtaccggccaggtcagcgtggagatcgagtgggagctgcagaaggagaacagcaaacgctggaacccagagattcagtacacttccaactactacaaatctacaaatgtggactttgctgtcaatactgagggtacttattccgagcctcgccccattggcacccgttacctcacccgtaatctgtaa

SEQ ID NO: 904 - DNA, 2217 bp, Artificial Sequence
  source: /note="Description of Artificial Sequence: Synthetic polynucleotide"
atggctgccgatggttatcttccagattggctcgaggacaacctctctgagggcattcgcgagtggtgggacctgaaacctggagccccgaaacccaaagccaaccagcaaaggcaggacaacggccggggtctggtgcttcctggctacaggtacctcggacccttcaacggactcgacaagggggagcccgtcaacgcggcggacgcagcggccctcgagcacgacagggcctacgaccagcagctccaagcgggtgacaatccgtacctgcggtataatcacgccgacgccgagtttcaggagcgtctgcaagaagatacgtcttttgggggcaacctcgggcgcgcagtcttccaggccaaaaagcgggttctcgaacctctgggcctggttgaatcgccggttaggacggctcctggaaagaagagaccggtagagccatcaccccagcgctctccagactcctctacgggcatcggcaagagaggccagcagcccgcaagaaagagactcaattttgggcagactggcgactcagagtcagtccccgaccctcaaccaatcggagaaccaccagcagccccctctggtgtgggacctaatacaatggctgcaggcggtggcgctccaatggcagacaataacgaaggcgccgacggagtgggtagttcctcaggaaattggcattgcgattccacatggctgggcgacagagtcatcaccaccagcacccgcacctgggccctgcccacctacaacaaccacctctacaggcaaatctccaacgggacctcgggaggaagcaccaacgacaacacctacttcggctacagcaccccctgggggtattttgacttcaacagattccactgccacttttcaccacgtgactggcagcgactcatcaacaacaactggggattccggcccaagaggctcaacttcaagctcttcaacatccaagtcaaggaggtcacgcagaatgaaggcaccaggaccatcgccaataaccttaccagcacgattcaggtctttacggactcggaataccagctcccgtacgtgctcggctcggcgcaccagggctgcctgcctccgttcccggcggacgtcttcatgattcctcagtacgggtacctgactctgaacaatggcagtcaggctgtgggccggtcgtccttctactgcctggagtactttccttctcaaatgctgagaacgggcaacaactttgaattcagctacaacttcgaggacgtgcccttccacagcagctacgcgcacagccagagcctggaccggctgatgaaccctctcatcgaccagtacttgtactacctgtcccggactcaaagcacgggcggtactgcaggaactcagcagttgctattttctcaggccgggcctaacaacatgtcggctcaggccaagaactggctacccggtccctgctaccggcagcaacgcgtctccacgacactgtcgcagaacaacaacagcaactttgcctggacgggtgccaccaagtatcatctgaatggcagagactctctggtgaatcctggcgttgccatggctacccacagggacgacgaagagcgattttttccatccagcggagtcttaatgtttgggaaacagggagctggaagagacaacgtggactatagcagcgtgatgctaaccagcgaggaagaaataaggaccaccaacccagtggccacagaacagtacggcgtggtggccgataacctgcaacagcaaaacgccgctcctattgtaggggccgtcaatagtcaaggagccttacctggcatggtgtggcagaaccgggacgtgtacctgcagggtcccatctgggccaagattcctcatacggacggcaactttcatccctcgccgctgatgggaggctttggactgaagcatccgcctcctcagatcctgattaaaaacacacctgttcccgcggatcctccgaccaccttcaatcaggccaagctggcttctttcatcacgcagtacagtaccggccaggtcagcgtggagatcgagtgggagctgcagaaggagaacagcaaacgctggaacccagagattcagtacacttccaactactacaaatctacaaatgtggactttgctgtcaatactgagggtacttattccgagcctcgccccattggcacccgttacctcacccgtaatctgtaa

SEQ ID NO: 905 - DNA, 2217 bp, Artificial Sequence
  source: /note="Description of Artificial Sequence: Synthetic polynucleotide"
atggctgccgatggttatcttccagattggctcgaggacaacctctctgagggcattcgcgagtggtgggacctgaaacctggagccccgaaacccaaagccaaccagcaaaggcaggacaacggccggggtctggtgcttcctggctacaggtacctcggacccttcaacggactcgacaagggggagcccgtcaacgcggcggacgcagcggccctcgagcacgacagggcctacgaccagcagctccaagcgggtgacaatccgtacctgcggtataatcacgccgacgccgagtttcaggagcgtctgcaagaagatacgtcttttgggggcaacctcgggcgcgcagtcttccaggccaaaaagcgggttctcgaacctctgggcctggttgaatcgccggttaggacggctcctggaaagaagagaccggtagagccatcaccccagcgctctccagactcctctacgggcatcggcaagagaggccagcagcccgcaaaaaagagactcaattttgggcagactggcgactcagagtcagtccccgaccctcaaccaatcggagaaccaccagcagccccctctggtgtgggacctaatacaatggctgcaggcggtggcgctccaatggcagacaataacgaaggcgccgacggagtgggtagttcctcaggaaattggcattgcgattccacatggctgggcgacagagtcatcaccaccagcacccgcacctgggccctgcccacctacaacaaccacctctacaggcaaatctccaacgggacctcgggaggaagcaccaacgacaacacctacttcggctacagcaccccctgggggtattttgacttcaacagattccactgccacttttcaccacgtgactggcagcgactcatcaacaacaactggggattccggcccaagaggctcaacttcaagctcttcaacatccaagtcaaggaggtcacgcagaatgaaggcaccaggaccatcgccaataaccttaccagcacgattcaggtctttacggactcggaataccagctcccgtacgtgctcggctcggcgcaccagggctgcctgcctccgttcccggcggacgtcttcatgattcctcagtacgggtacctgactctgaacaatggcagtcaggctgtgggccggtcgtccttctactgcctggagtactttccttctcaaatgctgagaacgggcaacaactttgaattcagctacaacttcgaggacgtgcccttccacagcagctacgcgcacagccagagcctggaccggctgatgaaccctctcatcgaccagtacttgtactacctgtcccggactcaaagcacgggcggtactgcaggaactcagcagttgctattttctcaggccgggcctaacaacatgtcggctcaggccaagaactggctacccggtccctgctaccggcagcaacgcgtctccacgacactgtcgcagaacaacaacagcaactttgcctggacgggtgccaccaagtatcatctgaatggcagagactctctggtgaatcctggcgttgccatggctacccacagggacgacgaagagcgattttttccatccagcggagtcttaatgtttgggagacagggagctggaagagacaacgtggactatagcagcgtgatgctaaccagcgaggaagaaataaggaccaccaacccagtggccacagaacagtacggcgtggtggccgataacctgcaacagcaaaacgccgctcctattgtaggggccgtcaatagtcaaggagccttacctggcatggtgtggcagaaccgggacgtgtacctgcagggtcccatctgggccaagattcctcatacggacggcaactttcatccctcgccgctgatgggaggctttggactgaagcatccgcctcctcagatcctgattaaaaacacacctgttcccgcggatcctccgaccaccttcaatcaggccaagctggcttctttcatcacgcagtacagtaccggccaggtcagcgtggagatcgagtgggagctgcagaaggagaacagcaaacgctggaacccagagattcagtacacttccaactactacaaatctacaaatgtggactttgctgtcaatactgagggtacttattccgagcctcgccccattggcacccgttacctcacccgtaatctgtaa

SEQ ID NO: 906 - DNA, 2217 bp, Artificial Sequence
  source: /note="Description of Artificial Sequence: Synthetic polynucleotide"
atggctgccgatggttatcttccagattggctcgaggacaacctctctgagggcattcgcgagtggtgggacctgaaacctggagccccgaaacccaaagccaaccagcaaaggcaggacaacggccggggtctggtgcttcctggctacaggtacctcggacccttcaacggactcgacaagggggagcccgtcaacgcggcggacgcagcggccctcgagcacgacagggcctacgaccagcagctccaagcgggtgacaatccgtacctgcggtataatcacgccgacgccgagtttcaggagcgtctgcaagaagatacgtcttttgggggcaacctcgggcgcgcagtcttccaggccaaaaagcgggttctcgaacctctgggcctggttgaatcgccggttaggacggctcctggaaagaagagaccggtagagccatcaccccagcgctctccagactcctctacgggcatcggcaagagaggccagcagcccgcaaaaaagagactcaattttgggcagactggcgactcagagtcagtccccgaccctcaaccaatcggagaaccaccagcagccccctctggtgtgggacctaatacaatggctgcaggcggtggcgctccaatggcagacaataacgaaggcgccgacggagtgggtagttcctcaggaaattggcattgcgattccacatggctgggcgacagagtcatcaccaccagcacccgcacctgggccctgcccacctacaacaaccacctctacaggcaaatctccaacgggacctcgggaggaagcaccaacgacaacacctacttcggctacagcaccccctgggggtattttgacttcaacagattccactgccacttttcaccacgtgactggcagcgactcatcaacaacaactggggattccggcccaagaggctcaacttcaagctcttcaacatccaagtcaaggaggtcacgcagaatgaaggcaccaggaccatcgccaataaccttaccagcacgattcaggtctttacggactcggaataccagctcccgtacgtgctcggctcggcgcaccagggctgcctgcctccgttcccggcggacgtcttcatgattcctcagtacgggtacctgactctgaacaatggcagtcaggctgtgggccggtcgtccttctactgcctggagtactttccttctcaaatgctgagaacgggcaacaactttgaattcagctacaacttcgaggacgtgcccttccacagcagctacgcgcacagccagagcctggaccggctgatgaaccctctcatcgaccagtacttgtactacctgtcccggactcaaagcacgggcggtactgcaggaactcagcagttgctattttctcaggccgggcctaacaacatgtcggctcaggccaagaactggctacccggtccctgctaccggcagcaacgcgtctccacgacactgtcgcagaacaacaacagcaactttgcctggacgggtgccaccaagtatcatctgaatggcagagactctctggtgaatcctggcgttgccatggctacccacagggacgacgaagagcgattttttccatccagcggagtcttaatgtttgggaaacagggagctggaagagacaacgtggactatagcagcgtgatgctaaccagcgaggaagaaataaggaccaccaacccagtggccacagaacagtacggcgtggtggccgataacctgcaacagcaaaacgccgctcctattgtaggggccgtcaatagtcaaggagccttacctggcatggtgtggcagaaccgggacgtgtacctgcagggtcccatctgggccaagattcctcatacggacggcaactttcatccctcgccgctgatgggaggctttggactgaagcatccgcctcctcagatcctgattaaaaacacacctgttcccgcggatcctccgaccaccttcaatcaggccaggctggcttctttcatcacgcagtacagtaccggccaggtcagcgtggagatcgagtgggagctgcagaaggagaacagcaaacgctggaacccagagattcagtacacttccaactactacaaatctacaaatgtggactttgctgtcaatactgagggtacttattccgagcctcgccccattggcacccgttacctcacccgtaatctgtaa

SEQ ID NO: 907 - DNA, 2217 bp, Artificial Sequence
  source: /note="Description of Artificial Sequence: Synthetic polynucleotide"
atggctgccgatggttatcttccagattggctcgaggacaacctctctgagggcattcgcgagtggtgggacctgaaacctggagccccgaaacccaaagccaaccagcaaaggcaggacaacggccggggtctggtgcttcctggctacaggtacctcggacccttcaacggactcgacaagggggagcccgtcaacgcggcggacgcagcggccctcgagcacgacagggcctacgaccagcagctccaagcgggtgacaatccgtacctgcggtataatcacgccgacgccgagtttcaggagcgtctgcaagaagatacgtcttttgggggcaacctcgggcgcgcagtcttccaggccaaaaagcgggttctcgaacctctgggcctggttgaatcgccggttaggacggctcctggaaagaagagaccggtagagccatcaccccagcgctctccagactcctctacgggcatcggcaagaaaggccagcagcccgcaaaaaagagactcaattttgggcagactggcgactcagagtcagtccccgaccctcaaccaatcggagaaccaccagcagccccctctggtgtgggacctaatacaatggctgcaggcggtggcgctccaatggcagacaataacgaaggcgccgacggagtgggtagttcctcaggaaattggcattgcgattccacatggctgggcgacagagtcatcaccaccagcacccgcacctgggccctgcccacctacaacaaccacctctacaggcaaatctccaacgggacctcgggaggaagcaccaacgacaacacctacttcggctacagcaccccctgggggtattttgacttcaacagattccactgccacttttcaccacgtgactggcagcgactcatcaacaacaactggggattccggcccaagaggctcaacttcaagctcttcaacatccaagtcaaggaggtcacgcagaatgaaggcaccaggaccatcgccaataaccttaccagcacgattcaggtctttacggactcggaataccagctcccgtacgtgctcggctcggcgcaccagggctgcctgcctccgttcccggcggacgtcttcatgattcctcagtacgggtacctgactctgaacaatggcagtcaggctgtgggccggtcgtccttctactgcctggagtactttccttctcaaatgctgagaacgggcaacaactttgaattcagctacaacttcgaggacgtgcccttccacagcagctacgcgcacagccagagcctggaccggctgatgaaccctctcatcgaccagtacttgtactacctgtcccggactcaaagcacgggcggtactgcaggaactcagcagttgctattttctcaggccgggcctaacaacatgtcggctcaggccaagaactggctacccggtccctgctaccggcagcaacgcgtctccacgacactgtcgcagaacaacaacagcaactttgcctggacgggtgccaccaagtatcatctgaatggcagagactctctggtgaatcctggcgttgccatggctacccacagggacgacgaagagcgattttttccatccagcggagtcttaatgtttgggagacagggagctggaagagacaacgtggactatagcagcgtgatgctaaccagcgaggaagaaataaggaccaccaacccagtggccacagaacagtacggcgtggtggccgataacctgcaacagcaaaacgccgctcctattgtaggggccgtcaatagtcaaggagccttacctggcatggtgtggcagaaccgggacgtgtacctgcagggtcccatctgggccaagattcctcatacggacggcaactttcatccctcgccgctgatgggaggctttggactgaagcatccgcctcctcagatcctgattaaaaacacacctgttcccgcggatcctccgaccaccttcaatcaggccaggctggcttctttcatcacgcagtacagtaccggccaggtcagcgtggagatcgagtgggagctgcagaaggagaacagcaaacgctggaacccagagattcagtacacttccaactactacaaatctacaaatgtggactttgctgtcaatactgagggtacttattccgagcctcgccccattggcacccgttacctcacccgtaatctgtaa

SEQ ID NO: 908 - protein, 744 aa, Artificial Sequence
  source: /note="Description of Artificial Sequence: Synthetic polypeptide"
MAADGYLPDWLEDTLSEGIRQWWKLKPGPPPPKPAERHKDDSRGLVLPGYKYLGPFNGLDKGEPVNEADAAALEHDKAYDRQLDSGDNPYLKYNHADAEFQERLKEDTSFGGNLGRAVFQAKKRVLEPLGLVEEPVKTAPGKKRPVEHSPVEPDSSSGTGKAGQQPARKRLNFGQTGDADSVPDPQPLGQPPAAPSGLGTNTMATGSGAPMADNNEGADGVGNSSGNWHCDSTWMGDRVITTSTRTWALPTYNNHLYKQISSQSGASNDNHYFGYSTPWGYFDFNRFHCHFSPRDWQRLINNNWGFRPKRLNFKLFNIQVKEVTQNDGTTTIANNLTSTVQVFTDSEYQLPYVLGSAHQGCLPPFPADVFMVPQYGYLTLNNGSQAVGRSSFYCLEYFPSQMLRTGNNFTFSYTFEDVPFHSSYAHSQSLDRLMNPLIDQYLYYLSRTNTPSGTTTQSRLQFSQAGASDIRDQSRNWLPGPCYRQQRVSKTSADNNNSEYSWTGATKYHLNGRDSLVNPGPAMASHKDDEEKFFPQSGVLIFGKQGSEKTNVDIEKVMITDEEEIRTTNPVATEQYGSVSTNLQRGQRGESGHGYFAQAATADVNTQGVLPGMVWQDRDVYLQGPIWAKIPHTDGHFHPSPLMGGFGLKHPPPQILIKNTPVPANPSTTFSAAKFASFITQYSTGQVSVEIEWELQKENSKRWNPEIQYTSNYNKSVNVDFTVDTNGVYSEPRPIGTRYLTRNL

SEQ ID NO: 909 - DNA, 8359 bp, Artificial Sequence
  source: /note="Description of Artificial Sequence: Synthetic polynucleotide"
catcatcaataatataccttattttggattgaagccaatatgataatgagggggtggagtttgtgacgtggcgcggggcgtgggaacggggcgggtgacgtagtagctctagaggtcctgtattagaggtcacgtgagtgttttgcgacattttgcgacaccatgtggtcacgctgggtatttaagcccgagtgagcacgcagggtctccattttgaagcgggaggtttgaacgcgcagccgccatgccggggttttacgagattgtgattaaggtccccagcgaccttgacgagcatctgcccggcatttctgacagctttgtgaactgggtggccgagaaggaatgggagttgccgccagattctgacatggatctgaatctgattgagcaggcacccctgaccgtggccgagaagctgcagcgcgactttctgacggaatggcgccgtgtgagtaaggcaccggaggcccttttctttgtgcaatttgagaagggagagagctacttccacatgcacgtgctcgtggaaaccaccggggtgaaatccatggttttgggacgtttcctgagtcagattcgcgaaaaactgattcagagaatttaccgcgggatcgagccgactttgccaaactggttcgcggtcacaaagaccagaaatggcgccggaggcgggaacaaggtggtggatgagtgctacatccccaattacttgctccccaaaacccagcctgagctccagtgggcgtggactaatatggaacagtatttaagcgcctgtttgaatctcacggagcgtaaacggttggtggcgcagcatctgacgcacgtgtcgcagacgcaggagcagaacaaagagaatcagaatcccaattctgatgcgccggtgatcagatcaaaaacttcagccaggtacatggagctggtcgggtggctcgtggacaaggggattacctcggagaagcagtggatccaggaggaccaggcctcatacatctccttcaatgcggcctccaactcgcggtcccaaatcaaggctgccttggacaatgcgggaaagattatgagcctgactaaaaccgcccccgactacctggtgggccagcagcccgtggaggacatttccagcaatcggatttataaaattttggaactaaacgggtacgatccccaatatgcggcttccgtctttctgggatgggccacgaaaaagttcggcaagaggaacaccatctggctgtttgggcctgcaactaccgggaagaccaacatcgcggaggccatagcccacactgtgcccttctacgggtgcgtaaactggaccaatgagaactttcccttcaacgactgtgtcgacaagatggtgatctggtgggaggaggggaagatgaccgccaaggtcgtggagtcggccaaagccattctcggaggaagcaaggtgcgcgtggaccagaaatgcaagtcctcggcccagatagacccgactcccgtgatcgtcacctccaacaccaacatgtgcgccgtgattgacgggaactcaacgaccttcgaacaccagcagccgttgcaagaccggatgttcaaatttgaactcacccgccgtctggatcatgactttgggaaggtcaccaagcaggaagtcaaagactttttccggtgggcaaaggatcacgtggttgaggtggagcatgaattctacgtcaaaaagggtggagccaagaaaagacccgcccccagtgacgcagatataagtgagcccaaacgggtgcgcgagtcagttgcgcagccatcgacgtcagacgcggaagcttcgatcaactacgcagacaggtaccaaaacaaatgttctcgtcacgtgggcatgaatctgatgctgtttccctgcagacaatgcgagagaatgaatcagaattcaaatatctgcttcactcacggacagaaagactgtttagagtgctttcccgtgtcagaatctcaacccgtttctgtcgtcaaaaaggcgtatcagaaactgtgctacattcatcatatcatgggaaaggtgccagacgcttgcactgcctgcgatctggtcaatgtggatttggatgactgcatctttgaacaataaatgatttaaatcaggtatggctgccgatggttatcttccagattggctcgaggacactctctctgaaggaataagacagtggtggaagctcaaacctggcccaccaccaccaaagcccgcagagcggcataaggacgacagcaggggtcttgtgcttcctgggtacaagtacctcggacccttcaacggactcgacaagggagagccggtcaacgaggcagacgccgcggccctcgagcacgacaaagcctacgaccggcagctcgacagcggagacaacccgtacctcaagtacaaccacgccgacgcggagtttcaggagcgccttaaagaagatacgtcttttgggggcaacctcggacgagcagtcttccaggcgaaaaagagggttcttgaacctctgggcctggttgaggaacctgttaagacggctccgggaaaaaagaggccggtagagcactctcctgtggagccagactcctcctcgggaaccggaaaggcgggccagcagcctgcaagaaaaagattgaattttggtcagactggagacgcagactcagtacctgacccccagcctctcggacagccaccagcagccccctctggtctgggaactaatacgatggctacaggcagtggcgcaccaatggcagacaataacgagggcgccgacggagtgggtaattcctcgggaaattggcattgcgattccacatggatgggcgacagagtcatcaccaccagcacccgaacctgggccctgcccacctacaacaaccacctctacaaacaaatttccagccaatcaggagcctcgaacgacaatcactactttggctacagcaccccttgggggtattttgacttcaacagattccactgccacttttcaccacgtgactggcaaagactcatcaacaacaactggggattccgacccaagagactcaacttcaagctctttaacattcaagtcaaagaggtcacgcagaatgacggtacgacgacgattgccaataaccttaccagcacggttcaggtgtttactgactcggagtaccagctcccgtacgtcctcggctcggcgcatcaaggatgcctcccgccgttcccagcagacgtcttcatggtgccacagtatggatacctcaccctgaacaacgggagtcaggcagtaggacgctcttcattttactgcctggagtactttccttctcagatgctgcgtaccggaaacaactttaccttcagctacacttttgaggacgttcctttccacagcagctacgctcacagccagagtctggaccgtctcatgaatcctctcatcgaccagtacctgtattacttgagcagaacaaacactccaagtggaaccaccacgcagtcaaggcttcagttttctcaggccggagcgagtgacattcgggaccagtctaggaactggcttcctggaccctgttaccgccagcagcgagtatcaaagacatctgcggataacaacaacagtgaatactcgtggactggagctaccaagtaccacctcaatggcagagactctctggtgaatccgggcccggccatggcaagccacaaggacgatgaagaaaagttttttcctcagagcggggttctcatctttgggaagcaaggctcagagaaaacaaatgtggacattgaaaaggtcatgattacagacgaagaggaaatcaggacaaccaatcccgtggctacggagcagtatggttctgtatctaccaacctccagagaggccagagaggcgagtctggtcatggttattttgcccaggcggccaccgcagatgtcaacacacaaggcgttcttccaggcatggtctggcaggacagagatgtgtaccttcaggggcccatctgggcaaagattccacacacggacggacattttcacccctctcccctcatgggtggattcggacttaaacaccctcctccacagattctcatcaagaacaccccggtacctgcgaatccttcgaccaccttcagtgcggcaaagtttgcttccttcatcacacagtactccacgggacaggtcagcgtggagatcgagtgggagctgcagaaggaaaacagcaaacgctggaatcccgaaattcagtacacttccaactacaacaagtctgttaatgtggactttactgtggacactaatggcgtgtattcagagcctcgccccattggcaccagatacctgactcgtaatctgtaattgcttgttaatcaataaaccgtttaattcgtttcagttgaactttggtctctgcgtatttctttcttatctagtttccatgctctagaggtcctgtattagaggtcacgtgagtgttttgcgacattttgcgacaccatgtggtcacgctgggtatttaagcccgagtgagcacgcagggtctccattttgaagcgggaggtttgaacgcgcagccaccacggcggggttttacgagattgtgattaaggtccccagcgaccttgacgagcatctgcccggcatttctgacagctttgtgaactgggtggccgagaaggaatgggagttgccgccagattctgacatggatctgaatctgattgagcaggcacccctgaccgtggccgagaagctgcatcgctggcgtaatagcgaagaggcccgcaccgatcgcccttcccaacagttgcgcagcctgaatggcgaatggcgattccgttgcaatggctggcggtaatattgttctggatattaccagcaaggccgatagtttgagttcttctactcaggcaagtgatgttattactaatcaaagaagtattgcgacaacggttaatttgcgtgatggacagactcttttactcggtggcctcactgattataaaaacacttctcaggattctggcgtaccgttcctgtctaaaatccctttaatcggcctcctgtttagctcccgctctgattctaacgaggaaagcacgttatacgtgctcgtcaaagcaaccatagtacgcgccctgtagcggcgcattaagcgcggcgggtgtggtggttacgcgcagcgtgaccgctacacttgccagcgccctagcgcccgctcctttcgctttcttcccttcctttctcgccacgttcgccggctttccccgtcaagctctaaatcgggggctccctttagggttccgatttagtgctttacggcacctcgaccccaaaaaacttgattagggtgatggttcacgtagtgggccatcgccctgatagacggtttttcgccctttgacgttggagtccacgttctttaatagtggactcttgttccaaactggaacaacactcaaccctatctcggtctattcttttgatttataagggattttgccgatttcggcctattggttaaaaaatgagctgatttaacaaaaatttaacgcgaattttaacaaaatattaacgtttacaatttaaatatttgcttatacaatcttcctgtttttggggcttttctgattatcaaccggggtacatatgattgacatgctagttttacgattaccgttcatcgattctcttgtttgctccagactctcaggcaatgacctgatagcctttgtagagacctctcaaaaatagctaccctctccggcatgaatttatcagctagaacggttgaatatcatattgatggtgatttgactgtctccggcctttctcacccgtttgaatctttacctacacattactcaggcattgcatttaaaatatatgagggttctaaaaatttttatccttgcgttgaaataaaggcttctcccgcaaaagtattacagggtcataatgtttttggtacaaccgatttagctttatgctctgaggctttattgcttaattttgctaattctttgccttgcctgtatgatttattggatgttggaattcctgatgcggtattttctccttacgcatctgtgcggtatttcacaccgcatatggtgcactctcagtacaatctgctctgatgccgcatagttaagccagccccgacacccgccaacacccgctgacgcgccctgacgggcttgtctgctcccggcatccgcttacagacaagctgtgaccgtctccgggagctgcatgtgtcagaggttttcaccgtcatcaccgaaacgcgcgagacgaaagggcctcgtgatacgcctatttttataggttaatgtcatgataataatggtttcttagacgtcaggtggcacttttcggggaaatgtgcgcggaacccctatttgtttatttttctaaatacattcaaatatgtatccgctcatgagacaataaccctgataaatgcttcaataatattgaaaaaggaagagtatgagtattcaacatttccgtgtcgcccttattcccttttttgcggcattttgccttcctgtttttgctcacccagaaacgctggtgaaagtaaaagatgctgaagatcagttgggtgcacgagtgggttacatcgaactggatctcaacagcggtaagatccttgagagttttcgccccgaagaacgttttccaatgatgagcacttttaaagttctgctatgtggcgcggtattatcccgtattgacgccgggcaagagcaactcggtcgccgcatacactattctcagaatgacttggttgagtactcaccagtcacagaaaagcatcttacggatggcatgacagtaagagaattatgcagtgctgccataaccatgagtgataacactgcggccaacttacttctgacaacgatcggaggaccgaaggagctaaccgcttttttgcacaacatgggggatcatgtaactcgccttgatcgttgggaaccggagctgaatgaagccataccaaacgacgagcgtgacaccacgatgcctgtagcaatggcaacaacgttgcgcaaactattaactggcgaactacttactctagcttcccggcaacaattaatagactggatggaggcggataaagttgcaggaccacttctgcgctcggcccttccggctggctggtttattgctgataaatctggagccggtgagcgtgggtctcgcggtatcattgcagcactggggccagatggtaagccctcccgtatcgtagttatctacacgacggggagtcaggcaactatggatgaacgaaatagacagatcgctgagataggtgcctcactgattaagcattggtaactgtcagaccaagtttactcatatatactttagattgatttaaaacttcatttttaatttaaaaggatctaggtgaagatcctttttgataatctcatgaccaaaatcccttaacgtgagttttcgttccactgagcgtcagaccccgtagaaaagatcaaaggatcttcttgagatcctttttttctgcgcgtaatctgctgcttgcaaacaaaaaaaccaccgctaccagcggtggtttgtttgccggatcaagagctaccaactctttttccgaaggtaactggcttcagcagagcgcagataccaaatactgtccttctagtgtagccgtagttaggccaccacttcaagaactctgtagcaccgcctacatacctcgctctgctaatcctgttaccagtggctgctgccagtggcgataagtcgtgtcttaccgggttggactcaagacgatagttaccggataaggcgcagcggtcgggctgaacggggggttcgtgcacacagcccagcttggagcgaacgacctacaccgaactgagatacctacagcgtgagctatgagaaagcgccacgcttcccgaagggagaaaggcggacaggtatccggtaagcggcagggtcggaacaggagagcgcacgagggagcttccagggggaaacgcctggtatctttatagtcctgtcgggtttcgccacctctgacttgagcgtcgatttttgtgatgctcgtcaggggggcggagcctatggaaaaacgccagcaacgcggcctttttacggttcctggccttttgctggccttttgctcacatgttctttcctgcgttatcccctgattctgtggataaccgtattaccgcctttgagtgagctgataccgctcgccgcagccgaacgaccgagcgcagcgagtcagtgagcgaggaagcggaagagcgcccaatacgcaaaccgcctctccccgcgcgttggccgattcattaatgcagaattcc

SEQ ID NO: 910 - protein, 736 aa, Artificial Sequence
  source: /note="Description of Artificial Sequence: Synthetic polypeptide"
MAADGYLPDWLEDNLSEGIREWWDLKPGAPKPKANQQKQDDGRGLVLPGYKYLGPFNGLDKGEPVNAADAAALEHDKAYDQQLKAGDNPYLRYNHADAEFQERLQEDTSFGGNLGRAVFQAKKRVLEPLGLVEEGAKTAPGKKRPVEQSPQEPDSSSGIGKKGQQPAKKRLNFGQTGDSESVPDPQPLGEPPAAPSGVGSNTMAAGGGAPMADNNEGADGVGNASGNWHCDSTWLGDRVITTSTRTWALPTYNNHLYKQISSQSGASTNDNTYFGYSTPWGYFDFNRFHCHFSPRDWQRLINNNWGFRPKRLNFKLFNIQVKEVTTNDGTTTIANNLTSTVQVFTDSEYQLPYVLGSAHQGCLPPFPADVFMIPQYGYLTLNNGSQAVGRSSFYCLEYFPSQMLRTGNNFEFSYTFEDVPFHSSYAHSQSLDRLMNPLIDQYLYYLSRTQTTSGTAGNRTLQFSQAGPSSMANQAKNWLPGPCYRQQRVSKTANQNNNSNFAWTGATKYHLNGRDSLVNPGPAMATHKDDEDKFFPMSGVLIFGKQGAGNSNVDLDNVMITSEEEIKTTNPVATEQYGTVATNLQSSNTAPATGTVNSQGALPGMVWQNRDVYLQGPIWAKIPHTDGHFHPSPLMGGFGLKHPPPQILIKNTPVPANPPTTFSPAKFASFITQYSTGQVSVEIEWELQKENSKRWNPEIQYTSNYNKSTNVDFAVDTNGVYSEPRPIGTRYLTRNL

SEQ ID NO: 911 - DNA, 2208 bp, Artificial Sequence
  source: /note="Description of Artificial Sequence: Synthetic polynucleotide"
atggctgccgatggttatcttccagattggctcgaggacaacctctctgagggcattcgcgagtggtgggacttgaaacctggagccccgaaacccaaagccaaccagcaaaagcaggacgacggccggggtctggtgcttcctggctacaagtacctcggacccttcaacggactcgacaagggggagcccgtcaacgcggcggacgcagcggccctcgagcacgacaaggcctacgaccagcagctcaaagcgggtgacaatccgtacctgcggtataaccacgccgacgccgagtttcaggagcgtctgcaagaagatacgtcttttgggggcaacctcgggcgagcagtcttccaggccaagaagcgggttctcgaacctctcggtctggttgaggaaggcgctaagacggctcctggaaagaagagaccggtagagcaatcaccccaggaaccagactcctcttcgggcatcggcaagaaaggccagcagcccgcgaagaagagactcaactttgggcagacaggcgactcagagtcagtgcccgaccctcaaccactcggagaaccccccgcagccccctctggtgtgggatctaatacaatggcagcaggcggtggcgctccaatggcagacaataacgaaggcgccgacggagtgggtaacgcctcaggaaattggcattgcgattccacatggctgggcgacagagtcatcaccaccagcacccgaacctgggccctccccacctacaacaaccacctctacaagcaaatctccagccaatcgggagcaagcaccaacgacaacacctacttcggctacagcaccccctgggggtattttgactttaacagattccactgccacttctcaccacgtgactggcagcgactcatcaacaacaactggggattccggcccaagagactcaacttcaagctcttcaacatccaggtcaaggaggtcacgacgaatgatggcaccacgaccatcgccaataaccttaccagcacggttcaggtctttacggactcggaataccagctcccgtacgtcctcggctctgcgcaccagggctgcctgcctccgttcccggcggacgtcttcatgattcctcagtacgggtacctgactctgaacaatggcagtcaggccgtgggccgttcctccttctactgcctggagtactttccttctcaaatgctgagaacgggcaacaactttgagttcagctacacgtttgaggacgtgccttttcacagcagctacgcgcacagccaaagcctggaccggctgatgaaccccctcatcgaccagtacctgtactacctgtctcggactcagaccacgagtggtaccgcaggaaatcggacgttgcaattttctcaggccgggcctagtagcatggcgaatcaggccaaaaactggctacccgggccctgctaccggcagcaacgcgtctccaagacagcgaatcaaaataacaacagcaactttgcctggaccggtgccaccaagtatcatctgaatggcagagactctctggtaaatcccggtcccgctatggcaacccacaaggacgacgaagacaaattttttccgatgagcggagtcttaatatttgggaaacagggagctggaaatagcaacgtggaccttgacaacgttatgataaccagtgaggaagaaattaaaaccaccaacccagtggccacagaacagtacggcacggtggccactaacctgcaatcgtcaaacaccgctcctgctacagggaccgtcaacagtcaaggagccttacctggcatggtctggcagaaccgggacgtgtacctgcagggtcctatctgggccaagattcctcacacggacggacactttcatccctcgccgctgatgggaggctttggactgaaacacccgcctcctcagatcctgattaagaatacacctgttcccgcgaatcctccaactaccttcagtccagctaagtttgcgtcgttcatcacgcagtacagcaccggacaggtcagcgtggaaattgaatgggagctgcagaaagaaaacagcaaacgctggaacccagagattcaatacacttccaactacaacaaatctacaaatgtggactttgctgttgacacaaatggcgtttattctgagcctcgccccatcggcacccgttacctcacccgtaatctg

SEQ ID NO: 912 - protein, 737 aa, Artificial Sequence
  source: /note="Description of Artificial Sequence: Synthetic polypeptide"
MAADGYLPDWLEDNLSEGIREWWDLKPGAPKPKANQQKQDDGRGLVLPGYKYLGPFNGLDKGEPVNAADAAALEHDKAYDQQLKAGDNPYLRYNHADAEFQERLQEDTSFGGNLGRAVFQAKKRVLEPLGLVEEGAKTAPGKKRPVEQSPQEPDSSTGIGKKGQQPAKKRLNFGQTGDSESVPDPQPLGEPPAAPSGVGSNTMAAGGGAPMADNNEGADGVGNASGNWHCDSTWLGDRVITTSTRTWALPTYNNHLYKQISNSQSGGSTNDNTYFGYSTPWGYFDFNRFHCHFSPRDWQRLINNNWGFRPKRLNFKLFNIQVKEVTTNDGTTTIANNLTSTVQVFTDSEYQLPYVLGSAHQGCLPPFPADVFMIPQYGYLTLNNGSQAVGRSSFYCLEYFPSQMLRTGNNFEFSYTFEDVPFHSSYAHSQSLDRLMNPLIDQYLYYLSRTQTTGGTAGNRTLQFSQAGPSSMANQAKNWLPGPCYRQQRVSKTTNQNNNSNFAWTGATKYHLNGRDSLVNPGVAMATHKDDEDRFFPSSGVLIFGKQGAGNDNVDLDNVMITSEEEIKTTNPVATEEYGVVATNLQSANTAPQTGTVNSQGALPGMVWQNRDVYLQGPIWAKIPHTDGNFHPSPLMGGFGLKHPPPQILIKNTPVPANPPTTFSPAKFASFITQYSTGQVSVEIEWELQKENSKRWNPEIQYTSNYNKSTNVDFAVDTEGVYSEPRPIGTRYLTRNL

SEQ ID NO: 913 - DNA, 2211 bp, Artificial Sequence
  source: /note="Description of Artificial Sequence: Synthetic polynucleotide"
atggctgccgatggttatcttccagattggctcgaggacaacctctctgagggcattcgcgagtggtgggacttgaaacctggagccccgaaacccaaagccaaccagcaaaagcaggacgacggccggggtctggtgcttcctggctacaagtacctcggacccttcaacggactcgacaagggggagcccgtcaacgcggcggacgcagcggccctcgagcacgacaaggcctacgaccagcagctcaaagcgggtgacaatccgtacctgcggtataaccacgccgacgccgagtttcaggagcgtctgcaagaagatacgtcttttgggggcaacctcgggcgagcagtcttccaggccaagaagcgggttctcgaacctctcggtctggttgaggaaggcgctaagacggctcctggaaagaagagaccggtagagcaatcaccccaggaaccagactcctctacgggcatcggcaagaaaggccagcagcccgcgaaaaagagactcaactttgggcagactggcgactcagagtcagtgcccgaccctcaaccactcggagaaccccccgcagccccctctggtgtgggatctaatacaatggctgcaggcggtggcgctccaatggcagacaataacgaaggcgccgacggagtgggtaatgcctcaggaaattggcattgcgattccacatggctgggcgacagagtcatcaccaccagcacccgaacctgggccctccccacctacaacaaccacctctacaagcaaatctccaacagccaatcgggaggaagcaccaacgacaacacctacttcggctacagcaccccctgggggtattttgactttaacagattccactgccacttctcaccacgtgactggcagcgactcatcaacaacaactggggattccggcccaagagactcaacttcaagctcttcaacatccaggtcaaggaggtcacgacgaatgatggcaccacgaccatcgccaataaccttaccagcacggttcaggtctttacggactcggaataccagctcccgtacgtcctcggctctgcgcaccagggctgcctgcctccgttcccggcggacgtcttcatgattcctcagtacgggtacctgactctgaacaatggcagtcaggccgtgggccgttcctccttctactgcctggagtactttccttctcaaatgctgagaacgggcaacaactttgagttcagctacacgtttgaggacgtgccttttcacagcagctacgcgcacagccaaagcctggaccggctgatgaaccccctcatcgaccagtacctgtactacctgtctcggactcagaccacgggaggtaccgcaggaaatcggacgttgcaattttctcaggccgggcctagtagcatggcgaatcaggccaaaaactggctacccgggccctgctaccggcagcaacgcgtctccaagacaacgaatcaaaataacaacagcaactttgcctggaccggtgccaccaagtatcatctgaatggcagagactctctggtaaatcccggtgtcgctatggcaacccacaaggacgacgaagaccgattttttccgtccagcggagtcttaatatttgggaaacagggagctggaaatgacaacgtggaccttgacaacgttatgataaccagtgaggaagaaattaaaaccaccaacccagtggccacagaagagtacggcgtggtggccactaacctgcaatcggcaaacaccgctcctcaaacagggaccgtcaacagtcaaggagccttacctggcatggtctggcagaaccgggacgtgtacctgcagggtcctatctgggccaagattcctcacacggacggaaactttcatccctcgccgctgatgggaggctttggactgaaacacccgcctcctcagatcctgattaagaatacacctgttcccgcgaatcctccaactaccttcagtccagctaagtttgcgtcgttcatcacgcagtacagcaccggacaggtcagcgtggaaattgaatgggagctgcagaaagaaaacagcaaacgctggaacccagagattcaatacacttccaactacaacaaatctacaaatgtggactttgctgttgacacagaaggcgtttattctgagcctcgccccatcggcacccgttacctcacccgtaatctg

SEQ ID NO: 914 - protein, 738 aa, Artificial Sequence
  source: /note="Description of Artificial Sequence: Synthetic polypeptide"
MAADGYLPDWLEDNLSEGIREWWDLKPGAPKPKANQQKQDDGRGLVLPGYKYLGPFNGLDKGEPVNAADAAALEHDKAYDQQLKAGDNPYLRYNHADAEFQERLQEDTSFGGNLGRAVFQAKKRVLEPLGLVEEGAKTAPGKKRPVEQSPQREPDSSTGIGKKGQQPAKKRLNFGQTGDSESVPDPQPLGEPPAAPSGVGSNTMAAGGGAPMADNNEGADGVGNSSGNWHCDSTWLGDRVITTSTRTWALPTYNNHLYKQISNGTSGGSTNDNTYFGYSTPWGYFDFNRFHCHFSPRDWQRLINNNWGFRPKRLNFKLFNIQVKEVTTNEGTKTIANNLTSTVQVFTDSEYQLPYVLGSAHQGCLPPFPADVFMIPQYGYLTLNNGSQAVGRSSFYCLEYFPSQMLRTGNNFQFSYTFEDVPFHSSYAHSQSLDRLMNPLIDQYLYYLSRTQTTGGTAGTQTLQFSQAGPSSMANQAKNWLPGPCYRQQRVSTTTNQNNNSNFAWTGATKYHLNGRDSLVNPGVAMATHKDDEDRFFPSSGVLIFGKQGAGNDNVDYSNVMITSEEEIKTTNPVATEEYGVVATNLQSANTAPQTGTVNSQGALPGMVWQNRDVYLQGPIWAKIPHTDGNFHPSPLMGGFGLKHPPPQILIKNTPVPADPPTTFNQAKLNSFITQYSTGQVSVEIEWELQKENSKRWNPEIQYTSNYYKSTNVDFAVNTEGVYSEPRPIGTRYLTRNL

SEQ ID NO: 915 - DNA, 2214 bp, Artificial Sequence
  source: /note="Description of Artificial Sequence: Synthetic polynucleotide"
atggctgccgatggttatcttccagattggctcgaggacaacctctctgagggcattcgcgagtggtgggacctgaaacctggagccccgaaacccaaagccaaccagcaaaagcaggacgacggccggggtctggtgcttcctggctacaagtacctcggacccttcaacggactcgacaagggggagcccgtcaacgcggcggacgcagcggccctcgagcacgacaaggcctacgaccagcagctcaaagcgggtgacaatccgtacctgcggtataatcacgccgacgccgagtttcaggagcgtctgcaagaagatacgtcttttgggggcaacctcgggcgagcagtcttccaggccaagaagcgggttctcgaacctctcggtctggttgaggaaggcgctaagacggctcctggaaagaagagaccggtagagcagtcaccacagcgtgagcccgactcctccacgggcatcggcaagaaaggccagcagcccgccaaaaagagactcaatttcggtcagactggcgactcagagtcagtccccgaccctcaacctctcggagaacctccagcagcgccctctggtgtgggatctaatacaatggctgcaggcggtggcgcaccaatggcagacaataacgaaggtgccgacggagtgggtaattcctcgggaaattggcattgcgattccacatggctgggcgacagagtcatcaccaccagcacccgaacctgggccctgcccacctacaacaaccacctctacaagcaaatctccaacgggacctcgggaggcagcaccaacgacaacacctactttggctacagcaccccctgggggtattttgactttaacagattccactgccacttctcaccacgtgactggcagcgactcatcaacaacaactggggattccggcccaagagactcaacttcaagctcttcaacatccaggtcaaagaggtcacgacgaatgaaggcaccaagaccatcgccaataacctcaccagcaccgtccaggtgtttacggactcggaataccagctgccgtacgtcctcggctctgcccaccagggctgcctgcctccgttcccggcggacgtcttcatgattcctcagtacggctacctgactctcaacaacggtagtcaggccgtgggacgttcctccttctactgcctggagtacttcccctctcagatgctgagaacgggcaacaactttcaattcagctacactttcgaggacgtgcctttccacagcagctacgcgcacagccagagtttggacaggctgatgaatcctctcatcgaccagtacctgtactacctgtcaagaacccagactacgggaggcacagcgggaacccagacgttgcagttttctcaggccgggcctagcagcatggcgaatcaggccaaaaactggctgcctggaccctgctacagacagcagcgcgtctccacgacaacgaatcaaaacaacaacagcaactttgcctggactggtgccaccaagtatcatctgaacggcagagactctctggtgaatccgggcgtcgccatggcaacccacaaggacgacgaggaccgcttcttcccatccagcggcgtcctcatatttggcaagcagggagctggaaatgacaacgtggactatagcaacgtgatgataaccagcgaggaagaaatcaagaccaccaaccccgtggccacagaagagtatggcgtggtggctactaacctacagtcggcaaacaccgctcctcaaacggggaccgtcaacagccagggagccttacctggcatggtctggcagaaccgggacgtgtacctgcagggtcctatttgggccaagattcctcacacagatggcaactttcacccgtctcctttaatgggcggctttggacttaaacatccgcctcctcagatcctcatcaaaaacactcctgttcctgcggatcctccaacaacgttcaaccaggccaagctgaattctttcatcacgcagtacagcaccggacaagtcagcgtggagatcgagtgggagctgcagaaggagaacagcaagcgctggaacccagagattcagtatacttccaactactacaaatctacaaatgtggactttgctgttaatactgagggtgtttactctgagcctcgccccattggcactcgttacctcacccgtaatctg

SEQ ID NO: 916 - protein, 738 aa, Artificial Sequence
  source: /note="Description of Artificial Sequence: Synthetic polypeptide"
MAADGYLPDWLEDNLSEGIREWWDLKPGAPKPKANQQKQDDGRGLVLPGYKYLGPFNGLDKGEPVNAADAAALEHDKAYDQQLKAGDNPYLRYNHADAEFQERLQEDTSFGGNLGRAVFQAKKRVLEPLGLVEEGAKTAPGKKRPVEQSPQREPDSSTGIGKKGQQPARKRLNFGQTGDSESVPDPQPLGEPPAAPSGVGSNTMAAGGGAPMADNNEGADGVGSSSGNWHCDSTWLGDRVITTSTRTWALPTYNNHLYKQISNGTSGGSTNDNTYFGYSTPWGYFDFNRFHCHFSPRDWQRLINNNWGFRPKRLNFKLFNIQVKEVTQNEGTKTIANNLTSTIQVFTDSEYQLPYVLGSAHQGCLPPFPADVFMIPQYGYLTLNNGSQAVGRSSFYCLEYFPSQMLRTGNNFQFSYTFEDVPFHSSYAHSQSLDRLMNPLIDQYLYYLSRTQTTGGTAGTQTLQFSQAGPSNMANQAKNWLPGPCYRQQRVSTTTSQNNNSNFAWTGATKYHLNGRDSLVNPGVAMATHKDDEDRFFPSSGILIFGKQGAGKDNVDYSNVMLTSEEEIKTTNPVATEEYGVVADNLQQQNTAPQIGTVNSQGALPGMVWQNRDVYLQGPIWAKIPHTDGNFHPSPLMGGFGLKHPPPQILIKNTPVPADPPTTFNQAKLNSFITQYSTGQVSVEIEWELQKENSKRWNPEIQYTSNYYKSTNVDFAVNTEGVYSEPRPIGTRYLTRNL

SEQ ID NO: 917 - DNA, 2214 bp, Artificial Sequence
  source: /note="Description of Artificial Sequence: Synthetic polynucleotide"
atggctgccgatggttatcttccagattggctcgaggacaacctctctgagggcattcgcgagtggtgggacctgaaacctggagccccgaaacccaaagccaaccagcaaaagcaggacgacggccggggtctggtgcttcctggctacaagtacctcggacccttcaacggactcgacaagggggagcccgtcaacgcggcggacgcagcggccctcgagcacgacaaggcctacgaccagcagctcaaagcgggtgacaatccgtacctgcggtataatcacgccgacgccgagtttcaggagcgtctgcaagaagatacgtcttttgggggcaacctcgggcgagcagtcttccaggccaagaagcgggttctcgaacctctcggtctggttgaggaaggcgctaagacggctcctggaaagaagagaccggtagagcagtcaccacagcgtgagcccgactcctccacgggcatcggcaagaaaggccagcagcccgccagaaagagactcaatttcggtcagactggcgactcagagtcagtccccgaccctcaacctctcggagaacctccagcagcgccctctggtgtgggatctaatacaatggctgcaggcggtggcgcaccaatggcagacaataacgaaggtgccgacggagtgggtagttcctcgggaaattggcattgcgattccacatggctgggcgacagagtcatcaccaccagcacccgaacctgggccctgcccacctacaacaaccacctctacaagcaaatctccaacgggacctcgggaggcagcaccaacgacaacacctactttggctacagcaccccctgggggtattttgactttaacagattccactgccacttctcaccacgtgactggcagcgactcatcaacaacaactggggattccggcccaagagactcaacttcaagctcttcaacatccaggtcaaagaggtcacgcagaatgaaggcaccaagaccatcgccaataacctcaccagcaccatccaggtgtttacggactcggaataccagctgccgtacgtcctcggctctgcccaccagggctgcctgcctccgttcccggcggacgtcttcatgattcctcagtacggctacctgactctcaacaacggtagtcaggccgtgggacgttcctccttctactgcctggagtacttcccctctcagatgctgagaacgggcaacaactttcaattcagctacactttcgaggacgtgcctttccacagcagctacgcgcacagccagagtttggacaggctgatgaatcctctcatcgaccagtacctgtactacctgtcaagaacccagactacgggaggcacagcgggaacccagacgttgcagttttctcaggccgggcctagcaacatggcgaatcaggccaaaaactggctgcctggaccctgctacagacagcagcgcgtctccacgacaacgtcgcaaaacaacaacagcaactttgcctggactggtgccaccaagtatcatctgaacggcagagactctctggtgaatccgggcgtcgccatggcaacccacaaggacgacgaggaccgcttcttcccatccagcggcatcctcatatttggcaagcagggagctggaaaagacaacgtggactatagcaacgtgatgctaaccagcgaggaagaaatcaagaccaccaaccccgtggccacagaagagtatggcgtggtggctgataacctacagcagcaaaacaccgctcctcaaatagggaccgtcaacagccagggagccttacctggcatggtctggcagaaccgggacgtgtacctgcagggtcctatttgggccaagattcctcacacagatggcaactttcacccgtctcctttaatgggcggctttggacttaaacatccgcctcctcagatcctcatcaaaaacactcctgttcctgcggatcctccaacaacgttcaaccaggccaagctgaattctttcatcacgcagtacagcaccggacaagtcagcgtggagatcgagtgggagctgcagaaggagaacagcaagcgctggaacccagagattcagtatacttccaactactacaaatctacaaatgtggactttgctgttaatactgagggtgtttactctgagcctcgccccattggcactcgttacctcacccgtaatctg

SEQ ID NO: 918 - protein, 738 aa, Artificial Sequence
  source: /note="Description of Artificial Sequence: Synthetic polypeptide"
MAADGYLPDWLEDNLSEGIREWWDLKPGAPKPKANQQKQDDGRGLVLPGYKYLGPFNGLDKGEPVNAADAAALEHDKAYDQQLKAGDNPYLRYNHADAEFQERLQEDTSFGGNLGRAVFQAKKRVLEPLGLVEEGAKTAPGKKRPVEPSPQRSPDSSTGIGKKGQQPARKRLNFGQTGDSESVPDPQPIGEPPAAPSGVGSGTMAAGGGAPMADNNEGADGVGSSSGNWHCDSTWLGDRVITTSTRTWALPTYNNHLYKQISNGTSGGSTNDNTYFGYSTPWGYFDFNRFHCHFSPRDWQRLINNNWGFRPKRLNFKLFNIQVKEVTQNEGTKTIANNLTSTIQVFTDSEYQLPYVLGSAHQGCLPPFPADVFMIPQYGYLTLNNGSQAVGRSSFYCLEYFPSQMLRTGNNFEFSYTFEDVPFHSSYAHSQSLDRLMNPLIDQYLYYLSRTQSTGGTAGTQQLLFSQAGPSNMSAQAKNWLPGPCYRQQRVSTTLSQNNNSNFAWTGATKYHLNGRDSLVNPGVAMATHKDDEDRFFPSSGILMFGKQGAGKDNVDYSNVMLTSEEEIKTTNPVATEQYGVVADNLQQQNTAPIVGAVNSQGALPGMVWQNRDVYLQGPIWAKIPHTDGNFHPSPLMGGFGLKHPPPQILIKNTPVPADPPTTFNQAKLNSFITQYSTGQVSVEIEWELQKENSKRWNPEIQYTSNYYKSTNVDFAVNTEGVYSEPRPIGTRYLTRNL

SEQ ID NO: 919 - DNA, 2214 bp, Artificial Sequence
  source: /note="Description of Artificial Sequence: Synthetic polynucleotide"
atggctgccgatggttatcttccagattggctcgaggacaacctctctgagggcattcgcgagtggtgggacctgaaacctggagccccgaaacccaaagccaaccagcaaaagcaggacgacggccggggtctggtgcttcctggctacaagtacctcggacccttcaacggactcgacaagggggagcccgtcaacgcggcggacgcagcggccctcgagcacgacaaggcctacgaccagcagctcaaagcgggtgacaatccgtacctgcggtataatcacgccgacgccgagtttcaggagcgtctgcaagaagatacgtcttttgggggcaacctcgggcgagcagtcttccaggccaagaagcgggttctcgaacctctcggtctggttgaggaaggcgctaagacggctcctggaaagaagagaccggtagagccgtcaccacagcgttcccccgactcctccacgggcatcggcaagaaaggccagcagcccgccagaaagagactcaatttcggtcagactggcgactcagagtcagtccccgaccctcaacctatcggagaacctccagcagcgccctctggtgtgggatctggtacaatggctgcaggcggtggcgcaccaatggcagacaataacgaaggtgccgacggagtgggtagttcctcgggaaattggcattgcgattccacatggctgggcgacagagtcatcaccaccagcacccgaacctgggccctgcccacctacaacaaccacctctacaagcaaatctccaacgggacctcgggaggcagcaccaacgacaacacctactttggctacagcaccccctgggggtattttgactttaacagattccactgccacttctcaccacgtgactggcagcgactcatcaacaacaactggggattccggcccaagagactcaacttcaagctcttcaacatccaggtcaaagaggtcacgcagaatgaaggcaccaagaccatcgccaataacctcaccagcaccatccaggtgtttacggactcggaataccagctgccgtacgtcctcggctctgcccaccagggctgcctgcctccgttcccggcggacgtcttcatgattcctcagtacggctacctgactctcaacaacggtagtcaggccgtgggacgttcctccttctactgcctggagtacttcccctctcagatgctgagaacgggcaacaactttgagttcagctacactttcgaggacgtgcctttccacagcagctacgcgcacagccagagtttggacaggctgatgaatcctctcatcgaccagtacctgtactacctgtcaagaacccagtctacgggaggcacagcgggaacccagcagttgctgttttctcaggccgggcctagcaacatgtcggctcaggccaaaaactggctgcctggaccctgctacagacagcagcgcgtctccacgacactgtcgcaaaacaacaacagcaactttgcctggactggtgccaccaagtatcatctgaacggcagagactctctggtgaatccgggcgtcgccatggcaacccacaaggacgacgaggaccgcttcttcccatccagcggcatcctcatgtttggcaagcagggagctggaaaagacaacgtggactatagcaacgtgatgctaaccagcgaggaagaaatcaagaccaccaaccccgtggccacagaacagtatggcgtggtggctgataacctacagcagcaaaacaccgctcctattgtgggggccgtcaacagccagggagccttacctggcatggtctggcagaaccgggacgtgtacctgcagggtcctatttgggccaagattcctcacacagatggcaactttcacccgtctcctttaatgggcggctttggacttaaacatccgcctcctcagatcctcatcaaaaacactcctgttcctgcggatcctccaacaacgttcaaccaggccaagctgaattctttcatcacgcagtacagcaccggacaagtcagcgtggagatcgagtgggagctgcagaaggagaacagcaagcgctggaacccagagattcagtatacttccaactactacaaatctacaaatgtggactttgctgttaatactgagggtgtttactctgagcctcgccccattggcactcgttacctcacccgtaatctg

SEQ ID NO: 920 - protein, 738 aa, Artificial Sequence
  source: /note="Description of Artificial Sequence: Synthetic polypeptide"
MAADGYLPDWLEDNLSEGIREWWDLKPGAPKPKANQQKQDDGRGLVLPGYKYLGPFNGLDKGEPVNAADAAALEHDKAYDQQLKAGDNPYLRYNHADAEFQERLQEDTSFGGNLGRAVFQAKKRVLEPLGLVEEGAKTAPGKKRPVEPSPQRSPDSSTGIGKKGQQPAKKRLNFGQTGDSESVPDPQPIGEPPAGPSGLGSGTMAAGGGAPMADNNEGADGVGSSSGNWHCDSTWLGDRVITTSTRTWALPTYNNHLYKQISNGTSGGSTNDNTYFGYSTPWGYFDFNRFHCHFSPRDWQRLINNNWGFRPKRLNFKLFNIQVKEVTQNEGTKTIANNLTSTIQVFTDSEYQLPYVLGSAHQGCLPPFPADVFMIPQYGYLTLNNGSQAVGRSSFYCLEYFPSQMLRTGNNFEFSYTFEDVPFHSSYAHSQSLDRLMNPLIDQYLYYLSRTQSTGGTAGTQQLLFSQAGPSNMSAQAKNWLPGPCYRQQRVSTTLSQNNNSNFAWTGATKYHLNGRDSLVNPGVAMATHKDDEERFFPSSGVLMFGKQGAGKDNVDYSSVMLTSEEEIKTTNPVATEQYGVVADNLQQQNTAPIVGAVNSQGALPGMVWQNRDVYLQGPIWAKIPHTDGNFHPSPLMGGFGLKHPPPQILIKNTPVPADPPTTFSQAKLASFITQYSTGQVSVEIEWELQKENSKRWNPEIQYTSNYYKSTNVDFAVNTEGTYSEPRPIGTRYLTRNL

SEQ ID NO: 921 - DNA, 2214 bp, Artificial Sequence
  source: /note="Description of Artificial Sequence: Synthetic polynucleotide"
atggctgccgatggttatcttccagattggctcgaggacaacctctctgagggcattcgcgagtggtgggacttgaaacctggagccccgaaacccaaagccaaccagcaaaagcaggacgacggccggggtctggtgcttcctggctacaagtacctcggacccttcaacggactcgacaagggggagcccgtcaacgcggcggacgcagcggccctcgagcacgacaaggcctacgaccagcagctcaaagcgggtgacaatccgtacctgcggtataaccacgccgacgccgagtttcaggagcgtctgcaagaagatacgtcttttgggggcaacctcgggcgagcagtcttccaggccaagaagcgggttctcgaacctctcggtctggttgaggaaggcgctaagacggctcctggaaagaagagaccggtagagccatcaccccagcgttctccagactcctctacgggcatcggcaagaaaggccagcagcccgcgaaaaagagactcaactttgggcagactggcgactcagagtcagtgcccgaccctcaaccaatcggagaaccccccgcaggcccctctggtctgggatctggtacaatggctgcaggcggtggcgctccaatggcagacaataacgaaggcgccgacggagtgggtagttcctcaggaaattggcattgcgattccacatggctgggcgacagagtcatcaccaccagcacccgaacctgggccctccccacctacaacaaccacctctacaagcaaatctccaacgggacttcgggaggaagcaccaacgacaacacctacttcggctacagcaccccctgggggtattttgactttaacagattccactgccacttctcaccacgtgactggcagcgactcatcaacaacaactggggattccggcccaagagactcaacttcaagctcttcaacatccaggtcaaggaggtcacgcagaatgaaggcaccaagaccatcgccaataaccttaccagcacgattcaggtctttacggactcggaataccagctcccgtacgtcctcggctctgcgcaccagggctgcctgcctccgttcccggcggacgtcttcatgattcctcagtacgggtacctgactctgaacaatggcagtcaggccgtgggccgttcctccttctactgcctggagtactttccttctcaaatgctgagaacgggcaacaactttgagttcagctacacgtttgaggacgtgccttttcacagcagctacgcgcacagccaaagcctggaccggctgatgaaccccctcatcgaccagtacctgtactacctgtctcggactcagtccacgggaggtaccgcaggaactcagcagttgctattttctcaggccgggcctagtaacatgtcggctcaggccaaaaactggctacccgggccctgctaccggcagcaacgcgtctccacgacactgtcgcaaaataacaacagcaactttgcctggaccggtgccaccaagtatcatctgaatggcagagactctctggtaaatcccggtgtcgctatggcaacccacaaggacgacgaagagcgattttttccgtccagcggagtcttaatgtttgggaaacagggagctggaaaagacaacgtggactatagcagcgttatgctaaccagtgaggaagaaattaaaaccaccaacccagtggccacagaacagtacggcgtggtggccgataacctgcaacagcaaaacaccgctcctattgtaggggccgtcaacagtcaaggagccttacctggcatggtctggcagaaccgggacgtgtacctgcagggtcctatctgggccaagattcctcacacggacggaaactttcatccctcgccgctgatgggaggctttggactgaaacacccgcctcctcagatcctgattaagaatacacctgttcccgcggatcctccaactaccttcagtcaagctaagctggcgtcgttcatcacgcagtacagcaccggacaggtcagcgtggaaattgaatgggagctgcagaaagaaaacagcaaacgctggaacccagagattcaatacacttccaactactacaaatctacaaatgtggactttgctgttaacacagaaggcacttattctgagcctcgccccatcggcacccgttacctcacccgtaatctg

SEQ ID NO: 922 - protein, 737 aa, Artificial Sequence
  source: /note="Description of Artificial Sequence: Synthetic polypeptide"
MAADGYLPDWLEDNLSEGIREWWDLKPGAPKPKANQQKQDDGRGLVLPGYKYLGPFNGLDKGEPVNAADAAALEHDKAYDQQLKAGDNPYLRYNHADAEFQERLQEDTSFGGNLGRAVFQAKKRVLEPLGLVEEGAKTAPGKKRPVEPSPQRSPDSSTGIGKKGQQPAKKRLNFGQTGDSESVPDPQPLGEPPAAPSGVGSGTMAAGGGAPMADNNEGADGVGNASGNWHCDSTWLGDRVITTSTRTWALPTYNNHLYKQISSQSAGSTNDNTYFGYSTPWGYFDFNRFHCHFSPRDWQRLINNNWGFRPKKLRFKLFNIQVKEVTTNDGVTTIANNLTSTVQVFSDSEYQLPYVLGSAHQGCLPPFPADVFMIPQYGYLTLNNGSQSVGRSSFYCLEYFPSQMLRTGNNFEFSYTFEDVPFHSSYAHSQSLDRLMNPLIDQYLYYLARTQSTTGGTAGNRELQFYQAGPSTMAEQAKNWLPGPCYRQQRVSKTLDQNNNSNFAWTGATKYHLNGRNSLVNPGVAMATHKDDEDRFFPSSGVLIFGKTGAANKTTLENVLMTNEEEIKTTNPVATEEYGVVSSNLQSANTAPQTQTVNSQGALPGMVWQNRDVYLQGPIWAKIPHTDGNFHPSPLMGGFGLKHPPPQILIKNTPVPANPPEVFTPAKFASFITQYSTGQVSVEIEWELQKENSKRWNPEIQYTSNYDKSTNVDFAVDSEGVYSEPRPIGTRYLTRNL

SEQ ID NO: 923 - DNA, 2211 bp, Artificial Sequence
  source: /note="Description of Artificial Sequence: Synthetic polynucleotide"
atggctgccgatggttatcttccagattggctcgaggacaacctctctgagggcattcgcgagtggtgggacctgaaacctggagccccgaaacccaaagccaaccagcaaaagcaggacgacggccggggtctggtgcttcctggctacaagtacctcggacccttcaacggactcgacaagggggagcccgtcaacgcggcggacgcagcggccctcgagcacgacaaggcctacgaccagcagctcaaagcgggtgacaatccgtacctgcggtataaccacgccgacgccgagtttcaggagcgtctgcaagaagatacgtcatttgggggcaacctcgggcgagcagtcttccaggccaagaagcgggttctcgaacctctcggtctggttgaggaaggcgctaagacggctcctggaaagaagagaccggtagagccgtcacctcagcgttcccccgactcctccacgggcatcggcaagaaaggccagcagcccgccaaaaagagactcaatttcggtcagactggcgactcagagtcagtccccgaccctcaacctctcggagaacctccagcagcgccctctggtgtgggatctggtacaatggctgcaggcggtggcgcaccaatggcagacaataacgaaggtgccgacggagtgggtaatgcctcaggaaattggcattgcgattccacatggctgggcgacagagtcattaccaccagcacccgaacctgggccctgcccacctacaacaaccacctctacaagcaaatctccagtcaaagtgcaggtagtaccaacgacaacacctacttcggctacagcaccccctgggggtattttgactttaacagattccactgccacttctcaccacgtgactggcagcgactcatcaacaacaactggggattccggcccaagaagctgcggttcaagctcttcaacatccaggtcaaggaggtcacgacgaatgacggcgttacgaccatcgctaataaccttaccagcacggttcaggtattctcggactcggaataccagctgccgtacgtcctcggctctgcgcaccagggctgcctgcctccgttcccggcggacgtcttcatgattcctcagtacggctacctgactctcaacaatggcagtcagtctgtgggacgttcctccttctactgcctggagtacttcccctctcagatgctgagaacgggcaacaactttgagttcagctacaccttcgaggacgtgcctttccacagcagctacgcacacagccagagcctggaccggctgatgaatcccctcatcgaccagtacttgtactacctggccagaacacagagtaccacaggaggcacagctggcaatcgggaactgcagttttaccaggccgggccttcaactatggccgaacaagccaagaattggttacctggaccttgctaccggcaacaaagagtctccaaaacgctggatcaaaacaacaacagcaactttgcttggactggtgccaccaaatatcacctgaacggcagaaactcgttggttaatcccggcgtcgccatggcaactcacaaggacgacgaggaccgctttttcccatccagcggagtcctgatttttggaaaaactggagcagctaacaaaactacattggaaaatgtgttaatgacaaatgaagaagaaattaaaactactaatcctgtagccacggaagaatacggggtagtcagcagcaacttacaatcggctaatactgcaccccagacacaaactgtcaacagccagggagccttacctggcatggtctggcagaaccgggacgtgtacctgcagggtcccatctgggccaagattcctcacacggatggcaactttcacccgtctcctttgatgggcggctttggacttaaacatccgcctcctcagatcctgatcaagaacactcccgttcccgctaatcctccggaggtgtttactcctgccaagtttgcttcgttcatcacacagtacagcaccggacaagtcagcgtggaaatcgagtgggagctgcagaaggaaaacagcaagcgctggaacccggagattcagtacacctccaactatgataagtcgactaatgtggactttgccgttgacagcgagggtgtttactctgagcctcgccctattggcactcgttacctcacccgtaatctg

SEQ ID NO: 924 - protein, 735 aa, Artificial Sequence
  source: /note="Description of Artificial Sequence: Synthetic polypeptide"
MAADGYLPDWLEDNLSEGIREWWDLKPGAPKPKANQQKQDDGRGLVLPGYKYLGPFNGLDKGEPVNAADAAALEHDKAYDQQLKAGDNPYLRYNHADAEFQERLQEDTSFGGNLGRAVFQAKKRVLEPLGLVEEGAKTAPGKKRPVEQSPQEPDSSSGIGKSGQQPAKKRLNFGQTGDSESVPDPQPLGEPPAAPSGVGSNTMASGGGAPMADNNEGADGVGNASGNWHCDSTWLGDRVITTSTRTWALPTYNNHLYKQISSQSGASNDNHYFGYSTPWGYFDFNRFHCHFSPRDWQRLINNNWGFRPKRLNFKLFNIQVKEVTTNDGTTTIANNLTSTVQVFTDSEYQLPYVLGSAHQGCLPPFPADVFMIPQYGYLTLNNGSQAVGRSSFYCLEYFPSQMLRTGNNFTFSYTFEDVPFHSSYAHSQSLDRLMNPLIDQYLYYLSRTQTTSGTAQNRELQFSQAGPSSMANQAKNWLPGPCYRQQRVSKTANDNNNSNFAWTGATKYHLNGRDSLVNPGPAMASHKDDEDKFFPMSGVLIFGKQGAGASNVDLDNVMITDEEEIKTTNPVATEQYGTVATNLQSSNTAPATGTVNSQGALPGMVWQDRDVYLQGPIWAKIPHTDGHFHPSPLMGGFGLKHPPPQILIKNTPVPANPPTTFSPAKFASFITQYSTGQVSVEIEWELQKENSKRWNPEIQYTSNYNKSANVDFTVDTNGVYSEPRPIGTRYLTRNL

SEQ ID NO: 925 - DNA, 2205 bp, Artificial Sequence
  source: /note="Description of Artificial Sequence: Synthetic polynucleotide"
atggctgccgatggttatcttccagattggctcgaggacaacctctctgagggcattcgcgagtggtgggacttgaaacctggagccccgaaacccaaagccaaccagcaaaagcaggacgacggccggggtctggtgcttcctggctacaagtacctcggacccttcaacggactcgacaagggggagcccgtcaacgcggcggatgcagcggccctcgagcacgacaaggcctacgaccagcagctcaaagcgggtgacaatccgtacctgcggtataaccacgccgacgccgagtttcaggagcgtctgcaagaagatacgtcttttgggggcaacctcgggcgagcagtcttccaggccaagaagagggttctcgaacctcttggtctggttgaggaaggtgctaagacggctcctggaaagaaacgtccggtagagcagtcgccacaagagccagactcctcctcgggcattggcaagtcaggccagcagcccgctaaaaagagactcaattttggtcagactggcgactcagagtcagtccccgacccacaacctctcggagaacctccagcagccccctctggtgtgggatctaatacaatggcttcaggcggtggcgcaccaatggcagacaataacgaaggcgccgacggagtgggtaatgcctcaggaaattggcattgcgattccacatggctgggcgacagagtcatcaccaccagcacccgaacatgggccttgcccacctataacaaccacctctacaagcaaatctccagtcaatcaggggccagcaacgacaaccactacttcggctacagcaccccctgggggtattttgatttcaacagattccactgccatttctcaccacgtgactggcagcgactcatcaacaacaattggggattccggcccaagagactcaacttcaagctcttcaacatccaagtcaaggaggtcacgacgaatgatggcaccacgaccatcgctaataaccttaccagcacggttcaagtcttcacggactcggagtaccagttgccgtacgtcctcggctctgcgcaccagggctgcctccctccgttcccggcggacgtgttcatgattccgcagtacggctacctaacgctcaacaatggcagccaggcagtgggacggtcatccttttactgcctggaatatttcccatcgcagatgctgagaacgggcaataactttaccttcagctacaccttcgaggacgtgcctttccacagcagctacgcgcacagccagagcctggaccggctgatgaatcctctcatcgaccagtacctgtattacctgagcagaactcagactacgtccggaactgcccaaaacagggagttgcagtttagccaggcgggtccatctagcatggctaatcaggccaaaaactggctacctggaccctgttaccggcagcagcgcgtttctaaaacagcaaatgacaacaacaacagcaactttgcctggactggtgctacaaaatatcaccttaatgggcgtgattctttagtcaaccctggccctgctatggcctcacacaaagacgacgaagacaagttctttcccatgagcggtgtcttgatttttggaaagcagggcgccggagcttcaaacgttgatttggacaatgtcatgatcacagacgaagaggaaatcaaaaccactaaccccgtggccaccgaacaatatgggactgtggcaaccaatctccagagcagcaacacagcccctgcgaccggaactgtgaattctcagggagccttacctggaatggtgtggcaagacagagacgtatacctgcagggtcctatttgggccaaaattcctcacacggatggacactttcacccgtctcctctcatgggcggctttggacttaagcacccgcctcctcagatcctcatcaaaaacacgcctgttcctgcgaatcctccgacaacgttttcgcctgcaaagtttgcttcattcatcacccagtattccacaggacaagtgagcgtggagattgaatgggagctgcagaaagaaaacagcaaacgctggaatcccgaaatacagtatacatctaactataataaatctgccaacgttgatttcactgtggacaccaatggagtttatagtgagcctcgccccattggcacccgttacctcacccgtaacctg

SEQ ID NO: 926 - protein, 735 aa, Artificial Sequence
  source: /note="Description of Artificial Sequence: Synthetic polypeptide"
MAADGYLPDWLEDNLSEGIREWWDLKPGAPQPKANQQHQDDGRGLVLPGYKYLGPFNGLDKGEPVNEADAAALEHDKAYDQQLKAGDNPYLKYNHADAEFQERLQEDTSFGGNLGRAVFQAKKRVLEPLGLVEEAAKTAPGKKRPVEQSPQEPDSSSGIGKSGQQPARKRLNFGQTGDSESVPDPQPLGEPPAAPSGVGSNTMASGGGAPMADNNEGADGVGNSSGNWHCDSTWLGDRVITTSTRTWALPTYNNHLYKQISSQSGASNDNHYFGYSTPWGYFDFNRFHCHFSPRDWQRLINNNWGFRPKKLNFKLFNIQVKEVTQNDGTTTIANNLTSTVQVFTDSEYQLPYVLGSAHQGCLPPFPADVFMIPQYGYLTLNNGSQAVGRSSFYCLEYFPSQMLRTGNNFTFSYTFEDVPFHSSYAHSQSLDRLMNPLIDQYLYYLSRTQTTSGTTQQSRLQFSQAGPSSMAQQAKNWLPGPCYRQQRVSKTANDNNNSNFAWTGATKYHLNGRDSLVNPGPAMASHKDDEEKFFPMHGVLIFGKQGTGASNVDLDNVMITDEEEIRTTNPVATEQYGTVATNLQSSNTAPATGTVNSQGALPGMVWQDRDVYLQGPIWAKIPHTDGHFHPSPLMGGFGLKHPPPQILIKNTPVPANPPTTFSPAKFASFITQYSTGQVSVEIEWELQKENSKRWNPEIQYTSNYNKSVNVDFTVDTNGVYSEPRPIGTRYLTRNL

SEQ ID NO: 927 - DNA, 2205 bp, Artificial Sequence
  source: /note="Description of Artificial Sequence: Synthetic polynucleotide"
atggctgctgacggttatcttccagattggctcgaggacaacctttctgaaggcattcgtgagtggtgggatctgaaacctggagcccctcaacccaaagcgaaccaacaacaccaggacgacggtcggggtcttgtgcttccgggttacaaatacctcggaccctttaacggactcgacaaaggagagccggtcaacgaggcggacgcggcagccctcgaacacgacaaagcttacgaccagcagctcaaggccggtgacaacccgtacctcaagtacaaccacgccgacgccgagtttcaggagcgtcttcaagaagatacgtcttttgggggcaaccttggcagagcagtcttccaggccaaaaagagggtccttgagcctcttggtctggttgaggaagcagctaaaacggctcctggaaagaagaggcctgtagaacagtctcctcaggaaccggactcatcatctggtattggcaaatcgggccaacagcctgccagaaaaagactaaatttcggtcagactggagactcagagtcagtcccagaccctcaacctctcggagaaccaccagcagccccctcaggtgtgggatctaatacaatggcttcaggcggtggcgcaccaatggcagacaataacgagggtgccgatggagtgggtaattcctcaggaaattggcattgcgattccacatggctgggcgacagagtcatcaccaccagcaccagaacctgggccctgcccacttacaacaaccatctctacaagcaaatctccagccaatcaggagcttcaaacgacaaccactactttggctacagcaccccttgggggtattttgactttaacagattccactgccacttctcaccacgtgactggcagcgactcattaacaacaactggggattccggcccaagaaactcaacttcaagctcttcaacatccaagttaaagaggtcacgcagaacgatggcacgacgactattgccaataaccttaccagcacggttcaagtgtttacggactcggagtatcagctcccgtacgtgctcgggtcggcgcaccaaggctgtctcccgccgtttccagcggacgtcttcatgatccctcagtatggatacctcaccctgaacaacggaagtcaagcggtgggacgctcatccttttactgcctggagtacttcccttcgcagatgctaaggactggaaataacttcacattcagctataccttcgaggatgtaccttttcacagcagctacgctcacagccagagtttggatcgcttgatgaatcctcttattgatcagtatctgtactacctgagcagaacgcaaacaacctctggaacaacccaacaatcacggctgcaatttagccaggctgggccttcgtctatggctcagcaggccaaaaattggctacctgggccctgctaccggcaacagagagtttcaaagactgctaacgacaacaacaacagtaactttgcttggacaggggccaccaaatatcatctcaatggccgcgactcgctggtgaatccaggaccagctatggccagtcacaaggacgatgaagaaaaatttttccctatgcacggcgttctaatatttggcaaacaagggacaggggcaagtaacgtagatttagataatgtaatgattacggatgaagaagagattcgtaccaccaatcctgtggcaacagagcagtatggaactgtggcaactaacttgcagagctcaaatacagctcccgcgactggaactgtcaatagtcagggggccttacctggcatggtgtggcaagatcgtgacgtgtaccttcaaggacctatctgggcaaagattcctcacacggatggacactttcatccttctcctctgatgggaggctttggactgaaacatccgcctcctcaaatcttgatcaaaaatactccggtaccggcaaatcctccgacgactttcagcccggccaagtttgcttcatttatcactcagtactccactggacaggtcagcgtggaaattgagtgggagctacagaaagaaaacagcaaacgttggaatccagagattcagtacacttccaactacaacaagtctgttaatgtggactttactgtagacactaatggtgtttatagtgaacctcgccctattggaacccggtatctcacacgaaacttg

SEQ ID NO: 928 - protein, 736 aa, Artificial Sequence
  source: /note="Description of Artificial Sequence: Synthetic polypeptide"
MAADGYLPDWLEDNLSEGIREWWDLKPGAPKPKANQQKQDDGRGLVLPGYKYLGPFNGLDKGEPVNAADAAALEHDKAYDQQLKAGDNPYLRYNHADAEFQERLQEDTSFGGNLGRAVFQAKKRVLEPLGLVEEGAKTAPGKKRPVEQSPQEPDSSSGIGKKGQQPARKRLNFGQTGDSESVPDPQPLGEPPAAPSGVGSNTMAAGGGAPMADNNEGADGVGNASGNWHCDSTWLGDRVITTSTRTWALPTYNNHLYKQISSQSGGSTNDNTYFGYSTPWGYFDFNRFHCHFSPRDWQRLINNNWGFRPKRLNFKLFNIQVKEVTTNDGTTTIANNLTSTVQVFTDSEYQLPYVLGSAHQGCLPPFPADVFMIPQYGYLTLNNGSQAVGRSSFYCLEYFPSQMLRTGNNFEFSYTFEDVPFHSSYAHSQSLDRLMNPLIDQYLYYLSRTQTTSGTAGNRTLQFSQAGPSSMANQAKNWLPGPCYRQQRVSKTANQNNNSNFAWTGATKYHLNGRDSLVNPGPAMATHKDDEDKFFPMSGVLIFGKQGAGNSNVDLDNVMITNEEEIKTTNPVATEQYGTVATNLQSANTAPATGTVNSQGALPGMVWQDRDVYLQGPIWAKIPHTDGHFHPSPLMGGFGLKHPPPQILIKNTPVPANPPTTFSPAKFASFITQYSTGQVSVEIEWELQKENSKRWNPEIQYTSNYNKSTNVDFAVDTNGVYSEPRPIGTRYLTRNL

SEQ ID NO: 929 - protein, 736 aa, Artificial Sequence
  source: /note="Description of Artificial Sequence: Synthetic polypeptide"
MAADGYLPDWLEDNLSEGIREWWDLKPGAPKPKANQQKQDDGRGLVLPGYKYLGPFNGLDKGEPVNAADAAALEHDKAYDQQLKAGDNPYLRYNHADAEFQERLQEDTSFGGNLGRAVFQAKKRVLEPLGLVEEGAKTAPGKKRPVEQSPQEPDSSSGIGKKGQQPAKKRLNFGQTGDSESVPDPQPLGEPPAAPSGVGSNTMASGGGAPMADNNEGADGVGNASGNWHCDSTWLGDRVITTSTRTWALPTYNNHLYKQISSQSGASTNDNTYFGYSTPWGYFDFNRFHCHFSPRDWQRLINNNWGFRPKRLNFKLFNIQVKEVTTNDGTTTIANNLTSTVQVFTDSEYQLPYVLGSAHQGCLPPFPADVFMIPQYGYLTLNNGSQAVGRSSFYCLEYFPSQMLRTGNNFQFSYTFEDVPFHSSYAHSQSLDRLMNPLIDQYLYYLSRTQTTSGTAGNRELQFSQAGPSSMANQAKNWLPGPCYRQQRVSKTTNQNNNSNFAWTGATKYHLNGRDSLVNPGPAMATHKDDEDKFFPMSGVLIFGKQGAGNSNVDLDNVMITNEEEIKTTNPVATEEYGTVATNLQSANTAPATGTVNSQGALPGMVWQNRDVYLQGPIWAKIPHTDGHFHPSPLMGGFGLKHPPPQILIKNTPVPANPPTTFSPAKFASFITQYSTGQVSVEIEWELQKENSKRWNPEIQYTSNYNKSTNVDFAVDTNGVYSEPRPIGTRYLTRNL

SEQ ID NO: 930 - protein, 736 aa, Artificial Sequence
  source: /note="Description of Artificial Sequence: Synthetic polypeptide"
MAADGYLPDWLEDNLSEGIREWWDLKPGAPKPKANQQKQDDGRGLVLPGYKYLGPFNGLDKGEPVNAADAAALEHDKAYDQQLKAGDNPYLRYNHADAEFQERLQEDTSFGGNLGRAVFQAKKRVLEPLGLVEEGAKTAPGKKRPVEQSPQEPDSSSGIGKKGQQPARKRLNFGQTGDSESVPDPQPLGEPPAAPSGVGSNTMAAGGGAPMADNNEGADGVGNASGNWHCDSTWLGDRVITTSTRTWALPTYNNHLYKQISSQSGGSTNDNTYFGYSTPWGYFDFNRFHCHFSPRDWQRLINNNWGFRPKRLNFKLFNIQVKEVTTNDGTTTIANNLTSTVQVFTDSEYQLPYVLGSAHQGCLPPFPADVFMIPQYGYLTLNNGSQAVGRSSFYCLEYFPSQMLRTGNNFEFSYTFEDVPFHSSYAHSQSLDRLMNPLIDQYLYYLSRTQTTSGTAGNRELQFSQAGPSSMANQAKNWLPGPCYRQQRVSKTTNQNNNSNFAWTGATKYHLNGRDSLVNPGPAMATHKDDEDKFFPMSGVLIFGKQGAGNSNVDLDNVMITSEEEIKTTNPVATEEYGTVATNLQSSNTAPATGTVNSQGALPGMVWQERDVYLQGPIWAKIPHTDGHFHPSPLMGGFGLKHPPPQILIKNTPVPANPPTTFSPAKFASFITQYSTGQVSVEIEWELQKENSKRWNPEIQYTSNYNKSTNVDFAVDTNGVYSEPRPIGTRYLTRNL

SEQ ID NO: 931 - protein, 736 aa, Artificial Sequence
  source: /note="Description of Artificial Sequence: Synthetic polypeptide"
MAADGYLPDWLEDNLSEGIREWWDLKPGAPKPKANQQKQDDGRGLVLPGYKYLGPFNGLDKGEPVNAADAAALEHDKAYDQQLKAGDNPYLRYNHADAEFQERLQEDTSFGGNLGRAVFQAKKRVLEPLGLVEEGAKTAPGKKRPVEQSPQEPDSSSGIGKKGQQPARKRLNFGQTGDSESVPDPQPLGEPPAAPSGVGSNTMASGGGAPMADNNEGADGVGNASGNWHCDSTWLGDRVITTSTRTWALPTYNNHLYKQISSQSGGSTNDNTYFGYSTPWGYFDFNRFHCHFSPRDWQRLINNNWGFRPKKLNFKLFNIQVKEVTTNDGTTTIANNLTSTVQVFTDSEYQLPYVLGSAHQGCLPPFPADVFMIPQYGYLTLNNGSQAVGRSSFYCLEYFPSQMLRTGNNFEFSYTFEDVPFHSSYAHSQSLDRLMNPLIDQYLYYLSRTQTTSGTAGNRELQFSQAGPSSMANQAKNWLPGPCYRQQRVSKTTNQNNNSNFAWTGATKYHLNGRDSLVNPGPAMATHKDDEDKFFPMSGVLIFGKQGAGNSNVDLDNVMITSEEEIKTTNPVATEEYGTVATNLQSANTAPATGTVNSQGALPGMVWQDRDVYLQGPIWAKIPHTDGHFHPSPLMGGFGLKHPPPQILIKNTPVPANPPTTFSPAKFASFITQYSTGQVSVEIEWELQKENSKRWNPEIQYTSNYNKSTNVDFAVDTNGVYSEPRPIGTRYLTRNL

SEQ ID NO: 932 - protein, 736 aa, Artificial Sequence
  source: /note="Description of Artificial Sequence: Synthetic polypeptide"
MAADGYLPDWLEDNLSEGIREWWDLKPGAPKPKANQQKQDDGRGLVLPGYKYLGPFNGLDKGEPVNAADAAALEHDKAYDQQLKAGDNPYLRYNHADAEFQERLQEDTSFGGNLGRAVFQAKKRVLEPLGLVEEGAKTAPGKKRPVEQSPQEPDSSSGIGKKGQQPARKRLNFGQTGDSESVPDPQPLGEPPAAPSGVGSNTMAAGGGAPMADNNEGADGVGNASGNWHCDSTWLGDRVITTSTRTWALPTYNNHLYKQISSQSGGSTNDNTYFGYSTPWGYFDFNRFHCHFSPRDWQRLINNNWGFRPKKLNFKLFNIQVKEVTTNDGTTTIANNLTSTVQVFTDSEYQLPYVLGSAHQGCLPPFPADVFMIPQYGYLTLNNGSQAVGRSSFYCLEYFPSQMLRTGNNFQFSYTFEDVPFHSSYAHSQSLDRLMNPLIDQYLYYLSRTQTTSGTAGNRTLQFSQAGPSSMANQAKNWLPGPCYRQQRVSKTTNQNNNSNFAWTGATKYHLNGRDSLVNPGPAMATHKDDEDKFFPMSGVLIFGKQGAGNSNVDLDNVMITNEEEIKTTNPVATEEYGTVATNLQSANTAPATGTVNSQGALPGMVWQDRDVYLQGPIWAKIPHTDGHFHPSPLMGGFGLKHPPPQILIKNTPVPANPPTTFSPAKFASFITQYSTGQVSVEIEWELQKENSKRWNPEIQYTSNYNKSTNVDFAVDTNGVYSEPRPIGTRYLTRNL

SEQ ID NO: 933 - protein, 736 aa, Artificial Sequence
  source: /note="Description of Artificial Sequence: Synthetic polypeptide"
MAADGYLPDWLEDNLSEGIREWWDLKPGAPKPKANQQKQDDGRGLVLPGYKYLGPFNGLDKGEPVNAADAAALEHDKAYDQQLKAGDNPYLRYNHADAEFQERLQEDTSFGGNLGRAVFQAKKRVLEPLGLVEEGAKTAPGKKRPVEQSPQEPDSSSGIGKKGQQPAKKRLNFGQTGDSESVPDPQPLGEPPAAPSGVGSNTMAAGGGAPMADNNEGADGVGNASGNWHCDSTWLGDRVITTSTRTWALPTYNNHLYKQISSQSGGSTNDNTYFGYSTPWGYFDFNRFHCHFSPRDWQRLINNNWGFRPKKLNFKLFNIQVKEVTTNDGTTTIANNLTSTVQVFTDSEYQLPYVLGSAHQGCLPPFPADVFMIPQYGYLTLNNGSQAVGRSSFYCLEYFPSQMLRTGNNFEFSYTFEDVPFHSSYAHSQSLDRLMNPLIDQYLYYLSRTQTTSGTAGNRTLQFSQAGPSSMANQAKNWLPGPCYRQQRVSKTANQNNNSNFAWTGATKYHLNGRDSLVNPGPAMATHKDDEDKFFPMSGVLIFGKQGAGNSNVDLDNVMITSEEEIKTTNPVATEQYGTVATNLQSSNTAPATGTVNSQGALPGMVWQNRDVYLQGPIWAKIPHTDGHFHPSPLMGGFGLKHPPPQILIKNTPVPANPPTTFSPAKFASFITQYSTGQVSVEIEWELQKENSKRWNPEIQYTSNYNKSTNVDFAVDTNGVYSEPRPIGTRYLTRNL

SEQ ID NO: 934 - protein, 736 aa, Artificial Sequence
  source: /note="Description of Artificial Sequence: Synthetic polypeptide"
MAADGYLPDWLEDNLSEGIREWWDLKPGAPKPKANQQKQDDGRGLVLPGYKYLGPFNGLDKGEPVNAADAAALEHDKAYDQQLKAGDNPYLRYNHADAEFQERLQEDTSFGGNLGRAVFQAKKRVLEPLGLVEEGAKTAPGKKRPVEQSPQEPDSSSGIGKKGQQPAKKRLNFGQTGDSESVPDPQPLGEPPAAPSGVGSNTMASGGGAPMADNNEGADGVGNASGNWHCDSTWLGDRVITTSTRTWALPTYNNHLYKQISSQSGGSTNDNTYFGYSTPWGYFDFNRFHCHFSPRDWQRLINNNWGFRPKKLNFKLFNIQVKEVTTNDGTTTIANNLTSTVQVFTDSEYQLPYVLGSAHQGCLPPFPADVFMIPQYGYLTLNNGSQAVGRSSFYCLEYFPSQMLRTGNNFEFSYTFEDVPFHSSYAHSQSLDRLMNPLIDQYLYYLSRTQTTSGTAGNRTLQFSQAGPSSMANQAKNWLPGPCYRQQRVSKTANQNNNSNFAWTGATKYHLNGRDSLVNPGPAMATHKDDEDKFFPMSGVLIFGKQGAGNSNVDLDNVMITSEEEIKTTNPVATEEYGTVATNLQSSNTAPATGTVNSQGALPGMVWQNRDVYLQGPIWAKIPHTDGHFHPSPLMGGFGLKHPPPQILIKNTPVPANPPTTFSPAKFASFITQYSTGQVSVEIEWELQKENSKRWNPEIQYTSNYNKSTNVDFAVDTNGVYSEPRPIGTRYLTRNL

SEQ ID NO: 935 - protein, 736 aa, Artificial Sequence
  source: /note="Description of Artificial Sequence: Synthetic polypeptide"
MAADGYLPDWLEDNLSEGIREWWDLKPGAPKPKANQQKQDDGRGLVLPGYKYLGPFNGLDKGEPVNAADAAALEHDKAYDQQLKAGDNPYLRYNHADAEFQERLQEDTSFGGNLGRAVFQAKKRVLEPLGLVEEGAKTAPGKKRPVEQSPQEPDSSSGIGKKGQQPAKKRLNFGQTGDSESVPDPQPLGEPPAAPSGVGSNTMASGGGAPMADNNEGADGVGNASGNWHCDSTWLGDRVITTSTRTWALPTYNNHLYKQISSQSGGSTNDNTYFGYSTPWGYFDFNRFHCHFSPRDWQRLINNNWGFRPKKLNFKLFNIQVKEVTTNDGTTTIANNLTSTVQVFTDSEYQLPYVLGSAHQGCLPPFPADVFMIPQYGYLTLNNGSQAVGRSSFYCLEYFPSQMLRTGNNFQFSYTFEDVPFHSSYAHSQSLDRLMNPLIDQYLYYLSRTQTTSGTAGNRELQFSQAGPSSMANQAKNWLPGPCYRQQRVSKTTNQNNNSNFAWTGATKYHLNGRDSLVNPGPAMATHKDDEDKFFPMSGVLIFGKQGAGNSNVDLDNVMITNEEEIKTTNPVATEQYGTVATNLQSANTAPATGTVNSQGALPGMVWQDRDVYLQGPIWAKIPHTDGHFHPSPLMGGFGLKHPPPQILIKNTPVPANPPTTFSPAKFASFITQYSTGQVSVEIEWELQKENSKRWNPEIQYTSNYNKSTNVDFAVDTNGVYSEPRPIGTRYLTRNL

SEQ ID NO: 936 - DNA, 2211 bp, Artificial Sequence
  source: /note="Description of Artificial Sequence: Synthetic polynucleotide"
atggctgccgatggttatcttccagattggctcgaggacaacctctctgagggcattcgcgagtggtgggacttgaaacctggagccccgaaacccaaagccaaccagcaaaagcaggacgacggccggggtctggtgcttcctggctacaagtacctcggacccttcaacggactcgacaagggggagcccgtcaacgcggcggacgcagcggccctcgagcacgacaaggcctacgaccagcagctcaaagcgggtgacaatccgtacctgcggtataaccacgccgacgccgagtttcaggagcgtctgcaagaagatacgtcttttgggggcaacctcgggcgagcagtcttccaggccaagaagcgggttctcgaacctctcggtctggttgaggaaggcgctaagacggctcctggaaagaagagaccggtagagcaatcaccccaggaaccagactcctcttcgggcatcggcaagaaaggccagcagcccgcgaaaaagagactcaactttgggcagacaggcgactcagagtcagtgcccgaccctcaaccactcggagaaccccccgcagccccctctggtgtgggatctaatacaatggctgcaggcggtggcgctccaatggcagacaataacgaaggcgccgacggagtgggtaacgcctcaggaaattggcattgcgattccacatggctgggcgacagagtcatcaccaccagcacccgaacctgggccctccccacctacaacaaccacctctacaagcaaatctccagccaatcgggagcaagcaccaacgacaacacctacttcggctacagcaccccctgggggtattttgactttaacagattccactgccacttctcaccacgtgactggcagcgactcatcaacaacaactggggattccggcccaagagactcaacttcaagctcttcaacatccaggtcaaggaggtcacgacgaatgatggcaccacgaccatcgccaataaccttaccagcacggttcaggtctttacggactcggaataccagctcccgtacgtcctcggctctgcgcaccagggctgcctgcctccgttcccggcggacgtcttcatgattcctcagtacgggtacctgactctgaacaatggcagtcaggccgtgggccgttcctccttctactgcctggagtactttccttctcaaatgctgagaacgggcaacaactttgagttcagctacacgtttgaggacgtgccttttcacagcagctacgcgcacagccaaagcctggaccggctgatgaaccccctcatcgaccagtacctgtactacctgtctcggactcagaccacgagtggtaccgcaggaaatcggacgttgcaattttctcaggccgggcctagtagcatggcgaatcaggccaaaaactggctacccgggccctgctaccggcagcaacgcgtctccaagacagcgaatcaaaataacaacagcaactttgcctggaccggtgccaccaagtatcatctgaatggcagagactctctggtaaatcccggtcccgctatggcaacccacaaggacgacgaagacaaattttttccgatgagcggagtcttaatatttgggaaacagggagctggaaatagcaacgtggaccttgacaacgttatgataaccagtgaggaagaaattaaaaccaccaacccagtggccacagaacagtacggcacggtggccactaacctgcaatcgtcaaacaccgctcctgctacagggaccgtcaacagtcaaggagccttacctggcatggtctggcagaaccgggacgtgtacctgcagggtcctatctgggccaagattcctcacacggacggacactttcatccctcgccgctgatgggaggctttggactgaaacacccgcctcctcagatcctgattaagaatacacctgttcccgcgaatcctccaactaccttcagtccagctaagtttgcgtcgttcatcacgcagtacagcaccggacaggtcagcgtggaaattgaatgggagctgcagaaagaaaacagcaaacgctggaacccagagattcaatacacttccaactacaacaaatctacaaatgtggactttgctgttgacacaaatggcgtttattctgagcctcgccccatcggcacccgttacctcacccgtaatctgtaa

SEQ ID NO: 937 - protein, 738 aa, Artificial Sequence; identical to SEQ ID NO: 16
  source: /note="Description of Artificial Sequence: Synthetic polypeptide"

SEQ ID NO: 938 - DNA, 2211 bp, Artificial Sequence
  source: /note="Description of Artificial Sequence: Synthetic polynucleotide"
atggctgccgatggttatcttccagattggctcgaggacaacctctctgagggcattcgcgagtggtgggacttgaaacctggagccccgaaacccaaagccaaccagcaaaagcaggacgacggccggggtctggtgcttcctggctacaagtacctcggacccttcaacggactcgacaagggggagcccgtcaacgcggcggacgcagcggccctcgagcacgacaaggcctacgaccagcagctcaaagcgggtgacaatccgtacctgcggtataaccacgccgacgccgagtttcaggagcgtctgcaagaagatacgtcttttgggggcaacctcgggcgagcagtcttccaggccaagaagcgggttctcgaaccttttggtctggttgaggaaggcgctaagacggctcctggaaagaaacgtccggtagagcagtcgccacaagagccagactcctcctcgggcatcggcaagacaggccagcagcccgctaaaaagagactcaattttggtcagactggcgactcagagtcagtccccgacccacaacctctcggagaacctccagcaacccccgctgctgtgggacctactacaatggcttcaggcggtggcgcaccaatggcagacaataacgaaggcgccgacggagtgggtaatgcctcaggaaattggcattgcgattccacatggctgggcgacagagtcatcaccaccagcacccgcacctgggccttgcccacctacaataaccacctctacaagcaaatctccagtgcttcaacgggggccagcaacgacaaccactacttcggctacagcaccccctgggggtattttgatttcaacagattccactgccacttttcaccgcgtgactggcagcgactcatcaacaacaattggggattccggcccaagagactcaacttcaagctcttcaacatccaagtcaaggaggtcacgacgagtgatggcgtcacaaccatcgctaataaccttaccagcacggttcaagtcttctcggactcggagtaccagcttccgtacgtcctcggctctgcgcaccagggctgcctccctccgttcccggcggacgtgttcatgattccgcaatacggctacctgacgctcaacaatggcagccaagccgtgggacgttcatccttttactgcctggaatatttcccttctcagatgctgagaacgggcaacaactttaccttcagctacacctttgaggaagtgcctttccacagcagctacgcgcacagccagagcctggaccggctgatgaatcctctcatcgaccaatacctgtattacctgaacagaactcaaaatcagtccggaagtgcccaaaacaaggacttgctgtttagccgtgggtctccagctggcatgtctgttcagcccaaaaactggctacctggaccctgttatcggcagcagcgcgtttctaaaacaaaaacaggcaacaacaacagcaattttacctggactggtgcttcaaaatataacctcaatgggcatgaatccatcatcaaccctggcactgctatggcctcacacaaagacgacgaagacaagttctttcccatgagcggtgtcatgatttttggaaaagagagcgccggagcttcaaacactgcattggacaatgtcatgattacagacgaagaggaaattaaagccactaaccctgtggccaccgaaagatttgggaccgtggcagtcaatttccagagcagcagcacacaccctgcgaccggagatgtgcatgttatgggagcattacctggcatggtgtggcaagatagagacgtgtacctgcagggtcccatctgggccaaaattcctcacacagatggacactttcacccgtctcctcttatgggcggctttggactcaagcacccgcctcctcagatcctcatcaaaaacacgcctgttcctgcgaatcctccggcggagttttcagctacaaagtttgcttcattcatcacccaatactccacaggacaagtgagtgtggaaattgaatgggagctgcagaaagaaaacagcaagcgctggaatcccgaagtgcagtacacatccaattatgcaaaatctgccaacgttgattttaccgtggacaacaatggactttatactgagcctcgccccattggcacccgttaccttacccgtcccctgtaa

SEQ ID NO: 939 - DNA, 2211 bp, Artificial Sequence; identical to SEQ ID NO: 938
  source: /note="Description of Artificial Sequence: Synthetic polynucleotide"

SEQ ID NO: 940 - DNA, 2202 bp, Artificial Sequence
  source: /note="Description of Artificial Sequence: Synthetic polynucleotide"
atgactgacggttaccttccagattggctagaggacaacctctctgaaggcgttcgagagtggtgggcgctgcaacctggagcccctaaacccaaggcaaatcaacaacatcaggacaacgctcggggtcttgtgcttccgggttacaaatacctcggacccggcaacggacttgacaagggggaacccgtcaacgcagcggacgcggcagccctcgaacacgacaaggcctacgaccagcagctcaaggccggtgacaacccctacctcaagtacaaccacgccgacgccgagtttcaggagcgtcttcaagaagatacgtcttttgggggcaacctcggacgagcagtcttccaggccaaaaagaggatccttgagcctctgggtctggttgaggaagcggctaagacggctcctggaaaaaagagacctgtagagcaatctccagcagaaccggactcctcttcgggcatcggcaaatcaggccagcagcccgctagaaaaagactgaattttggtcagactggcgacacagagtcagtcccagaccctcaaccactcggacaacctcccgcagccccctctggtgtgggatctactacaatggcttcaggcggtggcgcaccaatggcagacaataacgagggtgccgatggagtgggtaattcctcaggaaattggcattgcgattcccaatggctgggcgacagagtcatcaccaccagcacccgcacctgggccctgcccacctacaacaatcacctctacaagcaaatctccagccaatcaggagccaccaacgacaaccactactttggctacagcaccccctgggggtattttgacttcaacagattccactgccacttttcaccacgtgactggcaaagactcatcaacaacaactggggattccgacccaagagactcaacttcaagctctttaacattcaagtcaaagaggtcacgcagaatgacggtacgacgacgattgccaataaccttaccagcacggttcaggtgtttactgactccgagtaccagctcccgtacgtcctcggctcggcgcatcagggatgcctcccgccgttcccagcagacgtcttcatggtcccacagtatggatacctcaccctgaacaacgggagtcaggcggtaggacgctcttccttttactgcctggagtactttccttctcagatgctgcgtactggaaacaactttcagtttagctacacttttgaagacgtgcctttccacagcagctacgctcacagccaaagtctggaccgtctcatgaatcctctgatcgaccagtacctgtactatctgaacaggacacaaacagccagtggaactcagcagtctcggctactgtttagccaagctggacccaccagtatgtctcttcaagctaaaaactggctgcctggaccttgctacagacagcagcgtctgtcaaagcaggcaaacgacaacaacaacagcaactttccctggactggtgccaccaaatatcatctgaatggccgggactcattggtgaacccgggccctgctatggccagtcacaaggatgacaaagaaaagtttttccccatgcatggaaccctgatatttggtaaagaaggaacaaatgccaacaacgcggatttggaaaatgtcatgattacagatgaagaagaaatccgcaccaccaatcccgtggctacggagcagtacgggactgtgtcaaataatttgcaaaactcaaacgctggtccaactactggaactgtcaatcaccaaggagcgttacctggtatggtgtggcaggatcgagacgtgtacctgcagggacccatttgggccaagattcctcacaccgatggacactttcatccttctccactgatgggaggttttgggctcaaacacccgcctcctcagatcatgatcaaaaacactcccgttccagccaatcctcccacaaactttagtgcggcaaagtttgcttccttcatcacacagtactccacggggcaggtcagcgtggagatcgagtgggagctgcagaaggagaacagcaaacgctggaatcccgaaattcagtacacttccaactacaacaaatctgttaatgtggactttactgtggacactaatggtgtgtattcagagcctcgccccattggcaccagatacctgactcgtaatctgtaa

SEQ ID NO: 941 - DNA, 2211 bp, Artificial Sequence
  source: /note="Description of Artificial Sequence: Synthetic polynucleotide"
atggctgccgatggttatcttccagattggctcgaggacaacctctctgagggcattcgcgagtggtgggacttgaaacctggagccccgaaacccaaagccaaccagcaaaagcaggacgacggccggggtctggtgcttcctggctacaagtacctcggacccttcaacggactcgacaagggggagcccgtcaacgcggcggacgcagcggccctcgagcacgacaaggcctacgaccagcagctcaaagcgggtgacaatccgtacctgcggtataaccacgccgacgccgagtttcaggagcgtctgcaagaagatacgtcttttgggggcaacctcgggcgagcagtcttccaggccaagaagcgggttctcgaaccttttggtctggttgaggaaggcgctaagacggctcctggaaagaaacgtccggtagagcagtcgccacaagagccagactcctcctcgggcatcggcaagacaggccagcagcccgctaaaaagagactcaattttggtcagactggcgactcagagtcagtccccgacccacaacctctcggagaacctccagcaacccccgctgctgtgggacctactacaatggcttcaggcggtggcgcaccaatggcagacaataacgaaggcgccgacggagtgggtaatgcctcaggaaattggcattgcgattccacatggctgggcgacagagtcatcaccaccagcacccgcacctgggccttgcccacctacaataaccacctctacaagcaaatctccagtgcttcaacgggggccagcaacgacaaccactacttcggctacagcaccccctgggggtattttgatttcaacagattccactgccacttttcaccacgtgactggcagcgactcatcaacaacaattggggattccggcccaagagactcaacttcaagctcttcaacatccaagtcaaggaggtcacgacgaatgatggcgtcacaaccatcgctaataaccttaccagcacggttcaagtcttctcggactcggagtaccagcttccgtacgtcctcggctctgcgcaccagggctgcctccctccgttcccggcggacgtgttcatgattccgcaatacggctacctgacgctcaacaatggcagccaagccgtgggacgttcatccttttactgcctggaatatttcccttctcagatgctgagaacgggcaacaactttaccttcagctacacctttgaggaagtgcctttccacagcagctacgcgcacagccagagcctggaccggctgatgaatcctctcatcgaccaatacctgtattacctgaacagaactcaaaatcagtccggaagtgcccaaaacaaggacttgctgtttagccgtgggtctccagctggcatgtctgttcagcccaaaaactggctacctggaccctgttatcggcagcagcgcgtttctaaaacaaaaacagacaacaacaacagcaattttacctggactggtgcttcaaaatataacctcaatgggcgtgaatccatcatcaaccctggcactgctatggcctcacacaaagacgacgaagacaagttctttcccatgagcggtgtcatgatttttggaaaagagagcgccggagcttcaaacactgcattggacaatgtcatgattacagacgaagaggaaattaaagccactaaccctgtggccaccgaaagatttgggaccgtggcagtcaatttccagagcagcagcacagaccctgcgaccggagatgtgcatgttatgggagcattacctggcatggtgtggcaagatagagacgtgtacctgcagggtcccatctgggccaaaattcctcacacagatggacactttcacccgtctcctcttatgggcggctttggactcaagcacccgcctcctcagatcctcatcaaaaacacgcctgttcctgcgaatcctccggcggagttttcagctacaaagtttgcttcattcatcacccaatactccacaggacaagtgagtgtggaaattgaatgggagctgcagaaagaaaacagcaagcgctggaatcccgaagtgcagtacacatccaattatgcaaaatctgccaacgttgattttaccgtggacaacaatggactttatactgagcctcgccccattggcacccgttaccttacccgtcccctgtaa

SEQ ID NO: 942 - DNA, 2211 bp, Artificial Sequence
  source: /note="Description of Artificial Sequence: Synthetic polynucleotide"
atggctgccgatggttatcttccagattggctcgaggacaacctctctgagggcattcgcaagtggtgggacttgaaacctggagccccgaaacccaaagccaaccagcaaaagcaggacgacggccggggtctggtgcttcctggctacaagtacctcggacccttcaacggactcgacaagggggagcccgtcaacgcggcggacgcagcggccctcgagcacgacaaggcctacgaccagcagctcaaagcgggtgacaatccgtacctgcggtataaccacgccgacgccgagtttcaggagcgtctgcaagaagatacgtcttttgggggcaacctcgggagagcagtcttccaggccaagaagcgggttctcgaaccttttggtctggttgaggaaggcgctaagacggctcctggaaagaaacgtccggtagagcagtcgccacaagagccagactcctcctcgggcatcggcaagacaggccagcagcccgctaaaaagagactcaattttggtcagactggcgactcagagtcagtccccgacccacaacctctcggagaacctccagcaacccccgctgctgtgggacctactacaatggcttcaggcggtggcgcaccaatggcagacaataacgaaggcgccgacggagtgggtaatgcctcaggaaattggcattgcgattccacatggctgggcgacagagtcatcaccaccagcacccgcacctgggccttgcccacctacaataaccacctctacaagcaaatctccagtgcttcaacgggggccagcaacgacaaccactacttcggctacagcaccccctgggggtattttgatttcaacagattccactgccacttttcaccacgtgactggcagcgactcatcaacaacaattggggattccggcccaagagactcaacttcaagctcttcaacatccaagtcaaggaggtcacgacgaatgatggcgtcacaaccatcgctaataaccttaccagcacggttcaagtcttctcggactcggagtaccagcttccgtacgtcctcggctctgcgcaccagggctgcctccctccgttcccggcggacgtgttcatgattccgcaatacggctacctgacgctcaacaatggcagccaagccgtgggacgttcatccttttactgcctggaatatttcccttctcagatgctgagaacgggcaacaactttaccttcagctacacctttgaggaagtgcctttccacagcagctacgcgcacagccagagcctggaccggctgatgaatcctctcatcgaccaatacctgtattacctgaacagaactcaaaatcagtccggaagtgcccaaaacaaggacttgctgtttagccgtgggtctccagctggcatgtctgttcagcccaaaaactggctacctggaccctgttatcggcagcagcgcgtttctaaaacaaaaacagacaacaacaacagcaattttacctggactggtgcttcaaaatataacctcaatgggcgtgaatccatcatcaaccctggcactgctatggcctcacacaaagacgacaaagacaagttctttcccatgagcggtgtcatgatttttggaaaagagagcgccggagcttcaaacactgcattggacaatgtcatgattacagacgaagaggaaattaaagccactaaccctgtggccaccgaaagatttgggaccgtggcagtcaatttccagagcagcagcacagaccctgcgaccggagatgtgcatgttatgggagcattacctggcatggtgtggcaagatagagacgtgtacctgcagggtcccatttgggccaaaattcctcacacagatggacactttcacccgtctcctcttatgggcggctttggactcaagcacccgcctcctcagatcctcatcaaaaacacacctgttcctgcgaatcctccggcggagttttcagctacaaagtttgcttcattcatcacccaatactccacaggacaagtgagtgtggaaattgaatgggagctgcagaaagaaaacagcaagcgctggaatcccgaagtgcagtacacatccaattatgcaaaatctgccaacgttgattttaccgtggacaacaatggactttatactgagcctcgccccattggcacccgttaccttacccgtcccctgtaa

SEQ ID NO: 943 - DNA, 2211 bp, Artificial Sequence
  source: /note="Description of Artificial Sequence: Synthetic polynucleotide"
atggctgccgatggttatcttccagattggctcgaggacaacctctctgagggcattcgcgagtggtgggacttgaaacctggagccccgaaacccaaagccaaccagcaaaagcaggacaacggccggggtctggtgcttcctggctacaagtacctcggacccttcaacggactcgacaagggggagcccgtcaacgcggcggacgcagcggccctcgagcacgacaaggcctacgaccagcagctcaaagcgggtgacaatccgtacctgcggtataaccacgccgacgccgagtttcaggagcgtctgcaagaagatacgtcttttgggggcaacctcgggcgagcagtcttccaggccaagaagcgggttctcgaaccttttggtctggttgaggaaggcgctaagacggctcctggaaagaaacgtccggtagagcagtcgccacaagagccagactcctcctcgggcatcggcaagacaggccagcagcccgctaaaaagagactcaattttggtcagactggcgactcagagtcagtccccgacccacaacctctcggagaacctccagcaacccccgctgctgtgggacctactacaatggcttcaggcggtggcgcaccaatggcagacaataacgaaggcgccgacggagtgggtaatgcctcaggaaattggcattgcgattccacatggctgggcgacagagtcatcaccaccagcacccgcacctgggccttgcccacctacaataaccacctctacaagcaaatctccagtgcttcaacgggggccagcaacgacaaccactacttcggctacagcaccccctgggggtattttgatttcaacagattccactgccacttttcaccacgtgactggcagcgactcatcaacaacaattggggattccggcccaagagactcaacttcaagctcttcaacatccaagtcaaggaggtcacgacgaatgatggcgtcacaaccatcgctaataaccttaccagcacggttcaagtcttctcggactcggagtaccagcttccgtacgtcctcggctctgcgcaccagggctgcctccctccgttcccggcggacgtgttcatgattccgcaatacggctacctgacgctcaacaatggcagccaagccgtgggacgttcatccttttactgcctggaatatttcccttctcagatgctgagaacgggcaacaactttaccttcagctacacctttgaggaagtgcctttccacagcagctacgcgcacagccagagcctggaccggctgatgaatcctctcatcgaccaatacctgtattacctgaacagaactcaaaatcagtccggaagtgcccaaaacaaggacttgctgtttagccgtgggtctccagctggcatgtctgttcagcccaaaaactggctacctggaccctgttatcggcagcagcgcgtttctaaaacaaaaacagacaacaacaacagcaattttacctggactggtgcttcaaaatataacctcaatgggcgtgaatccatcatcaaccctggcactgctatggcctcacacaaagacgacgaagacaagttctttcccatgagcggtgtcatgatttttggaaaagagagcgccggagcttcaaacactgcattggacaatgtcatgattacagacgaagaggaaattaaagccactaaccctgtggccaccgaaagatttgggaccgtggcagtcaatttccagagcagcagcacacaccctgcgaccggagatgtgcatgttatgggagcattacctggcatggtgtggcaagatagagacgtgtacctgcagggtcccatctgggccaaaattcctcacacagatggacactttcacccgtctcctcttatgggcggctttggactcaagcacccgcctcctcagatcctcatcaaaaacacgcctgttcctgcgaatcctccggcggagttttcagctacaaagtttgcttcattcatcacccaatactccacaggacaagtgagtgtggaaattgaatgggagctgcagaaagaaaacagcaagcgctggaatcccgaagtgcagtacacatccaattatgcaaaatctgccaacgttgattttaccgtggacaacaatggactttatactgagcctcgccccattggcacccgttaccttacccgtcccctgtaa

SEQ ID NO: 944 - DNA, 2211 bp, Artificial Sequence
  source: /note="Description of Artificial Sequence: Synthetic polynucleotide"
atggctgccgatggttatcttccagattggctcgaggacaacctctctgagggcattcgcgagtggtgggacttgaaacctggagccccgaaacccaaagccaaccagcaaaagcaggacgacggccggggtctggtgcttcctggctacaagtacctcggacccttcaacggactcgacaagggggagcccgtcaacgcggcggacgcagcggccctcgagcacgacaaggcctacgaccagcagctcaaagcgggtgacaatccgtacctgcggtataaccacgccgacgccgagtttcaggagcgtctgcaagaagatacgtcttttgggggcaacctcgggcgagcagtcttccaggccaaaaagcgggttctcgaaccttttggtctggttgaggaaggcgctaagacggctcctggaaagaaacgtccggtagagcagtcgccacaagagccagactcctcctcgggcatcggcaagacaggccagcagcccgctaaaaagagactcaattttggtcagactggcgactcagagtcagtccccgacccacaacctctcggagaacctccagcaacccccgctgctgtgggacctactacaatggcttcaggcggtggcgcaccaatggcagacaataacgaaggcgccgacggagtgggtaatgcctcaggaaattggcattgcgattccacatggctgggcgacagagtcatcaccaccagcacccgcacctgggccttgcccacctacaataaccacctctacaagcaaatctccagtgcttcaacgggggccagcaacgacaaccactacttcggctacagcaccccctgggggtattttgatttcaacagattccactgccacttttcaccacgtgactggcagcgactcatcaacaacaattggggattccggcccaagagactcaacttcaagctcttcaacatccaagtcaaggaggtcacgacgaatgatggcgtcacaaccatcgctaataaccttaccagcacggttcaagtcttctcggactcggagtaccagcttccgtacgtcctcggctctgcgcaccagggctgcctccctccgttcccggcggacgtgttcatgattccgcaatacggctacctgacgctcaacaatggcagccaagccgtgggacgttcatccttttattgcctggaatatttcccatcgcagatgctgagaacgggcaataactttaccttcagctacacctttgaggacgtgcctttccacagcagctacgcgcacagccagagcctggaccggctgatgaatcctctcatcgaccagtacctgtattacctgaacagaactcagaaccagtccggaagtgcccaaaacaaggacttgctgtttagccgggggtctccagctggcatgtctgttcagctcaaaaactggctacctggaccctgttatcggcagcagcgcgtttctaaaacaaaaacagacaacaacaacagcaattttacctggactggtgcttcaaaatataaccttaatgggcgtgaatccatcatcaaccctggcactgctatggcctcacacaaagacgacgaagacaagttctttcccatgagcggtgtcatgatttttggaaaagagagcgccggagcttcaaacactgcattggacaatgtcatgattacagacgaagaggaaattaaagccactaaccctgtggccaccgaaagatttgggaccgtggcagtcaatttccagagcagcagcacagaccctgcgaccggagatgtgcatgttatgggagcattacctggcatggtgtggcaagatagagacgtgtacctgcagggtcccatttgggccaaaattcctcacacagatggacactttcacccgtctcctcttatgggcggctttggactcaaacacccgcctcctcagatcctcatcaaaaacacacctgttcctgcgaatcctccggcggagttttcagctacaaagtttgcttcattcatcacccaatactccacaggacaagtgagcgtggaaattgaatgggagctgcagaaagaaaacagcaagcgctggaatcccgaagtgcagtacacatccaattatgcaaaatctgccaacgttgattttaccgtggacaacaatggactttatactgagcctcgccccattggcacccgttaccttacccgtcccctgtaa

SEQ ID NO: 945 - DNA, 2211 bp, Artificial Sequence
  source: /note="Description of Artificial Sequence: Synthetic polynucleotide"
atggctgccgatggttatcttccagattggctcgaggacaacctctctgagggcattcgcgagtggtgggacttgaaacctggagccccgaaacccaaagccaaccagcaaaagcaggacgacggccggggtctggtgcttcctggctacaagtacctcggacccttcaacggactcgacaagggggagcccgtcaacgcggcggacgcagcggccctcgagcacgacaaggcctacgaccagcagctcaaagcgggtgacaatccgtacctgcggtataaccacgccgacgccgagtttcaggagcgtctgcaagaagatacgtcttttgggggcaacctcgggcgagcagtcttccaggccaagaagcgggttctcgaaccttttggtctggttgaggaaggtgctaagacggctcctggaaagaagagaccggtagagcagtcgccccaagaaccagactcctcatcgggcatcggcaaatcaggccagcagcccgctaaaaagagactcaattttggtcagactggcgactcagagtcagtccccgacccacaacctctcggagaacctccagcaacccccgctgctgtgggacctactacaatggcttcaggcggtggcgcaccaatggcagacaataacgaaggcgccgacggagtgggtaatgcctcaggaaattggcattgcgattccacatggctgggcgacagagtcattaccaccagcacccgaacctgggccctgcccacctataacaaccacctctacaaacaaatctccagcgcttcaacgggggccagcaacgacaaccactacttcggctacagcaccccctgggggtattttgattttaacagattccactgccacttctcaccacgtgactggcagcgactcatcaacaacaattggggattccggcccaagagactcaacttcaagctcttcaacatccaagtcaaggaggtcacgacgaacgatggcgtcacgaccatcgctaataaccttaccagcacggttcaagtcttctcggactcggagtaccagttgccgtacgtcctcggctctgcgcaccagggctgcctccctccgttcccggcggacgtgttcatgattccgcagtacggctacctaacactcaacaatggcagccaggccgtgggacgttcatccttttactgcctggaatatttcccatcgcagatgctgagaacgggcaataactttaccttcagctacacattcgaggacgtgcctttccacagcagctacgcgcacagccaaagcctggaccggctgatgaatcctctcatcgaccagtacttgtattacctaaacagaactcaaaatcagtccggaagtgcccaaaacaaggacttgctgtttagccgggggtctccagctggcatgtctgttcagcccaaaaactggctacctggaccctgttatcggcagcagcgcgtttctaaaacaaaaacagacaacaacaacagcaactttacctggactggtgcttcaaaatataaccttaatgggcgtgaatctataatcaaccctggcactgctatggcttcacacaaagacgacgaagacaagttctttccaatgagcggtgtcatgatttttggcaaggagagcgccggagcttcaaacactgcattggacaatgtcatgattacagacgaagaggaaattaaagccactaaccctgtggccaccgaaagatttgggaccgtggcagtcaatttccagagcagcagcacagaccctgcgaccggagatgtgcatgttatgggagcattacctggcatggtgtggcaagatagagacgtgtacctgcagggtccaatttgggccaaaattcctcacacagatggacactttcacccgtctcctcttatgggcggctttggacttaagcacccgcctcctcagatcctcatcaaaaacacgcctgttcctgcgaatcctccggcagagttttcggctacaaagtttgcttcattcatcacccagtattccacaggacaagtgagtgtggaaattgaatgggagttgcagaaagaaaacagcaagcgttggaatcccgaagtgcagtacacatctaattatgcaaaatctgccaacgttgatttcactgtggacaacaatggactttatactgagcctcgccccattggcacccgttacctcacccgtcccctgtaa

SEQ ID NO: 946 - DNA, 2211 bp, Artificial Sequence
  source: /note="Description of Artificial Sequence: Synthetic polynucleotide"
atggctgccgatggttatcttccagattggctcgaggacaacctctctgagggcattcgcgagtggtgggacttgaaacctggagccccgaaacccaaagccaaccagcaaaagcaggacgacggccggggtctggtgcttcctggctacaagtacctcggacccttcaacggactcgacaagggggagcccgtcaacgcggcggacgcagcggccctcgagcacgacaaggcctacgaccagcagctcaaagcgggtgacaatccgtacctgcggtataaccacgccgacgccgagtttcaggagcgtctgcaagaagatacgtcttttgggggcaacctcgggcgagcagtcttccaggccaagaagagggttctcgaaccttttggtctggttgaggaaggtgctaagacggctcctggaaagaaacgtccggtagagcagtcaccccaagaaccagactcctcctcgggcattggcaaatcaggccagcagcccgctaaaaagagactcaattttggtcagactggcgactcagagtcagtccccgacccacaacctctcggagaacctccagcaacccccgctgctttgggacctactacaatggcttcaggcggtggcgcaccaatggcagacaataacgaaggcgccgacggagtgggtaatgcctcaggaaattggcattgcgattccacatggctgggcgacagagtcatcaccaccagcacccgcacctgggccttgcccacctacaataaccacctctacaagcaaatctccagtgcttcaacgggggccagcaacgacaaccactacttcggctacagcaccccctgggggtattttgatttcaacagattccactgccatttctcaccacgtgactggcagcgactcatcaacaacaactggggattccggcccaagagactcaacttcaagctcttcaacatccaagtcaaggaggtcacgacgaacgatggcgtcacgaccatcgctaataaccttaccagcacggttcaagtcttctcggactcggagtaccagcttccgtacgtcctcggctctgcgcaccagggctgcctccctccgttcccggcggacgtgttcatgattccgcagtacggctacctgacgctcaacaatggcagcaaagccgtgggacgttcatccttttactgcctggaatatttcccttctcagatgctgagaacgggcaacaactttaccttcagctacacctttgaggaagtgcctttccacagcagctacgcgcacagccagagcctggaccggctgatgaatcctctcatcgaccaatacctgtattacctgaacagaactcaaaatcagtccggaagtgcccaaaacaaggacttgctgtttagccgtgggtctccagctggcatgtctgttcagcccaaaaactggctacctggaccctgttatcggcagcagcgcgtttctaaaacaaaaacagacaacaacaacagcaattttacctggactggtgcttcaaaatataacctcaatgggcgtgaatccatcatcaaccctggcactgctatggcctcacacaaagacgacgaagacaagttctttcccatgagcggtgtcatgatttttggaaaagagagcgccggagcttcaaacactgcattggacaatgtcatgattacagacgaagaggaaattaaagccactaaccctgtggccaccgaaagatttgggaccgtggcagtcaatttccagagcagcagcacagaccctgcgaccggagatgtgcatgttatgggagcattacctggcatggtgtggcaagatagagacgtgtacctgcagggtcccatttgggccaaaattcctcacacggatggacactttcacccgtctcctcttatgggcggctttggactcaagcacccgcctcctcagatcctcatcaaaaacacacctgttcctgcgaatcctccggcagagttttcggctacaaagtttgcttcattcatcacccagtactccacaggacaagtgagcgtggaaattgaatgggagttgcagaaagaaaacagtaagcgctggaatcccgaagtgcagtacacatctaattatgcaaaatctgccaacgttgacttcactgtggacaacaatggactttatactgagcctcgccccattggcacccgttacctcacccgtcccctgtaa

SEQ ID NO: 947 - DNA, 2970 bp, Artificial Sequence
  source: /note="Description of Artificial Sequence: Synthetic polynucleotide"
agatgaccgccaaggtcgtagagtccgccaaggccattctgggcggcagcaaggtgcgcgtggaccaaaaatgcaaggcctctgcgcagatcgaccccacccccgtgatcgtcacctccaacaccaacatgtgcgccgtgattgacgggaacagcaccaccttcgagcaccagcagcccctgcaggaccggatgttcaagtttgaactcacccgccgcctcgactacgactttggcaaggtcaccaagcaggaagtcaaggactttttccggtgggcggctgatcacgtgactgacgtggctcatgagttttacgtcacaaagggtggagctaagaaaaggcccgccccctctgacgaggatataagcgagcccaagcggccgcgcgtgtcatttgcgcagccggagacgtcagacgcggaagctcccggagacttcgccgacaggtaccaaaacaaatgttctcgtcacgcgggtatgctgcagatgctctttccctgcaagacgtgcgagagaatgaatcagaattccaacgtctgcttcacgcacggtcagaaagattgcggggagtgctttcccgggtcagaatctcaaccggtttctgtcgtcagaaaaacgtatcagaaactgtgcatccttcatcagctccggggggcacccgagatcgcctgctctgcttgcgaccaactcaaccccgatttggacgattgccaatttgagcaataaatgactgaaatcaggtatggctgctgacggttatcttccagattggctcgaggacaacctctctgaaggcattcgcgagtggtgggcgctgaaacctggagctccacaacccaaggccaaccaacagcatcaggacaacggcaggggtcttgtgcttcctgggtacaagtacctcggacccttcaacggactcgacaagggagagccggtcaacgaggcagacgccgcggccctcgagcacgacaaggcctacgacaagcagctcgagcagggggacaacccgtatctcaagtacaaccacggcgacgccgagttccagcagcgcttggcgaccgacacctcttttgggggcaacctcgggcgagcagtcttccaggccaaaaagaggattctcgagcctctgggtctggttgaagagggcgttaaaacggctcctggaaagaaacgcccattagaaaagactccaaatcggccgaccaacccggactctgggaaggccccggccaagaaaaagcaaaaagacggcgaaccagccgactctgctagaaggacactcgactttgaagactctggagcaggagacggaccccctgagggatcatcttccggagaaatgtctcatgatgctgagatgcgtgcggcgccaggcggaaatgctgtcgaggcgggacaaggtgccgatggagtgggtaatgcctccggtgattggcattgcgattccacctggtcagagggccgagtcaccaccaccagcacccgaacctgggtcctacccacgtacaacaaccacctgtacctgcgaatcggaacaacggccaacagcaacacctacaacggattctccaccccctggggatactttgactttaaccgcttccactgccacttttccccacgcgactggcagcgactcatcaacaacaactggggactcaggccgaaatcgatgcgtgttaaaatcttcaacatacaggtcaaggaggtcacgacgtcaaacggcgagactacggtcgctaataaccttaccagcacggttcagatctttgcggattcgacgtatgaactcccatacgtgatggacgccggtcaggaggggagctttcctccgtttcccaacgacgtctttatggttccccaatacggatactgcggagttgtcactggaaaaaaccagaaccagacagacagaaatgccttttactgcctggaatactttccatcccaaatgctaagaactggcaacaattttgaagtcagttaccaatttgaaaaagttcctttccattcaatgtacgcgcacagccagagcctggacagaatgatgaatcctttactggatcagtacctgtggcatctgcaatcgaccactaccggaaattcccttaatcaaggaacagctaccaccacgtacgggaaaattaccactggagactttgcctactacaggaaaaactggttgcctggagcctgcattaaacaacaaaaattttcaaagaatgccaatcaaaactacaagattcccgccagcgggggagacgcccttttaaagtatgacacgcataccactctaaatgggcgatggagtaacatggctcctggacctccaatggcaaccgcaggtgccggggactcggattttagcaacagccagctgatctttgccggacccaatccgagcggtaacacgaccacatcttcaaacaatttgttgtttacctcagaagaggagattgccacaacaaacccacgagacacggacatgtttggacagattgcagataataatcaaaatgccaccaccgcccctcacatcgctaacctggacgctatgggaattgttcccggaatggtctggcaaaacagagacatctactaccagggccctatttgggccaaggtccctcacacggacggacactttcacccttcgccgctgatgggaggatttggactgaaacacccgcctccacagattttcatcaaaaacacccccgtacccgccaatcccaatactacctttagcgctgcaaggattaattcttttctgacgcagtacagcaccggacaagttgccgttcagatcgactgggaaattcagaaggagcattccaaacgctggaatcccgaagttcaatttacttcaaactacggcactcaaaattctatgctgtgggctcccgacaatgctggcaactaccacgaactccgggctattgggtcccgtttcctcacccaccacttgtaa

SEQ ID NO: 948 - protein, 736 aa, Artificial Sequence
  source: /note="Description of Artificial Sequence: Synthetic polypeptide"
MAADGYLPDWLEDNLSEGIREWWDLKPGAPKPKANQQKQDDGRGLVLPGYKYLGPFNGLDKGEPVNAADAAALEHDKAYDQQLKAGDNPYLRYNHADAEFQERLQEDTSFGGNLGRAVFQAKKRVLEPFGLVEEGAKTAPGKKRPVEQSPQEPDSSSGIGKTGQQPAKKRLNFGQTGDSESVPDPQPLGEPPATPAAVGPTTMASGGGAPMADNNEGADGVGNASGNWHCDSTWLGDRVITTSTRTWALPTYNNHLYKQISSASTGASNDNHYFGYSTPWGYFDFNRFHCHFSPRDWQRLINNNWGFRPKRLNFKLFNIQVKEVTTSDGVTTIANNLTSTVQVFSDSEYQLPYVLGSAHQGCLPPFPADVFMIPQYGYLTLNNGSQAVGRSSFYCLEYFPSQMLRTGNNFTFSYTFEEVPFHSSYAHSQSLDRLMNPLIDQYLYYLNRTQNQSGSAQNKDLLFSRGSPAGMSVQPKNWLPGPCYRQQRVSKTKTGNNNSNFTWTGASKYNLNGHESIINPGTAMASHKDDEDKFFPMSGVMIFGKESAGASNTALDNVMITDEEEIKATNPVATERFGTVAVNFQSSSTHPATGDVHVMGALPGMVWQDRDVYLQGPIWAKIPHTDGHFHPSPLMGGFGLKHPPPQILIKNTPVPANPPAEFSATKFASFITQYSTGQVSVEIEWELQKENSKRWNPEVQYTSNYAKSANVDFTVDNNGLYTEPRPIGTRYLTRPL

SEQ ID NO: 949 - protein, 736 aa, Artificial Sequence; identical to SEQ ID NO: 948
  source: /note="Description of Artificial Sequence: Synthetic polypeptide"

SEQ ID NO: 950 - protein, 733 aa, Artificial Sequence
  source: /note="Description of Artificial Sequence: Synthetic polypeptide"
MTDGYLPDWLEDNLSEGVREWWALQPGAPKPKANQQHQDNARGLVLPGYKYLGPGNGLDKGEPVNAADAAALEHDKAYDQQLKAGDNPYLKYNHADAEFQERLQEDTSFGGNLGRAVFQAKKRILEPLGLVEEAAKTAPGKKRPVEQSPAEPDSSSGIGKSGQQPARKRLNFGQTGDTESVPDPQPLGQPPAAPSGVGSTTMASGGGAPMADNNEGADGVGNSSGNWHCDSQWLGDRVITTSTRTWALPTYNNHLYKQISSQSGATNDNHYFGYSTPWGYFDFNRFHCHFSPRDWQRLINNNWGFRPKRLNFKLFNIQVKEVTQNDGTTTIANNLTSTVQVFTDSEYQLPYVLGSAHQGCLPPFPADVFMVPQYGYLTLNNGSQAVGRSSFYCLEYFPSQMLRTGNNFQFSYTFEDVPFHSSYAHSQSLDRLMNPLIDQYLYYLNRTQTASGTQQSRLLFSQAGPTSMSLQAKNWLPGPCYRQQRLSKQANDNNNSNFPWTGATKYHLNGRDSLVNPGPAMASHKDDKEKFFPMHGTLIFGKEGTNANNADLENVMITDEEEIRTTNPVATEQYGTVSNNLQNSNAGPTTGTVNHQGALPGMVWQDRDVYLQGPIWAKIPHTDGHFHPSPLMGGFGLKHPPPQIMIKNTPVPANPPTNFSAAKFASFITQYSTGQVSVEIEWELQKENSKRWNPEIQYTSNYNKSVNVDFTVDTNGVYSEPRPIGTRYLTRNL

SEQ ID NO: 951 - protein, 736 aa, Artificial Sequence; identical to SEQ ID NO: 766
  source: /note="Description of Artificial Sequence: Synthetic polypeptide"

SEQ ID NO: 952 - protein, 736 aa, Artificial Sequence
  source: /note="Description of Artificial Sequence: Synthetic polypeptide"
MAADGYLPDWLEDNLSEGIRKWWDLKPGAPKPKANQQKQDDGRGLVLPGYKYLGPFNGLDKGEPVNAADAAALEHDKAYDQQLKAGDNPYLRYNHADAEFQERLQEDTSFGGNLGRAVFQAKKRVLEPFGLVEEGAKTAPGKKRPVEQSPQEPDSSSGIGKTGQQPAKKRLNFGQTGDSESVPDPQPLGEPPATPAAVGPTTMASGGGAPMADNNEGADGVGNASGNWHCDSTWLGDRVITTSTRTWALPTYNNHLYKQISSASTGASNDNHYFGYSTPWGYFDFNRFHCHFSPRDWQRLINNNWGFRPKRLNFKLFNIQVKEVTTNDGVTTIANNLTSTVQVFSDSEYQLPYVLGSAHQGCLPPFPADVFMIPQYGYLTLNNGSQAVGRSSFYCLEYFPSQMLRTGNNFTFSYTFEEVPFHSSYAHSQSLDRLMNPLIDQYLYYLNRTQNQSGSAQNKDLLFSRGSPAGMSVQPKNWLPGPCYRQQRVSKTKTDNNNSNFTWTGASKYNLNGRESIINPGTAMASHKDDKDKFFPMSGVMIFGKESAGASNTALDNVMITDEEEIKATNPVATERFGTVAVNFQSSSTDPATGDVHVMGALPGMVWQDRDVYLQGPIWAKIPHTDGHFHPSPLMGGFGLKHPPPQILIKNTPVPANPPAEFSATKFASFITQYSTGQVSVEIEWELQKENSKRWNPEVQYTSNYAKSANVDFTVDNNGLYTEPRPIGTRYLTRPL

SEQ ID NO: 953 - protein, 736 aa, Artificial Sequence
  source: /note="Description of Artificial Sequence: Synthetic polypeptide"
MAADGYLPDWLEDNLSEGIREWWDLKPGAPKPKANQQKQDNGRGLVLPGYKYLGPFNGLDKGEPVNAADAAALEHDKAYDQQLKAGDNPYLRYNHADAEFQERLQEDTSFGGNLGRAVFQAKKRVLEPFGLVEEGAKTAPGKKRPVEQSPQEPDSSSGIGKTGQQPAKKRLNFGQTGDSESVPDPQPLGEPPATPAAVGPTTMASGGGAPMADNNEGADGVGNASGNWHCDSTWLGDRVITTSTRTWALPTYNNHLYKQISSASTGASNDNHYFGYSTPWGYFDFNRFHCHFSPRDWQRLINNNWGFRPKRLNFKLFNIQVKEVTTNDGVTTIANNLTSTVQVFSDSEYQLPYVLGSAHQGCLPPFPADVFMIPQYGYLTLNNGSQAVGRSSFYCLEYFPSQMLRTGNNFTFSYTFEEVPFHSSYAHSQSLDRLMNPLIDQYLYYLNRTQNQSGSAQNKDLLFSRGSPAGMSVQPKNWLPGPCYRQQRVSKTKTDNNNSNFTWTGASKYNLNGRESIINPGTAMASHKDDEDKFFPMSGVMIFGKESAGASNTALDNVMITDEEEIKATNPVATERFGTVAVNFQSSSTHPATGDVHVMGALPGMVWQDRDVYLQGPIWAKIPHTDGHFHPSPLMGGFGLKHPPPQILIKNTPVPANPPAEFSATKFASFITQYSTGQVSVEIEWELQKENSKRWNPEVQYTSNYAKSANVDFTVDNNGLYTEPRPIGTRYLTRPL

SEQ ID NO: 954 - protein, 736 aa, Artificial Sequence
  source: /note="Description of Artificial Sequence: Synthetic polypeptide"
MAADGYLPDWLEDNLSEGIREWWDLKPGAPKPKANQQKQDDGRGLVLPGYKYLGPFNGLDKGEPVNAADAAALEHDKAYDQQLKAGDNPYLRYNHADAEFQERLQEDTSFGGNLGRAVFQAKKRVLEPFGLVEEGAKTAPGKKRPVEQSPQEPDSSSGIGKTGQQPAKKRLNFGQTGDSESVPDPQPLGEPPATPAAVGPTTMASGGGAPMADNNEGADGVGNASGNWHCDSTWLGDRVITTSTRTWALPTYNNHLYKQISSASTGASNDNHYFGYSTPWGYFDFNRFHCHFSPRDWQRLINNNWGFRPKRLNFKLFNIQVKEVTTNDGVTTIANNLTSTVQVFSDSEYQLPYVLGSAHQGCLPPFPADVFMIPQYGYLTLNNGSQAVGRSSFYCLEYFPSQMLRTGNNFTFSYTFEDVPFHSSYAHSQSLDRLMNPLIDQYLYYLNRTQNQSGSAQNKDLLFSRGSPAGMSVQLKNWLPGPCYRQQRVSKTKTDNNNSNFTWTGASKYNLNGRESIINPGTAMASHKDDEDKFFPMSGVMIFGKESAGASNTALDNVMITDEEEIKATNPVATERFGTVAVNFQSSSTDPATGDVHVMGALPGMVWQDRDVYLQGPIWAKIPHTDGHFHPSPLMGGFGLKHPPPQILIKNTPVPANPPAEFSATKFASFITQYSTGQVSVEIEWELQKENSKRWNPEVQYTSNYAKSANVDFTVDNNGLYTEPRPIGTRYLTRPL

SEQ ID NO: 955 - protein, 736 aa, Artificial Sequence
  source: /note="Description of Artificial Sequence: Synthetic polypeptide"
MAADGYLPDWLEDNLSEGIREWWDLKPGAPKPKANQQKQDDGRGLVLPGYKYLGPFNGLDKGEPVNAADAAALEHDKAYDQQLKAGDNPYLRYNHADAEFQERLQEDTSFGGNLGRAVFQAKKRVLEPFGLVEEGAKTAPGKKRPVEQSPQEPDSSSGIGKSGQQPAKKRLNFGQTGDSESVPDPQPLGEPPATPAAVGPTTMASGGGAPMADNNEGADGVGNASGNWHCDSTWLGDRVITTSTRTWALPTYNNHLYKQISSASTGASNDNHYFGYSTPWGYFDFNRFHCHFSPRDWQRLINNNWGFRPKRLNFKLFNIQVKEVTTNDGVTTIANNLTSTVQVFSDSEYQLPYVLGSAHQGCLPPFPADVFMIPQYGYLTLNNGSQAVGRSSFYCLEYFPSQMLRTGNNFTFSYTFEDVPFHSSYAHSQSLDRLMNPLIDQYLYYLNRTQNQSGSAQNKDLLFSRGSPAGMSVQPKNWLPGPCYRQQRVSKTKTDNNNSNFTWTGASKYNLNGRESIINPGTAMASHKDDEDKFFPMSGVMIFGKGSAGASNTALDNVMITDEEEIKATNPVATERFGTVAVNFQSSSTDPATGDVHVMGALPGMVWQDRDVYLQGPIWAKIPHTDGHFHPSPLMGGFGLKHPPPQILIKNTPVPANPPAEFSATKFASFITQYSTGQVSVEIEWELQKENSKRWNPEVQYTSNYAKSANVDFTVDNNGLYTEPRPIGTRYLTRPL

SEQ ID NO: 956 - protein, 736 aa, Artificial Sequence; identical to SEQ ID NO: 697
  source: /note="Description of Artificial Sequence: Synthetic polypeptide"

SEQ ID NO: 957 - protein, 742 aa, Artificial Sequence
  source: /note="Description of Artificial Sequence: Synthetic polypeptide"
MAADGYLPDWLEDNLSEGIREWWALKPGAPQPKANQQHQDNGRGLVLPGYKYLGPFNGLDKGEPVNEADAAALEHDKAYDKQLEQGDNPYLKYNHADAEFQQRLATDTSFGGNLGRAVFQAKKRILEPLGLVEEGVKTAPGKKRPLEKTPNRPTNPDSGKAPAKKKQKDGEPADSARRTLDFEDSGAGDGPPEGSSSGEMSHDAEMRAAPGGNAVEAGQGADGVGNASGDWHCDSTWSEGRVTTTSTRTWVLPTYNNHLYLRIGTTANSNTYNGFSTPWGYFDFNRFHCHFSPRDWQRLINNNWGLRPKSMRVKIFNIQVKEVTTSNGETTVANNLTSTVQIFADSTYELPYVMDAGQEGSFPPFPNDVFMVPQYGYCGVVTGKNQNQTDRNAFYCLEYFPSQMLRTGNNFEVSYQFEKVPFHSMYAHSQSLDRMMNPLLDQYLWHLQSTTTGNSLNQGTATTTYGKITTGDFAYYRKNWLPGACIKQQKFSKNANQNYKIPASGGDALLKYDTHTTLNGRWSNMAPGPPMATAGAGDSDFSNSQLIFAGPNPSGNTTTSSNNLLFTSEEEIATTNPRDTDMFGQIADNNQNATTAPHIANLDAMGIVPGMVWQNRDIYYQGPIWAKVPHTDGHFHPSPLMGGFGLKHPPPQIFIKNTPVPANPNTTFSAARINSFLTQYSTGQVAVQIDWEIQKEHSKRWNPEVQFTSNYGTQNSMLWAPDNAGNYHELRAIGSRFLTHHL

SEQ ID NO: 958 - DNA, 2211 bp, Artificial Sequence
  source: /note="Description of Artificial Sequence: Synthetic polynucleotide"
atggctgccgatggttatcttccagattggctcgaggacaacctctctgagggcattcgcgagtggtgggacttgaaacctggagccccgaagcccaaagccaaccagcaaaagcaggacgacggccggggtctggtgcttcctggctacaagtacctcggacccttcaacggactcgacaagggggagcccgtcaacgcggcggacgcagcggccctcgagcacgacaaggcctacgaccagcagctcaaagcgggtgacaatccgtacctgcggtataaccacgccgacgccgagtttcaggagcgtctgcaagaagatacgtcttttgggggcaacctcgggcgagcagtcttccaggccaagaagcgggttctcgaacctctcggtctggttgaggaaggcgctaaggcggctcctggaaagaaacgtccggtagagcagtcgccacaagagccagactcctcctcgggcatcggcaagacaggccagcagcccgctaaaaagagactcaattttggtcagactggcgactcagagtcagtccccgatccacaacctctcggagaacctccagcagccccctcaggtctgggacctaatacaatggcttcaggcggtggcgctccaatggcagacaataacgaaggcgccgacggagtgggtaattcctcgggaaattggcattgcgattccacatggctgggggacagagtcatcaccaccagcacccgaacctgggccctgcccacctacaacaaccacctctacaagcaaatctccaacggcacctcgggaggaagcaccaacgacaacacctattttggctacagcaccccctgggggtattttgacttcaacagattccactgtcacttttcaccacgtgactggcaacgactcatcaacaacaattggggattccggcccaaaagactcaacttcaagctgttcaacatccaggtcaaggaagtcacgacgaacgaaggcaccaagaccatcgccaataatctcaccagcaccgtgcaggtctttacggactcggagtaccagttaccgtacgtgctaggatccgctcaccagggatgtctgcctccgttcccggcggacgtcttcatggttcctcagtacggctatttaactttaaacaatggaagccaagccctgggacgttcctccttctactgtctggagtatttcccatcgcagatgctgagaaccggcaacaactttcagttcagctacaccttcgaggacgtgcctttccacagcagctacgcgcacagccagagcctggacaggctgatgaatcccctcatcgaccagtacctgtactacctggtcagaacgcaaacgactggaactggagggacgcagactctggcattcagccaagcgggtcctagctcaatggccaaccaggctagaaattgggtgcccggaccttgctaccggcagcagcgcgtctccacgacaaccaaccagaacaacaacagcaactttgcctggacgggagctgccaagtttaagctgaacggccgagactctctaatgaatccgggcgtggcaatggcttcccacaaggatgacgacgaccgcttcttcccttcgagcggggtcctgatttttggcaagcaaggagccgggaacgatggagtggattacagccaagtgctgattacagatgaggaagaaatcaaggctaccaaccccgtggccacagaagaatatggagcagtggccatcaacaaccaggccgccaatacgcaggcgcagaccggactcgtgcacaaccagggggtgattcccggcatggtgtggcagaatagagacgtgtacctgcagggtcccatctgggccaaaattcctcacacggacggcaactttcacccgtctcccctgatgggcggctttggactgaagcacccgcctcctcaaattctcatcaagaacacaccggttccagcggacccgccgcttaccttcaaccaggccaagctgaactctttcatcacgcagtacagcaccggacaggtcagcgtggaaatcgagtgggagctgcagaaagaaaacagcaaacgctggaatccagagattcaatacacttccaactactacaaatctacaaatgtggactttgctgtcaacacggagggggtttatagcgagcctcgccccattggcacccgttacctcacccgcaacctgtaa

SEQ ID NO: 959 - DNA, 2592 bp, Artificial Sequence
  source: /note="Description of Artificial Sequence: Synthetic polynucleotide"
ctggctgccgatggttatcttccagattggctcgaggacaacctctctgagggcattcgcgagtggtgggacttgaaacctggagccccgaagcccaaagccaaccagcaaaagcaggacgacggccggggtctggtgcttcctggctacaagtacctcggacccttcaacggactcgacaagggggagcccgtcaacgcggcggacgcagcggccctcgagcacgacaaggcctacgaccagcagctcaaagcgggtgacaatccgtacctgcggtataaccacgccgacgccgagtttcaggagcgtctgcaagaagatacgtcttttgggggcaacctcgggcgagcagtcttccaggccaagaagcgggttctcgaacctctcggtctggttgaggaaggcgctaagatggaagtgcagctccaagccagtggtggcggactggtgcaggcaggaggcagcttgaggctcagctgtgccgccagcggcttcaagatcacccactacaccatgggctggttccggcaggcccctggcaaggagagggagttcgtgagcaggattacctggggtggtgacaacaccttctacagcaacagcgtgaagggcaggttcaccatcagcagggacaacgccaagaacaccgtgtacctgcagatgaacagcctgaagcccgaggacaccgccgactactactgtgcagccggcagtaccagcaccgctacccccctgagggtggactactggggcaaaggcactcaggtgacagtgtcttcaggagggggtggcagcgctcctggaaagaaacgtccggtagagcagtcgccacaagagccagactcctcctcgggcatcggcaagacaggccagcagcccgctaaaaagagactcaattttggtcagactggcgactcagagtcagtccccgatccacaacctctcggagaacctccagcagccccctcaggtctgggacctaatacaatggcttcaggcggtggcgctccaatggcagacaataacgaaggcgccgacggagtgggtaattcctcgggaaattggcattgcgattccacatggctgggggacagagtcatcaccaccagcacccgaacctgggccctgcccacctacaacaaccacctctacaagcaaatctccaacggcacctcgggaggaagcaccaacgacaacacctattttggctacagcaccccctgggggtattttgacttcaacagattccactgtcacttttcaccacgtgactggcaacgactcatcaacaacaattggggattccggcccaaaagactcaacttcaagctgttcaacatccaggtcaaggaagtcacgacgaacgaaggcaccaagaccatcgccaataatctcaccagcaccgtgcaggtctttacggactcggagtaccagttaccgtacgtgctaggatccgctcaccagggatgtctgcctccgttcccggcggacgtcttcatggttcctcagtacggctatttaactttaaacaatggaagccaagccctgggacgttcctccttctactgtctggagtatttcccatcgcagatgctgagaaccggcaacaactttcagttcagctacaccttcgaggacgtgcctttccacagcagctacgcgcacagccagagcctggacaggctgatgaatcccctcatcgaccagtacctgtactacctggtcagaacgcaaacgactggaactggagggacgcagactctggcattcagccaagcgggtcctagctcaatggccaaccaggctagaaattgggtgcccggaccttgctaccggcagcagcgcgtctccacgacaaccaaccagaacaacaacagcaactttgcctggacgggagctgccaagtttaagctgaacggccgagactctctaatgaatccgggcgtggcaatggcttcccacaaggatgacgacgaccgcttcttcccttcgagcggggtcctgatttttggcaagcaaggagccgggaacgatggagtggattacagccaagtgctgattacagatgaggaagaaatcaaggctaccaaccccgtggccacagaagaatatggagcagtggccatcaacaaccaggccgccaatacgcaggcgcagaccggactcgtgcacaaccagggggtgattcccggcatggtgtggcagaatagagacgtgtacctgcagggtcccatctgggccaaaattcctcacacggacggcaactttcacccgtctcccctgatgggcggctttggactgaagcacccgcctcctcaaattctcatcaagaacacaccggttccagcggacccgccgcttaccttcaaccaggccaagctgaactctttcatcacgcagtacagcaccggacaggtcagcgtggaaatcgagtgggagctgcagaaagaaaacagcaaacgctggaatccagagattcaatacacttccaactactacaaatctacaaatgtggactttgctgtcaacacggagggggtttatagcgagcctcgccccattggcacccgttacctcacccgcaacctgtaa

SEQ ID NO: 960 - DNA, 2601 bp, Artificial Sequence
  source: /note="Description of Artificial Sequence: Synthetic polynucleotide"
ctggctgccgatggttatcttccagattggctcgaggacaacctctctgagggcattcgcgagtggtgggacttgaaacctggagccccgaagcccaaagccaaccagcaaaagcaggacgacggccggggtctggtgcttcctggctacaagtacctcggacccttcaacggactcgacaagggggagcccgtcaacgcggcggacgcagcggccctcgagcacgacaaggcctacgaccagcagctcaaagcgggtgacaatccgtacctgcggtataaccacgccgacgccgagtttcaggagcgtctgcaagaagatacgtcttttgggggcaacctcgggcgagcagtcttccaggccaagaagcgggttctcgaacctctcggtctggttgaggaaggcgctaagatggaggtgcagctgcaggcttctggaggaggactggtgcaggctggagggagtctgaggctgtcttgcagtgcctcagtgaggactttctccatctacgccatgggctggtttaggcaggctcccgggaaggagcgcgaattcgtggccggaatcaaccggtctggcgacgtgaccaagtacgctgatttcgtgaaaggccggtttagcatttccagagacaacgccaagaatatggtgtatctgcagatgaactccctgaaacctgaagacacagctctgtactattgtgccgctacttgggcctacgataccgtgggggctctgacatcaggatataatttttggggccaggggacccaggtgacagtgagctccggaggaggaggaagcgctcctggaaagaaacgtccggtagagcagtcgccacaagagccagactcctcctcgggcatcggcaagacaggccagcagcccgctaaaaagagactcaattttggtcagactggcgactcagagtcagtccccgatccacaacctctcggagaacctccagcagccccctcaggtctgggacctaatacaatggcttcaggcggtggcgctccaatggcagacaataacgaaggcgccgacggagtgggtaattcctcgggaaattggcattgcgattccacatggctgggggacagagtcatcaccaccagcacccgaacctgggccctgcccacctacaacaaccacctctacaagcaaatctccaacggcacctcgggaggaagcaccaacgacaacacctattttggctacagcaccccctgggggtattttgacttcaacagattccactgtcacttttcaccacgtgactggcaacgactcatcaacaacaattggggattccggcccaaaagactcaacttcaagctgttcaacatccaggtcaaggaagtcacgacgaacgaaggcaccaagaccatcgccaataatctcaccagcaccgtgcaggtctttacggactcggagtaccagttaccgtacgtgctaggatccgctcaccagggatgtctgcctccgttcccggcggacgtcttcatggttcctcagtacggctatttaactttaaacaatggaagccaagccctgggacgttcctccttctactgtctggagtatttcccatcgcagatgctgagaaccggcaacaactttcagttcagctacaccttcgaggacgtgcctttccacagcagctacgcgcacagccagagcctggacaggctgatgaatcccctcatcgaccagtacctgtactacctggtcagaacgcaaacgactggaactggagggacgcagactctggcattcagccaagcgggtcctagctcaatggccaaccaggctagaaattgggtgcccggaccttgctaccggcagcagcgcgtctccacgacaaccaaccagaacaacaacagcaactttgcctggacgggagctgccaagtttaagctgaacggccgagactctctaatgaatccgggcgtggcaatggcttcccacaaggatgacgacgaccgcttcttcccttcgagcggggtcctgatttttggcaagcaaggagccgggaacgatggagtggattacagccaagtgctgattacagatgaggaagaaatcaaggctaccaaccccgtggccacagaagaatatggagcagtggccatcaacaaccaggccgccaatacgcaggcgcagaccggactcgtgcacaaccagggggtgattcccggcatggtgtggcagaatagagacgtgtacctgcagggtcccatctgggccaaaattcctcacacggacggcaactttcacccgtctcccctgatgggcggctttggactgaagcacccgcctcctcaaattctcatcaagaacacaccggttccagcggacccgccgcttaccttcaaccaggccaagctgaactctttcatcacgcagtacagcaccggacaggtcagcgtggaaatcgagtgggagctgcagaaagaaaacagcaaacgctggaatccagagattcaatacacttccaactactacaaatctacaaatgtggactttgctgtcaacacggagggggtttatagcgagcctcgccccattggcacccgttacctcacccgcaacctgtaa

SEQ ID NO: 961 - DNA, 2367 bp, Artificial Sequence
  source: /note="Description of Artificial Sequence: Synthetic polynucleotide"
ctggctgccgatggttatcttccagattggctcgaggacaacctctctgagggcattcgcgagtggtgggacttgaaacctggagccccgaagcccaaagccaaccagcaaaagcaggacgacggccggggtctggtgcttcctggctacaagtacctcggacccttcaacggactcgacaagggggagcccgtcaacgcggcggacgcagcggccctcgagcacgacaaggcctacgaccagcagctcaaagcgggtgacaatccgtacctgcggtataaccacgccgacgccgagtttcaggagcgtctgcaagaagatacgtcttttgggggcaacctcgggcgagcagtcttccaggccaagaagcgggttctcgaacctctcggtctggttgaggaaggcgctaagatgccaagcagtgtaatcgatgcgctgcagtacaagctggagggcaccacgaggctgaccaggaagaggggtctgaagctggccacggccctcagccttagcaataagttcgtagagggcagccccagcggcggcggcggcagcggcggcggcggcagcgctcctggaaagaaacgtccggtagagcagtcgccacaagagccagactcctcctcgggcatcggcaagacaggccagcagcccgctaaaaagagactcaattttggtcagactggcgactcagagtcagtccccgatccacaacctctcggagaacctccagcagccccctcaggtctgggacctaatacaatggcttcaggcggtggcgctccaatggcagacaataacgaaggcgccgacggagtgggtaattcctcgggaaattggcattgcgattccacatggctgggggacagagtcatcaccaccagcacccgaacctgggccctgcccacctacaacaaccacctctacaagcaaatctccaacggcacctcgggaggaagcaccaacgacaacacctattttggctacagcaccccctgggggtattttgacttcaacagattccactgtcacttttcaccacgtgactggcaacgactcatcaacaacaattggggattccggcccaaaagactcaacttcaagctgttcaacatccaggtcaaggaagtcacgacgaacgaaggcaccaagaccatcgccaataatctcaccagcaccgtgcaggtctttacggactcggagtaccagttaccgtacgtgctaggatccgctcaccagggatgtctgcctccgttcccggcggacgtcttcatggttcctcagtacggctatttaactttaaacaatggaagccaagccctgggacgttcctccttctactgtctggagtatttcccatcgcagatgctgagaaccggcaacaactttcagttcagctacaccttcgaggacgtgcctttccacagcagctacgcgcacagccagagcctggacaggctgatgaatcccctcatcgaccagtacctgtactacctggtcagaacgcaaacgactggaactggagggacgcagactctggcattcagccaagcgggtcctagctcaatggccaaccaggctagaaattgggtgcccggaccttgctaccggcagcagcgcgtctccacgacaaccaaccagaacaacaacagcaactttgcctggacgggagctgccaagtttaagctgaacggccgagactctctaatgaatccgggcgtggcaatggcttcccacaaggatgacgacgaccgcttcttcccttcgagcggggtcctgatttttggcaagcaaggagccgggaacgatggagtggattacagccaagtgctgattacagatgaggaagaaatcaaggctaccaaccccgtggccacagaagaatatggagcagtggccatcaacaaccaggccgccaatacgcaggcgcagaccggactcgtgcacaaccagggggtgattcccggcatggtgtggcagaatagagacgtgtacctgcagggtcccatctgggccaaaattcctcacacggacggcaactttcacccgtctcccctgatgggcggctttggactgaagcacccgcctcctcaaattctcatcaagaacacaccggttccagcggacccgccgcttaccttcaaccaggccaagctgaactctttcatcacgcagtacagcaccggacaggtcagcgtggaaatcgagtgggagctgcagaaagaaaacagcaaacgctggaatccagagattcaatacacttccaactactacaaatctacaaatgtggactttgctgtcaacacggagggggtttatagcgagcctcgccccattggcacccgttacctcacccgcaacctgtaa

SEQ ID NO: 962 - DNA, 2328 bp, Artificial Sequence
  source: /note="Description of Artificial Sequence: Synthetic polynucleotide"
ctggctgccgatggttatcttccagattggctcgaggacaacctctctgagggcattcgcgagtggtgggacttgaaacctggagccccgaagcccaaagccaaccagcaaaagcaggacgacggccggggtctggtgcttcctggctacaagtacctcggacccttcaacggactcgacaagggggagcccgtcaacgcggcggacgcagcggccctcgagcacgacaaggcctacgaccagcagctcaaagcgggtgacaatccgtacctgcggtataaccacgccgacgccgagtttcaggagcgtctgcaagaagatacgtcttttgggggcaacctcgggcgagcagtcttccaggccaagaagcgggttctcgaacctctcggtctggttgaggaaggcgctaagatgtataccatctggatgcccgagaaccccaggcccggtaccccctgcgacatcttcaccaacagcaggggcaagcgagccagcaacggcggcggcggcggcagcggcggcggcggcagcgctcctggaaagaaacgtccggtagagcagtcgccacaagagccagactcctcctcgggcatcggcaagacaggccagcagcccgctaaaaagagactcaattttggtcagactggcgactcagagtcagtccccgatccacaacctctcggagaacctccagcagccccctcaggtctgggacctaatacaatggcttcaggcggtggcgctccaatggcagacaataacgaaggcgccgacggagtgggtaattcctcgggaaattggcattgcgattccacatggctgggggacagagtcatcaccaccagcacccgaacctgggccctgcccacctacaacaaccacctctacaagcaaatctccaacggcacctcgggaggaagcaccaacgacaacacctattttggctacagcaccccctgggggtattttgacttcaacagattccactgtcacttttcaccacgtgactggcaacgactcatcaacaacaattggggattccggcccaaaagactcaacttcaagctgttcaacatccaggtcaaggaagtcacgacgaacgaaggcaccaagaccatcgccaataatctcaccagcaccgtgcaggtctttacggactcggagtaccagttaccgtacgtgctaggatccgctcaccagggatgtctgcctccgttcccggcggacgtcttcatggttcctcagtacggctatttaactttaaacaatggaagccaagccctgggacgttcctccttctactgtctggagtatttcccatcgcagatgctgagaaccggcaacaactttcagttcagctacaccttcgaggacgtgcctttccacagcagctacgcgcacagccagagcctggacaggctgatgaatcccctcatcgaccagtacctgtactacctggtcagaacgcaaacgactggaactggagggacgcagactctggcattcagccaagcgggtcctagctcaatggccaaccaggctagaaattgggtgcccggaccttgctaccggcagcagcgcgtctccacgacaaccaaccagaacaacaacagcaactttgcctggacgggagctgccaagtttaagctgaacggccgagactctctaatgaatccgggcgtggcaatggcttcccacaaggatgacgacgaccgcttcttcccttcgagcggggtcctgatttttggcaagcaaggagccgggaacgatggagtggattacagccaagtgctgattacagatgaggaagaaatcaaggctaccaaccccgtggccacagaagaatatggagcagtggccatcaacaaccaggccgccaatacgcaggcgcagaccggactcgtgcacaaccagggggtgattcccggcatggtgtggcagaatagagacgtgtacctgcagggtcccatctgggccaaaattcctcacacggacggcaactttcacccgtctcccctgatgggcggctttggactgaagcacccgcctcctcaaattctcatcaagaacacaccggttccagcggacccgccgcttaccttcaaccaggccaagctgaactctttcatcacgcagtacagcaccggacaggtcagcgtggaaatcgagtgggagctgcagaaagaaaacagcaaacgctggaatccagagattcaatacacttccaactactacaaatctacaaatgtggactttgctgtcaacacggagggggtttatagcgagcctcgccccattggcacccgttacctcacccgcaacctgtaa

SEQ ID NO: 963 - DNA, 2298 bp, Artificial Sequence
  source: /note="Description of Artificial Sequence: Synthetic polynucleotide"
ctggctgccgatggttatcttccagattggctcgaggacaacctctctgagggcattcgcgagtggtgggacttgaaacctggagccccgaagcccaaagccaaccagcaaaagcaggacgacggccggggtctggtgcttcctggctacaagtacctcggacccttcaacggactcgacaagggggagcccgtcaacgcggcggacgcagcggccctcgagcacgacaaggcctacgaccagcagctcaaagcgggtgacaatccgtacctgcggtataaccacgccgacgccgagtttcaggagcgtctgcaagaagatacgtcttttgggggcaacctcgggcgagcagtcttccaggccaagaagcgggttctcgaacctctcggtctggttgaggaaggcgctaagatgaccttcttctacggcggcagcaggggcaagaggaacaacttcaagaccgaggagtacggcggcggcggcagcggcggcggcggcagcgctcctggaaagaaacgtccggtagagcagtcgccacaagagccagactcctcctcgggcatcggcaagacaggccagcagcccgctaaaaagagactcaattttggtcagactggcgactcagagtcagtccccgatccacaacctctcggagaacctccagcagccccctcaggtctgggacctaatacaatggcttcaggcggtggcgctccaatggcagacaataacgaaggcgccgacggagtgggtaattcctcgggaaattggcattgcgattccacatggctgggggacagagtcatcaccaccagcacccgaacctgggccctgcccacctacaacaaccacctctacaagcaaatctccaacggcacctcgggaggaagcaccaacgacaacacctattttggctacagcaccccctgggggtattttgacttcaacagattccactgtcacttttcaccacgtgactggcaacgactcatcaacaacaattggggattccggcccaaaagactcaacttcaagctgttcaacatccaggtcaaggaagtcacgacgaacgaaggcaccaagaccatcgccaataatctcaccagcaccgtgcaggtctttacggactcggagtaccagttaccgtacgtgctaggatccgctcaccagggatgtctgcctccgttcccggcggacgtcttcatggttcctcagtacggctatttaactttaaacaatggaagccaagccctgggacgttcctccttctactgtctggagtatttcccatcgcagatgctgagaaccggcaacaactttcagttcagctacaccttcgaggacgtgcctttccacagcagctacgcgcacagccagagcctggacaggctgatgaatcccctcatcgaccagtacctgtactacctggtcagaacgcaaacgactggaactggagggacgcagactctggcattcagccaagcgggtcctagctcaatggccaaccaggctagaaattgggtgcccggaccttgctaccggcagcagcgcgtctccacgacaaccaaccagaacaacaacagcaactttgcctggacgggagctgccaagtttaagctgaacggccgagactctctaatgaatccgggcgtggcaatggcttcccacaaggatgacgacgaccgcttcttcccttcgagcggggtcctgatttttggcaagcaaggagccgggaacgatggagtggattacagccaagtgctgattacagatgaggaagaaatcaaggctaccaaccccgtggccacagaagaatatggagcagtggccatcaacaaccaggccgccaatacgcaggcgcagaccggactcgtgcacaaccagggggtgattcccggcatggtgtggcagaatagagacgtgtacctgcagggtcccatctgggccaaaattcctcacacggacggcaactttcacccgtctcccctgatgggcggctttggactgaagcacccgcctcctcaaattctcatcaagaacacaccggttccagcggacccgccgcttaccttcaaccaggccaagctgaactctttcatcacgcagtacagcaccggacaggtcagcgtggaaatcgagtgggagctgcagaaagaaaacagcaaacgctggaatccagagattcaatacacttccaactactacaaatctacaaatgtggactttgctgtcaacacggagggggtttatagcgagcctcgccccattggcacccgttacctcacccgcaacctgtaa

SEQ ID NO: 964 - DNA, 2211 bp, Artificial Sequence
  source: /note="Description of Artificial Sequence: Synthetic polynucleotide"
atggctgccgatggttatcttccagattggctcgaggacaaccttagtgaaggaattcgcgagtggtgggctttgaaacctggagcccctcaacccaaggcaaatcaacaacatcaagacaacgctcgaggtcttgtgcttccgggttacaaataccttggacccggcaacggactcgacaagggggagccggtcaacgcagcagacgcggcggccctcgagcacgacaaggcctacgaccagcagctcaaggccggagacaacccgtacctcaagtacaaccacgccgacgccgagttccaggagcggctcaaagaagatacgtcttttgggggcaacctcgggcgagcagtcttccaggccaaaaagaggcttcttgaacctcttggtctggttgaggaagcggctaaggcggctcctggaaagaagaggcctgtagagcagtctcctcaggaaccggactcctccgcgggtattggcaaatcgggtgcacagcccgctaaaaagagactcaatttcggtcagactggcgacacagagtcagtcccagaccctcaaccaatcggagaacctcccgcagccccctcaggtgtgggatctcttacaatggcttcaggtggtggcgcaccagtggcagacaataacgaaggtgccgatggagtgggtagttcctcgggaaattggcattgcgattcccaatggctgggggacagagtcatcaccaccagcacccgaacctgggccctgcccacctacaacaatcacctctacaagcaaatctccaacagcacatctggaggatcttcaaatgacaacgcctacttcggctacagcaccccctgggggtattttgacttcaacagattccactgccacttctcaccacgtgactggcagcgactcatcaacaacaactggggattccggcctaagcgactcaacttcaagctcttcaacattcaggtcaaagaggttacggacaacaatggagtcaagaccatcgccaataaccttaccagcacggtccaggtcttcacggactcagactatcagctcccgtacgtgctcgggtcggctcacgagggctgcctcccgccgttcccagcggacgttttcatgattcctcagtacgggtatctgacgcttaatgatggaagccaggccgtgggtcgttcgtccttttactgcctggaatatttcccgtcgcaaatgctaagaacgggtaacaacttccagttcaactacgagtttgagaacgtacctttccatagcagctacgctcacagccaaagcctggaccgactaatgaatccactcatcgaccaatacttgtactatctctcaaagactattaacgattctggacagaatcaacaaacgctaaaattcagtgtggccggacccagcaacatggctgtccagggaagaaactacatacctggacccagctaccgacaacaacgtgtctcaaccactgtgactcaaaacaacaacagcgaatttgcttggcctggagcttcttcttgggctctcaatggacgtaatagcttgatgaatcctggacctgctatggccagccacaaagaaggagaggaccgtttctttcctttgtctggatctttaatttttggcaaacaaggaactggaagagacaacgtggatgcggacgaagtcatgataaccaacgaagaagaaattaaaactactaacccggtagcaacggagtcctatggacaagtggccataaaccaccagagtgcccaagcacaggcgcagaccggctgggttcaaaaccaaggaatacttccgggtatggtttggcaggacagagatgtgtacctgcaaggacccatttgggccaaaattcctcacacggacggcaactttcacccttctccgctgatgggagggtttggaatgaagcacccgcctcctcagatcctcatcaaaaacacacctgtacctgcggatcctccaacggccttcaacaaggacaagctgaactctttcatcacccagtattctactggccaagtcagcgtggagatcgagtgggagctgcagaaggaaaacagcaagcgctggaacccggagatccagtacacttccaactattacaagtctaataatgttgaatttgctgttaatactgaaggtgtatatagtgaaccccgccccattggcaccagatacctgactcgtaatctgtaa

SEQ ID NO: 965 - DNA, 2277 bp, Artificial Sequence
  source: /note="Description of Artificial Sequence: Synthetic polynucleotide"
ctggctgccgatggttatcttccagattggctcgaggacaaccttagtgaaggaattcgcgagtggtgggctttgaaacctggagcccctcaacccaaggcaaatcaacaacatcaagacaacgctcgaggtcttgtgcttccgggttacaaataccttggacccggcaacggactcgacaagggggagccggtcaacgcagcagacgcggcggccctcgagcacgacaaggcctacgaccagcagctcaaggccggagacaacccgtacctcaagtacaaccacgccgacgccgagttccaggagcggctcaaagaagatacgtcttttgggggcaacctcgggcgagcagtcttccaggccaaaaagaggcttcttgaacctcttggtctggttgaggaagcggctaagatgaacaaccagaagatcgtgaacctgaaggagaaggtggcccagctggaggccggcggcggcggcagcgctcctggaaagaagaggcctgtagagcagtctcctcaggaaccggactcctccgcgggtattggcaaatcgggtgcacagcccgctaaaaagagactcaatttcggtcagactggcgacacagagtcagtcccagaccctcaaccaatcggagaacctcccgcagccccctcaggtgtgggatctcttacaatggcttcaggtggtggcgcaccagtggcagacaataacgaaggtgccgatggagtgggtagttcctcgggaaattggcattgcgattcccaatggctgggggacagagtcatcaccaccagcacccgaacctgggccctgcccacctacaacaatcacctctacaagcaaatctccaacagcacatctggaggatcttcaaatgacaacgcctacttcggctacagcaccccctgggggtattttgacttcaacagattccactgccacttctcaccacgtgactggcagcgactcatcaacaacaactggggattccggcctaagcgactcaacttcaagctcttcaacattcaggtcaaagaggttacggacaacaatggagtcaagaccatcgccaataaccttaccagcacggtccaggtcttcacggactcagactatcagctcccgtacgtgctcgggtcggctcacgagggctgcctcccgccgttcccagcggacgttttcatgattcctcagtacgggtatctgacgcttaatgatggaagccaggccgtgggtcgttcgtccttttactgcctggaatatttcccgtcgcaaatgctaagaacgggtaacaacttccagttcaactacgagtttgagaacgtacctttccatagcagctacgctcacagccaaagcctggaccgactaatgaatccactcatcgaccaatacttgtactatctctcaaagactattaacgattctggacagaatcaacaaacgctaaaattcagtgtggccggacccagcaacatggctgtccagggaagaaactacatacctggacccagctaccgacaacaacgtgtctcaaccactgtgactcaaaacaacaacagcgaatttgcttggcctggagcttcttcttgggctctcaatggacgtaatagcttgatgaatcctggacctgctatggccagccacaaagaaggagaggaccgtttctttcctttgtctggatctttaatttttggcaaacaaggaactggaagagacaacgtggatgcggacgaagtcatgataaccaacgaagaagaaattaaaactactaacccggtagcaacggagtcctatggacaagtggccataaaccaccagagtgcccaagcacaggcgcagaccggctgggttcaaaaccaaggaatacttccgggtatggtttggcaggacagagatgtgtacctgcaaggacccatttgggccaaaattcctcacacggacggcaactttcacccttctccgctgatgggagggtttggaatgaagcacccgcctcctcagatcctcatcaaaaacacacctgtacctgcggatcctccaacggccttcaacaaggacaagctgaactctttcatcacccagtattctactggccaagtcagcgtggagatcgagtgggagctgcagaaggaaaacagcaagcgctggaacccggagatccagtacacttccaactattacaagtctaataatgttgaatttgctgttaatactgaaggtgtatatagtgaaccccgccccattggcaccagatacctgactcgtaatctgtaa

SEQ ID NO: 966 - DNA, 2313 bp, Artificial Sequence
  source: /note="Description of Artificial Sequence: Synthetic polynucleotide"
ctggctgccgatggttatcttccagattggctcgaggacaaccttagtgaaggaattcgcgagtggtgggctttgaaacctggagcccctcaacccaaggcaaatcaacaacatcaagacaacgctcgaggtcttgtgcttccgggttacaaataccttggacccggcaacggactcgacaagggggagccggtcaacgcagcagacgcggcggccctcgagcacgacaaggcctacgaccagcagctcaaggccggagacaacccgtacctcaagtacaaccacgccgacgccgagttccaggagcggctcaaagaagatacgtcttttgggggcaacctcgggcgagcagtcttccaggccaaaaagaggcttcttgaacctcttggtctggttgaggaagcggctaagatgtataccatctggatgcccgagaaccccaggcccggtaccccctgcgacatcttcaccaacagcaggggcaagcgagccagcaacggcggcggcggcggcagcgctcctggaaagaagaggcctgtagagcagtctcctcaggaaccggactcctccgcgggtattggcaaatcgggtgcacagcccgctaaaaagagactcaatttcggtcagactggcgacacagagtcagtcccagaccctcaaccaatcggagaacctcccgcagccccctcaggtgtgggatctcttacaatggcttcaggtggtggcgcaccagtggcagacaataacgaaggtgccgatggagtgggtagttcctcgggaaattggcattgcgattcccaatggctgggggacagagtcatcaccaccagcacccgaacctgggccctgcccacctacaacaatcacctctacaagcaaatctccaacagcacatctggaggatcttcaaatgacaacgcctacttcggctacagcaccccctgggggtattttgacttcaacagattccactgccacttctcaccacgtgactggcagcgactcatcaacaacaactggggattccggcctaagcgactcaacttcaagctcttcaacattcaggtcaaagaggttacggacaacaatggagtcaagaccatcgccaataaccttaccagcacggtccaggtcttcacggactcagactatcagctcccgtacgtgctcgggtcggctcacgagggctgcctcccgccgttcccagcggacgttttcatgattcctcagtacgggtatctgacgcttaatgatggaagccaggccgtgggtcgttcgtccttttactgcctggaatatttcccgtcgcaaatgctaagaacgggtaacaacttccagttcaactacgagtttgagaacgtacctttccatagcagctacgctcacagccaaagcctggaccgactaatgaatccactcatcgaccaatacttgtactatctctcaaagactattaacgattctggacagaatcaacaaacgctaaaattcagtgtggccggacccagcaacatggctgtccagggaagaaactacatacctggacccagctaccgacaacaacgtgtctcaaccactgtgactcaaaacaacaacagcgaatttgcttggcctggagcttcttcttgggctctcaatggacgtaatagcttgatgaatcctggacctgctatggccagccacaaagaaggagaggaccgtttctttcctttgtctggatctttaatttttggcaaacaaggaactggaagagacaacgtggatgcggacgaagtcatgataaccaacgaagaagaaattaaaactactaacccggtagcaacggagtcctatggacaagtggccataaaccaccagagtgcccaagcacaggcgcagaccggctgggttcaaaaccaaggaatacttccgggtatggtttggcaggacagagatgtgtacctgcaaggacccatttgggccaaaattcctcacacggacggcaactttcacccttctccgctgatgggagggtttggaatgaagcacccgcctcctcagatcctcatcaaaaacacacctgtacctgcggatcctccaacggccttcaacaaggacaagctgaactctttcatcacccagtattctactggccaagtcagcgtggagatcgagtgggagctgcagaaggaaaacagcaagcgctggaacccggagatccagtacacttccaactattacaagtctaataatgttgaatttgctgttaatactgaaggtgtatatagtgaaccccgccccattggcaccagatacctgactcgtaatctgtaa

SEQ ID NO: 967 - DNA, 2283 bp, Artificial Sequence
  source: /note="Description of Artificial Sequence: Synthetic polynucleotide"
ctggctgccgatggttatcttccagattggctcgaggacaaccttagtgaaggaattcgcgagtggtgggctttgaaacctggagcccctcaacccaaggcaaatcaacaacatcaagacaacgctcgaggtcttgtgcttccgggttacaaataccttggacccggcaacggactcgacaagggggagccggtcaacgcagcagacgcggcggccctcgagcacgacaaggcctacgaccagcagctcaaggccggagacaacccgtacctcaagtacaaccacgccgacgccgagttccaggagcggctcaaagaagatacgtcttttgggggcaacctcgggcgagcagtcttccaggccaaaaagaggcttcttgaacctcttggtctggttgaggaagcggctaagatgaccttcttctacggcggcagcaggggcaagaggaacaacttcaagaccgaggagtacggcggcggcggcagcgctcctggaaagaagaggcctgtagagcagtctcctcaggaaccggactcctccgcgggtattggcaaatcgggtgcacagcccgctaaaaagagactcaatttcggtcagactggcgacacagagtcagtcccagaccctcaaccaatcggagaacctcccgcagccccctcaggtgtgggatctcttacaatggcttcaggtggtggcgcaccagtggcagacaataacgaaggtgccgatggagtgggtagttcctcgggaaattggcattgcgattcccaatggctgggggacagagtcatcaccaccagcacccgaacctgggccctgcccacctacaacaatcacctctacaagcaaatctccaacagcacatctggaggatcttcaaatgacaacgcctacttcggctacagcaccccctgggggtattttgacttcaacagattccactgccacttctcaccacgtgactggcagcgactcatcaacaacaactggggattccggcctaagcgactcaacttcaagctcttcaacattcaggtcaaagaggttacggacaacaatggagtcaagaccatcgccaataaccttaccagcacggtccaggtcttcacggactcagactatcagctcccgtacgtgctcgggtcggctcacgagggctgcctcccgccgttcccagcggacgttttcatgattcctcagtacgggtatctgacgcttaatgatggaagccaggccgtgggtcgttcgtccttttactgcctggaatatttcccgtcgcaaatgctaagaacgggtaacaacttccagttcaactacgagtttgagaacgtacctttccatagcagctacgctcacagccaaagcctggaccgactaatgaatccactcatcgaccaatacttgtactatctctcaaagactattaacgattctggacagaatcaacaaacgctaaaattcagtgtggccggacccagcaacatggctgtccagggaagaaactacatacctggacccagctaccgacaacaacgtgtctcaaccactgtgactcaaaacaacaacagcgaatttgcttggcctggagcttcttcttgggctctcaatggacgtaatagcttgatgaatcctggacctgctatggccagccacaaagaaggagaggaccgtttctttcctttgtctggatctttaatttttggcaaacaaggaactggaagagacaacgtggatgcggacgaagtcatgataaccaacgaagaagaaattaaaactactaacccggtagcaacggagtcctatggacaagtggccataaaccaccagagtgcccaagcacaggcgcagaccggctgggttcaaaaccaaggaatacttccgggtatggtttggcaggacagagatgtgtacctgcaaggacccatttgggccaaaattcctcacacggacggcaactttcacccttctccgctgatgggagggtttggaatgaagcacccgcctcctcagatcctcatcaaaaacacacctgtacctgcggatcctccaacggccttcaacaaggacaagctgaactctttcatcacccagtattctactggccaagtcagcgtggagatcgagtgggagctgcagaaggaaaacagcaagcgctggaacccggagatccagtacacttccaactattacaagtctaataatgttgaatttgctgttaatactgaaggtgtatatagtgaaccccgccccattggcaccagatacctgactcgtaatctgtaa

SEQ ID NO: 968 - DNA, 2283 bp, Artificial Sequence
  source: /note="Description of Artificial Sequence: Synthetic polynucleotide"
ctggctgccgatggttatcttccagattggctcgaggacaaccttagtgaaggaattcgcgagtggtgggctttgaaacctggagcccctcaacccaaggcaaatcaacaacatcaagacaacgctcgaggtcttgtgcttccgggttacaaataccttggacccggcaacggactcgacaagggggagccggtcaacgcagcagacgcggcggccctcgagcacgacaaggcctacgaccagcagctcaaggccggagacaacccgtacctcaagtacaaccacgccgacgccgagttccaggagcggctcaaagaagatacgtcttttgggggcaacctcgggcgagcagtcttccaggccaaaaagaggcttcttgaacctcttggtctggttgaggaagcggctaagatggcagctgcggccgccgcggctgcagcggctgcagccgccgcagctgcggctgcagcgggcggcggcggcagcgctcctggaaagaagaggcctgtagagcagtctcctcaggaaccggactcctccgcgggtattggcaaatcgggtgcacagcccgctaaaaagagactcaatttcggtcagactggcgacacagagtcagtcccagaccctcaaccaatcggagaacctcccgcagccccctcaggtgtgggatctcttacaatggcttcaggtggtggcgcaccagtggcagacaataacgaaggtgccgatggagtgggtagttcctcgggaaattggcattgcgattcccaatggctgggggacagagtcatcaccaccagcacccgaacctgggccctgcccacctacaacaatcacctctacaagcaaatctccaacagcacatctggaggatcttcaaatgacaacgcctacttcggctacagcaccccctgggggtattttgacttcaacagattccactgccacttctcaccacgtgactggcagcgactcatcaacaacaactggggattccggcctaagcgactcaacttcaagctcttcaacattcaggtcaaagaggttacggacaacaatggagtcaagaccatcgccaataaccttaccagcacggtccaggtcttcacggactcagactatcagctcccgtacgtgctcgggtcggctcacgagggctgcctcccgccgttcccagcggacgttttcatgattcctcagtacgggtatctgacgcttaatgatggaagccaggccgtgggtcgttcgtccttttactgcctggaatatttcccgtcgcaaatgctaagaacgggtaacaacttccagttcaactacgagtttgagaacgtacctttccatagcagctacgctcacagccaaagcctggaccgactaatgaatccactcatcgaccaatacttgtactatctctcaaagactattaacgattctggacagaatcaacaaacgctaaaattcagtgtggccggacccagcaacatggctgtccagggaagaaactacatacctggacccagctaccgacaacaacgtgtctcaaccactgtgactcaaaacaacaacagcgaatttgcttggcctggagcttcttcttgggctctcaatggacgtaatagcttgatgaatcctggacctgctatggccagccacaaagaaggagaggaccgtttctttcctttgtctggatctttaatttttggcaaacaaggaactggaagagacaacgtggatgcggacgaagtcatgataaccaacgaagaagaaattaaaactactaacccggtagcaacggagtcctatggacaagtggccataaaccaccagagtgcccaagcacaggcgcagaccggctgggttcaaaaccaaggaatacttccgggtatggtttggcaggacagagatgtgtacctgcaaggacccatttgggccaaaattcctcacacggacggcaactttcacccttctccgctgatgggagggtttggaatgaagcacccgcctcctcagatcctcatcaaaaacacacctgtacctgcggatcctccaacggccttcaacaaggacaagctgaactctttcatcacccagtattctactggccaagtcagcgtggagatcgagtgggagctgcagaaggaaaacagcaagcgctggaacccggagatccagtacacttccaactattacaagtctaataatgttgaatttgctgttaatactgaaggtgtatatagtgaaccccgccccattggcaccagatacctgactcgtaatctgtaa

SEQ ID NO: 969 - protein, 726 aa, Artificial Sequence
  source: /note="Description of Artificial Sequence: Synthetic polypeptide"
MEVQLQASGGGLVQAGGSLRLSCAASGFKITHYTMGWFRQAPGKEREFVSRITWGGDNTFYSNSVKGRFTISRDNAKNTVYLQMNSLKPEDTADYYCAAGSTSTATPLRVDYWGKGTQVTVSSGGGGSAPGKKRPVEQSPQEPDSSSGIGKTGQQPAKKRLNFGQTGDSESVPDPQPLGEPPAAPSGLGPNTMASGGGAPMADNNEGADGVGNSSGNWHCDSTWLGDRVITTSTRTWALPTYNNHLYKQISNGTSGGSTNDNTYFGYSTPWGYFDFNRFHCHFSPRDWQRLINNNWGFRPKRLNFKLFNIQVKEVTTNEGTKTIANNLTSTVQVFTDSEYQLPYVLGSAHQGCLPPFPADVFMVPQYGYLTLNNGSQALGRSSFYCLEYFPSQMLRTGNNFQFSYTFEDVPFHSSYAHSQSLDRLMNPLIDQYLYYLVRTQTTGTGGTQTLAFSQAGPSSMANQARNWVPGPCYRQQRVSTTTNQNNNSNFAWTGAAKFKLNGRDSLMNPGVAMASHKDDDDRFFPSSGVLIFGKQGAGNDGVDYSQVLITDEEEIKATNPVATEEYGAVAINNQAANTQAQTGLVHNQGVIPGMVWQNRDVYLQGPIWAKIPHTDGNFHPSPLMGGFGLKHPPPQILIKNTPVPADPPLTFNQAKLNSFITQYSTGQVSVEIEWELQKENSKRWNPEIQYTSNYYKSTNVDFAVNTEGVYSEPRPIGTRYLTRNL

SEQ ID NO: 970 - protein, 729 aa, Artificial Sequence
  source: /note="Description of Artificial Sequence: Synthetic polypeptide"
MEVQLQASGGGLVQAGGSLRLSCSASVRTFSIYAMGWFRQAPGKEREFVAGINRSGDVTKYADFVKGRFSISRDNAKNMVYLQMNSLKPEDTALYYCAATWAYDTVGALTSGYNFWGQGTQVTVSSGGGGSAPGKKRPVEQSPQEPDSSSGIGKTGQQPAKKRLNFGQTGDSESVPDPQPLGEPPAAPSGLGPNTMASGGGAPMADNNEGADGVGNSSGNWHCDSTWLGDRVITTSTRTWALPTYNNHLYKQISNGTSGGSTNDNTYFGYSTPWGYFDFNRFHCHFSPRDWQRLINNNWGFRPKRLNFKLFNIQVKEVTTNEGTKTIANNLTSTVQVFTDSEYQLPYVLGSAHQGCLPPFPADVFMVPQYGYLTLNNGSQALGRSSFYCLEYFPSQMLRTGNNFQFSYTFEDVPFHSSYAHSQSLDRLMNPLIDQYLYYLVRTQTTGTGGTQTLAFSQAGPSSMANQARNWVPGPCYRQQRVSTTTNQNNNSNFAWTGAAKFKLNGRDSLMNPGVAMASHKDDDDRFFPSSGVLIFGKQGAGNDGVDYSQVLITDEEEIKATNPVATEEYGAVAINNQAANTQAQTGLVHNQGVIPGMVWQNRDVYLQGPIWAKIPHTDGNFHPSPLMGGFGLKHPPPQILIKNTPVPADPPLTFNQAKLNSFITQYSTGQVSVEIEWELQKENSKRWNPEIQYTSNYYKSTNVDFAVNTEGVYSEPRPIGTRYLTRNL

SEQ ID NO: 971 - protein, 651 aa, Artificial Sequence
  source: /note="Description of Artificial Sequence: Synthetic polypeptide"
MPSSVIDALQYKLEGTTRLTRKRGLKLATALSLSNKFVEGSPSGGGGSGGGGSAPGKKRPVEQSPQEPDSSSGIGKTGQQPAKKRLNFGQTGDSESVPDPQPLGEPPAAPSGLGPNTMASGGGAPMADNNEGADGVGNSSGNWHCDSTWLGDRVITTSTRTWALPTYNNHLYKQISNGTSGGSTNDNTYFGYSTPWGYFDFNRFHCHFSPRDWQRLINNNWGFRPKRLNFKLFNIQVKEVTTNEGTKTIANNLTSTVQVFTDSEYQLPYVLGSAHQGCLPPFPADVFMVPQYGYLTLNNGSQALGRSSFYCLEYFPSQMLRTGNNFQFSYTFEDVPFHSSYAHSQSLDRLMNPLIDQYLYYLVRTQTTGTGGTQTLAFSQAGPSSMANQARNWVPGPCYRQQRVSTTTNQNNNSNFAWTGAAKFKLNGRDSLMNPGVAMASHKDDDDRFFPSSGVLIFGKQGAGNDGVDYSQVLITDEEEIKATNPVATEEYGAVAINNQAANTQAQTGLVHNQGVIPGMVWQNRDVYLQGPIWAKIPHTDGNFHPSPLMGGFGLKHPPPQILIKNTPVPADPPLTFNQAKLNSFITQYSTGQVSVEIEWELQKENSKRWNPEIQYTSNYYKSTNVDFAVNTEGVYSEPRPIGTRYLTRNL

SEQ ID NO: 972 - protein, 638 aa, Artificial Sequence
  source: /note="Description of Artificial Sequence: Synthetic polypeptide"
MYTIWMPENPRPGTPCDIFTNSRGKRASNGGGGGSGGGGSAPGKKRPVEQSPQEPDSSSGIGKTGQQPAKKRLNFGQTGDSESVPDPQPLGEPPAAPSGLGPNTMASGGGAPMADNNEGADGVGNSSGNWHCDSTWLGDRVITTSTRTWALPTYNNHLYKQISNGTSGGSTNDNTYFGYSTPWGYFDFNRFHCHFSPRDWQRLINNNWGFRPKRLNFKLFNIQVKEVTTNEGTKTIANNLTSTVQVFTDSEYQLPYVLGSAHQGCLPPFPADVFMVPQYGYLTLNNGSQALGRSSFYCLEYFPSQMLRTGNNFQFSYTFEDVPFHSSYAHSQSLDRLMNPLIDQYLYYLVRTQTTGTGGTQTLAFSQAGPSSMANQARNWVPGPCYRQQRVSTTTNQNNNSNFAWTGAAKFKLNGRDSLMNPGVAMASHKDDDDRFFPSSGVLIFGKQGAGNDGVDYSQVLITDEEEIKATNPVATEEYGAVAINNQAANTQAQTGLVHNQGVIPGMVWQNRDVYLQGPIWAKIPHTDGNFHPSPLMGGFGLKHPPPQILIKNTPVPADPPLTFNQAKLNSFITQYSTGQVSVEIEWELQKENSKRWNPEIQYTSNYYKSTNVDFAVNTEGVYSEPRPIGTRYLTRNL

SEQ ID NO: 973 - protein, 628 aa, Artificial Sequence
  source: /note="Description of Artificial Sequence: Synthetic polypeptide"
MTFFYGGSRGKRNNFKTEEYGGGGSGGGGSAPGKKRPVEQSPQEPDSSSGIGKTGQQPAKKRLNFGQTGDSESVPDPQPLGEPPAAPSGLGPNTMASGGGAPMADNNEGADGVGNSSGNWHCDSTWLGDRVITTSTRTWALPTYNNHLYKQISNGTSGGSTNDNTYFGYSTPWGYFDFNRFHCHFSPRDWQRLINNNWGFRPKRLNFKLFNIQVKEVTTNEGTKTIANNLTSTVQVFTDSEYQLPYVLGSAHQGCLPPFPADVFMVPQYGYLTLNNGSQALGRSSFYCLEYFPSQMLRTGNNFQFSYTFEDVPFHSSYAHSQSLDRLMNPLIDQYLYYLVRTQTTGTGGTQTLAFSQAGPSSMANQARNWVPGPCYRQQRVSTTTNQNNNSNFAWTGAAKFKLNGRDSLMNPGVAMASHKDDDDRFFPSSGVLIFGKQGAGNDGVDYSQVLITDEEEIKATNPVATEEYGAVAINNQAANTQAQTGLVHNQGVIPGMVWQNRDVYLQGPIWAKIPHTDGNFHPSPLMGGFGLKHPPPQILIKNTPVPADPPLTFNQAKLNSFITQYSTGQVSVEIEWELQKENSKRWNPEIQYTSNYYKSTNVDFAVNTEGVYSEPRPIGTRYLTRNL

SEQ ID NO: 974 - protein, 621 aa, Artificial Sequence
  source: /note="Description of Artificial Sequence: Synthetic polypeptide"
MNNQKIVNLKEKVAQLEAGGGGSAPGKKRPVEQSPQEPDSSAGIGKSGAQPAKKRLNFGQTGDTESVPDPQPIGEPPAAPSGVGSLTMASGGGAPVADNNEGADGVGSSSGNWHCDSQWLGDRVITTSTRTWALPTYNNHLYKQISNSTSGGSSNDNAYFGYSTPWGYFDFNRFHCHFSPRDWQRLINNNWGFRPKRLNFKLFNIQVKEVTDNNGVKTIANNLTSTVQVFTDSDYQLPYVLGSAHEGCLPPFPADVFMIPQYGYLTLNDGSQAVGRSSFYCLEYFPSQMLRTGNNFQFNYEFENVPFHSSYAHSQSLDRLMNPLIDQYLYYLSKTINDSGQNQQTLKFSVAGPSNMAVQGRNYIPGPSYRQQRVSTTVTQNNNSEFAWPGASSWALNGRNSLMNPGPAMASHKEGEDRFFPLSGSLIFGKQGTGRDNVDADEVMITNEEEIKTTNPVATESYGQVAINHQSAQAQAQTGWVQNQGILPGMVWQDRDVYLQGPIWAKIPHTDGNFHPSPLMGGFGMKHPPPQILIKNTPVPADPPTAFNKDKLNSFITQYSTGQVSVEIEWELQKENSKRWNPEIQYTSNYYKSNNVEFAVNTEGVYSEPRPIGTRYLTRNL

SEQ ID NO: 975 - protein, 633 aa, Artificial Sequence
  source: /note="Description of Artificial Sequence: Synthetic polypeptide"
MYTIWMPENPRPGTPCDIFTNSRGKRASNGGGGGSAPGKKRPVEQSPQEPDSSAGIGKSGAQPAKKRLNFGQTGDTESVPDPQPIGEPPAAPSGVGSLTMASGGGAPVADNNEGADGVGSSSGNWHCDSQWLGDRVITTSTRTWALPTYNNHLYKQISNSTSGGSSNDNAYFGYSTPWGYFDFNRFHCHFSPRDWQRLINNNWGFRPKRLNFKLFNIQVKEVTDNNGVKTIANNLTSTVQVFTDSDYQLPYVLGSAHEGCLPPFPADVFMIPQYGYLTLNDGSQAVGRSSFYCLEYFPSQMLRTGNNFQFNYEFENVPFHSSYAHSQSLDRLMNPLIDQYLYYLSKTINDSGQNQQTLKFSVAGPSNMAVQGRNYIPGPSYRQQRVSTTVTQNNNSEFAWPGASSWALNGRNSLMNPGPAMASHKEGEDRFFPLSGSLIFGKQGTGRDNVDADEVMITNEEEIKTTNPVATESYGQVAINHQSAQAQAQTGWVQNQGILPGMVWQDRDVYLQGPIWAKIPHTDGNFHPSPLMGGFGMKHPPPQILIKNTPVPADPPTAFNKDKLNSFITQYSTGQVSVEIEWELQKENSKRWNPEIQYTSNYYKSNNVEFAVNTEGVYSEPRPIGTRYLTRNL

SEQ ID NO: 976 - protein, 623 aa, Artificial Sequence
  source: /note="Description of Artificial Sequence: Synthetic polypeptide"
MTFFYGGSRGKRNNFKTEEYGGGGSAPGKKRPVEQSPQEPDSSAGIGKSGAQPAKKRLNFGQTGDTESVPDPQPIGEPPAAPSGVGSLTMASGGGAPVADNNEGADGVGSSSGNWHCDSQWLGDRVITTSTRTWALPTYNNHLYKQISNSTSGGSSNDNAYFGYSTPWGYFDFNRFHCHFSPRDWQRLINNNWGFRPKRLNFKLFNIQVKEVTDNNGVKTIANNLTSTVQVFTDSDYQLPYVLGSAHEGCLPPFPADVFMIPQYGYLTLNDGSQAVGRSSFYCLEYFPSQMLRTGNNFQFNYEFENVPFHSSYAHSQSLDRLMNPLIDQYLYYLSKTINDSGQNQQTLKFSVAGPSNMAVQGRNYIPGPSYRQQRVSTTVTQNNNSEFAWPGASSWALNGRNSLMNPGPAMASHKEGEDRFFPLSGSLIFGKQGTGRDNVDADEVMITNEEEIKTTNPVATESYGQVAINHQSAQAQAQTGWVQNQGILPGMVWQDRDVYLQGPIWAKIPHTDGNFHPSPLMGGFGMKHPPPQILIKNTPVPADPPTAFNKDKLNSFITQYSTGQVSVEIEWELQKENSKRWNPEIQYTSNYYKSNNVEFAVNTEGVYSEPRPIGTRYLTRNL

SEQ ID NO: 977 - protein, 623 aa, Artificial Sequence
  source: /note="Description of Artificial Sequence: Synthetic polypeptide"
MAAAAAAAAAAAAAAAAAAAGGGGSAPGKKRPVEQSPQEPDSSAGIGKSGAQPAKKRLNFGQTGDTESVPDPQPIGEPPAAPSGVGSLTMASGGGAPVADNNEGADGVGSSSGNWHCDSQWLGDRVITTSTRTWALPTYNNHLYKQISNSTSGGSSNDNAYFGYSTPWGYFDFNRFHCHFSPRDWQRLINNNWGFRPKRLNFKLFNIQVKEVTDNNGVKTIANNLTSTVQVFTDSDYQLPYVLGSAHEGCLPPFPADVFMIPQYGYLTLNDGSQAVGRSSFYCLEYFPSQMLRTGNNFQFNYEFENVPFHSSYAHSQSLDRLMNPLIDQYLYYLSKTINDSGQNQQTLKFSVAGPSNMAVQGRNYIPGPSYRQQRVSTTVTQNNNSEFAWPGASSWALNGRNSLMNPGPAMASHKEGEDRFFPLSGSLIFGKQGTGRDNVDADEVMITNEEEIKTTNPVATESYGQVAINHQSAQAQAQTGWVQNQGILPGMVWQDRDVYLQGPIWAKIPHTDGNFHPSPLMGGFGMKHPPPQILIKNTPVPADPPTAFNKDKLNSFITQYSTGQVSVEIEWELQKENSKRWNPEIQYTSNYYKSNNVEFAVNTEGVYSEPRPIGTRYLTRNL

SEQ ID NO: 978 - DNA, 2214 bp, Artificial Sequence
  source: /note="Description of Artificial Sequence: Synthetic polynucleotide"
atggctgccgatggttatcttccagattggctcgaggacaacctctctgagggcattcgcgagtggtgggacttgaaacctggagccccgaagcccaaagccaaccagcaaaagcaggacgacggccggggtctggtgcttcctggctacaagtacctcggacccttcaacggactcgacaagggggagcccgtcaacgcggcggacgcagcggccctcgagcacgacaaggcctacgaccagcagctcaaagcgggtgacaatccgtacctgcggtataaccacgccgacgtcgagtttcaggagcgtctgcaagaagatacgtcttttgggggcaacctcgggcgagcagtcttccaggccaagaagagggttctcgaaccttttggtctggttgaggaaggcgctaagacggctcctggaaagaaacgtccggtagagcagtcgccacaagagccagactcctcctcgggcatcggcaagaaaggccaacagcccgccagaaaaagactcaattttggccagactggcgactcagagtcagttccagaccctcaacctctcggagaacctccagcagcgccctctggtgtgggacctaatacaatggctgcaggcggtggcgcaccaatggcagacaataacgagggcgccgacggagtgggtaattcctcgggaaattggcattgcgattccacatggatgggggacagagtcatcaccaccagcacccgaacctgggccctgcccacctacaacaaccacctctacaagcaaatctccaacggcacctcgggaggaagcaccaacgacaacacctattttggctacagcaccccctgggggtattttgatttcaacagattccactgccacttctcaccacgtgactggcagcgactcatcaacaacaactggggattccggccaaaaagactcagcttcaagctcttcaacatccaggtcaaggaggtcacgcagaatgaaggcaccaagaccatcgccaataaccttaccagcacgattcaggtatttacggactcggaataccagctgccatacgtcctcggctccgcgcaccagggctgcctgcctccgttcccggcggacgtcttcatgattccccagtacggctaccttacactgaacaatggaagtcaagccgtaggccgttcctccttctactgcctggaatattttccttctcaaatgctgagaacgggcaacaactttgagttcagctaccagtttgaggacgtgccttttcacagcagctacgcgcacagccaaagcctggaccggctgatgaaccccctcatcgaccagtacctgtactacctgtctcggactcagtccacgggaggtaccgcaagaactcagcagttgctattttctcaggccgggcctaatacaatggccaatcaggcaaagaactggctgccaggaccctgttaccgccaacaacgcgtctcaacgacaaccgggcaaaacaacaatagcaactctgcctggactgctgggaccaaataccatctgaatggaagaaattcattggctaatcctggcatcgctatggcaacacacaaagacgacgaggagcgtttttttcccagtaacgggatcctgatttttggcaaacaaaatgctgccagagacaatgcggattacagcgatgtcatgctcaccagcgaggaagaaatcaaaaccactaaccctgtggctacagaggaatacggtatcgtggcagataacttgcagcagcaaaacacggctcctcaaattggaactgtcaacagccagggggccttacccggtatggtctggcagaaccgggacgtgtacctgcagggtcccatctgggccaagattcctcacacggacggcaacttccacccatctccgctgatgggcggctttggcctgaaacatcctccgcctcagatcctgatcaagaacacgcctgtacctgcggatcctccgaccaccttcaaccagtcaaagctgaactctttcatcacgcaatacagcaccggacaggtcagcgtggaaattgaatgggagctacagaaggaaaacagcaagcgctggaaccccgagatccagtacacctccaactactacaaatctacaagtgtggactttgctgttaatacagaaggcgtgtactctgaaccccgccccattggcacccgttacctcacccgtaatctgtaa

SEQ ID NO: 979 - DNA, 2214 bp, Artificial Sequence
  source: /note="Description of Artificial Sequence: Synthetic polynucleotide"
atggctgccgatggttatcttccagattggctcgaggacaacctctctgagggcattcgcgagtggtgggcgctgaaacctggagccccgaagcccaaagccaaccagcaaaagcaggacgacggccggggtctggtgcttcctggctacaagtacctcggacccttcaacggactcgacaagggggagcccgtcaacgcggcggacgcagcggccctcgagcacgacaaggcctacgaccagcagctcaaagcgggtgacaatccgtacctgcggtataaccacgccgacgccgagtttcaggagcgtctgcaagaagatacgtcttttgggggcaacctcgggcgagcagtcttccaggccaagaagcgggttctcgaacctctcggtctggttgaggacggcgctaagacggctcctggaaagaagagaccagtagagcagtcaccccaagaaccagactcctcctcgggcatcggcaagaaaggccaacagcccgccagaaaaagactcaattttggccagactggcgactcagagtcagttccagaccctcaacctctcggagaacctccagcaacccccgctgctgtgggacctactacaatggcttcaggcggtggcgcaccaatggcagacaataacgaaggcgccgacggagtgggtagttcctcgggaaattggcattgcgattccacatggctgggcgacagagtcatcaccaccagcacccgaacctgggccctgcccacctacaacaaccacctctacaagcaaatctccaacgggacatcgggaggagccaccaacgacaacacctacttcggctacagcaccccctgggggtattttgactttaacagattccactgccacttttcaccacgtgactggcagcgactcatcaacaacaactggggattccggcccaagagactcagcttcaagctcttcaacatccaggtcaaggaggtcacgcagaatgaaggcaccaagaccatcgccaataacctcaccagcaccatccaggtgtttacggactcggagtaccagctgccgtacgttctcggctctgcccaccagggctgcctgcctccgttcccggcggacgtgttcatgattccccagtacggctacctaacactcaacaacggtagtcaggccgtgggacgctcctccttctactgcctggaatactttccttcgcagatgctgagaaccggcaacaacttccagtttacttacaccttcgaggacgtgcctttccacagcagctacgcccacagccagagcttggaccggctgatgaatcctctgattgaccagtacctgtactacttgtctcggactcaaacaacaggaggcacggcaaatacgcagactctgggcttcagccaaggtgggcctaatacaatggccaatcaggcaaagaactggctgccaggaccctgttaccgccaacaacgcgtctcaacgacaaccgggcaaaacaacaatagcaactttgcctggactgctgggaccaaataccatctgaatggaagaaattcattggctaatcctggcatcgctatggcaacacacaaggacgacgaggagcgtttttttcccagtaacgggatcctgatttttggcaaacaaaatgctgccagagacaatgcggattacagcgatgtcatgctcaccagcgaggaagaaatcaaaaccactaaccctgtggctacagaggaatacggtatcgtggcagataacttgcagcagcaaaacacggctcctcaaattggaactgtcaacagccagggggccttacccggtatggtctggcagaaccgggacgtgtacctgcagggtcccatctgggccaagattcctcacacggacggcaacttccacccgtctccgctgatgggcggctttggcctgaaacatcctccgcctcagatcctgatcaagaacacgcctgtacctgcggatcctccgaccaccttcaaccagtcaaagctgaactctttcatcacgcaatacagcaccggacaggtcagcgtggaaatcgagtgggagctgcagaaagaaaacagcaagcgctggaaccccgagatccagtacacctccaactactacaaatctacaaatgtggactttgctgtcaacacggagggggtttatagcgagcctcgccccattggcacccgttacctcacccgcaacctgtaa

SEQ ID NO: 980 - DNA, 2211 bp, Artificial Sequence
  source: /note="Description of Artificial Sequence: Synthetic polynucleotide"
  modified_base (715)..(715): a, c, t, g, unknown or other
atggctgccgatggttatcttccagattggctcgaggacaacctctctgagggcattcgcgagtggtgggcgctgaaacctggagccccgaagcccaaagccaaccagcaaaagcaggacgacggccggggtctggtgcttcctggctacaagtacctcggacccttcaacggactcgacaagggggagcccgtcaacgcggcggacgcagcggccctcgagcacgacaaggcctacgaccagcagctcaaagcgggtgacaatccgtacctgcggtataaccacgccgacgccgagtttcaggagcgtctgcaagaagatacgtcttttgggggcaacctcgggcgagcagtcttccaggccaagaagcgggttctcgaacctctcggtctggttgaggaaggcgctaagacggctcctggaaagaaacgtccggtagagcagtcgccacaagagccagactcctcctcgggcatcggcaagacaggccagcagcccgctaaaaagaggctcaattttggtcagactggcgactcagagtcagtccccgacccacaacctctcggagaacctccagcaacccccgctgctgtgggacctactacaatggcttcaggcggtggcgcaccaatggcagacaataacgaaggcgccgacggagtgggtaatgcctcaggaaattggcattgcgattccacatggctgggcgacagantcatcaccaccagcacccgaacatgggccttgcccacctataacaaccacctctacaagcaaatctccagtgcttcaacgggggccagcaacgacaaccactacttcggctacagcaccccctgggggtattttgatttcaacagattccactgccatttctcaccacgtgactggcagcgactcatcaacaacaattggggattccggcccaagagactcaacttcaagctcttcaacatccaagtcaaggaggtcacgcagaatgaaggcaccaagaccatcgccaataacctcaccagcaccatccaggtgtttacggactcggagtaccagctgccgtacgttctcggctctgcccaccagggctgcctgcctccgttcccggcggacgtgttcatgattccccagtacggctacctaacactcaacaacggtagtcaggccgtgggacgctcctccttctactgcctggaatattttccatctcaaatgctgcgaactggaaacaattttgaattcagctacaccttcgaggacgtgcctttccacagcagctacgcacacagccagagcttggaccgactgatgaatcctctcatcgaccagtacctgtactacttgtctcggactcaaacaacaggaggcacggcaaatacgcagactctgggcttcagccaaggtgggcctaatacaatggccaatcaggcaaagaactggctgccaggaccctgttaccgccaacaacgcgtctcaacgacaaccgggcaaaacaacaatagcaactttgcctggactgctgggaccaaataccatctgaatggaagaaattcattggctaatcctggcatcgctatggcaacacacaaagacgacgaggagcgtttttttcccagtaacgggatcctgatttttggcaaacaaaatgctgccagagacaatgcggattacagcgatgtcatgctcaccagcgaggaagaaatcaaaaccactaaccctgtggctacagaggaatacggtatcgtggcagataacttgcagcagcaaaacacggctcctcaaattggaactgtcaacagccaggggaccttacccggtatggtctggcagaaccgggacgtgtacctgcagggtcccatctgggccaagattcctcacacggacggcaacttccacccgtctccgctgatgggcggctttggcctgaaacatcctccgcctcagatcctgatcaagaacacgcctgtacctgcggatcctccgaccaccttcaaccagtcaaagctgaactctttcatcacgcaatacagcaccggacaggtcagcgtggaaattgaatgggagctacagaaggaaaacagcaagcgctggaaccccgagatccagtacacctccaattactacaaatctacaagtgtggactttgctgttaatacagaaggcgtgtactctgaaccccgccccattggcacgcgtttcctcacccgtaatctgtaa

SEQ ID NO: 981 - DNA, 2214 bp, Artificial Sequence
  source: /note="Description of Artificial Sequence: Synthetic polynucleotide"
atggctgccgatggttatcttccagattggctcgaggacaacctctctgagggcattcgcgagtggtgggcgctgaaacctggagccccgaagcccaaagccaaccagcaaaagcaggacgacggccggggtctggtgcttcctggctacaagtacctcggacccttcaacggactcgacaagggggagcccgtcaacgcggcggacgcagcggccctcgagcacgacaaggcctacgaccagcagctcaaagcgggtgacaatccgtacctgcggtataaccacgccgacgccgagtttcaggagcgtctgcaagaagatacgtcttttgggggcaacctcgggcgagcagtcttccaggccaagaagcgggttctcgaacctctcggtctggttgaggaaggcgctaagacggctcctggaaagaaacgtccggtagagcagtcgccacaagagccagactcctcctcgggcatcggcaagacaggccagcagcccgctaaaaagaggctcaattttggccagactggcgactcagagtcagttccagaccctcaacctctcggagaacctccagcagcgccctctggtgtgggacctaatacaatggctgcaggcggtggcgcaccaatggcagacaataacgaaggcgccgacggagtgggtagttcctcgggaaattggcattgcgattccacatggctgggcgacagagtcatcaccaccagcacccgaacctgggccctgcccacctacaacaaccacctctacaagcaaatctccaacgggacatcgggaggagccaccaacgacaacacctacttcggctacagcaccccctgggggtattttgactttaacagattccactgccacttttcaccacgtgactggcagcgactcatcaacaacaactggggattccggcccaagagactcagcttcaagctcttcaacatccaggtcaaggaggtcacgcagaatgaaggcaccaagaccatcgccaataacctcaccagcaccatccaggtgtttacggactcggagtaccagctgccgtacgtactaggatccgctcaccagggatgtctgcctccgttcccggcggacgtgttcatgattccccagtacggctacctaacactcaacaacggtagtcaggccgtgggacgctcctccttctactgcctggaatattttccatctcagatgctgagaacgggcaataactttaccttcagctacaccttcgaggacgtgcctttccacagcagctatgcccacagccagagcttggaccggctgatgaatcctctgattgaccagtacctgtactacttgtctcggactcaaacaacaggaggcacggcaaatacgcagactctgggcttcagccaaggtgggcctaatacaatggccaatcaggcaaagaactggctgccaggaccctgttaccgccaacaacgcgtctcaacgacaaccgggcaaaacaacaatagcaactttgcctggactgctgggaccaaataccatctgaatggaagaaattcattggctaatcctggcatcgctatggcaacacacaaagacgacgaggagcgtttttttcccagtaacgggatcctgatttttggcaaacaaaatgctgccagagacaatgcggattacagcgatgtcatgctcaccagcgaggaagaaatcaaaaccactaaccctgtggctacagaggaatacggtatcgtggcagataacttgcagcagcaaaacacggctcctcaaattggaactgtcaacagccagggggccttacccggtatggtctggcagaaccgggacgtgtacctgcagggtcccatctgggccaagattcctcacacggacggcaacttccacccgtctccgctaatgggaggatttggactgaagcacccacctcctcagatcctgatcaagaacacgccggtacctgcggatcctccgaccaccttcaaccagtcaaagctgtactctttcatcacgcaatacagcaccggacaggtcagcgtggaaattgaatgggagctgcagaaggaaaacagcaagcgctggaaccccgagatccaatacacctccaactactacaaatctacaagtgtggactttgctgttaatacagaaggcgtgtactctgaaccccgccccattggcacccgttacctcacccgtaatctgtaa

SEQ ID NO: 982 - protein, 737 aa, Artificial Sequence
  source: /note="Description of Artificial Sequence: Synthetic polypeptide"
MAADGYLPDWLEDNLSEGIREWWDLKPGAPKPKANQQKQDDGRGLVLPGYKYLGPFNGLDKGEPVNAADAAALEHDKAYDQQLKAGDNPYLRYNHADVEFQERLQEDTSFGGNLGRAVFQAKKRVLEPFGLVEEGAKTAPGKKRPVEQSPQEPDSSSGIGKKGQQPARKRLNFGQTGDSESVPDPQPLGEPPAAPSGVGPNTMAAGGGAPMADNNEGADGVGNSSGNWHCDSTWMGDRVITTSTRTWALPTYNNHLYKQISNGTSGGSTNDNTYFGYSTPWGYFDFNRFHCHFSPRDWQRLINNNWGFRPKRLSFKLFNIQVKEVTQNEGTKTIANNLTSTIQVFTDSEYQLPYVLGSAHQGCLPPFPADVFMIPQYGYLTLNNGSQAVGRSSFYCLEYFPSQMLRTGNNFEFSYQFEDVPFHSSYAHSQSLDRLMNPLIDQYLYYLSRTQSTGGTARTQQLLFSQAGPNTMANQAKNWLPGPCYRQQRVSTTTGQNNNSNSAWTAGTKYHLNGRNSLANPGIAMATHKDDEERFFPSNGILIFGKQNAARDNADYSDVMLTSEEEIKTTNPVATEEYGIVADNLQQQNTAPQIGTVNSQGALPGMVWQNRDVYLQGPIWAKIPHTDGNFHPSPLMGGFGLKHPPPQILIKNTPVPADPPTTFNQSKLNSFITQYSTGQVSVEIEWELQKENSKRWNPEIQYTSNYYKSTSVDFAVNTEGVYSEPRPIGTRYLTRNL

SEQ ID NO: 983 - protein, 737 aa, Artificial Sequence
  source: /note="Description of Artificial Sequence: Synthetic polypeptide"
MAADGYLPDWLEDNLSEGIREWWALKPGAPKPKANQQKQDDGRGLVLPGYKYLGPFNGLDKGEPVNAADAAALEHDKAYDQQLKAGDNPYLRYNHADAEFQERLQEDTSFGGNLGRAVFQAKKRVLEPLGLVEDGAKTAPGKKRPVEQSPQEPDSSSGIGKKGQQPARKRLNFGQTGDSESVPDPQPLGEPPATPAAVGPTTMASGGGAPMADNNEGADGVGSSSGNWHCDSTWLGDRVITTSTRTWALPTYNNHLYKQISNGTSGGATNDNTYFGYSTPWGYFDFNRFHCHFSPRDWQRLINNNWGFRPKRLSFKLFNIQVKEVTQNEGTKTIANNLTSTIQVFTDSEYQLPYVLGSAHQGCLPPFPADVFMIPQYGYLTLNNGSQAVGRSSFYCLEYFPSQMLRTGNNFQFTYTFEDVPFHSSYAHSQSLDRLMNPLIDQYLYYLSRTQTTGGTANTQTLGFSQGGPNTMANQAKNWLPGPCYRQQRVSTTTGQNNNSNFAWTAGTKYHLNGRNSLANPGIAMATHKDDEERFFPSNGILIFGKQNAARDNADYSDVMLTSEEEIKTTNPVATEEYGIVADNLQQQNTAPQIGTVNSQGALPGMVWQNRDVYLQGPIWAKIPHTDGNFHPSPLMGGFGLKHPPPQILIKNTPVPADPPTTFNQSKLNSFITQYSTGQVSVEIEWELQKENSKRWNPEIQYTSNYYKSTNVDFAVNTEGVYSEPRPIGTRYLTRNL

SEQ ID NO: 984 - protein, 736 aa, Artificial Sequence
  source: /note="Description of Artificial Sequence: Synthetic polypeptide"
  MOD_RES (239)..(239): Any amino acid
MAADGYLPDWLEDNLSEGIREWWALKPGAPKPKANQQKQDDGRGLVLPGYKYLGPFNGLDKGEPVNAADAAALEHDKAYDQQLKAGDNPYLRYNHADAEFQERLQEDTSFGGNLGRAVFQAKKRVLEPLGLVEEGAKTAPGKKRPVEQSPQEPDSSSGIGKTGQQPAKKRLNFGQTGDSESVPDPQPLGEPPATPAAVGPTTMASGGGAPMADNNEGADGVGNASGNWHCDSTWLGDRXITTSTRTWALPTYNNHLYKQISSASTGASNDNHYFGYSTPWGYFDFNRFHCHFSPRDWQRLINNNWGFRPKRLNFKLFNIQVKEVTQNEGTKTIANNLTSTIQVFTDSEYQLPYVLGSAHQGCLPPFPADVFMIPQYGYLTLNNGSQAVGRSSFYCLEYFPSQMLRTGNNFEFSYTFEDVPFHSSYAHSQSLDRLMNPLIDQYLYYLSRTQTTGGTANTQTLGFSQGGPNTMANQAKNWLPGPCYRQQRVSTTTGQNNNSNFAWTAGTKYHLNGRNSLANPGIAMATHKDDEERFFPSNGILIFGKQNAARDNADYSDVMLTSEEEIKTTNPVATEEYGIVADNLQQQNTAPQIGTVNSQGTLPGMVWQNRDVYLQGPIWAKIPHTDGNFHPSPLMGGFGLKHPPPQILIKNTPVPADPPTTFNQSKLNSFITQYSTGQVSVEIEWELQKENSKRWNPEIQYTSNYYKSTSVDFAVNTEGVYSEPRPIGTRFLTRNL

SEQ ID NO: 985 - protein, 737 aa, Artificial Sequence
  source: /note="Description of Artificial Sequence: Synthetic polypeptide"
MAADGYLPDWLEDNLSEGIREWWALKPGAPKPKANQQKQDDGRGLVLPGYKYLGPFNGLDKGEPVNAADAAALEHDKAYDQQLKAGDNPYLRYNHADAEFQERLQEDTSFGGNLGRAVFQAKKRVLEPLGLVEEGAKTAPGKKRPVEQSPQEPDSSSGIGKTGQQPAKKRLNFGQTGDSESVPDPQPLGEPPAAPSGVGPNTMAAGGGAPMADNNEGADGVGSSSGNWHCDSTWLGDRVITTSTRTWALPTYNNHLYKQISNGTSGGATNDNTYFGYSTPWGYFDFNRFHCHFSPRDWQRLINNNWGFRPKRLSFKLFNIQVKEVTQNEGTKTIANNLTSTIQVFTDSEYQLPYVLGSAHQGCLPPFPADVFMIPQYGYLTLNNGSQAVGRSSFYCLEYFPSQMLRTGNNFTFSYTFEDVPFHSSYAHSQSLDRLMNPLIDQYLYYLSRTQTTGGTANTQTLGFSQGGPNTMANQAKNWLPGPCYRQQRVSTTTGQNNNSNFAWTAGTKYHLNGRNSLANPGIAMATHKDDEERFFPSNGILIFGKQNAARDNADYSDVMLTSEEEIKTTNPVATEEYGIVADNLQQQNTAPQIGTVNSQGALPGMVWQNRDVYLQGPIWAKIPHTDGNFHPSPLMGGFGLKHPPPQILIKNTPVPADPPTTFNQSKLYSFITQYSTGQVSVEIEWELQKENSKRWNPEIQYTSNYYKSTSVDFAVNTEGVYSEPRPIGTRYLTRNL

SEQ ID NO: 986 - DNA, 2208 bp, Artificial Sequence
  source: /note="Description of Artificial Sequence: Synthetic polynucleotide"
atggctgccgatggttatcttccagattggctcgaggacaacctctctgagggcattcgcgagtggtgggacttgaaacctggagccccgaaacccaaagccaaccagcaaaagcaggacgacggccggggtctggtgcttcctggctacaagtacctcggacccttcaacggactcgacaagggggagcccgtcaacgcggcggatgcagcggccctcgagcacgacaaagcctacgaccggcagctcgacagcggagacaacccgtacctcaagtacaaccacgccgacgcggagtttcaggagcgccttaaagaagatacgtcttttgggggcaacctcggacgagcagtcttccaggccaagaagagggttctcgaaccttttggtctggttgaggaaggtgctaagacggctcctggaaagaaacgtccggtagagcagtcgccacaagagccagactcctcctcgggcattggcaagacaggccagcagcccgctaaaaagagactcaattttggtcagactggcgactcagagtcagtccccgacccacaacctctcggagaacctccagcaacccccgctgctgtgggacctactacaatggcttcaggtggtggcgcaccagtggcagacaataacgaaggcgccgacggagtgggtagttcctcgggaaattggcattgcgattccacatggctgggcgacagagtcatcaccaccagcacccgaacatgggccttgcccacctataacaaccacctctacaagcaaatctccagtgcttcgacgggggccagcaacgacaaccactacttcggctacagcaccccctgggggtattttgatttcaacaggttccactgccatttctcaccacgtgactggcagcgactcatcaacaacaattggggattccggcccaaaagactcaacttcaagctgttcaacatccaggtcaaggaagtcacgacgaacgaaggcaccaagaccatcgccaataatctcaccagcaccgtgcaggtctttacggactcggagtaccagttaccgtacgtgctaggatccgctcaccagggatgtctgcctccgttcccggcggacgtcttcatggttcctcagtacggctatttaactttaaacaatggaagccaagccctgggacgttcctccttctactgtctggagtatttcccatcgcagatgctgagaacgggcaacaactttacctttagctacaccttcgaggacgtgcctttccacagcagctacgcgcacagccagagcctggacaggctgatgaatcccctcatcgaccagtacctgtactacctggtcagaacgcaaacgactggaactggagggacgcagactctggcattcagccaagcgggtcctagctcaatggccaaccaggctagaaattgggtgcccggaccttgctaccggcagcagcgcgtctccacgacaaccaaccagaacaacaacagcaactttgcctggacgggagctgccaagtttaagctgaacggccgagactctctaatgaatccgggcgtggcaatggcttcccacaaggatgacgacgaccgcttcttcccttcgagcggggtcctgatttttggcaagcaaggagccgggaacgatggagtggattacagccaagtgctgattacagatgaggaagaaatcaaggctaccaaccccgtggccacagaagaatatggagcagtggccatcaacaaccaggccgccaatacgcaggcgcagaccggactcgtgcacaaccagggggtgattcccggcatggtgtggcagaatagagacgtgtacctgcagggtcccatctgggccaaaattcctcacacggacggcaactttcacccgtctcccctgatgggcggctttggactgaagcacccgcctcctcaaattctcatcaagaacacaccggttccagcggacccgccgcttaccttcaaccaggccaagctgaactctttcatcacgcagtacagcaccggacaggtcagcgtggaaatcgagtgggagctgcagaaagaaaacagcaaacgctggaatccagagattcaatacacttccaactactacaaatctacaaatgtggactttgctgtcaacacggagggggtttatagcgagcctcgccccattggcacccgttacctcacccgcaacctgtaa

SEQ ID NO: 987 - DNA, 2211 bp, Artificial Sequence
  source: /note="Description of Artificial Sequence: Synthetic polynucleotide"
  modified_base (337)..(337): a, c, t, g, unknown or other
atggctgccgatggttatcttccagattggctcgaggacactctctctgaaggaataagacagtggtggaagctcaaacctggcccaccaccaccaaagcccgcagagcggcataaggacgacagcaggggtcttgtgcttcctggctacaagtacctcggacccttcaacggactcgacaagggggagcccgtcaacgcggcggacgcagcgaccctcgagcacgacaaggcctacgaccagcagctcaaagcgggtgacaatccgtacctgcggtataaccacgccgacgccgagtttcaggagcgtctgcaagaagatacgtcttttgggggcnacctcgggcgagcagtcttccaggccaagaagcgggttctcgaacctctcggtctggttgaggaagctgctaagacggctcctggaaagaagagaccagtagagccatcaccccagcgttctccagactcctctacgggcatcggcaagaaaggccaacagcccgccagaaaaagactcaattttggtcagactggcgactcagagtcagttccagaccctcaacctctcggagaacctccagcagcgccctctggtgtgggacctaatacaatggctgcaggcggtggcgcaccaatggcagacaataacgaaggcgccgacggagtgggtagttcctcgggaaattggcattgcgattccacatggctgggcgacagagtcatcaccaccagcacccgaacctgggccctgcccacctacaacaaccacctctacaagcaaatctccagtgcttcaacgggggccagcaacgacaaccactacttcggctacagcaccccctgggggtattttgatttcaacagattccactgccatttctcaccacgtgactggcagcgactcatcaacaacaattggggattccggcccaagagactcaacttcaagctcttcaacatccaagtcaaggaggtcacgacgaatgatggcgtcacgaccatcgctaataaccttaccagcacggttcaagtcttctcggactcagactatcagctcccgtacgtgctcgggtcggctcacgagggctgcctcccgccgttcccagcggacgttttcatgattcctcagtacggctatttaactttaaacaatggaagccaagccctgggacgttcctccttctactgtctggagtatttcccatcgcagatgctgagaaccggcaacaactttcagttcagctacaccttcgaggacgtgcctttccacagcagctacgcgcacagccagagcctggacaggctgatgaatcccctcatcgaccagtacctgtactacctggtcagaacgcaaacgactggaactggagggacgcagactctggcattcagccaagcgggtcctagctcaatggccaaccaggctagaaattgggtgcccggaccttgctaccggcagcagcgcgtctccacgacaaccaaccagaacaacaacagcaactttgcctggacgggagctgccaagtttaagctgaacggccgagactctctaatgaatccgggcgtggcaatggcttcccacaaggatgacgacgaccgcttcttcccttcgagcggggtcctgatttttggcaagcaaggagccgggaacgatggagtggattacagccaagtgctgattacagatgaggaagaaatcaaggctaccaaccccgtagccacagaagaatatggagcagtggccatcaacaaccaggccgccaatacgcaggcgcagaccggactcgtgcacaaccagggggtgattcccggaatggtgtggcaagacagagacgtatacctgcagggtcctatttgggccaaaattcctcacacggatggacactttcacccgtctcctctcatgggcggctttggacttaagcacccgcctcctcagatcctcatcaaaaacacgcctgttcctgcgaatcctccggcagagttttcggctacaaagtttgcttcattcatcacccagtattccacaggacaagtgagcgtggagattgaatgggagctgcagaaagaaaacagcaaacgctggaatcccgaagtgcagtatacatctaactatgcaaaatctgccaacgttgatttcactgtggacaacaatggactttatactgagcctcgccccattggcacccgttacctcacccgtcccctgtaa

SEQ ID NO: 988 - DNA, 2214 bp, Artificial Sequence
  source: /note="Description of Artificial Sequence: Synthetic polynucleotide"
  modified_base (335)..(335): a, c, t, g, unknown or other
atgactgacggttaccttccagattggctagaggacaacctctctgaaggcgttcgagagtggtgggcgctgcaacctggagccccgaagcccaaagccaaccagcaaaagcaggacgacggccggggtctggtgcttcctggctacaagtacctcggacccttcaacggactcgacaagggggagcccgtcaacgcggcggacgcagcggccctcgagcacgacaaggcctacgaccagcagctcaaagcgggtgacaatccgtacctgcggtataaccacgccgacgccgagtttcaggagcgtctgcaagaagatacgtcttttgggggcancctcgggcgagcagtcttccaggccaagaagcgggttctcgaacctctcggtctggttgaggaaggcgctaagacggctcctggaaagaaacgtccggtagagccatcaccccagcgttctccagactcctctacgggcatcggcaagaaaggccaacagcccgccagaaaaagactcaattttggtcagactggcgactcagagtcagttccagaccctcaacctctcggagaacctccagcagcgccctcaggtgtgggatctcttacaatggcttcaggtggtggcgcaccagtggcagacaataacgaaggtgccgatggagtgggtagttcctcgggaaattggcattgcgattcccaatggctgggggacagagtcatcaccaccagcacccgaacctgggccctgcccacctacaacaatcacctctacaagcaaatctccaacagcacatctggaggatcttcaaatgacaacgcctacttcggctacagcaccccctgggggtattttgacttcaacagattccactgccacttctcaccacgtgactggcagcgactcatcaacaacaactggggattccggcccaagagactcagcttcaagctcttcaacatccaggtcaaggaggtcacgcagaatgaaggcaccaagaccatcgccaataacctcaccagcaccatccaggtgtttacggactcggagtaccagctgccgtacgttctcggctctgcccaccagggctgcctgcctccgttcccggcggacgtgttcatgattccccagtacggctacctaacactcaacaacggtagtcaggccgtgggacgctcctccttctactgcctggaatactttccttcgcagatgctgagaaccggcaacaacttccagtttacttacaccttcgaggacgtgcctttccacagcagctacgcccacagccagagcttggaccggctgatgaatcctctgattgaccagtacctgtactacttgtctcggactcaaacaacaggaggcacggcaaatacgcagactctgggcttcagccaaggtgggcctaatacaatggccaatcaggcaaagaactggctgccaggaccctgttaccgccaacaacgcgtctcaacgacaaccgggcaaaacaacaatagcaactttgcctggactgctgggaccaaataccatctgaatggaagaaattcattggctaatcctggcatcgctatggcaacacacaaagacgacgaggagcgtttttttcccagtaacgggatcctgatttttggcaaacaaaatgctgccagagacaatgcggattacagcgatgtcatgctcaccagcgaggaagaaatcaaaaccactaaccctgtggctacagaggaatacggtatcgtggcagataacttgcagcagcaaaacacggctcctcaaattggaactgtcaacagccagggggccttacccggtatggtctggcagaaccgggacgtgtacctgcagggtcccatctgggccaagattcctcacacggacggcaacttccacccgtctccgctgatgggcggctttggcctgaaacatcctccgcctcagatcctgatcaagaacacgcctgtacctgcggatcctccgaccaccttaaaccaggccaagctgaactctttcatcacgcaatacagcaccggacaggtcagcgtggaaattgaatgggagctgcagaaggaaaacagcaagcgctggaacccagagattcagtacacttcaaactactacaaatctacaaatgtggactttgctgtcaatacagagggaacttatagtgaaccccgccccattggcaccagatttctgactcgtaatctgtaa

SEQ ID NO: 989 - DNA, 2211 bp, Artificial Sequence
  source: /note="Description of Artificial Sequence: Synthetic polynucleotide"
  modified_base (338)..(338): a, c, t, g, unknown or other
atggctgccgatggttatcttccagattggctcgaggacactctctctgaaggaataagacagtggtggaagctcaaacctggcccaccaccaccaaagcccgcagagcggcataaggacgacagcaggggtcttgtgcttcctgggtacaagtacctcggccccttcaacggactcgacaagggggagcccgtcaacgcggcggacgcagcggccctcgagcacgacaaggcctacgaccagcagctcgaagcgggtgacaatccgtacctgcggtataaccacgccgacgccgagtttcaggagcgtctgcaagaagatacgtcttttgggggcancctcgggcgagcagtcttccaggccaagaagcgggttctcgaacctctcggtctggttgaggaaggcgctaagacggctcctggaaagaagagaccagtagagcagtcaccccaagaaccagactcctcctcgggcatcggcaggaaaggccaacagcccgccagaaaaagactcaattttggccagactggcgactcagagtcagttccagaccctcaacctctcggagaacctccagcagcgccctctggtgtgggacctaatacaatggcttcaggcggtggcgctccaatggcagacaataacgaaggcgccgacggagtgggtaatgcctcaggaaattggcattgcgattccacatggctgggcgacagagtcatcaccaccagcacccgcacctgggccttgcccacctacaataaccacctctacaagcaaatctccagtgcttcaacgggggccagcaacgacaaccactacttcggctacagcaccccctgggggtattttgatttcaacagattccactgccacttttcaccacgtgactggcagcgactcatcaacaacaattggggattccggcccaagagactcaacttcaaactcttcaacatccaggtcaaggaggtcacgcagaatgaaggcactaagaccatcgccaataaccttaccagcacgattcaggtatttacggactcggaataccagctgccgtacgtcctcggctccgcgcaccagggctgcctgcctccgttcccggcggacgtcttcatgattccccagtacggctaccttacactgaacaatggaagtcaagccgtaggccgttcctccttctactgcctggaatattttccatctcaaatgctgcgaactggcaacaacttccagtttacctacaccttcgaggacgtgcctttccacagcagctacgcccacagccagagcttggaccggctgatgaatcctctgattgaccagtacctgtactacttgtctcggactcagtccacaggaggaactcaaggtacccagcaattgttattttctcaagctgggcctgcaaacatgtcggctcaggctaagaactggctacctggaccttgctaccggcagcagcgagtctctacgacactgtcgcaaaacaacaacagcaactttgcttggactggtgccaccaaatatcacctgaacggaagagactctttggtaaatcccggtgtcgccatggcaacccacaaggacgacgaggaacgcttcttcccgtcgagtggagtcctgatgtttggaaaacagggtgctggaagagacaatgtggactacagcagcgttatgctaaccagcgaagaagaaattaaaaccactaaccctgtagccacagaacaatacggtgtggtggttgataacttgcagcaaaccaatacggggcctattgtgggaaatgtcaacagccaaggagccttacctggtatggtctggcagaaccgggacgtgtacctgcagggtcccatctgggccaagattcctcacacggacggcaacttccacccgtctccgctgatgggcggctttggcctgaaacatcctccgcctcagatcctcatcaaaaacacacctgtacctgcggatcctccaacggccttcaacaaggacaagctgaactctttcatcacccagtattctactggccaagtcagcgtggagatcgagtgggagctgcagaaggaaaacagcaagcgctggaacccggagatccagtacacttccaactattacaagtctaataatgttgaatttgctgttaatactgaaggtgtatatagtgaaccccgccccattggcaccagatacctgactcgtaatctgtaa

SEQ ID NO: 990 - protein, 735 aa, Artificial Sequence
  source: /note="Description of Artificial Sequence: Synthetic polypeptide"
MAADGYLPDWLEDNLSEGIREWWDLKPGAPKPKANQQKQDDGRGLVLPGYKYLGPFNGLDKGEPVNAADAAALEHDKAYDRQLDSGDNPYLKYNHADAEFQERLKEDTSFGGNLGRAVFQAKKRVLEPFGLVEEGAKTAPGKKRPVEQSPQEPDSSSGIGKTGQQPAKKRLNFGQTGDSESVPDPQPLGEPPATPAAVGPTTMASGGGAPVADNNEGADGVGSSSGNWHCDSTWLGDRVITTSTRTWALPTYNNHLYKQISSASTGASNDNHYFGYSTPWGYFDFNRFHCHFSPRDWQRLINNNWGFRPKRLNFKLFNIQVKEVTTNEGTKTIANNLTSTVQVFTDSEYQLPYVLGSAHQGCLPPFPADVFMVPQYGYLTLNNGSQALGRSSFYCLEYFPSQMLRTGNNFTFSYTFEDVPFHSSYAHSQSLDRLMNPLIDQYLYYLVRTQTTGTGGTQTLAFSQAGPSSMANQARNWVPGPCYRQQRVSTTTNQNNNSNFAWTGAAKFKLNGRDSLMNPGVAMASHKDDDDRFFPSSGVLIFGKQGAGNDGVDYSQVLITDEEEIKATNPVATEEYGAVAINNQAANTQAQTGLVHNQGVIPGMVWQNRDVYLQGPIWAKIPHTDGNFHPSPLMGGFGLKHPPPQILIKNTPVPADPPLTFNQAKLNSFITQYSTGQVSVEIEWELQKENSKRWNPEIQYTSNYYKSTNVDFAVNTEGVYSEPRPIGTRYLTRNL

SEQ ID NO: 991 - protein, 736 aa, Artificial Sequence
  source: /note="Description of Artificial Sequence: Synthetic polypeptide"
  MOD_RES (113)..(113): Any amino acid
MAADGYLPDWLEDTLSEGIRQWWKLKPGPPPPKPAERHKDDSRGLVLPGYKYLGPFNGLDKGEPVNAADAATLEHDKAYDQQLKAGDNPYLRYNHADAEFQERLQEDTSFGGXLGRAVFQAKKRVLEPLGLVEEAAKTAPGKKRPVEPSPQRSPDSSTGIGKKGQQPARKRLNFGQTGDSESVPDPQPLGEPPAAPSGVGPNTMAAGGGAPMADNNEGADGVGSSSGNWHCDSTWLGDRVITTSTRTWALPTYNNHLYKQISSASTGASNDNHYFGYSTPWGYFDFNRFHCHFSPRDWQRLINNNWGFRPKRLNFKLFNIQVKEVTTNDGVTTIANNLTSTVQVFSDSDYQLPYVLGSAHEGCLPPFPADVFMIPQYGYLTLNNGSQALGRSSFYCLEYFPSQMLRTGNNFQFSYTFEDVPFHSSYAHSQSLDRLMNPLIDQYLYYLVRTQTTGTGGTQTLAFSQAGPSSMANQARNWVPGPCYRQQRVSTTTNQNNNSNFAWTGAAKFKLNGRDSLMNPGVAMASHKDDDDRFFPSSGVLIFGKQGAGNDGVDYSQVLITDEEEIKATNPVATEEYGAVAINNQAANTQAQTGLVHNQGVIPGMVWQDRDVYLQGPIWAKIPHTDGHFHPSPLMGGFGLKHPPPQILIKNTPVPANPPAEFSATKFASFITQYSTGQVSVEIEWELQKENSKRWNPEVQYTSNYAKSANVDFTVDNNGLYTEPRPIGTRYLTRPL

SEQ ID NO: 992 - protein, 737 aa, Artificial Sequence
  source: /note="Description of Artificial Sequence: Synthetic polypeptide"
  MOD_RES (112)..(112): Any amino acid
MTDGYLPDWLEDNLSEGVREWWALQPGAPKPKANQQKQDDGRGLVLPGYKYLGPFNGLDKGEPVNAADAAALEHDKAYDQQLKAGDNPYLRYNHADAEFQERLQEDTSFGGXLGRAVFQAKKRVLEPLGLVEEGAKTAPGKKRPVEPSPQRSPDSSTGIGKKGQQPARKRLNFGQTGDSESVPDPQPLGEPPAAPSGVGSLTMASGGGAPVADNNEGADGVGSSSGNWHCDSQWLGDRVITTSTRTWALPTYNNHLYKQISNSTSGGSSNDNAYFGYSTPWGYFDFNRFHCHFSPRDWQRLINNNWGFRPKRLSFKLFNIQVKEVTQNEGTKTIANNLTSTIQVFTDSEYQLPYVLGSAHQGCLPPFPADVFMIPQYGYLTLNNGSQAVGRSSFYCLEYFPSQMLRTGNNFQFTYTFEDVPFHSSYAHSQSLDRLMNPLIDQYLYYLSRTQTTGGTANTQTLGFSQGGPNTMANQAKNWLPGPCYRQQRVSTTTGQNNNSNFAWTAGTKYHLNGRNSLANPGIAMATHKDDEERFFPSNGILIFGKQNAARDNADYSDVMLTSEEEIKTTNPVATEEYGIVADNLQQQNTAPQIGTVNSQGALPGMVWQNRDVYLQGPIWAKIPHTDGNFHPSPLMGGFGLKHPPPQILIKNTPVPADPPTTLNQAKLNSFITQYSTGQVSVEIEWELQKENSKRWNPEIQYTSNYYKSTNVDFAVNTEGTYSEPRPIGTRFLTRNL

SEQ ID NO: 993 - protein, 736 aa, Artificial Sequence
  source: /note="Description of Artificial Sequence: Synthetic polypeptide"
  MOD_RES (113)..(113): Any amino acid
MAADGYLPDWLEDTLSEGIRQWWKLKPGPPPPKPAERHKDDSRGLVLPGYKYLGPFNGLDKGEPVNAADAAALEHDKAYDQQLEAGDNPYLRYNHADAEFQERLQEDTSFGGXLGRAVFQAKKRVLEPLGLVEEGAKTAPGKKRPVEQSPQEPDSSSGIGRKGQQPARKRLNFGQTGDSESVPDPQPLGEPPAAPSGVGPNTMASGGGAPMADNNEGADGVGNASGNWHCDSTWLGDRVITTSTRTWALPTYNNHLYKQISSASTGASNDNHYFGYSTPWGYFDFNRFHCHFSPRDWQRLINNNWGFRPKRLNFKLFNIQVKEVTQNEGTKTIANNLTSTIQVFTDSEYQLPYVLGSAHQGCLPPFPADVFMIPQYGYLTLNNGSQAVGRSSFYCLEYFPSQMLRTGNNFQFTYTFEDVPFHSSYAHSQSLDRLMNPLIDQYLYYLSRTQSTGGTQGTQQLLFSQAGPANMSAQAKNWLPGPCYRQQRVSTTLSQNNNSNFAWTGATKYHLNGRDSLVNPGVAMATHKDDEERFFPSSGVLMFGKQGAGRDNVDYSSVMLTSEEEIKTTNPVATEQYGVVVDNLQQTNTGPIVGNVNSQGALPGMVWQNRDVYLQGPIWAKIPHTDGNFHPSPLMGGFGLKHPPPQILIKNTPVPADPPTAFNKDKLNSFITQYSTGQVSVEIEWELQKENSKRWNPEIQYTSNYYKSNNVEFAVNTEGVYSEPRPIGTRYLTRNL

SEQ ID NO: 994 - DNA, 2211 bp, Artificial Sequence
  source: /note="Description of Artificial Sequence: Synthetic polynucleotide"
atggccgccgacggctacctgcccgactggctggaggacaacctgagcgagggcatccgcgagtggtgggccctgaagcccggcgccccccagcccaaggccaaccagcagcaccaggacaacgcccgcggcctggtgctgcccggctacaagtacctgggccccggcaacggcctggacaagggcgagcccgtgaacgccgccgacgccgccgccctggagcacgacaaggcctacgaccagcagctgaaggccggcgacaacccctacctgaagtacaaccacgccgacgccgagttccaggagcgcctgaaggaggacaccagcttcggcggcaacctgggccgcgccgtgttccaggccaagaagcgcctgctggagcccctgggcctggtggaggaggccgccaagaccgcccccggcaagaagcgccccgtggagcagagcccccaggagcccgacagcagcgccggcatcggcaagagcggcgcccagcccgccaagaagcgcctgaacttcggccagaccggcgacaccgagagcgtgcccgacccccagcccatcggcgagccccccgccgcccccagcggcgtgggcagcctgaccatggccagcggcggcggcgcccccgtggccgacaacaacgagggcgccgacggcgtgggcagcagcagcggcaactggcactgcgacagccagtggctgggcgaccgcgtgatcaccaccagcacccgcacctgggccctgcccacctacaacaaccacctgtacaagcagatcagcaacagcaccagcggcggcagcagcaacgacaacgcctacttcggctacagcaccccctggggctacttcgacttcaaccgcttccactgccacttcagcccccgcgactggcagcgcctgatcaacaacaactggggcttccgccccaagcgcctgaacttcaagctgttcaacatccaggtgaaggaggtgaccgacaacaacggcgtgaagaccatcgccaacaacctgaccagcaccgtgcaggtgttcaccgacagcgactaccagctgccctacgtgctgggcagcgcccacgagggctgcctgccccccttccccgccgacgtgttcatgatcccccagtacggctacctgaccctgaacgacggcagccaggccgtgggccgcagcagcttctactgcctggagtacttccccagccagatgctgcgcaccggcaacaacttccagttcagctacgagttcgagaacgtgcccttccacagcagctacgcccacagccagagcctggaccgcctgatgaaccccctgatcgaccagtacctgtactacctgagcaagaccatcaacggcagcggccagaaccagcagaccctgaagttcagcgtggccggccccagcaacatggccgtgcagggccgcaactacatccccggccccagctaccgccagcagcgcgtgagcaccaccgtgacccagaacaacaacagcgagttcgcctggcccggcgccagcagctgggccctgaacggccgcaacagcctgatgaaccccggccccgccatggccagccacaaggagggcgaggaccgcttcttccccctgagcggcagcctgatcttcggcaagcagggcaccggccgcgacaacgtggacgccgacaaggtgatgatcaccaacgaggaggagatcaagaccaccaaccccgtggccaccgagagctacggccaggtggccaccaaccaccagagcgcccaggcccaggcccagaccggctgggtgcagaaccagggcatcctgcccggcatggtgtggcaggaccgcgacgtgtacctgcagggccccatctgggccaagatcccccacaccgacggcaacttccaccccagccccctgatgggcggcttcggcatgaagcacccccccccccagatcctgatcaagaacacccccgtgcccgccgacccccccaccgccttcaacaaggacaagctgaacagcttcatcacccagtacagcaccggccaggtgagcgtggagatcgagtgggagctgcagaaggagaacagcaagcgctggaaccccgagatccagtacaccagcaactactacaagagcaacaacgtggagttcgccgtgaacaccgagggcgtgtacagcgagccccgccccatcggcacccgctacctgacccgcaacctgtaa

SEQ ID NO: 995 - DNA, 2211 bp, Artificial Sequence
  source: /note="Description of Artificial Sequence: Synthetic polynucleotide"
atggctgccgatggttatcttccagattggctcgaggacactctctctgaaggaataagacagtggtggaagctcaaacctggcccaccaccaccaaagcccgcagagcggcataaggacgacagcaggggtcttgtgcttcctgggtacaagtacctcggacccttcaacggactcgacaagggagagccggtcaacgaggcagacgccgcggccctcgagcacgacaaggcctacgaccagcagctcaaggccggagacaacccgtacctcaagtacaaccacgccgacgccgagttccaggagcggctcaaagaagatacgtcttttgggggcaacctcggacgagcagtcttccaggccaagaagcgggttctcgaacctctcggtctggttgaggaaggcgctaagacggctcctggaaagaaacgtccggtagagcagtcgccacaagagccagactcctcctcgggcattggcaagacaggccagcagcccgctaaaaagagactcaattttggtcagactggcgactcagagtcagtccccgacccacaacctctcggagaacctccagcaacccccgctgctgtgggacctactacaatggcttcaggcggtggcgcaccaatggcggacaataacgaaggcgccgatggagtgggtagttcctcgggaaattggcattgcgattcccaatggctgggggacagagtcatcaccaccagcacccgaacatgggccttgcccacctataacaaccacctctacaagcaaatctccagtgcttcaacgggggccagcaacgacaaccactacttcggctacagcaccccctgggggtattttgacttcaacagattccactgccacttctcaccacgtgactggcagcgactcatcaacaacaactggggattccgacccaagagactcaacttcaagctctttaacattcaagtcaaggaggtcacgcagaatgaaggcaccaagaccatcgccaataacctcaccagcaccatccaggtgtttacggactcggagtaccagctgccgtacgttctcggctccgcccaccagggctgcctgcctccgttcccggcggacgtgttcatgattccccagtacggctacctaacactcaacaacggtagtcaggccgtgggacgctcctccttctactgcctggaatactttccttcgcagatgctgagaaccggcaacaacttccagtttacttacaccttcgaggacgtgcctttccacagcagctacgcccacagccagagcttggaccggctgatgaatcctctgattgaccagtacctgtactacttgtctcggactcaaacaacaggaggcacggcaaatacgcagactctgggcttcagccaaggtgggcctaatacaatggccaatcaggcaaagaactggctgccaggaccctgttaccgccaacaacgcgtctcaacgacaaccgggcaaaacaacaatagcaactttgcctggactgctgggaccaaataccatctgaatggaagaaattcattggctaatcctggcatcgctatggcaacacacaaagacgacaaggagcgtttttttcccagtaacgggatcctgatttttggcaaacaaaatgctgccagagacaatgcggattacagcgatgtcatgctcaccagcgaggaagaaatcaaaaccactaaccctgtggctacagaggaatacggtatcgtggcagataacttgcagcagcaaaacacggctcctcaaattggaactgtcaacagccagggggccttacccggtatggtctggcagaaccgggacgtgtacctgcagggtcccatctgggccaagattcctcacacggacggcaacttccacccgtctccgctgatgggcggctttggcctgaaacatcctccgcctcagatcctgatcaagaacacgcctgtacctgcggatcctccgaccaccttcaaccagtcaaagctgaactctttcatcacgcaatacagcaccggacaggtcagcgtggaaattgaatgggagctgcagaaagaaaacagcaaacgctggaacccagagattcaatacacttccaactactacaaatctacaagtgtggactttgctgttaatacagaaggcgtgtactctgaaccccaccccattggcacccgttacctcacccgtcccctgtaa

SEQ ID NO: 996 - DNA, 2211 bp, Artificial Sequence
  source: /note="Description of Artificial Sequence: Synthetic polynucleotide"
atggctgccgatggttatcttccagattggctcgaggacaacctctctgagggcattcgcgagtggtgggcgctgaaacctggagccccgaagcccaaagccaaccagcaaaagcaggacgacggccggggtctggtgcttcctggctacaagtacctcggacccttcaacggactcgacaagggggagccggtcaacgcagcagacgcggcggccctcgagcacgacaaggcctacgaccagcagctcaaggccggagacaacccgtacctcaagtacaaccacgccgacgccgagttccaggagcggctcaaagaagatacgtcttttgggggcaacctcgggcgagcagtcttccaggccaaaaagaggcttcttgaacctcttggtctggttgaggaagcggctaagacggctcctggaaagaagaggcctgtagagcagtctcctcaggaaccggactcctccgcgggtattggcaaatcgggtgcacagcccgctaaaaagagactcaattttggtcagactggcgactcagagtcagtccccgacccacaacctctcggagaacctccagcaacccccgctgctgtgggacctactacaatggcttcaggcggtggcgcaccaatggcagacaataacgaaggcgccgacggagtgggtaatgcctcaggaaattggcattgcgattccacatggctgggcgacagagtcatcaccaccagcacccgaacctgggccctgcccacctacaataaccacctctacaagcaaatctccagtgcttcaacgggggccagcaacgacaaccactacttcggctacagcaccccctgggggtattttgatttcaacagattccactgccacttttcaccacgtgactggcagcgactcatcaacaacaattggggattccggcccaagagactcaacttcaaactcttcaacatccaagtcaaggaggtcacgcagaatgaaggcaccaagaccatcgccaataacctcaccagcaccatccaggtgtttacggactcggagtaccagctgccgtacgttctcggctctgcccaccagggctgcctgcctccgttcccggcggacgtgttcatgattccccagtacggctacctaacactcaacaacggtagtcaggccgtgggacgctcctccttctactgcctggaatactttccttcgcagatgctgagaaccggcaacaacttccagtttacttacaccttcgaggacgtgcctttccacagcagctacgcccacagccagagcttggaccggctgatgaatcctctgattgaccagtacctgtactacttgtctcggactcaaacaacaggaggcacggcaaatacgcagactctgggcttcagccaaggtgggcctaatacaatggccaatcaggcaaagaactggctgccaggaccctgttaccgccaacaacgcgtctcaacgacaaccgggcaaaacaacaatagcaactttgcctggactgctgggaccaaataccatctgaatggaagaaattcattggctaatcctggcatcgctatggcaacacacaaagacgacaaggagcgtttttttcccagtaacgggatcctgatttttggcaaacaaaatgctgccagagacaatgcggattacagcgatgtcatgctcaccagcgaggaagaaatcaaagccactaaccctgtggctacagaggaatacggtatcgtggcagataacttgcagcagcaaaacacggctcctcaaattggaactgtcaacagccagggggccttacccggtatggtttggcagaaccgggacgtgtacctgcagggtcccatctgggccaagattcctcacacggacggcaacttccacccgtctccgctgatgggcggctttggcctgaaacatcctccgcctcagatcctgatcaagaacacgcctgtacctgcggatcctccgaccaccttcaaccagtcaaagctgaactctttcatcacgcaatacagcaccggacaggtcagcgtggaaattgaatgggagctgcagaaggaaaacagcaagcgctggaaccccgagatccagtacacctccaactactacaaatctacaagtgtggactttgctgttaatacagaaggcgtgtactctgaaccccaccccattggcacccgttacctcacccgtcccctgtaa

SEQ ID NO: 997 - DNA, 2214 bp, Artificial Sequence
  source: /note="Description of Artificial Sequence: Synthetic polynucleotide"
atggctgccgatggttatcttccagattggctcgaggacaacctctctgagggcattcgcgagtggtgggacttgaaacctggagccccgaagcccaaagccaaccagcaaaagcaggacgacggccggggtctggtgcttcctggctacaagtacctcggacccttcaacggactcgacaagggggagcccgtcaacgcggcggacgcagcggccctcgagcacgacaaggcctacgaccagcagctcaaagcgggtgacaatccgtacctgcggtataaccacgccgacgccgagtttcaggagcgtctgcaagaagatacgtcttttgggggcaacctcgggcgagcagtcttccaggccaagaagcgggttctcgaacctctcggtctggttgaggaaggcgctaatacggctcctggaaagaaacgtccggtagagcagtcgccacaagagccagactcctccgcgggtattggcaaatcgggtgcacagcccgctaaaaagagactcaatttcggtcagactggcgacacagagtcagtcccagaccctcaaccaatcggagaacctcccgcagccccctcaggtgtgggatctcttacaatggcttcaggtggtggcgcaccagtggcagacaataacgaaggtgccgatggagtgggtagttcctcgggaaattggcattgcgattcccaatggctgggggacagagtcatcaccaccagcacccgaacctgggccctgcccacctacaacaatcacctctacaagcaaatctccaacagcacatctggaggatcttcaaatgacaacgcctacttcggctacagcaccccctgggggtattttgacttcaacagattccactgccacttctcaccacgtgactggcagcgactcatcaacaacaactggggattccggcctaagcgactcaacttcaagctcttcaacattcaggtcaaagaggttacggacaacaatggagtcaagaccatcgccaataacctcaccagcaccatccaggtgtttacggactcggagtaccagctgccgtacgttctcggctccgcccaccagggctgcctgcctccgttcccggcggacgtgttcatgattccccagtacggctacctaacactcaacaacggtagtcaggccgtgggacgctcctccttctactgcctggaatactttccttcgcagatgctgagaaccggcaacaacttccagtttacttacaccttcgaggacgtgcctttccacagcagctacgcccacagccagagcttggaccggctgatgaatcctctgattgaccagtacctgtactacttgtctcggactcaaacaacaggaggcacggcaaatacgcagactctgggcttcagccaaggtgggcctaatacaatggccaatcaggcaaagaactggctgccaggaccctgttaccgccaacaacgcgtctcaacgacaaccgggcaaaacaacaatagcaactttgcctggactgctgggaccaaataccatctgaatggaagaaattcattggctaatcctggcatcgctatggcctcacacaaagacgacaaggagcgtttttttcccagtaacgggatcctgatttttggcaaacaaaatgctgccagagacaatgcggattacagcgatgtcatgctcaccagcgaggaagaaatcaaaaccactaaccctgtggctacagaggaatacggtatcgtggcagataacttgcagcagcaaaacacggctcctcaaattggaactgtcaacagtcaaggagccttacctggcatggtctggcagaaccgggacgtgtacctgcagggtcccatctgggccaagattcctcacacggacggcaacttccacccgtctccgctgatgggcggctttggcctgaaacatcctccgcctcagatcctgatcaagaacacgcctgtacctgcggatcctccgaccaccttcaaccagtcaaagctgaactctttcatcacgcaatacagcaccggacaggtcagcgtggaaattgaatgggagctgcagaaggaaaacagcaagcgctggaaccccgagatccagtacaccaccaactactacaaatctacaagtgtggactttgctgttaatacagaaggcgtgtactctgaaccccaccccattggcacccgttacctcacccgtcccctgtaa

SEQ ID NO: 998 - DNA, 2211 bp, Artificial Sequence
  source: /note="Description of Artificial Sequence: Synthetic polynucleotide"
atggctgccgatggttatcttccagattggctcgaggacaacctctctgagggcattcgcgagtggtgggcgctgaaacctggagccccgaagcccaaagccaaccagcaaaagcaggacgacggccggggtctggtgcttcctggctacaagtacctcggacccttcaacggactcgacaaaggagagccggtcaacgaggcggacgcggcagccctcgaacacgacaaagcttacgaccagcagctcaaggccggtgacaatccgtacctgcggtataaccacgccgacgccgagtttcaggagcgtcttcaagaagatacgtcttttgggggcaacctcgggcgagcagtcttccaggccaagaagcgggttctcgaacctctcggtctggttgaggaaggcgctaagacggctcctggaaagaaacgtccggtagagcagtcgccacaagagccagactcctcctcgggcatcggcaagacaggccagcagcccgctaaaaagagactcaattttggtcagactggcgactcagagtcagtccccgacccacaacctctcggagaacctccagcaacccccgctgctgtgggacctactacaatggcttcaggcggtggcgcaccaatggcagacaataacgaaggcgccgacggagtgggtaatgcctcaggaaattggcattgcgattccacatggctgggcgacagagtcatcaccaccagcacccgcacctgggccttgcccacctacaataaccacctctacaagcaaatctccagtgcttcaacgggggccagcaacgacaaccactacttcggctacagcaccccctgggggtattttgactttaacagattccactgccacttttcaccacgtgactggcaaagactcatcaacaacaactggggattccggcccaagagactcaacttcaagctcttcaacatccaggtcaaggaggtcacgcagaatgaaggcaccaagaccatcgccaataaccttaccagcacgattcaggtctttacggactcggaataccagctcccgtacgtcctcggctctgcgcaccagggctgcctccctccgttcccggcggacgtgttcatgattccgcagtacggctacctaacactcaacaacggtagtcaggccgtgggacgctcctccttctactgcctggaatactttccttcgcagatgctgagaaccggcaacaacttccagtttacttacaccttcgaggacgtgcctttccacagcagctacgcccacagccagagcttggaccggctgatgaatcctctgattgaccagtacctgtactacttgtctcggactcaaacaacaggaggcacggcaaatacgcagactctgggcttcagccaaggtgggcctaatacaatggccaatcaggcaaagaactggctgccaggaccctgttaccgccaacaacgcgtctcaacgacaaccgggcaaaacaacaatagcaactttgcctggactgctgggaccaaataccatctgaatggaagaaattcattggctaatcctggcatcgctatggcaacacacaaagacgacaaggagcgtttttttcccagtaacgggatcctgatttttggcaaacaaaatgctgccagagacaatgcggattacagcgatgtcatgctcaccagcgaggaagaaatcaaaaccactaaccctgtggctacagaggaatacggtatcgtggcagataacttgcagcagcaaaacacggctcctcaaattggaactgtcaacagccagggggccttacccggtatggtctggcagaaccgggacgtgtacctgcagggtcccatctgggccaagattcctcacacggacggcaacttccacccgtctccgctgatgggcggctttggcctgaaacatcctccgcctcagatcctgatcaagaacacgcctgtacctgcggatcctccgaccaccttcaaccagtcaaagctgaactctttcatcacgcaatacagcaccggacaggtcagcgtggaaattgaatgggagctgcagaaggaaaacagcaagcgctggaaccccgagatccagtacacctccaactactacaaatctacaagtgtggactttgctgttaatacagaaggcgtgtactctgaaccccaccccattggcacccgttacctcacccgtcccctgtaa

SEQ ID NO: 999 - DNA, 2211 bp, Artificial Sequence
  source: /note="Description of Artificial Sequence: Synthetic polynucleotide"
atggctgccgatggttatcttccagattggctcgaggacaacctctctgagggcattcgcgagtggtgggcgctgaaacctggagccccgaagcccaaagccaaccagcaaaagcaggacgacggccggggtctggtgcttcctggctacaagtacctcggacccttcaacggactcgacaaaggagagccggtcaacgaggcggacgcggcagccctcgaacacgacaaagcttacgaccagcagctcaaagcgggtgacaatccgtacctgcggtataaccacgccgacgccgagtttcaggagcgtctgcaagaagatacgtcttttgggggcaacctcgggcgagcagtcttccaggccaagaagagggttctcgaaccttttggtctggttgaggaaggtgctaagacggctcctggaaagaaacgtccggtagagcagtcgccacaagagccagactcctcctcgggcattggcaagacaggccagcagcccgctaaaaagagactcaattttggtcagactggcgactcagagtcagtccccgacccacaacctctcggagaacctccagcaacccccgctgctgtgggacctactacaatggcttcaggcggtggcgcaccaatggcagacaataacgaaggcgccgacggagtgggtaatgcctcaggaaattggcattgcgattcccaatggctgggcgacagagtcatcaccaccagcaccagaacctgggccttgcccacctataacaaccacctctacaagcaaatctccagtgcttcaacgggggccagcaacgacaaccactacttcggctacagcaccccctgggggtattttgatttcaacagattccactgccacttctcaccacgtgactggcagcgactcatcaacaacaactggggattccggcctaagcgactcaacttcaagctcttcaacattcaggtcaaagaggttacggacaacaatggagtcaagaccatcgccaataaccttaccagcacggttcaagtcttctcggactcggagtaccagttgccgtacgtcctcggctctgcgcaccagggctgcctccctccgttcccggcggacgtgttcatgattccccagtacggctacctaacactcaacaacggtagtcaggccgtgggacgctcctccttctactgcctggaatactttccttcgcagatgctgagaaccggcaacaacttccagtttacttacaccttcgaggacgtgcctttccacagcagctacgcgcacagccagagcttggaccggctgatgaatcctctgattgaccagtacctgtactacttgtctcggactcaaacaacaggaggcacggcaaatacgcagactctgggcttcagccaaggtgggcctaatacaatggccaatcaggcaaagaactggctgccaggaccctgttaccgccaacaacgcgtctcaacgacaaccgggcaaaacaacaatagcaactttgcctggactgctgggaccaaataccatctgaatggaagaaattcattggctaatcctggcatcgctatggcaacacacaaagacgacaaggagcgtttttttcccagtaacgggatcctgatttttggcaaacaaaatgctgccagagacaatgcggattacagcgatgtcatgctcaccagcgaggaagaaatcaaaaccactaaccctgtggctacagaggaatacggtatcgtggcagataacttgcagcagcaaaacacggctcctcaaattggaactgtcaacagccagggggccttacccggtatggtctggcagaaccgggacgtgtacctgcagggtcccatctgggccaagattcctcacacggacggcaacttccacccgtctccgctgatgggcggctttggcctgaaacatcctccgcctcagatcctgatcaagaacacgcctgtacctgcggatcctccgaccaccttcaaccagtcaaagctgaactctttcatcacgcaatacagcaccggacaggtcagcgtggaaattgaatgggagctgcagaaggaaaacagcaagcgctggaaccccgagatccagtacacctccaactactacaaatctacaagtgtggactttgctgttaatacagaaggcgtgtactctgaaccccaccccattggcacccgttacctcacccgtcccctgtaa

SEQ ID NO: 1000 - DNA, 2244 bp, Artificial Sequence
  source: /note="Description of Artificial Sequence: Synthetic polynucleotide"
  modified_base (2241)..(2241): a, c, t, g, unknown or other
atggctgccgatggttatcttccagattggctcgaggacactctctctgaaggaataagacagtggtggaagctcaaacctggcccaccaccaccaaagcccgcagagcggcataaggacgacagcaggggtcttgtgcttcctgggtacaagtacctcggacccttcaacggactcgacaagggagagccggtcaacgaggcagacgccgcggccctcgagcacgacaaagcctacgaccggcagctcgacagcggagacaacccgtacctcaagtacaaccacgccgacgcggagtttcaggagcgccttaaagaagatacgtcttttgggggcaacctcgggcgagcagtcttccaggccaagaagagggttctcgaaccttttggtctggttgaggaaggtgctaagacggctcctggaaagaaacgtccggtagagcagtcgccacaagagccagactcctcctcgggcattggcaagacaggccagcagcccgctaaaaagagactcaattttggtcagactggcgactcagagtcagtccccgacccacaacctctcggagaacctccagcaacccccgctgctgtgggacctactacaatggcttcaggcggtggcgcaccaatggcagacaataacgaaggcgccgacggagtgggtaatgcctcaggaaattggcattgcgattccacatggctgggcgacagagtcatcaccaccagcacccgaacatgggccttgcccacctataacaaccacctctacaagcaaatctccagtgcttcaacgggggccagcaacgacaaccactacttcggctacagcaccccctgggggtattttgacttcaacagattccactgccacttctcaccacgtgactggcagcgactcatcaacaacaactggggattccggcctaagcgactcaacttcaagctcttcaacattcaggtcaaagaggttacggacaacaatggagtcaagaccatcgccaataaccttaccagcacggtccaggtcttcacggactcagactatcagctcccgtacgtgctcgggtcggctcacgagggctgcctcccgccgttcccagcggacgttttcatgattcctcagtacggctacctaacactcaacaacggtagtcaggccgtgggacgctcctccttctactgcctggaatactttccttcgcagatgctgagaaccggcaacaacttccagtttacttacaccttcgaggacgtgcctttccacagcagctacgcgcacagccagagcttggaccggctgatgaatcctctgattgaccagtacctgtactacttgtctcggactcaaacaacaggaggcacggcaaatacgcagactctgggcttcagccaaggtgggcctaatacaatggccaatcaggcaaagaactggctgccaggaccctgttaccgccaacaacgcgtctcaacgacaaccgggcaaaacaacaatagcaactttgcctggactgctgggaccaaataccatctgaatggaagaaattcattggctaatcctggcatcgctatggcaacacacaaagacgacaaggagcgtttttttcccagtaacgggatcctgatttttggcaaacaaaatgctgccagagacaatgcggattacagcgatgtcatgctcaccagcgaggaagaaatcaaaaccactaaccctgtggctacagaggaatacggtatcgtggcagataacttgcagcagcaaaacacggctcctcaaattggaactgtcaacagccagggggccttacccggtatggtctggcagaaccgggacgtgtacctgcagggtcccatctgggccaagattcctcacacggacggcaacttccacccgtctccgctgatgggcggctttggcctgaaacatcctccgcctcagatcctgatcaagaacacgcctgtacctgcggatcctccgaccaccttcaaccagtcaaagctgaactctttcatcacgcaatacagcaccggacaggtcagcgtggaaattgaatgggagctgcagaaggaaaacagcaagcgctggaaccccgagatccagtacacctccaactactacaaatctacaagtgtggactttgctgttaatacagaaggcgtgtactctgaaccccaccccattggcaccagatacctgactcgtaatctgtaattgcttgttaatcaataaaccgtttaattnttt

SEQ ID NO: 1001 - DNA, 2217 bp, Artificial Sequence
  source: /note="Description of Artificial Sequence: Synthetic polynucleotide"
atggctgccgatggttatcttccagattggctcgaggacaacctctctgagggcattcgcgagtggtgggacttgaaacctggagccccgaaacccaaagccaaccagcaaaagcaggacgacggccggggtctggtgcttcctggctacaagtacctcggacccttcaacggactcgacaagggggagcccgtcaacgcggcggacgcagcggccctcgagcacgacaaggcctacgaccagcagctccaagcgggtgacaatccgtacctgcggtataaccacgccgacgccgagtttcaggagcgtctgcaagaagatacgtcttttgggggcaacctcggacgagcagtcttccaggcgaaaaagagggttctcgaacctctcggtctggttgaggaaggcgctaagacggctcctggaaagaagagaccggtagagccatcaccccagcgttctccagactcctctacgggcatcggcaagaaaggccaacagcccgccagaaaaagactcaattttggtcagactggcgactcagagtcagttccagaccctcaacctctcggagaacctccagcagcgccctctggtgtgggacctaatacaatggctgcaggcggtggcgcaccaatggcagacaataacgaaggcgccgacggagtgggtagttcctcgggaaattggcattgcgattcccaatggctgggggacagagtcatcaccaccagcacccgaacctgggccctgcccacctacaacaatcacctctacaagcaaatctccaacagcacatctggaggatcttcaaatgacaacgcctacttcggctacagcaccccctgggggtattttgacttcaaccgcttccactgccacttctcaccacgtgactggcagcgactcatcaacaacaactggggattccggcccaagagactcagcttcaaactcttcaacatccaggtcaaggaggtcacgcagaatgaaggcaccaagaccatcgccaataacctcaccagcaccatccaggtgtttacggactcggagtaccagctgccgtacgttctcggctctgcccaccagggctgcctgcctccgttcccggcggacgtgttcatgattcctcagtacggctacctaacgctcaacaatggcagccaggcagtgggacggtcatccttttactgcctggaatatttcccatcgcagatgctgagaacgggcaacaactttaccttcagctacacctttgaggacgttcctttccacagcagctacgctcacagccagagtctggaccgtctcatgaatcctctgattgaccagtacctgtactacttgtctcggactcaaacaacaggaggcacggcaaatacgcagactctgggcttcagccaaggtgggcctaatacaatggccaatcaggcaaagaactggctgccaggaccctgttaccgccaacaacgcgtctcaacgacaaccgggcaaaacaacaatagcaactttgcctggactgctgggaccaaataccatctgaatggaagaaattcattggctaatcctggcatcgctatggcaacacacaaagacgacaaggagcgtttttttcccagtaacgggatcctgatttttggcaaacaaaatgctgccagagacaatgcggattacagcgatgtcatgctcaccagcgaggaagaaatcaaaaccactaaccctgtggctacagaggaatacggtatcgtggcagataacttgcagcagcaaaacacggctcctcaaattggaactgtcaacagccagggggccttacccggtatggtctggcagaaccgggacgtgtacctgcagggtcccatctgggccaagattcctcacacggacggcaacttccacccgtctccgctgatgggcggctttggacttaagcacccgcctcctcagatcctcatcaaaaacacgcctgttcctgcggatcctccgaccaccttcaaccagtcaaagctgaactctttcatcacgcaatacagcaccggacaggtcagcgtggaaattgaatgggagctgcagaaggaaaacagcaagcgctggaaccccgagatccagtacacctccaactactacaaatctacaagtgtggactttgctgttaatacagaaggcgtgtactctgaaccccaccccattggcacccgttacctcacccgtcccctgtaa

SEQ ID NO: 1002 - DNA, 2214 bp, Artificial Sequence
  source: /note="Description of Artificial Sequence: Synthetic polynucleotide"
atggctgccgatggttatcttccagattggctcgaggacaacctctctgagggcattcgcgagtggtgggacttgaaacctggagccccgaagcccaaagccaaccagcaaaagcaggacgacggccggggtctggtgcttcctggctacaagtacctcggacccttcaacggactcgacaagggggagcccgtcaacgcggcggatgcagcggccctcgagcacgacaaagcctacgaccagcagctcaaagcgggtgacaatccgtacctgcggtataaccacgccgacgccgagtttcaggagcgtctgcaagaagatacgtcttttgggggcaacctcgggcgagcagtcttccaggccaagaagagggttctcgaaccttttggtctggttgaggaaggtgctaagacggctcctggaaagaaacgtccggtagagcagtcgccacaagagccagactcctcctcgggcattggcaagacaggccagcagcccgctaaaaagagactcaattttggtcagactggcgactcagagtcagtccccgacccacaacctctcggagaacctccagcaacccccgctgctgtgggacctactacaatggcttcaggcggtggcgcacccatgcaagacaataacgaaggcgccgacggagtgggtagttcctcgggaaattggcattgcgattccacatggctgggcgacagagtcatcaccaccagcacccgaacctgggccctgcccacctacaacaaccacctctacaagcaaatctccaacgggacatcgggaggagccaccaacgacaacacctacttcggctacagcaccccctgggggtattttgactttaacagattccactgccacttttcaccacgtgactggcagcgactcatcaacaacaactggggattccggcccaagagactcaacttcaagctcttcaacatccaggtcaaggaggtcacgcagaatgaaggcaccaagaccatcgccaataaccttaccagcacgattcaggtctttacggattcggaataccagctcccgtacgtcctcggctctgcgcaccagggctgcctccctccgttcccggcggacgtgttcatgattccgcagtacggctacctaacgctcaacaatggtagccaggcagtgggacggtcatccttttactgcctggaatatttcccatcgcagatgctgagaacgggcaacaactttaccttcagctacacctttgaggacgttcctttccacagcagctacgctcacagccagagtctggaccgtctcatgaatcctctgattgaccagtacctgtactacttgtctcggactcaaacaacaggaggcacggcaaatacgcagactctgggcttcagccaaggtgggcctaatacaatggccaatcaggcaaagaactggctgccaggaccctgttaccgccaacaacgcgtctcaacgacaaccgggcaaaacaacaatagcaactttgcctggactgctgggaccaaataccatctgaatggaagaaattcattggctaatcctggcatcgctatggcaacacacaaagacgacaaggagcgtttttttcccagtaacgggatcctgatttttggcaaacaaaatgctgccagagacaatgcggattacagcgatgtcatgctcaccagcgaggaagaaatcaaaaccactaaccctgtggctacagaggaatacggtatcgtggcagataacttgcagcagcaaaacacggctcctcaaattggaactgtcaacagccagggggccttacccggtatggtctggcagaaccgggacgtgtacctgcagggtcccatctgggccaagattcctcacacggacggcaacttccacccgtctccgctgatgggcggctttggcctgaaacatcctccgcctcagatcctgatcaagaacacgcctgtacctgcggatcctccgaccaccttcaaccagtcaaagctgaactctttcatcacgcaatacagcaccggacaggtcagcgtggaaattgaatgggagctgcagaaggaaaacagcaagcgctggaaccccgagatccagtacacctccaactactacaaatctacaagtgtggactttgctgttaatacagaaggcgtgtactctgaaccccaccccattggcacccgttacctcacccgtcccctgtaa

SEQ ID NO: 1003 - DNA, 2211 bp, Artificial Sequence
  source: /note="Description of Artificial Sequence: Synthetic polynucleotide"
atggctgccgatggttatcttccagattggctcgaggacaacctctctgagggcattcgcgagtggtgggcgctgaaacctggagccccgaagcccaaagccaaccagcaaaagcaggacgacggccggggtctggtgcttcctggctacaagtacctcggacccttcaacggactcgacaagggggagcccgtcaacgcggcggacgcagcggccctcgagcacgacaaggcctacgaccagcagctcaaagcgggtgacaatccgtacctgcggtataaccacgccgacgccgagtttcaggagcgtctgcaagaagatacgtcttttgggggcaacctcgggcgagcagtcttccaggccaagaagcgggttctcgaacctctcggtctggttgaggaaggcgctaagacggctcctggaaagaaacgtccggtagagcagtcgccacaagagccagactcctcctcgggcatcggcaagacaggccagcagcccgctaaaaagagactcaattttggtcagactggcgactcagagtcagtccccgacccacaacctctcggagaacctccagcaacccccgctgctgtgggacctactacaatggcttcaggcggtggcgcaccaatggcagacaataacgaaggcgccgacggagtgggtagttcctcgggaaattggcattgcgattccacatggctgggcgacagagtcatcaccaccagcacccgcacctgggccttgcccacctacaataaccacctctacaagcaaatctccagtgcttcaacgggggccagcaacgacaaccactacttcggctacagcaccccctgggggtattttgacttcaacagattccactgccacttctcaccacgtgactggcagcgactcatcaacaacaactggggattccggcctaagcgactcaacttcaagctcttcaacattcaggtcaaagaggttacggacaacaatggagtcaagaccatcgccaataaccttaccagcacggtccaggtcttcacggactcagactatcagctcccgtacgtgctcgggtcggctcacgagggctgcctcccgccgttcccagcggacgttttcatgattcctcagtacgggtatctgacgctcaacaatggcagccaggcagtgggacggtcatccttttactgcctggaatatttcccatcgcagatgctgagaacgggcaataactttaccttcagctacaccttcgaggacgtgcctttccacagcagctacgcgcacagccagagcctggaccggctgatgaatcctctgattgaccagtacctgtactacttgtctcggactcaaacaacaggaggcacggcaaatacgcagactctgggcttcagccaaggtgggcctaatacaatggccaatcaggcaaagaactggctgccaggaccctgttaccgccaacaacgcgtctcaacgacaaccgggcaaaacaacaatagcaactttgcctggactgctgggaccaaataccatctgaatggaagaaattcattggctaatcctggcatcgctatggcaacacacaaagacgacaaggagcgtttttttcccagtaacgggatcctgatttttggcaaacaaaatgctgccagagacaatgcggattacagcgatgtcatgctcaccagcgaggaagaaatcaaaaccactaaccctgtggctacagaggaatacggtatcgtggcagataacttgcagcagcaaaacacggctcctcaaattggaactgtcaacagccagggggccttacccggtatggtctggcagaaccgggacgtgtacctgcagggtcccatctgggccaagattcctcacacggacggcaacttccacccgtctccgctgatgggcggctttggcctgaaacatcctccgcctcagatcctgatcaagaacacgcctgtacctgcggatcctccgaccaccttcaaccagtcaaagctgaactctttcatcacgcaatacagcaccggacaggtcagcgtggaaattgaatgggagctgcagaaggaaaacagcaagcgctggaaccccgagatccagtacacctccaactactacaaatctacaagtgtggactttgctgttaatacagaaggcgtgtactctgaaccccaccccattggcacccgttacctcacccgtcccctgtaa

SEQ ID NO: 1004 - DNA, 2214 bp, Artificial Sequence
  source: /note="Description of Artificial Sequence: Synthetic polynucleotide"
atggctgccgatggttatcttccagattggctcgaggacaacctctctgagggcattcgcgagtggtgggacttgaaacctggagccccgaaacccaaagccaaccagcaaaagcaggacgacggccggggtctggtgcttcctggctacaagtacctcggacccttcaacggactcgacaagggggagcccgtcaacgcggcggatgcagcggccctcgagcacgacaaggcctacgaccagcagctcaaagcgggtgacaatccgtacctgcggtataaccacgccgacgccgagtttcaggagcgtctgcaagaagatacgtcttttgggggcaacctcgggcgagcagtcttccaggccaagaagcgggttctcgaacctctcggtctggttgaggaaggcgctaagacggctcctggaaagaagagaccggtagagccatcaccccagcgttctccagactcctctacgggcatcggcaagaaaggccaacagcccgccagaaaaagactcaattttggtcagactggcgactcagagtcagtccccgacccacaacctctcggagaacctccagcaacccccgctgctgtgggacctactacaatggcttcaggcggtggcgcaccaatggcagacaataacgaaggcgccgacggagtgggtaatgcctcaggaaattggcattgcgattccacatggctgggcgacagagtcatcaccaccagcacccgaacatgggccttgcccacctataacaaccacctctacaagcaaatctccagtgcttcaacgggggccagcaacgacaaccactacttcggctacagcaccccctgggggtattttgatttcaacagattccactgccatttctcaccacgtgactggcagcgactcatcaacaacaatttgggatcccggcccaagagactcaacttcaagctcttcatcatccaagtcaaggaggtcacgacgaatgatggcgtcacgaccatcgctaataaccttaccagcacggttcaagtcttctcggactcggagtaccagttgccgtacgtcctcggctctgcgcaccagggctgcctccctccgttcccggcggacgtgttcatgattccgcagtacggctacctaacgctcaacaatggcagccaggcagtgggacggtcatccttttactgcctggaatatttcccatcgcagatgctgagaacgggcaataactttaccttcagctacaccttcgaggacgtgcctttccacagcagctacgcgcacagccagagcctggaccggctgatgaatcctctcatcgaccagtacctgtattacctgaacagaactcagaatcagtccggaagtgcccaaaacaaggacttgctgtttagccgggggtctccagctggcatgtctgttcagcccaaaaactggctacctggaccctgttaccggcagcagcgcgtttctaaaacaaaaacagacaacaacaacagcaactttacctggactggtgcttcaaaatataaccttaatgggcgtgaatctataatcaaccctggcactgctatggcctcacacaaagacgacaaagacaagttctttcccatgagcggtgtcatgatttttggaaaggagagcgccggagcttcaaacactgcattggacaatgtcatgatcacagacgaagaggaaatcaaagccactaaccccgtggccaccgaaagatttgggactgtggcagtcaatctccagagcagcagcacagaccctgcgaccggagatgtgcatgttatgggagccttacctggaatggtgtggcaagacagagacgtatacctgcagggtcctatttgggccaaaattcctcacacggatggacactttcacccgtctcctctcatgggcggctttggacttaagcacccgcctcctcagatcctcatcaaaaacacgcctgttcctgcgaatcctccggcagagttttcggctacaaagtttgcttcattcatcacccagtattccacaggacaagtgagcgtggagattgaatgggagctgcagaaagaaaacagcaaacgctggaatcccgaagtgcagtatacatctaactatgcaaaatctgccaacgttgatttcactgtggacaacaatggactttatactgagcctcgccccattggcacccgttacctcacccgtcccctgtaa

SEQ ID NO: 1005 - DNA, 2211 bp, Artificial Sequence
  source: /note="Description of Artificial Sequence: Synthetic polynucleotide"
atggctgccgatggttatcttccagattggctcgaggacaacctctctgagggcattcgcgagtggtgggcgctgaaacctggagccccgaaacccaaagccaaccagcaaaagcaggacgacggccggggtctggtgcttcctggctacaagtacctcggacccttcaacggactcgacaagggggagcccgtcaacgcggcggacgcagcggccctcgagcacgacaaggcctacgaccagcagctcaaggcgggtgacaatccgtacctgcggtataaccacgccgacgccgagtttcaggagcgtctgcaagaagatacgtcttttgggggcaacctcgggcgagcagtcttccaggccaaaaagaggcttcttgaacctcttggtctggttgaggaagcggctaagacggctcctggaaagaaacgtccggtagagcagtcgccacaagagccagactcctcctcgggcattggcaagacaggccagcagcccgctaaaaagagactcaactttgggcagactggcgactcagagtcagtgcccgaccctcaaccaatcggagaacctccagcaacccccgctgctgtgggacctactacaatggcttcaggcggtggcgcaccaatggcggacaataacgaaggcgccgatggagtgggtaattcctcgggaaattggcattgcgattccacatggctgggcgacagagtcatcaccaccagcacccgaacctgggccctgcccacctacaacaatcacctctacaagcaaatctccagtgcttcaacgggggccagcaacgacaaccactacttcggctacagcaccccctgggggtattttgatttcaacagattccactgccacttttcaccacgtgactggcagcgactcatcaacaacaactggggattccggcccaagagactcaacttcaagctcttcaacatccaggtcaaggaggtcacgcagaatgaaggcaccaagaccatcgccaataacctcaccagcaccatccaggtgtttacggactcggagtaccagctgccgtacgttctcggctccgcccaccagggctgcctgcctccgttcccggcggacgtgttcatgattccgcagtacggctacctaacgctcaacaatggcagccaggcagtgggacggtcatccttttactgcctggaatatttcccatcgcagatgctgagaacgggcaacaactttaccttcagctacacctttgaggacgttcctttccacagcagctacgctcacagccagagtctggaccgtctcatgaatcctctgattgaccagtacctgtactacttgtctcggactcaaacaacaggaggcacggcaaatacgcagactctgggcttcagccaaggtgggcctaatacaatggccaatcaggcaaagaactggctgccaggaccctgttaccgccaacaacgcgtctcaacgacaaccgggcaaaacaacaatagcaactttgcctggactgctgggaccaaataccatctgaatggaagaaattcattggctaatcctggcatcgctatggcaacacacaaagacgacaaggagcgtttttttcccagtaacgggatcctgatttttggcaaacaaaatgctgccagagacaatgcggattacagcgatgtcatgctcaccagcgaggaagaaatcaaaaccactaaccctgtggctacagaggaatacggtatcgtggcagataacttgcagcagcaaaacacggctcctcaaattggaactgtcaacagccagggggccttacccggtatggtctggcagaaccgggacgtgtacctgcagggtcccatctgggccaagattcctcacacggacggcaacttccacccgtctccgctgatgggcggctttggcctgaaacatcctccgcctcagatcctgatcaagaacacgcctgtacctgcggatcctccgaccaccttcaaccagtcaaagctgaactctttcatcacgcaatacagcaccggacaggtcagcgtggaaattgaatgggagctgcagaaggaaaacagcaagcgctggaaccccgagatccagtacacctccaactactacaaatctacaagtgtggactttgctgttaatacagaaggcgtgtactctgatccccaccccattggcacccgttacctcacccgtcccctgtaa

SEQ ID NO: 1006 - DNA, 2211 bp, Artificial Sequence
  source: /note="Description of Artificial Sequence: Synthetic polynucleotide"
atggctgccgatggttatcttccagattggctcgaggacaacctctctgagggcattcgcgagtggtgggcgctgaaacctggagccccgaagcccaaagccaaccagcaagagcaggacgacggccggggtctggtgcttcctggctacaagtacctcggacccttcaacggactcgacaagggagagcccgtcaacgcggcggatgcagcggccctcgagcacgacaaagcctacgaccagcagctcaaagcgggtgacaatccgtacctgcggtataaccacgccgacgccgagtttcaggagcgtctgcaagaagatacgtcttttgggggcaacctcgggcgagcagtcttccaggccaagaagagggttctcgaaccttttggtctggttgaggaaggtgctaagacggctcctggaaagaaacgtccggtagagcagtcgccacaagagccagactcctcctcgggcattggcaagacaggccagcagcccgctaaaaagagactcaattttggtcagactggcgactcagagtcagttccagaccctcaacctctcggagaacctccagcagcgccctctggtgtgggacctaatacaatggctgcaggcggtggcgcaccaatggcagacaataacgaaggcgccgacggagtgggtagttcctcgggaaattggcattgcgattccacatggctgggcgacagagtcatcaccaccagcacccgaacctgggccctgcccacctacaacaaccacctctacaagcaaatctccagtgcttcaacgggggccagcaacgacaaccactacttcggctacagcaccccctgggggtattttgactttaacagattccactgccacttttcaccacgtgactggcagcgactcatcaacaacaactggggattccggcccaagagactcaacttcaagctcttcaacatccaggtcaaggaggtcacgcagaatgaaggcaccaagaccatcgccaataaccttaccagcacgattcaggtctttacggattcggaataccagctcccgtacgtcctcggctctgcgcaccagggctgcctccctccgttcccggcggacgtgttcatgattccgcagtacggctacctaacgctcaacaatggtagccaggcagtgggacggtcatcctttttctgcctggaatatttcccatcgcagatgctgagaacgggcaacaactttaccttcagctacacctttgaggacgttcctttccacagcagctacgctcacagccagagtctggaccgtctcatgaatcctctgattgaccagtacctgtactacttgtctcggactcaaacaacaggaggcacggcaaatacgcagactctgggcttcagccaaggtgggcctaatacaatggccaatcaggcaaagaactggctgccaggaccctgttaccgccaacaacgcgtctcaacgacaaccgggcaaaacaacaatagcaactttgcctggactgctgggaccaaataccatctgaatggaagaaattcattggctaatcctggcatcgctatggcaacacacaaagacgacaaggagcgtttttttcccagtaacgggatcctgatttttggcaaacaaaatgctgccagagacaatgcggattacagcgatgtcatgctcaccagcgaggaagaaatcaaaaccactaaccctgtggctacagaggaatacggtatcgtggcagataacttgcagcagcaaaacacggctcctcaaattggaactgtcaacagccagggggccttacccggtatggtctggcagaaccgagacgtgtacctgcagggtcccatctgggccaagattcctcacacggacggcaacttccacccgtctccgctgatgggcggctttggcctgaaacatcctccgcctcagatcctgatcaagaacacgcctgtacctgcggatcctccgaccaccttcaaccagtcaaagctgaactctttcatcacgcaatacagcaccggacaggtcagcgtggaaattgaatgggagctgcagaaggaaaacagcaagcgctggaaccccgagatccagtacacctccaactactacaaatctacaagtgtggactttgctgttaatacagaaggcgtgtactctgaaccccaccccattggcacccgttacctcacccgtcccctgtaa

SEQ ID NO: 1007 - DNA, 2211 bp, Artificial Sequence
  source: /note="Description of Artificial Sequence: Synthetic polynucleotide"
atggctgccgatggttatcttccagattggctcgaggacaacctctctgagggcattcgcgagtggtgggacttgaaacctggagccccgaagcccaaagccaaccagcaaaagcaggacgacggccggggtctggtgcttcctggctacaagtacctcggacccttcaacggactcgacaagggggagcccgtcaacgcggcggacgcagcggccctcgagcacgacaaggcctacgaccagcagctcaaagcgggtgacaatccgtacctgcggtataaccacgccgacgccgagtttcaggagcgtctgcaagaagatacgtcttttgggggcaacctcgggcgagcagtcttccaggccaagaagcgggttctcgaacctctcggtctggttgaggaaggcgctaagacggctcctggaaagaaacgtccggtagagcagtcaccacaagagccagactcctcctcgggcatcggcaagacaggccagcagcccgctaaaaagagactcaattttggtcagactggcgactcagagtcagtccccgacccacaacctctcggagaacctccagcaacccccgctgctgtgggacctactacaatggcttcaggcggtggcgcaccaatggcggacaataacgaaggcgccgacggagtgggtaatgcctcaggaaattggcattgcgattccacatggctgggcgacagagtcatcaccaccagcacccgaacatgggccttgcccacctataacaaccacctctacaagcaaatctccagtgcttcaacgggggccagcaacgacaaccactacttcggctacagcaccccctgggggtattttgatttcaacagattccactgccatttctcaccacgtgactggcagcgactcatcaacaacaattggggattccggcccaagagactcaacttcaagctcttcaacatccaagtcaaggaggtcacgacgaatgatggcgtcacgaccatcgctaataaccttaccagcacggttcaagtcttctcggactcggagtaccagttgccgtacgtcctcggctctgcgcaccagggctgcctccctccgttcccggcggacgtgttcatgattccgcagtacggctacctaacgctcaacaatggcagccaggcagtgggacggtcatccttttactgcctggaatatttcccatcgcagatgctgagaacgggcaataactttaccttcagctacaccttcgaggacgtgcctttccacagcagctacgcgcacagccagagcctggaccggctgatgaatcctctcatcgaccagtacctgtattacctgaacagaactcagaatcagtccggaagtgcccaaaacaaggacttgctgtttagccgggggtctccagctggcatgtctgttcagcccaaaaactggctacctggaccctgttaccggcagcagcgcgtttctaaaacaaaaacagacaacaacaacagcaactttacctggacaggtgcttcaaaatataaccttaatgggcgtgaatctataatcaaccctggcactgctatggcctcacacaaagacgacaaagacaagttctttcccatgagcggtgtcatgatttttggaaaggagagcgccggagcttcaaacactgcattggacaatgtcatgatcacagacgaagaggaaatcaaagccactaaccccgtggccaccgaaagatttgggactgtggcagtcaatctccagaacagcagcacagaccctgcgaccggagatgtgcatgttatgggagccttacctggaatggtgtggcaagacagagacgtatacctgcagggtcctatttgggccaaaattcctcacacggatggacactttcacccgtctcctctcatgggcggctttggacttaagcacccgcctcctcagatcctcatcaaaaacacgcctgttcctgcgaatcctccggcagagttttcggctacaaagtttgcttcattcatcacccagtattccacaggacaagtgagcgtggagattgaatgggagctgcagaaagaaaacagcaaacgctggaatcccgaagtgcagtatacatctaactatgcaaaatctgccaacgttgatttcactgtagacaacaatggactttatactgtgcctcgccccattggcacccgttacctcacccgtcccctgtaa

SEQ ID NO: 1008 - DNA, 2211 bp, Artificial Sequence
  source: /note="Description of Artificial Sequence: Synthetic polynucleotide"
atggctgccgatggttatcttccagattggctcgaggacaacctctctgagggcattcgcgagtggtgggcgctgaaacctggagccccgaagcccaaagccaaccagcaaaagcaggacgacggccggggtctggtgcttcctggctacaagtacctcggacccttcaacggactcgacaaaggagagccggtcaacgcggcggacgcggcggccctcgaacacgacaaggcttacgaccagcagctcaaggcgggtgacaacccctacctgcggtataaccacgccgacgccgagttccaggagcggctgcaagaagatacgtcttttgggggcaacctcgggcgagcagtcttccaggccaaaaagaggcttcttgaacctcttggtctggttgaggaaggcgctaagacggctcctggaaagaagaggcctgtagagcagtctcctcaagaaccggactcctcctcgggtattggcaaaacaggtgagcagcccgctaaaaagagactcaattttggtcagactggcgactcagagtcagtccccgacccacaacctctcggagaacctccagcaacccccgctgctgtgggacctactacaatggcttcaggcggtggcgcaccaatggcagacaataacgaaggcgccgacggagtgggtagtgcctcaggaaattggcattgcgattccacatggctgggcgacagagtcatcaccaccagcacccgaacctgggccctgcccacctataacaaccatctctacaagcaaatctccagtgcttcaacgggggccagcaacgacaaccactacttcggctacagcaccccctgggggtattttgacttcaacagattccactgccacttctcaccacgtgactggcagcgactcatcaacaacaactggggattccggcctaagcgactcaacttcaagctcttcaacattcaggtcaaagaggttacggacaacaatggagtcaagaccatcgccaataacctcaccagcaccatccaggtgttcacggactcagagtatcagctgccgtacgtgctcgggtcggctcaccagggctgcctccctccgttcccagcggacgtgttcatgattcctcagtacgggtatctgacactcaacaacggcagtcaggcagtgggacggtcatccttctactgcctggaatattttccatcgcagatgctgagaaccggcaacaactttccgttcagttacaccttcgaggacgtgcctttccacagcagctacgcgcacagccagagcctggaccggctgatgaatcctctgattgaccagtacctgtactacttgtctcggactcaaacaacaggaggcacggcaaatacgcagactctgggcttcagccaaggtgggcctaatacaatggccaatcaggcaaagaactggctgccaggaccctgttaccgccaacaacgcgtctcaacgacaaccgggcaaaacaacaatagcaactttgcctggactgctgggaccaaataccatctgaatggaagaaattcattggctaatcctggcatcgctatggcaacacacaaagacgacaaggagcgtttttttcccagtaacgggatcctgatttttggcaaacaaaatgctgccagagacaatgcggattacagcgatgtcatgctcaccagcgaggaagaaatcaaaaccactaaccctgtggctacagaggaatacggtatcgtggcagataacttgcagcagcaaaacacggctcctcaaattggaactgtcaacagccagggggccttacccggtatggtctggcagaaccgggacgtgtacctgcagggtcccatctgggccaagattcctcacacggacggcaacttccacccgtctccgctgatgggcggctttggcctgaaacatcctccgcctcagatcctgatcaagaacacgcctgtacctgcggatcctccgaccaccttcaaccagtcaaagctgaactctttcatcacgcaatacagcaccggacaggtcagcgtggaaattgaatgggagctgcagaaggaaaacagcaagcgctggaaccccgagatccagtacacctccaactactacaaatctacaagtgtggactttgctgttaatacagaaggcgtgtactctgaaccccaccccattggcacccgttacctcacccgtcccctgtaa

SEQ ID NO: 1009 - DNA, 2211 bp, Artificial Sequence
  source: /note="Description of Artificial Sequence: Synthetic polynucleotide"
atggctgccgatggttatcttccagattggctcgaggacaacctctctgagggcattcgcgagtggtgggcgctgaaacctggagccccgaagcccaaagccaaccagcaaaagcaggacgacggccggggtctggtgcttcctggctacaagtacctcggacccttcaacggactcgacaagggggagcccgtcaacgcggcggacgcagcggccctcgagcacgacaaggcctacgaccagcagctcaaagcgggtgacaatccgtacctgcggtataaccacgccgacgccgagtttcaggagcgtctgcaagaagatacgtcttttgggggcaacctcgggcgagcagtcttccaggccaagaagcgggttctcgaacctctcggtctggttgaggaaggcgctaagacggctcctggaaagaaacgtccggtagaacagtcgccacaagagccagactcctcctcgggcatcggcaagacaggccagcagcccgctaaaaagagactcaattttggtcagactggcgactcagagtcagtccccgatccacaacctctcggagaacctccagcaacccccgctgctgtgggacctactacaatggcttcaggcggtggcgcaccaatggcagacaataacgaaggcgccgacggagtgggtagttcctcgggaaattggcattgcgattcccaatggctgggggacagagtcatcaccaccagcacccgaacctgggccctgcccacctacaacaaccacctctacaagcaaatctccagtgcttcaacgggggccagcaacgacaaccactacttcggctacagcaccccctgggggtattttgatttcaacagattccactgccatttctcaccacgtgactggcagcgactcatcaacaacaactggggattccggcctaagcgactcaacttcaagctcttcaacattcaggtcaaagaggttacggacaacaatggagtcaagaccatcgccaataaccttaccagcacggtccaggtcttcacggactcggagtaccagttgccgtacgtcctcggctctgcgcaccaggactgcctccctccgttcccggcggacgtgttcatgattccgcagtacggctacctaacgctcaacaatggcagccaggcagtgggacggtcatccttttactgcctggaatatttcccatcgcagatgctgagaacgggcaacaactttaccttcagctacacctttgaggacgttcctttccacagcagctacgctcacagccagagtctggaccgtctcatgaatcctctgattgaccagtacctgtactacttgtctcggactcaaacaacaggaggcacggcaaatacgcagactctgggcttcagccaaggtgggcctaatacaatggccaatcaggcaaagaactggctgccaggaccctgttaccgccaacaacgcgtctcaacgacaaccggacaaaacaacaatagcaactttgcctggactgctgggaccaaataccatctgaatggaagaaattcattggctaatcctggcatcgctatggcaacacacaaagacgacaaggagcgtttttttcccagtaacgggatcctgatttttggcaaacaaaatgctgccagagacaatgcggattacagcgatgtcatgctcaccagcgaggaagaaatcaaaaccactaaccctgtggctacagaggaatacggtatcgtggcagataacttgcagcagcaaaacacggctcctcaaattggaactgtcaacagccagggggccttacccggtatggtctggcagaaccgggacgtgtacctgcagggtcccatctgggccaagattcctcacacggacggcaacttccacccgtctccgctgatgggcggctttggcctgaaacatcctccgcctcagatcctgatcaagaacacgcctgtacctgcggatcctccgaccaccttcaaccagtcaaagctgaactctttcatcacgcaatacagcaccggacaggtcagcgtggaaattgaatgggagctgcagaaggaaaacagcaagcgctggaaccccgagatccagtacacctccaactactacaaatctacaagtgtggactttgctgttaatacagaaggcgtgtactctgaaccccaccccattggcacccgttacctcacccgtcccctgtaa

SEQ ID NO: 1010 - DNA, 2211 bp, Artificial Sequence
  source: /note="Description of Artificial Sequence: Synthetic polynucleotide"
atggctgccgatggttatcttccagattggctcgaggacaacctctctgagggcattcgcgagtggtgggacttgaaacctggagccccgaagcccaaagccaaccagcaaaagcaggacgacggccggggtctggtgcttcctggctacaagtacctcggacccttcaacggactcgacaagggggagcccgtcaacgcggcggacgcagcggccctcgagcacgacaaggcctacgaccagcagctcaaagcgggtgacaatccgtacctgcggtataaccacgccgacgccgagtttcaggagcgtctgcaagaagatacgtcttttgggggcaacctcgggcgagcagtcttccaggccaagaagcgggttctcgaacctctcggtctggttgaggaaggcgctaagacggctcctggaaagaaacgtccggtagagcagtcaccacaagagccagactcctcctcgggcatcggcaagacaggccagcagcccgctaaaaagagactcaattttggtcagactggcgactcagagtcagtccccgacccacaacctctcggagaacctccagcaacccccgctgctgtgggacctactacaatggcttcaggcggtggcgcaccaatggcagacaataacgaaggtgccgacggagtgggtaatgcctcaggaaattggcattgcgattccacatggctgggcgactgagtcatcaccaccagcacccgcacctgggccttgcccacctacaataaccacctctacaagcaaatctccagtgcttcaacgggggccagcaacgacaaccactacttcggctacagcaccccctgggggtattttgatttcaacagattccactgccacttttcaccacgtgactggcagcgactcatcaacaacaattggggattccggcccaagagactcaacttcaaactcttcaacatccaagtcaaggaggtcacgcagaatgaaggcaccaagaccatcgccaataacctcaccagcaccatccaggtgtttacggactcggagtaccagctgccgtacgttctcggctctgcccaccagggctgcctgcctccgttcccggcggacgtgttcatgattccccagtacggctacctaacgctcaacaatggcagccaggcagtgggacggtcatccttttactgcctggaatactttccttcgcagatgctgagaaccggcaacaacttccagtttacttacaccttcgaggacgtgcctttccacagcagctacgcccacagccagagcttggaccggctgatgaatcctctgattgaccagtacctgtactacttgtctcggactcaaacaacaggaggcacggcaaatacgcagactctgggcttcagccaaggtgggcctaatacaatggccaatcaggcaaagaactggctgccaggaccctgttaccgccaacaacgcgtctcaacgacaaccgggcaaaacaacaatagcaactttgcctggactgctgggaccaaataccatctgaatggaagaaattcattggctaatcctggcatcgctatggcaacacacaaagacgacaaggagcgtttttttcccagtaacgggatcctgatttttggcaaacaaaatgctgccagagacaatgcggattacagcgatgtcatactcaccagcgaggaagaaatcaaaaccactaaccctgtggctacagaggaatacggtatcgtggcagataacttgcagcagcaaaacacggctcctcaaattggaactgtcaacagccagggggccttacccggtatggtctggcagaaccgggacgtgtacctgcagggtcccatctgggccaagattcctcacacggacggcaacttccacccgtctccgctgatgggcggctttggcctgaaacatcctccgcctcagatcctgatcaagaacacgcctgtacctgcggatcctccgaccaccttcaaccagtcaaagctgaactctttcatcacgcaatacagcaccggacaggtcagcgtggaaattgaatgggagctgcagaaggaaaacagcaagcgctggaaccccgagatccagtacacctccaactactacaaatctacaagtgtggactttgctgttaatacagaaggcgtgtactctgaaccccaccccattggcacccgttacctcacccgtcccctgtaa

SEQ ID NO: 1011 - DNA, 2211 bp, Artificial Sequence
  source: /note="Description of Artificial Sequence: Synthetic polynucleotide"
atggctgccgatggttatcttccagattggctcgaggacactctctctgaaggaataagacagtggtggaagctcaaacctggcccaccaccaccaaagcccgcagagcggcataaggacgacagcaggggtcttgtgcttcctgggtacaagtacctcggacccttcaacggactcgacaagggagagccggtcaacgaggcagacgccgcggccctcgagcacgacaaagcctacgaccggcagctcgacagcggagacaacccgtacctcaagtacaaccacgccgacgcggagtttcaggagcgccttaaagaagatacgtcttttgggggcaacctcgggcgagcagtcttccaggccaagaagagggttctcgaaccttttggtctggttgaggaaggtgctaagacggctcctggaaagaaacgtccggtagagcagtcgccacaagagccagactcctcctcgggcattggcaagacaggccagcagcccgctaaaaagagactcaattttggtcagactggcgactcagagtcagtccccgacccacaacctctcggagaacctccagcaacccccgctgctgtgggacctactacaatggcttcaggcggtggcgcaccaatggcagacaataacgaaggcgccgacggagtgggtaatgcctcaggaaattggcattgcgattccacatggctgggcgacagagtcatcaccaccagcacccgaacatgggccttgcccacctataacaaccacctctacaagcaaatctccagtacttcaacgggggccagtaacgacaaccactacttcggctacagcaccccctgggggtattttgacttcaacagattccactgccacttctcaccacgtgactggcagcgactcatcaacaacaactggggattccggcctaagcgactcaacttcaagctcttcaacattcaggtcaaagaggttacggacaacaatggagtcaagaccatcgccaataaccttaccagcacggtccaggtcttcacggactcggagtaccagttgccgtacgtcctcggctctgcgcaccagggctgcctgcctccgttcccggcggacgtgttcatgattccgcagtacggctacctaacgctcaacaatggcagccaggcagtgggacggtcatccttttactgcctggaatatttcccatcgcagatgctgagaacgggcaacaactttaccttcagctacacttttgaggacgttcctttccacagcagctacgctcacagccagagtctggaccgtctcatgaatcctctgattgaccagtacctgtactacttgtctcggactcaaacaacaggaggcacggcaaatacgcagactctgggcttcagccaaggtgggcctaatacaatggccaatcaggcaaagaactggctgccaggaccctgttaccgccaacaacgcgtctcaacgacaaccggacaaaacaacaatagcaactttgcctggactgctgggaccaaataccatctgaatggaagaaattcattggctaatcctggcatcgctatggcaacacacaaagacgacaaggagcgtttttttcccagtaacgggatcctgatttttggcaaacaaaatgctgccagagacaatgcggattacagcgatgtcatgctcaccagcgaggaagaaatcaaaaccactaaccctgtggctacagaggaatacggtatcgtggcagataacttgcagcagcaaaacacggctcctcaaattggaactgtcaacagccagggggccttacccggtatggtctggcagaaccgggacgtgtacctgcagggtcccatctgggccaagattcctcacacggacggcaacttccacccgtctccgctgatgggcggctttggcctgaaacatcctccgcctcagatcctgatcaagaacacgcctgtacctgcggatcctccgaccaccttcaaccagtcaaagctgaactctttcatcacgcaatacagcaccggacaggtcagcgtggaaattgaatgggagctgcagaaggaaaacagcaagcgctggaaccccgagatccagtacacctccaactactacaaatctacaagtgtggactttgctgttaatacagaaggcgtgtactctgaaccccaccccattggcacccgttacctcacccgtcccctgtaa

SEQ ID NO: 1012 - DNA, 2208 bp, Artificial Sequence
  source: /note="Description of Artificial Sequence: Synthetic polynucleotide"
atggctgccgatggttatcttccagattggctcgaggacaacctctctgagggcattcgcgagtggtgggacttgaaacctggagccccgaagcccaaagccaaccagcaaaagcaggacgacggccggggtctggtgcttcctggctacaagtacctcggacccttcaacggactcgacaagggggagcccgtcaacgcggcggatgcagcggccctcgagcacgacaaggcctacgaccggcagctcgacagcggagacaacccgtacctgcggtataaccacgccgacgcggagtttcaggagcgccttaaagaagatacgtcttttgggggcaacctcgggcgagcagtcttccaggccaagaagagggttctcgaaccttttggtctggttgaggaaggtgctaagacggctcctggaaagaaacgtccggtagagcagtcgccacaagagccagactcctcctcgggcattggcaagacaggccagcagcccgctaaaaagagactcaattttggtcagactggcgactcagagtcagtccccgacccacaacctctcggagaacctccagcaacccccgctgctgtgggacctactacaatggcttcaggcggtggcgcaccaatggcagacaataacgaaggcgccgacggagtgggtaatgcctcaggaaattggcattgcgattccacatggctgggcgacagagtcatcaccaccagcacccgcacctgggccttgcccacctacaataaccacctctacaagcaaatctccagtgcttcaacgggggccagcaacgacaaccactacttcggctacagcaccccctgggggtattttgactttaacagattccactgccacttttcaccacgtgactggcaaagactcatcaacaacaactggggattccggcccaagagactcaacttcaagctcttcaacatccaggtcaaggaggtcacgcagaatgaaggcaccaagaccatcgccaataaccttaccagcacgattcaggtctttacggactcggaataccagctcccgtacgtcctcggctctgcgcaccagggctgcctccctccgttcccggcggacgtgttcatgattccgcagtacggctacctaacactcaacaacggtagtcaggccgtgggacgctcctccttctactgcctggaatactttccttcgcagatgctgagaaccggcaacaacttccagtttacttacaccttcgaggacgtgcctttccacagcagctacgcccacagccagagcttggaccggctgatgaatcctctgattgaccagtacctgtactacttgtctcggactcaaacaacaggaggcacggcaaatacgcagactctgggcttcagccaaggtgggcctaatacaatggccaatcaggcaaagaactggctgccaggaccctgttaccgccaacaacgcgtctcaacgacaaccgggcaaaacaacaatagcaactttgcctggactgctgggaccaaataccatctgaatggaagaaattcactggctaatcctggcatcgctatggcaacacacaaagacgacaggagcgtttttttccagtaccgggatcctgattttggcaaacaaaatgctgccagagacaatgcggattacagcgatgtcatgctcaccagcgaggaagaaatcaaaaccactaaccctgtggctacagaggaatacggtatcgtggcagataacttgcagcagcaaaacacggctcctcaaattggaactgtcaacagccagggggccttacccggtatggtctggcagaaccgggacgtgtacctgcagggtcccatctgggccaagattcctcacacggacggcaacttccacccgtctccgctgatgggcggctttggcctgaaacatcctccgcctcagatcctgatcaagaacacgcctgtacctgcggatcctccgaccaccttcaaccagtcaaagctgaactctttcatcacgcaatacagcaccggacaggtcagcgtggaaattgaatgggagctgcagaaggaaaacagcaagcgctggaaccccgagatccagtacacctccaactactacaaatctacaagtgtggactttgctgttaatacagaaggcgtgtactctgaaccccaccccattggcacccgttacctcacccgtcccctgtaa

SEQ ID NO: 1013 - DNA, 2211 bp, Artificial Sequence
  source: /note="Description of Artificial Sequence: Synthetic polynucleotide"
atggctgccgatggttatcttccagattggctcgaggacaacctctctgagggcattcgcgagtggtgggcgctgaaacctggagccccgaagcccaaagccaaccagcaaaagcaggacgacggccggggtctggtgcttcctggctacaagtacctcggacccttcaacggactcgacaagggggagcccgtcaacgcggcggatgcagcagccctcgaacacgacaaagcttacgaccagcagctcaaggccggtgacaacccctacctcaagtataaccacgccgacgccgagtttcaggagcgtcttcaaggagatacgtcttttgggggcaacctcggacgagcagtcttccaggccaagaagcgggttctcgaacctcttggtctggttgaggaagcggctaagacggctcctggaaagaagaggcctgtagagcagtctcctcaggaaccggactcctccgcgggtattggcaaatcgggtgcacagcccgctaaaaagagactcaatttcggtcagactggcgacacagagtcagtcccagaccctcaacctctcggagaacctccagcagcgccctctggtgtgggacctaatacaatggctgcaggcggtggcgcaccaatggcagacaataacgaaggtgccgatggagtgggtagttcctcgggaaattggcattgcgattcccaatggctgggggacagagtcatcaccaccagcacccgaacctgggccctgcccacctacaacaaccacctctacaagcaaatctccagtgcttcaacgggggccagcaacgacaaccactacttcggctacagcaccccttgggggtattttgacttcaacagattccactgccacttttcaccacgtgactggcagcgactcatcaacaacaactggggattccggcctaagcgactcaacttcaagctcttcaacattcaggtcaaagaggttacggacaacaatggagtcaagaccatcgccaataaccttaccagcacggtccaggtcttcacggactcagactatcagctcccgtacgtgctcgggtcggctcacgagggctgcctccctccgttcccggcggacgtgttcatgattccgcagtacggctacctaacgctcaacaatggcagccaggcagtgggacggtcatccttttactgcctggaatactttccttcgcagatgctgagaaccggcaacaacttccagtttacttacaccttcgaggacgtgcctttccacagcagctacgctcacagccagagtctggaccgtctcatgaatcctctgattgaccagtacctgtactacttgtctcggactcaaacaacaggaggcacggcaaatacgcagactctgggcttcagccaaggtgggcctaatacaatggccaatcaggcaaagaactggctgccaggaccctgttaccgccaacaacgcgtctcaacgacaaccgggcaaaacaacaatagcaactttgcctggactgctgggaccaaataccatctgaatggaagaaattcattggctaatcctggcatcgctatggcaacacacaaagacgacaaggagcgtttttttcccagtaacgggatcctgatttttggcaaacaaaatgctgccagagacaatgcggattacagcgatgtcatgctcaccagcgaggaagaaatcaaaaccactaaccctgtggctacagaggaatacggtatcgtagcagataacttgcagcagcaaaacacggctcctcaaattggaactgtcaacagccagggggccttacccggtatggtctggcagaaccgggacgtgtacctgcagggtcccatctgggccaagattcctcacacggacggcaacttccacccgtctccgctgatgggcggctttggcctgaaacatcctccgcctcagatcctgatcaagaacacgcctgtacctgcggatcctccgaccaccttcaaccagtcaaagctgaactctttcatcacgcaatacagcaccggacaggtcagcgtggaaattgaatgggagctgcagaaggaaaacagcaagcgctggaaccccgagatccagtacacctccaactactacaaatctacaagtgtggactttgctgttaatacagaaggcgtgtactctgaaccccaccccattggcacccgttacctcacccgtcccctgtaa

SEQ ID NO: 1014 - DNA, 2211 bp, Artificial Sequence
  source: /note="Description of Artificial Sequence: Synthetic polynucleotide"
atggctgccgatggttatcttccagattggctcgaggacactctctctgaaggaataagacagtggtggaagctcaaacctggcccaccaccaccaaagcccgcagagcggcataaggacgacagcaggggtcttgtgcttcctgggtacaagtacctcggacccttcaacggactcgacaagggagagccggtcaacgaggcagacgccgcggccctcgagcacgacaaagcctacgaccggcagctcgacagcggagacaacccgtacctcaagtacaaccacgccgacgcggagtttcaggagcgccttaaagaagatacgtcttttgggggcaacctcgggcgagcagtcttccaggccaagaagagggttctcgaaccttttggtctggttgaggaagcggctaagacggctcctggaaagaaacgtccggtagagcagtcgccacaagagccagactcctcctcgggcattggcaagacaggccagcagcccgctaaaaagagactcaattttggtcagactggcgactcagagtcagtccccgacccacaacctctcggagaacctccagcaacccccgctgctgtgggacctactacaatggcttcaggcggtggcgcaccaatggcagacaataacgaaggcgccgacggagtgggtaatgcctcaggaaattggcattgcgattccacatggctgggcgacagagtcatcaccaccagcacccgaacatgggccttgcccacctataacaaccacctctacaagcaaatctccagtgcttcaacgggggccagcaacgacaaccactacttcggctacagcaccccctgggggtattttgacttcaacagattccactgccacttctcaccacgtgactggcagcgactcatcaacaacaactggggattccggcctaagcgactcaacttcaagctcttcaacattcaggtcaaagaggttacggacaacaatggagtcaagaccatcgccaataaccttaccagcacggtccaggtcttcacggactcagactatcagctcccgtacgtgctcgggtcggctcacgagggctgcctcccgccgttcccagcggacgttttcatgattcctcagtacggctacctaacactcaacaacggtagtcaggccgtgggacgctcctccttctactgcctggaatactttccttcgcagatgctgagaacgggcaacaactttaccttcagctacacctttgaggacgttcctttccacagcagctacgctcacagccagagtctggaccgtctcatgaatcctctgattgaccagtacctgtactacttgtctcggactcaaacaacaggaggcacggcaaatacgcagactctgggcttcagccaaggtgggcctaatacaatggccaatcaggcaaagaactggctgccaggaccctgttaccgccaacaacgcgtctcaacgacaaccgggcaaaacaacaatagcaactttgcctggactgctgggacaaaataccatctgaatggaagaaattcattggctaatcctggcatcgctatggcaacacacaaagacgacaaggagcgtttttttcccagtaacgggattctgatttttggcaaacaaaatgctgccagagacaatgcggattacagcgatgtcatgctcaccagcgaggaagaaatcaaaaccactaaccctgtggctacagaggaatacggtatcgtggcagataacttgcagcagcaaaacacggctcctcaaattggaactgtcaacagccagggggccttacccggtatggtctggcagaaccgggacgtgtacctgcagggtcccatctgggccaagattcctcacacggacggcaacttccacccgtctccgctgatgggcggctttggacttaagcacccgcctcctcagatcctcatcaaaaacacgcctgttcctgcggatcctccgaccaccttcaaccagtcaaagctgaactctttcatcacgcaatacagcaccggacaggtcagcgtggaaattgaatgggagctgcagaaggaaaacagcaagcgctggaaccccgagatccagtacacctccaactactacaaatctacaagtgtggactttgctgttaatacagaaggcgtgtactctgaaccccaccccattggcacccgttacctcacccgtcccctgtaa

SEQ ID NO: 1015 - DNA, 2211 bp, Artificial Sequence
  source: /note="Description of Artificial Sequence: Synthetic polynucleotide"
atggctgccgatggttatcttccagattggctcgaggacaacctctctgagggcattcgcgagtggtgggcgctgaaacctggagccccgaagcccaaagccaaccagcaaaagcaggacgacggccggggtctggtgcttcctggctacaagtacctcggacccttcaacggactcgacaaaggagagccggtcaacgcggcggacgcagcggccctcgagcacgacaaggcctacgaccagcagctcaaagcgggtgacaatccgtacctgcggtataaccacgccgacgccgagtttcaggagcgtctgcaagaagatacgtcttttgggggcaacctcgggcgagcagtcttccaggccaagaagcgggttctcgaacctctcggtctggttgaggaaggcgctaagacggctcctggaaagaaacgtccggtagagcagtcgccacaagagccagactcctcctcgggcatcggcaagacaggccagcagcccgctaaaaagagactcaattttggtcagactggcgactcagagtcagtccccgacccacaacctctcggagaacctccagcaacccccgctgctgtgggacctactacaatggcttcaggcggtggcgcaccaatggcagacaataacgaaggcgccgacggagtgggtagttcctcgggaaattggcattgcgattccacatggctgggcgacagagtcatcaccaccagcacccgcacctgggccttgcccacctacaataaccacctctacaagcaaatctccagtgcttcaacgggggccagcaacgacaaccactacttcggctacagcaccccctgggggtattttgacttcaacagattccactgccacttctcaccacgtgactggcagcgactcatcaacaacaactggggattccggcctaagcgactcaacttcaagctcttcaacattcaggtcaaagaggttacggacaacaatggagtcaagaccatcgccaataaccttaccagcacggtccaggtcttcacggactcggagtaccagttgccgtacgtcctcggctctgcgcaccagggctgcctccctccgttcccggcggacgtgttcatgattccgcagtacggctacctaacgctcaacaatggcagccaggcagtgggacggtcatccttttactgcctggaatatttcccatcgcagatgctgagaacgggcaacaactttaccttcagctacacctttgaggacgttcctttccacagcagctacgctcacagccagagtctggaccgtctcatgaatcctctgattgaccagtacctgtactacttgtctcggactcaaacaacaggaggcacggcaaatacgcagactctgggcttcagccaaggtgggcctaatacaatggccaatcaggcaaagaactggctgccaggaccctgttaccgccaacaacgcgtctcaacgacaaccgggcaaaacaacaatagcaactttgcctggactgctgggaccaaataccatctgaatggaagaaattcattggctaatcctggcatcgctatggcaacacacaaagacgacaaggagcgtttttttcccagtaacgggatcctgatttttggcaaacaaaatgctgccagagacaatgcggattacagcgatgtcatgctcaccagcgaggaagaaatcaaaaccactaaccctgtggctacagaggaatacggtatcgtggcagataacttgcagcagcaaaacacggctcctcaaattggaactgtcaacagccagggggccttacccggtatggtctggcagaaccgggatgtgtacctgcagggtcccatctgggccaagattcctcacacggacggcaacttccacccgtctccgctgatgggcggctttggcctgaaacatcctccgcctcagatcctgatcaagaacacgcctgtacctgcggatcctccgaccaccttcaaccagtcaaagctgaactctttcatcacgcaatacagcaccggacaggtcagcgtggaaattgaatgggagctgcagaaggaaaacagcaagcgctggaaccccgagatccagtacacctccaactactacaaatctacaagtgtggactttgctgttaatacagaaggcgtgtactctgaaccccaccccattggcacccgttacctcacccgtcccctgtaa

SEQ ID NO: 1016 - DNA, 2214 bp, Artificial Sequence
  source: /note="Description of Artificial Sequence: Synthetic polynucleotide"
atggctgccgatggttatcttccagattggctcgaggacaaccttagtgaaggaattcgcgagtggtgggcgctgaaacctggagccccgaagcccaaagccaaccagcaaaagcaggacgacggccggggtctggtgcttcctggctacaagtacctcggacccttcaacggactcgacaagggggagcccgtcaacgcggcggacgcagcggccctcgagcacgacaaggcctacgaccagcagctcaaagcgggtgacaatccgtacctgcggtataaccacgccgacgccgagtttcaggagcgtctgcaagaagatacgtcttttgggggcaacctcgggcgagcagtcttccaggccaagaagcgggttctcgaacctctcggtctggttgaggaaggcgctaagacggctcctggaaagaaacgtccggtagagcagtcgccacaagagccagactcctcctcgggcatcggcaagacaggccagcagcccgctaaaaagagactcaatttcggtcagactggcgacacagagtcagtcccagaccctcaaccaatcggagaacctcccgcagccccctcaggtgtgggatctcttacaatggcttcaggtggtggcgcaccagtggcagacaataacgaaggtgccgatggagtgggtagttcctcgggaaattggcattgcgattcccaatggctgggggacagagtcatcaccaccagcaccagaacctgggccttgcccacctacaataaccacctctacaagcaaatctccaacagcacatctggaggatcttcaaatgacaacgcctacttcggctacagcaccccctgggggtattttgactttaacagattccactgccacttttcaccacgtgactggcagcgactcatcaacaacaactggggattccgacccaagagactcaacttcaagctcttcaacatccaggtcaaggaggtcacgcagaacgaaggcaccaagaccatcgccaataacctcaccagcaccatccaggtgtttacggactcggagtaccagctgccgtacgttctcggctccgcccaccagggctgcctgcctccgttcccggcggacgtgttcatgattccccagtacggctacctaacgctcaacaacggtagtcaggccgtgggacgctcctccttctactgcctggaatactttccttcgcagatgctgagaaccggcaacaacttccagtttacttacaccttcgaggacgtgcctttccacagcagctacgcgcacagccagagcttggaccggctgatgaatcctctgattgaccagtacctgtactacttgtctcggactcaaacaacaggaggcacggcaaatacgcagactctgggcttcagccaaggtgggcctaatacaatggccaatcaggcaaagaactggctgccaggaccctgttaccgccaacaacgcgtctcaacgacaaccgggcaaaacaacaatagcaactttgcctggactgctgggaccaaataccatctgaatggaagaaattcattggctaatcctggcatcgctatggcaacacacaaagacgacaaggagcgtttttttcccagtaacgggatcctgatttttggcaaacaaaatgctgccagagacaatgcggattacagcgatgtcatgctcaccagcgaggaagaaatcaaaaccactaaccctgtggctacagaggaatacggtatcgtggcagataacttgcagcagcaaaacacggctcctcaaattggaactgtcaacagccagggggccttacccggtatggtctggcagaaccgggacgtgtacctgcagggtcccatctgggccaagattcctcacacggacggcaacttccacccgtctccgctgatgggcggctttggcctgaaacatcctccgcctcagatcctgatcaagaacacgcctgtacctgcggatcctccgaccaccttcaaccagtcaaagctgaactctttcatcacgcaatacagcaccggacaggtcagcgtggaaattgaatgggagctgcagaaggaaaacagcaagcgctggaaccccgagatccagtacacctccaactactacaaatctacaagtgtggactttgctgttaatacagaaggcgtgtactctgaaccccaccccattggcactcgttacctcacccgtcccctgtaa

SEQ ID NO: 1017 - DNA, 2211 bp, Artificial Sequence
  source: /note="Description of Artificial Sequence: Synthetic polynucleotide"
atggctgccgatggttatcttccagattggctcgaggacaacctctctgagggcattcgcgagtggtgggcgctgaaacctggagccccgaagcccaaagccaaccagcaaaagcaggacgacggccggggtctggtgcttcctggctacaagtacctcggacccttcaacggactcgacaagggggagcccgtcaacgcggcggatgcagcagccctcgaacacgacaaagcttacgaccagcagctcaaggccggtgacaacccctacctcaagtataaccacgccgacgccgagtttcaggagcgtcttcaaggagatacgtcttttgggggcaacctcggacgagcagtcttccaggccaagaagcgggttctcgaacctcttggtctggttgaggaagcggctaagacggctcctggaaagaagaggcctgtagagcagtctcctcaggaaccggactcctccgcgggtattggcaaatcgggtgcacagcccgctaaaaagagactcaatttcggtcagactggcgacacagagtcagtcccagaccctcaacctctcggagaacctccagcagcgccctctggtgtgggacctaatacaatggctgcaggcggtggcgcaccaatggcagacaataacgaaggtgccgatggagtgggtagttcctcgggaaattggcattgcgattcccaatggctgggggacagagtcatcaccaccagcacccgaacctgggccctgcccacctacaacaaccacctctacaagcaaatctccagtgcttcaacgggggccagcaacgacaaccactacttcggctacagcaccccttgggggtattttgacttcaacagattccactgccacttctcaccacgtgactggcagcgactcatcaacaacaactggggattccggcctaagcgactcaacttcaagctcttcaacattcaggtcaaagaggttacggacaacaatggagtcaagaccatcgccaataaccttaccagcacggtccaggtcttcacggactcggagtaccagttgccgtacgtcctcggctctgcgcaccagggctgcctccctccgttcccggcggacgtgttcatgattccgcagtacggctacctaacgctcaacaatggcagccaggcagtgggacggtcatccttttactgcctggaatatttcccatcgcagatgctgagaacgggcaacaactttaccttcagctacacctttgaggacgttcctttccacagcagctacgctcacagccagagtctggaccgtctcatgaatcctctgattgaccagtacctgtactacttgtctcggactcaaacaacaggaggcacggcaaatacgcagactctgggcttcagccaaggtgggcctaatacaatggccaatcaggcaaagaactggctgccaggaccctgttaccgccaacaacgcgtctcaacgacaaccgggcaaaacaacaatagcaactttgcctggactgctgggaccaaataccatctgaatggaagaaattcattggctaatcctggcatcgctatggcaacacacaaagacgacaaggagcgtttttttcccagtaacgggatcctgatttttgacaaacaaaatgctgccagagacaatgcggattacagcgatgtcatgctcaccagcgaggaagaaatcaaaaccactaaccctgtggctacagaggaatacggtatcgtggcagataacttgcagcagcaaaacacggctcctcaaattggaactgtcaacagccagggggccttacccggtatggtctggcagaaccgggatgtgtacctgcagggtcccatctgggccaagattcctcacacggacggcaacttccacccgtctccgctgatgggcggctttggcctgaaacatcctccgcctcagatcctgatcaagaacacgcctgtacctgcggatcctccgaccaccttcaaccagtcaaagctgaactctttcatcacgcaatacagcaccggacaggtcagcgtggaaattgaatgggagctgcagaaggaaaacagcaagcgctggaaccccgagatccagtacacctccaactactacaaatctacaagtgtggactttgctgttaatacagaaggcgtgtactctgaaccccaccccattggcacccgttacctcacccgtcccctgtaa

SEQ ID NO: 1018 - DNA, 2211 bp, Artificial Sequence
  source: /note="Description of Artificial Sequence: Synthetic polynucleotide"
atggctgccgatggttatcttccagattggctcgaggacactctctctgaaggaataagacagtggtggaagctcaaacctggcccaccaccaccaaagcccgcagagcggcataaggacgacagcaggggtcttgtgcttcctgggtacaagtacctcggacccttcaacggactcgacaagggagagccggtcaacgaggcagacgccgcggccctcgagcacgacaaagcctacgaccggcagctcgacagcggagacaacccgtacctcaagtacaaccacgccgacgcggagtttcaggagcgccttaaagaagatacgtcttttgggggcaacctcggacgagcagtcttccaggcgaaaaagagggttcttgaacctctgggcctggttgaggaacctgttaagacggctccgggaaaaaagaggccggtagagcactctcctgtggagccagactcctcctcgggaaccggaaaggcgggccagcagcctgcaagaaaaagattgaattttggtcagactggcgactcagagtcagtccccgacccacaacctctcggagaacctccagcaacccccgctgctgtgggacctaatacgatggctacaggcagtggcgcaccaatggcagacaataacgagggcgccgacggagtgggtaattcctcgggaaattggcattgcgattccacatggatgggcgacagagtcatcaccaccagcaccagaacctgggccctgcccacttacaacaaccatctctacaagcaaatctccagtgcttcaacgggggccagcaacgacaaccactacttcggctacagcaccccctgggggtattttgacttcaacagattccactgccacttctcaccacgtgactggcagcgactcatcaacaacaactggggattccggcctaagcgactcaacttcaagctcttcaacattcaggtcaaagaggttacggacaacaatggagtcaagaccatcgccaataaccttaccagcaccatccaggtctttacggactcggaataccagctgccgtacgttctcggctctgcccaccagggctgcctgcctccgttcccggcggacgtgttcatgattccccagtacggctacctaacactcaacaacggtagtcaggccgtgggacgctcctccttctactgcctggaatatttcccatcgcagatgctgagaacgggcaacaactttaccttcagctacacctttgaggacgttcctttccacagcagctacgctcacagccagagtctggaccgtctcatgaatcctctgattgaccagtacctgtactacttgtctcggactcaaacaacaggaggcaaggcaaatacgcagactctgggcttcagccaaggtgggcctaatacaatggccaatcaggcaaagaactggctgccaggaccctgttaccgccaacaacgcgtctcaacgacaaccgggcaaaacaacaatagcaactttgcctggactgctgggaccaaataccatctgaatggaagaaattcattggctaatcctggcatcgctatggcaacacacaaagacgacaaggagcgtttttttcccagtaacgggatcctgatttttggcaaacaaaatgctgccagagacaatgcggattacagcgatgtcatgctcaccagcgaggaagaaatcaaaaccactaaccctgtggctacagaggaatacggtatcgtggcagataacttgcagcagcaaaacacggctcctcaaattggaactgtcaacagccagggggccttacccggtatggtctggcagaaccgggacgtgtacctgcagggtcccatctgggccaagattcctcacacggacggcaacttccacccgtctccgctgatgggcggctttggcctgaaacatcctccgcctcagatcctgatcaagaacacgcctgtacctgcggatcctccgaccaccttcaaccagtcaaagctgaactctttcatcacgcaatacagcaccggacaggtcagcgtggaaattgaatgggagctgcagaaggaaaacagcaagcgctggaaccccgagatccagtacacctccaactactacaaatctacaagtgtggactttgctgttaatacagaaggcgtgtactctgaaccccaccccattggcacccgttacctcacccgtcccctgtaa

SEQ ID NO: 1019 - DNA, 2211 bp, Artificial Sequence
  source: /note="Description of Artificial Sequence: Synthetic polynucleotide"
atggctgccgatggttatcttccagattggctcgaggacaacctctctgagggcattcgcgagtggtgggcgctgaaacctggagccccgaagcccaaagccaaccagcaaaagcaggacgacggccggggtctggtgcttcctggctacaagtacctcggacccttcaacggactcgacaagggggagcccgtcaacgcggcggacgcagcggccctcgagcacgacaaggcctacgaccagcagctcaaagcgggtgacaatccgtacctgcggtataaccacgccgacgccgagtttcaggagcgtctgcaagaagatacgtcttttgggggcaacctcgggcgagcagtcttccaggccaagaagcgggttctcgaaccttttggtctggttgaggaaggtgctaagacggctcctggaaagaaacgtccggtagagcagtcgccacaagagccagactcctcctcgggcatcggcaagacaggccagcagcccgctaaaaagagactcaattttggtcagactggcgactcagagtcagtccccgacccacaacctctcggagaacctccagcaacccccgctgctgtgggacctactacaatggcttcaggcggtggcgcaccaatggcggacaataacgaaggcgccgacggagtgggtaatgcctcaggaaattggcattgcgattccacatggctgggcgacagagtcatcaccaccagcacccgcacctgggccttgcccacctacaataaccacctctacaagcaaatctccagtgcttcaacgggggccagcaacgacaaccactacttcggctacagcaccccctgggggtattttgacttcaacagattccactgccacttttcaccacgtgactggcaaagactcatcaacaacaactggggattccggcctaagcgactcaacttcaagctcttcaacattcaggtcaaagaggttacggacaacaatggagtcaagaccatcgccaataaccttaccagcacggtccaggtcttcacggactcggagtaccagttgccgtacgtcctcggctctgcgcaccagggctgcctccctccgttcccggcggacgtgttcatgattccgcagtacggctacctaacgctcaacaatggcagccaggcagtgggacggtcatccttttactgcctggaatatttcccatcgcagatgctgagaacgggcaacaactttaccttcagctacacctttgaggacgttcctttccacagcagctacgctcacagccagagtctggaccgtctcatgaatcctctgattgaccagtacctgtactacttgtctcggactcaaacaacaggaggcacgggaaatacgcagactctgggcttcagccaaggtgggcctaatacaatggccaatcaggcaaagaactggctgccaggaccctgttaccgccaacaacgcgtctcaacgacaaccgggcaaaacaacaatagcaactttgcctggactgctgggaccaaataccatctgaatggaagaaattcattggctaatcctggcatcgctatggcaacacacaaagacgacaaggagcgtttttttcccagtaacgggatcctgatttttggcaaacaaaatgctgccagagacaatgcggattacagcgatgtcatgctcaccagcgaggaagaaatcaaaaccactaaccctgtggctacagaggaatacggtatcgtggcagataacttgcagcagcaaaacacggctcctcaaattggaactgtcaacagccagggggccttacccggtatggtctggcagaaccgggacgtgtacctgcagggtcccatctgggccaagattcctcacacggacggcaacttccacccgtctccgctgatgggcggctttggcctgaaacatcctccgcctcagatcctgatcaagaacacgcctgtacctgcggatcctccgaccaccttcaaccagtcaaagctgaactctttcatcacgcaatacagcaccggacaggtcagcgtggaaattgaatgggagctgcagaaggaaaacagcaagcgctggaaccccgagatccagtacacctccaactactacaaatctacaagtgtggactttgctgttaatacagaaggcgtgtactctgaaccccaccccattggcacccgttacctcacccgtcccctgtaa

SEQ ID NO: 1020 - DNA, 2211 bp, Artificial Sequence
  source: /note="Description of Artificial Sequence: Synthetic polynucleotide"
atggctgccgatggttatcttccagattggctcgaggacaacctctctgagggcattcgcgagtggtgggacttgaaacctggagccccgaaacccaaagccaaccagcaaaagcaggacgacggccggggtctggtgcttcctggctacaagtacctcggacccttcaacggactcgacaagggggagcccgtcaacgcggcggacgcagcggccctcgagcacgacaaggcctacgaccagcagctcaaagcgggtgacaatccgtacctgcggtataaccacgccgacgccgagtttcaggagcgtctgcaagaagatacgtcttttgggggcaacctcgggcgagcagtcttccaggccaagaagcgggttctcgaacctctcggtctggttgaggaaggcgctaagacggctcctggaaagaagaggcctgtagagcagtcgccacaagagccagactcctcctcgggcatcggcaagacaggccagcagcccgctaaaaagagactcaattttggtcagactggcgactcagagtcagtccccgatccacaacctctcggagaacctccagcaacccccgctgctgtgggacctactacaatggcttcaggcggtggcgcaccaatggcagacaataacgaaggcgccgacggagtgggtagttcctcgggaaattggcattgcgattccacatggctgggcgacagagtcatcaccaccagcacccgaacatgggccttgcccacctataacaaccacctctacaagcaaatctccagtgcttcaacgggggccagcaacgacaaccactacttcggctacagcaccccctgggggtattttgacttcaacagattccactgccacttctcaccacgtgactggcagcgactcatcaacaacaactggggattccggcctaagcgactcaacttcaagctcttcaacatccaggtcaaggaggtcacgcagaatgaaggcaccaagaccatcgccaataacctcaccagcaccatccaggtgtttacggactcggagtaccagcttccgtacgtcctcggctctgcgcaccagggctgcctccctccgttcccggcggacgtgttcatgattccgcagtacggctacctaacgctcaacaatggcagccaggcagtgggacggtcatccttttactgcctggaatatttcccatcgcagatgctgagaacgggcaacaactttaccttcagctacacctttgaggacgttcctttccacagcagctacgcgcacagccagagcttggaccggctgatgaatcctctgattgaccagtacctgtactacttgtctcggactcaaacaacaggaggcacggcaaatacgcagactctgggcttcagccaaggtgggcctaatacaatggccaatcaggcaaagaactggctgccaggaccctgttaccgccaacaacgcgtctcaacgacaaccgggcaaaacaacaatagcaactttgcctggactgctgggaccaaataccatctgaatggaagaaattcattggctaatcctggcatcgctatggcaacacacaaagacgacaaggagcgtttttttcccagtaacgggatcctgatttttggcaaacaaaatgctgccagagacaatgcggattacagcgatgtcatgctcaccagcgaggaagaaatcaaaaccactaaccctgtggctacagaggaatacggtatcgtggcagataacttgcagcagcaaaacacggctcctcaaattggaactgtcaacagccagggggccttacccggtatggtctggcagaaccgggacgtgtacctgcagggtcccatctgggccaagattcctcacacggacggcaacttccacccgtctccgctgatgggcggctttggcctgaaacatcctccgcctcagatcctgatcaagaacacgcctgtacctgcggatcctccgaccaccttcaaccagtcaaagctgaactctttcatcacgcaatacagcaccggacaggtcagcgtggaaattgaatgggagctgcagaaggaaaacagcaagcgctggaaccccgagatccagtacacctccaactactacaaatctacaagtgtggactttgctgttaatacagaaggcgtgtactctgaaccccaccccattggcacccgttacctcacccgtcccctgtaa

SEQ ID NO: 1021 - DNA, 2211 bp, Artificial Sequence
  source: /note="Description of Artificial Sequence: Synthetic polynucleotide"
atggctgccgatggttatcttccagattggctcgaggacaacctctctgagggcattcgcgagtggtgggcgctgaaacctggagccccgaagcccaaagccaaccagcaaaagcaggacgacggccggggtctggtgcttcctggctacaagtacctcggacccttcaacggactcgacaagggggagcccgtcaacgcggcggatgcagcggccctcgagcacgacaaggcctacgaccagcagctcaaagcgggtgacaatccgtacctgcggtataaccacgccgacgccgagtttcaggagcgtctgcaagaagatacgtcttttgggggcaacctcgggcgagcagtcttccaggccaagaagcgggttctcgaacctctcggtctggttgaggaaggcgctaagacggctcctggaaagaaacgtccggtagagcagtcgccacaagagccagactcctcctcgggcatcggcaagacaggccagcagcccgctaaaaagagactcaattttggtcagactggcgactcagagtcagtccccgacccacaacctctcggagaacctccagcaacccccgctgctgtgggacctactacaatggctgcaggcggtggcgcaccaatggcagacaataacgaaggcgccgacggagtgggtagttcctcgggaaattggcattgcgattccacatggatgggcgacagagtcatcaccaccagcacccgaacctgggccttgcccacctataacaaccatctctacaagcaaatctccagtgcttcaacgggggccagcaacgacaaccactacttcggctacagcaccccctgggggtattttgacttcaacagattccactgccacttctcaccacgtgactggcagcgactcatcaacaacaactggggattccggcccaagagactcagcttcaagctcttcaacatccaggtcaaggaggtcacgcagaatgaaggcaccaagaccatcgccaataacctcaccagcaccatccaggtgtttacggactcggagtaccagctgccgtacgtcctcggctctgcgcaccagggctgcctccctccgttcccggcggacgtgttcatgattccgcagtacggctacctaacgctcaacaatggcagccaggcagtgggacggtcatccttttactgcctggaatatttcccatcgcagatgctgagaacgggcaacaactttaccttcagctacacctttgaggacgttcctttccacagcagctacgctcacagccagagcttggaccggctgatgaatcctctgattgaccagtacctgtactacttgtctcggactcaaacaacaggaggcacggcaaatacgcagactctgggtttcagccaaggtgggcctaatacaatggccaatcaggcaaagaactggctgcaaggaccctgttaccgccaacaacgcgtctcaacgacaaccgggcaaaacaacaatagcaactttgcctggactgctgggaccaaataccatctgaatggaagaaattcattggctaatcctggcatcgctatggcaacacacaaagacgacaaggagcgtttttttcccagtaacgggatcctgatttttggcaaacaaaatgctgccagagacaatgcggattacagcgatgtcatgctcaccagcgaggaagaaatcaaaaccactaaccctgtggctacagaggaatacggtatcgtggcagataacttgcagcagcaaaacacggctcctcaaattggaactgtcaacagccagggggccttacccggtatggtctggcagaacctggacgtgtacctgcagggtcccatctgggccaagattcctcacacggacggcaacttccacccgtctccgctgatgggcggctttggcctgaaacatcctccgcctcagatcctgatcaagaacacgcctgtacctgcggatcctccgaccaccttcaaccagtcaaagctgaactctttcatcacgcaatacagcaccggacaggtcagcgtggaaattgaatgggagctgcagaaggaaaacagcaagcgctggaaccccgagatccagtacacctccaactactacaaatctacaagtgtggactttgctgttaatacagaaggcgtgtactctgaaccccaccccattggcacccgttacctcacccgtcccctgtaa

SEQ ID NO: 1022 - DNA, 2214 bp, Artificial Sequence
  source: /note="Description of Artificial Sequence: Synthetic polynucleotide"
atggctgccgatggttatcttccagattggctcgaggacaacctctctgagggcattcgcgagtggtgggcgctgaaacctggagccccgaagcccaaagccaaccagcaaaagcaggacgacggccggggtctggtgcttcctggctacaagtacctcggacccttcaacggactcgacaagggagagcccgtcaacgcggcggacgcagcggccctcgagcacgacaaggcctacgaccagcagctcaaagcgggtgacaatccgtacctgcggtataaccacgccgacgccgagtttcaggagcgtctgcaagaagatacgtcttttgggggcaacctcgggcgagcagtcttccaggccaagaagcgggttctcgaacctctcggtctggttgaggaaggcgctaagacggctcctggaaagaagagaccggtagagccatcaccccagcgttctccagactcctcctcgggcatcggcaagacaggccagcagcccgctaaaaagagactcaattttggtcagactggcgactcagagtcagtccccgacccacaacctctcggagaacctccagcaacccccgctgctgtgggacctactacaatggcttcaggtggtggcgcaccaatggcagacaataacgaaggcgccgacggagtgggtaatgcctcaggaaattggcattgcgattcccaatggctgggcgacagagtcatcaccaccagcacccgaacatgggccttgcccacctataacaaccacctctacaagcaaatctccagtgcttcaacgggggccagcaacgacaaccactacttcggctacagcaccccctgggggtattttgacttcaacagattccactgccacttttcaccacgtgactggcagcgactcatcaacaacaactggggattccggcctaagcgactcaacttcaagctcttcaacattcaggtcaaagaggttacggacaacaatggagtcaagaccatcgccaataaccttaccagcacggtccaggtcttcacggactcagactatcagctcccgtacgtgctcgggtcggctcacgagggctgcctcccgccgttcccagcggacgttttcatgattccccagtacggctacctaacactcaacaacggtagtcaggccgtgggacgctcctccttctactgcctggaatactttccttcgcagatgctgagaaccggcaacaacttccagtttacttacaccttcgaggacgtgcctttccacagcagctacgctcacagccagagcttggaccggctgatgaatcctctgattgaccagtacctgtactacttgtctcggactcaaacaacaggaggcacggcaaatacgcagactttgggcttcagccaaggtgggcctaatacaatggccaatcaggcaaagaactgggtgccaggaccctgttaccgccaacaacgggtttcaacggcaaccgggcaaaacaacaatagcaactttgcctggactgctgggaccaaataccatctgaaaggaagaaattcattggctaatcctggcatcgctatggcaacacacaaagacgacaaggagcgtttttttcccagtaacgggatcctgatttttggcaaacaaaatgctgccagagacaatgcggattacagcgatgtcatgctcaccagcgaggaagaaatcaaaaccactaaccctgtggctacagaggaatacggtatcgtggcagataacttgcagcagcaaaacacggctcctcaaattggaactgtcaacagccagggggccttacccggtatggtctggcagaaccgggacgtgtacctgcagggtcccatctgggccaagattcctcacacggacggcaacttccacccgtctccgctgatgggcggctttggcctgaaacatcctccgcctcagatcctgatcaagaacacgcctgtacctgcggatcctccgaccaccttcaaccagtcaaagctgaactctttcatcacgcaatacagcaccggacaggtcagcgtggaaattgaatgggagctgcagaaggaaaacagcaaacgctggaacccagagattcaatacacttccaactactacaaatctacaagtgtggactttgctgttaatacagaaggcgtgtactctgaaccccaccccattggcacccgttacctcacccgtcccctgtaa

SEQ ID NO: 1023 - DNA, 2214 bp, Artificial Sequence
  source: /note="Description of Artificial Sequence: Synthetic polynucleotide"
  modified_base (676)..(676): a, c, t, g, unknown or other
  modified_base (697)..(697): a, c, t, g, unknown or other
  modified_base (715)..(715): a, c, t, g, unknown or other
  modified_base (748)..(748): a, c, t, g, unknown or other
  modified_base (750)..(750): a, c, t, g, unknown or other
  modified_base (757)..(757): a, c, t, g, unknown or other
  modified_base (763)..(763): a, c, t, g, unknown or other
atggctgccgatggttatcttccagattggctcgaggacactctctctgaaggaataagacagtggtggaagctcaaacctggcccaccaccaccaaagcccgcagagcggcataaggacgacagcaggggtcttgtgcttcctgggtacaagtacctcggacccttcaacggactcgacaagggagagccggtcaacgaggcagacgccgcggccctcgagcacgacaaagcctacgaccggcagctcgacagcggagacaacccgtacctcaagtacaaccacgccgacgcggagtttcaggagcgccttaaagaagatacgtcttttgggggcaacctcggacgagcagtcttccaggcgaaaaagagggttcttgaacctctcggtctggttgaggaaggcgctaagacggctcctggaaagaaacgtccggtagagcagtcgccacaagagccagactcctcctcgggcatcggcaagacaggccagcagcccgctaaaaagagactcaattttggtcagactggcgactcagagtcagtccccgacccacaacctctcggagaacctccagcaacgccctctggtgtgggacctaatacaatggctgcaggcggtggcgctccaatggcagacaataacgaaggcgccgacggagtgggtagttcctcangaaattggcattgcgattccncatggctgggcgacagantcatcaccaccagcacccgaacctgggccctgncnacctacnacaacnacctctacaagcaaatctccaacagcacatctggaggagccaccaacgacaacacctacttcggctacagcaccccctgggggtattttgactttaacagattccactgccacttttcaccacgtgactggcagcgactcatcaacaacaactggggattccggcctaagcgactcaacttcaagctcttcaacatccaggtcaaggaggtcacgcagaatgaaggcaccaagaccatcgccaataacctcaccagcaccatccaggtgtttacggactcggagtaccagctgccgtacgttctcggctctgcccaccagggctgcctgcctccgttcccggcggacgtgttcatgattccccagtacggctacctaacactcaacaacggtagtcaggccgtgggacgctcctccttctactgcctggaatactttccttcgcagatgctgagaaccggcaacaacttccagtttacttacaccttcgaggacgtgcctttccacagcagctacgcccacagccagagcttggaccggctgatgaatcctctgattgaccagtacctgtactacttgtctcggactcaaacaacaggaggcacggcaaatacgcagactctgggcttcagccaaggtgggcctaatacaatggccaatcaggcaaagaactggctgccaggaccctgttaccgccaacaacgcgtctcaacgacaaccgggcaaaacaacaatagcaactttgcctggactgctgggaccaaataccatctgaatggaagaaattcattggctaatcctggcatcgctatggcaacacacaaagacgacaaggagcgtttttttcccagtaacgggatcctgatttttggcaaacaaaatgctgccagagacaatgcggattacagcgatgtcatgctcaccagcgaggaagaaatcaaaaccactaaccctgtggctacagaggaatacggtatcgtggcagataacttgcagcagcaaaacacggctcctcaaattggaactgtcaacagccagggggccttacccggtatggtttggcagaaccgggacgtgtacctgcagggtcctatctgggccaagattcctcacacggacggaaactttcatccctcgccgctgatgggaggctttggactgaaacacccgcctcctcagatcctgattaagaatacacctgttcccgcggatcctccaactaccttcagtcaagctaagctggcgtcgttcatcacgcaatacagcacaggacaagtgagtgtggaaattgaatgggagctgcagaaagaaaacagcaagcgctggaatcccgaagtgcagtacacatccaattatgcaaaatctgccaacgttgattttactgtggacaacaatggactttatactgagcctcgccccattggcacccgttaccttacccgtcccctgtaa

SEQ ID NO: 1024 - DNA, 2214 bp, Artificial Sequence
  source: /note="Description of Artificial Sequence: Synthetic polynucleotide"
atggctgccgatggttatcttccagattggctcgaggacaacctctctgagggcattcgcgagtggtgggacttgaaacctggagccccgaagcccaaagccaaccagcaaaagcaggacgacggccggggtctggtgcttcctggctacaagtacctcggacccttcaacggactcgacaagggggagcccgtcaacgcggcggacgcagcggccctcgagcacgacaaggcctacgaccagcagctcaaagcgggtgacaatccgtacctgcggtataaccacgccgacgccgagtttcaggagcgtctgcaagaagatacgtcttttgggggcaacctcgggcgagcagtcttccaggccaagaagcgggttctcgaacctctcggtctggttgaggaaggcgctaagacggctcctggaaagaagagaccggtagagccatcaccccagcgttctccagactcctctacgggcatcggcaagaaaggccagcagcccgcgaaaaagagactcaactttgggcagactggcgactcagagtcagtgcccgaccctcaaccaatcggagaaccccccgcaggcccctctggtgtgggatctcttacaatggcttcaggtggtggcgcaccagtggcagacaataacgaaggtgccgatggagtgggtagttcctcgggaaattggcattgcgattcccaatggctgggggacagagtcatcaccaccagcacccgaacatgggccttgcccacctataacaaccacctctacaagcaaatctccagtgcttcaacgggggccagcaacgacaaccactacttcggctacagcaccccctgggggtattttgactttaacagattccactgccacttctcaccacgtgactggcagcgactcatcaacaacaactggggattccggcccaagagactcaacttcaagctcttcaacatccaggtcaaggaggtcacggacaatgatggagtcaagaccatcgccaataaccttaccagcacgattcaggtctttacggactcggaataccagttgccgtacgtcctcggctctgcgcaccagggctgcctgcctccgttcccggcggacgtgttcatgattccgcagtacggctacctaacgctcaacaatggcagccaggcagtgggacggtcatccttttactgcctggaatatttcccatcgcagatgctgagaacgggcaacaactttaccttcagctacacttttgaggacgttcctttccacagcagctacgctcacagccagagtctggaccgtctcatgaatcctctgattgaccagtacctgtactacttgtctcggactcaaacaacaggaggcacggcaaatacgcagactctgggcttcagccaaggtgggcctaatacaatggccaatcacgcaaagaactggctgccaggaccctgttaccgccaacaacgcgtctcaacgacaaccggacaaaacaacaatagcaactttgcctggactgctgggaccaaataccatctgaatggaagaaattcattggctaatcctggcatcgctatggcaacacacaaagacgacaaggagcgtttttttcccagtaacgggatcctgatttttggcaaacaaaatgctgccagagacaatgcggattacagcgatgtcatgctcaccagcgaggaagaaatcaaaaccactaaccctgtggctacagaggaatacggtatcgtggcagataacttgcagcagcaaaacacggctcctcaaattggaactgtcaacagccagggggccttacccggtatggtctggcagaaccgggacgtgtacctgcagggtcccatctgggccaagattcctcacacggacggcaacttccacccgtctccgctgatgggcggctttggcctgaaacatcctccgcctcagatcctgatcaagaacacgcctgtacctgcggatcctccgaccaccttcaaccagtcaaagctgaactctttcatcacgcaatacagcaccggacaggtcagcgtggaaattgaatgggagctgcagaaggaaaacagcaagcgctggaaccccgagatccagtacacctccaactactacaaatctacaagtgtggactttgctgttaatacagaaggcgtgtactctgaaccccaccccattggcacccgttacctcacccgtcccctgtaa

SEQ ID NO: 1025 - DNA, 2211 bp, Artificial Sequence
  source: /note="Description of Artificial Sequence: Synthetic polynucleotide"
atggctgccgatggttatcttccagattggctcgaggacactctctctgaaggaataagacagtggtggaagctcaaacctggcccaccaccaccaaagcccgcagagcggcacaaggacgacagcaggggtcttgtgcttcctgggtacaagtacctcggacccttcaacggactcgacaagggagagccggtcaacgaggcagacgccgcggccctcgagcacgacaaagcctacgaccggcagctcgacagcggagacaacccgtacctcaagtacaaccacgccgacgcggagtttcaggagcgccttaaagaagatacgtcttttgggggcaacctcggacgagcagtcttccaggcgaaaaagagggttcttgaacctctgggcctggttgaggaacctgttaagacggctccgggaaaaaagaggccggtagagcactctcctgtggagccagactcctcctcgggaaccggaaaggcgggccagcagcctgctaaaaagagactcaattttggtcagactggcgactcagagtcagtccccgacccacaacctctcggagaacctccagcaacccccgctgctgtgggacctactacaatggcttcaggtggtggcgcaccaatggcagacaataacgaaggcgccgacggagtgggtaatgcctcaggaaattggcattgcgattccacatggctgggcgacagagtcatcaccaccagcacccgcacctgggccttgcccacctacaataaccacctctacaagcaaatctccagtgcttcaacgggggccagcaacgacaaccactacttcggctacagcaccccctgggggtattttgacttcaacagattccactgccacttctcaccacgtgactggcagcgactcatcaacaacaactggggattccggcccaagagactcaacttcaaactcttcaacatccaagtcaaggaggtcacgcagaatgaaggcaccaagaccatcgccaataacctcaccagcaccatccaggtgtttacggactcggagtaccagctgccgtacgttctcggctctgcccaccagggctgcctgcctccgttcccggcggacgtgttcatgattccccagtacggctacctaacactcaacaacggtagtcaggccgtgggacgctcctccttctactgcctggaatactttccttcgcagatgctgagaaccggcaacaacttccagtttacttacaccttcgaggacgtgcctttccacagcagctacgcgcacagccagagcttggaccggctgatgaatcctctgattgaccagtacctgtactacttgtctcggactcaaacaacaggaggcacggcaaatacgcagactctgggcttcagccaaggtgggcctaatacaatggccaatcaggcaaagaactggctgccaggaccctgttaccgccaacaacgcgtctcaacgacaaccgggcaaaacaacaatagcaactttgcctggactgctgggaccaaataccatctgaatggaagaaattcattggctaatcctggcatcgctatggcaacacacaaagacgacaaggagcgtttttttcccagtaacgggatcctgatttttggcaaacaaaatgctgccagagacaatgcggattacagcgatgtcatgctcaccagcgaggaagaaatcaaaaccactaaccctgtggctacagaggaatacggtatcgtggcagataacttgcagcagcaaaacacggctcctcaaattggaactgtcaacagccagggggccttacccggtatggtctggcagaaccgggacgtgtacctgcagggtcccatctgggccaagattcctcacacggacggcaacttccacccgtctccgctgatgggcggctttggcctgaaacatcctccgcctcagatcctgatcaagaacacgcctgtacctgcggatcctccgaccaccttcaaccagtcaaagctgaactctttcatcacgcaatacagcaccggacaggtcagcgtggaaattgaatgggagctgcagaaggaaaacagcaagcgctggaaccccgagatccagtacacctccaactactacaaatctacaagtgtggactttgctgttaatacagaaggcgtgtactctgaaccccaccccattggcacccgttacctcacccgtcccctgtaa

SEQ ID NO: 1026 - DNA, 2211 bp, Artificial Sequence
  source: /note="Description of Artificial Sequence: Synthetic polynucleotide"
atggctgccgatggttatcttccagattggctcgaggacaacctctctgagggcattcgcgagtggtgggcgctgaaacctggagccccgaagcccaaagccaaccagcaaaagcaggacgacggccggggtctggtgcttcctggctacaagtacctcggacccttcaacggactcgacaagggggagcccgtcaacgcggcggatgcagcggccctcgagcacgacaaggcctacgaccagcagctccaagcgggtgacaatccgtacctgcggtataaccacgccgacgccgagtttcaggagcgtcttcaaggagatacgtcttttgggggcaacctcggacgagcagtcttccaggccaagaagcgggttctcgaacctctcggtctggttgaggaaggcgctaagacggctcctggaaagaaacgtccggtagagcagtcgccacaagagccagactcctcctcgggcatcggcaagacaggccagcagcccgctaaaaagagactcaattttggtcagactggcgactcagagtcagtccccgacccacaacctctcggagaacctccagcaacccccgctgctgtgggacctactacaatggcttcaggcggtggcgcaccaatggcggacaataacgaaggcgccgatggagtgggtaatgcctcaggaaattggcattgcgattccacatggctgggcgacagagtcatcaccaccagcacccgcacctgggccttgcccacctacaataaccacctctacaagcaaatctccagtgcttcaacgggggccagcaacgacaaccactacttcggctacagcaccccctgggggtattttgacttcaacagattccactgccacttctcaccacgtgactggcagcgactcatcaacaacaactggggattccggcctaagcgactcaacttcaagctcttcaacattcaggtcaaagaggttacggacaacaatggagtcaagaccatcgccaataacctcaccagcaccatccaggtgtttacggactcggagtaccagctgccgtacgttctcggctctgcccaccagggctgcctgcctccgttcccggcggacgtgttcatgattccccagtacggctacctaacactcaacaacggtagtcaggccgtgggacgctcctccttctactgcctggaatactttccttcgcagatgctgagaaccggcaacaacttccagtttacttacaccttcgaggacgtgcctttccacagcagctacgcccacagccagagcttggaccggctgatgaatcctctgattgaccagtacctgtactacttgtctcggactcaaacaacaggaggcacggcaaatacgcagactctgggcttcagccaaggtgggcctaatacaatggccaatcaggcaaagaactggctgccaggaccctgttaccgccaacaacgcgtctcaacgacaaccgggcaaaacaacaatagcaactttgcctggactgctgggaccaaataccatctgaatggaagaaattcattggctaatcctggcatcgctatggcaacacacaaagacgacaaggagcgtttttttcccagtaacgggatcctgatttttggcaaacaaaatgctgccagagacaatgcggattacagcgatgtcatgctcaccagcgaggaagaaatcaaaaccactaaccctgtggctacagaggaatacggtatcgtggcagataacttgcagcagcaaaacacggctcctcaaattggaactgtcaacagccagggggccttacccggtatggtctggcagaaccgggacgtgtacctgcagggtcccatctgggccaagattcctcacacggacggcaacttccacccgtctccgctgatgggcggctttggcctgaaacatcctccgcctcagatcctgatcaagaacacgcctgtacctgcggatcctccgaccaccttcaaccagtcaaagctgaactctttcatcacgcaatacagcaccggacaggtcagcgtggaaattgaatgggagctgcagaaggaaaacagcaagcgctggaaccccgagatccagtacacctccaactactacaaatctacaagtgtggactttgctgttaatacagaaggcgtgtactctgaaccccaccccattggcacccgttacctcacccgtcccctgtaa

SEQ ID NO: 1027 - DNA, 2217 bp, Artificial Sequence
  source: /note="Description of Artificial Sequence: Synthetic polynucleotide"
atggctgccgatggttatcttccagattggctcgaggacactctctctgaaggaataagacagtggtggaagctcaaacctggcccaccaccaccaaagcccgcagagcggcataaggacgacagcaggggtcttgtgcttcctgggtacaagtacctcggacccttcaacggactcgacaagggggagcccgtcaacgcggcggatgcagcggccctcgagcacgacaaggcctacgaccagcagctcaaagcgggtgacaatccgtacctgcggtataaccacgccgacgcggagtttcaggagcgccttaaagaagatacgtcttttgggggcaacctcggacgagcagtcttccaggcgaaaaagagggttcttgaacctctcggtctggttgaggaaggcgctaagacggctcctggaaagaagagaccggtagagccatcaccccagcgttctccagactcctctacgggcatcggcaagaaaggccaacagcccgccagaaaaagactcaattttggtcagactggcgactcagagtcagttccagaccctcaacctctcggagaacctccagcagcgccctctggtgtgggacctaatacaatggctgcaggcggtggcgcaccaatggcagacaataacgaaggcgccgacggagtgggtagttcctcgggaaattggcattgcgattcccaatggctgggggacagagtcatcaccaccagcaccagaacctgggccctgcccacctacaacaatcacctctacaagcaaatctccaacagcacatctggaggatcttcaaatgacaacgcctacttcggctacagcaccccctgggggtattttgacttcaaccgcttccactgccacttctcaccacgtgactggcagcgactcatcaacaacaactggggattccggcccaagagactcaacttcaagctcttcaacattcaggtcaaagaggttacggacaacaatggagtcaagaccatcgccaataaccttaccagcacggtccaggtctttacggactcggagtaccagttgccgtacgtcctcggctctgcgcaccagggctgcctccctccgttcccggcggacgtgttcatgattccccagtacggctacctaacactcaacaacggtagtcaggccgtgggacgctcctccttctactgcctggaatatttcccttctcagatgctgagaacgggcaacaactttaccttcagctacacctttgaggacgttcctttccacagcagctacgctcacagccagagtctggaccgtctcatgaatcctctgattgaccagtacctgtactacttgtctcggactcaaacaacaggaggcacggcaaatacgcagactctgggcttcagccaaggtgggcctaatacaatggccaatcaggcaaagaactggctgccaggaccctgttaccgccaacaacgcgtctcaacgacaaccgggcaaaacaacaatagcaactttgcctggactgctgggaccaaataccatctgaatggaagaaattcattggctaatcctggcatcgctatggcaacacacaaagacgacaaggagcgtttttttcccagtaacgggatcctgatttttggcaaacaaaatgctgccagagacaatgcggattacagcgatgtcatgctcaccagcgaggaagaaatcaaaaccactaaccctgtggctacagaggaatacggtatcgtggcagataacttgcagcagcaaaacacggctcctcaaattggaactgtcaacagccagggggccttacccggtatggtctggcagaaccgggacgtgtacctgcagggtcccatctgggcaaagattccacacacggacggacattttcacccctctcccctcatgggtggattcggacttaaacaccctcctccacagattctcatcaagaacaccccggtacctgcgaatcctccgaccaccttcaaccagtcaaagctgaactctttcatcacgcaatacagcacaggacaagtgagtgtggaaattgaatgggagctgcagaaagaaaacagcaagcgctggaatcccgaagtgcagtacacatccaattatgcaaaatctgccaacgttgattttactgtggacaacaatggactttatactgagcctcgccccattggcacccgttaccttacccgtcccctgtaa

SEQ ID NO: 1028 - DNA, 2211 bp, Artificial Sequence
  source: /note="Description of Artificial Sequence: Synthetic polynucleotide"
atggctgccgatggttatcttccagattggctcgaggacaacctctctgagggcattcgcgagtggtgggcgctgaaacctggagccccgaaacccaaagccaaccagcaaaagcaggacgacggccggggtctggtgcttcctggctacaagtacctcggacccttcaacggactcgacaagggggagcccgtcaacgcggcggacgcagcggccctcgagcacgacaaggcctacgaccagcagctcaaggcgggtgacaatccgtacctgcggtataaccacgccgacgccgagtttcaggagcgtctgcaagaagatacgtcttttgggggcaacctcgggcgagcagtcttccaggccaaaaagaggcttcttgaacctcttggtctggttgaggaaggggctaagacggctcctggaaagaaacgtccggtagagcagtcgccacaagagccagactcctcctcgggcattggcaagacaggccagcagcccgctaaaaagagactcaactttgggcagactggcgactcagagtcagtgcccgatcctcaacctctcggagaacctccagcaacccccgctgctgtgggacctactacaatggcttcaggcggtggcgcaccaatggcggacaataacgaaggcgccgatggagtgggtaattcctcgggaaattggcattgcgattccacatggatgggcgacagagtcatcaccaccagcacccgaacctgggccctgcccacctacaacaatcacctctacaagcaaatctccagtgcttcaacgggggccagcaacgacaaccactacttcggctacagcaccccctgggggtattttgatttcaacagattccactgccatttttcaccacgtgactggcagcgactcatcaacaacaactggggattccggcccaagagactcaacttcaagctcttcaacatccaggtcaaggaggtcacgcagaatgaaggcaccaagaccatcgccaataaccttaccagcacgattcaggtctttacggattcggaataccagctcccgtacgtcctcggctctgcgcaccagggctgcctccctccgttcccggcggacgtgttcattattccgcagtacggctacctaacgctcaacaatggtagccaggcagtgggacggtcatccttttactgcctggaatatttcccatcgcagatgctgagaacgggcaacaactttaccttcagctacacctttgaggacgttcctttccacagcagctacgctcacagccagagtctggaccgtctcatgaatcctctgattgaccagtacctgtactacttgtctcggactcaaacaacaggaggcacggcaaatacgcagactctgggcttcagccaaggtgggcctaatacaatggccaatcaggcaaagaactggctgccaggaccctgttaccgccaacaacgcgtctcaacgacaaccgggcaaaacaacaatagcaactttgcctggactgctgggaccaaataccatctgaatggaagaaattcattggctaatcctggcatcgctatggcaacacacaaagacgacaaggagcgtttttttcccagtaacgggatcctgatttttggcaaacaaaatgctgccagagacaatgcggattacagcgatgtcatgctcaccagcgaggaagaaatcaaaaccactaaccctgtggctacagaggaatacggtatcgtggcagataacttgcagcagcaaaacacggctcctcaaattggaactgtcaacagccagggggccttacccggtatggtctggcagaaccgggacgtgtacctgcagggtcccatctgggccaagattcctcacacggacggcaacttccacccgtctccgctgatgggcggctttggcctgaaacatcctccgcctcagatcctgatcaagaacacgccagtacctgcggatcctccgaccaccttcaaccagtcaaagctgaactctttcatcacgcaatacagcaccggacaggtcagcgtggaaattgaatgggagctgcagaaggaaaacagcaagcgctggaaccccgagatccagtacacctccaactactacaaatctacaagtgtggactttgctgttaatacagaaggcgtgtactctgaaccccaccccattggcacccgttacctcacccgtcccctgtaa

SEQ ID NO: 1029 - DNA, 2211 bp, Artificial Sequence
  source: /note="Description of Artificial Sequence: Synthetic polynucleotide"
atggctgccgatggttatcttccagattggctcgaggacaacctctctgagggcattcgcgagtggtgggcgctgaaacctggagccccgaaacccaaagccaaccagcaaaagcaggacgacggccggggtctggtgcttcctggctacaagtacctcggacccttcaacggactcgacaagggggagcccgtcaacgcggcggatgcagcggccctcgagcacgacaaggcctacgaccagcagctcaaggcgggtgacaatccgtacctgcggtataaccacgccgacgccgagtttcaggagcgtctgcaagaagatacgtcttttgggggcaacctcgggcgagcagtcttccaggccaaaaagagggttcttgaaccttttggtctggttgaggaagctgctaagacggctcctggaaagaaacgtccggtagagcagtcgccacaagagccagactcctcctcgggcattggcaagacaggccagcagcccgctaaaaagagactcaattttggtcagactggcgactcagagtcagtgcccgaccctcaacctctcggagaacctccagcaacccccgctgctgtgggacctactacaatggcttcaggcggtggcgcaccaatggcagacaataacgaaggcgccgatggagtgggtaatgcctcaggaaattggcattgcgattccacatggctgggcgacagagtcatcaccaccagcacccgaacctgggccctgcccacctacaacaatcacctctacaagcaaatctccagtgcttcaacgggggccagcaacgacaaccactacttcggctacagcaccccctgggggtattttgactttaacagattccactgccacttttcaccacgtgactggcagcgactcatcaacaacaactggggattccggcccaagagactcaacttcaagctcttcaacatccaggtcaaggaggtcacgcagaatgaaggcaccaagaccatcgccaataacctcaccagcaccattcaggtctttacggattcggaataccagctcccgtacgtcctcggctctgcccaccagggctgcctccctccgttcccggcggacgtgttcatgattccgcagtacggctacctaacgctcaacaatggtagccaggcagtgggacggtcatccttttactgcctggaatatttcccatcgcagatgctgagaacgggcaacaactttaccttcagctacacctttgaggacgttcctttccacagcagctacgctcacagccagagtctggaccgtctcatgaatcctctgattgaccagtacctgtactacttgtctcggactcaaacaacaggaggcacggcaaatacgcagactctgggcttcagccaaggtgggcctaatacaatggccaatcacgcaaagaactggctgccaggaccctgttaccgccaacaacgcgtctcaacgacaaccgggcaaaacaacaatagcaactttgcctggactgctgggaccaaataccatctgaatggaagaaattcattggctaatcctggcatcgctatggcaacacacaaagacgacaaggagcgtttttttcccagtaacgggatcctgatttttggcaaacaaaatgctgccagagacaatgcggattacagcgatgtcatgctcaccagcgaggaagaaatcaaaaccactaaccctgtggctacagaggaatacggtatcgtggcagataacttgcagcagcaaaacacggctcctcaaattggaactgtcaacagccagggggccttacccggtatggtctggcagaaccgggacgtgtacctgcagggtcccatctgggccaagattcctcacacggacggcaacttccacccgtctccgctgatgggcggctttggcctgaaacatcctccgcctcagatcctgatcaagaacacgcctgtacctgcggatcctccgaccaccttcaaccagtcaaagctgaactctttcatcacgcaatacagcaccggacaggtcagcgtggaaattgaatgggagctgcagaaggaaaacagcaagcgctggaaccccgagatccagtacacctccaactactacaaatctacaagtgtggactttgctgttaatacagaaggcgtgtactctgaaccccaccccattggcacccgttacctcacccgtcccctgtaa

SEQ ID NO: 1030 - DNA, 2211 bp, Artificial Sequence
  source: /note="Description of Artificial Sequence: Synthetic polynucleotide"
atggctgccgatggttatcttccagattggctcgaggacaacctctctgagggcattcgcgagtggtgggcgctgaaacctggagccccgaagcccaaagccaaccagcaaaagcaggacgacggccggggtctggtgcttcctggctacaagtacctcggacccttcaacggactcgacaaaggagagcccgtcaacgaggcggacgcggcggccctcgaacacgacaaggcttacgaccagcagctcaaggccggtgacaacccctacctgcggtacaaccacgccgacgccgagttccaggagcggctgcaagaagatacgtcttttgggggcaacctcgggcgagcagtcttccaggccaagaagaggcttcttgaacctcttggtctggttgaggaagcggctaagacggctcctggaaagaagaggcctgtagagcagtctcctcaggaaccggactcctccgcgggtattggcaaatcaggtgcacagcccgctaaaaagagactcaattttggtcagactggcgactcagagtcagtccccgacccacaacctctcggagaacctccagcaacccccgctgctgtgggacctactacaatggcttcaggcggtggcgcaccaatggcagacaataacgaaggcgccgatggagtgggtaatgcctcaggaaattggcattgcgattccacatggctgggcgacagagtcatcaccaccagcacccgaacctgggccctgcccacctataacaaccatctctacaagcaaatctccagtgcttcaacgggggccagtaacgacaaccactacttcggctacagcaccccctgggggtattttgactttaacagattccactgccacttctcaccacgtgactggcagcgactcatcaacaacaactggggattccggcccaagcgactcaacttcaagctcttcaacattcaggtcaaagaggttacggacaacgatggagtcaagaccatcgccaataaccttaccagcaccattcaggtgtttacggactcggaataccagctgccgtacgttctcggctccgcccaccagggctgcctgcctccgttcccggcggacgtgttcatgattccccagtacggctacctaacactcaacaacggtagtcaggccgtgggacgctcctccttctactgcctggaatactttccttcgcagatgctgagaactggcaacaacttccagtttacttacaccttcgaggacgtgcctttccacagcagctacgcccacagccagagcttggaccggctgatgaatcctctgattgaccagtacctgtactacttgtctcggactcaaacaacaggaggcacggcaaatacgcagactctgggcttcagccaaggtgggcctaatacaatggccaatcaggcaaagaactggctgccaggaccctgttaccgccaacaacgcgtctcaacgacaaccgggcaaaacaacaatagcaactttgcctggactgctgggaccaaataccatctgaatggaagaaattcattggctaatcctggcatcgctatggcaacacacaaagacgacaaggagcgtttttttcccagtaacgggatcctgatttttggcaaacaaaatgctgccagagacaatgcggattacagcgatgtcatgctcaccagcgaggaagaaatcaaaaccactaaccctgtggctacagaggaatacggtatcgtggcagataacttgcagcagcaaaacacggctcctcaaattggaactgtcaacagccagggggccttacccggtatggtctggcagaaccgggacgtgtacctgcagggtcccatctgggccaagattcctcacacggacggcaacttccacccgtctccgctgatgggcggctttggcctgaaacatcctccgcctcagatcctgatcaagaacacgcctgtacctgcggatcctccgaccaccttcaaccagtcaaagctgaactctttcatcacgcaatacagcaccggacaggtcagcgtggaaattgaatgggagctgcagaaggaaaacagcaagcgctggaaccccgagatccagtacacctccaactactacaaatctacaagtgtggactttgctgttaatacagaaggcgtgtactctgaaccccaccccattggcacccgttacctcacccgtcccctgtaa

SEQ ID NO: 1031 - DNA, 2211 bp, Artificial Sequence
  source: /note="Description of Artificial Sequence: Synthetic polynucleotide"
atggctgccgatggttatcttccagattggctcgaggacaacctctctgagggcattcgcgagtggtgggcgctgaaacctggagccccgaagcccaaagccaaccagcaaaagcaggacgacggccggggtctggtgcttcctggctacaagtacctcggacccttcaacggactcgacaagggggagcccgtcaacgcggcggatgcagcggccctcgagcacgacaaagcctacgaccagcagctcaaagcgggtgacaatccgtacctgcggtataaccacgccgacgccgagtttcaggagcgtctgcaagaagatacgtcttttgggggcaacctcgggcgagcagtcttccaggccaagaagagggttctcgaacctttgggtctggttgaggaaggggctaagacggctcctggaaagaaaaggccggtagagcagtctcctcaggaaccggactcctccgcgggtattggcaagacaggtgcacagcccgctaaaaagagactcaattttggtcagactggcgactcagagtcagtccccgacccacaacctctcggagaacctccagcaacccccgctgctgtgggacctactacaatggcttcaggcggtggcgcaccaatggcagacaataacgaaggcgccgacggagtgggtagtgcctcgggaaattggcattgcgattccacatggctgggcgacagagtcatcaccaccagcacccgaacctgggccctgcccacctataacaaccatctctacaagcaaatctccagtgcttcaacgggggccagtaacgacaaccactacttcggctacagcaccccctgggggtattttgacttcaacagattccactgccacttctcaccacgtgactggcagcgactcatcaacaacaactggggattccggcccaagcgactcaacttcaagctcttcaacattcaggtcaaagaggttacggacaacaatggagtcaagaccatcgccaataaccttaccagcacgatccaggtctttacggactcggagtaccagctgccgtacgtcctcggctctgcgcaccagggctgcctgcctccgttcccggcggacgtgttcatgattccgcagtacggctacctaacgctcaacaatggtagccaggcagtgggacggtcatccttttactgcctggaatatttcccatcgcagatgctgagaacgggcaacaactttaccttcagctacacctttgaggacgttcctttccacagcagctacgctcacagccagagtctggaccgtctcatgaatcctctgattgaccagtacctgtactacttgtctcggactcaaacaacaggaggcacggcaaatacgcagactctgggcttcagccaaggtgggcctaatacaatggccaatcaggcaaagaactggctgccaggaccctgttaccgccaacaacgcgtctcaacgacaaccgggcaaaacaacaatagcaactttgcctggactgctgggaccaaataccatctgaatggaagaaattcattggctaatcctggcatcgctatggcaacacacaaagacgacaaggagcgtttttttcccagtaacgggatcctgatttttggcaaacaaaatgctgccagagacaatgcggattacagcgatgtcatgctcaccagcgaggaagaaatcaaaaccactaaccctgtggctacagaggaatacggtatcgtggcagataacttgcagcagcaaaacacggctcctcaaattggaactgtcaacagccagggggccttacccggtatggtctggcagaaccgggacgtgtacctgcagggtcccatctgggccaagattcctcacacggacggcaacttccacccgtctccgctgatgggcggctttggcctgaaacatcctccgcctcagatcctgatcaagaacacgcctgtacctgcggatcctccgaccaccttcaaccagtcaaagctgaactctttcatcacgcaatacagcaccggacaggtcagcgtggaaattgaatgggagctgcagaaggaaaacagcaagcgctggaaccccgagatccagtacacctccaactactacaaatctacaagtgtggactttgctgttaatacagaaggcgtgtactctgaaccccaccccattggcacccgttacctcacccgtcccctgtaa

SEQ ID NO: 1032 - DNA, 2211 bp, Artificial Sequence
  source: /note="Description of Artificial Sequence: Synthetic polynucleotide"
atggctgccgatggttatcttccagattggctcgaggacaacctctctgagggcattcgcgagtggtgggacttgaaacctggagccccgaagcccaaagccaaccagcaaaagcaggacgacggccggggtctggtgcttcctggctacaagtacctcggacccttcaacggactcgacaagggggagcccgtcaacgcggcggacgcagcggccctcgagcacgacaaggcctacgaccagcagctcaaagcgggtgacaatccgtacctgcggtataaccacgccgacgccgagtttcaggagcgtctgcaagaagatacgtcttttgggggcaacctcggacgagcagtcttccaggccaaaaagaggcttcttgaacctcttggtctggttgaggaagcggctaagacggctcctggaaagaagaggcctgtagagcagtctcctcaggaaccggactcctccgcgggtattggcaaatcgggtgcacagcccgctaaaaagagactcaatttcggtcagactggcgacacagagtcagtcccagaccctcaaccaatcggagaacctccagcagcgccctctggtgtgggacctaatacaatggctgcaggcggtggcgcaccaatggcagacaataacgaaggtgccgatggagtgggtagttcctcgggaaattggcattgcgattcccaatggctgggggacagagtcatcaccaccagcacccgaacctgggccctgcccacctataacaaccacctctacaagcaaatctccagtgcttcaacgggggccagcaacgacaaccactactttggctacagcaccccttgggggtattttgacttcaacagattccactgccacttttcaccacgtgactggcaaagactcatcaacaacaactggggattccgacccaagagactcaacttcaagctcttcaacatccaggtcaaggaggtcacgcagaatgaaggcaccaagaccatcgccaataacctcaccagcaccatccaggtgtttacggactcggagtaccagctgccgtacgttctcggctctgcccaccagggctgcctgcctccgttcccggcggacgtgttcatgattccccagtacggctacctaacactcaacaacggtagtcaggccgtgggacgctcctccttctactgcctggaatactttccttcgcagatgctgagaaccggcaacaacttccagtttacttacaccttcgaggacgtgcctttccacagcagctacgcgcacagccagagcttggaccggctgatgaatcctctgattgaccagtacctgtactacttgtctcggactcaaacaacaggaggcacggcaaatacgcagactctgggcttcagccaaggtgggcctaatacaatggccaatcacgcaaagaactggctgccaggaccctgttaccgccaacaacgcgtctcaacgacaaccgggcaaaacaacaatagcaactttgcctggactgctgggaccaaataccatctgaatggaagaaattcattggctaatcctggcatcgctatggcaacacacaaagacgacaaggagcgtttttttcccagtaacgggatcctgatttttggcaaacaaaatgctgccagagacaatgcggattacagcgatgtcatgctcaccagcgaggaagaaatcaaaaccactaaccctgtggctacagaggaatacggtatcgtggcagataacttgcagcagcaaaacacggctcctcaaattggaactgtcaacagccagggggccttacccggtatggtctggcagaaccgggacgtgtacctgcagggtcccatctgggccaagattcctcacacggacggcaacttccacccgtctccgctgatgggcggctttggcctgaaacatcctccgcctcagatcctgatcaagaacacgcctgtacctgcggatcctccgaccaccttcaaccagtcaaagctgaactctttcatcacgcaatacagcaccggacaggtcagcgtggaaattgaatgggagctgcagaaggaaaacagcaagcgctggaaccccgagatccagtacacctccaactactacaaatctacaagtgtggactttgctgttaatacagaaggcgtgtactctgaaccccaccccattggcacccgttacctcacccgtcccctgtaa

SEQ ID NO: 1033 - DNA, 2214 bp, Artificial Sequence
  source: /note="Description of Artificial Sequence: Synthetic polynucleotide"
atggctgccgatggttatcttccagattggctcgaggacaaccttagtgaaggaattcgcgagtggtgggcgctgaaacctggagccccgaagcccaaagccaaccagcaaaagcaggacgacggccggggtctggtgcttcctggctacaagtacctcggacccttcaacggactcgacaagggggagcccgtcaacgcggcggacgcagcggccctcgagcacgacaaggcctacgaccagcagctcaaagcgggtgacaatccgtacctgcggtataaccacgccgacgccgagtttcaggagcgtctgcaagaagatacgtcttttgggggcaacctcgggcgagcagtcttccaggccaagaagcgggttctcgaacctctcggtctggttgaggaaggcgctaagacggctcctggaaagaaacgtccggtagagcagtcgccacaagagccagactcctcctcgggcatcggcaagacaggccagcagcccgctaaaaagagactcaatttcggtcagactggcgacacagagtcagtcccagaccctcaaccaatcggagaacctcccgcagccccctcaggtgtgggatctcttacaatggcttcaggtggtggcgcaccagtggcagacaataacgaaggtgccgatggagtgggtagttcctcgggaaattggcattgcgattcccaatggctgggggacagagtcatcaccaccagcaccagaacctgggccttgcccacctacaataaccacctctacaagcaaatctccaacagcacatctggaggatcttcaaatgacaacgcctacttcggctacagcaccccctgggggtattttgactttaacagattccactgccacttttcaccacgtgactggcagcgactcatcaacaacaactggggattccgacccaagagactcaacttcaagctcttcaacatccaggtcaaggaggtcacgcagaacgaaggcaccaagaccatcgccaataacctcaccagcaccatccaggtgtttacggactcggagtaccagctgccgtacgttctcggctccgcccaccagggctgcctgcctccgttcccggcggacgtgttcatgattccccagtacggctacctaacgctcaacaacggtagtcaggccgtgggacgctcctccttctactgcctggaatactttccttcgcagatgctgagaaccggcaacaacttccagtttacttacaccttcgaggacgtgcctttccacagcagctacgcgcacagccagagcttggaccggctgatgaatcctctgattgaccagtacctgtactacttgtctcggactcaaacaacaggaggcacggcaaatacgcagactctgggcttcagccaaggtgggcctaatacaatggccaatcaggcaaagaactggctgccaggaccctgttaccgccaacaacgcgtctcaacgacaaccgggcaaaacaacaatagcaactttgcctggactgctgggaccaaataccatctgaatggaagaaattcattggctaatcctggcatcgctatggcaacacacaaagacgacaaggagcgtttttttcccagtaacgggatcctgatttttggcaaacaaaatgctgccagagacaatgcggattacagcgatgtcatgctcaccagcgaggaagaaatcaaaaccactaaccctgtggctacagaggaatacggtatcgtggcagataacttgcagcagcaaaacacggctcctcaaattggaactgtcaacagccagggggccttacccggtatggtctggcagaaccgggacgtgtacctgcagggtcccatctgggccaagattcctcacacggacggcaacttccacccgtctccgctgatgggcggctttggcctgaaacatcctccgcctcagatcctgatcaagaacacgcctgtacctgcggatcctccgaccaccttcaaccagtcaaagctgaactctttcatcacgcaatacagcaccggacaggtcagcgtggaaattgaatgggagctgcagaaggaaaacagcaagcgctggaaccccgagatccagtacacctccaactactacaaatctacaagtgtggactttgctgttaatacagaaggcgtgtactctgaaccccaccccattggcacccgttacctcacccgtcccctgtaa

SEQ ID NO: 1034 - DNA, 2214 bp, Artificial Sequence
  source: /note="Description of Artificial Sequence: Synthetic polynucleotide"
atggctgccgatggttatcttccagattggctcgaggacaaccttagtgaaggaattcgcgagtggtgggcgctgaaacctggagccccgaagcccaaagccaaccagcaaaagcaggacgacggccggggtctggtgcttcctggctacaagtacctcggacccttcaacggactcgacaagggggagcccgtcaacgcggcggacgcagcggccctcgagcacgacaaggcctacgaccagcagctcaaagcgggtgacaatccgtacctgcggtataaccacgccgacgcggagtttcaggagcgccttaaagaagatacgtcttttgggggcaacctcgggcgagcagtcttccaggccaagaagagggttctcgaaccttttggtctggttgaggaaggtgctaagacggctcctggaaagaaacgtccggtagagcagtcgccacaagagccagactcctcctcgggcatcggcaagacaggccagcagcccgctaaaaagagactcaattttggtcagactggcgactcagagtcagttccagaccctcaacctctcggagaacctccagcagcgccctctggtgtgggacctaatacaatggctgcaggcggtggcgcaccaatggcagacaataacgaaggtgccgatggagtgggtagttcctcgggaaattggcattgcgattcccaatggctggggaacagagtcatcaccaccagcacccgaacctgggccctgcccacctacaacaatcacctctacaagcaaatctccaacagcacatctggaggatcttcaaatgacaacgcctacttcggctacagcaccccctgggggtattttgacttcaacagattccactgccacttctcaccacgtgactggcagcgactcatcaacaacaactggggattccggcccaagagactcaacttcaagctcttcaacattcaggtcaaagaggttacggacaacaatggagtcaagaccatcgccaataaccttaccagcacggtccaggtcttcacggactcggagtaccagttgccgtacgtcctcggctctgcgcaccagggctgcctccctccgttcccggcggacgtgttcatgattccgcaatacggctacctgacgctcaacaacggtagccaagccgtgggacgttcatccttttactgcctggaatatttcccttctcagatgctgagaaccggcaacaacttccagtttacttacaccttcgaggacgtgcctttccacagcagctacgcgcacagccagagcttggaccggctgatgaatcctctgattgaccagtacctgtactacttgtctcggactcaaacaacaggaggcacggcaaatacgcagactctgggcttcagccaaggtgggcctaatacaatggccaatcaggcaaagaactggctgccaggaccctgttaccgccaacaacgcgtctcaacgacaaccgggcaaaacaacaatagcaactttgcctggactgctgggaccaaataccatctgaatggaagaaattcattggctaatcctggcatcgctatggcaacacacaaagacgacaaggagcgtttttttcccagtaacgggatcctgatttttggcaaacaaaatgctgccagagacaatgcggattacagcgatgtcatgctcaccagcgaggaagaaatcaaaaccactaaccctgtggctacagaggaatacggtatcgtggcagataacttgcagcagcaaaacacggctcctcaaattggaactgtcaacagccagggggccttacccggtatggtctggcagaaccgggacgtgtacctgcagggtcccatctgggccaagattcctcacacggacggcaacttccacccgtctccgctgatgggcggctttggcctgaaacatcctccgcctcagatcctgatcaagaacacgcctgtacctgcggatcctccgaccaccttcaaccagtcaaagctgaactctttcatcacgcaatacagcaccggacaggtcagcgtggaaattgaatgggagctgcagaaggaaaacagcaagcgctggaaccccgagatccagtacacctccaactactacaaatctacaagtgtggactttgctgttaatacagaaggcgtgtactctgaaccccaccccattggcacccgttacctcacccgtcccctgtaa

SEQ ID NO: 1035 - DNA, 2211 bp, Artificial Sequence
  source: /note="Description of Artificial Sequence: Synthetic polynucleotide"
atggctgccgatggttatcttccagattggctcgaggacaacctctctgagggcattcgcgagtggtgggacttgaaacctggagccccgaagcccaaagccaaccagcaaaagcaggacgacggccggggtctggtgcttcctggctacaagtacctcggacccttcaacggactcgacaggggggagcccgtcaacgcggcggacgcagcggccctcgagcacgacaaggcctacgaccagcagctcaaagcgggtgacaatccgtacctgcggtataaccacgccgacgccgagtttcaggagcgtctgcaagaagatacgtcttttgggggcaacctcgggcgagcagtcttccaggccaagaagcgggttctcgaacctctcggtctggttgaggaaggcgctaagacggctcctggaaagaaacgtccggtagagcagtcgccacaagagccagactcctcctcgggcatcggcaagacaggccagcagcccgctaaaaagagactcaattttggtcagactggcgactcagagtcagtccccgacccacaacctctcggagaacctccagcaacccccgctgctgtgggacctactacaatggcttcaggcggtggcgcaccaatggcagacaataacgaaggcgccgacggagtgggtaatgcctcaggaaattggcattgcgattccacatggctgggcgacagagtcatcaccaccagcacccgaacctgggccttgcccacctataacaaccacctctacaagcaaatctccagtgcttcaacgggggccagcaacgacaaccactacttcggctacagcaccccctgggggtattttgacttcaacagattccactgccacttctcaccacgtgactggcagcgactcatcaacaacaactggggattccggcctaagcgactcaacttcaagctcttcaacattcaggtcaaagaggttacggacaacaatggagtcaagaccatcgccaataacctcaccagcaccatccaggtgtttacggactcggagtaccagctgccgtacgttctcggctctgcccaccagggctgcctgcctccgttcccggcggacgtgttcatgattccccagtacggctacctaacactcaacaacggtagtcaggccgtgggacgctcctccttctactgcctggaatactttccttcgcagatgctgagaaccggcaacaacttccagtttacttacaccttcgaggacgtgcctttccacagcagctacgcccacagccagagcttggaccggctgatgaatcctctgattgaccagtacctgtactacttgtctcggactcaaacaacaggaggcacggcaaatacgcagactctgggcttcagccaaggtgggcctaatacaatggccaatcaggcaaagaactggctgccaggaccctgttaccgccaacaacgcgtctcaacgacaaccgggcaaaacaacaatagcaactttgcctggactgctgggaccaaataccatctgaatggaagaaattcattggctaatcctggcatcgctatggcaacacacaaagacgacaaggagcgtttttttcccagtaacgggatcctgatttttggcaaacaaaatgctgccagagacaatgcggattacagcgatgtcatgctcaccagcgaggaagaaatcaaaaccactaaccctgtggctacagaggaatacggtatcgtggcagataacttgcagcagcaaaacacggctcctcaaattggaactgtcaacagccagggggccttacccggtatggtctggcagaaccgggacgtgtacctgcagggtcccatctgggccaagattcctcacacggacggcaacttccacccgtctccgctgatgggcggctttggcctgaaacatcctccgcctcagatcctgatcaagaacacgcctgtacctgcggatcctccgaccaccttcaaccagtcaaagctgaactctttcatcacgcaatacagcaccggacaggtcagcgtggaaattgaatgggagctgcagaaggaaaacagcaagcgctggaaccccgagatccagtacacctccaactactacaaatctacaagtgtggactttgctgttaatacagaaggcgtgtactctgaaccccaccccattggcacccgttacctcacccgtcccctgtaa

SEQ ID NO: 1036 - DNA, 2211 bp, Artificial Sequence
  source: /note="Description of Artificial Sequence: Synthetic polynucleotide"
atggctgccgatggttatcttccagattggctcgaggacaacctctctgagggcattcgcgagtggtgggacttgaaacctggagccccgaagcccaaagccaaccagcaaaagcaggacgacggccggggtctggtgcttcctggctacaagtacctcggacccttcaacggactcgacaagggggagcccgtcaacgcggcggacgcagcggccctcgagcacgacaaggcctacgaccagcagctcaaagcgggtgacaatccgtacctgcggtataaccacgccgacgccgagtttcaggagcgtctgcaagaagatacgtcttttgggggcaacctcgggcgagcagtcttccaggccaagaagcgggttctcgaacctctcggtctggttgaggaaggcgctaagacggctcctggaaagaaacgtccggtagagcagtcgccacaagagccagactcctcctcgggcatcggcaagaaaggccaacagcccgccagaaaaagactcaattttggtcagactggcgactcagagtcagttccagaccctcaacctctcggagaacctcccgcagccccctcaggtgtgggatctcttacaatggcttcaggcggtggcgcaccaatggcagacaataacgaaggcgccgacggagtgggtaatgcctcaggaaattggcattgcgattccacatggctgggcgacagagtcatcaccaccagcacccgaacatgggccttgcccacttacaacaaccatctctacaagcaaatctccagtgcttcaacgggggccagcaacgacaaccactacttcggctacagcaccccctgggggtattttgatttcaacagattccactgccacttttcaccacgtgactggcaaagactcatcaacaacaactggggattccgacccaagagactcaacttcaagctctttaacattcaagtcaaagaggtcacgcagaatgaaggcaccaagaccatcgccaataaccttaccagcacggtccaggtcttcacggactcagactatcagctcccgtacgttctcggctccgcccaccagggctgcctgcctccgttcccggcggacgtgttcatgattccccagtacggctacctaacactcaacaacggtagtcaggccgtgggacgctcctccttctactgcctggaatactttccttcgcagatgctgagaaccggcaacaacttccagtttacttacacctttgaggacgttcctttccacagcagctacgctcacagccagagtctggaccgtctcatgaatcctctgattgaccagtacctgtactacttgtctcggactcaaacaacaggaggcacggcaaatacgcagactctgggcttcagccaaggtgggcctaatacaatggccaatcaggcaaagaactggctgccaggaccctgttaccgccaacaacgcgtctcaacgacaaccgggcaaaacaacaatagcaactttgcctggactgctggaaccaaataccatctgaatggaagaaattcattgtctaatcctggcatcgctatggcgacacacaaagacgacaaggagcgtttttttcccagtaacgggatcctgatttttggcaaacaaaatgctgccagagacaatgcggattacagcgatgtcatgctcaccagcgaggaagaaatcaaaaccactaaccctgtggctacagaggaatacggtatcgtggcagataacttgcagcagcaaaacacggctcctcaaattggaactgtcaacagccagggggccttacccggtatggtctggcagaaccgggacatgtacctgcagggtcccatctgggccaagattcctcacacggacggcaacttccacccgtctccgctgatgggcggctttggcctgaaacatcctccgcctcagatcctgatcaagaacacgcctgtacctgcggatcctccgaccaccttcaaccagtcaaagctgaactctttcatcacgcaatacagcaccggacaggtcagcgtggaaattgaatgggagctgcagaaggaaaacagcaagcgctggaaccccgagatccagtacacctccaactactacaaatctacaagtgtggactttgctgttaatacagaaggcgtgtactctgaaccccaccccattggcacccgttacctcacccgtcccctgtaa

SEQ ID NO: 1037 - DNA, 2211 bp, Artificial Sequence
  source: /note="Description of Artificial Sequence: Synthetic polynucleotide"
atggctgccgatggttatcttccagattggctcgaggacaacctctctgagggcattcgcgagtggtgggcgctgaaacctggagccccgaagcccaaagccaaccagcaaaagcaggacgacggccggggtctggtgcttcctggctacaagtacctcggacccttcaacggactcgacaagggggagcccgtcaacgcggcggatgcagcggccctcgagcacgacaaggcctacgaccagcagctcaaagcgggtgacaatccgtacctgcggtataaccacgccgacgccgagtttcaggagcgtctgcaggaagatacgtcttttgggggcaacctcgggcgagcagtcttccaggccaagaagagggttctcgaaccttttggtctggttgaggaaggcgctaagacggctcctggaaagaaacgtccggtagagcagtcgccacaagagccagactcctcctcgggcatcggcaagacaggccagcagcccgctaaaaagagactcaattttggtcagactggcggctcagagtcagtccccgacccacaacctctcggagaacctccagcaacccccgctgctgtgggacctactacaatggctgcaggcggtggcgcaccaatggcagacaataacgaaggcgccgacggagtgggtagttcctcgggaaattggcattgcgattccacatggctgggcgacagagtcatcaccaccagcaccagaacctgggccttgcccacctataacaaccacctctacaagcaaatctccagtgcttcaacgggggccagcaacgacaaccactacttcggctacagcaccccctgggggtattttgatttcaacagattccactgccatttctcaccacgtgactggcagcgactcatcaacaacaactggggattccggcccaagagactcaacttcaaactcttcaacattcaggtcaaagaggttacggacaacaatggagtcaagaccatcgccaataaccttaccagcacggtccaggtgtttacggactcggagtaccagctgccgtacgttctcggctctgcccaccagggctgcctccctccgttcccggcggacgtgttcatgattccgcagtacggctacctaacgctcaacaatggcagccaggcagtgggacggtcatccttttactgcctggaatatttcccttctcagatgctgagaacgggcaacaactttaccttcagctacacctttgaggaagtgcctttccacagcagctacgcgcacagccagagcctggaccggctgatgaatcctctgattgaccagtacctgtactacttgtctcggactcaaacaacaggaggcacggcaaatacgcagactctgggcttcagccaaggtgggcctaatacaatggccaatcaggcaaagaactggctgccaggaccctgttaccgccaacaacgcgtctcaacgacaaccgggcaaaacaacaatagcaactttgcctggactgctgggaccaaataccatctgaatggaagaaattcattggctaatcctggcatcgctatggcctcacacaaagacgacaaggagcgtttttttcccagtaacgggatcctgatttttggcaaacaaaatgctgccagagacaatgcggattacagcgatgtcatgctcaccagcgaggaagaaatcaaaaccactaaccctgtggctacagaggaatacggtatcgtggcagataacttgcagcagcaaaacacggctcctcaaattggaactgtcaacagccagggggccttacccggtatggtctggcagaaccgggacgtgtacctgcagggtcccatctgggccaagattcctcacacggacggcaacttccacccgtctccgctgatgggcggctttggcctgaaacatcctccgcctcagatcctgatcaagaacacgcctgtacctgcggatcctccgaccaccttcaaccagtcaaagctgaactctttcatcacgcaatacagcaccggacaggtcagcgtggaaattgaatgggagctgcagaaggaaaacagcaagcgctggaaccccgagatccagtacacctccaactactacaaatctacaagtgtggactttgctgttaatacagaaggcgtgtactctgaaccccaccccattggcacccgttacctcacccgtcccctgtaa

SEQ ID NO: 1038 - protein, 736 aa, Artificial Sequence
  source: /note="Description of Artificial Sequence: Synthetic polypeptide"
MAADGYLPDWLEDTLSEGIRQWWKLKPGPPPPKPAERHKDDSRGLVLPGYKYLGPFNGLDKGEPVNEADAAALEHDKAYDQQLKAGDNPYLKYNHADAEFQERLKEDTSFGGNLGRAVFQAKKRVLEPLGLVEEGAKTAPGKKRPVEQSPQEPDSSSGIGKTGQQPAKKRLNFGQTGDSESVPDPQPLGEPPATPAAVGPTTMASGGGAPMADNNEGADGVGSSSGNWHCDSQWLGDRVITTSTRTWALPTYNNHLYKQISSASTGASNDNHYFGYSTPWGYFDFNRFHCHFSPRDWQRLINNNWGFRPKRLNFKLFNIQVKEVTQNEGTKTIANNLTSTIQVFTDSEYQLPYVLGSAHQGCLPPFPADVFMIPQYGYLTLNNGSQAVGRSSFYCLEYFPSQMLRTGNNFQFTYTFEDVPFHSSYAHSQSLDRLMNPLIDQYLYYLSRTQTTGGTANTQTLGFSQGGPNTMANQAKNWLPGPCYRQQRVSTTTGQNNNSNFAWTAGTKYHLNGRNSLANPGIAMATHKDDKERFFPSNGILIFGKQNAARDNADYSDVMLTSEEEIKTTNPVATEEYGIVADNLQQQNTAPQIGTVNSQGALPGMVWQNRDVYLQGPIWAKIPHTDGNFHPSPLMGGFGLKHPPPQILIKNTPVPADPPTTFNQSKLNSFITQYSTGQVSVEIEWELQKENSKRWNPEIQYTSNYYKSTSVDFAVNTEGVYSEPHPIGTRYLTRPL

SEQ ID NO: 1039 - protein, 736 aa, Artificial Sequence
  source: /note="Description of Artificial Sequence: Synthetic polypeptide"
MAADGYLPDWLEDNLSEGIREWWALKPGAPKPKANQQKQDDGRGLVLPGYKYLGPFNGLDKGEPVNAADAAALEHDKAYDQQLKAGDNPYLKYNHADAEFQERLKEDTSFGGNLGRAVFQAKKRLLEPLGLVEEAAKTAPGKKRPVEQSPQEPDSSAGIGKSGAQPAKKRLNFGQTGDSESVPDPQPLGEPPATPAAVGPTTMASGGGAPMADNNEGADGVGNASGNWHCDSTWLGDRVITTSTRTWALPTYNNHLYKQISSASTGASNDNHYFGYSTPWGYFDFNRFHCHFSPRDWQRLINNNWGFRPKRLNFKLFNIQVKEVTQNEGTKTIANNLTSTIQVFTDSEYQLPYVLGSAHQGCLPPFPADVFMIPQYGYLTLNNGSQAVGRSSFYCLEYFPSQMLRTGNNFQFTYTFEDVPFHSSYAHSQSLDRLMNPLIDQYLYYLSRTQTTGGTANTQTLGFSQGGPNTMANQAKNWLPGPCYRQQRVSTTTGQNNNSNFAWTAGTKYHLNGRNSLANPGIAMATHKDDKERFFPSNGILIFGKQNAARDNADYSDVMLTSEEEIKATNPVATEEYGIVADNLQQQNTAPQIGTVNSQGALPGMVWQNRDVYLQGPIWAKIPHTDGNFHPSPLMGGFGLKHPPPQILIKNTPVPADPPTTFNQSKLNSFITQYSTGQVSVEIEWELQKENSKRWNPEIQYTSNYYKSTSVDFAVNTEGVYSEPHPIGTRYLTRPL

SEQ ID NO: 1040 - protein, 737 aa, Artificial Sequence
  source: /note="Description of Artificial Sequence: Synthetic polypeptide"
MAADGYLPDWLEDNLSEGIREWWDLKPGAPKPKANQQKQDDGRGLVLPGYKYLGPFNGLDKGEPVNAADAAALEHDKAYDQQLKAGDNPYLRYNHADAEFQERLQEDTSFGGNLGRAVFQAKKRVLEPLGLVEEGANTAPGKKRPVEQSPQEPDSSAGIGKSGAQPAKKRLNFGQTGDTESVPDPQPIGEPPAAPSGVGSLTMASGGGAPVADNNEGADGVGSSSGNWHCDSQWLGDRVITTSTRTWALPTYNNHLYKQISNSTSGGSSNDNAYFGYSTPWGYFDFNRFHCHFSPRDWQRLINNNWGFRPKRLNFKLFNIQVKEVTDNNGVKTIANNLTSTIQVFTDSEYQLPYVLGSAHQGCLPPFPADVFMIPQYGYLTLNNGSQAVGRSSFYCLEYFPSQMLRTGNNFQFTYTFEDVPFHSSYAHSQSLDRLMNPLIDQYLYYLSRTQTTGGTANTQTLGFSQGGPNTMANQAKNWLPGPCYRQQRVSTTTGQNNNSNFAWTAGTKYHLNGRNSLANPGIAMASHKDDKERFFPSNGILIFGKQNAARDNADYSDVMLTSEEEIKTTNPVATEEYGIVADNLQQQNTAPQIGTVNSQGALPGMVWQNRDVYLQGPIWAKIPHTDGNFHPSPLMGGFGLKHPPPQILIKNTPVPADPPTTFNQSKLNSFITQYSTGQVSVEIEWELQKENSKRWNPEIQYTTNYYKSTSVDFAVNTEGVYSEPHPIGTRYLTRPL

SEQ ID NO: 1041 - protein, 736 aa, Artificial Sequence
  source: /note="Description of Artificial Sequence: Synthetic polypeptide"
MAADGYLPDWLEDNLSEGIREWWALKPGAPKPKANQQKQDDGRGLVLPGYKYLGPFNGLDKGEPVNEADAAALEHDKAYDQQLKAGDNPYLRYNHADAEFQERLQEDTSFGGNLGRAVFQAKKRVLEPLGLVEEGAKTAPGKKRPVEQSPQEPDSSSGIGKTGQQPAKKRLNFGQTGDSESVPDPQPLGEPPATPAAVGPTTMASGGGAPMADNNEGADGVGNASGNWHCDSTWLGDRVITTSTRTWALPTYNNHLYKQISSASTGASNDNHYFGYSTPWGYFDFNRFHCHFSPRDWQRLINNNWGFRPKRLNFKLFNIQVKEVTQNEGTKTIANNLTSTIQVFTDSEYQLPYVLGSAHQGCLPPFPADVFMIPQYGYLTLNNGSQAVGRSSFYCLEYFPSQMLRTGNNFQFTYTFEDVPFHSSYAHSQSLDRLMNPLIDQYLYYLSRTQTTGGTANTQTLGFSQGGPNTMANQAKNWLPGPCYRQQRVSTTTGQNNNSNFAWTAGTKYHLNGRNSLANPGIAMATHKDDKERFFPSNGILIFGKQNAARDNADYSDVMLTSEEEIKTTNPVATEEYGIVADNLQQQNTAPQIGTVNSQGALPGMVWQNRDVYLQGPIWAKIPHTDGNFHPSPLMGGFGLKHPPPQILIKNTPVPADPPTTFNQSKLNSFITQYSTGQVSVEIEWELQKENSKRWNPEIQYTSNYYKSTSVDFAVNTEGVYSEPHPIGTRYLTRPL

SEQ ID NO: 1042 - protein, 736 aa, Artificial Sequence
  source: /note="Description of Artificial Sequence: Synthetic polypeptide"
MAADGYLPDWLEDNLSEGIREWWALKPGAPKPKANQQKQDDGRGLVLPGYKYLGPFNGLDKGEPVNEADAAALEHDKAYDQQLKAGDNPYLRYNHADAEFQERLQEDTSFGGNLGRAVFQAKKRVLEPFGLVEEGAKTAPGKKRPVEQSPQEPDSSSGIGKTGQQPAKKRLNFGQTGDSESVPDPQPLGEPPATPAAVGPTTMASGGGAPMADNNEGADGVGNASGNWHCDSQWLGDRVITTSTRTWALPTYNNHLYKQISSASTGASNDNHYFGYSTPWGYFDFNRFHCHFSPRDWQRLINNNWGFRPKRLNFKLFNIQVKEVTDNNGVKTIANNLTSTVQVFSDSEYQLPYVLGSAHQGCLPPFPADVFMIPQYGYLTLNNGSQAVGRSSFYCLEYFPSQMLRTGNNFQFTYTFEDVPFHSSYAHSQSLDRLMNPLIDQYLYYLSRTQTTGGTANTQTLGFSQGGPNTMANQAKNWLPGPCYRQQRVSTTTGQNNNSNFAWTAGTKYHLNGRNSLANPGIAMATHKDDKERFFPSNGILIFGKQNAARDNADYSDVMLTSEEEIKTTNPVATEEYGIVADNLQQQNTAPQIGTVNSQGALPGMVWQNRDVYLQGPIWAKIPHTDGNFHPSPLMGGFGLKHPPPQILIKNTPVPADPPTTFNQSKLNSFITQYSTGQVSVEIEWELQKENSKRWNPEIQYTSNYYKSTSVDFAVNTEGVYSEPHPIGTRYLTRPL

SEQ ID NO: 1043 - protein, 736 aa, Artificial Sequence
  source: /note="Description of Artificial Sequence: Synthetic polypeptide"
MAADGYLPDWLEDTLSEGIRQWWKLKPGPPPPKPAERHKDDSRGLVLPGYKYLGPFNGLDKGEPVNEADAAALEHDKAYDRQLDSGDNPYLKYNHADAEFQERLKEDTSFGGNLGRAVFQAKKRVLEPFGLVEEGAKTAPGKKRPVEQSPQEPDSSSGIGKTGQQPAKKRLNFGQTGDSESVPDPQPLGEPPATPAAVGPTTMASGGGAPMADNNEGADGVGNASGNWHCDSTWLGDRVITTSTRTWALPTYNNHLYKQISSASTGASNDNHYFGYSTPWGYFDFNRFHCHFSPRDWQRLINNNWGFRPKRLNFKLFNIQVKEVTDNNGVKTIANNLTSTVQVFTDSDYQLPYVLGSAHEGCLPPFPADVFMIPQYGYLTLNNGSQAVGRSSFYCLEYFPSQMLRTGNNFQFTYTFEDVPFHSSYAHSQSLDRLMNPLIDQYLYYLSRTQTTGGTANTQTLGFSQGGPNTMANQAKNWLPGPCYRQQRVSTTTGQNNNSNFAWTAGTKYHLNGRNSLANPGIAMATHKDDKERFFPSNGILIFGKQNAARDNADYSDVMLTSEEEIKTTNPVATEEYGIVADNLQQQNTAPQIGTVNSQGALPGMVWQNRDVYLQGPIWAKIPHTDGNFHPSPLMGGFGLKHPPPQILIKNTPVPADPPTTFNQSKLNSFITQYSTGQVSVEIEWELQKENSKRWNPEIQYTSNYYKSTSVDFAVNTEGVYSEPHPIGTRYLTRNL

SEQ ID NO: 1044 - protein, 738 aa, Artificial Sequence
  source: /note="Description of Artificial Sequence: Synthetic polypeptide"
MAADGYLPDWLEDNLSEGIREWWDLKPGAPKPKANQQKQDDGRGLVLPGYKYLGPFNGLDKGEPVNAADAAALEHDKAYDQQLQAGDNPYLRYNHADAEFQERLQEDTSFGGNLGRAVFQAKKRVLEPLGLVEEGAKTAPGKKRPVEPSPQRSPDSSTGIGKKGQQPARKRLNFGQTGDSESVPDPQPLGEPPAAPSGVGPNTMAAGGGAPMADNNEGADGVGSSSGNWHCDSQWLGDRVITTSTRTWALPTYNNHLYKQISNSTSGGSSNDNAYFGYSTPWGYFDFNRFHCHFSPRDWQRLINNNWGFRPKRLSFKLFNIQVKEVTQNEGTKTIANNLTSTIQVFTDSEYQLPYVLGSAHQGCLPPFPADVFMIPQYGYLTLNNGSQAVGRSSFYCLEYFPSQMLRTGNNFTFSYTFEDVPFHSSYAHSQSLDRLMNPLIDQYLYYLSRTQTTGGTANTQTLGFSQGGPNTMANQAKNWLPGPCYRQQRVSTTTGQNNNSNFAWTAGTKYHLNGRNSLANPGIAMATHKDDKERFFPSNGILIFGKQNAARDNADYSDVMLTSEEEIKTTNPVATEEYGIVADNLQQQNTAPQIGTVNSQGALPGMVWQNRDVYLQGPIWAKIPHTDGNFHPSPLMGGFGLKHPPPQILIKNTPVPADPPTTFNQSKLNSFITQYSTGQVSVEIEWELQKENSKRWNPEIQYTSNYYKSTSVDFAVNTEGVYSEPHPIGTRYLTRPL

SEQ ID NO: 1045 - protein, 737 aa, Artificial Sequence
  source: /note="Description of Artificial Sequence: Synthetic polypeptide"
MAADGYLPDWLEDNLSEGIREWWDLKPGAPKPKANQQKQDDGRGLVLPGYKYLGPFNGLDKGEPVNAADAAALEHDKAYDQQLKAGDNPYLRYNHADAEFQERLQEDTSFGGNLGRAVFQAKKRVLEPFGLVEEGAKTAPGKKRPVEQSPQEPDSSSGIGKTGQQPAKKRLNFGQTGDSESVPDPQPLGEPPATPAAVGPTTMASGGGAPMQDNNEGADGVGSSSGNWHCDSTWLGDRVITTSTRTWALPTYNNHLYKQISNGTSGGATNDNTYFGYSTPWGYFDFNRFHCHFSPRDWQRLINNNWGFRPKRLNFKLFNIQVKEVTQNEGTKTIANNLTSTIQVFTDSEYQLPYVLGSAHQGCLPPFPADVFMIPQYGYLTLNNGSQAVGRSSFYCLEYFPSQMLRTGNNFTFSYTFEDVPFHSSYAHSQSLDRLMNPLIDQYLYYLSRTQTTGGTANTQTLGFSQGGPNTMANQAKNWLPGPCYRQQRVSTTTGQNNNSNFAWTAGTKYHLNGRNSLANPGIAMATHKDDKERFFPSNGILIFGKQNAARDNADYSDVMLTSEEEIKTTNPVATEEYGIVADNLQQQNTAPQIGTVNSQGALPGMVWQNRDVYLQGPIWAKIPHTDGNFHPSPLMGGFGLKHPPPQILIKNTPVPADPPTTFNQSKLNSFITQYSTGQVSVEIEWELQKENSKRWNPEIQYTSNYYKSTSVDFAVNTEGVYSEPHPIGTRYLTRPL

SEQ ID NO: 1046 - protein, 736 aa, Artificial Sequence
  source: /note="Description of Artificial Sequence: Synthetic polypeptide"
MAADGYLPDWLEDNLSEGIREWWALKPGAPKPKANQQKQDDGRGLVLPGYKYLGPFNGLDKGEPVNAADAAALEHDKAYDQQLKAGDNPYLRYNHADAEFQERLQEDTSFGGNLGRAVFQAKKRVLEPLGLVEEGAKTAPGKKRPVEQSPQEPDSSSGIGKTGQQPAKKRLNFGQTGDSESVPDPQPLGEPPATPAAVGPTTMASGGGAPMADNNEGADGVGSSSGNWHCDSTWLGDRVITTSTRTWALPTYNNHLYKQISSASTGASNDNHYFGYSTPWGYFDFNRFHCHFSPRDWQRLINNNWGFRPKRLNFKLFNIQVKEVTDNNGVKTIANNLTSTVQVFTDSDYQLPYVLGSAHEGCLPPFPADVFMIPQYGYLTLNNGSQAVGRSSFYCLEYFPSQMLRTGNNFTFSYTFEDVPFHSSYAHSQSLDRLMNPLIDQYLYYLSRTQTTGGTANTQTLGFSQGGPNTMANQAKNWLPGPCYRQQRVSTTTGQNNNSNFAWTAGTKYHLNGRNSLANPGIAMATHKDDKERFFPSNGILIFGKQNAARDNADYSDVMLTSEEEIKTTNPVATEEYGIVADNLQQQNTAPQIGTVNSQGALPGMVWQNRDVYLQGPIWAKIPHTDGNFHPSPLMGGFGLKHPPPQILIKNTPVPADPPTTFNQSKLNSFITQYSTGQVSVEIEWELQKENSKRWNPEIQYTSNYYKSTSVDFAVNTEGVYSEPHPIGTRYLTRPL

SEQ ID NO: 1047 - protein, 737 aa, Artificial Sequence
  source: /note="Description of Artificial Sequence: Synthetic polypeptide"
MAADGYLPDWLEDNLSEGIREWWDLKPGAPKPKANQQKQDDGRGLVLPGYKYLGPFNGLDKGEPVNAADAAALEHDKAYDQQLKAGDNPYLRYNHADAEFQERLQEDTSFGGNLGRAVFQAKKRVLEPLGLVEEGAKTAPGKKRPVEPSPQRSPDSSTGIGKKGQQPARKRLNFGQTGDSESVPDPQPLGEPPATPAAVGPTTMASGGGAPMADNNEGADGVGNASGNWHCDSTWLGDRVITTSTRTWALPTYNNHLYKQISSASTGASNDNHYFGYSTPWGYFDFNRFHCHFSPRDWQRLINNNLGSRPKRLNFKLFIIQVKEVTTNDGVTTIANNLTSTVQVFSDSEYQLPYVLGSAHQGCLPPFPADVFMIPQYGYLTLNNGSQAVGRSSFYCLEYFPSQMLRTGNNFTFSYTFEDVPFHSSYAHSQSLDRLMNPLIDQYLYYLNRTQNQSGSAQNKDLLFSRGSPAGMSVQPKNWLPGPCYRQQRVSKTKTDNNNSNFTWTGASKYNLNGRESIINPGTAMASHKDDKDKFFPMSGVMIFGKESAGASNTALDNVMITDEEEIKATNPVATERFGTVAVNLQSSSTDPATGDVHVMGALPGMVWQDRDVYLQGPIWAKIPHTDGHFHPSPLMGGFGLKHPPPQILIKNTPVPANPPAEFSATKFASFITQYSTGQVSVEIEWELQKENSKRWNPEVQYTSNYAKSANVDFTVDNNGLYTEPRPIGTRYLTRPL

SEQ ID NO: 1048 - protein, 736 aa, Artificial Sequence
  source: /note="Description of Artificial Sequence: Synthetic polypeptide"
MAADGYLPDWLEDNLSEGIREWWALKPGAPKPKANQQKQDDGRGLVLPGYKYLGPFNGLDKGEPVNAADAAALEHDKAYDQQLKAGDNPYLRYNHADAEFQERLQEDTSFGGNLGRAVFQAKKRLLEPLGLVEEAAKTAPGKKRPVEQSPQEPDSSSGIGKTGQQPAKKRLNFGQTGDSESVPDPQPIGEPPATPAAVGPTTMASGGGAPMADNNEGADGVGNSSGNWHCDSTWLGDRVITTSTRTWALPTYNNHLYKQISSASTGASNDNHYFGYSTPWGYFDFNRFHCHFSPRDWQRLINNNWGFRPKRLNFKLFNIQVKEVTQNEGTKTIANNLTSTIQVFTDSEYQLPYVLGSAHQGCLPPFPADVFMIPQYGYLTLNNGSQAVGRSSFYCLEYFPSQMLRTGNNFTFSYTFEDVPFHSSYAHSQSLDRLMNPLIDQYLYYLSRTQTTGGTANTQTLGFSQGGPNTMANQAKNWLPGPCYRQQRVSTTTGQNNNSNFAWTAGTKYHLNGRNSLANPGIAMATHKDDKERFFPSNGILIFGKQNAARDNADYSDVMLTSEEEIKTTNPVATEEYGIVADNLQQQNTAPQIGTVNSQGALPGMVWQNRDVYLQGPIWAKIPHTDGNFHPSPLMGGFGLKHPPPQILIKNTPVPADPPTTFNQSKLNSFITQYSTGQVSVEIEWELQKENSKRWNPEIQYTSNYYKSTSVDFAVNTEGVYSDPHPIGTRYLTRPL

SEQ ID NO: 1049 - protein, 736 aa, Artificial Sequence
  source: /note="Description of Artificial Sequence: Synthetic polypeptide"
MAADGYLPDWLEDNLSEGIREWWALKPGAPKPKANQQEQDDGRGLVLPGYKYLGPFNGLDKGEPVNAADAAALEHDKAYDQQLKAGDNPYLRYNHADAEFQERLQEDTSFGGNLGRAVFQAKKRVLEPFGLVEEGAKTAPGKKRPVEQSPQEPDSSSGIGKTGQQPAKKRLNFGQTGDSESVPDPQPLGEPPAAPSGVGPNTMAAGGGAPMADNNEGADGVGSSSGNWHCDSTWLGDRVITTSTRTWALPTYNNHLYKQISSASTGASNDNHYFGYSTPWGYFDFNRFHCHFSPRDWQRLINNNWGFRPKRLNFKLFNIQVKEVTQNEGTKTIANNLTSTIQVFTDSEYQLPYVLGSAHQGCLPPFPADVFMIPQYGYLTLNNGSQAVGRSSFFCLEYFPSQMLRTGNNFTFSYTFEDVPFHSSYAHSQSLDRLMNPLIDQYLYYLSRTQTTGGTANTQTLGFSQGGPNTMANQAKNWLPGPCYRQQRVSTTTGQNNNSNFAWTAGTKYHLNGRNSLANPGIAMATHKDDKERFFPSNGILIFGKQNAARDNADYSDVMLTSEEEIKTTNPVATEEYGIVADNLQQQNTAPQIGTVNSQGALPGMVWQNRDVYLQGPIWAKIPHTDGNFHPSPLMGGFGLKHPPPQILIKNTPVPADPPTTFNQSKLNSFITQYSTGQVSVEIEWELQKENSKRWNPEIQYTSNYYKSTSVDFAVNTEGVYSEPHPIGTRYLTRPL

SEQ ID NO: 1050 - protein, 736 aa, Artificial Sequence
  source: /note="Description of Artificial Sequence: Synthetic polypeptide"
MAADGYLPDWLEDNLSEGIREWWDLKPGAPKPKANQQKQDDGRGLVLPGYKYLGPFNGLDKGEPVNAADAAALEHDKAYDQQLKAGDNPYLRYNHADAEFQERLQEDTSFGGNLGRAVFQAKKRVLEPLGLVEEGAKTAPGKKRPVEQSPQEPDSSSGIGKTGQQPAKKRLNFGQTGDSESVPDPQPLGEPPATPAAVGPTTMASGGGAPMADNNEGADGVGNASGNWHCDSTWLGDRVITTSTRTWALPTYNNHLYKQISSASTGASNDNHYFGYSTPWGYFDFNRFHCHFSPRDWQRLINNNWGFRPKRLNFKLFNIQVKEVTTNDGVTTIANNLTSTVQVFSDSEYQLPYVLGSAHQGCLPPFPADVFMIPQYGYLTLNNGSQAVGRSSFYCLEYFPSQMLRTGNNFTFSYTFEDVPFHSSYAHSQSLDRLMNPLIDQYLYYLNRTQNQSGSAQNKDLLFSRGSPAGMSVQPKNWLPGPCYRQQRVSKTKTDNNNSNFTWTGASKYNLNGRESIINPGTAMASHKDDKDKFFPMSGVMIFGKESAGASNTALDNVMITDEEEIKATNPVATERFGTVAVNLQNSSTDPATGDVHVMGALPGMVWQDRDVYLQGPIWAKIPHTDGHFHPSPLMGGFGLKHPPPQILIKNTPVPANPPAEFSATKFASFITQYSTGQVSVEIEWELQKENSKRWNPEVQYTSNYAKSANVDFTVDNNGLYTVPRPIGTRYLTRPL

SEQ ID NO: 1051 - protein, 736 aa, Artificial Sequence
  source: /note="Description of Artificial Sequence: Synthetic polypeptide"
MAADGYLPDWLEDNLSEGIREWWALKPGAPKPKANQQKQDDGRGLVLPGYKYLGPFNGLDKGEPVNAADAAALEHDKAYDQQLKAGDNPYLRYNHADAEFQERLQEDTSFGGNLGRAVFQAKKRLLEPLGLVEEGAKTAPGKKRPVEQSPQEPDSSSGIGKTGEQPAKKRLNFGQTGDSESVPDPQPLGEPPATPAAVGPTTMASGGGAPMADNNEGADGVGSASGNWHCDSTWLGDRVITTSTRTWALPTYNNHLYKQISSASTGASNDNHYFGYSTPWGYFDFNRFHCHFSPRDWQRLINNNWGFRPKRLNFKLFNIQVKEVTDNNGVKTIANNLTSTIQVFTDSEYQLPYVLGSAHQGCLPPFPADVFMIPQYGYLTLNNGSQAVGRSSFYCLEYFPSQMLRTGNNFPFSYTFEDVPFHSSYAHSQSLDRLMNPLIDQYLYYLSRTQTTGGTANTQTLGFSQGGPNTMANQAKNWLPGPCYRQQRVSTTTGQNNNSNFAWTAGTKYHLNGRNSLANPGIAMATHKDDKERFFPSNGILIFGKQNAARDNADYSDVMLTSEEEIKTTNPVATEEYGIVADNLQQQNTAPQIGTVNSQGALPGMVWQNRDVYLQGPIWAKIPHTDGNFHPSPLMGGFGLKHPPPQILIKNTPVPADPPTTFNQSKLNSFITQYSTGQVSVEIEWELQKENSKRWNPEIQYTSNYYKSTSVDFAVNTEGVYSEPHPIGTRYLTRPL

SEQ ID NO: 1052 - protein, 736 aa, Artificial Sequence
  source: /note="Description of Artificial Sequence: Synthetic polypeptide"
MAADGYLPDWLEDNLSEGIREWWALKPGAPKPKANQQKQDDGRGLVLPGYKYLGPFNGLDKGEPVNAADAAALEHDKAYDQQLKAGDNPYLRYNHADAEFQERLQEDTSFGGNLGRAVFQAKKRVLEPLGLVEEGAKTAPGKKRPVEQSPQEPDSSSGIGKTGQQPAKKRLNFGQTGDSESVPDPQPLGEPPATPAAVGPTTMASGGGAPMADNNEGADGVGSSSGNWHCDSQWLGDRVITTSTRTWALPTYNNHLYKQISSASTGASNDNHYFGYSTPWGYFDFNRFHCHFSPRDWQRLINNNWGFRPKRLNFKLFNIQVKEVTDNNGVKTIANNLTSTVQVFTDSEYQLPYVLGSAHQDCLPPFPADVFMIPQYGYLTLNNGSQAVGRSSFYCLEYFPSQMLRTGNNFTFSYTFEDVPFHSSYAHSQSLDRLMNPLIDQYLYYLSRTQTTGGTANTQTLGFSQGGPNTMANQAKNWLPGPCYRQQRVSTTTGQNNNSNFAWTAGTKYHLNGRNSLANPGIAMATHKDDKERFFPSNGILIFGKQNAARDNADYSDVMLTSEEEIKTTNPVATEEYGIVADNLQQQNTAPQIGTVNSQGALPGMVWQNRDVYLQGPIWAKIPHTDGNFHPSPLMGGFGLKHPPPQILIKNTPVPADPPTTFNQSKLNSFITQYSTGQVSVEIEWELQKENSKRWNPEIQYTSNYYKSTSVDFAVNTEGVYSEPHPIGTRYLTRPL

SEQ ID NO: 1053 - protein, 735 aa, Artificial Sequence
  source: /note="Description of Artificial Sequence: Synthetic polypeptide"
MAADGYLPDWLEDNLSEGIREWWDLKPGAPKPKANQQKQDDGRGLVLPGYKYLGPFNGLDKGEPVNAADAAALEHDKAYDQQLKAGDNPYLRYNHADAEFQERLQEDTSFGGNLGRAVFQAKKRVLEPLGLVEEGAKTAPGKKRPVEQSPQEPDSSSGIGKTGQQPAKKRLNFGQTGDSESVPDPQPLGEPPATPAAVGPTTMASGGGAPMADNNEGADGVGNASGNWHCDSTWLGDVITTSTRTWALPTYNNHLYKQISSASTGASNDNHYFGYSTPWGYFDFNRFHCHFSPRDWQRLINNNWGFRPKRLNFKLFNIQVKEVTQNEGTKTIANNLTSTIQVFTDSEYQLPYVLGSAHQGCLPPFPADVFMIPQYGYLTLNNGSQAVGRSSFYCLEYFPSQMLRTGNNFQFTYTFEDVPFHSSYAHSQSLDRLMNPLIDQYLYYLSRTQTTGGTANTQTLGFSQGGPNTMANQAKNWLPGPCYRQQRVSTTTGQNNNSNFAWTAGTKYHLNGRNSLANPGIAMATHKDDKERFFPSNGILIFGKQNAARDNADYSDVILTSEEEIKTTNPVATEEYGIVADNLQQQNTAPQIGTVNSQGALPGMVWQNRDVYLQGPIWAKIPHTDGNFHPSPLMGGFGLKHPPPQILIKNTPVPADPPTTFNQSKLNSFITQYSTGQVSVEIEWELQKENSKRWNPEIQYTSNYYKSTSVDFAVNTEGVYSEPHPIGTRYLTRPL

SEQ ID NO: 1054 - protein, 736 aa, Artificial Sequence
  source: /note="Description of Artificial Sequence: Synthetic polypeptide"
MAADGYLPDWLEDTLSEGIRQWWKLKPGPPPPKPAERHKDDSRGLVLPGYKYLGPFNGLDKGEPVNEADAAALEHDKAYDRQLDSGDNPYLKYNHADAEFQERLKEDTSFGGNLGRAVFQAKKRVLEPFGLVEEGAKTAPGKKRPVEQSPQEPDSSSGIGKTGQQPAKKRLNFGQTGDSESVPDPQPLGEPPATPAAVGPTTMASGGGAPMADNNEGADGVGNASGNWHCDSTWLGDRVITTSTRTWALPTYNNHLYKQISSTSTGASNDNHYFGYSTPWGYFDFNRFHCHFSPRDWQRLINNNWGFRPKRLNFKLFNIQVKEVTDNNGVKTIANNLTSTVQVFTDSEYQLPYVLGSAHQGCLPPFPADVFMIPQYGYLTLNNGSQAVGRSSFYCLEYFPSQMLRTGNNFTFSYTFEDVPFHSSYAHSQSLDRLMNPLIDQYLYYLSRTQTTGGTANTQTLGFSQGGPNTMANQAKNWLPGPCYRQQRVSTTTGQNNNSNFAWTAGTKYHLNGRNSLANPGIAMATHKDDKERFFPSNGILIFGKQNAARDNADYSDVMLTSEEEIKTTNPVATEEYGIVADNLQQQNTAPQIGTVNSQGALPGMVWQNRDVYLQGPIWAKIPHTDGNFHPSPLMGGFGLKHPPPQILIKNTPVPADPPTTFNQSKLNSFITQYSTGQVSVEIEWELQKENSKRWNPEIQYTSNYYKSTSVDFAVNTEGVYSEPHPIGTRYLTRPL

SEQ ID NO: 1055 - protein, 735 aa, Artificial Sequence
  source: /note="Description of Artificial Sequence: Synthetic polypeptide"
MAADGYLPDWLEDNLSEGIREWWDLKPGAPKPKANQQKQDDGRGLVLPGYKYLGPFNGLDKGEPVNAADAAALEHDKAYDRQLDSGDNPYLRYNHADAEFQERLKEDTSFGGNLGRAVFQAKKRVLEPFGLVEEGAKTAPGKKRPVEQSPQEPDSSSGIGKTGQQPAKKRLNFGQTGDSESVPDPQPLGEPPATPAAVGPTTMASGGGAPMADNNEGADGVGNASGNWHCDSTWLGDRVITTSTRTWALPTYNNHLYKQISSASTGASNDNHYFGYSTPWGYFDFNRFHCHFSPRDWQRLINNNWGFRPKRLNFKLFNIQVKEVTQNEGTKTIANNLTSTIQVFTDSEYQLPYVLGSAHQGCLPPFPADVFMIPQYGYLTLNNGSQAVGRSSFYCLEYFPSQMLRTGNNFQFTYTFEDVPFHSSYAHSQSLDRLMNPLIDQYLYYLSRTQTTGGTANTQTLGFSQGGPNTMANQAKNWLPGPCYRQQRVSTTTGQNNNSNFAWTAGTKYHLNGRNSLANPGIAMATHKDDRSVFFQYRDPDFGKQNAARDNADYSDVMLTSEEEIKTTNPVATEEYGIVADNLQQQNTAPQIGTVNSQGALPGMVWQNRDVYLQGPIWAKIPHTDGNFHPSPLMGGFGLKHPPPQILIKNTPVPADPPTTFNQSKLNSFITQYSTGQVSVEIEWELQKENSKRWNPEIQYTSNYYKSTSVDFAVNTEGVYSEPHPIGTRYLTRPL

SEQ ID NO: 1056 - protein, 736 aa, Artificial Sequence
  source: /note="Description of Artificial Sequence: Synthetic polypeptide"
MAADGYLPDWLEDNLSEGIREWWALKPGAPKPKANQQKQDDGRGLVLPGYKYLGPFNGLDKGEPVNAADAAALEHDKAYDQQLKAGDNPYLKYNHADAEFQERLQGDTSFGGNLGRAVFQAKKRVLEPLGLVEEAAKTAPGKKRPVEQSPQEPDSSAGIGKSGAQPAKKRLNFGQTGDTESVPDPQPLGEPPAAPSGVGPNTMAAGGGAPMADNNEGADGVGSSSGNWHCDSQWLGDRVITTSTRTWALPTYNNHLYKQISSASTGASNDNHYFGYSTPWGYFDFNRFHCHFSPRDWQRLINNNWGFRPKRLNFKLFNIQVKEVTDNNGVKTIANNLTSTVQVFTDSDYQLPYVLGSAHEGCLPPFPADVFMIPQYGYLTLNNGSQAVGRSSFYCLEYFPSQMLRTGNNFQFTYTFEDVPFHSSYAHSQSLDRLMNPLIDQYLYYLSRTQTTGGTANTQTLGFSQGGPNTMANQAKNWLPGPCYRQQRVSTTTGQNNNSNFAWTAGTKYHLNGRNSLANPGIAMATHKDDKERFFPSNGILIFGKQNAARDNADYSDVMLTSEEEIKTTNPVATEEYGIVADNLQQQNTAPQIGTVNSQGALPGMVWQNRDVYLQGPIWAKIPHTDGNFHPSPLMGGFGLKHPPPQILIKNTPVPADPPTTFNQSKLNSFITQYSTGQVSVEIEWELQKENSKRWNPEIQYTSNYYKSTSVDFAVNTEGVYSEPHPIGTRYLTRPL

SEQ ID NO: 1057 - protein, 736 aa, Artificial Sequence
  source: /note="Description of Artificial Sequence: Synthetic polypeptide"
MAADGYLPDWLEDTLSEGIRQWWKLKPGPPPPKPAERHKDDSRGLVLPGYKYLGPFNGLDKGEPVNEADAAALEHDKAYDRQLDSGDNPYLKYNHADAEFQERLKEDTSFGGNLGRAVFQAKKRVLEPFGLVEEAAKTAPGKKRPVEQSPQEPDSSSGIGKTGQQPAKKRLNFGQTGDSESVPDPQPLGEPPATPAAVGPTTMASGGGAPMADNNEGADGVGNASGNWHCDSTWLGDRVITTSTRTWALPTYNNHLYKQISSASTGASNDNHYFGYSTPWGYFDFNRFHCHFSPRDWQRLINNNWGFRPKRLNFKLFNIQVKEVTDNNGVKTIANNLTSTVQVFTDSDYQLPYVLGSAHEGCLPPFPADVFMIPQYGYLTLNNGSQAVGRSSFYCLEYFPSQMLRTGNNFTFSYTFEDVPFHSSYAHSQSLDRLMNPLIDQYLYYLSRTQTTGGTANTQTLGFSQGGPNTMANQAKNWLPGPCYRQQRVSTTTGQNNNSNFAWTAGTKYHLNGRNSLANPGIAMATHKDDKERFFPSNGILIFGKQNAARDNADYSDVMLTSEEEIKTTNPVATEEYGIVADNLQQQNTAPQIGTVNSQGALPGMVWQNRDVYLQGPIWAKIPHTDGNFHPSPLMGGFGLKHPPPQILIKNTPVPADPPTTFNQSKLNSFITQYSTGQVSVEIEWELQKENSKRWNPEIQYTSNYYKSTSVDFAVNTEGVYSEPHPIGTRYLTRPL

SEQ ID NO: 1058 - protein, 736 aa, Artificial Sequence
  source: /note="Description of Artificial Sequence: Synthetic polypeptide"
MAADGYLPDWLEDNLSEGIREWWALKPGAPKPKANQQKQDDGRGLVLPGYKYLGPFNGLDKGEPVNAADAAALEHDKAYDQQLKAGDNPYLRYNHADAEFQERLQEDTSFGGNLGRAVFQAKKRVLEPLGLVEEGAKTAPGKKRPVEQSPQEPDSSSGIGKTGQQPAKKRLNFGQTGDSESVPDPQPLGEPPATPAAVGPTTMASGGGAPMADNNEGADGVGSSSGNWHCDSTWLGDRVITTSTRTWALPTYNNHLYKQISSASTGASNDNHYFGYSTPWGYFDFNRFHCHFSPRDWQRLINNNWGFRPKRLNFKLFNIQVKEVTDNNGVKTIANNLTSTVQVFTDSEYQLPYVLGSAHQGCLPPFPADVFMIPQYGYLTLNNGSQAVGRSSFYCLEYFPSQMLRTGNNFTFSYTFEDVPFHSSYAHSQSLDRLMNPLIDQYLYYLSRTQTTGGTANTQTLGFSQGGPNTMANQAKNWLPGPCYRQQRVSTTTGQNNNSNFAWTAGTKYHLNGRNSLANPGIAMATHKDDKERFFPSNGILIFGKQNAARDNADYSDVMLTSEEEIKTTNPVATEEYGIVADNLQQQNTAPQIGTVNSQGALPGMVWQNRDVYLQGPIWAKIPHTDGNFHPSPLMGGFGLKHPPPQILIKNTPVPADPPTTFNQSKLNSFITQYSTGQVSVEIEWELQKENSKRWNPEIQYTSNYYKSTSVDFAVNTEGVYSEPHPIGTRYLTRPL

SEQ ID NO: 1059 - protein, 737 aa, Artificial Sequence
  source: /note="Description of Artificial Sequence: Synthetic polypeptide"
MAADGYLPDWLEDNLSEGIREWWALKPGAPKPKANQQKQDDGRGLVLPGYKYLGPFNGLDKGEPVNAADAAALEHDKAYDQQLKAGDNPYLRYNHADAEFQERLQEDTSFGGNLGRAVFQAKKRVLEPLGLVEEGAKTAPGKKRPVEQSPQEPDSSSGIGKTGQQPAKKRLNFGQTGDTESVPDPQPIGEPPAAPSGVGSLTMASGGGAPVADNNEGADGVGSSSGNWHCDSQWLGDRVITTSTRTWALPTYNNHLYKQISNSTSGGSSNDNAYFGYSTPWGYFDFNRFHCHFSPRDWQRLINNNWGFRPKRLNFKLFNIQVKEVTQNEGTKTIANNLTSTIQVFTDSEYQLPYVLGSAHQGCLPPFPADVFMIPQYGYLTLNNGSQAVGRSSFYCLEYFPSQMLRTGNNFQFTYTFEDVPFHSSYAHSQSLDRLMNPLIDQYLYYLSRTQTTGGTANTQTLGFSQGGPNTMANQAKNWLPGPCYRQQRVSTTTGQNNNSNFAWTAGTKYHLNGRNSLANPGIAMATHKDDKERFFPSNGILIFGKQNAARDNADYSDVMLTSEEEIKTTNPVATEEYGIVADNLQQQNTAPQIGTVNSQGALPGMVWQNRDVYLQGPIWAKIPHTDGNFHPSPLMGGFGLKHPPPQILIKNTPVPADPPTTFNQSKLNSFITQYSTGQVSVEIEWELQKENSKRWNPEIQYTSNYYKSTSVDFAVNTEGVYSEPHPIGTRYLTRPL

SEQ ID NO: 1060 - protein, 736 aa, Artificial Sequence
  source: /note="Description of Artificial Sequence: Synthetic polypeptide"
MAADGYLPDWLEDNLSEGIREWWALKPGAPKPKANQQKQDDGRGLVLPGYKYLGPFNGLDKGEPVNAADAAALEHDKAYDQQLKAGDNPYLKYNHADAEFQERLQGDTSFGGNLGRAVFQAKKRVLEPLGLVEEAAKTAPGKKRPVEQSPQEPDSSAGIGKSGAQPAKKRLNFGQTGDTESVPDPQPLGEPPAAPSGVGPNTMAAGGGAPMADNNEGADGVGSSSGNWHCDSQWLGDRVITTSTRTWALPTYNNHLYKQISSASTGASNDNHYFGYSTPWGYFDFNRFHCHFSPRDWQRLINNNWGFRPKRLNFKLFNIQVKEVTDNNGVKTIANNLTSTVQVFTDSEYQLPYVLGSAHQGCLPPFPADVFMIPQYGYLTLNNGSQAVGRSSFYCLEYFPSQMLRTGNNFTFSYTFEDVPFHSSYAHSQSLDRLMNPLIDQYLYYLSRTQTTGGTANTQTLGFSQGGPNTMANQAKNWLPGPCYRQQRVSTTTGQNNNSNFAWTAGTKYHLNGRNSLANPGIAMATHKDDKERFFPSNGILIFDKQNAARDNADYSDVMLTSEEEIKTTNPVATEEYGIVADNLQQQNTAPQIGTVNSQGALPGMVWQNRDVYLQGPIWAKIPHTDGNFHPSPLMGGFGLKHPPPQILIKNTPVPADPPTTFNQSKLNSFITQYSTGQVSVEIEWELQKENSKRWNPEIQYTSNYYKSTSVDFAVNTEGVYSEPHPIGTRYLTRPL

SEQ ID NO: 1061 - protein, 736 aa, Artificial Sequence
  source: /note="Description of Artificial Sequence: Synthetic polypeptide"
MAADGYLPDWLEDTLSEGIRQWWKLKPGPPPPKPAERHKDDSRGLVLPGYKYLGPFNGLDKGEPVNEADAAALEHDKAYDRQLDSGDNPYLKYNHADAEFQERLKEDTSFGGNLGRAVFQAKKRVLEPLGLVEEPVKTAPGKKRPVEHSPVEPDSSSGTGKAGQQPARKRLNFGQTGDSESVPDPQPLGEPPATPAAVGPNTMATGSGAPMADNNEGADGVGNSSGNWHCDSTWMGDRVITTSTRTWALPTYNNHLYKQISSASTGASNDNHYFGYSTPWGYFDFNRFHCHFSPRDWQRLINNNWGFRPKRLNFKLFNIQVKEVTDNNGVKTIANNLTSTIQVFTDSEYQLPYVLGSAHQGCLPPFPADVFMIPQYGYLTLNNGSQAVGRSSFYCLEYFPSQMLRTGNNFTFSYTFEDVPFHSSYAHSQSLDRLMNPLIDQYLYYLSRTQTTGGKANTQTLGFSQGGPNTMANQAKNWLPGPCYRQQRVSTTTGQNNNSNFAWTAGTKYHLNGRNSLANPGIAMATHKDDKERFFPSNGILIFGKQNAARDNADYSDVMLTSEEEIKTTNPVATEEYGIVADNLQQQNTAPQIGTVNSQGALPGMVWQNRDVYLQGPIWAKIPHTDGNFHPSPLMGGFGLKHPPPQILIKNTPVPADPPTTFNQSKLNSFITQYSTGQVSVEIEWELQKENSKRWNPEIQYTSNYYKSTSVDFAVNTEGVYSEPHPIGTRYLTRPL

SEQ ID NO: 1062 - protein, 736 aa, Artificial Sequence
  source: /note="Description of Artificial Sequence: Synthetic polypeptide"
MAADGYLPDWLEDNLSEGIREWWALKPGAPKPKANQQKQDDGRGLVLPGYKYLGPFNGLDKGEPVNAADAAALEHDKAYDQQLKAGDNPYLRYNHADAEFQERLQEDTSFGGNLGRAVFQAKKRVLEPFGLVEEGAKTAPGKKRPVEQSPQEPDSSSGIGKTGQQPAKKRLNFGQTGDSESVPDPQPLGEPPATPAAVGPTTMASGGGAPMADNNEGADGVGNASGNWHCDSTWLGDRVITTSTRTWALPTYNNHLYKQISSASTGASNDNHYFGYSTPWGYFDFNRFHCHFSPRDWQRLINNNWGFRPKRLNFKLFNIQVKEVTDNNGVKTIANNLTSTVQVFTDSEYQLPYVLGSAHQGCLPPFPADVFMIPQYGYLTLNNGSQAVGRSSFYCLEYFPSQMLRTGNNFTFSYTFEDVPFHSSYAHSQSLDRLMNPLIDQYLYYLSRTQTTGGTGNTQTLGFSQGGPNTMANQAKNWLPGPCYRQQRVSTTTGQNNNSNFAWTAGTKYHLNGRNSLANPGIAMATHKDDKERFFPSNGILIFGKQNAARDNADYSDVMLTSEEEIKTTNPVATEEYGIVADNLQQQNTAPQIGTVNSQGALPGMVWQNRDVYLQGPIWAKIPHTDGNFHPSPLMGGFGLKHPPPQILIKNTPVPADPPTTFNQSKLNSFITQYSTGQVSVEIEWELQKENSKRWNPEIQYTSNYYKSTSVDFAVNTEGVYSEPHPIGTRYLTRPL

SEQ ID NO: 1063 - protein, 736 aa, Artificial Sequence
  source: /note="Description of Artificial Sequence: Synthetic polypeptide"
MAADGYLPDWLEDNLSEGIREWWDLKPGAPKPKANQQKQDDGRGLVLPGYKYLGPFNGLDKGEPVNAADAAALEHDKAYDQQLKAGDNPYLRYNHADAEFQERLQEDTSFGGNLGRAVFQAKKRVLEPLGLVEEGAKTAPGKKRPVEQSPQEPDSSSGIGKTGQQPAKKRLNFGQTGDSESVPDPQPLGEPPATPAAVGPTTMASGGGAPMADNNEGADGVGSSSGNWHCDSTWLGDRVITTSTRTWALPTYNNHLYKQISSASTGASNDNHYFGYSTPWGYFDFNRFHCHFSPRDWQRLINNNWGFRPKRLNFKLFNIQVKEVTQNEGTKTIANNLTSTIQVFTDSEYQLPYVLGSAHQGCLPPFPADVFMIPQYGYLTLNNGSQAVGRSSFYCLEYFPSQMLRTGNNFTFSYTFEDVPFHSSYAHSQSLDRLMNPLIDQYLYYLSRTQTTGGTANTQTLGFSQGGPNTMANQAKNWLPGPCYRQQRVSTTTGQNNNSNFAWTAGTKYHLNGRNSLANPGIAMATHKDDKERFFPSNGILIFGKQNAARDNADYSDVMLTSEEEIKTTNPVATEEYGIVADNLQQQNTAPQIGTVNSQGALPGMVWQNRDVYLQGPIWAKIPHTDGNFHPSPLMGGFGLKHPPPQILIKNTPVPADPPTTFNQSKLNSFITQYSTGQVSVEIEWELQKENSKRWNPEIQYTSNYYKSTSVDFAVNTEGVYSEPHPIGTRYLTRPL

SEQ ID NO: 1064 - protein, 736 aa, Artificial Sequence
  source: /note="Description of Artificial Sequence: Synthetic polypeptide"
MAADGYLPDWLEDNLSEGIREWWALKPGAPKPKANQQKQDDGRGLVLPGYKYLGPFNGLDKGEPVNAADAAALEHDKAYDQQLKAGDNPYLRYNHADAEFQERLQEDTSFGGNLGRAVFQAKKRVLEPLGLVEEGAKTAPGKKRPVEQSPQEPDSSSGIGKTGQQPAKKRLNFGQTGDSESVPDPQPLGEPPATPAAVGPTTMAAGGGAPMADNNEGADGVGSSSGNWHCDSTWMGDRVITTSTRTWALPTYNNHLYKQISSASTGASNDNHYFGYSTPWGYFDFNRFHCHFSPRDWQRLINNNWGFRPKRLSFKLFNIQVKEVTQNEGTKTIANNLTSTIQVFTDSEYQLPYVLGSAHQGCLPPFPADVFMIPQYGYLTLNNGSQAVGRSSFYCLEYFPSQMLRTGNNFTFSYTFEDVPFHSSYAHSQSLDRLMNPLIDQYLYYLSRTQTTGGTANTQTLGFSQGGPNTMANQAKNWLQGPCYRQQRVSTTTGQNNNSNFAWTAGTKYHLNGRNSLANPGIAMATHKDDKERFFPSNGILIFGKQNAARDNADYSDVMLTSEEEIKTTNPVATEEYGIVADNLQQQNTAPQIGTVNSQGALPGMVWQNLDVYLQGPIWAKIPHTDGNFHPSPLMGGFGLKHPPPQILIKNTPVPADPPTTFNQSKLNSFITQYSTGQVSVEIEWELQKENSKRWNPEIQYTSNYYKSTSVDFAVNTEGVYSEPHPIGTRYLTRPL

SEQ ID NO: 1065 - protein, 737 aa, Artificial Sequence
  source: /note="Description of Artificial Sequence: Synthetic polypeptide"
MAADGYLPDWLEDNLSEGIREWWALKPGAPKPKANQQKQDDGRGLVLPGYKYLGPFNGLDKGEPVNAADAAALEHDKAYDQQLKAGDNPYLRYNHADAEFQERLQEDTSFGGNLGRAVFQAKKRVLEPLGLVEEGAKTAPGKKRPVEPSPQRSPDSSSGIGKTGQQPAKKRLNFGQTGDSESVPDPQPLGEPPATPAAVGPTTMASGGGAPMADNNEGADGVGNASGNWHCDSQWLGDRVITTSTRTWALPTYNNHLYKQISSASTGASNDNHYFGYSTPWGYFDFNRFHCHFSPRDWQRLINNNWGFRPKRLNFKLFNIQVKEVTDNNGVKTIANNLTSTVQVFTDSDYQLPYVLGSAHEGCLPPFPADVFMIPQYGYLTLNNGSQAVGRSSFYCLEYFPSQMLRTGNNFQFTYTFEDVPFHSSYAHSQSLDRLMNPLIDQYLYYLSRTQTTGGTANTQTLGFSQGGPNTMANQAKNWVPGPCYRQQRVSTATGQNNNSNFAWTAGTKYHLKGRNSLANPGIAMATHKDDKERFFPSNGILIFGKQNAARDNADYSDVMLTSEEEIKTTNPVATEEYGIVADNLQQQNTAPQIGTVNSQGALPGMVWQNRDVYLQGPIWAKIPHTDGNFHPSPLMGGFGLKHPPPQILIKNTPVPADPPTTFNQSKLNSFITQYSTGQVSVEIEWELQKENSKRWNPEIQYTSNYYKSTSVDFAVNTEGVYSEPHPIGTRYLTRPL

SEQ ID NO: 1066 - protein, 737 aa, Artificial Sequence
  source: /note="Description of Artificial Sequence: Synthetic polypeptide"
  MOD_RES (226)..(226): Any amino acid
  MOD_RES (233)..(233): Any amino acid
  MOD_RES (239)..(239): Any amino acid
  MOD_RES (250)..(250): Any amino acid
  MOD_RES (253)..(253): Any amino acid
  MOD_RES (255)..(255): Any amino acid
MAADGYLPDWLEDTLSEGIRQWWKLKPGPPPPKPAERHKDDSRGLVLPGYKYLGPFNGLDKGEPVNEADAAALEHDKAYDRQLDSGDNPYLKYNHADAEFQERLKEDTSFGGNLGRAVFQAKKRVLEPLGLVEEGAKTAPGKKRPVEQSPQEPDSSSGIGKTGQQPAKKRLNFGQTGDSESVPDPQPLGEPPATPSGVGPNTMAAGGGAPMADNNEGADGVGSSSXNWHCDSXWLGDRXITTSTRTWALXTYXNXLYKQISNSTSGGATNDNTYFGYSTPWGYFDFNRFHCHFSPRDWQRLINNNWGFRPKRLNFKLFNIQVKEVTQNEGTKTIANNLTSTIQVFTDSEYQLPYVLGSAHQGCLPPFPADVFMIPQYGYLTLNNGSQAVGRSSFYCLEYFPSQMLRTGNNFQFTYTFEDVPFHSSYAHSQSLDRLMNPLIDQYLYYLSRTQTTGGTANTQTLGFSQGGPNTMANQAKNWLPGPCYRQQRVSTTTGQNNNSNFAWTAGTKYHLNGRNSLANPGIAMATHKDDKERFFPSNGILIFGKQNAARDNADYSDVMLTSEEEIKTTNPVATEEYGIVADNLQQQNTAPQIGTVNSQGALPGMVWQNRDVYLQGPIWAKIPHTDGNFHPSPLMGGFGLKHPPPQILIKNTPVPADPPTTFSQAKLASFITQYSTGQVSVEIEWELQKENSKRWNPEVQYTSNYAKSANVDFTVDNNGLYTEPRPIGTRYLTRPL

SEQ ID NO: 1067 - protein, 737 aa, Artificial Sequence
  source: /note="Description of Artificial Sequence: Synthetic polypeptide"
MAADGYLPDWLEDNLSEGIREWWDLKPGAPKPKANQQKQDDGRGLVLPGYKYLGPFNGLDKGEPVNAADAAALEHDKAYDQQLKAGDNPYLRYNHADAEFQERLQEDTSFGGNLGRAVFQAKKRVLEPLGLVEEGAKTAPGKKRPVEPSPQRSPDSSTGIGKKGQQPAKKRLNFGQTGDSESVPDPQPIGEPPAGPSGVGSLTMASGGGAPVADNNEGADGVGSSSGNWHCDSQWLGDRVITTSTRTWALPTYNNHLYKQISSASTGASNDNHYFGYSTPWGYFDFNRFHCHFSPRDWQRLINNNWGFRPKRLNFKLFNIQVKEVTDNDGVKTIANNLTSTIQVFTDSEYQLPYVLGSAHQGCLPPFPADVFMIPQYGYLTLNNGSQAVGRSSFYCLEYFPSQMLRTGNNFTFSYTFEDVPFHSSYAHSQSLDRLMNPLIDQYLYYLSRTQTTGGTANTQTLGFSQGGPNTMANHAKNWLPGPCYRQQRVSTTTGQNNNSNFAWTAGTKYHLNGRNSLANPGIAMATHKDDKERFFPSNGILIFGKQNAARDNADYSDVMLTSEEEIKTTNPVATEEYGIVADNLQQQNTAPQIGTVNSQGALPGMVWQNRDVYLQGPIWAKIPHTDGNFHPSPLMGGFGLKHPPPQILIKNTPVPADPPTTFNQSKLNSFITQYSTGQVSVEIEWELQKENSKRWNPEIQYTSNYYKSTSVDFAVNTEGVYSEPHPIGTRYLTRPL

SEQ ID NO: 1068 - protein, 736 aa, Artificial Sequence
  source: /note="Description of Artificial Sequence: Synthetic polypeptide"
MAADGYLPDWLEDTLSEGIRQWWKLKPGPPPPKPAERHKDDSRGLVLPGYKYLGPFNGLDKGEPVNEADAAALEHDKAYDRQLDSGDNPYLKYNHADAEFQERLKEDTSFGGNLGRAVFQAKKRVLEPLGLVEEPVKTAPGKKRPVEHSPVEPDSSSGTGKAGQQPAKKRLNFGQTGDSESVPDPQPLGEPPATPAAVGPTTMASGGGAPMADNNEGADGVGNASGNWHCDSTWLGDRVITTSTRTWALPTYNNHLYKQISSASTGASNDNHYFGYSTPWGYFDFNRFHCHFSPRDWQRLINNNWGFRPKRLNFKLFNIQVKEVTQNEGTKTIANNLTSTIQVFTDSEYQLPYVLGSAHQGCLPPFPADVFMIPQYGYLTLNNGSQAVGRSSFYCLEYFPSQMLRTGNNFQFTYTFEDVPFHSSYAHSQSLDRLMNPLIDQYLYYLSRTQTTGGTANTQTLGFSQGGPNTMANQAKNWLPGPCYRQQRVSTTTGQNNNSNFAWTAGTKYHLNGRNSLANPGIAMATHKDDKERFFPSNGILIFGKQNAARDNADYSDVMLTSEEEIKTTNPVATEEYGIVADNLQQQNTAPQIGTVNSQGALPGMVWQNRDVYLQGPIWAKIPHTDGNFHPSPLMGGFGLKHPPPQILIKNTPVPADPPTTFNQSKLNSFITQYSTGQVSVEIEWELQKENSKRWNPEIQYTSNYYKSTSVDFAVNTEGVYSEPHPIGTRYLTRPL

SEQ ID NO: 1069 - protein, 736 aa, Artificial Sequence
  source: /note="Description of Artificial Sequence: Synthetic polypeptide"
MAADGYLPDWLEDNLSEGIREWWALKPGAPKPKANQQKQDDGRGLVLPGYKYLGPFNGLDKGEPVNAADAAALEHDKAYDQQLQAGDNPYLRYNHADAEFQERLQGDTSFGGNLGRAVFQAKKRVLEPLGLVEEGAKTAPGKKRPVEQSPQEPDSSSGIGKTGQQPAKKRLNFGQTGDSESVPDPQPLGEPPATPAAVGPTTMASGGGAPMADNNEGADGVGNASGNWHCDSTWLGDRVITTSTRTWALPTYNNHLYKQISSASTGASNDNHYFGYSTPWGYFDFNRFHCHFSPRDWQRLINNNWGFRPKRLNFKLFNIQVKEVTDNNGVKTIANNLTSTIQVFTDSEYQLPYVLGSAHQGCLPPFPADVFMIPQYGYLTLNNGSQAVGRSSFYCLEYFPSQMLRTGNNFQFTYTFEDVPFHSSYAHSQSLDRLMNPLIDQYLYYLSRTQTTGGTANTQTLGFSQGGPNTMANQAKNWLPGPCYRQQRVSTTTGQNNNSNFAWTAGTKYHLNGRNSLANPGIAMATHKDDKERFFPSNGILIFGKQNAARDNADYSDVMLTSEEEIKTTNPVATEEYGIVADNLQQQNTAPQIGTVNSQGALPGMVWQNRDVYLQGPIWAKIPHTDGNFHPSPLMGGFGLKHPPPQILIKNTPVPADPPTTFNQSKLNSFITQYSTGQVSVEIEWELQKENSKRWNPEIQYTSNYYKSTSVDFAVNTEGVYSEPHPIGTRYLTRPL

SEQ ID NO: 1070 - protein, 738 aa, Artificial Sequence
  source: /note="Description of Artificial Sequence: Synthetic polypeptide"
MAADGYLPDWLEDTLSEGIRQWWKLKPGPPPPKPAERHKDDSRGLVLPGYKYLGPFNGLDKGEPVNAADAAALEHDKAYDQQLKAGDNPYLRYNHADAEFQERLKEDTSFGGNLGRAVFQAKKRVLEPLGLVEEGAKTAPGKKRPVEPSPQRSPDSSTGIGKKGQQPARKRLNFGQTGDSESVPDPQPLGEPPAAPSGVGPNTMAAGGGAPMADNNEGADGVGSSSGNWHCDSQWLGDRVITTSTRTWALPTYNNHLYKQISNSTSGGSSNDNAYFGYSTPWGYFDFNRFHCHFSPRDWQRLINNNWGFRPKRLNFKLFNIQVKEVTDNNGVKTIANNLTSTVQVFTDSEYQLPYVLGSAHQGCLPPFPADVFMIPQYGYLTLNNGSQAVGRSSFYCLEYFPSQMLRTGNNFTFSYTFEDVPFHSSYAHSQSLDRLMNPLIDQYLYYLSRTQTTGGTANTQTLGFSQGGPNTMANQAKNWLPGPCYRQQRVSTTTGQNNNSNFAWTAGTKYHLNGRNSLANPGIAMATHKDDKERFFPSNGILIFGKQNAARDNADYSDVMLTSEEEIKTTNPVATEEYGIVADNLQQQNTAPQIGTVNSQGALPGMVWQNRDVYLQGPIWAKIPHTDGHFHPSPLMGGFGLKHPPPQILIKNTPVPANPPTTFNQSKLNSFITQYSTGQVSVEIEWELQKENSKRWNPEVQYTSNYAKSANVDFTVDNNGLYTEPRPIGTRYLTRPL

SEQ ID NO: 1071 - protein, 738 aa, Artificial Sequence; identical to SEQ ID NO: 1070
  source: /note="Description of Artificial Sequence: Synthetic polypeptide"

SEQ ID NO: 1072 - protein, 736 aa, Artificial Sequence
  source: /note="Description of Artificial Sequence: Synthetic polypeptide"
MAADGYLPDWLEDNLSEGIREWWALKPGAPKPKANQQKQDDGRGLVLPGYKYLGPFNGLDKGEPVNAADAAALEHDKAYDQQLKAGDNPYLRYNHADAEFQERLQEDTSFGGNLGRAVFQAKKRLLEPLGLVEEGAKTAPGKKRPVEQSPQEPDSSSGIGKTGQQPAKKRLNFGQTGDSESVPDPQPLGEPPATPAAVGPTTMASGGGAPMADNNEGADGVGNSSGNWHCDSTWMGDRVITTSTRTWALPTYNNHLYKQISSASTGASNDNHYFGYSTPWGYFDFNRFHCHFSPRDWQRLINNNWGFRPKRLNFKLFNIQVKEVTQNEGTKTIANNLTSTIQVFTDSEYQLPYVLGSAHQGCLPPFPADVFIIPQYGYLTLNNGSQAVGRSSFYCLEYFPSQMLRTGNNFTFSYTFEDVPFHSSYAHSQSLDRLMNPLIDQYLYYLSRTQTTGGTANTQTLGFSQGGPNTMANQAKNWLPGPCYRQQRVSTTTGQNNNSNFAWTAGTKYHLNGRNSLANPGIAMATHKDDKERFFPSNGILIFGKQNAARDNADYSDVMLTSEEEIKTTNPVATEEYGIVADNLQQQNTAPQIGTVNSQGALPGMVWQNRDVYLQGPIWAKIPHTDGNFHPSPLMGGFGLKHPPPQILIKNTPVPADPPTTFNQSKLNSFITQYSTGQVSVEIEWELQKENSKRWNPEIQYTSNYYKSTSVDFAVNTEGVYSEPHPIGTRYLTRPL

SEQ ID NO: 1073 - protein, 736 aa, Artificial Sequence
  source: /note="Description of Artificial Sequence: Synthetic polypeptide"
MAADGYLPDWLEDNLSEGIREWWALKPGAPKPKANQQKQDDGRGLVLPGYKYLGPFNGLDKGEPVNAADAAALEHDKAYDQQLKAGDNPYLRYNHADAEFQERLQEDTSFGGNLGRAVFQAKKRVLEPFGLVEEAAKTAPGKKRPVEQSPQEPDSSSGIGKTGQQPAKKRLNFGQTGDSESVPDPQPLGEPPATPAAVGPTTMASGGGAPMADNNEGADGVGNASGNWHCDSTWLGDRVITTSTRTWALPTYNNHLYKQISSASTGASNDNHYFGYSTPWGYFDFNRFHCHFSPRDWQRLINNNWGFRPKRLNFKLFNIQVKEVTQNEGTKTIANNLTSTIQVFTDSEYQLPYVLGSAHQGCLPPFPADVFMIPQYGYLTLNNGSQAVGRSSFYCLEYFPSQMLRTGNNFTFSYTFEDVPFHSSYAHSQSLDRLMNPLIDQYLYYLSRTQTTGGTANTQTLGFSQGGPNTMANHAKNWLPGPCYRQQRVSTTTGQNNNSNFAWTAGTKYHLNGRNSLANPGIAMATHKDDKERFFPSNGILIFGKQNAARDNADYSDVMLTSEEEIKTTNPVATEEYGIVADNLQQQNTAPQIGTVNSQGALPGMVWQNRDVYLQGPIWAKIPHTDGNFHPSPLMGGFGLKHPPPQILIKNTPVPADPPTTFNQSKLNSFITQYSTGQVSVEIEWELQKENSKRWNPEIQYTSNYYKSTSVDFAVNTEGVYSEPHPIGTRYLTRPL

SEQ ID NO: 1074 - protein, 736 aa, Artificial Sequence
  source: /note="Description of Artificial Sequence: Synthetic polypeptide"
MAADGYLPDWLEDNLSEGIREWWALKPGAPKPKANQQKQDDGRGLVLPGYKYLGPFNGLDKGEPVNEADAAALEHDKAYDQQLKAGDNPYLRYNHADAEFQERLQEDTSFGGNLGRAVFQAKKRLLEPLGLVEEAAKTAPGKKRPVEQSPQEPDSSAGIGKSGAQPAKKRLNFGQTGDSESVPDPQPLGEPPATPAAVGPTTMASGGGAPMADNNEGADGVGNASGNWHCDSTWLGDRVITTSTRTWALPTYNNHLYKQISSASTGASNDNHYFGYSTPWGYFDFNRFHCHFSPRDWQRLINNNWGFRPKRLNFKLFNIQVKEVTDNDGVKTIANNLTSTIQVFTDSEYQLPYVLGSAHQGCLPPFPADVFMIPQYGYLTLNNGSQAVGRSSFYCLEYFPSQMLRTGNNFQFTYTFEDVPFHSSYAHSQSLDRLMNPLIDQYLYYLSRTQTTGGTANTQTLGFSQGGPNTMANQAKNWLPGPCYRQQRVSTTTGQNNNSNFAWTAGTKYHLNGRNSLANPGIAMATHKDDKERFFPSNGILIFGKQNAARDNADYSDVMLTSEEEIKTTNPVATEEYGIVADNLQQQNTAPQIGTVNSQGALPGMVWQNRDVYLQGPIWAKIPHTDGNFHPSPLMGGFGLKHPPPQILIKNTPVPADPPTTFNQSKLNSFITQYSTGQVSVEIEWELQKENSKRWNPEIQYTSNYYKSTSVDFAVNTEGVYSEPHPIGTRYLTRPL

SEQ ID NO: 1075 - protein, 736 aa, Artificial Sequence
  source: /note="Description of Artificial Sequence: Synthetic polypeptide"
MAADGYLPDWLEDNLSEGIREWWALKPGAPKPKANQQKQDDGRGLVLPGYKYLGPFNGLDKGEPVNAADAAALEHDKAYDQQLKAGDNPYLRYNHADAEFQERLQEDTSFGGNLGRAVFQAKKRVLEPLGLVEEGAKTAPGKKRPVEQSPQEPDSSAGIGKTGAQPAKKRLNFGQTGDSESVPDPQPLGEPPATPAAVGPTTMASGGGAPMADNNEGADGVGSASGNWHCDSTWLGDRVITTSTRTWALPTYNNHLYKQISSASTGASNDNHYFGYSTPWGYFDFNRFHCHFSPRDWQRLINNNWGFRPKRLNFKLFNIQVKEVTDNNGVKTIANNLTSTIQVFTDSEYQLPYVLGSAHQGCLPPFPADVFMIPQYGYLTLNNGSQAVGRSSFYCLEYFPSQMLRTGNNFTFSYTFEDVPFHSSYAHSQSLDRLMNPLIDQYLYYLSRTQTTGGTANTQTLGFSQGGPNTMANQAKNWLPGPCYRQQRVSTTTGQNNNSNFAWTAGTKYHLNGRNSLANPGIAMATHKDDKERFFPSNGILIFGKQNAARDNADYSDVMLTSEEEIKTTNPVATEEYGIVADNLQQQNTAPQIGTVNSQGALPGMVWQNRDVYLQGPIWAKIPHTDGNFHPSPLMGGFGLKHPPPQILIKNTPVPADPPTTFNQSKLNSFITQYSTGQVSVEIEWELQKENSKRWNPEIQYTSNYYKSTSVDFAVNTEGVYSEPHPIGTRYLTRPL

SEQ ID NO: 1076 - protein, 736 aa, Artificial Sequence
  source: /note="Description of Artificial Sequence: Synthetic polypeptide"
MAADGYLPDWLEDNLSEGIREWWDLKPGAPKPKANQQKQDDGRGLVLPGYKYLGPFNGLDKGEPVNAADAAALEHDKAYDQQLKAGDNPYLRYNHADAEFQERLQEDTSFGGNLGRAVFQAKKRLLEPLGLVEEAAKTAPGKKRPVEQSPQEPDSSAGIGKSGAQPAKKRLNFGQTGDTESVPDPQPIGEPPAAPSGVGPNTMAAGGGAPMADNNEGADGVGSSSGNWHCDSQWLGDRVITTSTRTWALPTYNNHLYKQISSASTGASNDNHYFGYSTPWGYFDFNRFHCHFSPRDWQRLINNNWGFRPKRLNFKLFNIQVKEVTQNEGTKTIANNLTSTIQVFTDSEYQLPYVLGSAHQGCLPPFPADVFMIPQYGYLTLNNGSQAVGRSSFYCLEYFPSQMLRTGNNFQFTYTFEDVPFHSSYAHSQSLDRLMNPLIDQYLYYLSRTQTTGGTANTQTLGFSQGGPNTMANHAKNWLPGPCYRQQRVSTTTGQNNNSNFAWTAGTKYHLNGRNSLANPGIAMATHKDDKERFFPSNGILIFGKQNAARDNADYSDVMLTSEEEIKTTNPVATEEYGIVADNLQQQNTAPQIGTVNSQGALPGMVWQNRDVYLQGPIWAKIPHTDGNFHPSPLMGGFGLKHPPPQILIKNTPVPADPPTTFNQSKLNSFITQYSTGQVSVEIEWELQKENSKRWNPEIQYTSNYYKSTSVDFAVNTEGVYSEPHPIGTRYLTRPL

SEQ ID NO: 1077 - protein, 737 aa, Artificial Sequence; identical to SEQ ID NO: 1059
  source: /note="Description of Artificial Sequence: Synthetic polypeptide"

SEQ ID NO: 1078 - protein, 737 aa, Artificial Sequence
  source: /note="Description of Artificial Sequence: Synthetic polypeptide"
MAADGYLPDWLEDNLSEGIREWWALKPGAPKPKANQQKQDDGRGLVLPGYKYLGPFNGLDKGEPVNAADAAALEHDKAYDQQLKAGDNPYLRYNHADAEFQERLKEDTSFGGNLGRAVFQAKKRVLEPFGLVEEGAKTAPGKKRPVEQSPQEPDSSSGIGKTGQQPAKKRLNFGQTGDSESVPDPQPLGEPPAAPSGVGPNTMAAGGGAPMADNNEGADGVGSSSGNWHCDSQWLGNRVITTSTRTWALPTYNNHLYKQISNSTSGGSSNDNAYFGYSTPWGYFDFNRFHCHFSPRDWQRLINNNWGFRPKRLNFKLFNIQVKEVTDNNGVKTIANNLTSTVQVFTDSEYQLPYVLGSAHQGCLPPFPADVFMIPQYGYLTLNNGSQAVGRSSFYCLEYFPSQMLRTGNNFQFTYTFEDVPFHSSYAHSQSLDRLMNPLIDQYLYYLSRTQTTGGTANTQTLGFSQGGPNTMANQAKNWLPGPCYRQQRVSTTTGQNNNSNFAWTAGTKYHLNGRNSLANPGIAMATHKDDKERFFPSNGILIFGKQNAARDNADYSDVMLTSEEEIKTTNPVATEEYGIVADNLQQQNTAPQIGTVNSQGALPGMVWQNRDVYLQGPIWAKIPHTDGNFHPSPLMGGFGLKHPPPQILIKNTPVPADPPTTFNQSKLNSFITQYSTGQVSVEIEWELQKENSKRWNPEIQYTSNYYKSTSVDFAVNTEGVYSEPHPIGTRYLTRPL

SEQ ID NO: 1079 - protein, 736 aa, Artificial Sequence
  source: /note="Description of Artificial Sequence: Synthetic polypeptide"
MAADGYLPDWLEDNLSEGIREWWDLKPGAPKPKANQQKQDDGRGLVLPGYKYLGPFNGLDRGEPVNAADAAALEHDKAYDQQLKAGDNPYLRYNHADAEFQERLQEDTSFGGNLGRAVFQAKKRVLEPLGLVEEGAKTAPGKKRPVEQSPQEPDSSSGIGKTGQQPAKKRLNFGQTGDSESVPDPQPLGEPPATPAAVGPTTMASGGGAPMADNNEGADGVGNASGNWHCDSTWLGDRVITTSTRTWALPTYNNHLYKQISSASTGASNDNHYFGYSTPWGYFDFNRFHCHFSPRDWQRLINNNWGFRPKRLNFKLFNIQVKEVTDNNGVKTIANNLTSTIQVFTDSEYQLPYVLGSAHQGCLPPFPADVFMIPQYGYLTLNNGSQAVGRSSFYCLEYFPSQMLRTGNNFQFTYTFEDVPFHSSYAHSQSLDRLMNPLIDQYLYYLSRTQTTGGTANTQTLGFSQGGPNTMANQAKNWLPGPCYRQQRVSTTTGQNNNSNFAWTAGTKYHLNGRNSLANPGIAMATHKDDKERFFPSNGILIFGKQNAARDNADYSDVMLTSEEEIKTTNPVATEEYGIVADNLQQQNTAPQIGTVNSQGALPGMVWQNRDVYLQGPIWAKIPHTDGNFHPSPLMGGFGLKHPPPQILIKNTPVPADPPTTFNQSKLNSFITQYSTGQVSVEIEWELQKENSKRWNPEIQYTSNYYKSTSVDFAVNTEGVYSEPHPIGTRYLTRPL

SEQ ID NO: 1080 - protein, 736 aa, Artificial Sequence
  source: /note="Description of Artificial Sequence: Synthetic polypeptide"
MAADGYLPDWLEDNLSEGIREWWDLKPGAPKPKANQQKQDDGRGLVLPGYKYLGPFNGLDKGEPVNAADAAALEHDKAYDQQLKAGDNPYLRYNHADAEFQERLQEDTSFGGNLGRAVFQAKKRVLEPLGLVEEGAKTAPGKKRPVEQSPQEPDSSSGIGKKGQQPARKRLNFGQTGDSESVPDPQPLGEPPAAPSGVGSLTMASGGGAPMADNNEGADGVGNASGNWHCDSTWLGDRVITTSTRTWALPTYNNHLYKQISSASTGASNDNHYFGYSTPWGYFDFNRFHCHFSPRDWQRLINNNWGFRPKRLNFKLFNIQVKEVTQNEGTKTIANNLTSTVQVFTDSDYQLPYVLGSAHQGCLPPFPADVFMIPQYGYLTLNNGSQAVGRSSFYCLEYFPSQMLRTGNNFQFTYTFEDVPFHSSYAHSQSLDRLMNPLIDQYLYYLSRTQTTGGTANTQTLGFSQGGPNTMANQAKNWLPGPCYRQQRVSTTTGQNNNSNFAWTAGTKYHLNGRNSLSNPGIAMATHKDDKERFFPSNGILIFGKQNAARDNADYSDVMLTSEEEIKTTNPVATEEYGIVADNLQQQNTAPQIGTVNSQGALPGMVWQNRDMYLQGPIWAKIPHTDGNFHPSPLMGGFGLKHPPPQILIKNTPVPADPPTTFNQSKLNSFITQYSTGQVSVEIEWELQKENSKRWNPEIQYTSNYYKSTSVDFAVNTEGVYSEPHPIGTRYLTRPL

SEQ ID NO: 1081 - protein, 736 aa, Artificial Sequence
  source: /note="Description of Artificial Sequence: Synthetic polypeptide"
MAADGYLPDWLEDNLSEGIREWWALKPGAPKPKANQQKQDDGRGLVLPGYKYLGPFNGLDKGEPVNAADAAALEHDKAYDQQLKAGDNPYLRYNHADAEFQERLQEDTSFGGNLGRAVFQAKKRVLEPFGLVEEGAKTAPGKKRPVEQSPQEPDSSSGIGKTGQQPAKKRLNFGQTGGSESVPDPQPLGEPPATPAAVGPTTMAAGGGAPMADNNEGADGVGSSSGNWHCDSTWLGDRVITTSTRTWALPTYNNHLYKQISSASTGASNDNHYFGYSTPWGYFDFNRFHCHFSPRDWQRLINNNWGFRPKRLNFKLFNIQVKEVTDNNGVKTIANNLTSTVQVFTDSEYQLPYVLGSAHQGCLPPFPADVFMIPQYGYLTLNNGSQAVGRSSFYCLEYFPSQMLRTGNNFTFSYTFEEVPFHSSYAHSQSLDRLMNPLIDQYLYYLSRTQTTGGTANTQTLGFSQGGPNTMANQAKNWLPGPCYRQQRVSTTTGQNNNSNFAWTAGTKYHLNGRNSLANPGIAMASHKDDKERFFPSNGILIFGKQNAARDNADYSDVMLTSEEEIKTTNPVATEEYGIVADNLQQQNTAPQIGTVNSQGALPGMVWQNRDVYLQGPIWAKIPHTDGNFHPSPLMGGFGLKHPPPQILIKNTPVPADPPTTFNQSKLNSFITQYSTGQVSVEIEWELQKENSKRWNPEIQYTSNYYKSTSVDFAVNTEGVYSEPHPIGTRYLTRPL

SEQ ID NO: 1082 - DNA, 2211 bp, Artificial Sequence
  source: /note="Description of Artificial Sequence: Synthetic polynucleotide"
atggctgccgatggttatcttccagattggctcgaggacaacctctctgagggcattcgcgagtggtgggacttgaaacctgcatccccgaaacccaaagccaaccagcaaaagcaggacgacggccggggtctggtgcttcctggctacaagtacctcggacccttcaacggactcgacaagggggagcccgtcaacgcggcggacgcagcggccctcgagcacgacaaggcctacgaccagcagctcaaagcgggtgacaatccgtacctgcggtataaccacgccgacgccgagtttcaggagcgtctgcaagaagatacgtcttttgggggcaacctcgggcgagcagtcttccaggccaaaaagaggcttcttgaacctcttggtctggttgaggaagcggctaagacggctcctggaaagaagaggcctgtagagcagtctcctcaggaaccggactcctccgcgggtattggcaaatcgggtgcacagcccgccaaaaagagactcaatttcggtcagactggcggcacagagtcagttccagaccctcaacctctcggagaacctccagcagcgccctctggtgtgggacctaatacaatggctgcaggcggtggcgcaccaatggcagacaataacgaaggcgccgacggagtgggtagttcctcgggaaattggcattgcgattccacatggctgggcgacagagtcatcaccaccagcaccagaacctgggccctgcccacttacaacaaccatctctacaagcaaatctccagtgcttcaacgggggccagcaacgacaaccactacttcggctacagcaccccctgggggtattttgatttcaacagattccactgccacttctcaccacgtgactggcagcgactcatcaacaacaactggggattccggcccaagagactcagcttcaagctcttcaacatccaggtcaaggaggtcacgcagaatgaaggcaccaagaccatcgccaataacctcaccagcaccatccaggtgtttacggactcggagtaccagctgccgtacgttctcggctctgcccaccagggctgcctgcctccgttcccggcggacgtgttcatgattccccagtacggatacctaacactcaacaacggtagtcaggccgtgggacgctcctccttctactgcctggaatactttccttcgcagatgctgagaaccggcaacaacttccagtttacttacaccttcgaggacgtgcctttccacagcagctacgcccacagccagagcttggaccggctgatgaatcctctgattgaccagtacctgtactacttgtctcggactcaaacaacaggaggcacggcaaatacgcagactctgggcttcagccaaggtgggcctaatacaatggccaatcaggcaaagaactggctgccaggaccctgttaccgccaacaacgcgtctcaacgacaaccgggcaaaacaacaatagcaactttgcctggactgctgggaccaaataccatctgaatggaagaaattcattggctaatcctggcatcgctatggcaacacacaaagacgacaaggagcgtttttttcccagtaacgggatcctgatttttggcaaacaaaatgctgccagagacaatgcggattacagcgatgtcatgctcaccagcgaggaagaaatcaaaaccactaaccctgtggctacagaggaatacggtatcgtggcagataacttgcagcagcaaaacacggctcctcaaattggaactgtcaacagccagggggccttacccggtatggtctggcagaaccgggacgtgtacctgcagggtcccatctgggccaagattcctcacacggacggcaacttccacccgtctccgctgatgggcggctttggcctgaaacatcctccgcctcagatcctgatcaagaacacgcctgtacctgcggatcctccgaccaccttcaaccagtcaaagctgaactctttcatcacgcaatacagcaccggacaggtcagcgtggaaattgaatgggagctgcagaaggaaaacagcaagcgctggaaccccgagatccagtacacctccaactactacaaatctacaagtgtggactttgctgttaatacagaaggcgtgtactctgaaccccaccccattggcacccgttacctcacccgtcccctgtaa

SEQ ID NO: 1083 - DNA, 2211 bp, Artificial Sequence
  source: /note="Description of Artificial Sequence: Synthetic polynucleotide"
atggctgccgatggttatcttccagattggctcgaggacaacctctctgagggcattcgcgagtggtgggacttgaaacctggagccccgaaacccaaagccaaccagcaaaagcaggacgacggccggggtctggtgcttcctggctacaagtacctcggacccttcaacggactcgacaagggggagcccgtcaacgcggcggacgcagcggccctcgagcacgacaaggcctacgaccagcagctcaaagcgggtgacaatccgtacctgcggtataaccacgccgacgccgagtttcaggagcgtctgcaagaagatacgtcttttgggggcaacctcgggcgagcagtcttccaggccaagaagagggttctcgaaccttttggtctggttgaggaaggcgctaagacggctcctggaaagaaacgtccggtagagcagtcgccacaagagccagactcctcctcgggcattggcaagacaggccagcagcccgctaaaaagagactcaattttggtcagactggcgactcagagtcagtccccgacccacaacctctcggagaacctccagcaacccccgctgctgtgggacctactacaatggcttcaggtggtggcgcaccaatggcagacaataacgaaggcgccgacggagtgggtaatgcctcaggaaattggcattgcgattcccaatggctgggggacagagtcatcaccaccagcacccgaacctgggccctgcccacctacaacaatcacctctacaagcaaatctccagtgcttcaacgggggccagcaacgacaaccactacttcggctacagcaccccctgggggtattttgatttcaacagattccactgccatttctcaccacgtgactggcagcgactcatcaacaacaattggggattccggcccaagagactcaacttcaaactcttcaacatccaagtcaaggaggtcacgcagaatgaaggcaccaagaccatcgccaataacctcaccagcaccatccaggtgtttacggactcggagtaccagctgccgtacgttctcggctccgcccaccagggctgcctgcctccgttcccggcggacgtgttcatgattccccagtacggctacctaacactcaacaacggtagtcaggccgtgggacgctcctccttctactgcctggaatactttccttcgcagatgctgagaaccggcaacaacttccagtttacttacaccttcgaggacgtgcctttccacagcagctacgcccacagccagagcttggaccggctgatgaatcctctgattgaccagtacctgtactacttgtctcggactcaaacaacaggaggcacggcaaatacgcagactctgggcttcagccaaggtgggcctaatacaatggccaatcaggcaaagaactggctgccaggaccctgttaccgccaacaacgcgtctcaacgacaaccgggcaaaacaacaatagcaactttgcctggactgctgggaccaaataccatctgaatggaagaaattcattggctaatcctggcatcgctatggcaacacacaaagacgacaaggagcgtttttttcccagtaacgggatcctgatttttggcaaacaaaatgctgccagagacaatgcggattacagcgatgtcatgctcaccagcgaggaagaaatcaaaaccactaaccctgtggctacagaggaatacggtatcgtggcagataacttgcagcagcaaaacacggctcctcaaattggaactgtcaacagccagggggccttacccggtatggtctggcagaaccgggacgtgtacctgcagggtcccatctgggccaagattcctcacacggacggcaacttccacccgtctccgctgatgggcggctttggcctgaaacatcctccgcctcagatcctgatcaagaacacgcctgtacctgcggatcctccgaccaccttcaaccagtcaaagctgaactctttcatcacgcaatacagcaccggacaggtcagcgtggaaattgaatgggagctgcagaaggaaaacagcaagcgctggaaccccgagatccagtacacctccaactactacaaatctacaagtgtggactttgctgttaatacagaaggcgtgtactctgaaccccaccccattggcacccgttacctcacccgtcccctgtaa

SEQ ID NO: 1084 - DNA, 2211 bp, Artificial Sequence
  source: /note="Description of Artificial Sequence: Synthetic polynucleotide"
atggctgccgatggttatcttccagattggctcgaggacaacctctctgagggcattcgcgagtggtgggacttggaacctggagccccgaagcccaaagccaaccagcaaaagcaggacgacggccggggtctggtgcttcctggctacaagtacctcggacccttcaacggactcgacaagggggagcccgtcaacgcggcggacgcagcggccctcgagcacgacaaggcctacgaccagcagctcaaagcgggtgacaatccgtacctgcggtataaccacgccgacgccgagtttcaggagcgtctgcaagaagatacgtcttttgggggcaacctcgggcgagcagtcttccaggccaagaagcgggttctcgaacctctcggtctggttgaggaaggcgctaagacggctcctggaaagaaacgtccggtagagcagtcgccacaagagccagactcctcctcgggcatcggcaagacaggccagcagcccgctaaaaagagactcaattttggtcagactggcgactcagagtcagtccccgatccacaacctctcggagaacctccagcaacccccgctgctgtgggacctactacaatggcttcaggcggtggcgcaccaatggcagacaataacgaaggcgccgacggagtgggtaatgcctcaggaaattggcattgcgattccacatggctgggcgacagagtcatcaccaccagcacccgcacctgggccttgcccacctacaataaccacctctacaagcaaatctccagtgcttcaacaggggccagcaacgacaaccactacttcggctacagcaccccctgggggtattttgacttcaacagattccactgccacttctcaccacgtgactggcagcgactcatcaacaacaactggggattccggcctaagcgactcaacttcaagctcttcaacattcaggtcaaagaggttacggacaacaatggagtcaagaccatcgccaataaccttaccagcacggtccaggtcttcacggactcggagtaccagttgccgtacgtcctcggctctgcgcaccagggctgcctccctccgttcccggcggacgtgttcatgattccgcagtacggctacctaacgctcaacaacggtagtcaggccgtgggacgctcctccttctactgcctggaatactttccttcgcagatgctgagaaccggcaacaacttccagtttacttacaccttcgaggacgtgcctttccacagcagctacgcccacagccagagcttggaccggctgatgaatcctctgattgaccagtacctgtactacttgtctcggactcaaacaacaggaggcacggcaaatacgcagactctgggcttcagccaaggtgggcctaatacaatggccaatcaggcaaagaactggctgccaggaccctgttaccgccaacaacgcgtctcaacgacaaccgggcaaaacaacaatagcaactttgcctggactgctgggaccaaataccatctgaatggaagaaattcattggctaatcctggcatcgctatggcaacacacaaagacgacaaggagcgtttttttcccagtaacgggatcctgatttttggcaaacaaaatgctgccagagacaatgcggattacagcgatgtcatgctcaccagcgaggaagaaatcaaaaccactaaccctgtggctacagaggaatacggtatcgtggcagataacttgcagcagcaaaacacggctcctcaaattggaactgtcaacagccagggggccttacccggtatggtctggcagaaccgggacgtgtacctgcagggtcccatctgggccaagattcctcacacggacggcaacttccacccgtctccgctgatgggcggctttggcctgaaacatcctccgcctcagatcctgatcaagaacacgcctgtacctgcggatcctccgaccaccttcaaccagtcaaagctgaactctttcatcacgcaatacagcaccggacaggtcagcgtggaaattgaatgggagctgcagaaggaaaacagcaagcgctggaaccccgagatccagtacacctccaactactacaaatctacaagtgtggactttgctgttaatacagaaggcgtgtactctgaaccccaccccattggcacccgttacctcacccgtcccctgtaa

SEQ ID NO: 1085 - DNA, 2211 bp, Artificial Sequence
  source: /note="Description of Artificial Sequence: Synthetic polynucleotide"
atggctgccgatggttatcttccagattggctcgaggacactctctctgaaggaataagacagtggtggaagctcaaacctggcccaccaccaccaaagcccgcagagcggcataaggacgacagcaggggtcttgtgcttcctgggtacaagtacctcggacccttcaacggactcgacaagggagagccggtcaacgaggcagacgccgcggccctcgagcacgacaaagcctacgaccggcagctcgacagcggagacaacccgtacctcaagtacaaccacgccgacgcggagtttcaggagcgccttaaagaagatacgtcttttgggggcaacctcgggcgagcagtcttccaggccaagaagagggttctcgaaccttttggtctggttgaggaaggtgctaagacggctcctggaaagaaacgtccggtagagcagtcgccacaagagccagactcctcctcgggcattggcaagacaggccagcagcccgctaaaaagagactcaattttggtcagactggcgactcagagtcagtccccgacccacaacctctcggagaacctccagcaacccccgctgctgtgggacctactacaatggcttcaggcggtggcgcaccaatggcagacaataacgaaggcgccgacggagtgggtaatgcctcaggaaattggcattgcgattccacatggctgggcgacagagtcatcaccaccagcacccgaacatgggccttgcccacctataacaaccacctctacaagcaaatctccagtgcttcaacgggggccagcaacgacaaccactacttcggctacagcaccccctgggggtattttgacttcaacagattccactgccacttctcaccacgtgactggcagcgactcatcaacaacaactggggattccggcctaagcgactcaacttcaagctcttcaacattcaggtcaaagaggttacggacaacaatggagtcaagaccatcgccaataaccttaccagcacggtccaggtcttcacggactcagactatcagctcccgtacgtgctcgggtcggctcacgagggctgcctcccgccgttcccagcggacgttttcatgattcctcagtacggctacctaacactcaacaacggtagtcaggccgtgggacgctcctccttctactgcctggaatactttccttcgcagatgctgagaaccggcaacaacttccagtttacttacaccttcgaggacgtgcctttccacagcagctacgcgcacagccagagtctggaccggctgatgaatcctctgattgaccagtacctgtactacttgtctcggactcaaacaacaggaggcacggcaaatacgcagactctgggcttcagccaaggtgggcctaatacaatggccaatcaggcaaagaactggctgccaggaccctgttaccgccaacaacgcgtctcaacgacaaccgggcaaaacaacaatagcaactttgcctggactgctgggaccaaataccatctgaatggaagaaattcattggctaatcctggcatcgctatggcaacacacaaagacgacaaggagcgtttttttcccagtaacgggatcctgattttcggcaaacaaaatgctgccagagacaatgcggattacagcgatgtcatgctcaccagcgaggaagaaatcaaaaccactaaccctgtggctacagaggaatacggtatcgtggcagataacttgcagcagcaaaacacggctcctcaaattggaactgtcaacagccagggggccttacccggtatggtctggcagaaccgggacgtgtacctgcagggtcccatctgggccaagattcctcacacggacggcaacttccacccgtctccgctgatgggcggctttggcctgaaacatcctccgcctcagatcctgatcaagaacacgcctgtacctgcggatcctccgaccaccttcaaccagtcaaagctgaactctttcatcacgcaatacagcaccggacaggtcagcgtggaaattgaatgggagctgcagaaggaaaacagcaagcgctggaaccccgagatccagtacacctccaactactacaaatctacaagtgtggactttgctgttaatacagaaggcgtgtactctgaaccccaccccattggcaccagatacctgactcgtaatctgtaa

SEQ ID NO: 1086 - DNA, 2208 bp, Artificial Sequence
  source: /note="Description of Artificial Sequence: Synthetic polynucleotide"
atggctgccgatggttatcttccagattggctcgaggacactctctctgaaggaataagacagtggtggaagctcaaacctggcccaccaccaccaaagcccgcagagcggcataaggacgacagcaggggtcttgtgcttcctgggtacaagtacctcggacccttcaacggactcgacaagggagagccggtcaacgaggcagacgccgcggccctcgagcacgacaaagcctacgaccggcagctcgacagcggagacaacccgtacctcaagtacaaccacgccgacgcggagtttcaggagcgccttaaagaagatacgtcttttgggggcaacctcggacgagcagtcttccaggcgaaaaagagggttcttgaacctctgggcctggttgaggaacctgttaagacggctccgggaaaaaagaggccggtagagcagtcgccacaagagccagactcctcctcgggcatcggcaagaaaggccagcagcccgctaaaaagagactcaattttggtcagactggcgactcagagtcagtccccgacccacaacctctcggagaacctccagcaacccccgctgctgtgggacctactacaatggcttcaggcggtggcgcaccaatggcggacaataacgaaggcgccgatggagtgggtaatgcctcaggaaattggcattgcgattccacatggctgggcgacagagtcatcaccaccagcacccgaacatgggccttgcccacctataacaaccacctctacaagcaaatctccagtgcttcaacgggggccagcaacgacaaccactacttcggctacagcaccccctgggggtattttgacttcaacagattccactgccacttctcaccacgtgactggcagcgactcatcaacaacaactggggattccggcctaagcgactcaacttcaagctcttcaacattcaggtcaaagaggttacggacaacaatggagtcaagaccatcgccaataaccttaccagcacggtccaggtcttcacggactcagactatcagctcccgtacgttctcggctctgcccaccagggctgcctgcctccgttcccggcggacgtgttcatgattccccagtacggctacctaacactcaacaacggtagtcaggccgtgggacgctcctccttctactgcctggaatactttccttcgcagatgctgagaaccggcaacaacttccagtttacttacaccttcgaggacgtgcctttccacagcagctacgcccacagccagagcttggaccggctgatgaatcctctgattgaccagtacctgtactacttgtctcggactcaaacaacaggaggcacggcaaatacgcagactctgggcttcagccaaggtgggcctaatacaatggccaatcaggcaaagaactggctgccaggaccctgttaccgccaacaacgcgtctcaacgacaaccgggcaaaacaacaatagcaactttgcctggactgctgggaccaaataccatctgaatggaagaaattcattggctaatcctggcatcgctatggcaacacacaaagacgacaaggagcgtttttttcccagtaacgggatcctgatttttggcaaacaaaatgctgccagagacaatgcggattacagcgatgtcatgctcaccagcgaggaagaaatcaaaaccactaaccctgtggctacagaggaatacggtatcgtggcagataacttgcagcagcaaaacacggctcctcaaattggaactgtcaacagccagggggccttacccggtatggtctggcagaaccgggacgtgtacctgcagggtcccatctgggccaagattcctcacacggacggcaacttccacccgtctccgctgatgggcggctttggcctgaaacatcctccgcctcagatcctgatcaagaacacgcctgtacctgcggatcctccgaccaccttcaaccagtcaaagctgaactctttcatcacgcaatacagcaccggacaggtcagcgtggaaattgaatgggagctgcagaaggaaaacagcaagcgctggaaccccgagatccagtacacctccaactactacaaatctacaagtgtggactttgctgttaatacagaaggcgtgtactctgaaccccaccccattggcacccgttacctcacccgtcccctg

SEQ ID NO: 1087 - DNA, 2211 bp, Artificial Sequence
  source: /note="Description of Artificial Sequence: Synthetic polynucleotide"
atggctgccgatggttatcttccagattggctcgaggacactctctctgaaggaataagacagtggtggaagctcaaacctggcccaccaccaccaaagcccgcagagcggcataaggacgacagcaggggtcttgtgcttcctgggtacaagtacctcggacccttcaacggactcgacaagggagagccggtcaacgaggcagacgccgcggccctcgagcacgacaaagcctacgaccagcagctccaagcgggtgacaatccgtacctgcggtataaccacgccgacgccgagtttcaggagcgtcttcaaggagatacgtcttttgggggcaacctcggacgagcagtcttccaggccaaaaagaggcttcttgaacctcttggtctggttgaggaagcggctaagacggctcctggaaagaagaggcctgtagagcagtctcctcaggaaccggactcctccgcgggtattggcaaatcgggtgcacagcccgctaaaaagagactcaatttcggtcagactggcgacacagagtcagtcccagaccctcaaccaatcggagaacctcccgcagccccctcaggtgtgggatctcttacaatggcttcaggtggtggcgcaccagtggcagacaataacgaaggtgccgatggagtgggtagttcctcgggaaattggcattgcgattcccaatggctgggggacagagtcatcaccaccagcacccgaacatgggccttgcccacctataacaaccacctctacaagcaaatctccagtgcttcaacgggggccagcaacgacaaccactacttcggctacagcaccccctgggggtattttgacttcaaccgcttccactgccacttctcaccacgtgactggcagcgactcatcaacaacaactggggattccggcccaagagactcagcttcaagctcttcaaccatccaggtcaaggaggtcacgcagaatgaaggcaccaagaccatcgccaataacctcaccagcacatccaggtgtttacggactcggagtaccagctgccgtacgttctcggctctgcccaccagggctgcctgcctccgttcccggcggacgtgttcatgattccccagtacggctacctaacactcaacaacggtagtcaggccgtgggacgctcctccttctactgcctggaatactttccttcgcagatgctgagaaccggcaacaacttccagttcacttacaccttcgaggacgtgcctttccacagcagctacgcgcacagccagagcttggaccggctgatgaatcctctgattgaccagtacctgtactacttgtctcggactcaaacaacaggaggcacggcaaatacgcagactctgggcttcagccaaggtgggcctaatacaatggccaatcaggcaaagaactggctgccaggaccctgttaccgccaacaacgcgtctcaacgacaaccgggcaaaacaacaatagcaactttgcctggactgctgggaccaaataccatctgaatggaagaaattcattgggtaatcctggcatcgctatggcaacacacaaagacgacaaggagcgtttttttcccagtaacgggatcctgatttttggcaaacaaaatgctgccagagacaatgcggattacagcgatgtcatgctcaccagcgaggaagaaatcaaaaccactaaccctgtggctacagaggaatacggtatcgtggcagataacttgcagcagcaaaacacggctcctcaaattggaactgtcaacagccagggggccttacccggtatggtctggcagaaccgggacgtgtacctgcagggtcccatctgggccaagattcctcacacggacggcaacttccacccgtctccgctgatgggcggctttggcctgaaacatcctccgcctcagatcctcatcaaaaacacacctgtacctgcggatcctccaacggccttcaaccagtcaaagctgaactctttcatcacgcaatacagcaccggacaggtcagcgtggaaattgaatgggagctgcagaaggaaaacagcaagcgctggaaccccgagatccagtacacctccaactactacaaatctacaagtgtggactttgctgttaatacagaaggcgtgtactctgaaccccaccccattggcacccgttacctcacccgtcccctgtaa

SEQ ID NO: 1088 - DNA, 2214 bp, Artificial Sequence
  source: /note="Description of Artificial Sequence: Synthetic polynucleotide"
atggctgccgatggttatcttccagattggctcgaggacaacctctctgagggcattcgcgagtggtgggacttgaaacatggagccccgaaacccaaagccaaccagcaaaagcaggacgacggccggggtctggtgcttcctggctacaagtacctcggacccttcaacggactcgacaagggggagcccgtcaacgcggcggatgcagcggccctcgagcacgacaaggcctacgaccagcagctcaaagcgggtgacaatccgtacctgcggtataaccacgccgacgccgagtttcaggagcgtctgcaagaagatacgtcttttgggggcaacctcgggcgagcagtcttccaggccaagaagagggttctcgaaccttttggtctggttgaggaaggtgctaagacggctcctggaaagaaacgtccggtagagcagtcgccacaagagccagactcctcctcgggcattggcaagacaggccagcagcccgctaaaaagagactcaattttggtcagactggcgactcagagtcagtccccgacccacaacctctcggagaacctccagcaacccccgctgctgtgggacctactacaatggcttcaggcggtggcgcaccaatggcagacaataacgaaggcgccgacggagtgggtaatgcctcaggaaattggcattgcgattccacatggctgggcgacagagtcatcaccaccagcacccgaacatgggccttgcccacctataacaaccacctctacaagcaaatctccaacgggacttcgggaggaagcaccaacgacaacacctacttcggctacagcaccccctgggggtattttgactttaacagattccactgccacttctcaccacgtgactggcagcgactcatcaacaacaactggggattccggcccaagagactcaacttcaaactcttcaacatccaagtcaaggaggtcacgcagaatgaaggcaccaagaccatcgccaataacctcaccagcaccatccaggtgtttacggactcggagtaccagctgccgtacgttctcggctccgcccaccagggctgcctgcctccgttcccggcggacgtgttcatgattccccagtacggctacctaacactcaacaacggtagtcaggccgtgggacgctcctccttctactgcctggaatactttccttcgcagatgctgagaacgggcaacaactttaccttcagctacacctttgaggacgttcctttccacagcagctacgctcacagccagagtctggaccgtctcatgaatcctctgattgaccagtacctgtactacttgtctcggactcaaacaacaggaggcacggcaaatacgcagactctgggcttcagccaaggtgggcctaatacaatggccaatcaggcaaagaactggctgccaggaccctgttaccgccaacaacgcgtctcaacgacaaccgggcaaaacaacaatagcaactttgcctggactgctgggaccaaataccatctgaatggaagaaattcattggctaatcctggcatcgctatggcaacacacaaagacgacaaggagcgtttttttcccagtaacgggatcctgatttttggcaaacaaaatgctgccagagacaatgcggattacagcgatgtcatgctcaccagcgaggaagaaatcaaaaccactaaccctgtggctacagaggaatacggtatcgtggcagataacttgcagcagcaaaacacggctcctcaaattggaactgtcaacagccagggggccttacccggtatggtctggcagaaccgggacgtgtacctgcagggtcccatctgggccaagattcctcacacggacggcaacttccacccgtctccgctgatgggcggctttggcctgaaacatcctccgcctcagatcctgatcaagaacacgcctgtacctgcggatcctccgaccaccttcaaccagtcaaagctgaactctttcatcacgcaatacagcaccggacaggtcagcgtggaaattgaatgggagctgcagaaggaaaacagcaagcgctggaaccccgagatccagtacacctccaactactacaaatctacaagtgtggactttgctgttaatacagaaggcgtgtactctgatccccaccccattggcacccgttacctcacccgtcccctgtaa

SEQ ID NO: 1089 - DNA, 2214 bp, Artificial Sequence
  source: /note="Description of Artificial Sequence: Synthetic polynucleotide"
atggctgccgatggttatcttccagattggctcgaggacaacctctctgagggcattcgcgagtggtgggcgctgaaacctggagccccgaagcccaaagccaaccagcaaaagcaggacgacggccggggtctggtgcttcctggctacaagtacctcggacccttcaacggactcgacaaaggagagccggtcaacgaggcggacgcggcagccctcgaacacgacaaggcctacgaccagcagctcaaagcgggtgacaatccgtacctgcggtataaccacgccgacgccgagtttcaggagcgtctgcaagaagatacgtcttttgggggcaacctcgggcgagcagtcttccaggccaagaagcgggttctcgaacctctcggtctggttgaggaaggcgctaagacggctcctggaaagaagagaccggtagagccatcaccccagcgttctccagactcctctacgggcatcggcaagaaaggccagcagcccgccagaaaaagactcaattttggtcagactggcgactcagagtcagttccagaccctcaacctctcggagaacctccagcagcgccctctggtgtgggacctaatacaatggcttcaggcggtggcgcaccaatggcagacaataacgagggcgccgacggagtgggtaattcctcgggaaattggcattgcgattccacatggatgggcgacagagtcatcaccaccagcacccgaacctgggccctgcccacctacaacaaccacctctacaagcaaatctccagtgcttcaacgggggccagcaacgacaaccactacttcggctacagcaccccctgggggtattttgactttaacagattccactgccacttttcaccacgtgactggcagcgactcatcaacaacaactggggattccggcccaagagactcaacttcaagctcttcaacatccaagtcaaggaggtcacgcagaatgaaggcaccaagaccatcgccaataacctcaccagcaccatccaggtgtttacggactcggagtaccagctgccgtacgttctcggctctgcccaccagggctgcctgcctccgttcccggcggacgtgttcatgattccccagtacggctacctaacactcaacaacggtagtcaggccgtgggacgctcctccttctactgcctggaatactttccttcgcagatgctgagaaccggcaacaacttccagtttacttacaccttcgaggacgtgcctttccacagcagctacgcgcacagccagagcttggaccggctgatgaatcctctgattgaccagtacctgtactacttgtctcggactcaaacaacaggaggcacggcaaatacgcagactctgggcttcagccaaggtgggcctaatacaatggccaatcaggcaaagaactggctgccaggaccctgttaccgccaacaacgcgtctcaacgacaaccgggcaaaacaacaatagcaactttgcctggactgctgggaccaaataccatctgaatggaagaaattcattggctaatcctggcatcgctatggcaacacacaaagacgacaaggagcgtttttttcccagtaacgggatcctgatttttggcaaacaaaatgctgccagagacaatgcggattacagcgatgtcatgctcaccagcgaggaagaaatcaaaaccactaaccctgtggctacagaggaatacggtatcgtggcagataacttgcagcagcaaaacacggctcctcaaattggaactgtcaacagccagggggccttacccggtatggtctggcagaaccgggacgtgtacctgcagggtcccatctgggccaagattcctcacacggacggcaacttccacccgtctccgctgatgggcggctttggcctgaaacatcctccgcctcagatcctgatcaagaacacgcctgtacctgcggatcctccgaccaccttcaaccagtcaaagctgaactctttcatcacacaatacagcaccggacaggtcagcgtggaaattgaatgggagctgcagaaggaaaacagcaagcgctggaaccccgagatccagtacacctccaactactacaaatctacaagtgtggactttgctgttaatacagaaggcgtgtactctgaaccccaccccattggcacccgttacctcacccgtcccctgtaa

SEQ ID NO: 1090 - DNA, 2211 bp, Artificial Sequence
  source: /note="Description of Artificial Sequence: Synthetic polynucleotide"
  modified_base (676)..(676): a, c, t, g, unknown or other
atggctgccgatggttatcttccagattggctcgaggacactctctctgaaggaataagacagtggtggaagctcaaacctggcccaccaccaccaaagcccgcagagcggcataaggacgacagcaggggtcttgtgcttcctgggtacaagtacctcggacccttcaacggactcgacaagggagagccggtcaacgaggcagacgccgcggccctcgagcacgacaaagcctacgaccggcagctcgacagcggagacaacccgtacctcaagtacaaccacgccgacgcggagtttcaggagcgccttaaagaagatacgtcttttgggggcaacctcggacgagcagtcttccaggcgaaaaagagggttcttgaacctctgggcctggttgaggaacctgttaagacggctccgggaaaaaagaggccggtagagcagtcgccacaagagccagactcctcctcgggcatcggcaagaaaggccagcagcccgctaaaaagagactcaattttggtcagactggcgactcagagtcagtccccgacccacaacctctcggagaacctccagcaacccccgctgctgtgggacctactacaatggcttcaggcggtggcgcaccaatggcggacaataacgaaggcgccgatggagtgggtaatgcctcangaaattggcattgcgattccacatggctgggcgacagagtcatcaccaccagcacccgaacatgggccttgccacctataacaaccacctctacaagcaaatctccagtgcttcaacgggggcgcagcaacgacaaccactacttcggctacagcaccccctgggggtattttgacttcaacagattccactgccacttctcaccacgtgactggcagcgactcatcaacaacaactggggattccggcctaagcgactcaacttcaagctcttcaacattcaggtcaaagaggttacggacaacaatggagtcaagaccatcgccaataaccttaccagcacggtccaggtcttcacggactcagactatcagctcccgtacgttctcggctctgcccaccagggctgcctgcctccgttcccggcggacgtgttcatgattccccagtacggctacctaacactcaacaacggtagtcaggccgtgggacgctcctccttctactgcctggaatactttccttcgcagatgctgagaaccggcaacaacttccagtttacttacaccttcgaggacgtgcctttccacagcagctacgcccacagccagagcttggaccggctgatgaatcctctgattgaccagtacctgtactacttgtctcggactcaaacaacaggaggcacggcaaatacgcagactctgggcttcagccaaggtgggcctaatacaatggccaatcaggcaaagaactggctgccaggaccctgttaccgccaacaacgcgtctcaacgacaaccgggcaaaacaacaatagcaactttgcctggactgctgggaccaaataccatctgaatggaagaaattcattggctaatcctggcatcgctatggcaacacacaaagacgacaaggagcgtttttttcccagtaacgggatcctgatttttggcaaacaaaatgctgccagagacaatgcggattacagcgatgtcatgctcaccagcgaggaagaaatcaaaaccactaaccctgtggctacagaggaatacggtatcgtggcagataacttgcagcagcaaaacacggctcctcaaattggaactgtcaacagccagggggccttacccggtatggtttggcagaaccgggacgtgtacctgcagggtcccatctgggccaagattcctcacacggacggcaacttccacccgtctccgctgatgggcggctttggcctgaaacatcctccgcctcagatcctgatcaagaacacgcctgtacctgcggatcctccgaccaccttcaaccagtcaaagctgaactctttcatcacacagtactccacgggacaggtcagcgtggaaattgaatgggagctgcagaaggaaaacagcaagcgctggaacccggagatccagtacacttccaactactacaaatctacaaatgtggactttgctgttaacacagaaggcgtgtactctgaaccccaccccattggcacccgttacctcacccgtcccctgtaa

SEQ ID NO: 1091 - DNA, 2211 bp, Artificial Sequence
  source: /note="Description of Artificial Sequence: Synthetic polynucleotide"
  modified_base (715)..(715): a, c, t, g, unknown or other
atggctgccgatggttatcttccagattggctcgaggacaacctctctgagggcattcgcgagtggtgggacttgaaacctggagccccgaaacccaaagccaaccagcaaaagcaggacgacggccggggtctggtgcttcctggctacaagtacctcggacccttcaacggactcgacaagggggagcccgtcaacgcggcggatgcagcggccctcgagcacgacaaggcctacgaccagcagctccaagcgggtgacaatccgtacctgcggtataaccacgccgacgccgagtttcaggagcgtcttcaaggagatacgtcttttgggggcaacctcggacgagcagtcttccaggccaagaagcgggttctcgaacctctcggtctggttgaggaagcggctaagacggctcctggaaagaagaggcctgtagagcagtctcctcaggaaccggactcctccgcgggtattggcaaatcgggtgcacagcccgctaaaaagagactcaatttcggtcagactggcgacacagagtcagtcccagaccctcaaccaatcggagaacctcccgcagccccctctggtgtgggacctaatacaatggctgcaggcggtggcgcaccaatggcagacaataacgaaggcgccgatggagtgggtagttcctcgggaaattggcattgcgattccacatggctgggcgacagantcatcaccaccagcacccgaacctgggccctgcccacctataacaaccatctctacaagcaaatctccagtgcttcaacgggggccagcaacgacaaccactacttcggctacagcaccccctgggggtattttgacttcaacagattccactgccacttctcaccacgtgactggcagcgactcatcaacaacaactggggattccggcctaagcgactcaacttcaagctcttcaacattcaggtcaaagaggttacggacaacaatggagtcaagaccatcgccaataaccttaccagcacggtccaggtcttcacggactcggagtaccagttgccgtacgtcctcggctctgcgcaccagggctgcctgcctccgttcccggcggacgtgttcatgattccgcagtacggctacctaacgctcaacaatggcagccaggcagtgggacggtcatccttttactgcctggaatatttcccatcgcagatgctgagaacgggcaacaactttaccttcagctacacttttgaggacgttcctttccacagcagctacgctcacagccagagtctggaccgtctcatgaatcctctgattgaccagtacctgtactacttgtctcggactcaaacaacaggaggcacggcaaatacgcagactctgggcttcagccaaggtgggcctaatacaatggccaatcaggcaaagaactggctgccaggaccctgttaccgccaacaacgcgtctcaacgacaaccggacaaaacaacaatagcaactttgcctggactgctgggaccaaataccatctgaatggaagaaattcattggctaatcctggcatcgctatggcaacacacaaagacgacaaggagcgtttttttcccagtaacgggatcctgatttttggcaaacaaaatgctgccagagacaatgcggattacagcgatgtcatgctcaccagcgaggaagaaatcaaaaccactaaccctgtggctacagaggaatacggtatcgtggcagataactttcagcagcaaaacacggctcctcaaattggaactgtcaacagccagggggccttacccggtatggtctggcagaaccgggacgtgtacctgcagggtcccatctgggccaagattcctcacacggacggcaacttccacccgtctccgctgatgggcggctttggcctgaaacatcctccgcctcagatcctgatcaagaacacgcctgtacctgcggatcctccgaccaccttcaaccagtcaaagctgaactctttcatcacgcaatacagcaccggacaggtcagcgtggaaattgaatgggagctgcagaaggaaaacagcaagcgctggaaccccgagatccagtacacctccaactactacaaatctacaagtgtggactttgctgttaatacagaaggcgtgtactctgaaccccaccccattggcacccgttacctcacccgtcccctgtaa

SEQ ID NO: 1092 - DNA, 2211 bp, Artificial Sequence
  source: /note="Description of Artificial Sequence: Synthetic polynucleotide"
atggctgccgatggttatcttccagattggctcgaggacaacctctctgagggcattcgcgagtggtgggcgctgaaacctggagccccgaagcccaaagccaaccagcaaaagcaggacgacggccggggtctggtgcttcctggctacaagtacctcggacccttcaacggactcgacaaaggagagccggtcaacgaggcggacgcggcagccctcgaacacgacaaagcttacgaccagcagctcaaggccggtgacaacccctacctcaagtataaccacgccgacgccgagtttcaggagcgtctgcaagaagatacgtcttttgggggcaacctcgggcgagcagtcttccaggccaaaaagaggcttcttgaacctcttggtctggttgaggaagcggctaagacggctcctggaaagaagaggcctgtagagcagtctcctcaggaaccggactcctccgcgggtattggcaaatcgggtgcacagcccgctaaaaagagactcaatttcggtcagactggcgacacagagtcagtcccagacccacaacctctcggagaacctccagcaacccccgctgctgtgggacctactacaatggcttcaggcggtggcgcaccaatggcggacaataacgaaggcgccgatggagtgggtaatgcctcaggaaattggcattgcgattccacatggctgggcgacagagtcatcaccaccagcacccgaacatgggccttgcccacctataacaaccacctctacaagcaaatctccagtgcttcaacgggggccagcaacgacaaccactacttcggctacagcaccccctgggggtattttgacttcaacagattccactgccacttctcaccacgtgactggcagcgactcatcaacaacaactggggattccggcccaagagactcagcttcaagctcttcaacatccaggtcaaggaggtcacgcagaatgaaggcaccaagaccatcgccaataacctcaccagcaccatccaggtgtttacggactcggagtaccagctgccgtacgttctcggctccgcccaccagggctgcctgcctccgttcccggcggacgtgttcatgattccccagtacggctacctaacactcaacaacggtagtcaggccgtgggacgctcctccttctactgcctggaatactttccttcgcagatgctgagaaccggcaacaacttccagtttacttacaccttcgaggacgtgcctttccacagcagctacgcccacagccagagcttggaccggctgatgaatcctctgattgaccagtacctgtactacttgtctcggactcaaacaacaggaggcacggcaaatacgcagactctgggcttcagccaaggtgggcctaatacaatggccaatcaggcaaagaactggctgccaggaccctgttaccgccaacaacgcgtctcaacgacaaccgggcaaaacaacaatagcaactttgcctggactgctgggaccaaataccatctgaatggaagaaattcattggctaatcctggcatcgctatggcaacacacaaagacgacaaggagcgtttttttcccagtaacgggatcctgatttttggcaaacaaaatgctgccagagacaatgcggattacagcgatgtcatgctcaccagcgaggaagaaatcaaaaccactaaccctgtggctacagaggaatacggtatcgtggcagataacttgcagcagcaaaacacggctcctcaaattggaactgtcaacagccagggggccttacccggtatggtctggcagaaccgggacgtgtacctgcagggtcccatctgggccaagattcctcacacggacggcaacttccacccgtctccgctgatgggcggctttggcctgaaacatcctccgcctcagatcctgatcaagaacacgcctgtacctgcggatcctccgaccaccttcaaccagtcaaagctgaactctttcatcacgcaatacagcaccggacaggtcagcgtggaaattgaatgggagctgcagaaggaaaacagcaagcgctggaaccccgagatccagtacacctccaactactacaaatctacaagtgtggactttgctgttaatacagaaggcgtgtactctgaaccccaccccattggcacccgttacctcacccgtcccctgtaa

SEQ ID NO: 1093 - DNA, 2211 bp, Artificial Sequence
  source: /note="Description of Artificial Sequence: Synthetic polynucleotide"
atggctgccgatggttatcttccagattggctcgaggacactctctctgaaggaataagacagtggtggaagctcaaacctggcccaccaccaccaaagcccgcagagcggcataaggacgacagcaggggtcttgtgcttcctgggtacaagtacctcggacccttcaacggactcgacaagggagagccggtcaacgaggcagacgccgcggccctcgagcacgacaaagcctacgaccagcagctccaagcgggtgacaatccgtacctgcggtataaccacgccgacgccgagtttcaggagcgtcttcaaggagatacgtcttttgggggcaacctcggacgagcagtcttccaggccaaaaagaggcttcttgaacctcttggtctggttgaggaagcggctaagacggctcctggaaagaagaggcctgtagagcagtctcctcaggaaccggactcctccgcgggtattggcaaatcgggtgcacagcccgctaaaaagagactcaatttcggtcagactggcgacacagagtcagtcccagaccctcaaccaatcggagaacctcccgcagccccctcaggtgtgggatctcttacaatggcttcaggtggtggcgcaccagtggcagacaataacgaaggtgccgatggagtgggtagttcctcgggaaattggcattgcgattcccaatggctgggggacagagtcatcaccaccagcacccgaacatgggccttgcccacctataacaaccacctctacaagcaaatctccagtgcttcaacgggggccagcaacgacaaccactacttcggctacagcaccccctgggggtattttgacttcaaccgcttccactgccacttctcaccacgtgactggcagcgactcatcaacaacaactggggattccggcccaagagactcagcttcaagctcttcaacatccaggtcaaggaggtcacgcagaatgaaggcaccaagaccatcgccaataacctcaccagcaccatccaggtgtttacggactcggagtaccagctgccgtacgttctcggctctgcccaccagggctgcctgcctccgttcccggcggacgtgttcatgattccccagtacggctacctaacactcaacaacggtagtcaggccgtgggacgctcctccttctactgcctggaatactttccttcgcagatgctgagaaccggcaacaacttccagtttacttacaccttcgaggacgtgcctttccacagcagctacgcccacagccagagcttggaccggctgatgaatcctctgattgaccagtacctgtactacttgtctcggactcaaacaacaggaggcacggcaaatacgcagactctgggcttcagccaaggtgggcctaatacaatggccaatcaggcaaagaactggctgccaggaccctgttaccgccaacaacgcgtctcaacgacaaccgggcaaaacaacaatagcaactttgcctggactgctgggaccaaataccatctgaatggaagaaattcattggctaatcctggcatcgctatggcaacacacaaagacgacaaggagcgtttttttcccagtaacgggatcctgatttttggcaaacaaaatgctgccagagacaatgcggattacagcgatgtcatgctcaccagcgaggaagaaatcaaaaccactaaccctgtggctacagaggaatacggtatcgtggcagataacttgcagcagcaaaacacggctcctcaaattggaactgtcaacagccagggggccttacccggtatggtctggcagaaccgggacgtgtacctgcagggtcccatctgggccaagattcctcacacggacggcaacttccacccgtctccgctgatgggcggctttggcctgaaacatcctccgcctcagatcctgatcaagaacacgcctgtacctgcggatcctccgaccaccttcaaccagtcaaagctgaactctttcatcacgcaatacagcaccggacaggtcagcgtggaaattgaatgggagctgcagaaggaaaacagcaagcgctggaaccccgagatccagtacacctccaactactacaaatctacaagtgtggactttgctgttaatacagaaggcgtgtactctgaaccccaccccattggcacccgttacctcacccgtcccctgtaa

SEQ ID NO: 1094 - DNA, 2217 bp, Artificial Sequence
  source: /note="Description of Artificial Sequence: Synthetic polynucleotide"
atggctgccgatggttatcttccagattggctcgaggacaacctctctgagggaataagacagtggtggaagctcaaacctggcccaccaccaccaaagcccgcagagcggcataaggacgacagcaggggtcttgtgcttcctgggtacaagtacctcggacccttcaacggactcgacaagggagagccggtcaacgcggcggacgcagcggccctcgagcacgacaaggcctacgaccagcagctcaaagcgggtgacaatccgtacctgcggtataaccacgccgacgccgagtttcaggagcgtctgcaagaagatacgtcttttgggggcaacctcgggcgagcagtcttccaggccaagaagcgggttctcgaacctctcggtctggttgaggaaggcgctaagacggctcctggaaagaagagaccggtagagccatcaccccagcgttctccagactcctctacgggcatcggcaagaaaggccagcagcccgctaaaaagagactcaattttggtcagactggcgactcagagtcagtccccgacccacaacctctcggagaacctccagcaacccccgctgctgtgggacctactacaatggcttcaggcggtggcgcaccaatggcagacaataacgaaggcgccgacggagtgggtaatgcctcaggaaattggcattgcgattccacatggctgggggacagagtcatcaccaccagcacccgaacctgggccctgcccacctacaacaaccacctctacaagcaaatctccaacgggacttcgggaggaagcaccaacgacaacacctacttcggctgcgtcacgccctgggggtattttgactttaacaaattccactgccacttttcaccggatgactggcaacgactcatcaacaacggctggggattccggactaagcgactcaacttcaagctcttcagcatgaaagtcaaaaagggtacggacaacactggaatcaagaccatcgcgaataaccttaccaacacggtccatgtcttcgcggactcggagtaccagttgccgtacgtcctcggctctgcgcaccagggctgcctccctccgttcccggcggacgtgttcatgattccgcagtacggctacctaacgctcaacaatggcagccaggcagtgggacggtcatccttttactgcctggaatatttcccatcgcagatgctgagaacgggcaacaactttaccttcagctacacctttgaggacgttcctttccacagcagctacgctcacagccagagtctggaccgtctcatgaatcctctgattgaccagtacctgtactacttgtctcggactcaaacaacaggaggcacggcaaatacgcagactctgggcttcagccaaggtgggcctaatacaatggccaatcaggcaaagaactggctgccaggaccctgttaccgccaacaacgcgtctcaacgacaaccgggcaaaacaacaatagcaactttgcctggactgctgggaccaaataccatctgaatggaagaaattcattggctaatcctggcatcgctatggcaacacacaaagacgacaaggagcgtttttttcccagtaacgggatcctgatttttggcaaacaaaatgctgccagagacaatgcggattacagcgatgtcatgctcaccagcgaggaagaaatcaaaaccactaaccctgtggctacagaggaatacggtatcgtggcagataacttgcagcagcaaaacacggctcctcaaattggaactgtcaacagccagggggccttacccggtatggtctggcagaaccgggacgtgtacctgcagggtcccatctgggccaagattcctcacacggacggcaacttccacccgtctccgctgatgggcggctttggcctgaaacatcctccgcctcagatcctgatcaagaacacgcctgtacctgcggatcctccgaccaccttcaaccagtcaaagctgaactctttcatcacgcaatacagcaccggacaggtcagcgtggagatcgagtgggagctgcagaaggaaaacagcaagcgctggaacccggagatccagtacacctccaactactacaaatctacaagtgtggactttgctgttaatacagaaggcgtgtactctgaaccccaccccattggcacccgttacctcacccgtcccctgtaa

SEQ ID NO: 1095 - DNA, 2214 bp, Artificial Sequence
  source: /note="Description of Artificial Sequence: Synthetic polynucleotide"
atggctgccgatggttatcttccagattggctcgaggacactctctctgaaggaataagacagtggtggaagctcaaacctggcccaccaccaccaaagcccgcagagcggcataaggacgacagcaggggtcttgtgcttcctgggtacaagtacctcggacccttcaacggactcgacaagggggagcccgtcaacgcggcggacgcagcggccctcgagcacgacaaggcctacgaccagcagctcaaagcgggtgacaatccgtacctgcggtataaccacgccgacgccgagtttcaggagcgtctgcaagaagatacgtcttttgggggcaacctcgggcgagcagtcttccaggccaagaagcgggttctcgaacctctcggtctggttgaggaaggcgctaagacggctcctggaaagaagagaccggtagagccatcaccccagcgttctccagactcctctacgggcatcggcaagaaaggccagcagcccgcgaaaaagagactcaactttgggcagactggcgactcagagtcagtgcccgaccctcaaccaatcggagaaccccccgcaggcccctctggtctgggatctggtacaatggctgcaggcggtggcgctccaatggcagacaataacgaaggcgccgatggagtgggtagttcctcgggaaattggcattgcgattccacatggctgggggacagagtcatcaccaccagcacccgaacctgggccctgcccacctacaacaaccacctctacaaacaaatttccagcgcttcaacgggagcctcgaacgacaatcactactttggctacagcaccccctgggggtattttgacttcaacagattccactgccacttctcaccacgtgactggcagcgactcatcaacaacaactggggattccggcctaagcgactcaacttcaagctcttcaacattcaggtcaaagaggttacggacaacaatggagtcaagaccatcgccaataaccttaccagcacggtccaggtcttcacggactcggagtaccagttgccgtacgtcctcggctctgcgcaccagggctgcctccctccgttcccggcggacgtgttcatgattccgcagtacggctacctaacgctcaacaatggcagccaggcagtgggacggtcatccttttactgcctggaatatttcccatcgcagatgctgagaacgggcaacaactttaccttcagctacacctttgaggacgttcctttccacagcagctacgctcacagccagagtctggaccgtctcatgaatcctctgattgaccagtacctgtactacttgtctcggactcaaacaacaggaggcacggcaaatacgcagactctgggcttcagccaaggtgggcctaatacaatggccaatcaggcaaagaactggctgccaggaccctgttaccgccaacaacgcgtctcaacgacaaccgggcaaaacaacaatagcaactttgcctggactgctgggaccaaataccatctgaatggaagaaattcattggctaatcctggcatcgctatggcaacacacaaagacgacaaggagcgtttttttcccagtaacgggatcctgatttttggcaaacaaaatgctgccagagacaatgcggattacagcgatgtcatgctcaccagcgaggaagaaatcaaaaccactaaccctgtggctacagaggaatacggtatcgtggcagataacctgcagcagcaaaacacggctcctcaaattggaactgtcaacagccagggggccttacccggtatggtctggcagaaccgggacgtgtacctgcagggtcccatctgggccaagattcttcacacggacggcaactttcacccttctccgctgatgggagggtttggaatgaagcacccgcctcctccgatcctgatcaagaacacgcctgtacctgcggatcctccgaccaccttcaaccagtcaaagctgaactctttcatcacgcaatacagcaccggacaggtcagcgtggaaattgaatgggagctgccgaaggaaaacagcaagcgctggaaccccgagatccagtacacctccaactactacaaatctacaagtgtggactttgctgttaatacagaaggtgtgtactatgaaccccaccccattggcacccgttacctcacccctcccctgtaa

SEQ ID NO: 1096 - DNA, 2214 bp, Artificial Sequence
  source: /note="Description of Artificial Sequence: Synthetic polynucleotide"
atggctgccgatggttatcttccagattggctcgaggacaacctctctgagggcattcgcgagtggtgggcgctgaaacctggagccccgaagcccaaagccaaccagcaaaagcaggacgacggccggggtctggtgcttcctggctacaagtacctcggacccttcaacggactcgacaagggggagcccgtcaacgcggcggacgcagcggccctcgagcacgacaaggcctacgaccagcagctcaaagcgggtgacaatccgtacctgcggtataaccacgccgacgccgagtttcaggagcgtctgcaagaagatacgtcttttgggggcaacctcgggcgagcagtcttccaggccaagaagcgggttctcgaacctctcggtctggttgaggaaggcgctaagacggctcctggaaagaagagaccggtagagccatcaccccagcgctctccagactcctctacgggcatcggcaagaaaggccaacagcccgccagaaaaagactcaattttggtcagactggcgactcagagtcagttccagaccctcaacctctcggagaacctccagcagcgccctctggtgtggcacctaatacaatggctgcaggcggtggcgcaccaatggcagacaataacgaaggcgccgacggagtgggtaatgcctcaggaaattggcattgcgattccacatggctgggcgacagagtcatcaccaccagcacccgaacatgggccttgcccacctataacaaccacctctacaagcaaatctccagtgcttcaacgggggccagcaacgacaaccactacttcggctacagcaccccctgggggtattttgatttcaacagattccactgccacttttcaccacgtgactggcagcgactcatcacaacaattgggggattccggcctaagcgactcaacttcaagctcttcaacattcaggtcaaagaggttacggacaacaatggagtcaagaccatcgccaataaccttaccagcacggtccaggtcttcacggactcggagtaccagttgccgtacgtcctcggctctgcgcaccagggctgcctccctccgttcccggcggacgtgttcatgattccgcagtacggctacctaacgctcaacaatggcagccaggcagtgggacggtcatccttttactgcctggaatatttcccatcgcagatgctgagaacgggcaacaactttaccttcagctacacctttgaggacgttcctttccacagcagctacgctcacagccagagtctggaccggctgatgaatcctctgattgaccagtacctgtactacttgtctcggactcaaacaacaggaggcacggcaaatacgcagactctgggcttcagccaaggtgggcctaatacaatggccaatcaggcaaagaactggctgccaggaccctgttaccgccaacaacgcgtctcaacgacaaccgggcaaaacaacaatagcaactttgcctggactgctgggaccaaataccatctgaatggaagaaattcattggctaatcctggcatcgctatggcaacacacaaagacgacaaggagcgtttttttcccagtaacgggatcctgatttttggcaaacaaaatgctgccagagacaatgcggattacagcgatgtcatgctcaccagcgaggaagaaatcaaaaccactaaccctgtggctacagaggaatacggtatcgtggcagataacttgcagcagcaaaacacggctcctcaaattggaactgtcaacagccagggggccttacccggtatggtctggcagaaccgggacgtgtacctgcagggtcccatctgggccaagattcctcacacggacggcaacttccacccgtctccgctgatgggcggctttggcctgaaacatcctccgcctcagatcctgatcaagaacacgcctgtacctgcggatcctccgaccaccttcaaccagtcaaagctgaactctttcatcacgcaatacagcaccggacaggtcagcgtggaaattgaatgggagctgcagaaggaaaacagcaagcgctggaaccccgagatccagtacacctccaactactacaaatctacaagtgtggactttgctgttaatacagaaggcgtgtactctgaaccccaccccattggcacccgttacctcacccgtcccctgtaa

SEQ ID NO: 1097 - DNA, 2211 bp, Artificial Sequence
  source: /note="Description of Artificial Sequence: Synthetic polynucleotide"
atggctgccgatggttatcttccagattggctcgaggacactctctctgaaggaataagacagtggtggaagctcaaacctggcccaccaccaccaaagcccgcagagcggcataaggacgacggccggggtctggtgcttcctggctacaagtacctcggacccttcaacggactcgacaagggggagcccgtcaacgcggcggacgcagcggccctcgagcacgacaaggcctacgaccagcagctcaaagcgggtgacaatccgtacctgcggtataaccacgccgacgccgagtttcaggagcgtctgcaagaagatacgtcttttgggggcaacctcggacgagcagtcttccaggcgaaaaagagggttcttgaacctctgggcctggttgaggaacctgttaagacggctccgggaaaaaagaggccggtagagcagtcgccacaagagccagactcctcctcgggcatcggcaagaaaggccagcagcccgctaaaaagagactcaattttggtcagactggcgactcagagtcagtccccgacccacaacctctcggagaacctccagcaacccccgctgctgtgggacctactacaatggcttcaggcggtggcgcaccaatggcagacaataacgaaggcgccgacggagtgggtaatgcctcaggaaattggcattgcgattccacatggatgggcgacagagtcatcaccaccagcacccgaacatgggccttgcccacctataacaaccacctctacaagcaaatctccagtgcttcaacgggggccagcaacgacaaccactacttcggctacagcaccccctgggggtattttgactttaacagattccactgccacttttcaccacgtgactggcagcgactcatcaacaacaactggggattccggcctaagcgactcaacttcaagctcttcaacattcaggtcaaggaggtcacgcagaatgaaggcaccaagaccatcgccaataacctcaccagcaccatccaggtgtttacggactcggagtaccagctgccgtacgttctcggctccgcccaccagggctgcctgcctccgttcccggcggacgtgttcatgatcccccagtacggctacctaacactcaacaacggtagtcaggccgtgggacgctcctccttctactgcctggaatactttccttcgcagatgctgagaaccggcaacaacttccagtttacttacaccttcgaggacgtgcctttccacagcagctacgcgcacagccagagcttggaccggctgatgaatcctctgattgaccagtacctgtactacttgtctcggactcaaacaacaggaggcacggcaaatacgcagactctgggcttcagccaaggtgggcctaatacaatggccaatcacgcaaagaactggctgccaggaccctgttaccgccaacaacgcgtctcaacgacaaccgggcaaaacaacaatagcaactttgcctggactgctgggaccaaataccatctgaatggaagaaattcattggctaatcctggcatcgctatggcaacacacaaagacgacaaggagcgtttttttcccagtaacgggatcctgatttttggcaaacaaaatgctgccagagacaatgcggattacagcgatgtcatgctcaccagcgaggaagaaatcaaaaccactaaccctgtggctacagaggaatacggtatcgtggcagataacttgcagcagcaaaacacggctcctcaaattggaactgtcaacagccagggggccttacccggtatggtctggcagaaccgggacgtgtacctgcagggtcccatctgggccaagattcctcacacggacggcaacttccacccgtctccgctgatgggcggcttcggcctgaaacatcctccgcctcagatcctgatcaagaacacgcctgtacctgcggatcctccgaccaccttcaaccagtcaaagctgaactctttcatcacgcaatacagcaccggacaggtcagcgtggaaattgaatgggagctgcagaaggaaaacagcaagcgctggaaccccgagatccagtacacctccaactactacaaatctacaagtgtggactttgctgttaatacagaaggcgtgtactctgaaccccaccccattggcacccgttacctcacccgtcccctgtaa

SEQ ID NO: 1098 - DNA, 2214 bp, Artificial Sequence
  source: /note="Description of Artificial Sequence: Synthetic polynucleotide"
atggctgccgatggttatcttccagattggctcgaggacaacctctctcagggcattcgcgagtggtgggacttgaaacctggagccccgaaacccaaagccaaccagcaaaagcaggacgacggccggggtctggtgcttcctggctacaagtacctcggacccttcaacggactcgacaagggggagcccgtcaacgcggcggacgcagcggccctcgagcacgacaaggcctacgaccagcagctcaaagcgggtgacaatccgtacctgcggtataaccacgccgacgccgagtttcaggagcgtctgcaagaagatacgtcttttgggggcaacctcggacgagcagtcttccaggccaagaagcgggttctcgaacctctcggtctggttgaggaaggcgctaagacggctcctggaaagaagagaccggtagagccatcaccccagcgttctccagactcctctacgggcatcggcaagaaaggccaacagcccgccagaaaaagactcaattttggtcagactggcgactcagagtcagttccagaccctcaacctctcggagaacctccagcagcgcccgctgctgtgggacctactacaatggcttcaggcggtggcgcaccaatggcagacaataacgaaggcgccgacggagtgggtagttcctcgggaaattggcattgcgattcccaatggctgggggacagagtcatcaccaccagcacccgaacctgggccctgcccacctacaacaaccacctctacaagcaaatctccagtgcttcaacgggggccagcaacgacaaccactacttcggctacagcaccccctgggggtattttgacttcaacagattccactgccacttttcaccacgtgactggcaaagactcatcaacaacaactggggattccggcccaagagactcagcttcaagctcttcaacatccaggtcaaggaggtcacgcagaatgaaggcaccaagaccatcgccaataacctcaccagcaccatccaggtgtttacggactcggagtaccagctgccgtacgttctcggctctgcccaccagggctgcctgcctccgttcccggcggacgtgttcatgattccccagtacgggtacctgactctgaacaatggcagtcaggccgtgggccgttcctccttctactgcctggagtactttccttctcaaatgctgagaaccggcaacaacttccagtttacttacaccttcgaggacgtgcctttccacagcagctacgcccacagccagagcttggaccggctgatgaatcctctgattgaccagtacctgtactacttgtctcggactcaaacaacaggaggcacgacaaatgcgcagactctgggcttcagccaaggtgggcctaatacaatggccaatcaggcaaagaactggctgccaggaccctgttaccgccaacaacgcgtctcaacgacaaccgggcaaaacaacaatagcaactttgcctggactgctgggaccaaataccatctgaatggaagaaattcattggctaatcctggcatcgctatggcaacacacaaagacgacaaggagcgtttttttcccagtaacgggatcctgatttttggcaaacaaaatgctgccagagacaatgcggattacagcgatgtcatgctcaccagcgaggaagaaatcaaaaccactaaccctgtggctacagaggaatacggtatcgtggcagataacttgcagcagcaaaacacggctcctcaaattggaactgtcaacagccagggggccttacccggtatggtctggcagaaccgggacgtgtacctgcagggtcccatctgggccaagattcctcacacggacggcaacttccacccgtctccgctgatgggcggctttggcctgaaacatcctccgcctcagatcctgatcaagaacacgcctgtacctgcggatcctccgaccaccttcaaccagtcaaagctgaactctttcatcacacagtactccacgggacaggtcagcgtggaaattgaatgggagctgcagaaggaaaacagcaagcgctggaacccggagatccagtacacttccaactactacaaatctacaaatgtggactttgctgttaacacagaaggcgtgtactctgaaccccaccccattggcacccgttacctcacccgtcccctgtaa

SEQ ID NO: 1099 - DNA, 2211 bp, Artificial Sequence
  source: /note="Description of Artificial Sequence: Synthetic polynucleotide"
atggctgccgatggttatcttccagattggctcgaggacaacctctctgagggcattcgcgagtggtgggacttgaaacctggagccccgaaacccaaagccaaccagcaaaagcaggacgacggccggggtctggtgcttcctggctacaagtacctcggacccttcaacggactcgacaagggggagcccgtcaacgcggcggacgcagcggccctcgagcacgacaaggcctacgaccagcagctcaaagcgggtgacaatccgtacctgcggtataaccacgccgacgccgagtttcaggagcgtctgcaagaagatacgtcttttgggggcaacctcgggcgagcagtcttccaggccaagaagagggttctcgaaccttttggtctggttgaggaaggcgctaagacggctcctggaaagaaacgtccggtagagcagtcgccacaagagccagactcctcctcgggcatcggcaagacaggccagcagcccgctaaaaagagactcaatttcggtcagactggcgacacagagtcagtcccagaccctcaaccaatcggagaacctcccgcagccccctcaggtgtgggacctaatacaatggctgcaggcggtggcgcaccaatggcagacaataacgaaggcgccgacggagtgggtagttcctcgggaaattggcattgcgattccacatggatgggtgacagagtcatcaccaccagcacccgaacctgggccctgcccacctacaataaccacctctacaagcaaatctccagtgcttcaacgggggccagcaacgacaaccactacttcggctacagcaccccctgggggtattttgacttcaacagattccactgccacttctcaccacgtgactggcagcgactcatcaacaacaactggggattccggcctaagcgactcaacttcaagctcttcaacattcaggtcaaggaggtcacgcagaatgaaggcaccaagaccatcgccaataacctcaccagcaccatccaggtgtttacggactcggagtaccagctgccgtacgttctcggctctgcccaccagggctgcctgcctccgttcccggcggacgtgttcatgattccccagtacggctacctaacactcaacaacggtagtcaggccgtgggacgctcctccttctactgcctggaatactttccttcgcagatgctgagaaccggcaacaacttccagtttacttacaccttcgaggacgtgcctttccacagcagctacgcccacagccagagcttggaccggctgatgaatcctctgattgaccagtacctgtactacttgtctcggactcaaacaacaggaggcacggcaaatacgcagactctgggcttcagccaaggtgggcctaatacaatggccaatcaggcaaagaactggctgccaggaccctgttaccgccaacaacgcgtctcaacgacaaccgggcaaaacaacaatagcaactttgcctggactgctgggaccaaataccatctgaatggaagaaattcattggctaatcctggcatcgctatggcaacacacaaagacgacaaggagcgtttttttcccagtaacgggatcctgatttttggcaaacaaaatgctgccagagacaatgcggattacagcgatgtcatgctcaccagcgaggaagaaatcaaaaccactaaccctgtggctacagaggaatacggtatcgtggcagataacttgcagcagcaaaacacggctcctcaaattggaactgtcaacagccagggggccttacccggtatggtctggcagaaccgggacgtgtacctgcagggtcccatctgggccaagattcctcacacggacggcaacttccacccgtctccgctgatgggcggctttggcctgaaacatcctccgcctcagatcctgatcaagaacacgcctgtacctgcggatcctccgaccaccttcaaccagtcaaagctgaactctttcatcacacagtactccacgggacaggtcagcgtggaaattgaatgggagctgcagaaggaaaacagcaagcgctggaacccggagatccagtacacttccaactactacaaatctacaaatgtggactttgctgttaacacagaaggcgtgtactctgaaccccaccccattggcacccgttacttcacccgtcccctgtaa

SEQ ID NO: 1100 - DNA, 2211 bp, Artificial Sequence
  source: /note="Description of Artificial Sequence: Synthetic polynucleotide"
atggctgccgatggttatcttccagattggctcgaggacaacctctctgagggcattcgcgagtggtgggacttgaaacctggagccccgaaacccaaagccaaccagcaaaagcaggacgacggccggggtctggtgcttcctggctacaagtacctcggacccttcaacggactcgacaagggggagcccgtcaacgcggcggacgcagcggccctcgagcacgacaaggcctacgaccagcagctcaaagcgggtgacaatccgtacctgcggtataaccacgccgacgccgagtttcaggagcgtctgcaagaagatacgtcttttgggggcaacctcgggcgagcagtcttccaggccaagaagcgggttctcgaacctctcggtctggttgaggaaggcgctaagacggctcctggaaagaaacgtccggtagagcagtcgccacaagagccagactcctcctcgggcatcggcaagacaggccagcagcccgctaaaaaaagactcaattttggtcagactggcgactcagagtcagttccagaccctcaacctctcggagaacctccagcaacccccgctgctgtgggacctactacaatggcttcaggtggtggcgcaccaatggcagacaataacgagggcgccgacggagtgggtaattcctcgggaaattggcattgcgattccacatggatgggcgacagagtcatcaccaccagcacccgaacctgggccctgcccacctacaacaatcacctctacaagcaaatctccagtgcttcaacgggggccagcaacgacaaccactacttcggctacagcaccccctgggggtattttgacttcaacagattccactgccacttctcaccacgtgactggcagcgactcatcaacaacaactggggattccggcctaagcgactcaacttcaagctcttcaacattcaggtcaaagaggttacggacaacaatggagtcaagaccatcgccaataaccttaccagcacggtccaggtcttcacggactcggagtaccagttgccgtacgtcctcggctctgcgcaccagggctgcctccctccgttcccggcggacgtgttcatgattccgcagtacggctacctaacgctcaacaacggtagtcaggccgtgggacgctcctccttctactgcctggaatactttccttcgcagatgctgagaaccggcaacaacttccagtttacttacaccttcgaggacgtgcctttccacagcagctacgcccacagccagagcttggaccggctgatgaatcctctgattgaccagtacctgtactacttgtctcggactcaaacaacaggaggcacggcaaatacgcagactctgggcttcagccaaggtgggcctaatacaatggccaatcaggcaaagaactggctgccaggaccctgttaccgccaacaacgcgtctcgacgacaaccgggcaaaacaacaatagcaactttgcctggactgctgggaccaaataccatctgaatggaagaaattcattggctaatcctggcatcgctatggcaacacacaaagacgacaaggagcgtttttttcccagtaacgggatcctgatttttggcaaacaaaatgctgccagagacaatgcggattacagcgatgtcatgctcaccagcgaggaagaaatcaaaaccactaaccctgtggctacagaggaatacggtatcgtggcagataacttgcagcagcaaaacacggctcctcaaattggaactgtcaacagccagggggccttacccggtatggtttggcagaaccgggacgtgtacctgcagggtcccatctgggccaagattcctcacacggacggcaacttccacccgtctccgctgatgggcggctttggcctgaaacatcctccgcctcagatcctgatcaagaacacgcctgtacctgcggatcctccgaccaccttcaaccagtcaaagctgaactctttcatcacacagtactccacgggacaggtcagcgtggaaattgaatgggagctgcagaaggaaaacagcaagcgctggaacccggagatccagtacacttccaactactacaaatctacaaatgtggactttgctgttaacacagaaggcgtgtactctgaaccccaccccattggcacccgttacctcacccgtcccctgtaa

SEQ ID NO: 1101 - DNA, 2211 bp, Artificial Sequence
  source: /note="Description of Artificial Sequence: Synthetic polynucleotide"
atggctgccgatggttatcttccagattggctcgaggacaacctctctgagggcattcgcgagtggtgggacttgaaacctggagccccgaagcccaaagccaaccagcaaaagcaggacgacggccggggtctggtgcttcctggctacaagtacctcggacccttcaacggactcgacaagggggagcccgtcaacgcggcggacgcagcggccctcgagcacgacaaggcctacgaccagcagctcaaagcgggtgacaatccgtacctgcggtataaccacgccgacgccgagtttcaggagcgtctgcaagaagatacgtcttttgggggcaacctcgggcgagcagtcttccaggccaagaagcgggttctcgaacctctcggtctggttgaggaaggcgctaagacggctcctggaaagaaacgtccggtagagcagtcaccacaagagccagactcctcctcgggcatcggcaagacaggccagcagcccgctaaaaagagactcaattttggtcagactggcgactcagagtcagtccccgacccacaacctctcggagaacctccagcaacccccgctgctgtgggacctactacaatggcttcaggcggtggcgcaccaatggcggacaataacgaaggcgccgatggagtgggtaatgcctcaggaaattggcattgcgattccacatggctgggcgacagagtcatcaccaccagcacccgaacatgggccttgcccacctataacaaccacctctacaagcaaatctccagtgcttcaacgggggccagcaacgacaaccactacttcggctacagcaccccctgggggtattttgactttaacagattccactgccacttctcaccacgtgactggcagcgactcatcaacaacaactggggattccggcccaagagactcaacttcaagctcttcaacatccaggtcaaggaggtcacgcagaatgaaggcaccaagaccatcgccaataacctcaccagcaccatccaggtgtttacggactcggagtaccagctgccgtacgttctcggctctgcccaccagggctgcctgcctccgttcccggcggacgtgttcatgattccccagtacggctacctgactctgaacaatggcagtcaggccgtgggccgttcctccttctactgcctagagtactttccttctcaaatgctgagaacgggcaacaactttgagttcagctaccagtttgaggacgtgccttttcacagcagctacgcgcacagccaaagcctggaccggctgatgaatcctctgattgaccagtacctgtactacttgtctcggactcaaacaacaggaggcacggcaaatacgcagactctgggcttcagccaaggtgggcctaatacaatggccaatcaggcaaagaactggctgccaggaccctgttaccgccaacaacgcgtctcaacgacaaccgggcaaaacaacaatagcaactttgcctggactgctgggaccaaataccatatgaatggaagaaattcattggttaatcctggcatcgctatggcaacacacaaagacgacaaggagcgtttttttcccagtaacgggatcctgatttttggcaaacaaaatgttgccagagacaatgcggattacagcgatgtcatgctcaccagcgaggaagaaatcaaaaccactaaccctgtggctacagaggaatacggtattgtggcagataacttgcagcagcaaaacacggctcctcaaattggaactgtcaacagccagggggccttacccggtatggtctggcagaaccgggacgtgtacctgcagggtcccatctgggccaagattcctcacacggacggcaacttccacccgtcgccgctgatgggcggctttggcctgaaacatcctccgcctcagatcctgatcaagaacacgcctgtacctgcggatcctccgaccaccttcaaccagtcaaagctgaactctttcatcacgcaatacagcaccggacaggtcagcgtggaaattgaatgggagctgcagaaggaaaacagcaagcgctggaaccccgagatccagtacacctccaactactacaaatctacaagtgtggactttgctgttaatacagaaggcgtgtactctgaaccccaccccattggcacccgttacctcacccgtcccctgtaa

SEQ ID NO: 1102 - protein, 736 aa, Artificial Sequence
  source: /note="Description of Artificial Sequence: Synthetic polypeptide"
MAADGYLPDWLEDTLSEGIRQWWKLKPGPPPPKPAERHKDDSRGLVLPGYKYLGPFNGLDKGEPVNEADAAALEHDKAYDRQLDSGDNPYLKYNHADAEFQERLKEDTSFGGNLGRAVFQAKKRVLEPLGLVEEPVKTAPGKKRPVEQSPQEPDSSSGIGKKGQQPAKKRLNFGQTGDSESVPDPQPLGEPPATPAAVGPTTMASGGGAPMADNNEGADGVGNASGNWHCDSTWMGDRVITTSTRTWALPTYNNHLYKQISSASTGASNDNHYFGYSTPWGYFDFNRFHCHFSPRDWQRLINNNWGFRPKRLNFRLFNIQVKEVTDNNGVKTIANNLTSTVQVFTDSEYQLPYVLGSAHQGCLPPFPADVFMIPQYGYLTLNNGSQAVGRSSFYCLEYFPSQMLRTGNNFTFSYTFEEVPFHSSYAHSQSLDRLMNPLIDQYLYYLSRTQTTGGTANTQTLGFSQGGPNTMANQAKNWLPGPCYRQQRVSTTTGQNNNSNFAWTAGTKYHLNGRNSLANPGIAMATHKDDKERFFPSNGILIFGKQNAARDNADYSDVMLTSEEEIKTTNPVATEEYGIVADNLQQQNTAPQIGTVNSQGALPGMVWQNRDVYLQGPIWAKIPHTDGNFHPSPLMGGFGLKHPPPQILIKNTPVPADPPTTFNQSKLNSFITQYSTGQVSVEIEWELQKENSKRWNPEIQYTSNYYKSTSVDFAVNTEGVYSEPHPIGTRYLTRPL

SEQ ID NO: 1103 - protein, 736 aa, Artificial Sequence
  source: /note="Description of Artificial Sequence: Synthetic polypeptide"
MAADGYLPDWLEDNLSEGIREWWDLKPASPKPKANQQKQDDGRGLVLPGYKYLGPFNGLDKGEPVNAADAAALEHDKAYDQQLKAGDNPYLRYNHADAEFQERLQEDTSFGGNLGRAVFQAKKRLLEPLGLVEEAAKTAPGKKRPVEQSPQEPDSSAGIGKSGAQPAKKRLNFGQTGGTESVPDPQPLGEPPAAPSGVGPNTMAAGGGAPMADNNEGADGVGSSSGNWHCDSTWLGDRVITTSTRTWALPTYNNHLYKQISSASTGASNDNHYFGYSTPWGYFDFNRFHCHFSPRDWQRLINNNWGFRPKRLSFKLFNIQVKEVTQNEGTKTIANNLTSTIQVFTDSEYQLPYVLGSAHQGCLPPFPADVFMIPQYGYLTLNNGSQAVGRSSFYCLEYFPSQMLRTGNNFQFTYTFEDVPFHSSYAHSQSLDRLMNPLIDQYLYYLSRTQTTGGTANTQTLGFSQGGPNTMANQAKNWLPGPCYRQQRVSTTTGQNNNSNFAWTAGTKYHLNGRNSLANPGIAMATHKDDKERFFPSNGILIFGKQNAARDNADYSDVMLTSEEEIKTTNPVATEEYGIVADNLQQQNTAPQIGTVNSQGALPGMVWQNRDVYLQGPIWAKIPHTDGNFHPSPLMGGFGLKHPPPQILIKNTPVPADPPTTFNQSKLNSFITQYSTGQVSVEIEWELQKENSKRWNPEIQYTSNYYKSTSVDFAVNTEGVYSEPHPIGTRYLTRPL

SEQ ID NO: 1104 - protein, 736 aa, Artificial Sequence; identical to SEQ ID NO: 1043
  source: /note="Description of Artificial Sequence: Synthetic polypeptide"

SEQ ID NO: 1105 - protein, 736 aa, Artificial Sequence
  source: /note="Description of Artificial Sequence: Synthetic polypeptide"
MAADGYLPDWLEDNLSEGIREWWDLEPGAPKPKANQQKQDDGRGLVLPGYKYLGPFNGLDKGEPVNAADAAALEHDKAYDQQLKAGDNPYLRYNHADAEFQERLQEDTSFGGNLGRAVFQAKKRVLEPLGLVEEGAKTAPGKKRPVEQSPQEPDSSSGIGKTGQQPAKKRLNFGQTGDSESVPDPQPLGEPPATPAAVGPTTMASGGGAPMADNNEGADGVGNASGNWHCDSTWLGDRVITTSTRTWALPTYNNHLYKQISSASTGASNDNHYFGYSTPWGYFDFNRFHCHFSPRDWQRLINNNWGFRPKRLNFKLFNIQVKEVTDNNGVKTIANNLTSTVQVFTDSEYQLPYVLGSAHQGCLPPFPADVFMIPQYGYLTLNNGSQAVGRSSFYCLEYFPSQMLRTGNNFQFTYTFEDVPFHSSYAHSQSLDRLMNPLIDQYLYYLSRTQTTGGTANTQTLGFSQGGPNTMANQAKNWLPGPCYRQQRVSTTTGQNNNSNFAWTAGTKYHLNGRNSLANPGIAMATHKDDKERFFPSNGILIFGKQNAARDNADYSDVMLTSEEEIKTTNPVATEEYGIVADNLQQQNTAPQIGTVNSQGALPGMVWQNRDVYLQGPIWAKIPHTDGNFHPSPLMGGFGLKHPPPQILIKNTPVPADPPTTFNQSKLNSFITQYSTGQVSVEIEWELQKENSKRWNPEIQYTSNYYKSTSVDFAVNTEGVYSEPHPIGTRYLTRPL

SEQ ID NO: 1106 - protein, 736 aa, Artificial Sequence; identical to SEQ ID NO: 1043
  source: /note="Description of Artificial Sequence: Synthetic polypeptide"

SEQ ID NO: 1107 - protein, 736 aa, Artificial Sequence
  source: /note="Description of Artificial Sequence: Synthetic polypeptide"
MAADGYLPDWLEDTLSEGIRQWWKLKPGPPPPKPAERHKDDSRGLVLPGYKYLGPFNGLDKGEPVNEADAAALEHDKAYDRQLDSGDNPYLKYNHADAEFQERLKEDTSFGGNLGRAVFQAKKRVLEPLGLVEEPVKTAPGKKRPVEQSPQEPDSSSGIGKKGQQPAKKRLNFGQTGDSESVPDPQPLGEPPATPAAVGPTTMASGGGAPMADNNEGADGVGNASGNWHCDSTWLGDRVITTSTRTWALPTYNNHLYKQISSASTGASNDNHYFGYSTPWGYFDFNRFHCHFSPRDWQRLINNNWGFRPKRLNFKLFNIQVKEVTDNNGVKTIANNLTSTVQVFTDSDYQLPYVLGSAHQGCLPPFPADVFMIPQYGYLTLNNGSQAVGRSSFYCLEYFPSQMLRTGNNFQFTYTFEDVPFHSSYAHSQSLDRLMNPLIDQYLYYLSRTQTTGGTANTQTLGFSQGGPNTMANQAKNWLPGPCYRQQRVSTTTGQNNNSNFAWTAGTKYHLNGRNSLANPGIAMATHKDDKERFFPSNGILIFGKQNAARDNADYSDVMLTSEEEIKTTNPVATEEYGIVADNLQQQNTAPQIGTVNSQGALPGMVWQNRDVYLQGPIWAKIPHTDGNFHPSPLMGGFGLKHPPPQILIKNTPVPADPPTTFNQSKLNSFITQYSTGQVSVEIEWELQKENSKRWNPEIQYTSNYYKSTSVDFAVNTEGVYSEPHPIGTRYLTRPL

SEQ ID NO: 1108 - protein, 734 aa, Artificial Sequence
  source: /note="Description of Artificial Sequence: Synthetic polypeptide"
MAADGYLPDWLEDTLSEGIRQWWKLKPGPPPPKPAERHKDDSRGLVLPGYKYLGPFNGLDKGEPVNEADAAALEHDKAYDQQLQAGDNPYLRYNHADAEFQERLQGDTSFGGNLGRAVFQAKKRLLEPLGLVEEAAKTAPGKKRPVEQSPQEPDSSAGIGKSGAQPAKKRLNFGQTGDTESVPDPQPIGEPPAAPSGVGSLTMASGGGAPVADNNEGADGVGSSSGNWHCDSQWLGDRVITTSTRTWALPTYNNHLYKQISSASTGASNDNHYFGYSTPWGYFDFNRFHCHFSPRDWQRLINNNWGFRPKRLSFKLFNHPGQGGHAERHQDHRQPHQHIQVFTDSEYQLPYVLGSAHQGCLPPFPADVFMIPQYGYLTLNNGSQAVGRSSFYCLEYFPSQMLRTGNNFQFTYTFEDVPFHSSYAHSQSLDRLMNPLIDQYLYYLSRTQTTGGTANTQTLGFSQGGPNTMANQAKNWLPGPCYRQQRVSTTTGQNNNSNFAWTAGTKYHLNGRNSLGNPGIAMATHKDDKERFFPSNGILIFGKQNAARDNADYSDVMLTSEEEIKTTNPVATEEYGIVADNLQQQNTAPQIGTVNSQGALPGMVWQNRDVYLQGPIWAKIPHTDGNFHPSPLMGGFGLKHPPPQILIKNTPVPADPPTAFNQSKLNSFITQYSTGQVSVEIEWELQKENSKRWNPEIQYTSNYYKSTSVDFAVNTEGVYSEPHPIGTRYLTRPL

SEQ ID NO: 1109 - protein, 737 aa, Artificial Sequence
  source: /note="Description of Artificial Sequence: Synthetic polypeptide"
MAADGYLPDWLEDNLSEGIREWWDLKHGAPKPKANQQKQDDGRGLVLPGYKYLGPFNGLDKGEPVNAADAAALEHDKAYDQQLKAGDNPYLRYNHADAEFQERLQEDTSFGGNLGRAVFQAKKRVLEPFGLVEEGAKTAPGKKRPVEQSPQEPDSSSGIGKTGQQPAKKRLNFGQTGDSESVPDPQPLGEPPATPAAVGPTTMASGGGAPMADNNEGADGVGNASGNWHCDSTWLGDRVITTSTRTWALPTYNNHLYKQISNGTSGGSTNDNTYFGYSTPWGYFDFNRFHCHFSPRDWQRLINNNWGFRPKRLNFKLFNIQVKEVTQNEGTKTIANNLTSTIQVFTDSEYQLPYVLGSAHQGCLPPFPADVFMIPQYGYLTLNNGSQAVGRSSFYCLEYFPSQMLRTGNNFTFSYTFEDVPFHSSYAHSQSLDRLMNPLIDQYLYYLSRTQTTGGTANTQTLGFSQGGPNTMANQAKNWLPGPCYRQQRVSTTTGQNNNSNFAWTAGTKYHLNGRNSLANPGIAMATHKDDKERFFPSNGILIFGKQNAARDNADYSDVMLTSEEEIKTTNPVATEEYGIVADNLQQQNTAPQIGTVNSQGALPGMVWQNRDVYLQGPIWAKIPHTDGNFHPSPLMGGFGLKHPPPQILIKNTPVPADPPTTFNQSKLNSFITQYSTGQVSVEIEWELQKENSKRWNPEIQYTSNYYKSTSVDFAVNTEGVYSDPHPIGTRYLTRPL

SEQ ID NO: 1110 - protein, 737 aa, Artificial Sequence
  source: /note="Description of Artificial Sequence: Synthetic polypeptide"
MAADGYLPDWLEDNLSEGIREWWALKPGAPKPKANQQKQDDGRGLVLPGYKYLGPFNGLDKGEPVNEADAAALEHDKAYDQQLKAGDNPYLRYNHADAEFQERLQEDTSFGGNLGRAVFQAKKRVLEPLGLVEEGAKTAPGKKRPVEPSPQRSPDSSTGIGKKGQQPARKRLNFGQTGDSESVPDPQPLGEPPAAPSGVGPNTMASGGGAPMADNNEGADGVGNSSGNWHCDSTWMGDRVITTSTRTWALPTYNNHLYKQISSASTGASNDNHYFGYSTPWGYFDFNRFHCHFSPRDWQRLINNNWGFRPKRLNFKLFNIQVKEVTQNEGTKTIANNLTSTIQVFTDSEYQLPYVLGSAHQGCLPPFPADVFMIPQYGYLTLNNGSQAVGRSSFYCLEYFPSQMLRTGNNFQFTYTFEDVPFHSSYAHSQSLDRLMNPLIDQYLYYLSRTQTTGGTANTQTLGFSQGGPNTMANQAKNWLPGPCYRQQRVSTTTGQNNNSNFAWTAGTKYHLNGRNSLANPGIAMATHKDDKERFFPSNGILIFGKQNAARDNADYSDVMLTSEEEIKTTNPVATEEYGIVADNLQQQNTAPQIGTVNSQGALPGMVWQNRDVYLQGPIWAKIPHTDGNFHPSPLMGGFGLKHPPPQILIKNTPVPADPPTTFNQSKLNSFITQYSTGQVSVEIEWELQKENSKRWNPEIQYTSNYYKSTSVDFAVNTEGVYSEPHPIGTRYLTRPL

SEQ ID NO: 1111 - protein, 736 aa, Artificial Sequence
  source: /note="Description of Artificial Sequence: Synthetic polypeptide"
  MOD_RES (226)..(226): Any amino acid
MAADGYLPDWLEDTLSEGIRQWWKLKPGPPPPKPAERHKDDSRGLVLPGYKYLGPFNGLDKGEPVNEADAAALEHDKAYDRQLDSGDNPYLKYNHADAEFQERLKEDTSFGGNLGRAVFQAKKRVLEPLGLVEEPVKTAPGKKRPVEQSPQEPDSSSGIGKKGQQPAKKRLNFGQTGDSESVPDPQPLGEPPATPAAVGPTTMASGGGAPMADNNEGADGVGNASXNWHCDSTWLGDRVITTSTRTWALPPITTTSTSKSPVLQRGRSNDNHYFGYSTPWGYFDFNRFHCHFSPRDWQRLINNNWGFRPKRLNFKLFNIQVKEVTDNNGVKTIANNLTSTVQVFTDSDYQLPYVLGSAHQGCLPPFPADVFMIPQYGYLTLNNGSQAVGRSSFYCLEYFPSQMLRTGNNFQFTYTFEDVPFHSSYAHSQSLDRLMNPLIDQYLYYLSRTQTTGGTANTQTLGFSQGGPNTMANQAKNWLPGPCYRQQRVSTTTGQNNNSNFAWTAGTKYHLNGRNSLANPGIAMATHKDDKERFFPSNGILIFGKQNAARDNADYSDVMLTSEEEIKTTNPVATEEYGIVADNLQQQNTAPQIGTVNSQGALPGMVWQNRDVYLQGPIWAKIPHTDGNFHPSPLMGGFGLKHPPPQILIKNTPVPADPPTTFNQSKLNSFITQYSTGQVSVEIEWELQKENSKRWNPEIQYTSNYYKSTNVDFAVNTEGVYSEPHPIGTRYLTRPL

SEQ ID NO: 1112 - protein, 736 aa, Artificial Sequence
  source: /note="Description of Artificial Sequence: Synthetic polypeptide"
  MOD_RES (239)..(239): Any amino acid
MAADGYLPDWLEDNLSEGIREWWDLKPGAPKPKANQQKQDDGRGLVLPGYKYLGPFNGLDKGEPVNAADAAALEHDKAYDQQLQAGDNPYLRYNHADAEFQERLQGDTSFGGNLGRAVFQAKKRVLEPLGLVEEAAKTAPGKKRPVEQSPQEPDSSAGIGKSGAQPAKKRLNFGQTGDTESVPDPQPIGEPPAAPSGVGPNTMAAGGGAPMADNNEGADGVGSSSGNWHCDSTWLGDRXITTSTRTWALPTYNNHLYKQISSASTGASNDNHYFGYSTPWGYFDFNRFHCHFSPRDWQRLINNNWGFRPKRLNFKLFNIQVKEVTDNNGVKTIANNLTSTVQVFTDSEYQLPYVLGSAHQGCLPPFPADVFMIPQYGYLTLNNGSQAVGRSSFYCLEYFPSQMLRTGNNFTFSYTFEDVPFHSSYAHSQSLDRLMNPLIDQYLYYLSRTQTTGGTANTQTLGFSQGGPNTMANQAKNWLPGPCYRQQRVSTTTGQNNNSNFAWTAGTKYHLNGRNSLANPGIAMATHKDDKERFFPSNGILIFGKQNAARDNADYSDVMLTSEEEIKTTNPVATEEYGIVADNFQQQNTAPQIGTVNSQGALPGMVWQNRDVYLQGPIWAKIPHTDGNFHPSPLMGGFGLKHPPPQILIKNTPVPADPPTTFNQSKLNSFITQYSTGQVSVEIEWELQKENSKRWNPEIQYTSNYYKSTSVDFAVNTEGVYSEPHPIGTRYLTRPL

SEQ ID NO: 1113 - protein, 736 aa, Artificial Sequence
  source: /note="Description of Artificial Sequence: Synthetic polypeptide"
MAADGYLPDWLEDNLSEGIREWWALKPGAPKPKANQQKQDDGRGLVLPGYKYLGPFNGLDKGEPVNEADAAALEHDKAYDQQLKAGDNPYLKYNHADAEFQERLQEDTSFGGNLGRAVFQAKKRLLEPLGLVEEAAKTAPGKKRPVEQSPQEPDSSAGIGKSGAQPAKKRLNFGQTGDTESVPDPQPLGEPPATPAAVGPTTMASGGGAPMADNNEGADGVGNASGNWHCDSTWLGDRVITTSTRTWALPTYNNHLYKQISSASTGASNDNHYFGYSTPWGYFDFNRFHCHFSPRDWQRLINNNWGFRPKRLSFKLFNIQVKEVTQNEGTKTIANNLTSTIQVFTDSEYQLPYVLGSAHQGCLPPFPADVFMIPQYGYLTLNNGSQAVGRSSFYCLEYFPSQMLRTGNNFQFTYTFEDVPFHSSYAHSQSLDRLMNPLIDQYLYYLSRTQTTGGTANTQTLGFSQGGPNTMANQAKNWLPGPCYRQQRVSTTTGQNNNSNFAWTAGTKYHLNGRNSLANPGIAMATHKDDKERFFPSNGILIFGKQNAARDNADYSDVMLTSEEEIKTTNPVATEEYGIVADNLQQQNTAPQIGTVNSQGALPGMVWQNRDVYLQGPIWAKIPHTDGNFHPSPLMGGFGLKHPPPQILIKNTPVPADPPTTFNQSKLNSFITQYSTGQVSVEIEWELQKENSKRWNPEIQYTSNYYKSTSVDFAVNTEGVYSEPHPIGTRYLTRPL

SEQ ID NO: 1114 - protein, 736 aa, Artificial Sequence
  source: /note="Description of Artificial Sequence: Synthetic polypeptide"
MAADGYLPDWLEDTLSEGIRQWWKLKPGPPPPKPAERHKDDSRGLVLPGYKYLGPFNGLDKGEPVNEADAAALEHDKAYDQQLQAGDNPYLRYNHADAEFQERLQGDTSFGGNLGRAVFQAKKRLLEPLGLVEEAAKTAPGKKRPVEQSPQEPDSSAGIGKSGAQPAKKRLNFGQTGDTESVPDPQPIGEPPAAPSGVGSLTMASGGGAPVADNNEGADGVGSSSGNWHCDSQWLGDRVITTSTRTWALPTYNNHLYKQISSASTGASNDNHYFGYSTPWGYFDFNRFHCHFSPRDWQRLINNNWGFRPKRLSFKLFNIQVKEVTQNEGTKTIANNLTSTIQVFTDSEYQLPYVLGSAHQGCLPPFPADVFMIPQYGYLTLNNGSQAVGRSSFYCLEYFPSQMLRTGNNFQFTYTFEDVPFHSSYAHSQSLDRLMNPLIDQYLYYLSRTQTTGGTANTQTLGFSQGGPNTMANQAKNWLPGPCYRQQRVSTTTGQNNNSNFAWTAGTKYHLNGRNSLANPGIAMATHKDDKERFFPSNGILIFGKQNAARDNADYSDVMLTSEEEIKTTNPVATEEYGIVADNLQQQNTAPQIGTVNSQGALPGMVWQNRDVYLQGPIWAKIPHTDGNFHPSPLMGGFGLKHPPPQILIKNTPVPADPPTTFNQSKLNSFITQYSTGQVSVEIEWELQKENSKRWNPEIQYTSNYYKSTSVDFAVNTEGVYSEPHPIGTRYLTRPL

SEQ ID NO: 1115 - protein, 738 aa, Artificial Sequence
  source: /note="Description of Artificial Sequence: Synthetic polypeptide"
MAADGYLPDWLEDNLSEGIRQWWKLKPGPPPPKPAERHKDDSRGLVLPGYKYLGPFNGLDKGEPVNAADAAALEHDKAYDQQLKAGDNPYLRYNHADAEFQERLQEDTSFGGNLGRAVFQAKKRVLEPLGLVEEGAKTAPGKKRPVEPSPQRSPDSSTGIGKKGQQPAKKRLNFGQTGDSESVPDPQPLGEPPATPAAVGPTTMASGGGAPMADNNEGADGVGNASGNWHCDSTWLGDRVITTSTRTWALPTYNNHLYKQISNGTSGGSTNDNTYFGCVTPWGYFDFNKFHCHFSPDDWQRLINNGWGFRTKRLNFKLFSMKVKKGTDNTGIKTIANNLTNTVHVFADSEYQLPYVLGSAHQGCLPPFPADVFMIPQYGYLTLNNGSQAVGRSSFYCLEYFPSQMLRTGNNFTFSYTFEDVPFHSSYAHSQSLDRLMNPLIDQYLYYLSRTQTTGGTANTQTLGFSQGGPNTMANQAKNWLPGPCYRQQRVSTTTGQNNNSNFAWTAGTKYHLNGRNSLANPGIAMATHKDDKERFFPSNGILIFGKQNAARDNADYSDVMLTSEEEIKTTNPVATEEYGIVADNLQQQNTAPQIGTVNSQGALPGMVWQNRDVYLQGPIWAKIPHTDGNFHPSPLMGGFGLKHPPPQILIKNTPVPADPPTTFNQSKLNSFITQYSTGQVSVEIEWELQKENSKRWNPEIQYTSNYYKSTSVDFAVNTEGVYSEPHPIGTRYLTRPL

SEQ ID NO: 1116 - protein, 737 aa, Artificial Sequence
  source: /note="Description of Artificial Sequence: Synthetic polypeptide"
MAADGYLPDWLEDTLSEGIRQWWKLKPGPPPPKPAERHKDDSRGLVLPGYKYLGPFNGLDKGEPVNAADAAALEHDKAYDQQLKAGDNPYLRYNHADAEFQERLQEDTSFGGNLGRAVFQAKKRVLEPLGLVEEGAKTAPGKKRPVEPSPQRSPDSSTGIGKKGQQPAKKRLNFGQTGDSESVPDPQPIGEPPAGPSGLGSGTMAAGGGAPMADNNEGADGVGSSSGNWHCDSTWLGDRVITTSTRTWALPTYNNHLYKQISSASTGASNDNHYFGYSTPWGYFDFNRFHCHFSPRDWQRLINNNWGFRPKRLNFKLFNIQVKEVTDNNGVKTIANNLTSTVQVFTDSEYQLPYVLGSAHQGCLPPFPADVFMIPQYGYLTLNNGSQAVGRSSFYCLEYFPSQMLRTGNNFTFSYTFEDVPFHSSYAHSQSLDRLMNPLIDQYLYYLSRTQTTGGTANTQTLGFSQGGPNTMANQAKNWLPGPCYRQQRVSTTTGQNNNSNFAWTAGTKYHLNGRNSLANPGIAMATHKDDKERFFPSNGILIFGKQNAARDNADYSDVMLTSEEEIKTTNPVATEEYGIVADNLQQQNTAPQIGTVNSQGALPGMVWQNRDVYLQGPIWAKILHTDGNFHPSPLMGGFGMKHPPPPILIKNTPVPADPPTTFNQSKLNSFITQYSTGQVSVEIEWELPKENSKRWNPEIQYTSNYYKSTSVDFAVNTEGVYYEPHPIGTRYLTPPL

SEQ ID NO: 1117 - protein, 737 aa, Artificial Sequence
  source: /note="Description of Artificial Sequence: Synthetic polypeptide"
MAADGYLPDWLEDNLSEGIREWWALKPGAPKPKANQQKQDDGRGLVLPGYKYLGPFNGLDKGEPVNAADAAALEHDKAYDQQLKAGDNPYLRYNHADAEFQERLQEDTSFGGNLGRAVFQAKKRVLEPLGLVEEGAKTAPGKKRPVEPSPQRSPDSSTGIGKKGQQPARKRLNFGQTGDSESVPDPQPLGEPPAAPSGVAPNTMAAGGGAPMADNNEGADGVGNASGNWHCDSTWLGDRVITTSTRTWALPTYNNHLYKQISSASTGASNDNHYFGYSTPWGYFDFNRFHCHFSPRDWQRLITTIGGFRPKRLNFKLFNIQVKEVTDNNGVKTIANNLTSTVQVFTDSEYQLPYVLGSAHQGCLPPFPADVFMIPQYGYLTLNNGSQAVGRSSFYCLEYFPSQMLRTGNNFTFSYTFEDVPFHSSYAHSQSLDRLMNPLIDQYLYYLSRTQTTGGTANTQTLGFSQGGPNTMANQAKNWLPGPCYRQQRVSTTTGQNNNSNFAWTAGTKYHLNGRNSLANPGIAMATHKDDKERFFPSNGILIFGKQNAARDNADYSDVMLTSEEEIKTTNPVATEEYGIVADNLQQQNTAPQIGTVNSQGALPGMVWQNRDVYLQGPIWAKIPHTDGNFHPSPLMGGFGLKHPPPQILIKNTPVPADPPTTFNQSKLNSFITQYSTGQVSVEIEWELQKENSKRWNPEIQYTSNYYKSTSVDFAVNTEGVYSEPHPIGTRYLTRPL

SEQ ID NO: 1118 - protein, 736 aa, Artificial Sequence
  source: /note="Description of Artificial Sequence: Synthetic polypeptide"
MAADGYLPDWLEDTLSEGIRQWWKLKPGPPPPKPAERHKDDGRGLVLPGYKYLGPFNGLDKGEPVNAADAAALEHDKAYDQQLKAGDNPYLRYNHADAEFQERLQEDTSFGGNLGRAVFQAKKRVLEPLGLVEEPVKTAPGKKRPVEQSPQEPDSSSGIGKKGQQPAKKRLNFGQTGDSESVPDPQPLGEPPATPAAVGPTTMASGGGAPMADNNEGADGVGNASGNWHCDSTWMGDRVITTSTRTWALPTYNNHLYKQISSASTGASNDNHYFGYSTPWGYFDFNRFHCHFSPRDWQRLINNNWGFRPKRLNFKLFNIQVKEVTQNEGTKTIANNLTSTIQVFTDSEYQLPYVLGSAHQGCLPPFPADVFMIPQYGYLTLNNGSQAVGRSSFYCLEYFPSQMLRTGNNFQFTYTFEDVPFHSSYAHSQSLDRLMNPLIDQYLYYLSRTQTTGGTANTQTLGFSQGGPNTMANHAKNWLPGPCYRQQRVSTTTGQNNNSNFAWTAGTKYHLNGRNSLANPGIAMATHKDDKERFFPSNGILIFGKQNAARDNADYSDVMLTSEEEIKTTNPVATEEYGIVADNLQQQNTAPQIGTVNSQGALPGMVWQNRDVYLQGPIWAKIPHTDGNFHPSPLMGGFGLKHPPPQILIKNTPVPADPPTTFNQSKLNSFITQYSTGQVSVEIEWELQKENSKRWNPEIQYTSNYYKSTSVDFAVNTEGVYSEPHPIGTRYLTRPL

SEQ ID NO: 1119 - protein, 737 aa, Artificial Sequence
  source: /note="Description of Artificial Sequence: Synthetic polypeptide"
MAADGYLPDWLEDNLSQGIREWWDLKPGAPKPKANQQKQDDGRGLVLPGYKYLGPFNGLDKGEPVNAADAAALEHDKAYDQQLKAGDNPYLRYNHADAEFQERLQEDTSFGGNLGRAVFQAKKRVLEPLGLVEEGAKTAPGKKRPVEPSPQRSPDSSTGIGKKGQQPARKRLNFGQTGDSESVPDPQPLGEPPAAPAAVGPTTMASGGGAPMADNNEGADGVGSSSGNWHCDSQWLGDRVITTSTRTWALPTYNNHLYKQISSASTGASNDNHYFGYSTPWGYFDFNRFHCHFSPRDWQRLINNNWGFRPKRLSFKLFNIQVKEVTQNEGTKTIANNLTSTIQVFTDSEYQLPYVLGSAHQGCLPPFPADVFMIPQYGYLTLNNGSQAVGRSSFYCLEYFPSQMLRTGNNFQFTYTFEDVPFHSSYAHSQSLDRLMNPLIDQYLYYLSRTQTTGGTTNAQTLGFSQGGPNTMANQAKNWLPGPCYRQQRVSTTTGQNNNSNFAWTAGTKYHLNGRNSLANPGIAMATHKDDKERFFPSNGILIFGKQNAARDNADYSDVMLTSEEEIKTTNPVATEEYGIVADNLQQQNTAPQIGTVNSQGALPGMVWQNRDVYLQGPIWAKIPHTDGNFHPSPLMGGFGLKHPPPQILIKNTPVPADPPTTFNQSKLNSFITQYSTGQVSVEIEWELQKENSKRWNPEIQYTSNYYKSTNVDFAVNTEGVYSEPHPIGTRYLTRPL

SEQ ID NO: 1120 - protein, 736 aa, Artificial Sequence
  source: /note="Description of Artificial Sequence: Synthetic polypeptide"
MAADGYLPDWLEDNLSEGIREWWDLKPGAPKPKANQQKQDDGRGLVLPGYKYLGPFNGLDKGEPVNAADAAALEHDKAYDQQLKAGDNPYLRYNHADAEFQERLQEDTSFGGNLGRAVFQAKKRVLEPFGLVEEGAKTAPGKKRPVEQSPQEPDSSSGIGKTGQQPAKKRLNFGQTGDTESVPDPQPIGEPPAAPSGVGPNTMAAGGGAPMADNNEGADGVGSSSGNWHCDSTWMGDRVITTSTRTWALPTYNNHLYKQISSASTGASNDNHYFGYSTPWGYFDFNRFHCHFSPRDWQRLINNNWGFRPKRLNFKLFNIQVKEVTQNEGTKTIANNLTSTIQVFTDSEYQLPYVLGSAHQGCLPPFPADVFMIPQYGYLTLNNGSQAVGRSSFYCLEYFPSQMLRTGNNFQFTYTFEDVPFHSSYAHSQSLDRLMNPLIDQYLYYLSRTQTTGGTANTQTLGFSQGGPNTMANQAKNWLPGPCYRQQRVSTTTGQNNNSNFAWTAGTKYHLNGRNSLANPGIAMATHKDDKERFFPSNGILIFGKQNAARDNADYSDVMLTSEEEIKTTNPVATEEYGIVADNLQQQNTAPQIGTVNSQGALPGMVWQNRDVYLQGPIWAKIPHTDGNFHPSPLMGGFGLKHPPPQILIKNTPVPADPPTTFNQSKLNSFITQYSTGQVSVEIEWELQKENSKRWNPEIQYTSNYYKSTNVDFAVNTEGVYSEPHPIGTRYFTRPL

SEQ ID NO: 1121 - protein, 736 aa, Artificial Sequence
  source: /note="Description of Artificial Sequence: Synthetic polypeptide"
MAADGYLPDWLEDNLSEGIREWWDLKPGAPKPKANQQKQDDGRGLVLPGYKYLGPFNGLDKGEPVNAADAAALEHDKAYDQQLKAGDNPYLRYNHADAEFQERLQEDTSFGGNLGRAVFQAKKRVLEPLGLVEEGAKTAPGKKRPVEQSPQEPDSSSGIGKTGQQPAKKRLNFGQTGDSESVPDPQPLGEPPATPAAVGPTTMASGGGAPMADNNEGADGVGNSSGNWHCDSTWMGDRVITTSTRTWALPTYNNHLYKQISSASTGASNDNHYFGYSTPWGYFDFNRFHCHFSPRDWQRLINNNWGFRPKRLNFKLFNIQVKEVTDNNGVKTIANNLTSTVQVFTDSEYQLPYVLGSAHQGCLPPFPADVFMIPQYGYLTLNNGSQAVGRSSFYCLEYFPSQMLRTGNNFQFTYTFEDVPFHSSYAHSQSLDRLMNPLIDQYLYYLSRTQTTGGTANTQTLGFSQGGPNTMANQAKNWLPGPCYRQQRVSTTTGQNNNSNFAWTAGTKYHLNGRNSLANPGIAMATHKDDKERFFPSNGILIFGKQNAARDNADYSDVMLTSEEEIKTTNPVATEEYGIVADNLQQQNTAPQIGTVNSQGALPGMVWQNRDVYLQGPIWAKIPHTDGNFHPSPLMGGFGLKHPPPQILIKNTPVPADPPTTFNQSKLNSFITQYSTGQVSVEIEWELQKENSKRWNPEIQYTSNYYKSTNVDFAVNTEGVYSEPHPIGTRYLTRPL

SEQ ID NO: 1122 - protein, 736 aa, Artificial Sequence
  source: /note="Description of Artificial Sequence: Synthetic polypeptide"
MAADGYLPDWLEDNLSEGIREWWDLKPGAPKPKANQQKQDDGRGLVLPGYKYLGPFNGLDKGEPVNAADAAALEHDKAYDQQLKAGDNPYLRYNHADAEFQERLQEDTSFGGNLGRAVFQAKKRVLEPLGLVEEGAKTAPGKKRPVEQSPQEPDSSSGIGKTGQQPAKKRLNFGQTGDSESVPDPQPLGEPPATPAAVGPTTMASGGGAPMADNNEGADGVGNASGNWHCDSTWLGDRVITTSTRTWALPTYNNHLYKQISSASTGASNDNHYFGYSTPWGYFDFNRFHCHFSPRDWQRLINNNWGFRPKRLNFKLFNIQVKEVTQNEGTKTIANNLTSTIQVFTDSEYQLPYVLGSAHQGCLPPFPADVFMIPQYGYLTLNNGSQAVGRSSFYCLEYFPSQMLRTGNNFEFSYQFEDVPFHSSYAHSQSLDRLMNPLIDQYLYYLSRTQTTGGTANTQTLGFSQGGPNTMANQAKNWLPGPCYRQQRVSTTTGQNNNSNFAWTAGTKYHMNGRNSLVNPGIAMATHKDDKERFFPSNGILIFGKQNVARDNADYSDVMLTSEEEIKTTNPVATEEYGIVADNLQQQNTAPQIGTVNSQGALPGMVWQNRDVYLQGPIWAKIPHTDGNFHPSPLMGGFGLKHPPPQILIKNTPVPADPPTTFNQSKLNSFITQYSTGQVSVEIEWELQKENSKRWNPEIQYTSNYYKSTSVDFAVNTEGVYSEPHPIGTRYLTRPL

SEQ ID NO: 1123 - DNA, 2217 bp, Artificial Sequence
  source: /note="Description of Artificial Sequence: Synthetic polynucleotide"
atggctgccgatggttatcttccagattggctcgaggacaacctctctgagggcattcgcgagtggtgggcgctgaaacctggagccccgaagcccaaagccaaccagcaaaagcaggacgacggccggggtctggtgcttcctggctacaagtacctcggacccttcaacggactcgacaagggggagcccgtcaacgcggcggacgcagcggccctcgagcacgacaaggcctacgaccagcagctgcaggcgggtgacaatccgtacctgcggtataaccacgccgacgccgagtttcaggagcgtctgcaagaagatacgtcttttgggggcaacctcgggcgagcagtcttccaggccaagaagcgggttctcgaacctctcggtctggttgaggaaggcgctaagacggctcctggaaagaagagaccggtagagccatcaccccagcgttctccagactcctctacgggcatcggcaagaaaggccaacagcccgccagaaaaagactcaattttggtcagactggcgactcagagtcagttccagaccctcaacctctcggagaacctccagcagcgccctctggtgtgggacctaatacaatggctgcaggcggtggcgcaccaatggcagacaataacgaaggcgccgacggagtgggtagttcctcgggaaattggcattgcgattccacatggctgggcgacagagtcatcaccaccagcacccgaacctgggccctgcccacctacaacaaccacctctacaagcaaatctccaacgggacatcgggaggagccaccaacgacaacacctacttcggctacagcaccccctgggggtattttgactttaacagattccactgccacttttcaccacgtgactggcagcgactcatcaacaacaactggggattccggcccaagagactcagcttcaagctcttcaacatccaggtcaaggaggtcacgcagaatgaaggcaccaagaccatcgccaataacctcaccagcaccatccaggtgtttacggactcggagtaccagctgccgtacgttctcggctctgcccaccagggctgcctgcctccgttcccggcggacgtgttcatgattccccagtacggctacctaacactcaacaacggtagtcaggccgtgggacgctcctccttctactgcctggaatactttccttcgcagatgctgagaaccggcaacaacttccagtttacttacaccttcgaggacgtgcctttccacagcagctacgcccacagccagagcttggaccggctgatgaatcctctgattgaccagtacctgtactacttgtctcggactcaaacaacaggaggcacggcaaatacgcagactctgggcttcagccaaggtgggcctaatacaatggccaatcaggcaaagaactggctgccaggaccctgttaccgccaacaacgcgtctcaacgacaaccgggcaaaacaacaatagcaactttgcctggactgctgggaccaaataccatctgaatggaagaaattcattggctaatcctggcatcgctatggcaacacacaaagacgacgaggagcgtttttttcccagtaacgggatcctgatttttggcaaacaaaatgctgccagagacaatgcggattacagcgatgtcatgctcaccagcgaggaagaaatcaaaaccactaaccctgtggctacagaggaatacggtatcgtggcagataacttgcagcagcaaaacacggctcctcaaattggaactgtcaacagccagggggccttacccggtatggtttggcagaaccgggacgtgtacctgcagggtcccatctgggccaagattcctcacacggacggcaacttccacccgtctccgctgatgggcggctttggcctgaaacatcctccgcctcagatcctgatcaagaacacgcctgtacctgcggatcctccgaccaccttcaaccagtcaaagctgaactctttcatcacgcaatacagcaccggacaggtcagcgtggaaattgaatgggagctgcagaaggaaaacagcaagcgctggaaccccgagatccagtacacctccaactactacaaatctacaagtgtggactttgctgttaatacagaaggcgtgtactctgaaccccgccccattggcacccgttacctcacccgtaatctgtaa

SEQ ID NO: 1124 - protein, 738 aa, Artificial Sequence; identical to SEQ ID NO: 114
  source: /note="Description of Artificial Sequence: Synthetic polypeptide"

SEQ ID NO: 1125 - protein, 735 aa, Artificial Sequence
  source: /note="Description of Artificial Sequence: Synthetic polypeptide"
MAADGYLPDWLEDNLSEGVREWWALQPGAPKPKANQQHQDNARGLVLPGYKYLGPGNGLDKGEPVNAADAAALEHDKAYDQQLKAGDNPYLKYNHADAEFQQRLQGDTSFGGNLGRAVFQAKKRVLEPLGLVEQAGETAPGKKRPLIESPQQPDSSTGIGKKGKQPAKKKLVFEDETGAGDGPPEGSTSGAMSDDSEMRAAAGGAAVEGGQGADGVGNASGDWHCDSTWSEGHVTTTSTRTWVLPTYNNHLYKRLGESLQSNTYNGFSTPWGYFDFNRFHCHFSPRDWQRLINNNWGMRPKAMRVKIFNIQVKEVTTSNGETTVANNLTSTVQIFADSSYELPYVMDAGQEGSLPPFPNDVFMVPQYGYCGLVTGNTSQQQTDRNAFYCLEYFPSQMLRTGNNFEITYSFEKVPFHSMYAHSQSLDRLMNPLIDQYLWGLQSTTTGTTLNAGTATTNFTKLRPTNFSNFKKNWLPGPSIKQQGFSKTANQNYKIPATGSDSLIKYETHSTLDGRWSALTPGPPMATAGPADSKFSNSQLIFAGPKQNGNTATVPGTLIFTSEEELAATNATDTDMWGNLPGGDQSNSNLPTVDRLTALGAVPGMVWQNRDIYYQGPIWAKIPHTDGHFHPSPLIGGFGLKHPPPQIFIKNTPVPANPATTFSSTPVNSFITQYSTGQVSVQIDWEIQKERSKRWNPEVQFTSNYGQQNSLLWAPDAAGKYTEPRAIGTRYLTHHL

SEQ ID NO: 1126 - protein, 735 aa, Artificial Sequence
  source: /note="Description of Artificial Sequence: Synthetic polypeptide"
MAADGYLPDWLEDNLSEGVREWWALQPGAPKPKANQQHQDNARGLVLPGYKYLGPGNGLDKGEPVNAADAAALEHDKAYDQQLKAGDNPYLKYNHADAEFQQRLQGDTSFGGNLGRAVFQAKKRVLEPLGLVEQAGETAPGKKRPLIESPQQPDSSTGIGKKGKQPAKKKLVFEDETGAGDGPPEGSTSGAMSDDSEMRAAAGGAAVEGGQGADGVGNASGDWHCDSTWSEGHVTTTSTRTWVLPTYNNHLYKRLGESLQSNTYNGFSTPWGYFDFNRFHCHFSPRDWQRLINNNWGMRPKAMRVKIFNIQVKEVTTSNGETTVANNLTSTVQIFADSSYELPYVMDAGQEGSLPPFPNDVFMVPQYGYCGLVTGNTSQQQTDRNAFYCLEYFPSQMLRTGNNFEITYSFEKVPFHSMYAHSQSLDRLMNPLIDQYLWGLQSTTTGTTLNAGTATTNFTKLRPTNFSNFKKNWLPGPSIKQQGFSKTANQNYLIPATGSDSLIRYETHSTLDGRWSALTPGPPMATAGPADSKFSNSQLIFAGPKQNGNTATVPGTLIFTSEEELAATNATDTDMWGNLPFRDLSSSNLPTVDRSTPLGAVPGMVWQNRDIYYQGPIWAKIPHTDGHFHPSPLIGGFGLKHPPPQIFIKNTPVPANPATTFSSTPVNSFITQYSTGQVSVQIDWEIQKERSKRWNPEVQFTSNYGQQNSLLWAPDAAGKYTEPRAIGTRYLTHHL

SEQ ID NO: 1127 - protein, 735 aa, Artificial Sequence
  source: /note="Description of Artificial Sequence: Synthetic polypeptide"
MAADGYLPDWLEDNLSEGVREWWALQPGAPKPKANQQHQDNARGLVLPGYKYLGPGNGLDKGEPVNAADAAALEHDKAYDQQLKAGDNPYLKYNHADAEFQQRLQGDTSFGGNLGRAVFQAKKRVLEPLGLVEQAGETAPGKKRPLIESPQQPDSSTGIGKKGKQPAKKKLVFEDETGAGDGPPEGSTSGAMSDDSEMRAAAGGAAVEGGQGADGVGNASGDWHCDSTWSEGHVTTTSTRTWVLPTYNNHLYKRLGESLQSNTYNGFSTPWGYFDFNRFHCHFSPRDWQRLINNNWGMRPKAMRVKIFNIQVKEVTTSNGETTVANNLTSTVQIFADSSYELPYVMDAGQEGSLPPFPNDVFMVPQYGYCGLVTGNTSQQQTDRNAFYCLEYFPSQMLRTGNNFEITYSFEKVPFHSMYAHSQSLDRLMNPLIDQYLWGLQSTTTGTTLNAGTATTNFTKLRPTNFSNFKKNWLPGPSIKQQGFSKTANQNYYIPATGSDSLILYETHSTLDGRWSALTPGPPMATAGPADSKFSNSQLIFAGPKQNGNTATVPGTLIFTSEEELAATNATDTDMWGNLPGGDQSNSNLPTVDRLTALGAVPGMVWQNRDIYYQGPIWAKIPHTDGHFHPSPLIGGFGLKHPPPQIFIKNTPVPANPATTFSSTPVNSFITQYSTGQVSVQIDWEIQKERSKRWNPEVQFTSNYGQQNSLLWAPDAAGKYTEPRAIGTRYLTHHL

SEQ ID NO: 1128 - protein, 735 aa, Artificial Sequence
  source: /note="Description of Artificial Sequence: Synthetic polypeptide"
MAADGYLPDWLEDNLSEGVREWWALQPGAPKPKANQQHQDNARGLVLPGYKYLGPGNGLDKGEPVNAADAAALEHDKAYDQQLKAGDNPYLKYNHADAEFQQRLQGDTSFGGNLGRAVFQAKKRVLEPLGLVEQAGETAPGKKRPLIESPQQPDSSTGIGKKGKQPAKKKLVFEDETGAGDGPPEGSTSGAMSDDSEMRAAAGGAAVEGGQGADGVGNASGDWHCDSTWSEGHVTTTSTRTWVLPTYNNHLYKRLGESLQSNTYNGFSTPWGYFDFNRFHCHFSPRDWQRLINNNWGMRPKAMRVKIFNIQVKEVTTSNGETTVANNLTSTVQIFADSSYELPYVMDAGQEGSLPPFPNDVFMVPQYGYCGLVTGNTSQQQTDRNAFYCLEYFPSQMLRTGNNFEITYSFEKVPFHSMYAHSQSLDRLMNPLIDQYLWGLQSTTTGTTLNAGTATTNFTKLRPTNFSNFKKNWLPGPSIKQQGFSKTANQNYGIPATGSDSLIKYETHSTLDGRWSALTPGPPIATAGPADSKFSNSQLIFAGPKQNGNTATVPGTLIFTSEEELAATNATDTDMWGNLPLYDASSSNLPTVDRLTLLGAVPGMVWQNRDIYYQGPIWAKIPHTDGHFHPSPLIGGFGLKHPPPQIFIKNTPVPANPATTFSSTPVNSFITQYSTGQVSVQIDWEIQKERSKRWNPEVQFTSNYGQQNSLLWAPDAAGKYTEPRAIGTRYLTHHL

SEQ ID NO: 1129 - protein, 735 aa, Artificial Sequence
  source: /note="Description of Artificial Sequence: Synthetic polypeptide"
MAADGYLPDWLEDNLSEGVREWWALQPGAPKPKANQQHQDNARGLVLPGYKYLGPGNGLDKGEPVNAADAAALEHDKAYDQQLKAGDNPYLKYNHADAEFQQRLQGDTSFGGNLGRAVFQAKKRVLEPLGLVEQAGETAPGKKRPLIESPQQPDSSTGIGKKGKQPAKKKLVFEDETGAGDGPPEGSTSGAMSDDSEMRAAAGGAAVEGGQGADGVGNASGDWHCDSTWSEGHVTTTSTRTWVLPTYNNHLYKRLGESLQSNTYNGFSTPWGYFDFNRFHCHFSPRDWQRLINNNWGMRPKAMRVKIFNIQVKEVTTSNGETTVANNLTSTVQIFADSSYELPYVMDAGQEGSLPPFPNDVFMVPQYGYCGLVTGNTSQQQTDRNAFYCLEYFPSQMLRTGNNFEITYSFEKVPFHSMYAHSQSLDRLMNPLIDQYLWGLQSTTTGTTLNAGTATTNFTKLRPTNFSNFKKNWLPGPSIKQQGFSKTANQNYTIPATGSDSLITYETHSTLDGRWSALTPGPPGATAGPADSKFSNSQLIFAGPKQNGNTATVPGTLIFTSEEELAATNATDTDMWGNLPRVDTSASNLPTVDRYTNLGAVPGMVWQNRDIYYQGPIWAKIPHTDGHFHPSPLIGGFGLKHPPPQIFIKNTPVPANPATTFSSTPVNSFITQYSTGQVSVQIDWEIQKERSKRWNPEVQFTSNYGQQNSLLWAPDAAGKYTEPRAIGTRYLTHHL

SEQ ID NO: 1130 - protein, 735 aa, Artificial Sequence
  source: /note="Description of Artificial Sequence: Synthetic polypeptide"
MAADGYLPDWLEDNLSEGVREWWALQPGAPKPKANQQHQDNARGLVLPGYKYLGPGNGLDKGEPVNAADAAALEHDKAYDQQLKAGDNPYLKYNHADAEFQQRLQGDTSFGGNLGRAVFQAKKRVLEPLGLVEQAGETAPGKKRPLIESPQQPDSSTGIGKKGKQPAKKKLVFEDETGAGDGPPEGSTSGAMSDDSEMRAAAGGAAVEGGQGADGVGNASGDWHCDSTWSEGHVTTTSTRTWVLPTYNNHLYKRLGESLQSNTYNGFSTPWGYFDFNRFHCHFSPRDWQRLINNNWGMRPKAMRVKIFNIQVKEVTTSNGETTVANNLTSTVQIFADSSYELPYVMDAGQEGSLPPFPNDVFMVPQYGYCGLVTGNTSQQQTDRNAFYCLEYFPSQMLRTGNNFEITYSFEKVPFHSMYAHSQSLDRLMNPLIDQYLWGLQSTTTGTTLNAGTATTNFTKLRPTNFSNFKKNWLPGPSIKQQGFSKTANQNYSIPATGSDSLIKYETHSTLDGRWSALTPGPPFATAGPADSKFSNSQLIFAGPKQNGNTATVPGTLIFTSEEELAATNATDTDMWGNLPDYDSSLSNLPTVDRDTTLGAVPGMVWQNRDIYYQGPIWAKIPHTDGHFHPSPLIGGFGLKHPPPQIFIKNTPVPANPATTFSSTPVNSFITQYSTGQVSVQIDWEIQKERSKRWNPEVQFTSNYGQQNSLLWAPDAAGKYTEPRAIGTRYLTHHL

SEQ ID NO: 1131 - protein, 735 aa, Artificial Sequence
  source: /note="Description of Artificial Sequence: Synthetic polypeptide"
MAADGYLPDWLEDNLSEGVREWWALQPGAPKPKANQQHQDNARGLVLPGYKYLGPGNGLDKGEPVNAADAAALEHDKAYDQQLKAGDNPYLKYNHADAEFQQRLQGDTSFGGNLGRAVFQAKKRVLEPLGLVEQAGETAPGKKRPLIESPQQPDSSTGIGKKGKQPAKKKLVFEDETGAGDGPPEGSTSGAMSDDSEMRAAAGGAAVEGGQGADGVGNASGDWHCDSTWSEGHVTTTSTRTWVLPTYNNHLYKRLGESLQSNTYNGFSTPWGYFDFNRFHCHFSPRDWQRLINNNWGMRPKAMRVKIFNIQVKEVTTSNGETTVANNLTSTVQIFADSSYELPYVMDAGQEGSLPPFPNDVFMVPQYGYCGLVTGNTSQQQTDRNAFYCLEYFPSQMLRTGNNFEITYSFEKVPFHSMYAHSQSLDRLMNPLIDQYLWGLQSTTTGTTLNAGTATTNFTKLRPTNFSNFKKNWLPGPSIKQQGFSKTANQNYSIPATGSDSLIWYETHSTLDGRWSALTPGPPCATAGPADSKFSNSQLIFAGPKQNGNTATVPGTLIFTSEEELAATNATDTDMWGNLPQGDSSLSNLPTVDRMTVLGAVPGMVWQNRDIYYQGPIWAKIPHTDGHFHPSPLIGGFGLKHPPPQIFIKNTPVPANPATTFSSTPVNSFITQYSTGQVSVQIDWEIQKERSKRWNPEVQFTSNYGQQNSLLWAPDAAGKYTEPRAIGTRYLTHHL

SEQ ID NO: 1132 - protein, 735 aa, Artificial Sequence
  source: /note="Description of Artificial Sequence: Synthetic polypeptide"
MAADGYLPDWLEDNLSEGVREWWALQPGAPKPKANQQHQDNARGLVLPGYKYLGPGNGLDKGEPVNAADAAALEHDKAYDQQLKAGDNPYLKYNHADAEFQQRLQGDTSFGGNLGRAVFQAKKRVLEPLGLVEQAGETAPGKKRPLIESPQQPDSSTGIGKKGKQPAKKKLVFEDETGAGDGPPEGSTSGAMSDDSEMRAAAGGAAVEGGQGADGVGNASGDWHCDSTWSEGHVTTTSTRTWVLPTYNNHLYKRLGESLQSNTYNGFSTPWGYFDFNRFHCHFSPRDWQRLINNNWGMRPKAMRVKIFNIQVKEVTTSNGETTVANNLTSTVQIFADSSYELPYVMDAGQEGSLPPFPNDVFMVPQYGYCGLVTGNTSQQQTDRNAFYCLEYFPSQMLRTGNNFEITYSFEKVPFHSMYAHSQSLDRLMNPLIDQYLWGLQSTTTGTTLNAGTATTNFTKLRPTNFSNFKKNWLPGPSIKQQGFSKTANQNYCIPATGSDSLIRYETHSTLDGRWSALTPGPPLATAGPADSKFSNSQLIFAGPKQNGNTATVPGTLIFTSEEELAATNATDTDMWGNLPYKDSSRSNLPTVDRETSLGAVPGMVWQNRDIYYQGPIWAKIPHTDGHFHPSPLIGGFGLKHPPPQIFIKNTPVPANPATTFSSTPVNSFITQYSTGQVSVQIDWEIQKERSKRWNPEVQFTSNYGQQNSLLWAPDAAGKYTEPRAIGTRYLTHHL

SEQ ID NO: 1133 - protein, 735 aa, Artificial Sequence
  source: /note="Description of Artificial Sequence: Synthetic polypeptide"
MAADGYLPDWLEDNLSEGVREWWALQPGAPKPKANQQHQDNARGLVLPGYKYLGPGNGLDKGEPVNAADAAALEHDKAYDQQLKAGDNPYLKYNHADAEFQQRLQGDTSFGGNLGRAVFQAKKRVLEPLGLVEQAGETAPGKKRPLIESPQQPDSSTGIGKKGKQPAKKKLVFEDETGAGDGPPEGSTSGAMSDDSEMRAAAGGAAVEGGQGADGVGNASGDWHCDSTWSEGHVTTTSTRTWVLPTYNNHLYKRLGESLQSNTYNGFSTPWGYFDFNRFHCHFSPRDWQRLINNNWGMRPKAMRVKIFNIQVKEVTTSNGETTVANNLTSTVQIFADSSYELPYVMDAGQEGSLPPFPNDVFMVPQYGYCGLVTGNTSQQQTDRNAFYCLEYFPSQMLRTGNNFEITYSFEKVPFHSMYAHSQSLDRLMNPLIDQYLWGLQSTTTGTTLNAGTATTNFTKLRPTNFSNFKKNWLPGPSIKQQGFSKTANQNYIIPATGSDSLIYYETHSTLDGRWSALTPGPPRATAGPADSKFSNSQLIFAGPKQNGNTATVPGTLIFTSEEELAATNATDTDMWGNLPWIDNSRSNLPTVDRPTSLGAVPGMVWQNKNIYYQGPIWAKIPHTDGHFHPSPLIGGFGLKHPPPQIFIKNTPVPANPATTFTSTPVNSFITQYSTGQVSVQIDWEIQKERSKRWNPEVQFTSNYGQQNSLLWAPDAAGKYTEPRAIGTRYLTHHL

SEQ ID NO: 1134 - protein, 735 aa, Artificial Sequence
  source: /note="Description of Artificial Sequence: Synthetic polypeptide"
MAADGYLPDWLEDNLSEGVREWWALQPGAPKPKANQQHQDNARGLVLPGYKYLGPGNGLDKGEPVNAADAAALEHDKAYDQQLKAGDNPYLKYNHADAEFQQRLQGDTSFGGNLGRAVFQAKKRVLEPLGLVEQAGETAPGKKRPLIESPQQPDSSTGIGKKGKQPAKKKLVFEDETGAGDGPPEGSTSGAMSDDSEMRAAAGGAAVEGGQGADGVGNASGDWHCDSTWSEGHVTTTSTRTWVLPTYNNHLYKRLGESLQSNTYNGFSTPWGYFDFNRFHCHFSPRDWQRLINNNWGMRPKAMRVKIFNIQVKEVTTSNGETTVANNLTSTVQIFADSSYELPYVMDAGQEGSLPPFPNDVFMVPQYGYCGLVTGNTSQQQTDRNAFYCLEYFPSQMLRTGNNFEITYSFEKVPFHSMYAHSQSLDRLMNPLIDQYLWGLQSTTTGTTLNAGTATTNFTKLRPTNFSNFKKNWLPGPSIKQQGFSKTANQNYGIPATGSDSLIIYETHSTLDGRWSALTPGPPRATAGPADSKFSNSQLIFAGPKQNGNTATVPGTLIFTSEEELAATNATDTDMWGNLPGGDQSNSNLPTVDRLTALGAVPGMVWQNRDIYYQGPIWAKIPHTDGHFHPSPLIGGFGLKHPPPQIFIKNTPVPANPATTFSSTPVNSFITQYSTGQVSVQIDWEIQKERSKRWNPEVQFTSNYGQQNSLLWAPDAAGKYTEPRAIGTRYLTHHL

SEQ ID NO: 1135 - protein, 735 aa, Artificial Sequence
  source: /note="Description of Artificial Sequence: Synthetic polypeptide"
MAADGYLPDWLEDNLSEGVREWWALQPGAPKPKANQQHQDNARGLVLPGYKYLGPGNGLDKGEPVNAADAAALEHDKAYDQQLKAGDNPYLKYNHADAEFQQRLQGDTSFGGNLGRAVFQAKKRVLEPLGLVEQAGETAPGKKRPLIESPQQPDSSTGIGKKGKQPAKKKLVFEDETGAGDGPPEGSTSGAMSDDSEMRAAAGGAAVEGGQGADGVGNASGDWHCDSTWSEGHVTTTSTRTWVLPTYNNHLYKRLGESLQSNTYNGFSTPWGYFDFNRFHCHFSPRDWQRLINNNWGMRPKAMRVKIFNIQVKEVTTSNGETTVANNLTSTVQIFADSSYELPYVMDAGQEGSLPPFPNDVFMVPQYGYCGLVTGNTSQQQTDRNAFYCLEYFPSQMLRTGNNFEITYSFEKVPFHSMYAHSQSLDRLMNPLIDQYLWGLQSTTTGTTLNAGTATTNFTKLRPTNFSNFKKNWLPGPSIKQQGFSKTANQNYVIPATESDSLIYYETHSTLDGRWSALTPGPPYATAGPADSKFSNSQLIFAGPKQNGNTATVPGTLIFTSEEELAATNATDTDMWGNLPPRDDSTSNLPTVDRKTYLGAVPGMVWQNRDIYYQGPIWAKIPHTDGHFHPSPLIGGFGLKHPPPQIFIKNTPVPANPATTFSSTPVNSFITQYSTGQVSVQIDWEIQKERSKRWNPEVQFTSNYGQQNSLLWAPDAAGKYTEPRAIGTRYLTHHL

SEQ ID NO: 1136 - protein, 735 aa, Artificial Sequence
  source: /note="Description of Artificial Sequence: Synthetic polypeptide"
MAADGYLPDWLEDNLSEGVREWWALQPGAPKPKANQQHQDNARGLVLPGYKYLGPGNGLDKGEPVNAADAAALEHDKAYDQQLKAGDNPYLKYNHADAEFQQRLQGDTSFGGNLGRAVFQAKKRVLEPLGLVEQAGETAPGKKRPLIESPQQPDSSTGIGKKGKQPAKKKLVFEDETGAGDGPPEGSTSGAMSDDSEMRAAAGGAAVEGGQGADGVGNASGDWHCDSTWSEGHVTTTSTRTWVLPTYNNHLYKRLGESLQSNTYNGFSTPWGYFDFNRFHCHFSPRDWQRLINNNWGMRPKAMRVKIFNIQVKEVTTSNGETTVANNLTSTVQIFADSSYELPYVMDAGQEGSLPPFPNDVFMVPQYGYCGLVTGNTSQQQTDRNAFYCLEYFPSQMLRTGNNFEITYSFEKVPFHSMYAHSQSLDRLMNPLIDQYLWGLQSTTTGTTLNAGTATTNFTKLRPTNFSNFKKNWLPGPSIKQQGFSKTANQNYYIPATGSDSLIIYETHSTLDGRWSALTPGPPIATAGPADSKFSNSQLIFAGPKQNGNTATVPGTLIFTSEEELAATNSTDTDMWGNLPTDDDSRSNLPTVDRMTLLGAVPGMVWQNRDIYYQGPIWAKIPHTDGHFHPSPLIGGFGLKHPPPQIFIKNTPVPANPATTFSSTPVNSFITQYSTGQVSVQIDWEIQKERSKRWNPEVQFTSNYGQQNSLLWAPDAAGKYTEPRAIGTRYLTHHL

SEQ ID NO: 1137 - protein, 735 aa, Artificial Sequence
  source: /note="Description of Artificial Sequence: Synthetic polypeptide"
MAADGYLPDWLEDNLSEGVREWWALQPGAPKPKANQQHQDNARGLVLPGYKYLGPGNGLDKGEPVNAADAAALEHDKAYDQQLKAGDNPYLKYNHADAEFQQRLQGDTSFGGNLGRAVFQAKKRVLEPLGLVEQAGETAPGKKRPLIESPQQPDSSTGIGKKGKQPAKKKLVFEDETGAGDGPPEGSTSGAMSDDSEMRAAAGGAAVEGGQGADGVGNASGDWHCDSTWSEGHVTTTSTRTWVLPTYNNHLYKRLGESLQSNTYNGFSTPWGYFDFNRFHCHFSPRDWQRLINNNWGMRPKAMRVKIFNIQVKEVTTSNGETTVANNLTSTVQIFADSSYELPYVMDAGQEGSLPPFPNDVFMVPQYGYCGLVTGNTSQQQTDRNAFYCLEYFPSQMLRTGNNFEITYSFEKVPFHSMYAHSQSLDRLMNPLIDQYLWGLQSTTTGTTLNAGTATTNFTKLRPTNFSNFKKNWLPGPSIKQQGFSKTANQNYHIPATGSDSLIYYETHSTLDGRWSALTPGPPSATAGPADSKFSNSQLIFAGPKQNGNTATVPGTLIFTSEEELAATNATDTDMWGNLPRRDSSVSNLPTVDRYTDLGAVPGMVWQNRDIYYQGPIWAKIPHTDGHFHPSPLIGGFGLKHPPPQIFIKNTPVPANPATTFSSTPVNSFITQYSTGQVSVQIDWEIQKERSKRWNPEVQFTSNYGQQNSLLWAPDAAGKYTEPRAIGTRYLTHHL

SEQ ID NO: 1138 - protein, 735 aa, Artificial Sequence
  source: /note="Description of Artificial Sequence: Synthetic polypeptide"
MAADGYLPDWLEDNLSEGVREWWALQPGAPKPKANQQHQDNARGLVLPGYKYLGPGNGLDKGEPVNAADAAALEHDKAYDQQLKAGDNPYLKYNHADAEFQQRLQGDTSFGGNLGRAVFQAKKRVLEPLGLVEQAGETAPGKKRPLIESPQQPDSSTGIGKKGKQPAKKKLVFEDETGAGDGPPEGSTSGAMSDDSEMRAAAGGAAVEGGQGADGVGNASGDWHCDSTWSEGHVTTTSTRTWVLPTYNNHLYKRLGESLQSNTYNGFSTPWGYFDFNRFHCHFSPRDWQRLINNNWGMRPKAMRVKIFNIQVKEVTTSNGETTVANNLTSTVQIFADSSYELPYVMDAGQEGSLPPFPNDVFMVPQYGYCGLVTGNTSQQQTDRNAFYCLEYFPSQMLRTGNNFEITYSFEKVPFHSMYAHSQSLDRLMNPLIDQYLWGLQSTTTGTTLNAGTATTNFTKLRPTNFSNFKKNWLPGPSIKQQGFSKTANQNYSIPATGSDSLISYETHSTLDGRWSALTPGPPRATAGPADSKFSNSQLIFAGPKQNGNTATVPGTLIFTSEEELAATNATDTDMWGNLPRHDSSLSNLPTVDRNTGLGAVPGMVWQNRDIYYQGPIWAKIPHTDGHFHPSPLIGGFGLKHPPPQIFIKNTPVPANPATTFSSTPVNSFITQYSTGQVSVQIDWEIQKERSKRWNPEVQFTSNYGQQNSLLWAPDAAGKYTEPRAIGTRYLTHHL

SEQ ID NO: 1139 - protein, 735 aa, Artificial Sequence
  source: /note="Description of Artificial Sequence: Synthetic polypeptide"
MAADGYLPDWLEDNLSEGVREWWALQPGAPKPKANQQHQDNARGLVLPGYKYLGPGNGLDKGEPVNAADAAALEHDKAYDQQLKAGDNPYLKYNHADAEFQQRLQGDTSFGGNLGRAVFQAKKRVLEPLGLVEQAGETAPGKKRPLIESPQQPDSSTGIGKKGKQPAKKKLVFEDETGAGDGPPEGSTSGAMSDDSEMRAAAGGAAVEGGQGADGVGNASGDWHCDSTWSEGHVTTTSTRTWVLPTYNNHLYKRLGESLQSNTYNGFSTPWGYFDFNRFHCHFSPRDWQRLINNNWGMRPKAMRVKIFNIQVKEVTTSNGETTVANNLTSTVQIFADSSYELPYVMDAGQEGSLPPFPNDVFMVPQYGYCGLVTGNTSQQQTDRNAFYCLEYFPSQMLRTGNNFEITYSFEKVPFHSMYAHSQSLDRLMNPLIDQYLWGLQSTTTGTTLNAGTATTNFTKLRPTNFSNFKKNWLPGPSIKQQGFSKTANQNYFIPATGSDSLIRYETHSTLDGRWSALTPGPPLATAGPADSKFSNSQLIFAGPKQNGNTATVPGTLIFTSEEELAATNATDTDMWGNLPVIDFSKSNLPTVDRLTHLGAVPGMVWQNRDIYYQGPIWAKIPHTDGHFHPSPLIGGFGLKHPPPQIFIKNTPVPANPATTFSSTPVNSFITQYSTGQVSVQIDWEIQKERSKRWNPEVQFTSNYGQQNSLLWAPDAAGKYTEPRAIGTRYLTHHL

SEQ ID NO: 1140 - protein, 735 aa, Artificial Sequence
  source: /note="Description of Artificial Sequence: Synthetic polypeptide"
MAADGYLPDWLEDNLSEGVREWWALQPGAPKPKANQQHQDNARGLVLPGYKYLGPGNGLDKGEPVNAADAAALEHDKAYDQQLKAGDNPYLKYNHADAEFQQRLQGDTSFGGNLGRAVFQAKKRVLEPLGLVEQAGETAPGKKRPLIESPQQPDSSTGIGKKGKQPAKKKLVFEDETGAGDGPPEGSTSGAMSDDSEMRAAAGGAAVEGGQGADGVGNASGDWHCDSTWSEGHVTTTSTRTWVLPTYNNHLYKRLGESLQSNTYNGFSTPWGYFDFNRFHCHFSPRDWQRLINNNWGMRPKAMRVKIFNIQVKEVTTSNGETTVANNLTSTVQIFADSSYELPYVMDAGQEGSLPPFPNDVFMVPQYGYCGLVTGNTSQQQTDRNAFYCLEYFPSQMLRTGNNFEITYSFEKVPFHSMYAHSQSLDRLMNPLIDQYLWGLQSTTTGTTLNAGTATTNFTKLRPTNFSNFKKNWLPGPSIKQQGFSKTANQNYKIPATGSDSLIKYETHSTLDGRWSALTPGPPMATAGPADSKFSNSQLIFAGPKQNGNTATVPGTLIFTSEEELAATNATDTDMWGNLPVRDFSLSNLPTVDRTTKLGAVPGMVWQNRDIYYQGPIWAKIPHTDGHFHPSPLIGGFGLKHPPPQIFIKNTPVPANPATTFSSTPVNSFITQYSTGQVSVQIDWEIQKERSKRWNPEVQFTSNYGQQNSLLWAPDAAGKYTEPRAIGTRYLTHHL

SEQ ID NO: 1141 - protein, 735 aa, Artificial Sequence
  source: /note="Description of Artificial Sequence: Synthetic polypeptide"
MAADGYLPDWLEDNLSEGVREWWALQPGAPKPKANQQHQDNARGLVLPGYKYLGPGNGLDKGEPVNAADAAALEHDKAYDQQLKAGDNPYLKYNHADAEFQQRLQGDTSFGGNLGRAVFQAKKRVLEPLGLVEQAGETAPGKKRPLIESPQQPDSSTGIGKKGKQPAKKKLVFEDETGAGDGPPEGSTSGAMSDDSEMRAAAGGAAVEGGQGADGVGNASGDWHCDSTWSEGHVTTTSTRTWVLPTYNNHLYKRLGESLQSNTYNGFSTPWGYFDFNRFHCHFSPRDWQRLINNNWGMRPKAMRVKIFNIQVKEVTTSNGETTVANNLTSTVQIFADSSYELPYVMDAGQEGSLPPFPNDVFMVPQYGYCGLVTGNTSQQQTDRNAFYCLEYFPSQMLRTGNNFEITYSFEKVPFHSMYAHSQSLDRLMNPLIDQYLWGLQSTTTGTTLNAGTATTNFTKLRPTNFSNFKKNWLPGPSIKQQGFSKTANQNYFIPATGSDSLIQYETHSTLDGRWSALTPGPPMATAGPADSKFSNSQLIFAGPKQNGNTATVPGTLIFTSEEELAATNATDTDMWGNLPGGDQSNSNLPTVDRLTALGAVPGMVWQNRDIYYQGPIWAKIPHTDGHFHPSPLIGGFGLKHPPPQIFIKNTPVPANPATTFSSTPVNSFITQYSTGQVSVQIDWEIQKERSKRWNPEVQFTSNYGQQNSLLWAPDAAGKYTEPRAIGTRYLTHHL

SEQ ID NO: 1142 - protein, 735 aa, Artificial Sequence
  source: /note="Description of Artificial Sequence: Synthetic polypeptide"
MAADGYLPDWLEDNLSEGVREWWALQPGAPKPKANQQHQDNARGLVLPGYKYLGPGNGLDKGEPVNAADAAALEHDKAYDQQLKAGDNPYLKYNHADAEFQQRLQGDTSFGGNLGRAVFQAKKRVLEPLGLVEQAGETAPGKKRPLIESPQQPDSSTGIGKKGKQPAKKKLVFEDETGAGDGPPEGSTSGAMSDDSEMRAAAGGAAVEGGQGADGVGNASGDWHCDSTWSEGHVTTTSTRTWVLPTYNNHLYKRLGESLQSNTYNGFSTPWGYFDFNRFHCHFSPRDWQRLINNNWGMRPKAMRVKIFNIQVKEVTTSNGETTVANNLTSTVQIFADSSYELPYVMDAGQEGSLPPFPNDVFMVPQYGYCGLVTGNTSQQQTDRNAFYCLEYFPSQMLRTGNNFEITYSFEKVPFHSMYAHSQSLDRLMNPLIDQYLWGLQSTTTGTTLNAGTATTNFTKLRPTNFSNFKKNWLPGPSIKQQGFSKTANQNYEMPATGSDSLIIYETHSTLDGRWSALTPGPPFATAGPADSKFSNSQLIFAGPKQNGNTATVPGTLIFTSEEELAATNATDTDVWGNLPSGDHSQSNLPTVDRPTMLGAVPGMVWQNRDIYYQGPIWAKIPHTDGHFHPSPLIGGFGLKHPPPQIFIKNTPVPANPATTFISTPVNSFITQYSTGQVSVHIDWEIQKERSKRWNPEVQFTSDYGQHSSLLWAPDAAGKYTEPTAIGTRYLTHHL

SEQ ID NO: 1143 - protein, 734 aa, Artificial Sequence
  source: /note="Description of Artificial Sequence: Synthetic polypeptide"
MAADGYLPDWLEDNLSEGVREWWALQPGAPKPKANQQHQDNARGLVLPGYKYLGPGNGLDKGEPVNAADAAALEHDKAYDQQLKAGDNPYLKYNHADAEFQQRLQGDTSFGGNLGRAVFQAKKRVLEPLGLVEQAGETAPGKKRPLIESPQQPDSSTGIGKKGKQPAKKKLVFEDETGAGDGPPEGSTSGAMSDDSEMRAAAGGAAVEGGQGADGVGNASGDWHCDSTWSEGHVTTTSTRTWVLPTYNNHLYKRLGESLQSNTYNGFSTPWGYFDFNRFHCHFSPRDWQRLINNNWGMRPKAMRVKIFNIQVKEVTTSNGETTVANNLTSTVQIFADSSYELPYVMDAGQEGSLPPFPNDVFMVPQYGYCGLVTGNTSQQQTDRNAFYCLEYFPSQMLRTGNNFEITYSFEKVPFHSMYAHSQSLDRLMNPLIDQYLWGLQSTTTGTTLNAGTATTNFTKLRPTNFSNFKKNWLPGPSIKQQGFSKTANQNDIPATGSDSLIKYETHSTLDGRWSALTPGPPMATAGPADSKFSNSQLIFAGPKQNGNTATVPGTLIFTSEEELAATNATDTDMWGNLPGGDQSNSNLPTVDRLTALGAVPGMVWQNRDIYYQGPIWAKIPHTDGHFHPSPLIGGFGLKHPPPQIFIKNTPVPANPATTFSSTPVNSFITQYSTGQVSVQIDWEIQKERSKRWNPEVQFTSNYGQQNSLLWAPDAAGKYTEPRAIGTRYLTHHL

SEQ ID NO: 1144 - protein, 735 aa, Artificial Sequence
  source: /note="Description of Artificial Sequence: Synthetic polypeptide"
MAADGYLPDWLEDNLSEGVREWWALQPGAPKPKANQQHQDNARGLVLPGYKYLGPGNGLDKGEPVNAADAAALEHDKAYDQQLKAGDNPYLKYNHADAEFQQRLQGDTSFGGNLGRAVFQAKKRVLEPLGLVEQAGETAPGKKRPLIESPQQPDSSTGIGKKGKQPAKKKLVFEDETGAGDGPPEGSTSGAMSDDSEMRAAAGGAAVEGGQGADGVGNASGDWHCDSTWSEGHVTTTSTRTWVLPTYNNHLYKRLGESLQSNTYNGFSTPWGYFDFNRFHCHFSPRDWQRLINNNWGMRPKAMRVKIFNIQVKEVTTSNGETTVANNLTSTVQIFADSSYELPYVMDAGQEGSLPPFPNDVFMVPQYGYCGLVTGNTSQQQTDRNAFYCLEYFPSQMLRTGNNFEITYSFEKVPFHSMYAHSQSLDRLMNPLIDQYLWGLQSTTTGTTLNAGTATTNFTKLRPTNFSNFKKNWLPGPSIKQQGFSKTANQNYIIPATGSDSLITYETHSTLDGRWSALTPGPPVATAGPADSKFSNSQLIFAGPKQNGNTATVPGTLIFTSEEELAATNATDTDMWGNLPFNDDSSSNLPTVDRSTFLGAVPGMVWQNRDIYYQGPIWAKIPHTDGHFHPSPLIGGFGLKHPPPQIFIKNTPVPANPATTFSSTPVNSFITQYSTGQVSVQIDWEIQKERSKRWNPEVQFTSNYGQQNSLLWAPDAAGKYTEPRAIGTRYLTHHL

SEQ ID NO: 1145 - protein, 733 aa, Artificial Sequence
  source: /note="Description of Artificial Sequence: Synthetic polypeptide"
MAADGYLPDWLEDNLSEGIREWWDLKPGAPKPKANQQKQDDGRGLVLPGYKYLGPFNGLDKGEPVNAADAAALEHDKAYDQQLKAGDNPYLRYNHADAEFQERLQEDTSFGGNLGRAVFQAKKRVLEPLGLVEEGAKTAPGKKRPLESPQEPDSSSGIGKKGKQPARKRLNFEEDTGAGDGPPEGSDTSAMSSDIEMRAAPGGNAVDAGQGSDGVGNASGDWHCDSTWSEGKVTTTSTRTWVLPTYNNHLYLRLGTTSSSNTYNGFSTPWGYFDFNRFHCHFSPRDWQRLINNNWGLRPKAMRVKIFNIQVKEVTTSNGETTVANNLTSTVQIFADSSYELPYVMDAGQEGSLPPFPNDVFMVPQYGYCGIVTGENQNQTDRNAFYCLEYFPSQMLRTGNNFEMAYNFEKVPFHSMYAHSQSLDRLMNPLLDQYLWHLQSTTSGETLNQGNAATTFGKIRSGDFAFYRKNWLPGPCVKQQRFSKTASQNYKIPASGGNALLKYDTHYTLNNRWSNIAPGPPMATAGPSDGDFSNAQLIFPGPSVTGNTTTSANNLLFTSEEEIAATNPRDTDMFGQIADNNQNATTAPITGNVTAMGVLPGMVWQNRDIYYQGPIWAKIPHADGHFHPSPLIGGFGLKHPPPQIFIKNTPVPANPATTFTAARVDSFITQYSTGQVAVQIEWEIEKERSKRWNPEVQFTSNYGNQSSMLWAPDTTGKYTEPRVIGSRYLTNHL

SEQ ID NO: 1146 - protein, 742 aa, Artificial Sequence; identical to SEQ ID NO: 957
  source: /note="Description of Artificial Sequence: Synthetic polypeptide"

SEQ ID NO: 1147 - protein, 733 aa, Artificial Sequence; identical to SEQ ID NO: 430
  source: /note="Description of Artificial Sequence: Synthetic polypeptide"

SEQ ID NO: 1148 - protein, 733 aa, Artificial Sequence; identical to SEQ ID NO: 147
  source: /note="Description of Artificial Sequence: Synthetic polypeptide"

SEQ ID NO: 1149 - protein, 733 aa, Artificial Sequence; identical to SEQ ID NO: 434
  source: /note="Description of Artificial Sequence: Synthetic polypeptide"

SEQ ID NO: 1150 - protein, 735 aa, Artificial Sequence
  source: /note="Description of Artificial Sequence: Synthetic polypeptide"
MAADGYLPDWLEDNLSEGVREWWALQPGAPKPKANQQHQDNARGLVLPGYKYLGPGNGLDKGEPVNAADAAALEHDKAYDQQLKAGDNPYLKYNHADAEFQQRLQGDTSFGGNLGRAVFQAKKRVLEPLGLVEQAGETAPGKKRPLIESPQQPDSSTGIGKKGKQPAKKKLVFEDETGAGDGPPEGSTSGAMSDDSEMRAAAGGAAVEGGQGADGVGNASGDWHCDSTWSEGHVTTTSTRTWVLPTYNNHLYKRLGESLQSNTYNGFSTPWGYFDFNRFHCHFSPRDWQRLINNNWGMRPKAMRVKIFNIQVKEVTTSNGETTVANNLTSTVQIFADSSYELPYVMDAGQEGSLPPFPNDVFMVPQYGYCGLVTGNTSQQQTDRNAFYCLEYFPSQMLRTGNNFEITYSFEKVPFHSMYAHSQSLDRLMNPLIDQYLWGLQSTTTGTTLNAGTATTNFTKLRPTNFSNFKKNWLPGPSIKQQGFSKTANQNYEIPATGSDSLIEYETHSTLDGRWSALTPGPPMATAGPADSKFSNSQLIFAGPKQNGNTATVPGTLIFTSEEELAATNATDTDMWGNLPGGDQSSSNLPTVDRLTALGAVPGMVWQNRDIYYQGPIWAKIPHTDGHFHPSPLIGGFGLKHPPPQIFIKNTPVPANPATTFSSTPVNSFITQYSTGQVSVQIDWEIQKERSKRWNPEVQFTSNYGQQNSLLWAPDAAGKYTEPRAIGTRYLTHHL

SEQ ID NO: 1151 - protein, 735 aa, Artificial Sequence
  source: /note="Description of Artificial Sequence: Synthetic polypeptide"
MAADGYLPDWLEDNLSEGVREWWALQPGAPKPKANQQHQDNARGLVLPGYKYLGPGNGLDKGEPVNAADAAALEHDKAYDQQLKAGDNPYLKYNHADAEFQQRLQGDTSFGGNLGRAVFQAKKRVLEPLGLVEQAGETAPGKKRPLIESPQQPDSSTGIGKKGKQPAKKKLVFEDETGAGDGPPEGSTSGAMSDDSEMRAAAGGAAVEGGQGADGVGNASGDWHCDSTWSEGHVTTTSTRTWVLPTYNNHLYKRLGESLQSNTYNGFSTPWGYFDFNRFHCHFSPRDWQRLINNNWGMRPKAMRVKIFNIQVKEVTTSNGETTVANNLTSTVQIFADSSYELPYVMDAGQEGSLPPFPNDVFMVPQYGYCGLVTGNTSQQQTDRNAFYCLEYFPSQMLRTGNNFEITYSFEKVPFHSMYAHSQSLDRLMNPLIDQYLWGLQSTTTGTTLNAGTATTNFTKLRPTNFSNFKKNWLPGPSIKQQGFSKTANQNYEIPATGSDSLIEYETHSTLDGRWSALTPGPPMATAGPADSKFSNSQLIFAGPKQNGNTATVPGTLIFTSEEELAATNATDTDMWGNLPGGDQSSSNLPVVRGLRALGAVPGMVWQNRDIYYQGPIWAKIPHTDGHFHPSPLIGGFGLKHPPPQIFIKNTPVPANPATTFSSTPVNSFITQYSTGQVSVQIDWEIQKERSKRWNPEVQFTSNYGQQNSLLWAPDAAGKYTEPRAIGTRYLTHHL

SEQ ID NO: 1152 - protein, 735 aa, Artificial Sequence
  source: /note="Description of Artificial Sequence: Synthetic polypeptide"
MAADGYLPDWLEDNLSEGVREWWALQPGAPKPKANQQHQDNARGLVLPGYKYLGPGNGLDKGEPVNAADAAALEHDKAYDQQLKAGDNPYLKYNHADAEFQQRLQGDTSFGGNLGRAVFQAKKRVLEPLGLVEQAGETAPGKKRPLIESPQQPDSSTGIGKKGKQPAKKKLVFEDETGAGDGPPEGSTSGAMSDDSEMRAAAGGAAVEGGQGADGVGNASGDWHCDSTWSEGHVTTTSTRTWVLPTYNNHLYKRLGESLQSNTYNGFSTPWGYFDFNRFHCHFSPRDWQRLINNNWGMRPKAMRVKIFNIQVKEVTTSNGETTVANNLTSTVQIFADSSYELPYVMDAGQEGSLPPFPNDVFMVPQYGYCGLVTGNTSQQQTDRNAFYCLEYFPSQMLRTGNNFEITYSFEKVPFHSMYAHSQSLDRLMNPLIDQYLWGLQSTTTGTTLNAGTATTNFTKLRPTNFSNFKKNWLPGPSIKQQGFSKTANQNYEIPATGSDSLIEYETHSTLDGRWSALTPGPPMATAGPADSKFSNSQLIFAGPKQNGNTATVPGTLIFTSEEELAATNATDTDMWGNLPGGDQSSSNLPVVNRLSALGAVPGMVWQNRDIYYQGPIWAKIPHTDGHFHPSPLIGGFGLKHPPPQIFIKNTPVPANPATTFSSTPVNSFITQYSTGQVSVQIDWEIQKERSKRWNPEVQFTSNYGQQNSLLWAPDAAGKYTEPRAIGTRYLTHHL

SEQ ID NO: 1153 - protein, 735 aa, Artificial Sequence
  source: /note="Description of Artificial Sequence: Synthetic polypeptide"
MAADGYLPDWLEDNLSEGVREWWALQPGAPKPKANQQHQDNARGLVLPGYKYLGPGNGLDKGEPVNAADAAALEHDKAYDQQLKAGDNPYLKYNHADAEFQQRLQGDTSFGGNLGRAVFQAKKRVLEPLGLVEQAGETAPGKKRPLIESPQQPDSSTGIGKKGKQPAKKKLVFEDETGAGDGPPEGSTSGAMSDDSEMRAAAGGAAVEGGQGADGVGNASGDWHCDSTWSEGHVTTTSTRTWVLPTYNNHLYKRLGESLQSNTYNGFSTPWGYFDFNRFHCHFSPRDWQRLINNNWGMRPKAMRVKIFNIQVKEVTTSNGETTVANNLTSTVQIFADSSYELPYVMDAGQEGSLPPFPNDVFMVPQYGYCGLVTGNTSQQQTDRNAFYCLEYFPSQMLRTGNNFEITYSFEKVPFHSMYAHSQSLDRLMNPLIDQYLWGLQSTTTGTTLNAGTATTNFTKLRPTNFSNFKKNWLPGPSIKQQGFSKTANQNYEIPATGSDSLIEYETHSTLDGRWSALTPGPPMATAGPADSKFSNSQLIFAGPKQNGNTATVPGTLIFTSEEELAATNATDTDMWGNLPGGDQSSSNLPPVMGLGALGAVPGMVWQNRDIYYQGPIWAKIPHTDGHFHPSPLIGGFGLKHPPPQIFIKNTPVPANPATTFSSTPVNSFITQYSTGQVSVQIDWEIQKERSKRWNPEVQFTSNYGQQNSLLWAPDAAGKYTEPRAIGTRYLTHHL

SEQ ID NO: 1154 - protein, 736 aa, Artificial Sequence
  source: /note="Description of Artificial Sequence: Synthetic polypeptide"
MAADGYLPDWLEDNLSEGVREWWALQPGAPKPKANQQHQDNARGLVLPGYKYLGPGNGLDKGEPVNAADAAALEHDKAYDQQLKAGDNPYLKYNHADAEFQQRLQGDTSFGGNLGRAVFQAKKRVLEPLGLVEQAGETAPGKKRPLIESPQQPDSSTGIGKKGKQPAKKKLVFEDETGAGDGPPEGSTSGAMSDDSEMRAAAGGAAVEGGQGADGVGNASGDWHCDSTWSEGHVTTTSTRTWVLPTYNNHLYKRLGESLQSNTYNGFSTPWGYFDFNRFHCHFSPRDWQRLINNNWGMRPKAMRVKIFNIQVKEVTTSNGETTVANNLTSTVQIFADSSYELPYVMDAGQEGSLPPFPNDVFMVPQYGYCGLVTGNTSQQQTDRNAFYCLEYFPSQMLRTGNNFEITYSFEKVPFHSMYAHSQSLDRLMNPLIDQYLWGLQSTTTGTTLNAGTATTNFTKLRPTNFSNFKKNWLPGPSIKQQGFSKTANQNYEIPATGSDSLIEYETHSTLDGRWSALTPGPPMATAGPADSKFSNSQLIFAGPKQNGNTATVPGTLIFTSEEELAATNATDTDMWGNLPGGDQSRVDRLPTVDRLTALGAVPGMVWQNRDIYYQGPIWAKIPHTDGHFHPSPLIGGFGLKHPPPQIFIKNTPVPANPATTFSSTPVNSFITQYSTGQVSVQIDWEIQKERSKRWNPEVQFTSNYGQQNSLLWAPDAAGKYTEPRAIGTRYLTHHL

SEQ ID NO: 1155 - protein, 736 aa, Artificial Sequence
  source: /note="Description of Artificial Sequence: Synthetic polypeptide"
MAADGYLPDWLEDNLSEGVREWWALQPGAPKPKANQQHQDNARGLVLPGYKYLGPGNGLDKGEPVNAADAAALEHDKAYDQQLKAGDNPYLKYNHADAEFQQRLQGDTSFGGNLGRAVFQAKKRVLEPLGLVEQAGETAPGKKRPLIESPQQPDSSTGIGKKGKQPAKKKLVFEDETGAGDGPPEGSTSGAMSDDSEMRAAAGGAAVEGGQGADGVGNASGDWHCDSTWSEGHVTTTSTRTWVLPTYNNHLYKRLGESLQSNTYNGFSTPWGYFDFNRFHCHFSPRDWQRLINNNWGMRPKAMRVKIFNIQVKEVTTSNGETTVANNLTSTVQIFADSSYELPYVMDAGQEGSLPPFPNDVFMVPQYGYCGLVTGNTSQQQTDRNAFYCLEYFPSQMLRTGNNFEITYSFEKVPFHSMYAHSQSLDRLMNPLIDQYLWGLQSTTTGTTLNAGTATTNFTKLRPTNFSNFKKNWLPGPSIKQQGFSKTANQNYEIPATGSDSLIEYETHSTLDGRWSALTPGPPMATAGPADSKFSNSQLIFAGPKQNGNTATVPGTLIFTSEEELAATNATDTDMWGNLPGGDQSRALRLPTVDRLTALGAVPGMVWQNRDIYYQGPIWAKIPHTDGHFHPSPLIGGFGLKHPPPQIFIKNTPVPANPATTFSSTPVNSFITQYSTGQVSVQIDWEIQKERSKRWNPEVQFTSNYGQQNSLLWAPDAAGKYTEPRAIGTRYLTHHL

SEQ ID NO: 1156 - DNA, 1172 bp, Artificial Sequence
  source: /note="Description of Artificial Sequence: Synthetic polynucleotide"
cttaattaggctgcgcgctcgctcgctcactgaggccgcccgggcaaagcccgggcgtcgggcgacctttggtcgcccggcctcagtgagcgagcgagcgcgcagagagggagtggccaactccatcactaggggttccttgtagttaatgattaacccgccatgctacttatctaccagggtaatggggatcctctagaactatagctagtcgacattgattattgactagttattaatagtaatcaattacggggtcattagttcatagcccatatatggagttccgcgttacataacttacggtaaatggcccgcctggctgaccgcccaacgacccccgcccattgacgtcaataatgacgtatgttcccatagtaacgccaatagggactttccattgacgtcaatgggtggactatttacggtaaactgcccacttggcagtacatcaagtgtatcatatgccaagtacgccccctattgacgtcaatgacggtaaatggcccgcctggcattatgcccagtacatgaccttatgggactttcctacttggcagtacatctacgtattagtcatcgctattaccatgtcgaggccacgttctgcttcactctccccatctcccccccctccccacccccaattttgtatttatttattttttaattattttgtgcagcgatgggggcggggggggggggcgcgcgccaggcggggcggggcggggcgaggggcggggcggggcgaggcggagaggtgcggcggcagccaatcagagcggcgcgctccgaaagtttccttttatggcgaggcggcggcggcggcggccctataaaaagcgaagcgcgcggcgggcgggagcaagctttattgcggtagtttatcacagttaaattgctaacgcagtcagtgcttctgacacaacagtctcgaacttaagctgcagaagttggtcgtgaggcactgggcaggtaagtatcaaggttacaagacaggtttaaggagaccaatagaaactgggcttgtcgagacagagaagactcttgcgtttctgataggcacctattggtcttactgacatccactttgcctttctctccacaggtgtccactcccagttcaattacagctcttaaggctagagtacttaatacgactcsactatagg

SEQ ID NO: 1157 - DNA, 3231 bp, Artificial Sequence
  source: /note="Description of Artificial Sequence: Synthetic polynucleotide"
taagaattcacgcgtggtacctctagagtcgacccgggcggcctcgaggacggggtgaactacgcctgaggatccgatctttttccctctgccaaaaattatggggacatcatgaagccccttgagcatctgacttctggctaataaaggaaatttattttcattgcaatagtgtgttggaattttttgtgtctctcactcggaagcaattcgttgatctgaatttcgaccacccataatacccattaccctggtagataagtagcatggcgggttaatcattaactacaaggaacccctagtgatggagttggccactccctctctgcgcgctcgctcgctcactgaggccgggcgaccaaaggtcgcccgacgcccgggctttgcccgggcggcctcagtgagcgagcgagcgcgcagccttaattaacctaattcactggccgtcgttttacaacgtcgtgactgggaaaaccctggcgttacccaacttaatcgccttgcagcacatccccctttcgccagctggcgtaatagcgaagaggcccgcaccgatcgcccttcccaacagttgcgcagcctgaatggcgaatgggacgcgccctgtagcggcgcattaagcgcggcgggtgtggtggttacgcgcagcgtgaccgctacacttgccagcgccctagcgcccgctcctttcgctttcttcccttcctttctcgccacgttcgccggctttccccgtcaagctctaaatcgggggctccctttagggttccgatttagtgctttacggcacctcgaccccaaaaaacttgattagggtgatggttcacgtagtgggccatcgccctgatagacggtttttcgccctttgacgttggagtccacgttctttaatagtggactcttgttccaaactggaacaacactcaaccctatctcggtctattcttttgatttataagggattttgccgatttcggcctattggttaaaaaatgagctgatttaacaaaaatttaacgcgaattttaacaaaatattaacgcttacaatttaggtggcacttttcggggaaatgtgcgcggaacccctatttgtttatttttctaaatacattcaaatatgtatccgctcatgagacaataaccctgataaatgcttcaataatattgaaaaaggaagagtatgagtattcaacatttccgtgtcgcccttattcccttttttgcggcattttgccttcctgtttttgctcacccagaaacgctggtgaaagtaaaagatgctgaagatcagttgggtgcacgagtgggttacatcgaactggatctcaacagcggtaagatccttgagagttttcgccccgaagaacgttttccaatgatgagcacttttaaagttctgctatgtggcgcggtattatcccgtattgacgccgggcaagagcaactcggtcgccgcatacactattctcagaatgacttggttgagtactcaccagtcacagaaaagcatcttacggatggcatgacagtaagagaattatgcagtgctgccataaccatgagtgataacactgcggccaacttacttctgacaacgatcggaggaccgaaggagctaaccgcttttttgcacaacatgggggatcatgtaactcgccttgatcgttgggaaccggagctgaatgaagccataccaaacgacgagcgtgacaccacgatgcctgtagcaatggcaacaacgttgcgcaaactattaactggcgaactacttactctagcttcccggcaacaattaatagactggatggaggcggataaagttgcaggaccacttctgcgctcggcccttccggctggctggtttattgctgataaatctggagccggtgagcgtgggtctcgcggtatcattgcagcactggggccagatggtaagccctcccgtatcgtagttatctacacgacggggagtcaggcaactatggatgaacgaaatagacagatcgctgagataggtgcctcactgattaagcattggtaactgtcagaccaagtttactcatatatactttagattgatttaaaacttcatttttaatttaaaaggatctaggtgaagatcctttttgataatctcatgaccaaaatcccttaacgtgagttttcgttccactgagcgtcagaccccgtagaaaagatcaaaggatcttcttgagatcctttttttctgcgcgtaatctgctgcttgcaaacaaaaaaaccaccgctaccagcggtggtttgtttgccggatcaagagctaccaactctttttccgaaggtaactggcttcagcagagcgcagataccaaatactgttcttctagtgtagccgtagttaggccaccacttcaagaactctgtagcaccgcctacatacctcgctctgctaatcctgttaccagtggctgctgccagtggcgataagtcgtgtcttaccgggttggactcaagacgatagttaccggataaggcgcagcggtcgggctgaacggggggttcgtgcacacagcccagcttggagcgaacgacctacaccgaactgagatacctacagcgtgagctatgagaaagcgccacgcttcccgaagggagaaaggcggacaggtatccggtaagcggcagggtcggaacaggagagcgcacgagggagcttccagggggaaacgcctggtatctttatagtcctgtcgggtttcgccacctctgacttgagcgtcgatttttgtgatgctcgtcaggggggcggagcctatggaaaaacgccagcaacgcggcctttttacggttcctggccttttgctggccttttgctcacatgttctttcctgcgttatcccctgattctgtggataaccgtattaccgcctttgagtgagctgataccgctcgccgcagccgaacgaccgagcgcagcgagtcagtgagcgaggaagcggaagagcgcccaatacgcaaaccgcctctccccgcgcgttggccgattcattaatgcagctggcacgacaggtttcccgactggaaagcgggcagtgagcgcaacgcaattaatgtgagttagctcactcattaggcaccccaggctttacactttatgcttccggctcgtatgttgtgtggaattgtgagcggataacaatttcacacaggaaacagctatgaccatgattacgccagatttaattaaggc

SEQ ID NO: 1158 - protein, 737 aa, Artificial Sequence
  source: /note="Description of Artificial Sequence: Synthetic polypeptide"
  MOD_RES (264)..(264): Any amino acid
  MOD_RES (266)..(266): Any amino acid
  MOD_RES (268)..(268): Any amino acid
  MOD_RES (448)..(448): Any amino acid
  MOD_RES (459)..(460): Any amino acid
  MOD_RES (467)..(467): Any amino acid
  MOD_RES (470)..(471): Any amino acid
  MOD_RES (474)..(474): Any amino acid
  MOD_RES (495)..(495): Any amino acid
  MOD_RES (516)..(516): Any amino acid
  MOD_RES (533)..(533): Any amino acid
  MOD_RES (547)..(547): Any amino acid
  MOD_RES (551)..(551): Any amino acid
  MOD_RES (555)..(555): Any amino acid
  MOD_RES (557)..(557): Any amino acid
  MOD_RES (561)..(561): Any amino acid
  MOD_RES (563)..(563): Any amino acid
  MOD_RES (577)..(577): Any amino acid
  MOD_RES (583)..(583): Any amino acid
  MOD_RES (593)..(593): Any amino acid
  MOD_RES (596)..(596): Any amino acid
  MOD_RES (661)..(662): Any amino acid
  MOD_RES (664)..(665): Any amino acid
  MOD_RES (710)..(710): Any amino acid
  MOD_RES (717)..(719): Any amino acid
  MOD_RES (723)..(723): Any amino acid
MAADGYLPDWLEDNLSEGIREWWDLKPGAPKPKANQQKQDDGRGLVLPGYKYLGPFNGLDKGEPVNAADAAALEHDKAYDQQLKAGDNPYLRYNHADAEFQERLQEDTSFGGNLGRAVFQAKKRVLEPLGLVEEGAKTAPGKKRPVEPSPQRSPDSSTGIGKKGQQPAKKRLNFGQTGDSESVPDPQPLGEPPAGPSGLGSGTMAAGGGAPMADNNEGADGVGNASGNWHCDSTWLGDRVITTSTRTWALPTYNNHLYKQISSXSXGXTNDNHYFGYSTPWGYFDFNRFHCHFSPRDWQRLINNNWGFRPKRLNFKLFNIQVKEVTTNDGVTTIANNLTSTVQVFSDSEYQLPYVLGSAHQGCLPPFPADVFMIPQYGYLTLNNGSQAVGRSSFYCLEYFPSQMLRTGNNFTFSYTFEDVPFHSSYAHSQSLDRLMNPLIDQYLYYLXRTQSTGGTAGXXELLFSQXGPXXMSXQAKNWLPGPCYRQQRVSKTLXQNNNSNFAWTGATKYHLNGRXSLVNPGVAMATHKDDEXRFFPSSGVLIFGKXGAGXNNTXLXNVMXTXEEEIKTTNPVATEXYGVVAXNLQSSNTAPXTGXVNSQGALPGMVWQNRDVYLQGPIWAKIPHTDGNFHPSPLMGGFGLKHPPPQILIKNTPVPANPPXXFXXAKFASFITQYSTGQVSVEIEWELQKENSKRWNPEIQYTSNYAKSXNVDFAVXXXGVYXEPRPIGTRYLTRNL

SEQ ID NO: 1159 - protein, 737 aa, Artificial Sequence
  source: /note="Description of Artificial Sequence: Synthetic polypeptide"
MAADGYLPDWLEDNLSEGIREWWDLKPGAPKPKANQQKQDDGRGLVLPGYKYLGPFNGLDKGEPVNAADAAALEHDKAYDQQLKAGDNPYLRYNHADAEFQERLQEDTSFGGNLGRAVFQAKKRVLEPLGLVEEGAKTAPGKKRPVEPSPQRSPDSSTGIGKKGQQPAKKRLNFGQTGDSESVPDPQPLGEPPAGPSGLGSGTMAAGGGAPMADNNEGADGVGNASGNWHCDSTWLGDRVITTSTRTWALPTYNNHLYKQISSASSGSTNDNHYFGYSTPWGYFDFNRFHCHFSPRDWQRLINNNWGFRPKRLNFKLFNIQVKEVTTNDGVTTIANNLTSTVQVFSDSEYQLPYVLGSAHQGCLPPFPADVFMIPQYGYLTLNNGSQAVGRSSFYCLEYFPSQMLRTGNNFTFSYTFEDVPFHSSYAHSQSLDRLMNPLIDQYLYYLARTQSTGGTAGNRELLFSQGGPSNMSAQAKNWLPGPCYRQQRVSKTLAQNNNSNFAWTGATKYHLNGRDSLVNPGVAMATHKDDEDRFFPSSGVLIFGKEGAGANNTALENVMLTNEEEIKTTNPVATEQYGVVASNLQSSNTAPATGAVNSQGALPGMVWQNRDVYLQGPIWAKIPHTDGNFHPSPLMGGFGLKHPPPQILIKNTPVPANPPATFTPAKFASFITQYSTGQVSVEIEWELQKENSKRWNPEIQYTSNYAKSTNVDFAVNNEGVYSEPRPIGTRYLTRNL

SEQ ID NO: 1160 - protein, 737 aa, Artificial Sequence
  source: /note="Description of Artificial Sequence: Synthetic polypeptide"
MAADGYLPDWLEDNLSEGIREWWDLKPGAPKPKANQQKQDDGRGLVLPGYKYLGPFNGLDKGEPVNAADAAALEHDKAYDQQLKAGDNPYLRYNHADAEFQERLQEDTSFGGNLGRAVFQAKKRVLEPLGLVEEGAKTAPGKKRPVEPSPQRSPDSSTGIGKKGQQPAKKRLNFGQTGDSESVPDPQPLGEPPAGPSGLGSGTMAAGGGAPMADNNEGADGVGNASGNWHCDSTWLGDRVITTSTRTWALPTYNNHLYKQISSQSSGSTNDNHYFGYSTPWGYFDFNRFHCHFSPRDWQRLINNNWGFRPKRLNFKLFNIQVKEVTTNDGVTTIANNLTSTVQVFSDSEYQLPYVLGSAHQGCLPPFPADVFMIPQYGYLTLNNGSQAVGRSSFYCLEYFPSQMLRTGNNFTFSYTFEDVPFHSSYAHSQSLDRLMNPLIDQYLYYLSRTQSTGGTAGNRELLFSQGGPANMSAQAKNWLPGPCYRQQRVSKTLSQNNNSNFAWTGATKYHLNGRDSLVNPGVAMATHKDDEERFFPSSGVLIFGKQGAGANNTTLDNVMMTSEEEIKTTNPVATEQYGVVASNLQSSNTAPQTGTVNSQGALPGMVWQNRDVYLQGPIWAKIPHTDGNFHPSPLMGGFGLKHPPPQILIKNTPVPANPPAVFSPAKFASFITQYSTGQVSVEIEWELQKENSKRWNPEIQYTSNYAKSTNVDFAVNSEGVYSEPRPIGTRYLTRNL

SEQ ID NO: 1161 - protein, 737 aa, Artificial Sequence
  source: /note="Description of Artificial Sequence: Synthetic polypeptide"
MAADGYLPDWLEDNLSEGIREWWDLKPGAPKPKANQQKQDDGRGLVLPGYKYLGPFNGLDKGEPVNAADAAALEHDKAYDQQLKAGDNPYLRYNHADAEFQERLQEDTSFGGNLGRAVFQAKKRVLEPLGLVEEGAKTAPGKKRPVEPSPQRSPDSSTGIGKKGQQPAKKRLNFGQTGDSESVPDPQPLGEPPAGPSGLGSGTMAAGGGAPMADNNEGADGVGNASGNWHCDSTWLGDRVITTSTRTWALPTYNNHLYKQISSASSGSTNDNHYFGYSTPWGYFDFNRFHCHFSPRDWQRLINNNWGFRPKRLNFKLFNIQVKEVTTNDGVTTIANNLTSTVQVFSDSEYQLPYVLGSAHQGCLPPFPADVFMIPQYGYLTLNNGSQAVGRSSFYCLEYFPSQMLRTGNNFTFSYTFEDVPFHSSYAHSQSLDRLMNPLIDQYLYYLARTQSTGGTAGTRELLFSQGGPSNMSAQAKNWLPGPCYRQQRVSKTLTQNNNSNFAWTGATKYHLNGRDSLVNPGVAMATHKDDEDRFFPSSGVLIFGKQGAGANNTALDNVMITNEEEIKTTNPVATEQYGVVASNLQSSNTAPATGTVNSQGALPGMVWQNRDVYLQGPIWAKIPHTDGNFHPSPLMGGFGLKHPPPQILIKNTPVPANPPTVFSPAKFASFITQYSTGQVSVEIEWELQKENSKRWNPEIQYTSNYAKSTNVDFAVNSEGVYTEPRPIGTRYLTRNL

SEQ ID NO: 1162 - protein, 737 aa, Artificial Sequence
  source: /note="Description of Artificial Sequence: Synthetic polypeptide"
  MOD_RES (264)..(264): Any amino acid
  MOD_RES (448)..(448): Any amino acid
  MOD_RES (459)..(459): Any amino acid
  MOD_RES (470)..(470): Any amino acid
  MOD_RES (495)..(495): Any amino acid
  MOD_RES (533)..(533): Any amino acid
  MOD_RES (547)..(547): Any amino acid
  MOD_RES (555)..(555): Any amino acid
  MOD_RES (557)..(557): Any amino acid
  MOD_RES (561)..(561): Any amino acid
  MOD_RES (563)..(563): Any amino acid
  MOD_RES (593)..(593): Any amino acid
  MOD_RES (596)..(596): Any amino acid
  MOD_RES (661)..(662): Any amino acid
  MOD_RES (664)..(664): Any amino acid
  MOD_RES (718)..(718): Any amino acid
  MOD_RES (723)..(723): Any amino acid
MAADGYLPDWLEDNLSEGIREWWDLKPGAPKPKANQQKQDDGRGLVLPGYKYLGPFNGLDKGEPVNAADAAALEHDKAYDQQLKAGDNPYLRYNHADAEFQERLQEDTSFGGNLGRAVFQAKKRVLEPLGLVEEGAKTAPGKKRPVEPSPQRSPDSSTGIGKKGQQPAKKRLNFGQTGDSESVPDPQPLGEPPAGPSGLGSGTMAAGGGAPMADNNEGADGVGNASGNWHCDSTWLGDRVITTSTRTWALPTYNNHLYKQISSXSSGSTNDNHYFGYSTPWGYFDFNRFHCHFSPRDWQRLINNNWGFRPKRLNFKLFNIQVKEVTTNDGVTTIANNLTSTVQVFSDSEYQLPYVLGSAHQGCLPPFPADVFMIPQYGYLTLNNGSQAVGRSSFYCLEYFPSQMLRTGNNFTFSYTFEDVPFHSSYAHSQSLDRLMNPLIDQYLYYLXRTQSTGGTAGXRELLFSQGGPXNMSAQAKNWLPGPCYRQQRVSKTLXQNNNSNFAWTGATKYHLNGRDSLVNPGVAMATHKDDEXRFFPSSGVLIFGKXGAGANNTXLXNVMXTXEEEIKTTNPVATEQYGVVASNLQSSNTAPXTGXVNSQGALPGMVWQNRDVYLQGPIWAKIPHTDGNFHPSPLMGGFGLKHPPPQILIKNTPVPANPPXXFXPAKFASFITQYSTGQVSVEIEWELQKENSKRWNPEIQYTSNYAKSTNVDFAVNXEGVYXEPRPIGTRYLTRNL

SEQ ID NO: 1163 - protein, 737 aa, Artificial Sequence
  source: /note="Description of Artificial Sequence: Synthetic polypeptide"
  MOD_RES (264)..(264): Any amino acid
  MOD_RES (448)..(448): Any amino acid
  MOD_RES (470)..(470): Any amino acid
  MOD_RES (533)..(533): Any amino acid
  MOD_RES (547)..(547): Any amino acid
  MOD_RES (555)..(555): Any amino acid
  MOD_RES (557)..(557): Any amino acid
  MOD_RES (561)..(561): Any amino acid
  MOD_RES (563)..(563): Any amino acid
  MOD_RES (593)..(593): Any amino acid
  MOD_RES (596)..(596): Any amino acid
  MOD_RES (662)..(662): Any amino acid
  MOD_RES (664)..(664): Any amino acid
  MOD_RES (718)..(718): Any amino acid
MAADGYLPDWLEDNLSEGIREWWDLKPGAPKPKANQQKQDDGRGLVLPGYKYLGPFNGLDKGEPVNAADAAALEHDKAYDQQLKAGDNPYLRYNHADAEFQERLQEDTSFGGNLGRAVFQAKKRVLEPLGLVEEGAKTAPGKKRPVEPSPQRSPDSSTGIGKKGQQPAKKRLNFGQTGDSESVPDPQPLGEPPAGPSGLGSGTMAAGGGAPMADNNEGADGVGNASGNWHCDSTWLGDRVITTSTRTWALPTYNNHLYKQISSXSSGSTNDNHYFGYSTPWGYFDFNRFHCHFSPRDWQRLINNNWGFRPKRLNFKLFNIQVKEVTTNDGVTTIANNLTSTVQVFSDSEYQLPYVLGSAHQGCLPPFPADVFMIPQYGYLTLNNGSQAVGRSSFYCLEYFPSQMLRTGNNFTFSYTFEDVPFHSSYAHSQSLDRLMNPLIDQYLYYLXRTQSTGGTAGNRELLFSQGGPXNMSAQAKNWLPGPCYRQQRVSKTLSQNNNSNFAWTGATKYHLNGRDSLVNPGVAMATHKDDEXRFFPSSGVLIFGKXGAGANNTXLXNVMXTXEEEIKTTNPVATEQYGVVASNLQSSNTAPXTGXVNSQGALPGMVWQNRDVYLQGPIWAKIPHTDGNFHPSPLMGGFGLKHPPPQILIKNTPVPANPPAXFXPAKFASFITQYSTGQVSVEIEWELQKENSKRWNPEIQYTSNYAKSTNVDFAVNXEGVYSEPRPIGTRYLTRNL

SEQ ID NO: 1164 - DNA, 2217 bp, Artificial Sequence
  source: /note="Description of Artificial Sequence: Synthetic polynucleotide"
atggctgccgatggttatcttccagattggctcgaggacactctctctgaaggaataagacagtggtggaagctcaaacctggcccaccaccaccaaagcccgcagagcggcataaggacgacagcaggggtcttgtgcttcctgggtacaagtacctcggacccttcaacggactcgacaagggagagccggtcaacgaggcagacgccgcggccctcgagcacgacaaagcctacgaccggcagctcgacagcggagacaacccgtacctcaagtacaaccacgccgacgcggagtttcaggagcgccttaaagaagatacgtcttttgggggcaacctcggacgagcagtcttccaggcgaaaaagagggttcttgaacctctgggcctggttgaggaacctgttaagacggctccgggaaagaagagaccggtagagccatcaccccagcgttctccagactcctctacgggcatcggcaagaaaggccaacagcccgccagaaaaagactcaattttggtcagactggcgactcagagtcagttccagaccctcaacctctcggagaacctccagcagcgccctctggtgtgggacctaatacaatggctgcaggcggtggcgcaccaatggcagacaataacgaaggcgccgacggagtgggtagttcctcgggaaattggcattgcgattccacatggctgggcgacagagtcatcaccaccagcacccgaacctgggccctgcccacctacaacaaccacctctacaagcaaatctccaacgggacatcgggaggagccaccaacgacaacacctacttcggctacagcaccccctgggggtattttgactttaacagattccactgccacttttcaccacgtgactggcagcgactcatcaacaacaactggggattccggcccaagagactcagcttcaagctcttcaacatccaggtcaaggaggtcacgcagaatgaaggcaccaagaccatcgccaataacctcaccagcaccatccaggtgtttacggactcggagtaccagctgccgtacgttctcggctctgcccaccagggctgcctgcctccgttcccggcggacgtgttcatgattccccagtacggctacctaacactcaacaacggtagtcaggccgtgggacgctcctccttctactgcctggaatactttccttcgcagatgctgagaaccggcaacaacttccagtttacttacaccttcgaggacgtgcctttccacagcagctacgcccacagccagagcttggaccggctgatgaatcctctgattgaccagtacctgtactacttgtctcggactcaaacaacaggaggcacggcaaatacgcagactctgggcttcagccaaggtgggcctaatacaatggccaatcaggcaaagaactggctgccaggaccctgttaccgccaacaacgcgtctcaacgacaaccgggcaaaacaacaatagcaactttgcctggactgctgggaccaaataccatctgaatggaagaaattcattggctaatcctggcatcgctatggcaacacacaaagacgacgaggagcgtttttttcccagtaacgggatcctgatttttggcaaacaaaatgctgccagagacaatgcggattacagcgatgtcatgctcaccagcgaggaagaaatcaaaaccactaaccctgtggctacagaggaatacggtatcgtggcagataacttgcagcagcaaaacacggctcctcaaattggaactgtcaacagccagggggccttacccggtatggtctggcagaaccgggacgtgtacctgcagggtcccatctgggccaagattcctcacacggacggcaacttccacccgtctccgctgatgggcggctttggcctgaaacatcctccgcctcagatcctgatcaagaacacgcctgtacctgcggatcctccgaccaccttcaaccagtcaaagctgaactctttcatcacgcaatacagcaccggacaggtcagcgtggaaattgaatgggagctgcagaaggaaaacagcaagcgctggaaccccgagatccagtacacctccaactactacaaatctacaagtgtggactttgctgttaatacagaaggcgtgtactctgaaccccgccccattggcacccgttacctcacccgtaatctgtaa

SEQ ID NO: 1165 - protein, 733 aa, Artificial Sequence; identical to SEQ ID NO: 950
  source: /note="Description of Artificial Sequence: Synthetic polypeptide"

SEQ ID NO: 1166 - DNA, 2203 bp, Artificial Sequence
  source: /note="Description of Artificial Sequence: Synthetic polynucleotide"
atgtcttttgttgatcaccctccagattggttggaagaagttggtgaaggtcttcgcgagtttttgggccttgaagcgggcccaccgaaaccaaaacccaatcagcagcatcaagatcaagcccgtggtcttgtgctgcctggttataactatctcggacccggaaacggtctcgatcgaggagagcctgtcaacagggcagacgaggtcgcgcgagagcacgacatctcgtacaacgagcagcttgaggcgggagacaacccctacctcaagtacaaccacgcggacgccgagtttcaggagaagctcgccgacgacacatccttcgggggaaacctcggaaaggcagtctttcaggccaagaaaagggttctcgaaccttttggcctggttgaagagggtgctaagacggcccctaccggaaagcggatagacgaccactttccaaaaagaaagaaggctcggaccgaagaggactccaagccttccacctcgtcagacgccgaagctggacccagcggatcccagcagctgcaaatcccagcccaaccagcctcaagtttgggagctgatacaatgtctgcgggaggtggcggcccattgggcgacaataaccaaggtgccgatggagtgggcaatgcctcgggagattggcattgcgattccacgtggatgggggacagagtcgtcaccaagtccacccgaacctgggtgctgcccagctacaacaaccaccagtaccgagagatcaaaagcggctccgtcgacggaagcaacgccaacgcctactttggatacagcaccccctgggggtactttgactttaaccgcttccacagccactggagcccccgagactggcaaagactcatcaacaactactggggcttcagaccccggtccctcagagtcaaaatcttcaacattcaagtcaaagaggtcacggtgcaggactccaccaccaccatcgccaacaacctcacctccaccgtccaagtgtttacggacgacgactaccagctgccctacgtcgtcggcaacgggaccgagggatgcctgccggccttccctccgcaggtctttacgctgccgcagtacggttacgcgacgctgaaccgcgacaacacagaaaatcccaccgagaggagcagcttcttctgcctagagtactttcccagcaagatgctgagaacgggcaacaactttgagtttacctacaactttgaggaggtgcccttccactccagcttcgctcccagtcagaacctgttcaagctggccaacccgctggtggaccagtacttgtaccgcttcgtgagcacaaataacactggcggagtccagttcaacaagaacctggccgggagatacgccaacacctacaaaaactggttcccggggcccatgggccgaacccagggctggaacctgggctccggggtcaaccgcgccagtgtcagcgccttcgccacgaccaataggatggagctcgagggcgcgagttaccaggtgcccccgcagccgaacggcatgaccaacaacctccagggcagcaacacctatgccctggagaacactatgatcttcaacagccagccggcgaacccgggcaccaccgccacgtacctcgagggcaacatgctcatcaccagcgagagcgagacgcagccggtgaaccgcgtggcgtacaacgtcggcgggcaggtggccaccaacaaccagagctccaccactgcccccgcgaccggcacgtacaacctccaggaaatcgtgcccggcagcgtgtggatggagagggacgtgtacctccaaggacccatctgggccaagatcccagagacgggggcgcactttcacccctctccggccatgggcggattcggactcaaacacccaccgcccatgatgctcatcaagaacacgcctgtgcccggaaatatcaccagcttctcggacgtgcccgtcagcagcttcatcacccagtacagcaccgggcaggtcaccgtggagatggagtgggagctcaagaaggaaaactccaagaggtggaacccagagatccagtacacaaacaactacaacgacccccagtttgtggactttgccccggacagcaccggggaatacagaaccaccagacctatcggaacccgataccttacccgacccctttaacccattcatgtcgcataccctcaataaa

SEQ ID NO: 1167 - protein, 724 aa, Artificial Sequence
  source: /note="Description of Artificial Sequence: Synthetic polypeptide"
MSFVDHPPDWLEEVGEGLREFLGLEAGPPKPKPNQQHQDQARGLVLPGYNYLGPGNGLDRGEPVNRADEVAREHDISYNEQLEAGDNPYLKYNHADAEFQEKLADDTSFGGNLGKAVFQAKKRVLEPFGLVEEGAKTAPTGKRIDDHFPKRKKARTEEDSKPSTSSDAEAGPSGSQQLQIPAQPASSLGADTMSAGGGGPLGDNNQGADGVGNASGDWHCDSTWMGDRVVTKSTRTWVLPSYNNHQYREIKSGSVDGSNANAYFGYSTPWGYFDFNRFHSHWSPRDWQRLINNYWGFRPRSLRVKIFNIQVKEVTVQDSTTTIANNLTSTVQVFTDDDYQLPYVVGNGTEGCLPAFPPQVFTLPQYGYATLNRDNTENPTERSSFFCLEYFPSKMLRTGNNFEFTYNFEEVPFHSSFAPSQNLFKLANPLVDQYLYRFVSTNNTGGVQFNKNLAGRYANTYKNWFPGPMGRTQGWNLGSGVNRASVSAFATTNRMELEGASYQVPPQPNGMTNNLQGSNTYALENTMIFNSQPANPGTTATYLEGNMLITSESETQPVNRVAYNVGGQVATNNQSSTTAPATGTYNLQEIVPGSVWMERDVYLQGPIWAKIPETGAHFHPSPAMGGFGLKHPPPMMLIKNTPVPGNITSFSDVPVSSFITQYSTGQVTVEMEWELKKENSKRWNPEIQYTNNYNDPQFVDFAPDSTGEYRTTRPIGTRYLTRPL

SEQ ID NO: 1168 - DNA, 2203 bp, Artificial Sequence
  source: /note="Description of Artificial Sequence: Synthetic polynucleotide"
atgtcttttgttgatcaccctccagattggttggaagaagttggtgaaggtcttcgcgagtttttgggccttgaagcgggcccaccgaaaccaaaacccaatcagcagcatcaagatcaagcccgtggtcttgtgctgcctggttataactatctcggacccggaaacggtctcgatcgaggagagcctgtcaacagggcagacgaggtcgcgcgagagcacgacatctcgtacaacgagcagcttgaggcgggagacaacccctacctcaagtacaaccacgcggacgccgagtttcaggagaagctcgccgacgacacatccttcgggggaaacctcggaaaggcagtctttcaggccaagaaaagggttctcgaaccttttggcctggttgaagagggtgctaagacggcccctaccggaaagcggatagacgaccactttccaaaaagaaagaaggctcggaccgaagaggactccaagccttccacctcgtcagacgccgaagctggacccagcggatcccagcagctgcaaatcccagcccaaccagcctcaagtttgggagctgatacaatgtctgcgggaggtggcggcccattgggcgacaataaccaaggtgccgatggagtgggcaatgcctcgggagattggcattgcgattccacgtggatgggggacagagtcgtcaccaagtccacccgaacctgggtgctgcccagctacaacaaccaccagtaccgagagatcaaaagcggctccgtcgacggaagcaacgccaacgcctactttggatacagcaccccctgggggtactttgactttaaccgcttccacagccactggagcccccgagactggcaaagactcatcaacaactactggggcttcagaccccggtccctcagagtcaaaatcttcaacattcaagtcaaagaggtcacggtgcaggactccaccaccaccatcgccaacaacctcacctccaccgtccaagtgtttacggacgacgactaccagctgccctacgtcgtcggcaacgggaccgagggatgcctgccggccttccctccgcaggtctttacgctgccgcagtacggttacgcgacgctgaaccgcgacaacacagaaaatcccaccgagaggagcagcttcttctgcctagagtactttcccagcaagatgctgagaacgggcaacaactttgagtttacctacaactttgaggaggtgcccttccactccagcttcgctcccagtcagaacctgttcaagctggccaacccgctggtggaccagtacttgtaccgcttcgtgagcacaaataacactggcggagtccagttcaacaagaacctggccgggagatacgccaacacctacaaaaactggttcccggggcccatgggccgaacccagggctggaacctgggctccggggtcaaccgcgccagtgtcagcgccttcgccacgaccaataggatggagctcgagggcgcgagttaccaggtgcccccgcagccgaacggcatgaccaacaacctccagggcagcaacacctatgccctggagaacactatgatcttcaacagccagccggcgaacccgggcaccaccgccacgtacctcgagggcaacatgctcatcaccagcgagagcgagacgcagccggtgaaccgcgtggcgtacaacgtcggcgggcagatggccaccaacaaccagagctccaccactgcccccgcgaccggcacggtcaacctccaggaaatcgtgcccggcagcgtgtggatggagagggacgtgtacctccaaggacccatctgggccaagatcccagagacgggggcgcactttcacccctctccggccatgggcggattcggactcaaacacccaccgcccatgatgctcatcaagaacacgcctgtgcccggaaatatcaccagcttctcggacgtgcccgtcagcagcttcatcacccagtacagcaccgggcaggtcaccgtggagatggagtgggagctcaagaaggaaaactccaagaggtggaacccagagatccagtacacaaacaactacaacgacccccagtttgtggactttgccccggacagcaccggggaatacagaaccaccagacctatcggaacccgataccttacccgacccctttaacccattcatgtcgcataccctcaataaa

SEQ ID NO: 1169 - protein, 724 aa, Artificial Sequence
  source: /note="Description of Artificial Sequence: Synthetic polypeptide"
MSFVDHPPDWLEEVGEGLREFLGLEAGPPKPKPNQQHQDQARGLVLPGYNYLGPGNGLDRGEPVNRADEVAREHDISYNEQLEAGDNPYLKYNHADAEFQEKLADDTSFGGNLGKAVFQAKKRVLEPFGLVEEGAKTAPTGKRIDDHFPKRKKARTEEDSKPSTSSDAEAGPSGSQQLQIPAQPASSLGADTMSAGGGGPLGDNNQGADGVGNASGDWHCDSTWMGDRVVTKSTRTWVLPSYNNHQYREIKSGSVDGSNANAYFGYSTPWGYFDFNRFHSHWSPRDWQRLINNYWGFRPRSLRVKIFNIQVKEVTVQDSTTTIANNLTSTVQVFTDDDYQLPYVVGNGTEGCLPAFPPQVFTLPQYGYATLNRDNTENPTERSSFFCLEYFPSKMLRTGNNFEFTYNFEEVPFHSSFAPSQNLFKLANPLVDQYLYRFVSTNNTGGVQFNKNLAGRYANTYKNWFPGPMGRTQGWNLGSGVNRASVSAFATTNRMELEGASYQVPPQPNGMTNNLQGSNTYALENTMIFNSQPANPGTTATYLEGNMLITSESETQPVNRVAYNVGGQMATNNQSSTTAPATGTVNLQEIVPGSVWMERDVYLQGPIWAKIPETGAHFHPSPAMGGFGLKHPPPMMLIKNTPVPGNITSFSDVPVSSFITQYSTGQVTVEMEWELKKENSKRWNPEIQYTNNYNDPQFVDFAPDSTGEYRTTRPIGTRYLTRPL

SEQ ID NO: 1170 - DNA, 2203 bp, Artificial Sequence
  source: /note="Description of Artificial Sequence: Synthetic polynucleotide"
atgtcttttgttgatcaccctccagattggttggaagaagttggtgaaggtcttcgcgagtttttgggccttgaagcgggcccaccgaaaccaaaacccaatcagcagcatcaagatcaagcccgtggtcttgtgctgcctggttataactatctcggacccggaaacggtctcgatcgaggagagcctgtcaacagggcagacgaggtcgcgcgagagcacgacatctcgtacaacgagcagcttgaggcgggagacaacccctacctcaagtacaaccacgcggacgccgagtttcaggagaagctcgccgacgacacatccttcgggggaaacctcggaaaggcagtctttcaggccaagaaaagggttctcgaaccttttggcctggttgaagagggtgctaagacggcccctaccggaaagcggatagacgaccactttccaaaaagaaagaaggctcggaccgaagaggactccaagccttccacctcgtcagacgccgaagctggacccagcggatcccagcagctgcaaatcccagcccaaccagcctcaagtttgggagctgatacaatgtctgcgggaggtggcggcccattgggcgacaataaccaaggtgccgatggagtgggcaatgcctcgggagattggcattgcgattccacgtggatgggggacagagtcgtcaccaagtccacccgaacctgggtgctgcccagctacaacaaccaccagtaccgagagatcaaaagcggctccgtcgacggaagcaacgccaacgcctactttggatacagcaccccctgggggtactttgactttaaccgcttccacagccactggagcccccgagactggcaaagactcatcaacaactactggggcttcagaccccggtccctcagagtcaaaatcttcaacattcaagtcaaagaggtcacggtgcaggactccaccaccaccatcgccaacaacctcacctccaccgtccaagtgtttacggacgacgactaccagctgccctacgtcgtcggcaacgggaccgagggatgcctgccggccttccctccgcaggtctttacgctgccgcagtacggttacgcgacgctgaaccgcgacaacacagaaaatcccaccgagaggagcagcttcttctgcctagagtactttcccagcaagatgctgagaacgggcaacaactttgagtttacctacaactttgaggaggtgcccttccactccagcttcgctcccagtcagaacctgttcaagctggccaacccgctggtggaccagtacttgtaccgcttcgtgagcacaaataacactggcggagtccagttcaacaagaacctggccgggagatacgccaacacctacaaaaactggttcccggggcccatgggccgaacccagggctggaacctgggctccggggtcaaccgcgccagtgtcagcgccttcgccacgaccaataggatggagctcgagggcgcgagttaccaggtgcccccgcagccgaacggcatgaccaacaacctccagggcagcaacacctatgccctggagaacactatgatcttcaacagccagccggcgaacccgggcaccaccgccacgtacctcgagggcaacatgctcatcaccagcgagagcgagacgcagccggtgaaccgcgtggcgtacaacgtcggcgggcagatggccaccaacaaccagagctccaccactgcccccgcgaccggcacgtacaacacccaggaaatcgtgcccggcagcgtgtggatggagagggacgtgtacctccaaggacccatctgggccaagatcccagagacgggggcgcactttcacccctctccggccatgggcggattcggactcaaacacccaccgcccatgatgctcatcaagaacacgcctgtgcccggaaatatcaccagcttctcggacgtgcccgtcagcagcttcatcacccagtacagcaccgggcaggtcaccgtggagatggagtgggagctcaagaaggaaaactccaagaggtggaacccagagatccagtacacaaacaactacaacgacccccagtttgtggactttgccccggacagcaccggggaatacagaaccaccagacctatcggaacccgataccttacccgacccctttaacccattcatgtcgcataccctcaataaa

SEQ ID NO: 1171 - protein, 724 aa, Artificial Sequence
  source: /note="Description of Artificial Sequence: Synthetic polypeptide"
MSFVDHPPDWLEEVGEGLREFLGLEAGPPKPKPNQQHQDQARGLVLPGYNYLGPGNGLDRGEPVNRADEVAREHDISYNEQLEAGDNPYLKYNHADAEFQEKLADDTSFGGNLGKAVFQAKKRVLEPFGLVEEGAKTAPTGKRIDDHFPKRKKARTEEDSKPSTSSDAEAGPSGSQQLQIPAQPASSLGADTMSAGGGGPLGDNNQGADGVGNASGDWHCDSTWMGDRVVTKSTRTWVLPSYNNHQYREIKSGSVDGSNANAYFGYSTPWGYFDFNRFHSHWSPRDWQRLINNYWGFRPRSLRVKIFNIQVKEVTVQDSTTTIANNLTSTVQVFTDDDYQLPYVVGNGTEGCLPAFPPQVFTLPQYGYATLNRDNTENPTERSSFFCLEYFPSKMLRTGNNFEFTYNFEEVPFHSSFAPSQNLFKLANPLVDQYLYRFVSTNNTGGVQFNKNLAGRYANTYKNWFPGPMGRTQGWNLGSGVNRASVSAFATTNRMELEGASYQVPPQPNGMTNNLQGSNTYALENTMIFNSQPANPGTTATYLEGNMLITSESETQPVNRVAYNVGGQMATNNQSSTTAPATGTYNTQEIVPGSVWMERDVYLQGPIWAKIPETGAHFHPSPAMGGFGLKHPPPMMLIKNTPVPGNITSFSDVPVSSFITQYSTGQVTVEMEWELKKENSKRWNPEIQYTNNYNDPQFVDFAPDSTGEYRTTRPIGTRYLTRPL

SEQ ID NO: 1172 - DNA, 2203 bp, Artificial Sequence
  source: /note="Description of Artificial Sequence: Synthetic polynucleotide"
atgtcttttgttgatcaccctccagattggttggaagaagttggtgaaggtcttcgcgagtttttgggccttgaagcgggcccaccgaaaccaaaacccaatcagcagcatcaagatcaagcccgtggtcttgtgctgcctggttataactatctcggacccggaaacggtctcgatcgaggagagcctgtcaacagggcagacgaggtcgcgcgagagcacgacatctcgtacaacgagcagcttgaggcgggagacaacccctacctcaagtacaaccacgcggacgccgagtttcaggagaagctcgccgacgacacatccttcgggggaaacctcggaaaggcagtctttcaggccaagaaaagggttctcgaaccttttggcctggttgaagagggtgctaagacggcccctaccggaaagcggatagacgaccactttccaaaaagaaagaaggctcggaccgaagaggactccaagccttccacctcgtcagacgccgaagctggacccagcggatcccagcagctgcaaatcccagcccaaccagcctcaagtttgggagctgatacaatgtctgcgggaggtggcggcccattgggcgacaataaccaaggtgccgatggagtgggcaatgcctcgggagattggcattgcgattccacgtggatgggggacagagtcgtcaccaagtccacccgaacctgggtgctgcccagctacaacaaccaccagtaccgagagatcaaaagcggctccgtcgacggaagcaacgccaacgcctactttggatacagcaccccctgggggtactttgactttaaccgcttccacagccactggagcccccgagactggcaaagactcatcaacaactactggggcttcagaccccggtccctcagagtcaaaatcttcaacattcaagtcaaagaggtcacggtgcaggactccaccaccaccatcgccaacaacctcacctccaccgtccaagtgtttacggacgacgactaccagctgccctacgtcgtcggcaacgggaccgagggatgcctgccggccttccctccgcaggtctttacgctgccgcagtacggttacgcgacgctgaaccgcgacaacacagaaaatcccaccgagaggagcagcttcttctgcctagagtactttcccagcaagatgctgagaacgggcaacaactttgagtttacctacaactttgaggaggtgcccttccactccagcttcgctcccagtcagaacctgttcaagctggccaacccgctggtggaccagtacttgtaccgcttcgtgagcacaaataacactggcggagtccagttcaacaagaacctggccgggagatacgccaacacctacaaaaactggttcccggggcccatgggccgaacccagggctggaacctgggctccggggtcaaccgcgccagtgtcagcgccttcgccacgaccaataggatggagctcgagggcgcgagttaccaggtgcccccgcagccgaacggcatgaccaacaacctccagggcagcaacacctatgccctggagaacactatgatcttcaacagccagccggcgaacccgggcaccaccgccacgtacctcgagggcaacatgctcatcaccagcgagagcgagacgcagccggtgaaccgcgtggcgtacaacgtcggcgggcagatggccaccaacaaccagagctccaccactgcccccgcgaccggcacggtcaacacccaggaaatcgtgcccggcagcgtgtggatggagagggacgtgtacctccaaggacccatctgggccaagatcccagagacgggggcgcactttcacccctctccggccatgggcggattcggactcaaacacccaccgcccatgatgctcatcaagaacacgcctgtgcccggaaatatcaccagcttctcggacgtgcccgtcagcagcttcatcacccagtacagcaccgggcaggtcaccgtggagatggagtgggagctcaagaaggaaaactccaagaggtggaacccagagatccagtacacaaacaactacaacgacccccagtttgtggactttgccccggacagcaccggggaatacagaaccaccagacctatcggaacccgataccttacccgacccctttaacccattcatgtcgcataccctcaataaa

SEQ ID NO: 1173 - protein, 724 aa, Artificial Sequence
  source: /note="Description of Artificial Sequence: Synthetic polypeptide"
MSFVDHPPDWLEEVGEGLREFLGLEAGPPKPKPNQQHQDQARGLVLPGYNYLGPGNGLDRGEPVNRADEVAREHDISYNEQLEAGDNPYLKYNHADAEFQEKLADDTSFGGNLGKAVFQAKKRVLEPFGLVEEGAKTAPTGKRIDDHFPKRKKARTEEDSKPSTSSDAEAGPSGSQQLQIPAQPASSLGADTMSAGGGGPLGDNNQGADGVGNASGDWHCDSTWMGDRVVTKSTRTWVLPSYNNHQYREIKSGSVDGSNANAYFGYSTPWGYFDFNRFHSHWSPRDWQRLINNYWGFRPRSLRVKIFNIQVKEVTVQDSTTTIANNLTSTVQVFTDDDYQLPYVVGNGTEGCLPAFPPQVFTLPQYGYATLNRDNTENPTERSSFFCLEYFPSKMLRTGNNFEFTYNFEEVPFHSSFAPSQNLFKLANPLVDQYLYRFVSTNNTGGVQFNKNLAGRYANTYKNWFPGPMGRTQGWNLGSGVNRASVSAFATTNRMELEGASYQVPPQPNGMTNNLQGSNTYALENTMIFNSQPANPGTTATYLEGNMLITSESETQPVNRVAYNVGGQMATNNQSSTTAPATGTVNTQEIVPGSVWMERDVYLQGPIWAKIPETGAHFHPSPAMGGFGLKHPPPMMLIKNTPVPGNITSFSDVPVSSFITQYSTGQVTVEMEWELKKENSKRWNPEIQYTNNYNDPQFVDFAPDSTGEYRTTRPIGTRYLTRPL

SEQ ID NO: 1174 - DNA, 2203 bp, Artificial Sequence
  source: /note="Description of Artificial Sequence: Synthetic polynucleotide"
atgtcttttgttgatcaccctccagattggttggaagaagttggtgaaggtcttcgcgagtttttgggccttgaagcgggcccaccgaaaccaaaacccaatcagcagcatcaagatcaagcccgtggtcttgtgctgcctggttataactatctcggacccggaaacggtctcgatcgaggagagcctgtcaacagggcagacgaggtcgcgcgagagcacgacatctcgtacaacgagcagcttgaggcgggagacaacccctacctcaagtacaaccacgcggacgccgagtttcaggagaagctcgccgacgacacatccttcgggggaaacctcggaaaggcagtctttcaggccaagaaaagggttctcgaaccttttggcctggttgaagagggtgctaagacggcccctaccggaaagcggatagacgaccactttccaaaaagaaagaaggctcggaccgaagaggactccaagccttccacctcgtcagacgccgaagctggacccagcggatcccagcagctgcaaatcccagcccaaccagcctcaagtttgggagctgatacaatgtctgcgggaggtggcggcccattgggcgacaataaccaaggtgccgatggagtgggcaatgcctcgggagattggcattgcgattccacgtggatgggggacagagtcgtcaccaagtccacccgaacctgggtgctgcccagctacaacaaccaccagtaccgagagatcaaaagcggctccgtcgacggaagcaacgccaacgcctactttggatacagcaccccctgggggtactttgactttaaccgcttccacagccactggagcccccgagactggcaaagactcatcaacaactactggggcttcagaccccggtccctcagagtcaaaatcttcaacattcaagtcaaagaggtcacggtgcaggactccaccaccaccatcgccaacaacctcacctccaccgtccaagtgtttacggacgacgactaccagctgccctacgtcgtcggcaacgggaccgagggatgcctgccggccttccctccgcaggtctttacgctgccgcagtacggttacgcgacgctgaaccgcgacaacacagaaaatcccaccgagaggagcagcttcttctgcctagagtactttcccagcaagatgctgagaacgggcaacaactttgagtttacctacaactttgaggaggtgcccttccactccagcttcgctcccagtcagaacctgttcaagctggccaacccgctggtggaccagtacttgtaccgcttcgtgagcacaaataacactggcggagtccagttcaacaagaacctggccgggagatacgccaacacctacaaaaactggttcccggggcccatgggccgaacccagggctggaacctgggctccggggtcaaccgcgccagtgtcagcgccttcgccacgaccaataggatggagctcgagggcgcgagttaccaggtgcccccgcagccgaacggcatgaccaacaacctccagggcagcaacacctatgccctggagaacactatgatcttcaacagccagccggcgaacccgggcaccaccgccacgtacctcgagggcaacatgctcatcaccagcgagagcgagacgcagccggtgaaccgcgtggcgtacaacgtcggcgggcagatggccaccaacaaccagagctccaccactgcccccgcgaccggcacgtacaacctccaggaaatcgtgcccggcagcgtgtggatggagagggacgtgtacctccaaggacccatctgggccaagatcccagagacgggggcgcactttcacccctctccggccatgggcggattcggactcaaacacccaccgcccatgatgctcatcaagaacacgcctgtgcccggaaatatcaccagcttctcggccgtgcccgtcagcagcttcatcacccagtacagcaccgggcaggtcaccgtggagatggagtgggagctcaagaaggaaaactccaagaggtggaacccagagatccagtacacaaacaactacaacgacccccagtttgtggactttgccccggacagcaccggggaatacagaaccaccagacctatcggaacccgataccttacccgacccctttaacccattcatgtcgcataccctcaataaa

SEQ ID NO: 1175 - protein, 724 aa, Artificial Sequence
  source: /note="Description of Artificial Sequence: Synthetic polypeptide"
MSFVDHPPDWLEEVGEGLREFLGLEAGPPKPKPNQQHQDQARGLVLPGYNYLGPGNGLDRGEPVNRADEVAREHDISYNEQLEAGDNPYLKYNHADAEFQEKLADDTSFGGNLGKAVFQAKKRVLEPFGLVEEGAKTAPTGKRIDDHFPKRKKARTEEDSKPSTSSDAEAGPSGSQQLQIPAQPASSLGADTMSAGGGGPLGDNNQGADGVGNASGDWHCDSTWMGDRVVTKSTRTWVLPSYNNHQYREIKSGSVDGSNANAYFGYSTPWGYFDFNRFHSHWSPRDWQRLINNYWGFRPRSLRVKIFNIQVKEVTVQDSTTTIANNLTSTVQVFTDDDYQLPYVVGNGTEGCLPAFPPQVFTLPQYGYATLNRDNTENPTERSSFFCLEYFPSKMLRTGNNFEFTYNFEEVPFHSSFAPSQNLFKLANPLVDQYLYRFVSTNNTGGVQFNKNLAGRYANTYKNWFPGPMGRTQGWNLGSGVNRASVSAFATTNRMELEGASYQVPPQPNGMTNNLQGSNTYALENTMIFNSQPANPGTTATYLEGNMLITSESETQPVNRVAYNVGGQMATNNQSSTTAPATGTYNLQEIVPGSVWMERDVYLQGPIWAKIPETGAHFHPSPAMGGFGLKHPPPMMLIKNTPVPGNITSFSAVPVSSFITQYSTGQVTVEMEWELKKENSKRWNPEIQYTNNYNDPQFVDFAPDSTGEYRTTRPIGTRYLTRPL

SEQ ID NO: 1176 - DNA, 2203 bp, Artificial Sequence
  source: /note="Description of Artificial Sequence: Synthetic polynucleotide"
atgtcttttgttgatcaccctccagattggttggaagaagttggtgaaggtcttcgcgagtttttgggccttgaagcgggcccaccgaaaccaaaacccaatcagcagcatcaagatcaagcccgtggtcttgtgctgcctggttataactatctcggacccggaaacggtctcgatcgaggagagcctgtcaacagggcagacgaggtcgcgcgagagcacgacatctcgtacaacgagcagcttgaggcgggagacaacccctacctcaagtacaaccacgcggacgccgagtttcaggagaagctcgccgacgacacatccttcgggggaaacctcggaaaggcagtctttcaggccaagaaaagggttctcgaaccttttggcctggttgaagagggtgctaagacggcccctaccggaaagcggatagacgaccactttccaaaaagaaagaaggctcggaccgaagaggactccaagccttccacctcgtcagacgccgaagctggacccagcggatcccagcagctgcaaatcccagcccaaccagcctcaagtttgggagctgatacaatgtctgcgggaggtggcggcccattgggcgacaataaccaaggtgccgatggagtgggcaatgcctcgggagattggcattgcgattccacgtggatgggggacagagtcgtcaccaagtccacccgaacctgggtgctgcccagctacaacaaccaccagtaccgagagatcaaaagcggctccgtcgacggaagcaacgccaacgcctactttggatacagcaccccctgggggtactttgactttaaccgcttccacagccactggagcccccgagactggcaaagactcatcaacaactactggggcttcagaccccggtccctcagagtcaaaatcttcaacattcaagtcaaagaggtcacggtgcaggactccaccaccaccatcgccaacaacctcacctccaccgtccaagtgtttatggacgacgactaccagctgccctacgtcgtcggcaacgggaccgagggatgcctgccggccttccctccgcaggtctttacgctgccgcagtacggttacgcgacgctgaaccgcgacaacacagaaaatcccaccgagaggagcagcttcttctgcctagagtactttcccagcaagatgctgagaacgggcaacaactttgagtttacctacaactttgaggaggtgcccttccactccagcttcgctcccagtcagaacctgttcaagctggccaacccgctggtggaccagtacttgtaccgcttcgtgagcacaaataacactggcggagtccagttcaacaagaacctggccgggagatacgccaacacctacaaaaactggttcccggggcccatgggccgaacccagggctggaacctgggctccggggtcaaccgcgccagtgtcagcgccttcgccacgaccaataggatggagctcgagggcgcgagttaccaggtgcccccgcagccgaacggcatgaccaacaacctccagggcagcaacacctatgccctggagaacactatgatcttcaacagccagccggcgaacccgggcaccaccgccacgtacctcgagggcaacatgctcatcaccagcgagagcgagacgcagccggtgaaccgcgtggcgtacaacgtcggcgggcagatggccaccaacaaccagagctccaccactgcccccgcgaccggcacgtacaacctccaggaaatcgtgcccggcagcgtgtggatggagagggacgtgtacctccaaggacccatctgggccaagatcccagagacgggggcgcactttcacccctctccggccatgggcggattcggactcaaacacccaccgcccatgatgctcatcaagaacacgcctgtgcccggaaatatcaccagcttctcggacgtgcccgtcagcagcttcatcacccagtacagcaccgggcaggtcaccgtggagatggagtgggagctcaagaaggaaaactccaagaggtggaacccagagatccagtacacaaacaactacaacgacccccagtttgtggactttgccccggacagcaccggggaatacagaaccaccagacctatcggaacccgataccttacccgacccctttaacccattcatgtcgcataccctcaataaa

SEQ ID NO: 1177 - protein, 724 aa, Artificial Sequence
  source: /note="Description of Artificial Sequence: Synthetic polypeptide"
MSFVDHPPDWLEEVGEGLREFLGLEAGPPKPKPNQQHQDQARGLVLPGYNYLGPGNGLDRGEPVNRADEVAREHDISYNEQLEAGDNPYLKYNHADAEFQEKLADDTSFGGNLGKAVFQAKKRVLEPFGLVEEGAKTAPTGKRIDDHFPKRKKARTEEDSKPSTSSDAEAGPSGSQQLQIPAQPASSLGADTMSAGGGGPLGDNNQGADGVGNASGDWHCDSTWMGDRVVTKSTRTWVLPSYNNHQYREIKSGSVDGSNANAYFGYSTPWGYFDFNRFHSHWSPRDWQRLINNYWGFRPRSLRVKIFNIQVKEVTVQDSTTTIANNLTSTVQVFMDDDYQLPYVVGNGTEGCLPAFPPQVFTLPQYGYATLNRDNTENPTERSSFFCLEYFPSKMLRTGNNFEFTYNFEEVPFHSSFAPSQNLFKLANPLVDQYLYRFVSTNNTGGVQFNKNLAGRYANTYKNWFPGPMGRTQGWNLGSGVNRASVSAFATTNRMELEGASYQVPPQPNGMTNNLQGSNTYALENTMIFNSQPANPGTTATYLEGNMLITSESETQPVNRVAYNVGGQMATNNQSSTTAPATGTYNLQEIVPGSVWMERDVYLQGPIWAKIPETGAHFHPSPAMGGFGLKHPPPMMLIKNTPVPGNITSFSDVPVSSFITQYSTGQVTVEMEWELKKENSKRWNPEIQYTNNYNDPQFVDFAPDSTGEYRTTRPIGTRYLTRPL

SEQ ID NO: 1178 - DNA, 2203 bp, Artificial Sequence
  source: /note="Description of Artificial Sequence: Synthetic polynucleotide"
atgtcttttgttgatcaccctccagattggttggaagaagttggtgaaggtcttcgcgagtttttgggccttgaagcgggcccaccgaaaccaaaacccaatcagcagcatcaagatcaagcccgtggtcttgtgctgcctggttataactatctcggacccggaaacggtctcgatcgaggagagcctgtcaacagggcagacgaggtcgcgcgagagcacgacatctcgtacaacgagcagcttgaggcgggagacaacccctacctcaagtacaaccacgcggacgccgagtttcaggagaagctcgccgacgacacatccttcgggggaaacctcggaaaggcagtctttcaggccaagaaaagggttctcgaaccttttggcctggttgaagagggtgctaagacggcccctaccggaaagcggatagacgaccactttccaaaaagaaagaaggctcggaccgaagaggactccaagccttccacctcgtcagacgccgaagctggacccagcggatcccagcagctgcaaatcccagcccaaccagcctcaagtttgggagctgatacaatgtctgcgggaggtggcggcccattgggcgacaataaccaaggtgccgatggagtgggcaatgcctcgggagattggcattgcgattccacgtggatgggggacagagtcgtcaccaagtccacccgaacctgggtgctgcccagctacaacaaccaccagtaccgagagatcaaaagcggctccgtcgacggaagcaacgccaacgcctactttggatacagcaccccctgggggtactttgactttaaccgcttccacagccactggagcccccgagactggcaaagactcatcaacaactactggggcttcagaccccggtccctcagagtcaaaatcttcaacattcaagtcaaagaggtcacggtgcaggactccaccaccaccatcgccaacaacctcacctccaccgtcgatgtgtttacggacgacgactaccagctgccctacgtcgtcggcaacgggaccgagggatgcctgccggccttccctccgcaggtctttacgctgccgcagtacggttacgcgacgctgaaccgcgacaacacagaaaatcccaccgagaggagcagcttcttctgcctagagtactttcccagcaagatgctgagaacgggcaacaactttgagtttacctacaactttgaggaggtgcccttccactccagcttcgctcccagtcagaacctgttcaagctggccaacccgctggtggaccagtacttgtaccgcttcgtgagcacaaataacactggcggagtccagttcaacaagaacctggccgggagatacgccaacacctacaaaaactggttcccggggcccatgggccgaacccagggctggaacctgggctccggggtcaaccgcgccagtgtcagcgccttcgccacgaccaataggatggagctcgagggcgcgagttaccaggtgcccccgcagccgaacggcatgaccaacaacctccagggcagcaacacctatgccctggagaacactatgatcttcaacagccagccggcgaacccgggcaccaccgccacgtacctcgagggcaacatgctcatcaccagcgagagcgagacgcagccggtgaaccgcgtggcgtacaacgtcggcgggcagatggccaccaacaaccagagctccaccactgcccccgcgaccggcacgtacaacctccaggaaatcgtgcccggcagcgtgtggatggagagggacgtgtacctccaaggacccatctgggccaagatcccagagacgggggcgcactttcacccctctccggccatgggcggattcggactcaaacacccaccgcccatgatgctcatcaagaacacgcctgtgcccggaaatatcaccagcttctcggacgtgcccgtcagcagcttcatcacccagtacagcaccgggcaggtcaccgtggagatggagtgggagctcaagaaggaaaactccaagaggtggaacccagagatccagtacacaaacaactacaacgacccccagtttgtggactttgccccggacagcaccggggaatacagaaccaccagacctatcggaacccgataccttacccgacccctttaacccattcatgtcgcataccctcaataaa

SEQ ID NO: 1179 - protein, 724 aa, Artificial Sequence
  source: /note="Description of Artificial Sequence: Synthetic polypeptide"
MSFVDHPPDWLEEVGEGLREFLGLEAGPPKPKPNQQHQDQARGLVLPGYNYLGPGNGLDRGEPVNRADEVAREHDISYNEQLEAGDNPYLKYNHADAEFQEKLADDTSFGGNLGKAVFQAKKRVLEPFGLVEEGAKTAPTGKRIDDHFPKRKKARTEEDSKPSTSSDAEAGPSGSQQLQIPAQPASSLGADTMSAGGGGPLGDNNQGADGVGNASGDWHCDSTWMGDRVVTKSTRTWVLPSYNNHQYREIKSGSVDGSNANAYFGYSTPWGYFDFNRFHSHWSPRDWQRLINNYWGFRPRSLRVKIFNIQVKEVTVQDSTTTIANNLTSTVDVFTDDDYQLPYVVGNGTEGCLPAFPPQVFTLPQYGYATLNRDNTENPTERSSFFCLEYFPSKMLRTGNNFEFTYNFEEVPFHSSFAPSQNLFKLANPLVDQYLYRFVSTNNTGGVQFNKNLAGRYANTYKNWFPGPMGRTQGWNLGSGVNRASVSAFATTNRMELEGASYQVPPQPNGMTNNLQGSNTYALENTMIFNSQPANPGTTATYLEGNMLITSESETQPVNRVAYNVGGQMATNNQSSTTAPATGTYNLQEIVPGSVWMERDVYLQGPIWAKIPETGAHFHPSPAMGGFGLKHPPPMMLIKNTPVPGNITSFSDVPVSSFITQYSTGQVTVEMEWELKKENSKRWNPEIQYTNNYNDPQFVDFAPDSTGEYRTTRPIGTRYLTRPL

SEQ ID NO: 1180 - DNA, 2203 bp, Artificial Sequence
  source: /note="Description of Artificial Sequence: Synthetic polynucleotide"
atgtcttttgttgatcaccctccagattggttggaagaagttggtgaaggtcttcgcgagtttttgggccttgaagcgggcccaccgaaaccaaaacccaatcagcagcatcaagatcaagcccgtggtcttgtgctgcctggttataactatctcggacccggaaacggtctcgatcgaggagagcctgtcaacagggcagacgaggtcgcgcgagagcacgacatctcgtacaacgagcagcttgaggcgggagacaacccctacctcaagtacaaccacgcggacgccgagtttcaggagaagctcgccgacgacacatccttcgggggaaacctcggaaaggcagtctttcaggccaagaaaagggttctcgaaccttttggcctggttgaagagggtgctaagacggcccctaccggaaagcggatagacgaccactttccaaaaagaaagaaggctcggaccgaagaggactccaagccttccacctcgtcagacgccgaagctggacccagcggatcccagcagctgcaaatcccagcccaaccagcctcaagtttgggagctgatacaatgtctgcgggaggtggcggcccattgggcgacaataaccaaggtgccgatggagtgggcaatgcctcgggagattggcattgcgattccacgtggatgggggacagagtcgtcaccaagtccacccgaacctgggtgctgcccagctacaacaaccaccagtaccgagagatcaaaagcggctccgtcgacggaagcaacgccaacgcctactttggatacagcaccccctgggggtactttgactttaaccgcttccacagccactggagcccccgagactggcaaagactcatcaacaactactggggcttcagaccccggtccctcagagtcaaaatcttcaacattcaagtcaaagaggtcacggtgcaggactccaccaccaccatcgccaacaacctcacctccaccgtccaagtgtttacggacgacgactaccagctgccctacgtcgtcggcaacgggacccagggatgcctgccggccttccctccgcaggtctttacgctgccgcagtacggttacgcgacgctgaaccgcgacaacacagaaaatcccaccgagaggagcagcttcttctgcctagagtactttcccagcaagatgctgagaacgggcaacaactttgagtttacctacaactttgaggaggtgcccttccactccagcttcgctcccagtcagaacctgttcaagctggccaacccgctggtggaccagtacttgtaccgcttcgtgagcacaaataacactggcggagtccagttcaacaagaacctggccgggagatacgccaacacctacaaaaactggttcccggggcccatgggccgaacccagggctggaacctgggctccggggtcaaccgcgccagtgtcagcgccttcgccacgaccaataggatggagctcgagggcgcgagttaccaggtgcccccgcagccgaacggcatgaccaacaacctccagggcagcaacacctatgccctggagaacactatgatcttcaacagccagccggcgaacccgggcaccaccgccacgtacctcgagggcaacatgctcatcaccagcgagagcgagacgcagccggtgaaccgcgtggcgtacaacgtcggcgggcagatggccaccaacaaccagagctccaccactgcccccgcgaccggcacgtacaacctccaggaaatcgtgcccggcagcgtgtggatggagagggacgtgtacctccaaggacccatctgggccaagatcccagagacgggggcgcactttcacccctctccggccatgggcggattcggactcaaacacccaccgcccatgatgctcatcaagaacacgcctgtgcccggaaatatcaccagcttctcggacgtgcccgtcagcagcttcatcacccagtacagcaccgggcaggtcaccgtggagatggagtgggagctcaagaaggaaaactccaagaggtggaacccagagatccagtacacaaacaactacaacgacccccagtttgtggactttgccccggacagcaccggggaatacagaaccaccagacctatcggaacccgataccttacccgacccctttaacccattcatgtcgcataccctcaataaa

SEQ ID NO: 1181 - protein, 724 aa, Artificial Sequence
  source: /note="Description of Artificial Sequence: Synthetic polypeptide"
MSFVDHPPDWLEEVGEGLREFLGLEAGPPKPKPNQQHQDQARGLVLPGYNYLGPGNGLDRGEPVNRADEVAREHDISYNEQLEAGDNPYLKYNHADAEFQEKLADDTSFGGNLGKAVFQAKKRVLEPFGLVEEGAKTAPTGKRIDDHFPKRKKARTEEDSKPSTSSDAEAGPSGSQQLQIPAQPASSLGADTMSAGGGGPLGDNNQGADGVGNASGDWHCDSTWMGDRVVTKSTRTWVLPSYNNHQYREIKSGSVDGSNANAYFGYSTPWGYFDFNRFHSHWSPRDWQRLINNYWGFRPRSLRVKIFNIQVKEVTVQDSTTTIANNLTSTVQVFTDDDYQLPYVVGNGTQGCLPAFPPQVFTLPQYGYATLNRDNTENPTERSSFFCLEYFPSKMLRTGNNFEFTYNFEEVPFHSSFAPSQNLFKLANPLVDQYLYRFVSTNNTGGVQFNKNLAGRYANTYKNWFPGPMGRTQGWNLGSGVNRASVSAFATTNRMELEGASYQVPPQPNGMTNNLQGSNTYALENTMIFNSQPANPGTTATYLEGNMLITSESETQPVNRVAYNVGGQMATNNQSSTTAPATGTYNLQEIVPGSVWMERDVYLQGPIWAKIPETGAHFHPSPAMGGFGLKHPPPMMLIKNTPVPGNITSFSDVPVSSFITQYSTGQVTVEMEWELKKENSKRWNPEIQYTNNYNDPQFVDFAPDSTGEYRTTRPIGTRYLTRPL

SEQ ID NO: 1182 - DNA, 2203 bp, Artificial Sequence
  source: /note="Description of Artificial Sequence: Synthetic polynucleotide"
atgtcttttgttgatcaccctccagattggttggaagaagttggtgaaggtcttcgcgagtttttgggccttgaagcgggcccaccgaaaccaaaacccaatcagcagcatcaagatcaagcccgtggtcttgtgctgcctggttataactatctcggacccggaaacggtctcgatcgaggagagcctgtcaacagggcagacgaggtcgcgcgagagcacgacatctcgtacaacgagcagcttgaggcgggagacaacccctacctcaagtacaaccacgcggacgccgagtttcaggagaagctcgccgacgacacatccttcgggggaaacctcggaaaggcagtctttcaggccaagaaaagggttctcgaaccttttggcctggttgaagagggtgctaagacggcccctaccggaaagcggatagacgaccactttccaaaaagaaagaaggctcggaccgaagaggactccaagccttccacctcgtcagacgccgaagctggacccagcggatcccagcagctgcaaatcccagcccaaccagcctcaagtttgggagctgatacaatgtctgcgggaggtggcggcccattgggcgacaataaccaaggtgccgatggagtgggcaatgcctcgggagattggcattgcgattccacgtggatgggggacagagtcgtcaccaagtccacccgaacctgggtgctgcccagctacaacaaccaccagtaccgagagatcaaaagcggctccgtcgacggaagcaacgccaacgcctactttggatacagcaccccctgggggtactttgactttaaccgcttccacagccactggagcccccgagactggcaaagactcatcaacaactactggggcttcagaccccggtccctcagagtcaaaatcttcaacattcaagtcaaagaggtcacggtgcaggactccaccaccaccatcgccaacaacctcacctccaccgtccaagtgtttacggacgacgactaccagctgccctacgtcgtcggcaacgggaccgagggatgcctgccggccttccctccgcaggtctttacgctgccgcagtacggttacgcgacgctgaaccgcgacaacacagaaaatcccaccgagaggagcagcttcttctgcctagagtactttcccagcaagatgctgagaacgggcaacaactttgagtttacctacaactttgaggaggtgcccttccactccagcttcgctcccagtcagaacctgttcaagctggccaacccgctggtggaccagtacttgtaccgcttcgtgagcacaaataacactggcggagtccagttcaacaagaacctggccgggagatacgccaacacctacaaaaactggttcccggggcccatgggccgaacccagggctggaacctgggctccggggtcaaccgcgccagtgtcagcgccttcgccacgaccaataggatggagctcgagggcgcgagttaccaggtgcccccgcagccgaacggcatgaccaacaacctccagggcagcaacacctatgccctggagaacactatgatcttcaacagccagtcggcgaacccgggcaccaccgccacgtacctcgagggcaacatgctcatcaccagcgagagcgagacgcagccggtgaaccgcgtggcgtacaacgtcggcgggcagatggccaccaacaaccagagctccaccactgcccccgcgaccggcacgtacaacctccaggaaatcgtgcccggcagcgtgtggatggagagggacgtgtacctccaaggacccatctgggccaagatcccagagacgggggcgcactttcacccctctccggccatgggcggattcggactcaaacacccaccgcccatgatgctcatcaagaacacgcctgtgcccggaaatatcaccagcttctcggacgtgcccgtcagcagcttcatcacccagtacagcaccgggcaggtcaccgtggagatggagtgggagctcaagaaggaaaactccaagaggtggaacccagagatccagtacacaaacaactacaacgacccccagtttgtggactttgccccggacagcaccggggaatacagaaccaccagacctatcggaacccgataccttacccgacccctttaacccattcatgtcgcataccctcaataaa

SEQ ID NO: 1183 - protein, 724 aa, Artificial Sequence
  source: /note="Description of Artificial Sequence: Synthetic polypeptide"
MSFVDHPPDWLEEVGEGLREFLGLEAGPPKPKPNQQHQDQARGLVLPGYNYLGPGNGLDRGEPVNRADEVAREHDISYNEQLEAGDNPYLKYNHADAEFQEKLADDTSFGGNLGKAVFQAKKRVLEPFGLVEEGAKTAPTGKRIDDHFPKRKKARTEEDSKPSTSSDAEAGPSGSQQLQIPAQPASSLGADTMSAGGGGPLGDNNQGADGVGNASGDWHCDSTWMGDRVVTKSTRTWVLPSYNNHQYREIKSGSVDGSNANAYFGYSTPWGYFDFNRFHSHWSPRDWQRLINNYWGFRPRSLRVKIFNIQVKEVTVQDSTTTIANNLTSTVQVFTDDDYQLPYVVGNGTEGCLPAFPPQVFTLPQYGYATLNRDNTENPTERSSFFCLEYFPSKMLRTGNNFEFTYNFEEVPFHSSFAPSQNLFKLANPLVDQYLYRFVSTNNTGGVQFNKNLAGRYANTYKNWFPGPMGRTQGWNLGSGVNRASVSAFATTNRMELEGASYQVPPQPNGMTNNLQGSNTYALENTMIFNSQSANPGTTATYLEGNMLITSESETQPVNRVAYNVGGQMATNNQSSTTAPATGTYNLQEIVPGSVWMERDVYLQGPIWAKIPETGAHFHPSPAMGGFGLKHPPPMMLIKNTPVPGNITSFSDVPVSSFITQYSTGQVTVEMEWELKKENSKRWNPEIQYTNNYNDPQFVDFAPDSTGEYRTTRPIGTRYLTRPL

SEQ ID NO: 1184 - DNA, 2203 bp, Artificial Sequence
  source: /note="Description of Artificial Sequence: Synthetic polynucleotide"
atgtcttttgttgatcaccctccagattggttggaagaagttggtgaaggtcttcgcgagtttttgggccttgaagcgggcccaccgaaaccaaaacccaatcagcagcatcaagatcaagcccgtggtcttgtgctgcctggttataactatctcggacccggaaacggtctcgatcgaggagagcctgtcaacagggcagacgaggtcgcgcgagagcacgacatctcgtacaacgagcagcttgaggcgggagacaacccctacctcaagtacaaccacgcggacgccgagtttcaggagaagctcgccgacgacacatccttcgggggaaacctcggaaaggcagtctttcaggccaagaaaagggttctcgaaccttttggcctggttgaagagggtgctaagacggcccctaccggaaagcggatagacgaccactttccaaaaagaaagaaggctcggaccgaagaggactccaagccttccacctcgtcagacgccgaagctggacccagcggatcccagcagctgcaaatcccagcccaaccagcctcaagtttgggagctgatacaatgtctgcgggaggtggcggcccattgggcgacaataaccaaggtgccgatggagtgggcaatgcctcgggagattggcattgcgattccacgtggatgggggacagagtcgtcaccaagtccacccgaacctgggtgctgcccagctacaacaaccaccagtaccgagagatcaaaagcggctccgtcgacggaagcaacgccaacgcctactttggatacagcaccccctgggggtactttgactttaaccgcttccacagccactggagcccccgagactggcaaagactcatcaacaactactggggcttcagaccccggtccctcagagtcaaaatcttcaacattcaagtcaaagaggtcacggtgcaggactccaccaccaccatcgccaacaacctcacctccaccgtccaagtgtttacggacgacgactaccagctgccctacgtcgtcggcaacgggaccgagggatgcctgccggccttccctccgcaggtctttacgctgccgcagtacggttacgcgacgctgaaccgcgacaacacagaaaatcccaccgagaggagcagcttcttctgcctagagtactttcccagcaagatgctgagaacgggcaacaactttgagtttacctacaactttgaggaggtgcccttccactccagcttcgctcccagtcagaacctgttcaagctggccaacccgctggtggaccagtacttgtaccgcttcgtgagcacaaataacactggcggagtccagttcaacaagaacctggccgggagatacgccaacacctacaaaaactggttcccggggcccatgggccgaacccagggctggaacctgggctccggggtcaaccgcgccagtgtcagcgccttcgccacgaccaataggatggagctcgagggcgcgagttaccaggtgcccccgcagccgaacggcatgaccaacaacctccagggcagcaacacctatgccctggagaacactatgatcttcaacagccagggggcgaacccgggcaccaccgccacgtacctcgagggcaacatgctcatcaccagcgagagcgagacgcagccggtgaaccgcgtggcgtacaacgtcggcgggcagatggccaccaacaaccagagctccaccactgcccccgcgaccggcacgtacaacctccaggaaatcgtgcccggcagcgtgtggatggagagggacgtgtacctccaaggacccatctgggccaagatcccagagacgggggcgcactttcacccctctccggccatgggcggattcggactcaaacacccaccgcccatgatgctcatcaagaacacgcctgtgcccggaaatatcaccagcttctcggacgtgcccgtcagcagcttcatcacccagtacagcaccgggcaggtcaccgtggagatggagtgggagctcaagaaggaaaactccaagaggtggaacccagagatccagtacacaaacaactacaacgacccccagtttgtggactttgccccggacagcaccggggaatacagaaccaccagacctatcggaacccgataccttacccgacccctttaacccattcatgtcgcataccctcaataaa

SEQ ID NO: 1185 - protein, 724 aa, Artificial Sequence
  source: /note="Description of Artificial Sequence: Synthetic polypeptide"
MSFVDHPPDWLEEVGEGLREFLGLEAGPPKPKPNQQHQDQARGLVLPGYNYLGPGNGLDRGEPVNRADEVAREHDISYNEQLEAGDNPYLKYNHADAEFQEKLADDTSFGGNLGKAVFQAKKRVLEPFGLVEEGAKTAPTGKRIDDHFPKRKKARTEEDSKPSTSSDAEAGPSGSQQLQIPAQPASSLGADTMSAGGGGPLGDNNQGADGVGNASGDWHCDSTWMGDRVVTKSTRTWVLPSYNNHQYREIKSGSVDGSNANAYFGYSTPWGYFDFNRFHSHWSPRDWQRLINNYWGFRPRSLRVKIFNIQVKEVTVQDSTTTIANNLTSTVQVFTDDDYQLPYVVGNGTEGCLPAFPPQVFTLPQYGYATLNRDNTENPTERSSFFCLEYFPSKMLRTGNNFEFTYNFEEVPFHSSFAPSQNLFKLANPLVDQYLYRFVSTNNTGGVQFNKNLAGRYANTYKNWFPGPMGRTQGWNLGSGVNRASVSAFATTNRMELEGASYQVPPQPNGMTNNLQGSNTYALENTMIFNSQGANPGTTATYLEGNMLITSESETQPVNRVAYNVGGQMATNNQSSTTAPATGTYNLQEIVPGSVWMERDVYLQGPIWAKIPETGAHFHPSPAMGGFGLKHPPPMMLIKNTPVPGNITSFSDVPVSSFITQYSTGQVTVEMEWELKKENSKRWNPEIQYTNNYNDPQFVDFAPDSTGEYRTTRPIGTRYLTRPL

SEQ ID NO: 1186 - DNA, 2194 bp, Artificial Sequence
  source: /note="Description of Artificial Sequence: Synthetic polynucleotide"
atgtcttttgttgatcaccctccagattggttggaagaagttggtgaaggtcttcgcgagtttttgggccttgaagcgggcccaccgaaaccaaaacccaatcagcagcatcaagatcaagcccgtggtcttgtgctgcctggttataactatctcggacccggaaacggtctcgatcgaggagagcctgtcaacagggcagacgaggtcgcgcgagagcacgacatctcgtacaacgagcagcttgaggcgggagacaacccctacctcaagtacaaccacgcggacgccgagtttcaggagaagctcgccgacgacacatccttcgggggaaacctcggaaaggcagtctttcaggccaagaaaagggttctcgaaccttttggcctggttgaagagggtgctaagacggcccctaccggaaagcggatagacgaccactttccaaaaagaaagaaggctcggaccgaagaggactccaagccttccacctcgtcagacgccgaagctggacccagcggatcccagcagctgcaaatcccagcccaaccagcctcaagtttgggagctgatacaatgtctgcgggaggtggcggcccattgggcgacaataaccaaggtgccgatggagtgggcaatgcctcgggagattggcattgcgattccacgtggatgggggacagagtcgtcaccaagtccacccgaacctgggtgctgcccagctacaacaaccaccagtaccgagagatcaaaagcggctccgtcgacggaagcaacgccaacgcctactttggatacagcaccccctgggggtactttgactttaaccgcttccacagccactggagcccccgagactggcaaagactcatcaacaactactggggcttcagaccccggtccctcagagtcaaaatcttcaacattcaagtcaaagaggtcacggtgcaggactccaccaccaccatcgccaacaacctcacctccaccgtccaagtgtttacggacgacgactaccagctgccctacgtcgtcggcaacgggaccgagggatgcctgccggccttccctccgcaggtctttacgctgccgcagtacggttacgcgacgctgaaccgcgacaacacagaaaatcccaccgagaggagcagcttcttctgcctagagtactttcccagcaagatgctgagaacgggcaacaactttgagtttacctacaactttgaggaggtgcccttccactccagcttcgctcccagtcagaacctgttcaagctggccaacccgctggtggaccagtacttgtaccgcttcgtgagcacaaataacactggcggagtccagttcaacaagaacctggccgggagatacgccaacacctacaaaaactggttcccggggcccatgggccgaacccagggctggaacctgggctccggggtcaaccgcgccagtgtcagcgccttcgccacgaccaataggatggagctcgagggcgcgagttaccaggtgcccccgcagccgaacggcatgaccaacaacctccagggcagcaacacctatgccctggagaacactatgatcttcgggaagcaaggctcagagaaaacaaatgtggacattgaaaaggtcatgatcaccagcgagagcgagacgcagccggtgaaccgcgtggcgtacaacgtcggcgggcagatggccaccaacaaccagagctccaccactgcccccgcgaccggcacgtacaacctccaggaaatcgtgcccggcagcgtgtggatggagagggacgtgtacctccaaggacccatctgggccaagatcccagagacgggggcgcactttcacccctctccggccatgggcggattcggactcaaacacccaccgcccatgatgctcatcaagaacacgcctgtgcccggaaatatcaccagcttctcggacgtgcccgtcagcagcttcatcacccagtacagcaccgggcaggtcaccgtggagatggagtgggagctcaagaaggaaaactccaagaggtggaacccagagatccagtacacaaacaactacaacgacccccagtttgtggactttgccccggacagcaccggggaatacagaaccaccagacctatcggaacccgataccttacccgacccctttaacccattcatgtcgcataccctcaataaa

SEQ ID NO: 1187 - protein, 721 aa, Artificial Sequence
  source: /note="Description of Artificial Sequence: Synthetic polypeptide"
MSFVDHPPDWLEEVGEGLREFLGLEAGPPKPKPNQQHQDQARGLVLPGYNYLGPGNGLDRGEPVNRADEVAREHDISYNEQLEAGDNPYLKYNHADAEFQEKLADDTSFGGNLGKAVFQAKKRVLEPFGLVEEGAKTAPTGKRIDDHFPKRKKARTEEDSKPSTSSDAEAGPSGSQQLQIPAQPASSLGADTMSAGGGGPLGDNNQGADGVGNASGDWHCDSTWMGDRVVTKSTRTWVLPSYNNHQYREIKSGSVDGSNANAYFGYSTPWGYFDFNRFHSHWSPRDWQRLINNYWGFRPRSLRVKIFNIQVKEVTVQDSTTTIANNLTSTVQVFTDDDYQLPYVVGNGTEGCLPAFPPQVFTLPQYGYATLNRDNTENPTERSSFFCLEYFPSKMLRTGNNFEFTYNFEEVPFHSSFAPSQNLFKLANPLVDQYLYRFVSTNNTGGVQFNKNLAGRYANTYKNWFPGPMGRTQGWNLGSGVNRASVSAFATTNRMELEGASYQVPPQPNGMTNNLQGSNTYALENTMIFGKQGSEKTNVDIEKVMITSESETQPVNRVAYNVGGQMATNNQSSTTAPATGTYNLQEIVPGSVWMERDVYLQGPIWAKIPETGAHFHPSPAMGGFGLKHPPPMMLIKNTPVPGNITSFSDVPVSSFITQYSTGQVTVEMEWELKKENSKRWNPEIQYTNNYNDPQFVDFAPDSTGEYRTTRPIGTRYLTRPL

SEQ ID NO: 1188 - protein, 519 aa, Artificial Sequence
  source: /note="Description of Artificial Sequence: Synthetic polypeptide"
DGVGSSSGNWHCDSTWLGDRVITTSTRTWALPTYNNHLYKQISNGTSGGATNDNTYFGYSTPWGYFDFNRFHCHFSPRDWQRLINNNWGFRPKRLSFKLFNIQVKEVTQNEGTKTIANNLTSTIQVFTDSEYQLPYVLGSAHQGCLPPFPADVFMIPQYGYLTLNNGSQAVGRSSFYCLEYFPSQMLRTGNNFQFTYTFEDVPFHSSYAHSQSLDRLMNPLIDQYLYYLSRTQTTGGTANTQTLGFSQGGPNTMANQAKNWLPGPCYRQQRVSTTTGQNNNSNFAWTAGTKYHLNGRNSLANPGIAMATHKDDEERFFPSNGILIFGKQNAARDNADYSDVMLTSEEEIKTTNPVATEEYGIVADNLQQQNTAPQIGTVNSQGALPGMVWQNRDVYLQGPIWAKIPHTDGNFHPSPLMGGFGLKHPPPQILIKNTPVPADPPTTFNQSKLNSFITQYSTGQVSVEIEWELQKENSKRWNPEIQYTSNYYKSTSVDFAVNTEGVYSEPRPIGTRYLTRNL

SEQ ID NO: 1189 - protein, 738 aa, Artificial Sequence
  source: /note="Description of Artificial Sequence: Synthetic polypeptide"
MAADGYLPDWLEDNLSEGIREWWALQPGAPKPKANQQHQDNARGLVLPGYKYLGPGNGLDKGEPVNAADAAALEHDKAYDQQLKAGDNPYLKYNHADAEFQERLKEDTSFGGNLGRAVFQAKKRLLEPLGLVEEAAKTAPGKKRPVEPSPQRSPDSSTGIGKKGQQPARKRLNFGQTGDSESVPDPQPLGEPPAAPSGVGPNTMAAGGGAPMADNNEGADGVGSSSGNWHCDSTWLGDRVITTSTRTWALPTYNNHLYKQISNGTSGGATNDNTYFGYSTPWGYFDFNRFHCHFSPRDWQRLINNNWGFRPKRLSFKLFNIQVKEVTQNEGTKTIANNLTSTIQVFTDSEYQLPYVLGSAHQGCLPPFPADVFMIPQYGYLTLNNGSQAVGRSSFYCLEYFPSQMLRTGNNFQFTYTFEDVPFHSSYAHSQSLDRLMNPLIDQYLYYLSRTQTTGGTANTQTLGFSQGGPNTMANQAKNWLPGPCYRQQRVSTTTGQNNNSNFAWTAGTKYHLNGRNSLANPGIAMATHKDDEERFFPSNGILIFGKQNAARDNADYSDVMLTSEEEIKTTNPVATEEYGIVADNLQQQNTAPQIGTVNSQGALPGMVWQNRDVYLQGPIWAKIPHTDGNFHPSPLMGGFGLKHPPPQILIKNTPVPADPPTTFNQSKLNSFITQYSTGQVSVEIEWELQKENSKRWNPEIQYTSNYYKSTSVDFAVNTEGVYSEPRPIGTRYLTRNL

SEQ ID NO: 1190 - protein, 725 aa, Artificial Sequence
  source: /note="Description of Artificial Sequence: Synthetic polypeptide"
MAADGYLPDWLEDNLSEGIREWWALQPGAPKPKANQQHQDNARGLVLPGYKYLGPGNGLDKGEPVNAADAAALEHDKAYDQQLKAGDNPYLKYNHADAEFQERLKEDTSFGGNLGRAVFQAKKRLLEPLGLVEEAAKTAPTGKRIDDHFPKRKKARTEEDSKPSTSSDAEAGPSGSQQLQIPAQPASSLGADTMSAGGGGPLGDNNQGADGVGNASGDWHCDSTWMGDRVVTKSTRTWVLPSYNNHQYREIKSGSVDGSNANAYFGYSTPWGYFDFNRFHSHWSPRDWQRLINNYWGFRPRSLRVKIFNIQVKEVTVQDSTTTIANNLTSTVQVFTDDDYQLPYVVGNGTEGCLPAFPPQVFTLPQYGYATLNRDNTENPTERSSFFCLEYFPSKMLRTGNNFEFTYNFEEVPFHSSFAPSQNLFKLANPLVDQYLYRFVSTNNTGGVQFNKNLAGRYANTYKNWFPGPMGRTQGWNLGSGVNRASVSAFATTNRMELEGASYQVPPQPNGMTNNLQGSNTYALENTMIFNSQPANPGTTATYLEGNMLITSESETQPVNRVAYNVGGQMATNNQSSTTAPATGTYNLQEIVPGSVWMERDVYLQGPIWAKIPETGAHFHPSPAMGGFGLKHPPPMMLIKNTPVPGNITSFSDVPVSSFITQYSTGQVTVEMEWELKKENSKRWNPEIQYTNNYNDPQFVDFAPDSTGEYRTTRPIGTRYLTRPL

SEQ ID NO: 1191 - protein, 736 aa, Artificial Sequence
  source: /note="Description of Artificial Sequence: Synthetic polypeptide"
MAADGYLPDWLEDNLSEGIREWWALKPGAPKPKANQQKQDDGRGLVLPGYKYLGPFNGLDKGEPVNAADAAALEHDKAYDQQLQAGDNPYLRYNHADAEFQERLQEDTSFGGNLGRAVFQAKKRVLEPLGLVEEGAKTAPGKKRPVDQSPQEPDSSSGVGKSGKQPARKRLNFGQTGDSESVPDPQPLGEPPAAPTSLGSNTMASGGGAPMADNNEGADGVGNSSGNWHCDSQWLGDRVITTSTRTWALPTYNNHLYKQISSQSGASNDNHYFGYSTPWGYFDFNRFHCHFSPRDWQRLINNNWGFRPKKLSFKLFNIQVKEVTQNDGTTTIANNLTSTVQVFTDSEYQLPYVLGSAHQGCLPPFPADVFMVPQYGYLTLNNGSQAVGRSSFYCLEYFPSQMLRTGNNFQFSYTFEDVPFHSSYAHSQSLDRLMNPLIDQYLYYLNRTQGTTSGTTNQSRLLFSQAGPQSMSLQARNWLPGPCYRQQRLSKTANDNNNSNFPWTAASKYHLNGRDSLVNPGPAMASHKDDEEKFFPMHGNLIFGKEGTTASNAELDNVMITDEEEIRTTNPVATEQYGTVANNLQSSNTAPTTRTVNDQGALPGMVWQDRDVYLQGPIWAKIPHTDGHFHPSPLMGGFGLKHPPPQIMIKNTPVPANPPTTFSPAKFASFITQYSTGQVSVEIEWELQKENSKRWNPEIQYTSNYNKSVNVDFTVDTNGVYSEPRPIGTRYLTRNL

SEQ ID NO: 1192 - protein, 735 aa, Artificial Sequence
  source: /note="Description of Artificial Sequence: Synthetic polypeptide"
MSFVDHPPDWLEEVGEGLREFLGLEAGPPKPKPNQQHQDQARGLVLPGYNYLGPGNGLDRGEPVNRADEVAREHDISYNEQLEAGDNPYLKYNHADAEFQEKLADDTSFGGNLGKAVFQAKKRVLEPFGLVEEGAKTAPGKKRPVDQSPQEPDSSSGVGKSGKQPARKRLNFGQTGDSESVPDPQPLGEPPAAPTSLGSNTMASGGGAPMADNNEGADGVGNSSGNWHCDSQWLGDRVITTSTRTWALPTYNNHLYKQISSQSGASNDNHYFGYSTPWGYFDFNRFHCHFSPRDWQRLINNNWGFRPKKLSFKLFNIQVKEVTQNDGTTTIANNLTSTVQVFTDSEYQLPYVLGSAHQGCLPPFPADVFMVPQYGYLTLNNGSQAVGRSSFYCLEYFPSQMLRTGNNFQFSYTFEDVPFHSSYAHSQSLDRLMNPLIDQYLYYLNRTQGTTSGTTNQSRLLFSQAGPQSMSLQARNWLPGPCYRQQRLSKTANDNNNSNFPWTAASKYHLNGRDSLVNPGPAMASHKDDEEKFFPMHGNLIFGKEGTTASNAELDNVMITDEEEIRTTNPVATEQYGTVANNLQSSNTAPTTRTVNDQGALPGMVWQDRDVYLQGPIWAKIPHTDGHFHPSPLMGGFGLKHPPPQIMIKNTPVPANPPTTFSPAKFASFITQYSTGQVSVEIEWELQKENSKRWNPEIQYTSNYNKSVNVDFTVDTNGVYSEPRPIGTRYLTRPL

SEQ ID NO: 1193 - protein, 736 aa, Artificial Sequence
  source: /note="Description of Artificial Sequence: Synthetic polypeptide"
MAADGYLPDWLEDNLSEGIREWWALKPGAPKPKANQQKQDDGRGLVLPGYKYLGPFNGLDKGEPVNAADAAALEHDKAYDQQLQAGDNPYLRYNHADAEFQERLQEDTSFGGNLGRAVFQAKKRVLEPLGLVEEGAKTAPGKKRPVEPSPQRSPDSSTGIGKKGQQPARKRLNFGQTGDSESVPDPQPLGEPPAAPSGVGPNTMAAGGGAPMADNNEGADGVGSSSGNWHCDSTWLGDRVITTSTRTWALPTYNNHLYKQISSQSGASNDNHYFGYSTPWGYFDFNRFHCHFSPRDWQRLINNNWGFRPKRLSFKLFNIQVKEVTQNEGTKTIANNLTSTIQVFTDSEYQLPYVLGSAHQGCLPPFPADVFMIPQYGYLTLNNGSQAVGRSSFYCLEYFPSQMLRTGNNFQFTYTFEDVPFHSSYAHSQSLDRLMNPLIDQYLYYLSRTQTTGGTANTQTLGFSQGGPNTMANQAKNWLPGPCYRQQRVSTTTGQNNNSNFAWTAGTKYHLNGRNSLANPGIAMATHKDDEERFFPSNGILIFGKQGTTASNAELDNVMITDEEEIKTTNPVATEEYGIVADNLQQQNTAPQIGTVNSQGALPGMVWQNRDVYLQGPIWAKIPHTDGNFHPSPLMGGFGLKHPPPQILIKNTPVPADPPTTFNQSKLNSFITQYSTGQVSVEIEWELQKENSKRWNPEIQYTSNYNKSVNVDFTVDTNGVYSEPRPIGTRYLTRNL

SEQ ID NO: 1194 - protein, 736 aa, Artificial Sequence
  source: /note="Description of Artificial Sequence: Synthetic polypeptide"
MAADGYLPDWLEDNLSEGIREWWALKPGAPKPKANQQKQDDGRGLVLPGYKYLGPFNGLDKGEPVNAADAAALEHDKAYDQQLQAGDNPYLRYNHADAEFQERLQEDTSFGGNLGRAVFQAKKRVLEPLGLVEEGAKTAPGKKRPVEPSPQRSPDSSTGIGKKGQQPARKRLNFGQTGDSESVPDPQPLGEPPAAPSGVGPNTMAAGGGAPMADNNEGADGVGSSSGNWHCDSTWLGDRVITTSTRTWALPTYNNHLYKQISSQSGASNDNHYFGYSTPWGYFDFNRFHCHFSPRDWQRLINNNWGFRPKRLSFKLFNIQVKEVTQNEGTKTIANNLTSTIQVFTDSEYQLPYVLGSAHQGCLPPFPADVFMIPQYGYLTLNNGSQAVGRSSFYCLEYFPSQMLRTGNNFQFTYTFEDVPFHSSYAHSQSLDRLMNPLIDQYLYYLSRTQTTGGTANTQTLGFSQGGPNTMANQAKNWLPGPCYRQQRVSTTTGQNNNSNFAWTAGTKYHLNGRNSLANPGIAMATHKDDEERFFPSNGILIFGKQNAARDNADYSDVMLTSEEEIKTTNPVATEEYGIVADNLQQQNTAPQIGTVNSQGALPGMVWQNRDVYLQGPIWAKIPHTDGNFHPSPLMGGFGLKHPPPQILIKNTPVPADPPTTFNQSKLNSFITQYSTGQVSVEIEWELQKENSKRWNPEIQYTSNYYKSTSVDFAVNTEGVYSEPRPIGTRYLTRNL

SEQ ID NO: 1195 - protein, 736 aa, Artificial Sequence
  source: /note="Description of Artificial Sequence: Synthetic polypeptide"
MAADGYLPDWLEDNLSEGIREWWDLKPGAPKPKANQQKQDDGRGLVLPGYKYLGPFNGLDKGEPVNAADAAALEHDKAYDQQLKAGDNPYLRYNHADAEFQERLQEDTSFGGNLGRAVFQAKKRVLEPLGLVEEGAKTAPGKKRPVEQSPQEPDSSSGIGKTGQQPAKKRLNFGQTGDTESVPDPQPLGEPPAAPSGLGPNTMASGGGAPMADNNEGADGVGNSSGNWHCDSTWLGDRVITTSTRTWALPTYNNHLYKQISNGTSGGSTNDNTYFGYSTPWGYFDFNRFHCHFSPRDWQRLINNNWGFRPKRLNFKLFNIQVKEVTTNEGTKTIANNLTSTVQVFTDSEYQLPYVLGSAHQGCLPPFPADVFMVPQYGYLTLNNGSQALGRSSFYCLEYFPSQMLRTGNNFQFSYTFEDVPFHSSYAHSQSLDRLMNPLIDQYLYYLVRTQTTGTGGTQTLAFSQAGPSSMASQARNWVPGPSYRQQRVSTTTNQNNNSNFAWTGAAKFKLNGRDSLMNPGVAMASHKDDEDRFFPSSGVLIFGKQGAGNDGVDYSQVLITDEEEIKATNPVATEEYGAVAINNQAANTQAQTGLVHNQGVIPGMVWQNRDVYLQGPIWAKIPHTDGNFHPSPLMGGFGLKHPPPQILIKNTPVPADPPLTFNQAKLNSFITQYSTGQVSVEIEWELQKENSKRWNPEIQYTSNYYKSTNVDFAVNTEGVYSEPRPIGTRYLTRNL

SEQ ID NO: 1196 - DNA, 3695 bp, Artificial Sequence
  source: /note="Description of Artificial Sequence: Synthetic polynucleotide"
ctctttgcgcttgcgttttcccttgtccagatagcccagtagctgacattcatccggggtcagcaccgtttctgcggactggctttctacgtgaaaaggatctaggtgaagatcctttttgataatctcatgcctgacatttatattccccagaacatcaggttaatggcgtttttgatgtcattttcgcggtggctgagatcagccacttcttccccgataacggagaccggcacactggccatatcggtggtcatcatgcgccagctttcatccccgatatgcaccaccgggtaaagttcacgggagactttatctgacagcagacgtgcactggccagggggatcaccatccgtcgccccggcgtgtcaataatatcactctgtacatccacaaacagacgataacggctctctcttttataggtgtaaaccttaaactgccgtacgtataggctgcgcaactgttgggaagggcgatcggtgcgggcctcttcgctattacgccagctggcgaaagggggatgtgctgcaaggcgattaagttgggtaacgccagggttttcccagtcacgacgttgtaaaacgacggccagtgaattgtaatacgactcactatagggcgaattgaatttagcggccgcgaattcgcccttatgatatctggtgggaggagggcaagatgacggccaaggtcgtggagtccgccaaggccattctcggcggcagcaaagtgcgcgtggaccaaaagtgcaagtcgtccgcccagatcgatcccactcccgtcattgtcacctccaacaccaacatgtgcgccgtgattgacgggaacagcaccaccttcgagcaccagcagccgttgcaggaccggatgttcaaatttgaacttacccgccgtctggagcatgactttggcaaggtgacaaagcaggaagtcaaagagttcttccgctgggcgcaggatcacgtgaccgaggtggcgcatgagttccacgtcagaaagggtggagccaacaagagacccgcccccgatgacgctgataaaagcgagcccaagcgggcctgcccctcagtcgcagatccatcgacgtcagacgcggaaggagctccggtggactttgccgacaggtaccaaaacaaatgttctcgtcacgcgggcatgcttcagatgctgtttccctgcaagacatgcgagagaatgaatcagaatttcaacatttgcttcacgcacgggaccagggactgttcggagtgcttccccggcgtgtcagaatctcaaccggtcgtcagaaaaaggacgtatcggaaactctgtgccattcatcatctgctggggagggctcccgagattgcttgctcggcctgcgatctggtcaacgtggacctggatgactgtgtctctgagcaataaatgacttaaaccaggtatggctgccgatggttatcttccagattggctcgaggacaacctctctgagggcattcgcgagtggtgggacttgaaacctggagccccgaaacccaaagccaaccagcaaaagcaggacgacggccggggtctggtgcttcctggctacaagtacctcggacccttcaacggactcgacaagggggagcccgtcaacgcggcggacgcagcggccctcgagcacgacaaggcctacgaccagcagctcaaagcgggtgacaatccgtacctgcggtataaccacgccgacgccgagtttcaggagcgtctgcaagaagatacgtcttttgggggcaacctcgggcgagcagtcttccaggccaagaagcgggttctcgaacctctcggtctggttgaggaaggcgctaagacggctcctggaaagaagagaccggtagagcagtcaccccaagaaccagactcctcatcgggcatcggcaagacaggccagcagcccgctaaaaagagactcaattttggtcagactggcgacacagagtcagtccccgacccacaacctctcggagaacctccagcagccccctcaggtctgggacctaatacaatggcttcaggcggtggcgctccaatggcagacaataacgaaggcgccgacggagtgggtaattcctcgggaaattggcattgcgattccacatggctgggggacagagtcatcaccaccagcacccgaacctgggccctgcccacctacaacaaccacctctacaagcaaatctccaacggcacctcgggaggaagcaccaacgacaacacctactttggctacagcaccccctgggggtattttgacttcaacagattccactgccacttttcaccacgtgactggcagcgactcatcaacaacaattggggattccggcccaagagactcaacttcaagctcttcaacatccaggtcaaggaagtcacgacgaacgaaggcaccaagaccatcgccaataatctcaccagcaccgtgcaggtctttacggactcggagtaccagctaccgtacgtgctaggatcagctcaccagggatgtctgcctccgttcccggcggacgtcttcatggttcctcagtacggttatctaactctgaacaatggcagccaggccctgggacgttcctccttctactgcctggagtatttcccatcgcagatgctgagaaccggcaacaactttcagttcagctacaccttcgaggacgtgcctttccacagcagctacgcgcacagccaaagcctggacaggctgatgaatcccctcatcgaccagtacctgtattacctggtcagaacgcagacaaccgggactggagggacgcagactctggcattcagccaagcaggccctagctcaatggccagccaggctagaaactgggtgcccggaccgagctaccggcagcagcgcgtctccacgacaaccaaccagaacaacaacagcaactttgcctggacgggagctgccaaatttaaactgaacggccgagactctctaatgaaccccggcgtggccatggcttcacacaaggatgacgaggaccgcttcttcccttctagcggggtcctgattttcggcaagcaaggagccgggaatgatggagtggattacagccaagtgctgattacagatgaggaagaaatcaaggctaccaaccccgtggcaacagaggaatatggagcagtggccatcaacaaccaggccgctaatacgcaggcgcagaccggactcgtgcacaaccagggggtgattcccggcatggtgtggcagaacagagacgtgtacctgcagggtcccatctgggccaaaattcctcacacggacggcaactttcacccgtctcccctgatgggcggctttggactgaagcacccgcctcctcaaattctcatcaagaacacaccggttccagcggacccgccgcttaccttcaaccaggccaagctgaactctttcatcacgcagtacagcaccggacaggtcagcgtggaaatcgagtgggagctgcagaaagaaaacagcaaacgctggaatccagagattcagtacacttccaactactacaaatctacaaatgtggactttgctgtcaacacggaaggagtgtatagcgagcctcgccccattggcacccgttacctcacccgcaacctgtaattgcctgttaatcaataaaccggttaattcgtttcagtaaggaagaattcgtttaaa

SEQ ID NO: 1197 - protein, 736 aa, Artificial Sequence; identical to SEQ ID NO: 516
  source: /note="Description of Artificial Sequence: Synthetic polypeptide"

SEQ ID NO: 1198 - protein, 736 aa, Artificial Sequence
  source: /note="Description of Artificial Sequence: Synthetic polypeptide"
MAADGYLPDWLEDNLSEGIREWWDLKPGAPKPKANQQKQDDGRGLVLPGYKYLGPFNGLDKGEPVNAADAAALEHDKAYDQQLKAGDNPYLRYNHADAEFQERLQEDTSFGGNLGRAVFQAKKRVLEPLGLVEEGAKTAPGKKRPVEQSPQEPDSSSGIGKTGQQPAKKRLNFGQTGDTESVPDPQPLGEPPAAPSGLGPNTMASGGGAPMADNNEGADGVGNSSGNWHCDSTWLGDRVITTSTRTWALPTYNNHLYKQISNGTSGGSTNDNTYFGYSTPWGYFDFNRFHCHFSPRDWQRLINNNWGFRPKRLNFKLFNIQVKEVTTNEGTKTIANNLTSTVQVFTDSEYQLPYVLGSAHQGCLPPFPADVFMVPQYGYLTLNNGSQALGRSSFYCLEYFPSQMLRTGNNFQFSYTFEDVPFHSSYAHSQSLDRLMNPLIDQYLYYLVRTQTTGTGGTQTLAFSQAGPSNMASQARNWVPGPSYRQQRVSTTTNQNNNSNFAWTGAAKFKLNGRDSLMNPGVAMASHKDDEDRFFPSSGVLIFGKQGAGNDGVDYSQVLITDEEEIKATNPVATEEYGAVAINNQAANTQAQTGLVHNQGVIPGMVWQNRDVYLQGPIWAKIPHTDGNFHPSPLMGGFGLKHPPPQILIKNTPVPADPPLTFNQAKLNSFITQYSTGQVSVEIEWELQKENSKRWNPEIQYTSNYYKSTNVDFAVNTEGVYSEPRPIGTRYLTRNL

SEQ ID NO: 1199 - protein, 738 aa, Artificial Sequence; identical to SEQ ID NO: 893
  source: /note="Description of Artificial Sequence: Synthetic polypeptide"

SEQ ID NO: 1200 - protein, 736 aa, Artificial Sequence
  source: /note="Description of Artificial Sequence: Synthetic polypeptide"
MAADGYLPDWLEDNLSEGIREWWALQPGAPKPKANQQHQDNARGLVLPGYKYLGPGNGLDKGEPVNAADAAALEHDKAYDQQLKAGDNPYLKYNHADAEFQERLKEDTSFGGNLGRAVFQAKKRILEPLGLVEEAAKTAPGKKRPVDQSPQEPDSSSGVGKSGKQPARKRLNFGQTGDSESVPDPQPLGEPPAAPTSLGSNTMASGGGAPMADNNEGADGVGNSSGNWHCDSQWLGDRVITTSTRTWALPTYNNHLYKQISSQSGASNDNHYFGYSTPWGYFDFNRFHCHFSPRDWQRLINNNWGFRPKKLSFKLFNIQVKEVTQNDGTTTIANNLTSTVQVFTDSEYQLPYVLGSAHQGCLPPFPADVFMVPQYGYLTLNNGSQAVGRSSFYCLEYFPSQMLRTGNNFQFSYTFEDVPFHSSYAHSQSLDRLMNPLIDQYLYYLNRTQGTTSGTTNQSRLLFSQAGPQSMSLQARNWLPGPCYRQQRLSKTANDNNNSNFPWTAASKYHLNGRDSLVNPGPAMASHKDDEEKFFPMHGNLIFGKEGTTASNAELDNVMITDEEEIRTTNPVATEQYGTVANNLQSSNTAPTTRTVNDQGALPGMVWQDRDVYLQGPIWAKIPHTDGHFHPSPLMGGFGLKHPPPQIMIKNTPVPANPPTTFSPAKFASFITQYSTGQVSVEIEWELQKENSKRWNPEIQYTSNYNKSVNVDFTVDTNGVYSEPRPIGTRYLTRPL

SEQ ID NO: 1201 - protein, 736 aa, Artificial Sequence
  source: /note="Description of Artificial Sequence: Synthetic polypeptide"
MAADGYLPDWLEDNLSEGIREWWALQPGAPKPKANQQHQDNARGLVLPGYKYLGPGNGLDKGEPVNAADAAALEHDKAYDQQLKAGDNPYLKYNHADAEFQERLKEDTSFGGNLGRAVFQAKKRLLEPLGLVEEAAKTAPGKKRPVDQSPQEPDSSSGVGKSGKQPARKRLNFGQTGDSESVPDPQPLGEPPAAPTSLGSNTMASGGGAPMADNNEGADGVGNSSGNWHCDSQWLGDRVITTSTRTWALPTYNNHLYKQISSQSGASNDNHYFGYSTPWGYFDFNRFHCHFSPRDWQRLINNNWGFRPKKLSFKLFNIQVKEVTQNDGTTTIANNLTSTVQVFTDSEYQLPYVLGSAHQGCLPPFPADVFMVPQYGYLTLNNGSQAVGRSSFYCLEYFPSQMLRTGNNFQFSYTFEDVPFHSSYAHSQSLDRLMNPLIDQYLYYLNRTQGTTSGTTNQSRLLFSQAGPQSMSLQARNWLPGPCYRQQRLSKVANDNNNSNFPWTAASKYHLNGRDSLVNPGPAMASHKDDEEKFFPMHGNLIFGKEGTTASNAELDNVMITDEEEIRTTNPVATEQYGTVANNLQSSNTAPTTRTVNDQGALPGMVWQDRDVYLQGPIWAKIPHTDGHFHPSPLMGGFGLKHPPPQIMIKNTPVPANPPTTFVPAKFASFITQYSTGQVSVEIEWELQKENSKRWNPEIQYTSNYNKSVNVDFTVDTNGVYSEPRPIGTRYLTRPL

SEQ ID NO: 1202 - protein, 736 aa, Artificial Sequence
  source: /note="Description of Artificial Sequence: Synthetic polypeptide"
  MOD_RES (168)..(168): Any amino acid
  MOD_RES (204)..(204): Any amino acid
  MOD_RES (266)..(266): Any amino acid
  MOD_RES (311)..(311): Any amino acid
  MOD_RES (411)..(411): Any amino acid
  MOD_RES (460)..(460): Any amino acid
  MOD_RES (493)..(493): Any amino acid
  MOD_RES (562)..(562): Any amino acid
  MOD_RES (576)..(576): Any amino acid
  MOD_RES (587)..(587): Any amino acid
  MOD_RES (609)..(609): Any amino acid
MAADGYLPDWLEDNLSEGIREWWDLKPGAPKPKANQQKQDDGRGLVLPGYKYLGPFNGLDKGEPVNAADAAALEHDKAYDQQLKAGDNPYLRYNHADAEFQERLQEDTSFGGNLGRAVFQAKKRVLEPLGLVEEGAKTAPGKKRPVEQSPQEPDSSSGIGKKGQQPAXKRLNFGQTGDSESVPDPQPLGEPPAAPSGVGSNTMXAGGGAPMADNNEGADGVGNASGNWHCDSTWLGDRVITTSTRTWALPTYNNHLYKQISSQSGXSTNDNTYFGYSTPWGYFDFNRFHCHFSPRDWQRLINNNWGFRPKXLNFKLFNIQVKEVTTNDGTTTIANNLTSTVQVFTDSEYQLPYVLGSAHQGCLPPFPADVFMIPQYGYLTLNNGSQAVGRSSFYCLEYFPSQMLRTGNNFXFSYTFEDVPFHSSYAHSQSLDRLMNPLIDQYLYYLSRTQTTSGTAGNRXLQFSQAGPSSMANQAKNWLPGPCYRQQRVSKTXNQNNNSNFAWTGATKYHLNGRDSLVNPGPAMATHKDDEDKFFPMSGVLIFGKQGAGNSNVDLDNVMITXEEEIKTTNPVATEXYGTVATNLQSXNTAPATGTVNSQGALPGMVWQXRDVYLQGPIWAKIPHTDGHFHPSPLMGGFGLKHPPPQILIKNTPVPANPPTTFSPAKFASFITQYSTGQVSVEIEWELQKENSKRWNPEIQYTSNYNKSTNVDFAVDTNGVYSEPRPIGTRYLTRNL

SEQ ID NO: 1203 - DNA, 2208 bp, Artificial Sequence
  source: /note="Description of Artificial Sequence: Synthetic polynucleotide"
  modified_base (502)..(504): a, c, t, g, unknown or other
  modified_base (610)..(612): a, c, t, g, unknown or other
  modified_base (796)..(798): a, c, t, g, unknown or other
  modified_base (931)..(933): a, c, t, g, unknown or other
  modified_base (1231)..(1233): a, c, t, g, unknown or other
  modified_base (1378)..(1380): a, c, t, g, unknown or other
  modified_base (1477)..(1479): a, c, t, g, unknown or other
  modified_base (1684)..(1686): a, c, t, g, unknown or other
  modified_base (1726)..(1728): a, c, t, g, unknown or other
  modified_base (1759)..(1761): a, c, t, g, unknown or other
  modified_base (1825)..(1827): a, c, t, g, unknown or other
atggctgccgatggttatcttccagattggctcgaggacaacctctctgagggcattcgcgagtggtgggacttgaaacctggagccccgaaacccaaagccaaccagcaaaagcaggacgacggccggggtctggtgcttcctggctacaagtacctcggacccttcaacggactcgacaagggggagcccgtcaacgcggcggacgcagcggccctcgagcacgacaaggcctacgaccagcagctcaaagcgggtgacaatccgtacctgcggtataaccacgccgacgccgagtttcaggagcgtctgcaagaagatacgtcttttgggggcaacctcgggcgagcagtcttccaggccaagaagcgggttctcgaacctctcggtctggttgaggaaggcgctaagacggctcctggaaagaagagaccggtagagcaatcaccccaggaaccagactcctcttcgggcatcggcaagaaaggccagcagcccgcgnnnaagagactcaactttgggcagacaggcgactcagagtcagtgcccgaccctcaaccactcggagaaccccccgcagccccctctggtgtgggatctaatacaatgnnngcaggcggtggcgctccaatggcagacaataacgaaggcgccgacggagtgggtaacgcctcaggaaattggcattgcgattccacatggctgggcgacagagtcatcaccaccagcacccgaacctgggccctccccacctacaacaaccacctctacaagcaaatctccagccaatcgggannnagcaccaacgacaacacctacttcggctacagcaccccctgggggtattttgactttaacagattccactgccacttctcaccacgtgactggcagcgactcatcaacaacaactggggattccggcccaagnnnctcaacttcaagctcttcaacatccaggtcaaggaggtcacgacgaatgatggcaccacgaccatcgccaataaccttaccagcacggttcaggtctttacggactcggaataccagctcccgtacgtcctcggctctgcgcaccagggctgcctgcctccgttcccggcggacgtcttcatgattcctcagtacgggtacctgactctgaacaatggcagtcaggccgtgggccgttcctccttctactgcctggagtactttccttctcaaatgctgagaacgggcaacaactttnnnttcagctacacgtttgaggacgtgccttttcacagcagctacgcgcacagccaaagcctggaccggctgatgaaccccctcatcgaccagtacctgtactacctgtctcggactcagaccacgagtggtaccgcaggaaatcggnnnttgcaattttctcaggccgggcctagtagcatggcgaatcaggccaaaaactggctacccgggccctgctaccggcagcaacgcgtctccaagacannnaatcaaaataacaacagcaactttgcctggaccggtgccaccaagtatcatctgaatggcagagactctctggtaaatcccggtcccgctatggcaacccacaaggacgacgaagacaaattttttccgatgagcggagtcttaatatttgggaaacagggagctggaaatagcaacgtggaccttgacaacgttatgataaccnnngaggaagaaattaaaaccaccaacccagtggccacagaannntacggcacggtggccactaacctgcaatcgnnnaacaccgctcctgctacagggaccgtcaacagtcaaggagccttacctggcatggtctggcagnnncgggacgtgtacctgcagggtcctatctgggccaagattcctcacacggacggacactttcatccctcgccgctgatgggaggctttggactgaaacacccgcctcctcagatcctgattaagaatacacctgttcccgcgaatcctccaactaccttcagtccagctaagtttgcgtcgttcatcacgcagtacagcaccggacaggtcagcgtggaaattgaatgggagctgcagaaagaaaacagcaaacgctggaacccagagattcaatacacttccaactacaacaaatctacaaatgtggactttgctgttgacacaaatggcgtttattctgagcctcgccccatcggcacccgttacctcacccgtaatctg

SEQ ID NO: 1204 - protein, 737 aa, Artificial Sequence
  source: /note="Description of Artificial Sequence: Synthetic polypeptide"
  MOD_RES (157)..(157): Any amino acid
  MOD_RES (168)..(168): Any amino acid
  MOD_RES (262)..(263): Any amino acid
  MOD_RES (312)..(312): Any amino acid
  MOD_RES (412)..(412): Any amino acid
  MOD_RES (460)..(461): Any amino acid
  MOD_RES (552)..(552): Any amino acid
  MOD_RES (556)..(557): Any amino acid
  MOD_RES (563)..(563): Any amino acid
  MOD_RES (580)..(580): Any amino acid
  MOD_RES (588)..(588): Any amino acid
  MOD_RES (664)..(664): Any amino acid
MAADGYLPDWLEDNLSEGIREWWDLKPGAPKPKANQQKQDDGRGLVLPGYKYLGPFNGLDKGEPVNAADAAALEHDKAYDQQLKAGDNPYLRYNHADAEFQERLQEDTSFGGNLGRAVFQAKKRVLEPLGLVEEGAKTAPGKKRPVEQSPQEPDSSXGIGKKGQQPAXKRLNFGQTGDSESVPDPQPLGEPPAAPSGVGSNTMAAGGGAPMADNNEGADGVGNASGNWHCDSTWLGDRVITTSTRTWALPTYNNHLYKQISXXQSGGSTNDNTYFGYSTPWGYFDFNRFHCHFSPRDWQRLINNNWGFRPKXLNFKLFNIQVKEVTTNDGTTTIANNLTSTVQVFTDSEYQLPYVLGSAHQGCLPPFPADVFMIPQYGYLTLNNGSQAVGRSSFYCLEYFPSQMLRTGNNFXFSYTFEDVPFHSSYAHSQSLDRLMNPLIDQYLYYLSRTQTTGGTAGNXXLQFSQAGPSSMANQAKNWLPGPCYRQQRVSKTTNQNNNSNFAWTGATKYHLNGRDSLVNPGVAMATHKDDEDRFFPSSGVLIFGKQGAGNXNVDXXNVMITXEEEIKTTNPVATEEYGXVATNLQSXNTAPQTGTVNSQGALPGMVWQNRDVYLQGPIWAKIPHTDGNFHPSPLMGGFGLKHPPPQILIKNTPVPANPPTTFXPAKFASFITQYSTGQVSVEIEWELQKENSKRWNPEIQYTSNYNKSTNVDFAVDTEGVYSEPRPIGTRYLTRNL

SEQ ID NO: 1205 - DNA, 2211 bp, Artificial Sequence
  source: /note="Description of Artificial Sequence: Synthetic polynucleotide"
  modified_base (469)..(471): a, c, t, g, unknown or other
  modified_base (502)..(504): a, c, t, g, unknown or other
  modified_base (784)..(789): a, c, t, g, unknown or other
  modified_base (934)..(936): a, c, t, g, unknown or other
  modified_base (1234)..(1236): a, c, t, g, unknown or other
  modified_base (1378)..(1383): a, c, t, g, unknown or other
  modified_base (1654)..(1656): a, c, t, g, unknown or other
  modified_base (1666)..(1671): a, c, t, g, unknown or other
  modified_base (1687)..(1689): a, c, t, g, unknown or other
  modified_base (1738)..(1740): a, c, t, g, unknown or other
  modified_base (1762)..(1764): a, c, t, g, unknown or other
  modified_base (1990)..(1992): a, c, t, g, unknown or other
atggctgccgatggttatcttccagattggctcgaggacaacctctctgagggcattcgcgagtggtgggacttgaaacctggagccccgaaacccaaagccaaccagcaaaagcaggacgacggccggggtctggtgcttcctggctacaagtacctcggacccttcaacggactcgacaagggggagcccgtcaacgcggcggacgcagcggccctcgagcacgacaaggcctacgaccagcagctcaaagcgggtgacaatccgtacctgcggtataaccacgccgacgccgagtttcaggagcgtctgcaagaagatacgtcttttgggggcaacctcgggcgagcagtcttccaggccaagaagcgggttctcgaacctctcggtctggttgaggaaggcgctaagacggctcctggaaagaagagaccggtagagcaatcaccccaggaaccagactcctctnnnggcatcggcaagaaaggccagcagcccgcgnnnaagagactcaactttgggcagactggcgactcagagtcagtgcccgaccctcaaccactcggagaaccccccgcagccccctctggtgtgggatctaatacaatggctgcaggcggtggcgctccaatggcagacaataacgaaggcgccgacggagtgggtaatgcctcaggaaattggcattgcgattccacatggctgggcgacagagtcatcaccaccagcacccgaacctgggccctccccacctacaacaaccacctctacaagcaaatctccnnnnnncaatcgggaggaagcaccaacgacaacacctacttcggctacagcaccccctgggggtattttgactttaacagattccactgccacttctcaccacgtgactggcagcgactcatcaacaacaactggggattccggcccaagnnnctcaacttcaagctcttcaacatccaggtcaaggaggtcacgacgaatgatggcaccacgaccatcgccaataaccttaccagcacggttcaggtctttacggactcggaataccagctcccgtacgtcctcggctctgcgcaccagggctgcctgcctccgttcccggcggacgtcttcatgattcctcagtacgggtacctgactctgaacaatggcagtcaggccgtgggccgttcctccttctactgcctggagtactttccttctcaaatgctgagaacgggcaacaactttnnnttcagctacacgtttgaggacgtgccttttcacagcagctacgcgcacagccaaagcctggaccggctgatgaaccccctcatcgaccagtacctgtactacctgtctcggactcagaccacgggaggtaccgcaggaaatnnnnnnttgcaattttctcaggccgggcctagtagcatggcgaatcaggccaaaaactggctacccgggccctgctaccggcagcaacgcgtctccaagacaacgaatcaaaataacaacagcaactttgcctggaccggtgccaccaagtatcatctgaatggcagagactctctggtaaatcccggtgtcgctatggcaacccacaaggacgacgaagaccgattttttccgtccagcggagtcttaatatttgggaaacagggagctggaaatnnnaacgtggacnnnnnnaacgttatgataaccnnngaggaagaaattaaaaccaccaacccagtggccacagaagagtacggcnnngtggccactaacctgcaatcgnnnaacaccgctcctcaaacagggaccgtcaacagtcaaggagccttacctggcatggtctggcagaaccgggacgtgtacctgcagggtcctatctgggccaagattcctcacacggacggaaactttcatccctcgccgctgatgggaggctttggactgaaacacccgcctcctcagatcctgattaagaatacacctgttcccgcgaatcctccaactaccttcnnnccagctaagtttgcgtcgttcatcacgcagtacagcaccggacaggtcagcgtggaaattgaatgggagctgcagaaagaaaacagcaaacgctggaacccagagattcaatacacttccaactacaacaaatctacaaatgtggactttgctgttgacacagaaggcgtttattctgagcctcgccccatcggcacccgttacctcacccgtaatctg

SEQ ID NO: 1206 - protein, 738 aa, Artificial Sequence
  source: /note="Description of Artificial Sequence: Synthetic polypeptide"
  MOD_RES (158)..(158): Any amino acid
  MOD_RES (169)..(169): Any amino acid
  MOD_RES (564)..(564): Any amino acid
MAADGYLPDWLEDNLSEGIREWWDLKPGAPKPKANQQKQDDGRGLVLPGYKYLGPFNGLDKGEPVNAADAAALEHDKAYDQQLKAGDNPYLRYNHADAEFQERLQEDTSFGGNLGRAVFQAKKRVLEPLGLVEEGAKTAPGKKRPVEQSPQREPDSSXGIGKKGQQPAXKRLNFGQTGDSESVPDPQPLGEPPAAPSGVGSNTMAAGGGAPMADNNEGADGVGNSSGNWHCDSTWLGDRVITTSTRTWALPTYNNHLYKQISNGTSGGSTNDNTYFGYSTPWGYFDFNRFHCHFSPRDWQRLINNNWGFRPKRLNFKLFNIQVKEVTTNEGTKTIANNLTSTVQVFTDSEYQLPYVLGSAHQGCLPPFPADVFMIPQYGYLTLNNGSQAVGRSSFYCLEYFPSQMLRTGNNFQFSYTFEDVPFHSSYAHSQSLDRLMNPLIDQYLYYLSRTQTTGGTAGTQTLQFSQAGPSSMANQAKNWLPGPCYRQQRVSTTTNQNNNSNFAWTGATKYHLNGRDSLVNPGVAMATHKDDEDRFFPSSGVLIFGKQGAGNDNVDYSNVMITXEEEIKTTNPVATEEYGVVATNLQSANTAPQTGTVNSQGALPGMVWQNRDVYLQGPIWAKIPHTDGNFHPSPLMGGFGLKHPPPQILIKNTPVPADPPTTFNQAKLNSFITQYSTGQVSVEIEWELQKENSKRWNPEIQYTSNYYKSTNVDFAVNTEGVYSEPRPIGTRYLTRNL

SEQ ID NO: 1207 - DNA, 2214 bp, Artificial Sequence
  source: /note="Description of Artificial Sequence: Synthetic polynucleotide"
  modified_base (472)..(474): a, c, t, g, unknown or other
  modified_base (505)..(507): a, c, t, g, unknown or other
  modified_base (1690)..(1692): a, c, t, g, unknown or other
atggctgccgatggttatcttccagattggctcgaggacaacctctctgagggcattcgcgagtggtgggacctgaaacctggagccccgaaacccaaagccaaccagcaaaagcaggacgacggccggggtctggtgcttcctggctacaagtacctcggacccttcaacggactcgacaagggggagcccgtcaacgcggcggacgcagcggccctcgagcacgacaaggcctacgaccagcagctcaaagcgggtgacaatccgtacctgcggtataatcacgccgacgccgagtttcaggagcgtctgcaagaagatacgtcttttgggggcaacctcgggcgagcagtcttccaggccaagaagcgggttctcgaacctctcggtctggttgaggaaggcgctaagacggctcctggaaagaagagaccggtagagcagtcaccacagcgtgagcccgactcctccnnnggcatcggcaagaaaggccagcagcccgccnnnaagagactcaatttcggtcagactggcgactcagagtcagtccccgaccctcaacctctcggagaacctccagcagcgccctctggtgtgggatctaatacaatggctgcaggcggtggcgcaccaatggcagacaataacgaaggtgccgacggagtgggtaattcctcgggaaattggcattgcgattccacatggctgggcgacagagtcatcaccaccagcacccgaacctgggccctgcccacctacaacaaccacctctacaagcaaatctccaacgggacctcgggaggcagcaccaacgacaacacctactttggctacagcaccccctgggggtattttgactttaacagattccactgccacttctcaccacgtgactggcagcgactcatcaacaacaactggggattccggcccaagagactcaacttcaagctcttcaacatccaggtcaaagaggtcacgacgaatgaaggcaccaagaccatcgccaataacctcaccagcaccgtccaggtgtttacggactcggaataccagctgccgtacgtcctcggctctgcccaccagggctgcctgcctccgttcccggcggacgtcttcatgattcctcagtacggctacctgactctcaacaacggtagtcaggccgtgggacgttcctccttctactgcctggagtacttcccctctcagatgctgagaacgggcaacaactttcaattcagctacactttcgaggacgtgcctttccacagcagctacgcgcacagccagagtttggacaggctgatgaatcctctcatcgaccagtacctgtactacctgtcaagaacccagactacgggaggcacagcgggaacccagacgttgcagttttctcaggccgggcctagcagcatggcgaatcaggccaaaaactggctgcctggaccctgctacagacagcagcgcgtctccacgacaacgaatcaaaacaacaacagcaactttgcctggactggtgccaccaagtatcatctgaacggcagagactctctggtgaatccgggcgtcgccatggcaacccacaaggacgacgaggaccgcttcttcccatccagcggcgtcctcatatttggcaagcagggagctggaaatgacaacgtggactatagcaacgtgatgataaccnnngaggaagaaatcaagaccaccaaccccgtggccacagaagagtatggcgtggtggctactaacctacagtcggcaaacaccgctcctcaaacggggaccgtcaacagccagggagccttacctggcatggtctggcagaaccgggacgtgtacctgcagggtcctatttgggccaagattcctcacacagatggcaactttcacccgtctcctttaatgggcggctttggacttaaacatccgcctcctcagatcctcatcaaaaacactcctgttcctgcggatcctccaacaacgttcaaccaggccaagctgaattctttcatcacgcagtacagcaccggacaagtcagcgtggagatcgagtgggagctgcagaaggagaacagcaagcgctggaacccagagattcagtatacttccaactactacaaatctacaaatgtggactttgctgttaatactgagggtgtttactctgagcctcgccccattggcactcgttacctcacccgtaatctg

SEQ ID NO: 1208 - protein, 738 aa, Artificial Sequence
  source: /note="Description of Artificial Sequence: Synthetic polypeptide"
  MOD_RES (158)..(158): Any amino acid
  MOD_RES (169)..(169): Any amino acid
  MOD_RES (315)..(315): Any amino acid
  MOD_RES (413)..(413): Any amino acid
  MOD_RES (472)..(472): Any amino acid
  MOD_RES (534)..(534): Any amino acid
  MOD_RES (542)..(542): Any amino acid
  MOD_RES (595)..(595): Any amino acid
MAADGYLPDWLEDNLSEGIREWWDLKPGAPKPKANQQKQDDGRGLVLPGYKYLGPFNGLDKGEPVNAADAAALEHDKAYDQQLKAGDNPYLRYNHADAEFQERLQEDTSFGGNLGRAVFQAKKRVLEPLGLVEEGAKTAPGKKRPVEQSPQREPDSSXGIGKKGQQPAXKRLNFGQTGDSESVPDPQPLGEPPAAPSGVGSNTMAAGGGAPMADNNEGADGVGSSSGNWHCDSTWLGDRVITTSTRTWALPTYNNHLYKQISNGTSGGSTNDNTYFGYSTPWGYFDFNRFHCHFSPRDWQRLINNNWGFRPKRLXFKLFNIQVKEVTQNEGTKTIANNLTSTIQVFTDSEYQLPYVLGSAHQGCLPPFPADVFMIPQYGYLTLNNGSQAVGRSSFYCLEYFPSQMLRTGNNFXFSYTFEDVPFHSSYAHSQSLDRLMNPLIDQYLYYLSRTQTTGGTAGTQTLQFSQAGPSXMANQAKNWLPGPCYRQQRVSTTTSQNNNSNFAWTGATKYHLNGRDSLVNPGVAMATHKDDEXRFFPSSGXLIFGKQGAGKDNVDYSNVMLTSEEEIKTTNPVATEEYGVVADNLQQQNTAPQXGTVNSQGALPGMVWQNRDVYLQGPIWAKIPHTDGNFHPSPLMGGFGLKHPPPQILIKNTPVPADPPTTFNQAKLNSFITQYSTGQVSVEIEWELQKENSKRWNPEIQYTSNYYKSTNVDFAVNTEGVYSEPRPIGTRYLTRNL

SEQ ID NO: 1209 - DNA, 2214 bp, Artificial Sequence
  source: /note="Description of Artificial Sequence: Synthetic polynucleotide"
  modified_base (472)..(474): a, c, t, g, unknown or other
  modified_base (505)..(507): a, c, t, g, unknown or other
  modified_base (943)..(945): a, c, t, g, unknown or other
  modified_base (1237)..(1239): a, c, t, g, unknown or other
  modified_base (1414)..(1416): a, c, t, g, unknown or other
  modified_base (1600)..(1602): a, c, t, g, unknown or other
  modified_base (1624)..(1626): a, c, t, g, unknown or other
  modified_base (1783)..(1785): a, c, t, g, unknown or other
atggctgccgatggttatcttccagattggctcgaggacaacctctctgagggcattcgcgagtggtgggacctgaaacctggagccccgaaacccaaagccaaccagcaaaagcaggacgacggccggggtctggtgcttcctggctacaagtacctcggacccttcaacggactcgacaagggggagcccgtcaacgcggcggacgcagcggccctcgagcacgacaaggcctacgaccagcagctcaaagcgggtgacaatccgtacctgcggtataatcacgccgacgccgagtttcaggagcgtctgcaagaagatacgtcttttgggggcaacctcgggcgagcagtcttccaggccaagaagcgggttctcgaacctctcggtctggttgaggaaggcgctaagacggctcctggaaagaagagaccggtagagcagtcaccacagcgtgagcccgactcctccnnnggcatcggcaagaaaggccagcagcccgccnnnaagagactcaatttcggtcagactggcgactcagagtcagtccccgaccctcaacctctcggagaacctccagcagcgccctctggtgtgggatctaatacaatggctgcaggcggtggcgcaccaatggcagacaataacgaaggtgccgacggagtgggtagttcctcgggaaattggcattgcgattccacatggctgggcgacagagtcatcaccaccagcacccgaacctgggccctgcccacctacaacaaccacctctacaagcaaatctccaacgggacctcgggaggcagcaccaacgacaacacctactttggctacagcaccccctgggggtattttgactttaacagattccactgccacttctcaccacgtgactggcagcgactcatcaacaacaactggggattccggcccaagagactcnnnttcaagctcttcaacatccaggtcaaagaggtcacgcagaatgaaggcaccaagaccatcgccaataacctcaccagcaccatccaggtgtttacggactcggaataccagctgccgtacgtcctcggctctgcccaccagggctgcctgcctccgttcccggcggacgtcttcatgattcctcagtacggctacctgactctcaacaacggtagtcaggccgtgggacgttcctccttctactgcctggagtacttcccctctcagatgctgagaacgggcaacaactttnnnttcagctacactttcgaggacgtgcctttccacagcagctacgcgcacagccagagtttggacaggctgatgaatcctctcatcgaccagtacctgtactacctgtcaagaacccagactacgggaggcacagcgggaacccagacgttgcagttttctcaggccgggcctagcnnnatggcgaatcaggccaaaaactggctgcctggaccctgctacagacagcagcgcgtctccacgacaacgtcgcaaaacaacaacagcaactttgcctggactggtgccaccaagtatcatctgaacggcagagactctctggtgaatccgggcgtcgccatggcaacccacaaggacgacgagnnncgcttcttcccatccagcggcnnnctcatatttggcaagcagggagctggaaaagacaacgtggactatagcaacgtgatgctaaccagcgaggaagaaatcaagaccaccaaccccgtggccacagaagagtatggcgtggtggctgataacctacagcagcaaaacaccgctcctcaannngggaccgtcaacagccagggagccttacctggcatggtctggcagaaccgggacgtgtacctgcagggtcctatttgggccaagattcctcacacagatggcaactttcacccgtctcctttaatgggcggctttggacttaaacatccgcctcctcagatcctcatcaaaaacactcctgttcctgcggatcctccaacaacgttcaaccaggccaagctgaattctttcatcacgcagtacagcaccggacaagtcagcgtggagatcgagtgggagctgcagaaggagaacagcaagcgctggaacccagagattcagtatacttccaactactacaaatctacaaatgtggactttgctgttaatactgagggtgtttactctgagcctcgccccattggcactcgttacctcacccgtaatctg

SEQ ID NO: 1210 - protein, 738 aa, Artificial Sequence
  source: /note="Description of Artificial Sequence: Synthetic polypeptide"
  MOD_RES (169)..(169): Any amino acid
  MOD_RES (315)..(315): Any amino acid
  MOD_RES (534)..(534): Any amino acid
  MOD_RES (542)..(542): Any amino acid
MAADGYLPDWLEDNLSEGIREWWDLKPGAPKPKANQQKQDDGRGLVLPGYKYLGPFNGLDKGEPVNAADAAALEHDKAYDQQLKAGDNPYLRYNHADAEFQERLQEDTSFGGNLGRAVFQAKKRVLEPLGLVEEGAKTAPGKKRPVEPSPQRSPDSSTGIGKKGQQPAXKRLNFGQTGDSESVPDPQPIGEPPAAPSGVGSGTMAAGGGAPMADNNEGADGVGSSSGNWHCDSTWLGDRVITTSTRTWALPTYNNHLYKQISNGTSGGSTNDNTYFGYSTPWGYFDFNRFHCHFSPRDWQRLINNNWGFRPKRLXFKLFNIQVKEVTQNEGTKTIANNLTSTIQVFTDSEYQLPYVLGSAHQGCLPPFPADVFMIPQYGYLTLNNGSQAVGRSSFYCLEYFPSQMLRTGNNFEFSYTFEDVPFHSSYAHSQSLDRLMNPLIDQYLYYLSRTQSTGGTAGTQQLLFSQAGPSNMSAQAKNWLPGPCYRQQRVSTTLSQNNNSNFAWTGATKYHLNGRDSLVNPGVAMATHKDDEXRFFPSSGXLMFGKQGAGKDNVDYSNVMLTSEEEIKTTNPVATEQYGVVADNLQQQNTAPIVGAVNSQGALPGMVWQNRDVYLQGPIWAKIPHTDGNFHPSPLMGGFGLKHPPPQILIKNTPVPADPPTTFNQAKLNSFITQYSTGQVSVEIEWELQKENSKRWNPEIQYTSNYYKSTNVDFAVNTEGVYSEPRPIGTRYLTRNL

SEQ ID NO: 1211 - DNA, 2214 bp, Artificial Sequence
  source: /note="Description of Artificial Sequence: Synthetic polynucleotide"
  modified_base (505)..(507): a, c, t, g, unknown or other
  modified_base (943)..(945): a, c, t, g, unknown or other
  modified_base (1600)..(1602): a, c, t, g, unknown or other
  modified_base (1624)..(1626): a, c, t, g, unknown or other
atggctgccgatggttatcttccagattggctcgaggacaacctctctgagggcattcgcgagtggtgggacctgaaacctggagccccgaaacccaaagccaaccagcaaaagcaggacgacggccggggtctggtgcttcctggctacaagtacctcggacccttcaacggactcgacaagggggagcccgtcaacgcggcggacgcagcggccctcgagcacgacaaggcctacgaccagcagctcaaagcgggtgacaatccgtacctgcggtataatcacgccgacgccgagtttcaggagcgtctgcaagaagatacgtcttttgggggcaacctcgggcgagcagtcttccaggccaagaagcgggttctcgaacctctcggtctggttgaggaaggcgctaagacggctcctggaaagaagagaccggtagagccgtcaccacagcgttcccccgactcctccacgggcatcggcaagaaaggccagcagcccgccnnnaagagactcaatttcggtcagactggcgactcagagtcagtccccgaccctcaacctatcggagaacctccagcagcgccctctggtgtgggatctggtacaatggctgcaggcggtggcgcaccaatggcagacaataacgaaggtgccgacggagtgggtagttcctcgggaaattggcattgcgattccacatggctgggcgacagagtcatcaccaccagcacccgaacctgggccctgcccacctacaacaaccacctctacaagcaaatctccaacgggacctcgggaggcagcaccaacgacaacacctactttggctacagcaccccctgggggtattttgactttaacagattccactgccacttctcaccacgtgactggcagcgactcatcaacaacaactggggattccggcccaagagactcnnnttcaagctcttcaacatccaggtcaaagaggtcacgcagaatgaaggcaccaagaccatcgccaataacctcaccagcaccatccaggtgtttacggactcggaataccagctgccgtacgtcctcggctctgcccaccagggctgcctgcctccgttcccggcggacgtcttcatgattcctcagtacggctacctgactctcaacaacggtagtcaggccgtgggacgttcctccttctactgcctggagtacttcccctctcagatgctgagaacgggcaacaactttgagttcagctacactttcgaggacgtgcctttccacagcagctacgcgcacagccagagtttggacaggctgatgaatcctctcatcgaccagtacctgtactacctgtcaagaacccagtctacgggaggcacagcgggaacccagcagttgctgttttctcaggccgggcctagcaacatgtcggctcaggccaaaaactggctgcctggaccctgctacagacagcagcgcgtctccacgacactgtcgcaaaacaacaacagcaactttgcctggactggtgccaccaagtatcatctgaacggcagagactctctggtgaatccgggcgtcgccatggcaacccacaaggacgacgagnnncgcttcttcccatccagcggcnnnctcatgtttggcaagcagggagctggaaaagacaacgtggactatagcaacgtgatgctaaccagcgaggaagaaatcaagaccaccaaccccgtggccacagaacagtatggcgtggtggctgataacctacagcagcaaaacaccgctcctattgtgggggccgtcaacagccagggagccttacctggcatggtctggcagaaccgggacgtgtacctgcagggtcctatttgggccaagattcctcacacagatggcaactttcacccgtctcctttaatgggcggctttggacttaaacatccgcctcctcagatcctcatcaaaaacactcctgttcctgcggatcctccaacaacgttcaaccaggccaagctgaattctttcatcacgcagtacagcaccggacaagtcagcgtggagatcgagtgggagctgcagaaggagaacagcaagcgctggaacccagagattcagtatacttccaactactacaaatctacaaatgtggactttgctgttaatactgagggtgtttactctgagcctcgccccattggcactcgttacctcacccgtaatctg

SEQ ID NO: 1212 - protein, 738 aa, Artificial Sequence
  source: /note="Description of Artificial Sequence: Synthetic polypeptide"
  MOD_RES (471)..(471): Any amino acid
MAADGYLPDWLEDNLSEGIREWWDLKPGAPKPKANQQKQDDGRGLVLPGYKYLGPFNGLDKGEPVNAADAAALEHDKAYDQQLKAGDNPYLRYNHADAEFQERLQEDTSFGGNLGRAVFQAKKRVLEPLGLVEEGAKTAPGKKRPVEPSPQRSPDSSTGIGKKGQQPAKKRLNFGQTGDSESVPDPQPIGEPPAGPSGLGSGTMAAGGGAPMADNNEGADGVGSSSGNWHCDSTWLGDRVITTSTRTWALPTYNNHLYKQISNGTSGGSTNDNTYFGYSTPWGYFDFNRFHCHFSPRDWQRLINNNWGFRPKRLNFKLFNIQVKEVTQNEGTKTIANNLTSTIQVFTDSEYQLPYVLGSAHQGCLPPFPADVFMIPQYGYLTLNNGSQAVGRSSFYCLEYFPSQMLRTGNNFEFSYTFEDVPFHSSYAHSQSLDRLMNPLIDQYLYYLSRTQSTGGTAGTQQLLFSQAGPXNMSAQAKNWLPGPCYRQQRVSTTLSQNNNSNFAWTGATKYHLNGRDSLVNPGVAMATHKDDEERFFPSSGVLMFGKQGAGKDNVDYSSVMLTSEEEIKTTNPVATEQYGVVADNLQQQNTAPIVGAVNSQGALPGMVWQNRDVYLQGPIWAKIPHTDGNFHPSPLMGGFGLKHPPPQILIKNTPVPADPPTTFSQAKLASFITQYSTGQVSVEIEWELQKENSKRWNPEIQYTSNYYKSTNVDFAVNTEGTYSEPRPIGTRYLTRNL

SEQ ID NO: 1213 - DNA, 2214 bp, Artificial Sequence
  source: /note="Description of Artificial Sequence: Synthetic polynucleotide"
  modified_base (1411)..(1413): a, c, t, g, unknown or other
atggctgccgatggttatcttccagattggctcgaggacaacctctctgagggcattcgcgagtggtgggacttgaaacctggagccccgaaacccaaagccaaccagcaaaagcaggacgacggccggggtctggtgcttcctggctacaagtacctcggacccttcaacggactcgacaagggggagcccgtcaacgcggcggacgcagcggccctcgagcacgacaaggcctacgaccagcagctcaaagcgggtgacaatccgtacctgcggtataaccacgccgacgccgagtttcaggagcgtctgcaagaagatacgtcttttgggggcaacctcgggcgagcagtcttccaggccaagaagcgggttctcgaacctctcggtctggttgaggaaggcgctaagacggctcctggaaagaagagaccggtagagccatcaccccagcgttctccagactcctctacgggcatcggcaagaaaggccagcagcccgcgaaaaagagactcaactttgggcagactggcgactcagagtcagtgcccgaccctcaaccaatcggagaaccccccgcaggcccctctggtctgggatctggtacaatggctgcaggcggtggcgctccaatggcagacaataacgaaggcgccgacggagtgggtagttcctcaggaaattggcattgcgattccacatggctgggcgacagagtcatcaccaccagcacccgaacctgggccctccccacctacaacaaccacctctacaagcaaatctccaacgggacttcgggaggaagcaccaacgacaacacctacttcggctacagcaccccctgggggtattttgactttaacagattccactgccacttctcaccacgtgactggcagcgactcatcaacaacaactggggattccggcccaagagactcaacttcaagctcttcaacatccaggtcaaggaggtcacgcagaatgaaggcaccaagaccatcgccaataaccttaccagcacgattcaggtctttacggactcggaataccagctcccgtacgtcctcggctctgcgcaccagggctgcctgcctccgttcccggcggacgtcttcatgattcctcagtacgggtacctgactctgaacaatggcagtcaggccgtgggccgttcctccttctactgcctggagtactttccttctcaaatgctgagaacgggcaacaactttgagttcagctacacgtttgaggacgtgccttttcacagcagctacgcgcacagccaaagcctggaccggctgatgaaccccctcatcgaccagtacctgtactacctgtctcggactcagtccacgggaggtaccgcaggaactcagcagttgctattttctcaggccgggcctnnnaacatgtcggctcaggccaaaaactggctacccgggccctgctaccggcagcaacgcgtctccacgacactgtcgcaaaataacaacagcaactttgcctggaccggtgccaccaagtatcatctgaatggcagagactctctggtaaatcccggtgtcgctatggcaacccacaaggacgacgaagagcgattttttccgtccagcggagtcttaatgtttgggaaacagggagctggaaaagacaacgtggactatagcagcgttatgctaaccagtgaggaagaaattaaaaccaccaacccagtggccacagaacagtacggcgtggtggccgataacctgcaacagcaaaacaccgctcctattgtaggggccgtcaacagtcaaggagccttacctggcatggtctggcagaaccgggacgtgtacctgcagggtcctatctgggccaagattcctcacacggacggaaactttcatccctcgccgctgatgggaggctttggactgaaacacccgcctcctcagatcctgattaagaatacacctgttcccgcggatcctccaactaccttcagtcaagctaagctggcgtcgttcatcacgcagtacagcaccggacaggtcagcgtggaaattgaatgggagctgcagaaagaaaacagcaaacgctggaacccagagattcaatacacttccaactactacaaatctacaaatgtggactttgctgttaacacagaaggcacttattctgagcctcgccccatcggcacccgttacctcacccgtaatctg

SEQ ID NO: 1214 - protein, 737 aa, Artificial Sequence
  source: /note="Description of Artificial Sequence: Synthetic polypeptide"
  MOD_RES (148)..(148): Any amino acid
  MOD_RES (169)..(169): Any amino acid
  MOD_RES (314)..(314): Any amino acid
  MOD_RES (466)..(466): Any amino acid
  MOD_RES (563)..(563): Any amino acid
  MOD_RES (580)..(580): Any amino acid
  MOD_RES (588)..(588): Any amino acid
MAADGYLPDWLEDNLSEGIREWWDLKPGAPKPKANQQKQDDGRGLVLPGYKYLGPFNGLDKGEPVNAADAAALEHDKAYDQQLKAGDNPYLRYNHADAEFQERLQEDTSFGGNLGRAVFQAKKRVLEPLGLVEEGAKTAPGKKRPVEXSPQRSPDSSTGIGKKGQQPAXKRLNFGQTGDSESVPDPQPLGEPPAAPSGVGSGTMAAGGGAPMADNNEGADGVGNASGNWHCDSTWLGDRVITTSTRTWALPTYNNHLYKQISSQSAGSTNDNTYFGYSTPWGYFDFNRFHCHFSPRDWQRLINNNWGFRPKKLXFKLFNIQVKEVTTNDGVTTIANNLTSTVQVFSDSEYQLPYVLGSAHQGCLPPFPADVFMIPQYGYLTLNNGSQSVGRSSFYCLEYFPSQMLRTGNNFEFSYTFEDVPFHSSYAHSQSLDRLMNPLIDQYLYYLARTQSTTGGTAGNRELQFXQAGPSTMAEQAKNWLPGPCYRQQRVSKTLDQNNNSNFAWTGATKYHLNGRNSLVNPGVAMATHKDDEDRFFPSSGVLIFGKTGAANKTTLENVLMTXEEEIKTTNPVATEEYGXVSSNLQSXNTAPQTQTVNSQGALPGMVWQNRDVYLQGPIWAKIPHTDGNFHPSPLMGGFGLKHPPPQILIKNTPVPANPPEVFTPAKFASFITQYSTGQVSVEIEWELQKENSKRWNPEIQYTSNYDKSTNVDFAVDSEGVYSEPRPIGTRYLTRNL

SEQ ID NO: 1215 - DNA, 2211 bp, Artificial Sequence
  source: /note="Description of Artificial Sequence: Synthetic polynucleotide"
  modified_base (442)..(444): a, c, t, g, unknown or other
  modified_base (505)..(507): a, c, t, g, unknown or other
  modified_base (940)..(942): a, c, t, g, unknown or other
  modified_base (1396)..(1398): a, c, t, g, unknown or other
  modified_base (1687)..(1689): a, c, t, g, unknown or other
  modified_base (1738)..(1740): a, c, t, g, unknown or other
  modified_base (1762)..(1764): a, c, t, g, unknown or other
atggctgccgatggttatcttccagattggctcgaggacaacctctctgagggcattcgcgagtggtgggacctgaaacctggagccccgaaacccaaagccaaccagcaaaagcaggacgacggccggggtctggtgcttcctggctacaagtacctcggacccttcaacggactcgacaagggggagcccgtcaacgcggcggacgcagcggccctcgagcacgacaaggcctacgaccagcagctcaaagcgggtgacaatccgtacctgcggtataaccacgccgacgccgagtttcaggagcgtctgcaagaagatacgtcatttgggggcaacctcgggcgagcagtcttccaggccaagaagcgggttctcgaacctctcggtctggttgaggaaggcgctaagacggctcctggaaagaagagaccggtagagnnntcacctcagcgttcccccgactcctccacgggcatcggcaagaaaggccagcagcccgccnnnaagagactcaatttcggtcagactggcgactcagagtcagtccccgaccctcaacctctcggagaacctccagcagcgccctctggtgtgggatctggtacaatggctgcaggcggtggcgcaccaatggcagacaataacgaaggtgccgacggagtgggtaatgcctcaggaaattggcattgcgattccacatggctgggcgacagagtcattaccaccagcacccgaacctgggccctgcccacctacaacaaccacctctacaagcaaatctccagtcaaagtgcaggtagtaccaacgacaacacctacttcggctacagcaccccctgggggtattttgactttaacagattccactgccacttctcaccacgtgactggcagcgactcatcaacaacaactggggattccggcccaagaagctgnnnttcaagctcttcaacatccaggtcaaggaggtcacgacgaatgacggcgttacgaccatcgctaataaccttaccagcacggttcaggtattctcggactcggaataccagctgccgtacgtcctcggctctgcgcaccagggctgcctgcctccgttcccggcggacgtcttcatgattcctcagtacggctacctgactctcaacaatggcagtcagtctgtgggacgttcctccttctactgcctggagtacttcccctctcagatgctgagaacgggcaacaactttgagttcagctacaccttcgaggacgtgcctttccacagcagctacgcacacagccagagcctggaccggctgatgaatcccctcatcgaccagtacttgtactacctggccagaacacagagtaccacaggaggcacagctggcaatcgggaactgcagtttnnncaggccgggccttcaactatggccgaacaagccaagaattggttacctggaccttgctaccggcaacaaagagtctccaaaacgctggatcaaaacaacaacagcaactttgcttggactggtgccaccaaatatcacctgaacggcagaaactcgttggttaatcccggcgtcgccatggcaactcacaaggacgacgaggaccgctttttcccatccagcggagtcctgatttttggaaaaactggagcagctaacaaaactacattggaaaatgtgttaatgacannngaagaagaaattaaaactactaatcctgtagccacggaagaatacgggnnngtcagcagcaacttacaatcgnnnaatactgcaccccagacacaaactgtcaacagccagggagccttacctggcatggtctggcagaaccgggacgtgtacctgcagggtcccatctgggccaagattcctcacacggatggcaactttcacccgtctcctttgatgggcggctttggacttaaacatccgcctcctcagatcctgatcaagaacactcccgttcccgctaatcctccggaggtgtttactcctgccaagtttgcttcgttcatcacacagtacagcaccggacaagtcagcgtggaaatcgagtgggagctgcagaaggaaaacagcaagcgctggaacccggagattcagtacacctccaactatgataagtcgactaatgtggactttgccgttgacagcgagggtgtttactctgagcctcgccctattggcactcgttacctcacccgtaatctg

SEQ ID NO: 1216 - protein, 735 aa, Artificial Sequence
  source: /note="Description of Artificial Sequence: Synthetic polypeptide"
  MOD_RES (162)..(162): Any amino acid
  MOD_RES (168)..(168): Any amino acid
  MOD_RES (224)..(224): Any amino acid
  MOD_RES (310)..(310): Any amino acid
  MOD_RES (410)..(410): Any amino acid
  MOD_RES (446)..(446): Any amino acid
  MOD_RES (461)..(461): Any amino acid
  MOD_RES (471)..(471): Any amino acid
  MOD_RES (708)..(708): Any amino acid
MAADGYLPDWLEDNLSEGIREWWDLKPGAPKPKANQQKQDDGRGLVLPGYKYLGPFNGLDKGEPVNAADAAALEHDKAYDQQLKAGDNPYLRYNHADAEFQERLQEDTSFGGNLGRAVFQAKKRVLEPLGLVEEGAKTAPGKKRPVEQSPQEPDSSSGIGKXGQQPAXKRLNFGQTGDSESVPDPQPLGEPPAAPSGVGSNTMASGGGAPMADNNEGADGVGNXSGNWHCDSTWLGDRVITTSTRTWALPTYNNHLYKQISSQSGASNDNHYFGYSTPWGYFDFNRFHCHFSPRDWQRLINNNWGFRPKXLNFKLFNIQVKEVTTNDGTTTIANNLTSTVQVFTDSEYQLPYVLGSAHQGCLPPFPADVFMIPQYGYLTLNNGSQAVGRSSFYCLEYFPSQMLRTGNNFXFSYTFEDVPFHSSYAHSQSLDRLMNPLIDQYLYYLXRTQTTSGTAQNRELXFSQAGPSSMXNQAKNWLPGPCYRQQRVSKTANDNNNSNFAWTGATKYHLNGRDSLVNPGPAMASHKDDEDKFFPMSGVLIFGKQGAGASNVDLDNVMITDEEEIKTTNPVATEQYGTVATNLQSSNTAPATGTVNSQGALPGMVWQDRDVYLQGPIWAKIPHTDGHFHPSPLMGGFGLKHPPPQILIKNTPVPANPPTTFSPAKFASFITQYSTGQVSVEIEWELQKENSKRWNPEIQYTSNYNKSXNVDFTVDTNGVYSEPRPIGTRYLTRNL

SEQ ID NO: 1217 - DNA, 2205 bp, Artificial Sequence
  source: /note="Description of Artificial Sequence: Synthetic polynucleotide"
  modified_base (484)..(486): a, c, t, g, unknown or other
  modified_base (502)..(504): a, c, t, g, unknown or other
  modified_base (670)..(672): a, c, t, g, unknown or other
  modified_base (928)..(930): a, c, t, g, unknown or other
  modified_base (1228)..(1230): a, c, t, g, unknown or other
  modified_base (1336)..(1338): a, c, t, g, unknown or other
  modified_base (1381)..(1383): a, c, t, g, unknown or other
  modified_base (1411)..(1413): a, c, t, g, unknown or other
  modified_base (2122)..(2124): a, c, t, g, unknown or other
atggctgccgatggttatcttccagattggctcgaggacaacctctctgagggcattcgcgagtggtgggacttgaaacctggagccccgaaacccaaagccaaccagcaaaagcaggacgacggccggggtctggtgcttcctggctacaagtacctcggacccttcaacggactcgacaagggggagcccgtcaacgcggcggatgcagcggccctcgagcacgacaaggcctacgaccagcagctcaaagcgggtgacaatccgtacctgcggtataaccacgccgacgccgagtttcaggagcgtctgcaagaagatacgtcttttgggggcaacctcgggcgagcagtcttccaggccaagaagagggttctcgaacctcttggtctggttgaggaaggtgctaagacggctcctggaaagaaacgtccggtagagcagtcgccacaagagccagactcctcctcgggcattggcaagnnnggccagcagcccgctnnnaagagactcaattttggtcagactggcgactcagagtcagtccccgacccacaacctctcggagaacctccagcagccccctctggtgtgggatctaatacaatggcttcaggcggtggcgcaccaatggcagacaataacgaaggcgccgacggagtgggtaatnnntcaggaaattggcattgcgattccacatggctgggcgacagagtcatcaccaccagcacccgaacatgggccttgcccacctataacaaccacctctacaagcaaatctccagtcaatcaggggccagcaacgacaaccactacttcggctacagcaccccctgggggtattttgatttcaacagattccactgccatttctcaccacgtgactggcagcgactcatcaacaacaattggggattccggcccaagnnnctcaacttcaagctcttcaacatccaagtcaaggaggtcacgacgaatgatggcaccacgaccatcgctaataaccttaccagcacggttcaagtcttcacggactcggagtaccagttgccgtacgtcctcggctctgcgcaccagggctgcctccctccgttcccggcggacgtgttcatgattccgcagtacggctacctaacgctcaacaatggcagccaggcagtgggacggtcatccttttactgcctggaatatttcccatcgcagatgctgagaacgggcaataactttnnnttcagctacaccttcgaggacgtgcctttccacagcagctacgcgcacagccagagcctggaccggctgatgaatcctctcatcgaccagtacctgtattacctgnnnagaactcagactacgtccggaactgcccaaaacagggagttgnnntttagccaggcgggtccatctagcatgnnnaatcaggccaaaaactggctacctggaccctgttaccggcagcagcgcgtttctaaaacagcaaatgacaacaacaacagcaactttgcctggactggtgctacaaaatatcaccttaatgggcgtgattctttagtcaaccctggccctgctatggcctcacacaaagacgacgaagacaagttctttcccatgagcggtgtcttgatttttggaaagcagggcgccggagcttcaaacgttgatttggacaatgtcatgatcacagacgaagaggaaatcaaaaccactaaccccgtggccaccgaacaatatgggactgtggcaaccaatctccagagcagcaacacagcccctgcgaccggaactgtgaattctcagggagccttacctggaatggtgtggcaagacagagacgtatacctgcagggtcctatttgggccaaaattcctcacacggatggacactttcacccgtctcctctcatgggcggctttggacttaagcacccgcctcctcagatcctcatcaaaaacacgcctgttcctgcgaatcctccgacaacgttttcgcctgcaaagtttgcttcattcatcacccagtattccacaggacaagtgagcgtggagattgaatgggagctgcagaaagaaaacagcaaacgctggaatcccgaaatacagtatacatctaactataataaatctnnnaacgttgatttcactgtggacaccaatggagtttatagtgagcctcgccccattggcacccgttacctcacccgtaacctg

SEQ ID NO: 1218 - protein, 735 aa, Artificial Sequence
  source: /note="Description of Artificial Sequence: Synthetic polypeptide"
  MOD_RES (42)..(42): Any amino acid
  MOD_RES (168)..(168): Any amino acid
  MOD_RES (310)..(310): Any amino acid
  MOD_RES (410)..(410): Any amino acid
  MOD_RES (446)..(446): Any amino acid
  MOD_RES (461)..(461): Any amino acid
  MOD_RES (471)..(471): Any amino acid
  MOD_RES (475)..(475): Any amino acid
  MOD_RES (504)..(504): Any amino acid
  MOD_RES (539)..(539): Any amino acid
MAADGYLPDWLEDNLSEGIREWWDLKPGAPQPKANQQHQDDXRGLVLPGYKYLGPFNGLDKGEPVNEADAAALEHDKAYDQQLKAGDNPYLKYNHADAEFQERLQEDTSFGGNLGRAVFQAKKRVLEPLGLVEEAAKTAPGKKRPVEQSPQEPDSSSGIGKSGQQPAXKRLNFGQTGDSESVPDPQPLGEPPAAPSGVGSNTMASGGGAPMADNNEGADGVGNSSGNWHCDSTWLGDRVITTSTRTWALPTYNNHLYKQISSQSGASNDNHYFGYSTPWGYFDFNRFHCHFSPRDWQRLINNNWGFRPKXLNFKLFNIQVKEVTQNDGTTTIANNLTSTVQVFTDSEYQLPYVLGSAHQGCLPPFPADVFMIPQYGYLTLNNGSQAVGRSSFYCLEYFPSQMLRTGNNFXFSYTFEDVPFHSSYAHSQSLDRLMNPLIDQYLYYLXRTQTTSGTTQQSRLXFSQAGPSSMXQQAXNWLPGPCYRQQRVSKTANDNNNSNFAWTXATKYHLNGRDSLVNPGPAMASHKDDEEKFFPMHGXLIFGKQGTGASNVDLDNVMITDEEEIRTTNPVATEQYGTVATNLQSSNTAPATGTVNSQGALPGMVWQDRDVYLQGPIWAKIPHTDGHFHPSPLMGGFGLKHPPPQILIKNTPVPANPPTTFSPAKFASFITQYSTGQVSVEIEWELQKENSKRWNPEIQYTSNYNKSVNVDFTVDTNGVYSEPRPIGTRYLTRNL

SEQ ID NO: 1219 - DNA, 2205 bp, Artificial Sequence
  source: /note="Description of Artificial Sequence: Synthetic polynucleotide"
  modified_base (124)..(126): a, c, t, g, unknown or other
  modified_base (502)..(504): a, c, t, g, unknown or other
  modified_base (928)..(930): a, c, t, g, unknown or other
  modified_base (1228)..(1230): a, c, t, g, unknown or other
  modified_base (1336)..(1338): a, c, t, g, unknown or other
  modified_base (1381)..(1383): a, c, t, g, unknown or other
  modified_base (1411)..(1413): a, c, t, g, unknown or other
  modified_base (1423)..(1425): a, c, t, g, unknown or other
  modified_base (1510)..(1512): a, c, t, g, unknown or other
  modified_base (1615)..(1617): a, c, t, g, unknown or other
atggctgctgacggttatcttccagattggctcgaggacaacctttctgaaggcattcgtgagtggtgggatctgaaacctggagcccctcaacccaaagcgaaccaacaacaccaggacgacnnncggggtcttgtgcttccgggttacaaatacctcggaccctttaacggactcgacaaaggagagccggtcaacgaggcggacgcggcagccctcgaacacgacaaagcttacgaccagcagctcaaggccggtgacaacccgtacctcaagtacaaccacgccgacgccgagtttcaggagcgtcttcaagaagatacgtcttttgggggcaaccttggcagagcagtcttccaggccaaaaagagggtccttgagcctcttggtctggttgaggaagcagctaaaacggctcctggaaagaagaggcctgtagaacagtctcctcaggaaccggactcatcatctggtattggcaaatcgggccaacagcctgccnnnaaaagactaaatttcggtcagactggagactcagagtcagtcccagaccctcaacctctcggagaaccaccagcagccccctcaggtgtgggatctaatacaatggcttcaggcggtggcgcaccaatggcagacaataacgagggtgccgatggagtgggtaattcctcaggaaattggcattgcgattccacatggctgggcgacagagtcatcaccaccagcaccagaacctgggccctgcccacttacaacaaccatctctacaagcaaatctccagccaatcaggagcttcaaacgacaaccactactttggctacagcaccccttgggggtattttgactttaacagattccactgccacttctcaccacgtgactggcagcgactcattaacaacaactggggattccggcccaagnnnctcaacttcaagctcttcaacatccaagttaaagaggtcacgcagaacgatggcacgacgactattgccaataaccttaccagcacggttcaagtgtttacggactcggagtatcagctcccgtacgtgctcgggtcggcgcaccaaggctgtctcccgccgtttccagcggacgtcttcatgatccctcagtatggatacctcaccctgaacaacggaagtcaagcggtgggacgctcatccttttactgcctggagtacttcccttcgcagatgctaaggactggaaataacttcnnnttcagctataccttcgaggatgtaccttttcacagcagctacgctcacagccagagtttggatcgcttgatgaatcctcttattgatcagtatctgtactacctgnnnagaacgcaaacaacctctggaacaacccaacaatcacggctgnnntttagccaggctgggccttcgtctatgnnncagcaggccnnnaattggctacctgggccctgctaccggcaacagagagtttcaaagactgctaacgacaacaacaacagtaactttgcttggacannngccaccaaatatcatctcaatggccgcgactcgctggtgaatccaggaccagctatggccagtcacaaggacgatgaagaaaaatttttccctatgcacggcnnnctaatatttggcaaacaagggacaggggcaagtaacgtagatttagataatgtaatgattacggatgaagaagagattcgtaccaccaatcctgtggcaacagagcagtatggaactgtggcaactaacttgcagagctcaaatacagctcccgcgactggaactgtcaatagtcagggggccttacctggcatggtgtggcaagatcgtgacgtgtaccttcaaggacctatctgggcaaagattcctcacacggatggacactttcatccttctcctctgatgggaggctttggactgaaacatccgcctcctcaaatcttgatcaaaaatactccggtaccggcaaatcctccgacgactttcagcccggccaagtttgcttcatttatcactcagtactccactggacaggtcagcgtggaaattgagtgggagctacagaaagaaaacagcaaacgttggaatccagagattcagtacacttccaactacaacaagtctgttaatgtggactttactgtagacactaatggtgtttatagtgaacctcgccctattggaacccggtatctcacacgaaacttg

SEQ ID NO: 1220 - protein, 736 aa, Artificial Sequence; identical to SEQ ID NO: 928
  source: /note="Description of Artificial Sequence: Synthetic polypeptide"

SEQ ID NO: 1221 - protein, 736 aa, Artificial Sequence; identical to SEQ ID NO: 929
  source: /note="Description of Artificial Sequence: Synthetic polypeptide"

SEQ ID NO: 1222 - protein, 736 aa, Artificial Sequence; identical to SEQ ID NO: 930
  source: /note="Description of Artificial Sequence: Synthetic polypeptide"

SEQ ID NO: 1223 - protein, 736 aa, Artificial Sequence; identical to SEQ ID NO: 931
  source: /note="Description of Artificial Sequence: Synthetic polypeptide"

SEQ ID NO: 1224 - protein, 736 aa, Artificial Sequence; identical to SEQ ID NO: 932
  source: /note="Description of Artificial Sequence: Synthetic polypeptide"

SEQ ID NO: 1225 - protein, 736 aa, Artificial Sequence; identical to SEQ ID NO: 933
  source: /note="Description of Artificial Sequence: Synthetic polypeptide"

SEQ ID NO: 1226 - protein, 736 aa, Artificial Sequence; identical to SEQ ID NO: 934
  source: /note="Description of Artificial Sequence: Synthetic polypeptide"

SEQ ID NO: 1227 - protein, 736 aa, Artificial Sequence; identical to SEQ ID NO: 935
  source: /note="Description of Artificial Sequence: Synthetic polypeptide"

SEQ ID NO: 1228 - DNA, 2211 bp, Artificial Sequence; identical to SEQ ID NO: 936
  source: /note="Description of Artificial Sequence: Synthetic polynucleotide"

SEQ ID NO: 1229 - protein, 738 aa, Artificial Sequence; identical to SEQ ID NO: 16
  source: /note="Description of Artificial Sequence: Synthetic polypeptide"

SEQ ID NO: 1230 - protein, 738 aa, Artificial Sequence; identical to SEQ ID NO: 16
  source: /note="Description of Artificial Sequence: Synthetic polypeptide"

SEQ ID NO: 1231 - protein, 738 aa, Artificial Sequence
  source: /note="Description of Artificial Sequence: Synthetic polypeptide"
  MOD_RES (157)..(157): Any amino acid
  MOD_RES (169)..(169): Any amino acid
  MOD_RES (457)..(457): Any amino acid
  MOD_RES (463)..(463): Any amino acid
  MOD_RES (508)..(508): Any amino acid
  MOD_RES (510)..(511): Any amino acid
  MOD_RES (558)..(558): Any amino acid
  MOD_RES (585)..(585): Any amino acid
  MOD_RES (587)..(587): Any amino acid
MAADGYLPDWLEDNLSEGIREWWDLKPGAPKPKANQQKQDDGRGLVLPGYKYLGPFNGLDKGEPVNAADAAALEHDKAYDQQLKAGDNPYLRYNHADAEFQERLQEDTSFGGNLGRAVFQAKKRVLEPLGLVEEGAKTAPGKKRPVEQSPQEPDSSXLGIGKTGQQPAXKRLNFGQTGDSESVPDPQPLGEPPAAPSGVGSNTMASGGGAPMADNNEGADGVGNSSGNWHCDSTWLGDRVITTSTRTWALPTYNNHLYKQISNGTSGGSTNDNTYFGYSTPWGYFDFNRFHCHFSPRDWQRLINNNWGFRPKRLNFKLFNIQVKEVTTNEGTKTIANNLTSTVQVFTDSEYQLPYVLGSAHQGCLPPFPADVFMIPQYGYLTLNNGSQAVGRSSFYCLEYFPSQMLRTGNNFQFSYTFEDVPFHSSYAHSQSLDRLMNPLIDQYLYYLSRTQTTGTXGTQTLXFSQAGPSSMANQARNWVPGPCYRQQRVSTTTNQNNNSNFAWTGAXKXXLNGRDSLMNPGVAMASHKDDEDRFFPSSGVLIFGKQGAGNDNVDYSXVMITNEEEIKTTNPVATEEYGAVATNXQXLANTQAQTGLVHNQGVLPGMVWQNRDVYLQGPIWAKIPHTDGNFHPSPLMGGFGLKHPPPQILIKNTPVPADPPTTFNQAKLNSFITQYSTGQVSVEIEWELQKENSKRWNPEIQYTSNYYKSTNVDFAVNTEGVYSEPRPIGTRYLTRNL

SEQ ID NO: 1232 - DNA, 2211 bp, Artificial Sequence
  source: /note="Description of Artificial Sequence: Synthetic polynucleotide"
  modified_base (469)..(471): a, c, t, g, unknown or other
  modified_base (502)..(504): a, c, t, g, unknown or other
  modified_base (1366)..(1368): a, c, t, g, unknown or other
  modified_base (1384)..(1386): a, c, t, g, unknown or other
  modified_base (1519)..(1521): a, c, t, g, unknown or other
  modified_base (1525)..(1530): a, c, t, g, unknown or other
  modified_base (1669)..(1671): a, c, t, g, unknown or other
  modified_base (1750)..(1752): a, c, t, g, unknown or other
  modified_base (1756)..(1758): a, c, t, g, unknown or other
atggctgccgatggttatcttccagattggctcgaggacaacctctctgagggcattcgcgagtggtgggacttgaaacctggagccccgaaacccaaagccaaccagcaaaagcaggacgacggccggggtctggtgcttcctggctacaagtacctcggacccttcaacggactcgacaagggggagcccgtcaacgcggcggacgcagcggccctcgagcacgacaaagcctacgaccagcagctcaaagcgggtgacaatccgtacctgcggtataatcacgccgacgccgagtttcaggagcgtctgcaagaagatacgtcttttgggggcaacctcgggcgagcagtcttccaggccaagaagcgggttctcgaacctctcggtctggttgaggaaggcgctaagacggctcctggaaagaagaggccggtagagcagtcgccacaagagccagactcctccnnnggcatcggcaagacaggccagcagcccgctnnnaagagactcaattttggtcagactggcgactcagagtcagtccccgacccacaacctctcggagaacctccagcagccccctcaggtgtgggatctaatacaatggcttcaggcggtggcgctccaatggcagacaataacgaaggcgccgacggagtgggtaattcctcgggaaattggcattgcgattccacatggctgggggacagagtcatcaccaccagcacccgaacctgggccctgcccacctacaacaaccacctctacaagcaaatctccaacggcacctcgggaggaagcaccaacgacaacacctattttggctacagcaccccctgggggtattttgacttcaacagattccactgtcacttttcaccacgtgactggcaacgactcatcaacaacaattggggattccggcccaaaagactcaacttcaagctgttcaacatccaggtcaaggaagtcacgacgaacgaaggcaccaagaccatcgccaataatctcaccagcaccgtgcaggtctttacggactcggagtaccagttaccgtacgtgctaggatccgctcaccagggatgtctgcctccgttcccggcggacgtcttcatgattcctcagtacggctatttaactttaaacaatggaagccaagccgtgggacgttcctccttctactgtctggagtatttcccatcgcagatgctgagaaccggcaacaactttcagttcagctacaccttcgaggacgtgcctttccacagcagctacgcgcacagccagagcctggacaggctgatgaatcccctcatcgaccagtacctgtactacctgtccagaacgcaaacgactggaactnnngggacgcagactctgnnnttcagccaagcgggtcctagctcaatggccaaccaggctagaaattgggtgcccggaccttgctaccggcagcagcgcgtctccacgacaaccaaccagaacaacaacagcaactttgcctggacgggagctnnnaagnnnnnnctgaacggccgagactctctaatgaatccgggcgtggcaatggcttcccacaaggatgacgaggaccgcttcttcccttcgagcggggtcctgatttttggcaagcaaggagccgggaacgataatgtggattacagcnnngtgatgattacaaatgaggaagaaatcaagactaccaaccccgtggccacagaagaatatggagcagtggccaccaacnnncagnnngccaatacgcaggcgcagaccggactcgtgcacaaccagggggtgcttcccggcatggtgtggcagaatagagacgtgtacctgcagggtcccatctgggccaaaattcctcacacggacggcaactttcacccgtctcccctgatgggcggctttggactgaagcacccgcctcctcaaattctcatcaagaacacaccggttccagcggacccgccgactaccttcaaccaggccaagctgaactctttcatcacgcagtacagcaccggacaggtcagcgtggaaatcgagtgggagctgcagaaagaaaacagcaaacgctggaatccagagattcaatacacttccaactactacaaatctacaaatgtggactttgctgtcaacacggagggggtttatagcgagcctcgccccattggcacccgttacctcacccgcaacctgtaa

SEQ ID NO: 1233 - protein, 733 aa, Artificial Sequence; identical to SEQ ID NO: 432
  source: /note="Description of Artificial Sequence: Synthetic polypeptide"

SEQ ID NO: 1234 - DNA, 4472 bp, Artificial Sequence
  source: /note="Description of Artificial Sequence: Synthetic polynucleotide"
ctccatcactaggggtaaccgcgaagcgcctcccacgctgccgcgtcagcgctgacgtaaattacgtcataggggagtggtcctgtattagctgtcacgtgagtgcttttgcgacattttgcgacaccacgtggccattcatggtatatatggccgagtgagcgagcaggatctccattttgaccgcgaaatttgaacgagcagcagccatgccgggcttctacgagatcgtgcttaaggtgccgagcgacctggacgagcacctgccgggcatttctgactcgtttgtgaactgggtggcagagaaggaatgggagctgcccccggattctgacatggatcggaatctgattgagcaggcacccctgaccgtggccgagaagctacagcgcgacttcctggtccaatggcgccgcgtgagtaaggccccggaggccctcttctttgttcagttcgagaagggcgagtcctacttccacctccatattctggtagagaccacgggggtcaaatccatggtgctgggccgcttcctgagtcagattcgggacaagctggtgcagaccatctaccgcgggatcgagccgaccctgcccaactggttcgcggtgacaaagacgcgtaatggcgccggaggggggaacaaggtggtggacgagtgctacatccccaactacctgctgcccaagactcagcccgagctgcagtgggcgtggactaacatggaggagtatataagcgcgtgcttgaacctggccgagcgcaaacggctcgtggcgcagcacctgacccacgtcagccagacccaggagcagaacaaggagaatctgaacccgaattctgacgcgcctgtcatccggtcaaaaacctccgcgcgctacatggagctggtcgggtggctggtggaccggggcatcacctccgagaagcagtggatccaggaggaccaggcctcgtacatctccttcaacgccgcctccaactcgcggtctcagatcaaggccgcgctggacaatgccggcaagatcatggcgctgaccaaatccgcgcccgactacctggtaggccccgctctgcccgcggacattaaatccaaccgcatctaccgcatcctggagctgaatggctacgaccctgcctacgccggttccgtctttctcggctgggcccagaaaaagtttggcaaaaggaacaccatctggctgtttgggccggccaccacgggcaagaccaacatcgcggaagccatcgcccacgccgtgcccttctacggctgcgtcaactggaccaatgagaactttcccttcaacgattgcgtcgacaagatggtgatctggtgggaggagggcaagatgacggccaaggtcgtggagtccgccaaggccattctcggcggcagcaaggtgcgcgtggaccaaaagtgcaagtcgtccgcccagatcgatcccacccccgtgatcgtcacctccaacaccaacatgtgcgccgtgattgacgggaacagcaccaccttcgagcaccagcagccgttgcaggaccggatgttcaaatttgaacttacccgccgtctggagcacgactttggcaaggtgacaaagcaggaagtcaaagagttcttccgctgggcgcaggatcacgtgaccgaggtggcgcatgagttctacgtcagaaagggtggagctaacaaaagacccgcccccgatgacgcggatataagcgagcccaagcgggcctgcccctcagtcgcggatccatcgacgtcagacgcggaaggagctccggtggactttgccgacaggtaccaaaacaaatgttctcgtcacgcgggcatgcttcagatgctgtttccctgcaaaacatgcgagagaatgaatcagaatttcaacatttgcttcacgcacgggaccagagactgttcagaatgtttccctggcgtgtcagaatctcaaccggtcgtcagaaaaaagacgtatcggaaactctgtgcgattcatcatctgctggggcgggcacccgagattgcttgctcggcctgcgacctggtcaacgtggacctggatgactgtgtttctgagcaataaatgacttaaaccaggtatggctgccgatggttatcttccagattggctcgaggacaacctctctgagggcattcgcgagtggtgggacctgaaacctggagccccgaaacccaaagccaaccagcaaaagcaggacaacggccggggtctggtgcttcctggctacaagtacctcggacccttcaacggactcgacaagggggagcccgtcaacgcggcggacgcagcggccctcgagcacgacaaggcctacgaccagcagctccaagcgggtgacaatccgtacctgcggtataatcacgccgacgccgagtttcaggagcgtctgcaagaagatacgtcttttgggggcaacctcgggcgcgcagtcttccaggccaaaaagcgggttctcgaacctctgggcctggttgaatcgccggttaagacggctcctggaaagaagagaccggtagagccatcaccccagcgctctccagactcctctacgggcatcggcaagaaaggccagcagcccgcaaaaaagagactcaattttgggcagactggcgactcagagtcagtccccgaccctcaaccaatcggagaaccaccagcaggcccctctggtctgggatctggtacaatggctgcaggcggtggcgctccaatggcagacaataacgaaggcgccgacggagtgggtagttcctcaggaaattggcattgcgattccacatggctgggcgacagagtcatcaccaccagcacccgcacctgggccctgcccacctacaacaaccacctctacaagcaaatctccaacgggacctcgggaggaagcaccaacgacaacacctacttcggctacagcaccccctgggggtattttgacttcaacagattccactgccacttttcaccacgtgactggcagcgactcatcaacaacaactggggattccggcccaagaggctcaacttcaagctcttcaacatccaagtcaaggaggtcacgcagaatgaaggcaccaagaccatcgccaataaccttaccagcacgattcaggtctttacggactcggaataccagctcccgtacgtgctcggctcggcgcaccagggctgcctgcctccgttcccggcggacgtcttcatgattcctcagtacgggtacctgactctgaacaatggcagtcaggctgtgggccggtcgtccttctactgcctggagtactttccttctcaaatgctgagaacgggcaacaactttgaattcagctacaacttcgaggacgtgcccttccacagcagctacgcgcacagccagagcctggaccggctgatgaaccctctcatcgaccagtacttgtactacctgtcccggactcaaagcacgggcggtactgcaggaactcagcagttgctattttctcaggccgggcctaacaacatgtcggctcaggccaagaactggctacccggtccctgctaccggcagcaacgcgtctccacgacactgtcgcagaacaacaacagcaactttgcctggacgggtgccaccaagtatcatctgaatggcagagactctctggtgaatcctggcgttgccatggctacccacaaggacgacgaagagcgattttttccatccagcggagtcttaatgtttgggaaacagggagctggaaaagacaacgtggactatagcagcgtgatgctaaccagcgaggaagaaataaagaccaccaacccagtggccacagaacagtacggcgtggtggccgataacctgcaacagcaaaacgccgctcctattgtaggggccgtcaatagtcaaggagccttacctggcatggtgtggcagaaccgggacgtgtacctgcagggtcccatctgggccaagattcctcatacggacggcaactttcatccctcgccgctgatgggaggctttggactgaagcatccgcctcctcagatcctgattaaaaacacacctgttcccgcggatcctccgaccaccttcactaaggccaagctggcttctttcatcacgcagtacagtaccggccaggtcagcgtggagatcgagtgggagctgcagaaggagaacagcaaacgctggaacccagagattcagtacacttccaactactacaaatctacaaatgtggactttgctgtcaatactgagggtacttattccgagcctcgccccattggcacccgttacctcacccgtaatctgtaattacatgttaatcaataaaccggttaattcgtttcagttgaactttggtctcctgtccttcttatcttatcggttaccatagaaactggttacttattaactgcttggtgcgcttcgcgataaaagacttacgtcatcgggttacccctagtgatgga

SEQ ID NO: 1235 - DNA, 2208 bp, Artificial Sequence
  source: /note="Description of Artificial Sequence: Synthetic polynucleotide"
atggctgccgatggttatcttccagattggctcgaggacactctctctgaaggaataagacagtggtggaagctcaaacctggcccaccaccaccaaagcccgcagagcggcataaggacgacagcaggggtcttgtgcttcctgggtacaagtacctcggacccttcaacggactcgacaagggagagccggtcaacgaggcagacgccgcggccctcgagcacgacaaagcctacgaccggcagctcgacagcggagacaacccgtacctcaagtacaaccacgccgacgcggagtttcaggagcgccttaaagaagatacgtcttttgggggcaacctcggacgagcagtcttccaggcgaaaaagagggttcttgaacctctgggcctggttgaggaacctgttaagaaggctccgggaaaaaagaggccggtagagcactctcctgtggagccagactcctcctcgggaaccggaaaggcgggccagcagcctgcaagaaaaagattgaattttggtcagactggagacgcagactcagtacctgacccccagcctctcggacagccaccagcagccccctctggtctgggaactaataccatggctacaggcagtggcgcaccaatggcagacaataacgagggtgccgacggagtgggtaattcctcgggaaattggcattgcgattccacatggatgggcgacagagtcatcaccaccagcacccgaacctgggccctgcccacctacaacaaccacctctacaaacaaatttccagccaatcaggagcctcgaacgacaatcactactttggctacagcaccccttgggggtattttgacttcaacagattccactgccacttttcaccacgtgactggcaaagactcatcaacaacaactggggattccgacccaagagactcaacttcaagctctttaacattcaagtcaaagaggtcacgcagaatgacggtacgacgacgattgccaataaccttaccagcacggttcaggtgtttactgactcggagtaccagctcccgtacgtcctcggctcggcgcatcaaggatgcctcccgccgttcccagcagacgtcttcatggtgccacagtatggatacctcaccctgaacaacgggagtcaggcagtaggacgctcttcattttactgcctggagtactttccttctcagatgctgcgtaccggaaacaactttaccttcagctacacttttgaggacgttcctttccacagcagctacgctcacagccagagtctggaccgtctcatgaatcctctcatcgaccagtacctgtattacttgagcagaacaaacactccaagtggaaccaccacgcagtcaaggcttcagttttctcaggccggagcgagtgacattcgggaccagtctaggaactggcttcctggaccctgttaccgccagcagcgagtatcaaagacatctgcggataacaacaacagtgaatactcgtggactggagctaccaagtaccacctcaatggcagagactctctggtgaatccgggcccggctatggcaagccacaaggacgatgaagaaaagttttttcctcagagcggggttctcatctttgggaagcaaggctcagagaaaacaaatgtggacattgaaaaggtcatgattacagacgaagaggaaatcaggacaaccaatcccgtggctacggagcagtatggttctgtatctaccaacctccagagaggcaacagacaagcagctaccgcagatgtcaacacacaaggcgttcttccaggcatggtctggcaggacagagatgtgtaccttcaggggcccatctgggcaaagattccacacacggacggacattttcacccctctcccctcatgggtggattcggacttaaacaccctcctccacagattctcatcaagaacaccccggtgcctgcgaatccttcgaccaccttcagtgcggcaaagtttgcttccttcatcacacagtactccacgggacaggtcagcgtggagatcgagtgggagctgcagaaggaaaacagcaaacgctggaatcccgaaattcagtacacttccaactacaacaagtctgttaatgtggactttactgtggacactaatggcgtgtattcagagcctcgccccattggcaccagatacctgactcgtaatctgtaa

SEQ ID NO: 1236 - protein, 735 aa, Artificial Sequence
  source: /note="Description of Artificial Sequence: Synthetic polypeptide"
MAADGYLPDWLEDTLSEGIRQWWKLKPGPPPPKPAERHKDDSRGLVLPGYKYLGPFNGLDKGEPVNEADAAALEHDKAYDRQLDSGDNPYLKYNHADAEFQERLKEDTSFGGNLGRAVFQAKKRVLEPLGLVEEPVKKAPGKKRPVEHSPVEPDSSSGTGKAGQQPARKRLNFGQTGDADSVPDPQPLGQPPAAPSGLGTNTMATGSGAPMADNNEGADGVGNSSGNWHCDSTWMGDRVITTSTRTWALPTYNNHLYKQISSQSGASNDNHYFGYSTPWGYFDFNRFHCHFSPRDWQRLINNNWGFRPKRLNFKLFNIQVKEVTQNDGTTTIANNLTSTVQVFTDSEYQLPYVLGSAHQGCLPPFPADVFMVPQYGYLTLNNGSQAVGRSSFYCLEYFPSQMLRTGNNFTFSYTFEDVPFHSSYAHSQSLDRLMNPLIDQYLYYLSRTNTPSGTTTQSRLQFSQAGASDIRDQSRNWLPGPCYRQQRVSKTSADNNNSEYSWTGATKYHLNGRDSLVNPGPAMASHKDDEEKFFPQSGVLIFGKQGSEKTNVDIEKVMITDEEEIRTTNPVATEQYGSVSTNLQRGNRQAATADVNTQGVLPGMVWQDRDVYLQGPIWAKIPHTDGHFHPSPLMGGFGLKHPPPQILIKNTPVPANPSTTFSAAKFASFITQYSTGQVSVEIEWELQKENSKRWNPEIQYTSNYNKSVNVDFTVDTNGVYSEPRPIGTRYLTRNL

SEQ ID NO: 1237 - DNA, 8376 bp, Artificial Sequence
  source: /note="Description of Artificial Sequence: Synthetic polynucleotide"
aattcccatcatcaataatataccttattttggattgaagccaatatgataatgagggggtggagtttgtgacgtggcgcggggcgtgggaacggggcgggtgacgtagtagtctctagagtcctgtattagaggtcacgtgagtgttttgcgacattttgcgacaccatgtggtcacgctgggtatttaagcccgagtgagcacgcagggtctccattttgaagcgggaggtttgaacgcgcagccaccacgccggggttttacgagattgtgattaaggtccccagcgaccttgacgggcatctgcccggcatttctgacagctttgtgaactgggtggccgagaaggaatgggagttgccgccagattctgacatggatctgaatctgattgagcaggcacccctgaccgtggccgagaagctgcagcgcgactttctgacggaatggcgccgtgtgagtaaggccccggaggcccttttctttgtgcaatttgagaagggagagagctacttccacatgcacgtgctcgtggaaaccaccggggtgaaatccatggttttgggacgtttcctgagtcagattcgcgaaaaactgattcagagaatttaccgcgggatcgagccgactttgccaaactggttcgcggtcacaaagaccagaaatggcgccggaggcgggaacaaggtggtggatgagtgctacatccccaattacttgctccccaaaacccagcctgagctccagtgggcgtggactaatatggaacagtatttaagcgcctgtttgaatctcacggagcgtaaacggttggtggcgcagcatctgacgcacgtgtcgcagacgcaggagcagaacaaagagaatcagaatcccaattctgatgcgccggtgatcagatcaaaaacttcagccaggtacatggagctggtcgggtggctcgtggacaaggggattacctcggagaagcagtggatccaggaggaccaggcctcatacatctccttcaatgcggcctccaactcgcggtcccaaatcaaggctgccttggacaatgcgggaaagattatgagcctgactaaaaccgcccccgactacctggtgggccagcagcccgtggaggacatttccagcaatcggatttataaaattttggaactaaacgggtacgatccccaatatgcggcttccgtctttctgggatgggccacgaaaaagttcggcaagaggaacaccatctggctgtttgggcctgcaactaccgggaagaccaacatcgcggaggccatagcccacactgtgcccttctacgggtgcgtaaactggaccaatgagaactttcccttcaacgactgtgtcgacaagatggtgatctggtgggaggaggggaagatgaccgccaaggtcgtggagtcggccaaagccattctcggaggaagcaaggtgcgcgtggaccagaaatgcaagtcctcggcccagatagacccgactcccgtgatcgtcacctccaacaccaacatgtgcgccgtgattgacgggaactcaacgaccttcgaacaccagcagccgttgcaagaccggatgttcaaatttgaactcacccgccgtctggatcatgactttgggaaggtcaccaagcaggaagtcaaagactttttccggtgggcaaaggatcacgtggttgaggtggagcatgaattctacgtcaaaaagggtggagccaagaaaagacccgcccccagtgacgcagatataagtgagcccaaacgggtgcgcgagtcagttgcgcagccatcgacgtcagacgcggaagcttcgatcaactacgcagacaggtaccaaaacaaatgttctcgtcacgtgggcatgaatctgatgctgtttccctgcagacaatgcgagagaatgaatcagaattcaaatatctgcttcactcacggacagaaagactgtttagagtgctttcccgtgtcagaatctcaacccgtttctgtcgtcaaaaaggcgtatcagaaactgtgctacattcatcatatcatgggaaaggtgccagacgcttgcactgcctgcgatctggtcaatgtggatttggatgactgcatctttgaacaataaatgatttaaatcaggtatggctgccgatggttatcttccagattggctcgaggacactctctctgaaggaataagacagtggtggaagctcaaacctggcccaccaccaccaaagcccgcagagcggcataaggacgacagcaggggtcttgtgcttcctgggtacaagtacctcggacccttcaacggactcgacaagggagagccggtcaacgaggcagacgccgcggccctcgagcacgacaaagcctacgaccggcagctcgacagcggagacaacccgtacctcaagtacaaccacgccgacgcggagtttcaggagcgccttaaagaagatacgtcttttgggggcaacctcggacgagcagtcttccaggcgaaaaagagggttcttgaacctctgggcctggttgaggaacctgttaagacggctccgggaaaaaagaggccggtagagcactctcctgtggagccagactcctcctcgggaaccggaaaggcgggccagcagcctgcaagaaaaagattgaattttggtcagactggagacgcagactcagtacctgacccccagcctctcggacagccaccagcagccccctctggtctgggaactaatacgatggctacaggcagtggcgcaccaatggcagacaataacgagggcgccgacggagtgggtaattcctcgggaaattggcattgcgattccacatggatgggcgacagagtcatcaccaccagcacccgaacctgggccctgcccacctacaacaaccacctctacaaacaaatttccagccaatcaggagcctcgaacgacaatcactactttggctacagcaccccttgggggtattttgacttcaacagattccactgccacttttcaccacgtgactggcaaagactcatcaacaacaactggggattccgacccaagagactcaacttcaagctctttaacattcaagtcaaagaggtcacgcagaatgacggtacgacgacgattgccaataaccttaccagcacggttcaggtgtttactgactcggagtaccagctcccgtacgtcctcggctcggcgcatcaaggatgcctcccgccgttcccagcagacgtcttcatggtgccacagtatggatacctcaccctgaacaacgggagtcaggcagtaggacgctcttcattttactgcctggagtactttccttctcagatgctgcgtaccggaaacaactttaccttcagctacacttttgaggacgttcctttccacagcagctacgctcacagccagagtctggaccgtctcatgaatcctctcatcgaccagtacctgtattacttgagcagaacaaacactccaagtggaaccaccacgcagtcaaggcttcagttttctcaggccggagcgagtgacattcgggaccagtctaggaactggcttcctggaccctgttaccgccagcagcgagtatcaaagacatctgcggataacaacaacagtgaatactcgtggactggagctaccaagtaccacctcaatggcagagactctctggtgaatccgggcccggccatggcaagccacaaggacgatgaagaaaagttttttcctcagagcggggttctcatctttgggaagcaaggctcagagaaaacaaatgtggacattgaaaaggtcatgattacagacgaagaggaaatcaggacaaccaatcccgtggctacggagcagtatggttctgtatctaccaacctccagagaggcaacagacaagcagctaccgcagatgtcaacacacaaggcgttcttccaggcatggtctggcaggacagagatgtgtaccttcaggggcccatctgggcaaagattccacacacggacggacattttcacccctctcccctcatgggtggattcggacttaaacaccctcctccacagattctcatcaagaacaccccggtacctgcgaatccttcgaccaccttcagtgcggcaaagtttgcttccttcatcacacagtactccacgggacaggtcagcgtggagatcgagtgggagctgcagaaggaaaacagcaaacgctggaatcccgaaattcagtacacttccaactacaacaagtctgttaatgtggactttactgtggacactaatggcgtgtattcagagcctcgccccattggcaccagatacctgactcgtaatctgtaattgcttgttaatcaataaaccgtttaattcgtttcagttgaactttggtctctgcgtatttctttcttatctagtttccatgctctagagtcctgtattagaggtcacgtgagtgttttgcgacattttgcgacaccatgtggtcacgctgggtatttaagcccgagtgagcacgcagggtctccattttgaagcgggaggtttgaacgcgcagccaccacggcggggttttacgagattgtgattaaggtccccagcgaccttgacgggcatctgcccggcatttctgacagctttgtgaactgggtggccgagaaggaatgggagttgccgccagattctgacatggatctgaatctgattgagcaggcacccctgaccgtggccgagaagctgcatcgctggcgtaatagcgaagaggcccgcaccgatcgcccttcccaacagttgcgcagcctgaatggcgaatggaattccagacgattgagcgtcaaaatgtaggtatttccatgagcgtttttcctgttgcaatggctggcggtaatattgttctggatattaccagcaaggccgatagtttgagttcttctactcaggcaagtgatgttattactaatcaaagaagtattgcgacaacggttaatttgcgtgatggacagactcttttactcggtggcctcactgattataaaaacacttctcaggattctggcgtaccgttcctgtctaaaatccctttaatcggcctcctgtttagctcccgctctgattctaacgaggaaagcacgttatacgtgctcgtcaaagcaaccatagtacgcgccctgtagcggcgcattaagcgcggcgggtgtggtggttacgcgcagcgtgaccgctacacttgccagcgccctagcgcccgctcctttcgctttcttcccttcctttctcgccacgttcgccggctttccccgtcaagctctaaatcgggggctccctttagggttccgatttagtgctttacggcacctcgaccccaaaaaacttgattagggtgatggttcacgtagtgggccatcgccctgatagacggtttttcgccctttgacgttggagtccacgttctttaatagtggactcttgttccaaactggaacaacactcaaccctatctcggtctattcttttgatttataagggattttgccgatttcggcctattggttaaaaaatgagctgatttaacaaaaatttaacgcgaattttaacaaaatattaacgtttacaatttaaatatttgcttatacaatcttcctgtttttggggcttttctgattatcaaccggggtacatatgattgacatgctagttttacgattaccgttcatcgattctcttgtttgctccagactctcaggcaatgacctgatagcctttgtagagacctctcaaaaatagctaccctctccggcatgaatttatcagctagaacggttgaatatcatattgatggtgatttgactgtctccggcctttctcacccgtttgaatctttacctacacattactcaggcattgcatttaaaatatatgagggttctaaaaatttttatccttgcgttgaaataaaggcttctcccgcaaaagtattacagggtcataatgtttttggtacaaccgatttagctttatgctctgaggctttattgcttaattttgctaattctttgccttgcctgtatgatttattggatgttggaattcctgatgcggtattttctccttacgcatctgtgcggtatttcacaccgcatatggtgcactctcagtacaatctgctctgatgccgcatagttaagccagccccgacacccgccaacacccgctgacgcgccctgacgggcttgtctgctcccggcatccgcttacagacaagctgtgaccgtctccgggagctgcatgtgtcagaggttttcaccgtcatcaccgaaacgcgcgagacgaaagggcctcgtgatacgcctatttttataggttaatgtcatgataataatggtttcttagacgtcaggtggcacttttcggggaaatgtgcgcggaacccctatttgtttatttttctaaatacattcaaatatgtatccgctcatgagacaataaccctgataaatgcttcaataatattgaaaaaggaagagtatgagtattcaacatttccgtgtcgcccttattcccttttttgcggcattttgccttcctgtttttgctcacccagaaacgctggtgaaagtaaaagatgctgaagatcagttgggtgcacgagtgggttacatcgaactggatctcaacagcggtaagatccttgagagttttcgccccgaagaacgttttccaatgatgagcacttttaaagttctgctatgtggcgcggtattatcccgtattgacgccgggcaagagcaactcggtcgccgcatacactattctcagaatgacttggttgagtactcaccagtcacagaaaagcatcttacggatggcatgacagtaagagaattatgcagtgctgccataaccatgagtgataacactgcggccaacttacttctgacaacgatcggaggaccgaaggagctaaccgcttttttgcacaacatgggggatcatgtaactcgccttgatcgttgggaaccggagctgaatgaagccataccaaacgacgagcgtgacaccacgatgcctgtagcaatggcaacaacgttgcgcaaactattaactggcgaactacttactctagcttcccggcaacaattaatagactggatggaggcggataaagttgcaggaccacttctgcgctcggcccttccggctggctggtttattgctgataaatctggagccggtgagcgtgggtctcgcggtatcattgcagcactggggccagatggtaagccctcccgtatcgtagttatctacacgacggggagtcaggcaactatggatgaacgaaatagacagatcgctgagataggtgcctcactgattaagcattggtaactgtcagaccaagtttactcatatatactttagattgatttaaaacttcatttttaatttaaaaggatctaggtgaagatcctttttgataatctcatgaccaaaatcccttaacgtgagttttcgttccactgagcgtcagaccccgtagaaaagatcaaaggatcttcttgagatcctttttttctgcgcgtaatctgctgcttgcaaacaaaaaaaccaccgctaccagcggtggtttgtttgccggatcaagagctaccaactctttttccgaaggtaactggcttcagcagagcgcagataccaaatactgtccttctagtgtagccgtagttaggccaccacttcaagaactctgtagcaccgcctacatacctcgctctgctaatcctgttaccagtggctgctgccagtggcgataagtcgtgtcttaccgggttggactcaagacgatagttaccggataaggcgcagcggtcgggctgaacggggggttcgtgcacacagcccagcttggagcgaacgacctacaccgaactgagatacctacagcgtgagctatgagaaagcgccacgcttcccgaagggagaaaggcggacaggtatccggtaagcggcagggtcggaacaggagagcgcacgagggagcttccagggggaaacgcctggtatctttatagtcctgtcgggtttcgccacctctgacttgagcgtcgatttttgtgatgctcgtcaggggggcggagcctatggaaaaacgccagcaacgcggcctttttacggttcctggccttttgctggccttttgctcacatgttctttcctgcgttatcccctgattctgtggataaccgtattaccgcctttgagtgagctgataccgctcgccgcagccgaacgaccgagcgcagcgagtcagtgagcgaggaagcggaagagcgcccaatacgcaaaccgcctctccccgcgcgttggccgattcattaatgca

SEQ ID NO: 1238 - DNA, 1085 bp, Artificial Sequence
  source: /note="Description of Artificial Sequence: Synthetic polynucleotide"
  modified_base (611)..(611): a, c, t, g, unknown or other
  modified_base (640)..(640): a, c, t, g, unknown or other
  modified_base (1039)..(1039): a, c, t, g, unknown or other
tgcccacttacaacaaccatctctacaagcaaatctccagcvvmdcaggagctascaacgacaaccactactttggctacagcaccccttgggggtattttgactttaacagattccactgccacttctcaccacgtgactggcagcgactcattaacaacaactggggattccggcccaagaaactcagcttcaagctcttcaacatccaagttagaggggtcacgcagaacgatggcacgacgactattgccaataaccttaccagcacggttcaagtgtttacggactcggagtatcagctcccgtacgtgctcgggtcggcgcaccaaggctgtctcccgccgtttccagcggacgtcttcatggtccctcagtatggatacctcaccctgaacaacggaagtcaagcggtgggacgctcatccttttactgcctggagtacttcccttcgcagatgctaaggactggaaataacttccaattcagctataccttcgaggatgtaccttttcacagcagctacgctcacagccagagtttggatcgcttgatgaatcctcttattgatcagtatctgtactacctgaacagaacgcaargcamcvcnrgcggaacarccrvcmhsmrsvvsctgvngtttagccaggctgggcctcagtctatgtctttgcaggccagaaattggctacctgggccctgctaccggcaacagagactttcaamarycbmcrvcsrsaacaacaacagtrastttccttggmcagcggccagcamatatcatctcaatggccgcgactcgctggtgaatccaggaccagctatggccagtcacrrggacgatrmsgrsaratttttccctatgcacggcaatctaatatttggcaaasaarrcrscrvsrvarvcratrycgmsdwcgrsvrsgtaatgattacggatgaagaagagattcgtaccaccaatcctgtggcaacagagcagtatggaactgtggcaaataacttgcagrvsvvsmrsrvcvvscccacgdhtvvsrnsgtcvmscatcagggggccttacctggcatggtgtggcaagatcgt

SEQ ID NO: 1239 - protein, 620 aa, Artificial Sequence
  source: /note="Description of Artificial Sequence: Synthetic polypeptide"
  MOD_RES (263)..(264): Any amino acid
  MOD_RES (267)..(267): Any amino acid
  MOD_RES (450)..(453): Any amino acid
  MOD_RES (456)..(460): Any amino acid
  MOD_RES (462)..(462): Any amino acid
  MOD_RES (491)..(495): Any amino acid
  MOD_RES (500)..(500): Any amino acid
  MOD_RES (504)..(504): Any amino acid
  MOD_RES (508)..(508): Any amino acid
  MOD_RES (528)..(528): Any amino acid
  MOD_RES (531)..(533): Any amino acid
  MOD_RES (546)..(557): Any amino acid
  MOD_RES (586)..(590): Any amino acid
  MOD_RES (593)..(595): Any amino acid
  MOD_RES (597)..(597): Any amino acid
MAADGYLPDWLEDNLSEGIREWWALKPGVPQPKANQQHQDNRRGLVLPGYKYLGPGNGLDKGEPVNEADAAALEHDKAYDQQLKAGDNPYLKYNHADAEFQERLQEDTSFGGNLGRAVFQAKKRILEPLGLVEEAAKTAPGKKGAVDQSPQEPDSSSGVGKSGKQPARKRLNFGQTGDSESVPDPQPLGEPPAAPTSLGSNTMASGGGAPMADNNEGADGVGNSSGNWHCDSQWLGDRVITTSTRTWALPTYNNHLYKQISSXXGAXNDNHYFGYSTPWGYFDFNRFHCHFSPRDWQRLINNNWGFRPKKLSFKLFNIQVRGVTQNDGTTTIANNLTSTVQVFTDSEYQLPYVLGSAHQGCLPPFPADVFMVPQYGYLTLNNGSQAVGRSSFYCLEYFPSQMLRTGNNFQFSYTFEDVPFHSSYAHSQSLDRLMNPLIDQYLYYLNRTQXXXXGTXXXXXLXFSQAGPQSMSLQARNWLPGPCYRQQRLSXXXXXNNNSXFPWXAASXYHLNGRDSLVNPGPAMASHXDDXXXFFPMHGNLIFGKXXXXXXXXXXXXVMITDEEEIRTTNPVATEQYGTVANNLQXXXXXPTXXXVXHQGALPGMVWQDRDVYLQGPIWA

SEQ ID NO: 1240 - DNA, 1491 bp, Artificial Sequence
  source: /note="Description of Artificial Sequence: Synthetic polynucleotide"
accaccagcaccagaacctgggccctgcccacttacaacaaccatctctacaagcaaatctccagccaatcaggagcttcaaacgacaaccactactttggctacagcaccccttgggggtattttgactttaacagattccactgccacttctcaccacgtgactggcagcgactcattaacaacaactggggattccggcccaagaaactcagcttcaagctcttcaacatccaagttagaggggtcacgcagaacgatggcacgacgactattgccaataaccttaccagcacggttcaagtgtttacggactcggagtatcagctcccgtacgtgctcgggtcggcgcaccaaggctgtctcccgccgtttccagcggacgtcttcatggtccctcagtatggatacctcaccctgaacaacggaagtcaagcggtgggacgctcatccttttactgcctggagtacttcccttcgcagatgctaaggactggaaataacttccaattcagctataccttcgaggatgtaccttttcacagcagctacgctcacagccagagtttggatcgcttgatgaatcctcttattgatcagtatctgtactacctgaacagaacgcaaggaacaacctctggaacaaccaaccaatcacggctgctttttagccaggctgggcctcagtctatgtctttgcaggccagaaattggctacctgggccctgctaccggcaacagagactttcaaagactgctaacgacaacaacaacagtaactttccttggacagcggccagcaaatatcatctcaatggccgcgactcgctggtgaatccaggaccagctatggccagtcacaaggacgatgaagaaaaatttttccctatgcacggcaatctaatatttggcaaagaagggacaacggcaagtaacgcagaattagataatgtaatgattacggatgaagaagagattcgtaccaccaatcctgtggcaacagagcagtatggaactgtggcaaataacttgcagagctcaaatacagctcccacgactggaactgtcaatcatcagggggccttacctggcatggtgtggcaagatcgtgacgtctaccttcaaggacctatctgggcaaagattcctcacacggatggacactttcatccttctcctctgatgggaggctttggactgaaacatccgcctcctcaaatcatgatcaaaaatactccggtaccggcaaatcctccgacgactttcagcccggccaagtttgcttcatttatcactcagtactccactggacaggtcagcgtggaaattgagtgggagctacagaaagaaaacagcaaacgttggaatccagagattcagtacacttccaactacaacaagtctgttaatgtggactttactgtagacactaatggtgtttatagtgaacctcgccctattggaacccggtatctcacacgaaacttgtga

SEQ ID NO: 1241 - protein, 482 aa, Artificial Sequence
  source: /note="Description of Artificial Sequence: Synthetic polypeptide"
TTSTRTWALPTYNNHLYKQISSQSGASNDNHYFGYSTPWYFDFNRFHCHFSPRDWQRLNNNWGFRPKKLSFKLFNIQRGVTQNDGTTTIANNLTSTQVFTDSEYQLPYVLGSAHQCLPPFPADVFMVPQYGYLTNNGSQAVGRSSFYCLEYFPQMLRTGNNFQFSYTFEDVPHSSYAHSQSLDRLMNPLIDYLYYLNRTQGTTSGTTNQSLLFSQAGPQSMSLQARNWLGPCYRQQRLSKTANDNNNSFPWTAASKYHLNGRDSLVNGPAMASHKDDEEKFFPMHGLIFGKEGTTASNAELDNVMITDEEEIRTTNPVATEQYGTVANNLQSSNTAPTTGTVNHQGALPGMVWQDRDVYLQGPIWAKIPHTDGHFHPSPLMGGFGLKHPPPQIMIKNTPVPANPPTTFSPAKFASFITQYSTGQVSVEIEWELQKENSKRWNPEIQYTSNYNKSVNVDFTVDTNGVYSEPRPIGTRYLTRNL

SEQ ID NO: 1242 - DNA, 1140 bp, Artificial Sequence
  source: /note="Description of Artificial Sequence: Synthetic polynucleotide"
  modified_base (636)..(636): a, c, t, g, unknown or other
  modified_base (665)..(665): a, c, t, g, unknown or other
  modified_base (1064)..(1064): a, c, t, g, unknown or other
accaccagcaccagaacctgggccctgcccacttacaacaaccatctctacaagcaaatctccagcvvmdcaggagctascaacgacaaccactactttggctacagcaccccttgggggtattttgactttaacagattccactgccacttctcaccacgtgactggcagcgactcattaacaacaactggggattccggcccaagaaactcagcttcaagctcttcaacatccaagttagaggggtcacgcagaacgatggcacgacgactattgccaataaccttaccagcacggttcaagtgtttacggactcggagtatcagctcccgtacgtgctcgggtcggcgcaccaaggctgtctcccgccgtttccagcggacgtcttcatggtccctcagtatggatacctcaccctgaacaacggaagtcaagcggtgggacgctcatccttttactgcctggagtacttcccttcgcagatgctaaggactggaaataacttccaattcagctataccttcgaggatgtaccttttcacagcagctacgctcacagccagagtttggatcgcttgatgaatcctcttattgatcagtatctgtactacctgaacagaacgcaargcamcvcnrgcggaacarccrvcmhsmrsvvsctgvngtttagccaggctgggcctcagtctatgtctttgcaggccagaaattggctacctgggccctgctaccggcaacagagactttcaamarycbmcrvcsrsaacaacaacagtrastttccttggmcagcggccagcamatatcatctcaatggccgcgactcgctggtgaatccaggaccagctatggccagtcacrrggacgatrmsgrsaratttttccctatgcacggcaatctaatatttggcaaasaarrcrscrvsrvarvcratrycgmsdwcgrsvrsgtaatgattacggatgaagaagagattcgtaccaccaatcctgtggcaacagagcagtatggaactgtggcaaataacttgcagrvsvvsmrsrvcvvscccacgdhtvvsrnsgtcvmscatcagggggccttacctggcatggtgtggcaagatcgtgacgtctaccttcaaggacctatctgggca

SEQ ID NO: 1243 - protein, 620 aa, Artificial Sequence; identical to SEQ ID NO: 1239
  source: /note="Description of Artificial Sequence: Synthetic polypeptide"
  MOD_RES (263)..(264): Any amino acid
  MOD_RES (267)..(267): Any amino acid
  MOD_RES (450)..(453): Any amino acid
  MOD_RES (456)..(460): Any amino acid
  MOD_RES (462)..(462): Any amino acid
  MOD_RES (491)..(495): Any amino acid
  MOD_RES (500)..(500): Any amino acid
  MOD_RES (504)..(504): Any amino acid
  MOD_RES (508)..(508): Any amino acid
  MOD_RES (528)..(528): Any amino acid
  MOD_RES (531)..(533): Any amino acid
  MOD_RES (546)..(557): Any amino acid
  MOD_RES (586)..(590): Any amino acid
  MOD_RES (593)..(595): Any amino acid
  MOD_RES (597)..(597): Any amino acid

SEQ ID NO: 1244 - protein, 738 aa, Artificial Sequence; identical to SEQ ID NO: 16
  source: /note="Description of Artificial Sequence: Synthetic polypeptide"

SEQ ID NO: 1245 - DNA, 2258 bp, Artificial Sequence
  source: /note="Description of Artificial Sequence: Synthetic polynucleotide"
tcgaggacaacctctctgagggcattcgcgagtggtgggacttgaaacctggagccccgaaacccaaagccaaccagcaaaagcaggacgacggccggggtctggtgcttcctggctacaagtacctcggacccttcaacggactcgacaagggggagcccgtcaacgcggcggacgcagcggccctcgagcacgacaaggcctacgaccagcagctcaaagcgggtgacaatccgtacctgcggtataaccacgccgacgccgagtttcaggagcgtctgcaagaagatacgtcttttgggggcaacctcgggcgagcagtcttccaggccaagaagcgggttctcgaacctctcggtctggttgaggaaggcgctaagacggctcctggaaagaagagaccggtagagccatcaccccagcgttctccagactcctctacgggcatcggcaagaaaggccagcagcccgcgaaaaagagactcaactttgggcagactggcgactcagagtcagtgcccgaccctcaaccaatcggagaaccccccgcaggcccctctggtctgggatctggtacaatggctgcaggcggtggcgctccaatggcagacaataacgaaggcgccgacggagtgggtagttcctcaggaaattggcattgcgattccacatggctgggcgacagagtcatcaccaccagcacccgaacctgggccctccccacctacaacaaccacctctacaagcaaatctccaacgggacttcgggaggaagcaccaacgacaacacctacttcggctacagcaccccctgggggtattttgactttaacagattccactgccacttctcaccacgtgactggcagcgactcatcaacaacaactggggattccggcccaagagactcaacttcaagctcttcaacatccaggtcaaggaggtcacgcagaatgaaggcaccaagaccatcgccaataaccttaccagcacgattcaggtctttacggactcggaataccagctcccgtacgtcctcggctctgcgcaccagggctgcctgcctccgttcccggcggacgtcttcatgattcctcagtacgggtacctgactctgaacaatggcagtcaggccgtgggccgttcctccttctactgcctggagtactttccttctcaaatgctgagaacgggcaacaactttgagttcagctaccagtttgaggacgtgccttttcacagcagctacgcgcacagccaaagcctggaccggctgatgaaccccctcatcgaccagtacctgtactacctgtctcggactcagtccacgggaggtaccgcaggaactcagcagttgctattttctcaggccgggcctaataacatgtcggctcaggccaaaaactggctacccgggccctgctaccggcagcaacgcgtctccacgacactgtcgcaaaataacaacagcaactttgcctggaccggtgccaccaagtatcatctgaatggcagagactctctggtaaatcccggtgtcgctatggcaacccacaaggacgacgaagagcgattttttccgtccagcggagtcttaatgtttgggaaacagggagctggaaaagacaacgtggactatagcagcgttatgctaaccagtgaggaagaaattaaaaccaccaacccagtggccacagaacagtacggcgtggtggccgataacctgcaacagcaaaacgccgctcctattgtaggggccgtcaacagtcaaggagccttacctggcatggtctggcagaaccgggacgtgtacctgcagggtcctatctgggccaagattcctcacacggacggaaactttcatccctcgccgctgatgggaggctttggactgaaacacccgcctcctcagatcctgattaagaatacacctgttcccgcggatcctccaactaccttcagtcaagctaagctggcgtcgttcatcacgcagtacagcaccggacaggtcagcgtggaaattgaatgggagctgcagaaagaaaacagcaaacgctggaacccagagattcaatacacttccaactactacaaatctacaaatgtggactttgctgttaacacagatggcacttattctgagcctcgccccatcggcacccgttacctcacccgtaatctgtaattgcttgttaatcaataaaccggttgattcgtttcagttgaactttggtctctgcgaagggcgaattcgttt

SEQ ID NO: 1246 - DNA, 2208 bp, Artificial Sequence
  source: /note="Description of Artificial Sequence: Synthetic polynucleotide"
atggctgccgatggttatcttccagattggctcgaggacactctctctgaaggaataagacagtggtggaagctcaaacctggcccaccaccaccaaagcccgcagagcggcataaggacgacagcaggggtcttgtgcttcctgggtacaagtacctcggacccttcaacggactcgacaagggagagccggtcaacgaggcagacgccgcggccctcgagcacgacaaagcctacgaccggcagctcgacagcggagacaacccgtacctcaagtacaaccacgccgacgcggagtttcaggagcgccttaaagaagatacgtcttttgggggcaacctcggacgagcagtcttccaggcgaaaaagagggttcttgaacctctgggcctggttgaggaacctgttaagacggctccgggaaaaaagaggccggtagagcactctcctgtggagccagactcctcctcgggaaccggaaaggcgggccagcagcctgcaagaaaaagattgaattttggtcagactggagacgcagactcagtacctgacccccagcctctcggacagccaccagcagccccctctggtctgggaactaatacgatggctacaggcagtggcgcaccaatggcagacaataacgagggcgccgacggagtgggtaattcctcgggaaattggcattgcgattccacatggatgggcgacagagtcatcaccaccagcacccgaacctgggccctgcccacctacaacaaccacctctacaaacaaatttccagccaatcaggagcctcgaacgacaatcactactttggctacagcaccccttgggggtattttgacttcaacagattccactgccacttttcaccacgtgactggcaaagactcatcaacaacaactggggattccgacccaagagactcaacttcaagctctttaacattcaagtcaaagaggtcacgcagaatgacggtacgacgacgattgccaataaccttaccagcacggttcaggtgtttactgactcggagtaccagctcccgtacgtcctcggctcggcgcatcaaggatgcctcccgccgttcccagcagacgtcttcatggtgccacagtatggatacctcaccctgaacaacgggagtcaggcagtaggacgctcttcattttactgcctggagtactttccttctcagatgctgcgtaccggaaacaactttaccttcagctacacttttgaggacgttcctttccacagcagctacgctcacagccagagtctggaccgtctcatgaatcctctcatcgaccagtacctgtatttcttaagcagaacaaacactccaagtggaaccaccacgcagtcaaggcttcagttttctcaggccggagcgagtgacattcgggaccagtctaggaactggcttcctggaccctgttaccgccagcagcgagtatcaaagacatctgcggataacaacaacagtgaattctcgtggaccggtgctaccaagtaccacctcaatggcagagactctctggtgaatccgggcccggccatggcaagccacaaggacgatgaagaaaagttttttcctcagagcggggttctcatctttgggaagcaaggctcagagaaaacaaatgtggacattgaaaaggtcatgattacagacgaagaggaaatcaggacaaccaatcccgtggctacggagcagtatggttctgtatctaccaacctccagagaggcaacagacaagcagctaccgcagatgtcaacacacaaggcgttcttccaggcatggtctggcaggacagagatgtgtaccttcaggggcccatctgggcaaagattccacacacggacggacattttcacccctctcccctcatgggtggattcggacttaaacaccctcctccacagattctcatcaagaacaccccggtacctgcgaatccttcgaccaccttcagtgcggcaaagtttgcttccttcatcacacagtactccacgggacaggtcagcgtggagatcgagtgggagctgcagaaggaaaacagcaaacgctggaatcccgaaattcagtacacttccaactacaacaagtctgttaatgtggactttactgtggacactaatggcgtgtattcagagcctcgccccattggtaccagattcctgactcgtaatctgtaa

SEQ ID NO: 1247 - protein, 737 aa, Artificial Sequence
  source: /note="Description of Artificial Sequence: Synthetic polypeptide"
MAADGYLPDWLEDNLSEGIREWWDLKPGAPKPKANQQKQDNGRGLVLPGYKYLGPFNGLDKGEPVNAADAAALEHDKAYDQQLQAGDNPYLRYNHADAEFQERLQEDTSFGGNLGRAVFQAKKRVLEPLGLVESPVKTAPGKKRPVEPSPQRSPDSSTGIGKKGQQPAKKRLNFGQTGDSESVPDPQPIGEPPAAPSGVGPNTMAAGGGAPMADNNEGADGVGSSSGNWHCDSTWLGDRVITTSTRTWALPTYNNHLYKQISNGTSGGSTNDNTYFGYSTPWGYFDFNRFHCHFSPRDWQRLINNNWGFRPKRLNFKLFNIQVKEVTQNEGTKTIANNLTSTIQVFTDSEYQLPYVLGSAHQGCLPPFPADVFMIPQYGYLTLNNGSQAVGRSSFYCLEYFPSQMLRTGNNFEFSYNFEDVPFHSSYAHSQSLDRLMNPLIDQYLYYLSRTQSTGGTAGTQQLLFSQAGPNNMSAQAKNWLPGPCYRQQRVSTTLSQNNNSNFAWTGATKYHLNGRDSLVNPGVAMATHKDDEERFFPSSGVLMFGKQGAGKDNVDYSSVMLTSEEEIKTTNPVATEQYGWADNLQQQNAAPIVGAVNSQGALPGMVWQNRDVYLQGPIWAKIPHTDGNFHPSPLMGGFGLKHPPPQILIKNTPVPADPPTTFNQAKLASFITQYSTGQVSVEIEWELQKENSKRWNPEIQYTSNYYKSTNVDFAVNTEGTYSEPRPIGTRYLTRNL

SEQ ID NO: 1248 - DNA, 2211 bp, Artificial Sequence
  source: /note="Description of Artificial Sequence: Synthetic polynucleotide"
atggctgccgatggttatcttccagattggctcgaggacactctctctgaaggaataagacagtggtggaagctcaaacctggcccaccaccaccaaagcccgcagagcggcataaggacgacagcaggggtcttgtgcttcctgggtacaagtacctcggacccttcaacggactcgacaagggagagccggtcaacgaggcagacgccgcggccctcgagcacgacaaagcctacgaccggcagctcgacagcggagacaacccgtacctcaagtacaaccacgccgacgcggagtttcaggagcgccttaaagaagatacgtcttttgggggcaacctcggacgagcagtcttccaggcgaaaaagagggttcttgaacctctgggcctggttgaggaacctgttaagacggctccgggaaaaaagaggccggtagagcactctcctgtggagccagactcctcctcgggaaccggaaaggcgggccagcagcctgcaagaaaaagattgaattttggtcagactggagacgcagactcagtacctgacccccagcctctcggacagccaccagcagccccctctggtctgggaactaatacgatggctacaggcagtggcgcaccaatggcagacaataacgagggcgccgacggagtgggtaattcctcgggaaattggcattgcgattccacatggatgggcgacagagtcatcaccaccagcacccgaacctgggccctgcccacctacaacaaccacctctacaaacaaatttccagcgcttcaacgggagcctcgaacgacaatcactactttggctacagcaccccttgggggtattttgacttcaacagattccactgccacttttcaccacgtgactggcaaagactcatcaacaacaactggggattccgacccaagagactcaacttcaagctctttaacattcaagtcaaagaggtcacgcagaatgacggtacgacgacgattgccaataaccttaccagcacggttcaggtgtttactgactcggagtaccagctcccgtacgtcctcggctcggcgcatcaaggatgcctcccgccgttcccagcagacgtcttcatggtgccacagtatggatacctcaccctgaacaacgggagtcaggcagtaggacgctcttcattttactgcctggagtactttccttctcagatgctgcgtaccggaaacaactttaccttcagctacacttttgaggacgttcctttccacagcagctacgctcacagccagagtctggaccgtctcatgaatcctctcatcgaccagtacctgtattacttgagcagaacaaacactccaagtggaaccaccacgcagtcaaggcttcagttttctcaggccggagcgagtgacattcgggaccagtctaggaactggcttcctggaccctgttaccgccagcagcgagtatcaaagacatctgcggataacaacaacagtgaatactcgtggactggagctaccaagtaccacctcaatggcagagactctctggtgaatccgggcccggccatggcaagccacaaggacgatgaagaaaagttttttcctcagagcggggttctcatctttgggaagcaaggctcagagaaaacaaatgtggacattgaaaaggtcatgattacagacgaagaggaaatcaggacaaccaatcccgtggctacggagcagtatggttctgtatctaccaacctccagagaggcaacagacaagcagctaccgcagatgtcaacacacaaggcgttcttccaggcatggtctggcaggacagagatgtgtaccttcaggggcccatctgggcaaagattccacacacggacggacattttcacccctctcccctcatgggtggattcggacttaaacaccctcctccacagattctcatcaagaacaccccggtacctgcgaatccttcgaccaccttcagtgcggcaaagtttgcttccttcatcacacagtactccacgggacaggtcagcgtggagatcgagtgggagctgcagaaggaaaacagcaaacgctggaatcccgaaattcagtacacttccaactacgccaagtctgtcaatgtggactttactgtggacaataatggcgtgtattcagagcctcgccccattggcaccagatacctgactcgtaatctgtaa

SEQ ID NO: 1249 - DNA, 2208 bp, Artificial Sequence
  source: /note="Description of Artificial Sequence: Synthetic polynucleotide"
atggctgccgatggttatcttccagattggctcgaggacaacctctctgagggcattcgcgagtggtgggacttgaaacctggagccccgaagcccaaagccaaccagcaaaagcaggacgacggccggggtctggtgcttcctggctacaagtacctcggacccttcaacggactcgacaagggggagcccgtcaacgcggcggacgcagcggccctcgagcacgacaaggcctacgaccagcagctcaaagcgggtgacaatccgtacctgcggtataaccacgccgacgccgagtttcaggagcgtctgcaagaagatacgtcttttgggggcaacctcgggcgagcagtcttccaggccaagaagcgggttctcgaacctctcggtctggttgaggaaggcgctaagacggctcctggaaagaaacgtccggtagagcagtcgccacaagagccagactcctcctcgggcatcggcaagacaggccagcagcccgctaaaaagagactcaattttggtcagactggcgactcagagtcagtccccgatccacaacctctcggagaacctccagcaacccccgctgctgtgggacctactacaatggcttcaggcggtggcgcaccaatggcagacaataacgaaggcgccgacggagtgggtaatgcctcaggaaattggcattgcgattccacatggctgggcgacagagtcatcaccaccagcacccgcacctgggccttgcccacctacaataaccacctctacaagcaaatctccagtgcttcaggggccagcaacgacaaccactacttcggctacagcaccccctgggggtattttgatttcaacagattccactgccacttttcaccacgtgactggcagcgactcatcaacaacaattggggattccggcccaagagactcaacttcaaactcttcaacatccaagtcaaggaggtcacgacgaatgatggcgtcacaaccatcgctaataaccttaccagcacggttcaagtcttctcggactcggagtaccagcttccgtacgtcctcggctctgcgcaccagggctgcctccctccgttcccggcggacgtgttcatgattccgcaatacggctacctgacgctcaacaatggcagccaagccgtgggacgttcatccttttactgcctggaatatttcccttctcagatgctgagaacgggcaacaactttaccttcagctacacctttgaggaagtgcctttccacagcagctacgcgcacagccagagcctggaccggctgatgaatcctctcatcgaccaatacctgtattacctgaacagaactcaaaatcagtccggaagtgcccaaaacaaggacttgctgtttagccgtgggtctccagctggcatgtctgttcagcccaaaaactggctacctggaccctgttatcggcagcagcgcgtttctaaaacaaaaacagacaacaacaacagcaattttacctggactggtgcttcaaaatataacctcaatgggcgtgaatccatcatcaaccctggcactgctatggcctcacacaaagacgacgaagacaagttctttcccatgagcggtgtcatgatttttggaaaagagagcgccggagcttcaaacactgcattggacaatgtcatgattacagacgaagaggaaattaaagccactaaccctgtggccaccgaaagatttgggaccgtggcagtcaatttccagagcagcagcacagaccctgcgaccggagatgtgcatgctatgggagcattacctggcatggtgtggcaagatagagacgtgtacctgcagggtcccatttgggccaaaattcctcacacagatggacactttcacccgtctcctcttatgggcggctttggactcaagaacccgcctcctcagatcctcatcaaaaacacgcctgttcctgcgaatcctccggcggagttttcagctacaaagtttgcttcattcatcacccaatactccacaggacaagtgagtgtggaaattgaatgggagctgcagaaagaaaacagcaagcgctggaatcccgaagtgcagtacacatccaattatgcaaaatctgccaacgttgattttactgtggacaacaatggactttatactgagcctcgccccattggcacccgttaccttacccgtcccctgtaa

SEQ ID NO: 1250 - DNA, 2205 bp, Artificial Sequence
  source: /note="Description of Artificial Sequence: Synthetic polynucleotide"
atggctgccgatggttatcttccagattggctcgaggacaacctctdgagggcattcgcgagtggtgggacttgaaacctggagccccgaaacccaaagccaaccagcaaaagcaggacgacggccggggtdggtgcttcctggctacaagtacctcggacccttcaacggactcgacaagggggagcccgtcaacgcggcggatgcagcggccctcgagcacgacaaggcctacgaccagcagctcaaagcgggtgacaatccgtacctgcggtataaccacgccgacgccgagtttcaggagcgtctgcaagaagatacgtcttttgggggcaacctcgggcgagcagtcttccaggccaagaagagggttctcgaaccttttggtdggttgaggaaggtgctaagacggctcctggaaagaaacgtccggtagagcagtcgccacaagagccagactcctcctcgggcattggcaagacaggccagcagcccgctaaaaagagactcaattttggtcagactggcgactcagagtcagtccccgacccacaacctctcggagaacctccagcaacccccgctgctgtgggacctactacaatggcttcaggcggtggcgcaccaatggcagacaataacgaaggcgccgacggagtgggtaatgcctcaggaaattggcattgcgattccacatggctgggcgacagagtcatcaccaccagcacccgaacatgggccttgcccacctataacaaccacctctacaagcaaatctccagtgcttcaggggccagcaacgacaaccactacttcggctacagcaccccctgggggtattttgatttcaacagattccactgccatttctcaccacgtgactggcagcgactcatcaacaacaattggggattccggcccaagagactcaacttcaagctcttcaacatccaagtcaaggaggtcacgacgaatgatggcgtcacgaccatcgctaataaccttaccagcacggttcaagtcttctcggactcggagtaccagttgccgtacgtcctcggctctgcgcaccagggctgcctccctccgttcccggcggacgtgttcatgattccgcagtacggctacctaacgctcaacaatggcagccaggcagtgggacggtcatccttttactgcctggaatatttcccatcgcagatgctgagaacgggcaataactttaccttcagctacaccttcgaggacgtgcctttccacagcagctacgcgcacagccagagcctggaccggctgatgaatcctctcatcgaccagtacctgtattacctgaacagaactcagaatcagtccggaagtgcccaaaacaaggacttgctgtttagccgggggtctccagctggcatgtctgttcagcccaaaaactggctacctggaccctgttaccggcagcagcgcgtttctaaaacaaaaacagacaacaacaacagcaactttacctggactggtgcttcaaaatataaccttaatgggcgtgaatctataatcaaccctggcactgctatggcctcacacaaagacgacaaagacaagttctttcccatgagcggtgtcatgatttttggaaaggagagcgccggagcttcaaacactgcattggacaatgtcatgatcacagacgaagaggaaatcaaagccactaaccccgtggccaccgaaagatttgggactgtggcagtcaatctccagagcagcagcacagaccctgcgaccggagatgtgcatgttatgggagccttacctggaatggtgtggcaagacagagacgtatacctgcagggtcctatttgggccaaaattcctcacacggatggacactttcacccgtctcctctcatgggcggctttggacttaagcacccgcctcctcagatcctcatcaaaaacacgcctgttcctgcgaatcctccggcagagttttcggctacaaagtttgcttcattcatcacccagtattccacaggacaagtgagcgtggagattgaatgggagctgcagaaagaaaacagcaaacgctggaatcccgaagtgcagtatacatctaactatgcaaaatctgccaacgttgatttcactgtggacaacaatggactttatactgagcctcgccccattggcacccgttacctcacccgtcccctgtaa

SEQ ID NO: 1251 - DNA, 2208 bp, Artificial Sequence
  source: /note="Description of Artificial Sequence: Synthetic polynucleotide"
atggctgccgatggttatcttccagattggctcgaggacaacctctctgagggcattcgcgagtggtgggacttgaaacctggagccccgaaacccaaagccaaccagcaaaagcaggacgacggccggggtctggtgcttcctggctacaagtacctcggacccttcaacggactcgacaagggggagcccgtcaacgcggcggatgcagcggccctcgagcacgacaaggcctacgaccagcagctcaaagcgggtgacaatccgtacctgcggtataaccacgccgacgccgagtttcaggagcgtctgcaagaagatacgtcttttgggggcaacctcgggcgagcagtcttccaggccaagaagagggttctcgaaccttttggtctggttgaggaaggtgctaagacggctcctggaaagaaacgtccggtagagcagtcgccacaagagccagactcctcctcgggcattggcaagacaggccagcagcccgctaaaaagagactcaattttggtcagactggcgactcagagtcagtccccgacccacaacctctcggagaacctccagcaacccccgctgctgtgggacctactacaatggcttcaggcggtggcgcaccaatggcagacaataacgaaggcgccgacggagtgggtaatgcctcaggaaattggcattgcgattccacatggctgggcgacagagtcatcaccaccagcacccgaacatgggccttgcccacctataacaaccacctctacaagcaaatctccagtgcttcaggggccagcaacgacaaccactacttcggctacagcaccccctgggggtattttgatttcaacagattccactgccatttctcaccacgtgactggcagcgactcatcaacaacaattggggattccggcccaagagactcaacttcaagctcttcaacatccaagtcaaggaggtcacgacgaatgatggcgtcacgaccatcgctaataaccttaccagcacggttcaagtcttctcggactcggagtaccagttgccgtacgtcctcggctctgcgcaccagggctgcctccctccgttcccggcggacgtgttcatgattccgcagtacggctacctaacgctcaacaatggcagccaggcagtgggacggtcatccttttactgcctggaatatttcccatcgcagatgctgagaacgggcaataactttaccttcagctacaccttcgaggacgtgcctttccacagcagctacgcgcacagccagagcctggaccggctgatgaatcctctcatcgaccagtacctgtattacctgaacagaactcagaatcagtccggaagtgcccaaaacaaggacttgctgtttagccgggggtctccagctggcatgtctgttcagcccaaaaactggctacctggaccctgttaccggcagcagcgcgtttctaaaacaaaaacagacaacaacaacagcaactttacctggactggtgcttcaaaatataaccttaatgggcgtgaatctataatcaaccctggcactgctatggcctcacacaaagacgacgaagacaagttctttcccatgagcggtgtcatgatttttggaaaggagagcgccggagcttcaaacactgcattggacaatgtcatgatcacagacgaagaggaaatcaaagccactaaccccgtggccaccgaaagatttgggactgtggcagtcaatctccagagcagcagcacagaccctgcgaccggagatgtgcatgttatgggagccttacctggaatggtgtggcaagacagagacgtatacctgcagggtcctatttgggccaaaattcctcacacggatggacactttcacccgtctcctctcatgggcggctttggacttaagcacccgcctcctcagatcctcatcaaaaacacgcctgttcctgcgaatcctccggcagagttttcggctacaaagtttgcttcattcatcacccagtattccacaggacaagtgagcgtggagattgaatgggagctgcagaaagaaaacagcaaacgctggaatcccgaagtgcagtatacatctaactatgcaaaatctgccaacgttgatttcactgtggacaacaatggactttatactgagcctcgccccattggcacccgttacctcacccgtcccctgtaa

SEQ ID NO: 1252 - DNA, 2208 bp, Artificial Sequence
  source: /note="Description of Artificial Sequence: Synthetic polynucleotide"
atggctgccgatggttatcttccagattggctcgaggacactctctctgaaggaataagacagtggtggaagctcaaacctggcccaccaccaccaaagcccgcagagcggcataaggacgacagcaggggtcttgtgcttcctgggtacaagtacctcggacccttcaacggactcgacaagggagagccggtcaacgaggcagacgccgcggccctcgagcacgacaaagcctacgaccggcagctcgacagcggagacaacccgtacctcaagtacaaccacgccgacgcggagtttcaggagcgccttaaagaagatacgtcttttgggggcaacctcggacgagcagtcttccaggcgaaaaagagggttcttgaacctctgggcctggttgaggaacctgttaagacggctccgggaaaaaagaggccggtagagcactctcctgtggagccagactcctcctcgggaaccggaaaggcgggccagcagcctgcaagaaaaagattgaattttggtcagactggagacgcagactcagtacctgacccccagcctctcggacagccaccagcagccccctctggtctgggaactaatacgatggctacaggcagtggcgcaccaatggcagacaataacgagggcgccgacggagtgggtaattcctcgggaaattggcattgcgattccacatggatgggcgacagagtcatcaccaccagcacccgaacctgggccctgcccacctacaacaaccacctctacaaacaaatttccagccaatcaggagcctcgaacgacaatcactactttggctacagcaccccttgggggtattttgacttcaacagattccactgccacttttcaccacgtgactggcaaagactcatcaacaacaactggggattccgacccaagagactcaacttcaagctctttaacattcaagtcaaagaggtcacgcagaatgacggtacgacgacgattgccaataaccttaccagcacggttcaggtgtttactgactcggagtaccagctcccgtacgtcctcggctcggcgcatcaaggatgcctcccgccgttcccagcagacgtcttcatggtgccacagtatggatacctcaccctgaacaacgggagtcaggcagtaggacgctcttcattttactgcctggagtactttccttctcagatgctgcgtaccggaaacaactttaccttcagctacacttttgaggacgttcctttccacagcagctacgctcacagccagagtctggaccgtctcatgaatcctctcatcgaccagtacctgtattacttgagcagaacaaacactccaagtggaaccaccacgcagtcaaggcttcagttttctgtggccggacccagtaacatggctgtccagggaaggaactggcttcctggaccctgttaccgccagcagcgagtatcaaagacatctgcggataacaacaacagtgaatttgcttggactggagctaccaagtaccacctcaatggcagagactctctggtgaatccgggcccggccatggcaagccacaaggacgatgaagaaaagttttttcctcagagcggggttctcatctttgggaagcaaggctcagagaaaacaaatgtggacattgaaaaggtcatgattacagacgaagaggaaatcaggacaaccaatcccgtggctacggagcagtatggttctgtatctaccaacctccagcaacagaacacagcaccagctaccgcagatgtcaacacacaaggcgttcttccaggcatggtctggcaggacagagatgtgtaccttcaggggcccatctgggcaaagattccacacacggacggacattttcacccctctcccctcatgggtggattcggacttaaacaccctcctccacagattctcatcaagaacaccccggtacctgcgaatccttcgaccaccttcagtgcggcaaagtttgcttccttcatcacacagtactccacgggacaggtcagcgtggagatcgagtgggagctgcagaaggaaaacagcaaacgctggaatcccgaaattcagtacacttccaactacaacaagtctgttaatgtggactttactgtggacactaatggcgtgtattcagagcctcgccccattggcaccagatacctgactcgtaatctgtaa

SEQ ID NO: 1253 - protein, 735 aa, Artificial Sequence
  source: /note="Description of Artificial Sequence: Synthetic polypeptide"
MAADGYLPDWLEDTLSEGIRQWWKLKPGPPPPKPAERHKDDSRGLVLPGYKYLGPFNGLDKGEPVNEADAAALEHDKAYDRQLDSGDNPYLKYNHADAEFQERLKEDTSFGGNLGRAVFQAKKRVLEPLGLVEEPVKTAPGKKRPVEHSPVEPDSSSGTGKAGQQPARKRLNFGQTGDADSVPDPQPLGQPPAAPSGLGTNTMATGSGAPMADNNEGADGVGNSSGNWHCDSTWMGDRVITTSTRTWALPTYNNHLYKQISSQSGASNDNHYFGYSTPWGYFDFNRFHCHFSPRDWQRLINNNWGFRPKRLNFKLFNIQVKEVTQNDGTTTIANNLTSTVQVFTDSEYQLPYVLGSAHQGCLPPFPADVFMVPQYGYLTLNNGSQAVGRSSFYCLEYFPSQMLRTGNNFTFSYTFEDVPFHSSYAHSQSLDRLMNPLIDQYLYYLSRTNTPSGTTTQSRLQFSVAGPSNMAVQGRNWLPGPCYRQQRVSKTSADNNNSEFAWTGATKYHLNGRDSLVNPGPAMASHKDDEEKFFPQSGVLIFGKQGSEKTNVDIEKVMITDEEEIRTTNPVATEQYGSVSTNLQQQNTAPATADVNTQGVLPGMVWQDRDVYLQGPIWAKIPHTDGHFHPSPLMGGFGLKHPPPQILIKNTPVPANPSTTFSAAKFASFITQYSTGQVSVEIEWELQKENSKRWNPEIQYTSNYNKSVNVDFTVDTNGVYSEPRPIGTRYLTRNL

SEQ ID NO: 1254 - DNA, 2208 bp, Artificial Sequence
  source: /note="Description of Artificial Sequence: Synthetic polynucleotide"
atggctgccgatggttatcttccagattggctcgaggacactctctctgaaggaataagacagtggtggaagctcaaacctggcccaccaccaccaaagcccgcagagcggcataaggacgacagcaggggtcttgtgcttcctgggtacaagtacctcggacccttcaacggactcgacaagggagagccggtcaacgaggcagacgccgcggccctcgagcacgacaaagcctacgaccggcagctcgacagcggagacaacccgtacctcaagtacaaccacgccgacgcggagtttcaggagcgccttaaagaagatacgtcttttgggggcaacctcggacgagcagtcttccaggcgaaaaagaggattcttgaacctctgggcctggttgaggaacctgttaagacggctccgggaaaaaagaggccggtagagcactctcctgcggagccagactcctcctcgggaaccggaaagtcgggccagcagcctgcaagaaaaagattgaattttggtcagactggagacgcagactcagtacctgacccccagcctctcggacagccaccagcagccccctctggtctgggaactaatacgatggcttcaggcagtggcgcaccaatggcagacaataacgagggcgccgacggagtgggtaattcctcgggaaattggcattgcgattccacatggatgggcgacagagtcatcaccaccagcacccgaacctgggccctgcccacctacaacaaccacctctacaaacaaatttccagccaatcaggagcctcgaacgacaatcactactttggctacagcaccccttgggggtattttgacttcaacagattccactgccacttttcaccacgtgactggcaaagactcatcaacaacaactggggattccgacccaagagactcagcttcaagctctttaacattcaagtcaaagaggtcacgcagaatgacggtacgacgacgattgccaataaccttaccagcacggttcaggtgtttactgactcggagtaccagctcccgtacgtcctcggctcggcgcatcaaggatgcctcccgccgttcccagcagacgtcttcatggtgccacagtatggatacctcaccctgaacaacgggagtcaggcagtaggacgctcttcattttactgcctggagtactttccttctcagatgctgcgtaccggaaacaactttaccttcagctacacttttgaggacgttcctttccacagcagctacgctcacagccagagtctggaccgtctcatgaatcctctcatcgaccagtacctgtattacttgagcagaacaaacactccaagtggaaccaccacgatgtcaaggcttcagttttctcaggccggagcgagtgacattcgggaccagtctaggaactggcttcctggaccctgttaccgccagcagcgagtatcaaagacagctgcggataacaacaacagtgattactcgtggactggagctaccaagtaccacctcaatggcagagactctctggtgaatccgggcccggccatggcaagccacaaggacgatgaagaaaagtattttcctcagagcggggttctcatctttgggaagcaagactcaggaaaaacaaatgtggacattgaaaaggtcatgattacagacgaagaggaaatcaggacaaccaatcccgtggctacggagcagtatggttctgtatctaccaacctccagagcggcaacacacaagcagctacctcagatgtcaacacacaaggcgttcttccaggcatggtctggcaggacagagatgtgtaccttcaggggcccatctgggcaaagattccacacacggacggacattttcacccctctcccctcatgggtggattcggacttaaacaccctcctccacagattctcatcaagaacaccccggtacctgcgaatccttcgaccaccttcagtgcggcaaagtttgcttccttcatcacacagtactccacgggacaggtcagcgtggagatcgagtgggagctgcagaaggaaaacagcaaacgctggaatcccgaaattcagtacacttccaactacaacaagtctgttaatgtggactttactgtggacactaatggcgtgtattcagagcctcgccccattggcaccagatacctgactcgtaatctgtaa

SEQ ID NO: 1255 - DNA, 2208 bp, Artificial Sequence
  source: /note="Description of Artificial Sequence: Synthetic polynucleotide"
atggctgccgatggttatcttccagattggctcgaggacactctctctgaaggaataagacagtggtggaagctcaaacctggcccaccaccaccaaagcccgcagagcggcataaggacgacagcaggggtcttgtgcttcctgggtacaagtacctcggacccttcaacggactcgacaagggagagccggtcaacgaggcagacgccgcggccctcgagcacgacaaagcctacgaccggcagctcgacagcggagacaacccgtacctcaagtacaaccacgccgacgcggagtttcaggagcgccttaaagaagatacgtcttttgggggcaacctcggacgagcagtcttccaggcgaaaaagaggattcttgaacctctgggcctggttgaggaacctgttaagacggctccgggaaaaaagaggccggtagagcactctcctgcggagccagactcctcctcgggaaccggaaagtcgggccagcagcctgcaagaaaaagattgaattttggtcagactggagacgcagactcagtacctgacccccagcctctcggacagccaccagcagccccctctggtctgggaactaatacgatggcttcaggcagtggcgcaccaatggcagacaataacgagggcgccgacggagtgggtaattcctcgggaaattggcattgcgattccacatggatgggcgacagagtcatcaccaccagcacccgaacctgggccctgcccacctacaacaaccacctctacaaacaaatttccagccaatcaggagcctcgaacgacaatcactactttggctacagcaccccttgggggtattttgacttcaacagattccactgccacttttcaccacgtgactggcaaagactcatcaacaacaactggggattccgacccaagagactcaacttcaagctctttaacattcaagtcaaagaggtcacgcagaatgacggtacgacgacgattgccaataaccttaccagcacggttcaggtgtttactgactcggagtaccagctcccgtacgtcctcggctcggcgcatcaaggatgcctcccgccgttcccagcagacgtcttcatggtgccacagtatggatacctcaccctgaacaacgggagtcaggcagtaggacgctcttcattttactgcctggagtactttccttctcagatgctgcgtaccggaaacaactttaccttcagctacacttttgaggacgttcctttccacagcagctacgctcacagccagagtctggaccgtctcatgaatcctctcatcgaccagtacctgtattacttgagcagaacaaacactccaagtggaaccaccacgatgtcaaggcttcagttttctcaggccggagcgagtgacattcgggaccagtctaggaactggcttcctggaccctgttaccgccagcagcgagtatcaaagacagctgcggataacaacaacagtgattactcgtggactggagctaccaagtaccacctcaatggcagagactctctggtgaatccgggcccggccatggcaagccacaaggacgatgaagaaaagtattttcctcagagcggggttctcatctttgggaagcaagactcaggaaaaacaaatgtggacattgaaaaggtcatgattacagacgaagaggaaatcaggacaaccaatcccgtggctacggagcagtatggttctgtatctaccaacctccagagcggcaacacacaagcagctacctcagatgtcaacacacaaggcgttcttccaggcatggtctggcaggacagagatgtgtaccttcaggggcccatctgggcaaagattccacacacggacggacattttcacccctctcccctcatgggtggattcggacttaaacaccctcctccacagattctcatcaagaacaccccggtacctgcgaatccttcgaccaccttcagtgcggcaaagtttgcttccttcatcacacagtactccacgggacaggtcagcgtggagatcgagtgggagctgcagaaggaaaacagcaaacgctggaatcccgaaattcagtacacttccaactacaacaagtctgttaatgtggactttactgtggacactaatggcgtgtattcagagcctcgccccattggcaccagatacctgactcgtaatctgtaa

SEQ ID NO: 1256 - protein, 735 aa, Artificial Sequence
  source: /note="Description of Artificial Sequence: Synthetic polypeptide"
MAADGYLPDWLEDTLSEGIRQWWKLKPGPPPPKPAERHKDDSRGLVLPGYKYLGPFNGLDKGEPVNEADAAALEHDKAYDRQLDSGDNPYLKYNHADAEFQERLKEDTSFGGNLGRAVFQAKKRILEPLGLVEEPVKTAPGKKRPVEHSPAEPDSSSGTGKSGQQPARKRLNFGQTGDADSVPDPQPLGQPPAAPSGLGTNTMASGSGAPMADNNEGADGVGNSSGNWHCDSTWMGDRVITTSTRTWALPTYNNHLYKQISSQSGASNDNHYFGYSTPWGYFDFNRFHCHFSPRDWQRLINNNWGFRPKRLNFKLFNIQVKEVTQNDGTTTIANNLTSTVQVFTDSEYQLPYVLGSAHQGCLPPFPADVFMVPQYGYLTLNNGSQAVGRSSFYCLEYFPSQMLRTGNNFTFSYTFEDVPFHSSYAHSQSLDRLMNPLIDQYLYYLSRTNTPSGTTTMSRLQFSQAGASDIRDQSRNWLPGPCYRQQRVSKTAADNNNSDYSWTGATKYHLNGRDSLVNPGPAMASHKDDEEKYFPQSGVLIFGKQDSGKTNVDIEKVMITDEEEIRTTNPVATEQYGSVSTNLQSGNTQAATSDVNTQGVLPGMVWQDRDVYLQGPIWAKIPHTDGHFHPSPLMGGFGLKHPPPQILIKNTPVPANPSTTFSAAKFASFITQYSTGQVSVEIEWELQKENSKRWNPEIQYTSNYNKSVNVDFTVDTNGVYSEPRPIGTRYLTRNL

SEQ ID NO: 1257 - protein, 736 aa, Artificial Sequence
  source: /note="Description of Artificial Sequence: Synthetic polypeptide"
MAADGYLPDWLEDNLSEGIREWWDLKPGAPKPKANQQKQDDGRGLVLPGYKYLGPFNGLDKGEPVNAADAAALEHDKAYDQQLKAGDNPYLRYNHADAEFQERLQEDTSFGGNLGRAVFQAKKRVLEPFGLVEEGAKTAPGKKRPVEQSPQEPDSSSGIGKTGQQPAKKRLNFGQTGDSESVPDPQPLGEPPATPAAVGPTTMASGGGAPMADNNEGADGVGNASGNWHCDSTWLGDRVITTSTRTWALPTYNNHLYKQISSASTGASNDNHYFGYSTPWGYFDFNRFHCHFSPRDWQRLINNNWGFRPKRLNFKLFNIQVKEVTTNDGVTTIANNLTSTVQVFSDSEYQLPYVLGSAHQGCLPPFPADVFMIPQYGYLTLNNGSQAVGRSSFYCLEYFPSQMLRTGNNFTFSYTFEDVPFHSSYAHSQSLDRLMNPLIDQYLYFLNRTQNQSGSAQNKDLLFSRGSPAGMSVQPKNWLPGPCYRQQRVSKTKTDNNNSNFTWTGASKYNLNGRESIINPGTAMASHKDDKDKFFPMSGVMIFGKESAGASNTALDNVMITDEEEIKATNPVATERFGTVAVNLQSSSTDPATGDVHVMGALPGMVWQDRDVYLQGPIWAKIPHTDGHFHPSPLMGGFGLKHPPPQILIKNTPVPANPPAEFSATKFASFITQYSTGQVSVEIEWELQKENSKRWNPEVQYTSNYAKSANVDFTVDNNGLYTEPRPIGTRYLTRPL

SEQ ID NO: 1258 - protein, 747 aa, Artificial Sequence
  source: /note="Description of Artificial Sequence: Synthetic polypeptide"
MAADGYLPDWLEDTLSEGIRQWWKLKPGPPPPKPAERHKDDSRGLVLPGYKYLGPFNGLDKGEPVNEADAAALEHDKAYDRQLDSGDNPYLKYNHADAEFQERLKEDTSFGGNLGRAVFQAKKRVLEPLGLVEEPVKTAPGKKRPVEHSPVEPDSSSGTGKAGQQPARKRLNFGQTGDADSVPDPQPLGQPPAAPSGLGTNTMATGSGAPMADNNEGADGVGNSSGNWHCDSTWMGDRVITTSTRTWALPTYNNHLYKQISSQSGASNDNHYFGYSTPWGYFDFNRFHCHFSPRDWQRLINNNWGFRPKRLNFKLFNIQVKEVTQNDGTTTIANNLTSTVQVFTDSEYQLPYVLGSAHQGCLPPFPADVFMVPQYGYLTLNNGSQAVGRSSFYCLEYFPSQMLRTGNNFTFSYTFEDVPFHSSYAHSQSLDRLMNPLIDQYLYYLSRTNTPSGTTTQSRLQFSQAGASDIRDQSRNWLPGPCYRQQRVSKTSADNNNSEYSWTGATKYHLNGRDSLVNPGPAMASHKDDEEKFFPQSGVLIFGKQGSEKTNVDIEKVMITDEEEIRTTNPVATEQYGSVSTNLQRGNAAAGSTPPPMAARQAATADVNTQGVLPGMVWQDRDVYLQGPIWAKIPHTDGHFHPSPLMGGFGLKHPPPQILIKNTPVPANPSTTFSAAKFASFITQYSTGQVSVEIEWELQKENSKRWNPEIQYTSNYNKSVNVDFTVDTNGVYSEPRPIGTRYLTRNL

SEQ ID NO: 1259 - protein, 747 aa, Artificial Sequence
  source: /note="Description of Artificial Sequence: Synthetic polypeptide"
MAADGYLPDWLEDTLSEGIRQWWKLKPGPPPPKPAERHKDDSRGLVLPGYKYLGPFNGLDKGEPVNEADAAALEHDKAYDRQLDSGDNPYLKYNHADAEFQERLKEDTSFGGNLGRAVFQAKKRVLEPLGLVEEPVKTAPGKKRPVEHSPVEPDSSSGTGKAGQQPARKRLNFGQTGDADSVPDPQPLGQPPAAPSGLGTNTMATGSGAPMADNNEGADGVGNSSGNWHCDSTWMGDRVITTSTRTWALPTYNNHLYKQISSQSGASNDNHYFGYSTPWGYFDFNRFHCHFSPRDWQRLINNNWGFRPKRLNFKLFNIQVKEVTQNDGTTTIANNLTSTVQVFTDSEYQLPYVLGSAHQGCLPPFPADVFMVPQYGYLTLNNGSQAVGRSSFYCLEYFPSQMLRTGNNFTFSYTFEDVPFHSSYAHSQSLDRLMNPLIDQYLYYLSRTNTPSGTTTQSRLQFSQAGASDIRDQSRNWLPGPCYRQQRVSKTSADNNNSEYSWTGATKYHLNGRDSLVNPGPAMASHKDDEEKFFPQSGVLIFGKQGSEKTNVDIEKVMITDEEEIRTTNPVATEQYGSVSTNLQRGNAAAGETRAPLAARQAATADVNTQGVLPGMVWQDRDVYLQGPIWAKIPHTDGHFHPSPLMGGFGLKHPPPQILIKNTPVPANPSTTFSAAKFASFITQYSTGQVSVEIEWELQKENSKRWNPEIQYTSNYNKSVNVDFTVDTNGVYSEPRPIGTRYLTRNL

SEQ ID NO: 1260 - protein, 7 aa, Artificial Sequence
  source: /note="Description of Artificial Sequence: Synthetic peptide"
TLAVPFK

SEQ ID NO: 1261 - protein, 7 aa, Artificial Sequence
  source: /note="Description of Artificial Sequence: Synthetic peptide"
KFPVALT

SEQ ID NO: 1262 - protein, 6 aa, Artificial Sequence
  source: /note="Description of Artificial Sequence: Synthetic peptide"
LAVPFK

SEQ ID NO: 1263 - protein, 5 aa, Artificial Sequence
  source: /note="Description of Artificial Sequence: Synthetic peptide"
AVPFK

SEQ ID NO: 1264 - protein, 4 aa, Artificial Sequence
  source: /note="Description of Artificial Sequence: Synthetic peptide"
VPFK

SEQ ID NO: 1265 - protein, 6 aa, Artificial Sequence
  source: /note="Description of Artificial Sequence: Synthetic peptide"
TLAVPF

SEQ ID NO: 1266 - protein, 5 aa, Artificial Sequence
  source: /note="Description of Artificial Sequence: Synthetic peptide"
TLAVP

SEQ ID NO: 1267 - protein, 4 aa, Artificial Sequence
  source: /note="Description of Artificial Sequence: Synthetic peptide"
TLAV

SEQ ID NO: 1268 - protein, 7 aa, Artificial Sequence
  source: /note="Description of Artificial Sequence: Synthetic peptide"
SVSKPFL

SEQ ID NO: 1269 - protein, 7 aa, Artificial Sequence
  source: /note="Description of Artificial Sequence: Synthetic peptide"
FTLTTPK

SEQ ID NO: 1270 - protein, 7 aa, Artificial Sequence
  source: /note="Description of Artificial Sequence: Synthetic peptide"
MNATKNV

SEQ ID NO: 1271 - protein, 7 aa, Artificial Sequence
  source: /note="Description of Artificial Sequence: Synthetic peptide"
QSSQTPR

SEQ ID NO: 1272 - protein, 7 aa, Artificial Sequence
  source: /note="Description of Artificial Sequence: Synthetic peptide"
ILGTGTS

SEQ ID NO: 1273 - protein, 7 aa, Artificial Sequence
  source: /note="Description of Artificial Sequence: Synthetic peptide"
TRTNPEA

SEQ ID NO: 1274 - protein, 7 aa, Artificial Sequence
  source: /note="Description of Artificial Sequence: Synthetic peptide"
NGGTSSS

SEQ ID NO: 1275 - protein, 7 aa, Artificial Sequence
  source: /note="Description of Artificial Sequence: Synthetic peptide"
YTLSQGW

SEQ ID NO: 1276 - DNA, 21 bp, Artificial Sequence
  source: /note="Description of Artificial Sequence: Synthetic oligonucleotide"
aagtttcctgtggcgttgact

SEQ ID NO: 1277 - DNA, 21 bp, Artificial Sequence
  source: /note="Description of Artificial Sequence: Synthetic oligonucleotide"
actttggcggtgccttttaag

SEQ ID NO: 1278 - DNA, 21 bp, Artificial Sequence
  source: /note="Description of Artificial Sequence: Synthetic oligonucleotide"
agtgtgagtaagccttttttg

SEQ ID NO: 1279 - DNA, 21 bp, Artificial Sequence
  source: /note="Description of Artificial Sequence: Synthetic oligonucleotide"
tttacgttgacgacgcctaag

SEQ ID NO: 1280 - DNA, 21 bp, Artificial Sequence
  source: /note="Description of Artificial Sequence: Synthetic oligonucleotide"
atgaatgctacgaagaatgtg

SEQ ID NO: 1281 - DNA, 21 bp, Artificial Sequence
  source: /note="Description of Artificial Sequence: Synthetic oligonucleotide"
cagtcgtcgcagacgcctagg

SEQ ID NO: 1282 - DNA, 21 bp, Artificial Sequence
  source: /note="Description of Artificial Sequence: Synthetic oligonucleotide"
attctggggactggtacttcg

SEQ ID NO: 1283 - DNA, 21 bp, Artificial Sequence
  source: /note="Description of Artificial Sequence: Synthetic oligonucleotide"
acgcggactaatcctgaggct

SEQ ID NO: 1284 - DNA, 21 bp, Artificial Sequence
  source: /note="Description of Artificial Sequence: Synthetic oligonucleotide"
aatggggggactagtagttct

SEQ ID NO: 1285 - DNA, 21 bp, Artificial Sequence
  source: /note="Description of Artificial Sequence: Synthetic oligonucleotide"
tatactttgtcgcagggttgg

SEQ ID NO: 1286 - protein, 11 aa, Artificial Sequence
  source: /note="Description of Artificial Sequence: Synthetic peptide"
AQTLAVPFKAQ

SEQ ID NO: 1287 - protein, 11 aa, Artificial Sequence
  source: /note="Description of Artificial Sequence: Synthetic peptide"
AQSVSKPFLAQ

SEQ ID NO: 1288 - protein, 11 aa, Artificial Sequence
  source: /note="Description of Artificial Sequence: Synthetic peptide"
AQFTLTTPKAQ

SEQ ID NO: 1289 - protein, 11 aa, Artificial Sequence
  source: /note="Description of Artificial Sequence: Synthetic peptide"
DGTLAVPFKAQ

SEQ ID NO: 1290 - protein, 11 aa, Artificial Sequence
  source: /note="Description of Artificial Sequence: Synthetic peptide"
ESTLAVPFKAQ

SEQ ID NO: 1291 - protein, 11 aa, Artificial Sequence
  source: /note="Description of Artificial Sequence: Synthetic peptide"
GGTLAVPFKAQ

SEQ ID NO: 1292 - protein, 11 aa, Artificial Sequence
  source: /note="Description of Artificial Sequence: Synthetic peptide"
AQTLATPFKAQ

SEQ ID NO: 1293 - protein, 11 aa, Artificial Sequence
  source: /note="Description of Artificial Sequence: Synthetic peptide"
ATTLATPFKAQ

SEQ ID NO: 1294 - protein, 11 aa, Artificial Sequence
  source: /note="Description of Artificial Sequence: Synthetic peptide"
DGTLATPFKAQ

SEQ ID NO: 1295 - protein, 11 aa, Artificial Sequence
  source: /note="Description of Artificial Sequence: Synthetic peptide"
GGTLATPFKAQ

SEQ ID NO: 1296 - protein, 11 aa, Artificial Sequence
  source: /note="Description of Artificial Sequence: Synthetic peptide"
SGSLAVPFKAQ

SEQ ID NO: 1297 - protein, 11 aa, Artificial Sequence
  source: /note="Description of Artificial Sequence: Synthetic peptide"
AQTLAQPFKAQ

SEQ ID NO: 1298 - protein, 11 aa, Artificial Sequence
  source: /note="Description of Artificial Sequence: Synthetic peptide"
AQTLQQPFKAQ

SEQ ID NO: 1299 - protein, 11 aa, Artificial Sequence
  source: /note="Description of Artificial Sequence: Synthetic peptide"
AQTLSNPFKAQ

SEQ ID NO: 1300 - protein, 11 aa, Artificial Sequence
  source: /note="Description of Artificial Sequence: Synthetic peptide"
AQTLAVPFSNP

SEQ ID NO: 1301 - protein, 11 aa, Artificial Sequence
  source: /note="Description of Artificial Sequence: Synthetic peptide"
QGTLAVPFKAQ

SEQ ID NO: 1302 - protein, 11 aa, Artificial Sequence
  source: /note="Description of Artificial Sequence: Synthetic peptide"
NQTLAVPFKAQ

SEQ ID NO: 1303 - protein, 11 aa, Artificial Sequence
  source: /note="Description of Artificial Sequence: Synthetic peptide"
EGSLAVPFKAQ

SEQ ID NO: 1304 - protein, 11 aa, Artificial Sequence
  source: /note="Description of Artificial Sequence: Synthetic peptide"
SGNLAVPFKAQ

SEQ ID NO: 1305 - protein, 11 aa, Artificial Sequence
  source: /note="Description of Artificial Sequence: Synthetic peptide"
EGTLAVPFKAQ

SEQ ID NO: 1306 - protein, 11 aa, Artificial Sequence
  source: /note="Description of Artificial Sequence: Synthetic peptide"
DSTLAVPFKAQ

SEQ ID NO: 1307 - protein, 11 aa, Artificial Sequence
  source: /note="Description of Artificial Sequence: Synthetic peptide"
AVTLAVPFKAQ

SEQ ID NO: 1308 - protein, 11 aa, Artificial Sequence
  source: /note="Description of Artificial Sequence: Synthetic peptide"
AQTLSTPFKAQ

SEQ ID NO: 1309 - protein, 11 aa, Artificial Sequence
  source: /note="Description of Artificial Sequence: Synthetic peptide"
AQTLPQPFKAQ

SEQ ID NO: 1310 - protein, 11 aa, Artificial Sequence
  source: /note="Description of Artificial Sequence: Synthetic peptide"
AQTLSQPFKAQ

SEQ ID NO: 1311 - protein, 11 aa, Artificial Sequence
  source: /note="Description of Artificial Sequence: Synthetic peptide"
AQTLQLPFKAQ

SEQ ID NO: 1312 - protein, 11 aa, Artificial Sequence
  source: /note="Description of Artificial Sequence: Synthetic peptide"
AQTLTMPFKAQ

SEQ ID NO: 1313 - protein, 11 aa, Artificial Sequence
  source: /note="Description of Artificial Sequence: Synthetic peptide"
AQTLTTPFKAQ

SEQ ID NO: 1314 - protein, 11 aa, Artificial Sequence
  source: /note="Description of Artificial Sequence: Synthetic peptide"
AQYTLSQGWAQ

SEQ ID NO: 1315 - protein, 11 aa, Artificial Sequence
  source: /note="Description of Artificial Sequence: Synthetic peptide"
AQMNATKNVAQ

SEQ ID NO: 1316 - protein, 11 aa, Artificial Sequence
  source: /note="Description of Artificial Sequence: Synthetic peptide"
AQVSGGHHSAQ

SEQ ID NO: 1317 - protein, 11 aa, Artificial Sequence
  source: /note="Description of Artificial Sequence: Synthetic peptide"
AQTLTAPFKAQ

SEQ ID NO: 1318 - protein, 11 aa, Artificial Sequence
  source: /note="Description of Artificial Sequence: Synthetic peptide"
AQTLSKPFKAQ

SEQ ID NO: 1319 - protein, 7 aa, Artificial Sequence
  source: /note="Description of Artificial Sequence: Synthetic peptide"
QAVRTSL

SEQ ID NO: 1320 - protein, 7 aa, Artificial Sequence
  source: /note="Description of Artificial Sequence: Synthetic peptide"
LAKERLS

SEQ ID NO: 1321 - protein, 7 aa, Artificial Sequence
  source: /note="Description of Artificial Sequence: Synthetic peptide"
MNSTKNV

SEQ ID NO: 1322 - protein, 7 aa, Artificial Sequence
  source: /note="Description of Artificial Sequence: Synthetic peptide"
VSGGHHS

SEQ ID NO: 1323 - protein, 14 aa, Artificial Sequence
  source: /note="Description of Artificial Sequence: Synthetic peptide"
SAQTLAVPFKAQAQ

SEQ ID NO: 1324 - protein, 14 aa, Artificial Sequence
  source: /note="Description of Artificial Sequence: Synthetic peptide"
  MOD_RES (2)..(4): Any amino acid
SXXXLAVPFKAQAQ

SEQ ID NO: 1325 - protein, 14 aa, Artificial Sequence
  source: /note="Description of Artificial Sequence: Synthetic peptide"
  MOD_RES (4)..(6): Any amino acid
SAQXXXVPFKAQAQ

SEQ ID NO: 1326 - protein, 14 aa, Artificial Sequence
  source: /note="Description of Artificial Sequence: Synthetic peptide"
  MOD_RES (6)..(8): Any amino acid
SAQTLXXXFKAQAQ

SEQ ID NO: 1327 - protein, 14 aa, Artificial Sequence
  source: /note="Description of Artificial Sequence: Synthetic peptide"
  MOD_RES (8)..(10): Any amino acid
SAQTLAVXXXAQAQ

SEQ ID NO: 1328 - protein, 14 aa, Artificial Sequence
  source: /note="Description of Artificial Sequence: Synthetic peptide"
  MOD_RES (10)..(12): Any amino acid
SAQTLAVPFXXXAQ

SEQ ID NO: 1329 - protein, 7 aa, Artificial Sequence
  source: /note="Description of Artificial Sequence: Synthetic peptide"
TNHQSAQ

SEQ ID NO: 1330 - protein, 7 aa, Artificial Sequence
  source: /note="Description of Artificial Sequence: Synthetic peptide"
AQAQTGW

SEQ ID NO: 1331 - protein, 9 aa, Artificial Sequence
  source: /note="Description of Artificial Sequence: Synthetic peptide"
DGTLATPFK

SEQ ID NO: 1332 - protein, 11 aa, Artificial Sequence
  source: /note="Description of Artificial Sequence: Synthetic peptide"
  MOD_RES (10)..(11): Any amino acid
DGTLATPFKXX

SEQ ID NO: 1333 - protein, 8 aa, Artificial Sequence
  source: /note="Description of Artificial Sequence: Synthetic peptide"
LAVPFKAQ

SEQ ID NO: 1334 - protein, 6 aa, Artificial Sequence
  source: /note="Description of Artificial Sequence: Synthetic peptide"
VPFKAQ

SEQ ID NO: 1335 - protein, 4 aa, Artificial Sequence
  source: /note="Description of Artificial Sequence: Synthetic peptide"
FKAQ

SEQ ID NO: 1336 - protein, 6 aa, Artificial Sequence
  source: /note="Description of Artificial Sequence: Synthetic peptide"
AQTLAV

SEQ ID NO: 1337 - protein, 8 aa, Artificial Sequence
  source: /note="Description of Artificial Sequence: Synthetic peptide"
AQTLAVPF

SEQ ID NO: 1338 - protein, 4 aa, Artificial Sequence
  source: /note="Description of Artificial Sequence: Synthetic peptide"
QAVR

SEQ ID NO: 1339 - protein, 4 aa, Artificial Sequence
  source: /note="Description of Artificial Sequence: Synthetic peptide"
AVRT

SEQ ID NO: 1340 - protein, 4 aa, Artificial Sequence
  source: /note="Description of Artificial Sequence: Synthetic peptide"
VRTS

SEQ ID NO: 1341 - protein, 4 aa, Artificial Sequence
  source: /note="Description of Artificial Sequence: Synthetic peptide"
RTSL

SEQ ID NO: 1342 - protein, 5 aa, Artificial Sequence
  source: /note="Description of Artificial Sequence: Synthetic peptide"
QAVRT

SEQ ID NO: 1343 - protein, 5 aa, Artificial Sequence
  source: /note="Description of Artificial Sequence: Synthetic peptide"
AVRTS

SEQ ID NO: 1344 - protein, 5 aa, Artificial Sequence
  source: /note="Description of Artificial Sequence: Synthetic peptide"
VRTSL

SEQ ID NO: 1345 - protein, 6 aa, Artificial Sequence
  source: /note="Description of Artificial Sequence: Synthetic peptide"
QAVRTS

SEQ ID NO: 1346 - protein, 6 aa, Artificial Sequence
  source: /note="Description of Artificial Sequence: Synthetic peptide"
AVRTSL

SEQ ID NO: 1347 - DNA, 33 bp, Artificial Sequence
  source: /note="Description of Artificial Sequence: Synthetic oligonucleotide"
gatgggactttggcggtgccttttaaggcacag

SEQ ID NO: 1348 - DNA, 33 bp, Artificial Sequence
  source: /note="Description of Artificial Sequence: Synthetic oligonucleotide"
gatgggacgttggcggtgccttttaaggcacag

SEQ ID NO: 1349 - DNA, 21 bp, Artificial Sequence
  source: /note="Description of Artificial Sequence: Synthetic oligonucleotide"
caggcggttaggacgtctttg

SEQ ID NO: 1350 - DNA, 27 bp, Artificial Sequence
  source: /note="Description of Artificial Sequence: Synthetic oligonucleotide"
caggtcttcacggactcagactatcag

SEQ ID NO: 1351 - DNA, 32 bp, Artificial Sequence
  source: /note="Description of Artificial Sequence: Synthetic oligonucleotide"
caagtaaaacctctacaaatgtggtaaaatcg

SEQ ID NO: 1352 - DNA, 36 bp, Artificial Sequence
  source: /note="Description of Artificial Sequence: Synthetic oligonucleotide"
actcatcgaccaatacttgtactatctctctagaac

SEQ ID NO: 1353 - DNA, 26 bp, Artificial Sequence
  source: /note="Description of Artificial Sequence: Synthetic oligonucleotide"
ggaagtattccttggttttgaaccca

SEQ ID NO: 1354 - DNA, 23 bp, Artificial Sequence
  source: /note="Description of Artificial Sequence: Synthetic oligonucleotide"
ggtcgcggttcttgtttgtggat

SEQ ID NO: 1355 - DNA, 24 bp, Artificial Sequence
  source: /note="Description of Artificial Sequence: Synthetic oligonucleotide"
cgaccttgaagcgcatgaactcct

SEQ ID NO: 1356 - DNA, 83 bp, Artificial Sequence
  source: /note="Description of Artificial Sequence: Synthetic oligonucleotide"
  modified_base (42)..(43): a, c, t, or g
  modified_base (45)..(46): a, c, t, or g
  modified_base (48)..(49): a, c, t, or g
  modified_base (51)..(52): a, c, t, or g
  modified_base (54)..(55): a, c, t, or g
  modified_base (57)..(58): a, c, t, or g
  modified_base (60)..(61): a, c, t, or g
gtattccttggttttgaacccaaccggtctgcgcctgtgcmnnmnnmnnmnnmnnmnnmnnttgggcactctggtggtttgtc

SEQ ID NO: 1357 - DNA, 64 bp, Artificial Sequence
  source: /note="Description of Artificial Sequence: Synthetic oligonucleotide"
  modified_base (36)..(37): a, c, t, or g
  modified_base (39)..(40): a, c, t, or g
  modified_base (42)..(43): a, c, t, or g
gtattccttggttttgaacccaaccggtctgcgcmnnmnnmnnaaaaggcaccgccaaagtttg

SEQ ID NO: 1358 - DNA, 70 bp, Artificial Sequence
  source: /note="Description of Artificial Sequence: Synthetic oligonucleotide"
  modified_base (42)..(43): a, c, t, or g
  modified_base (45)..(46): a, c, t, or g
  modified_base (48)..(49): a, c, t, or g
gtattccttggttttgaacccaaccggtctgcgcctgtgcmnnmnnmnncaccgccaaagtttgggcact

SEQ ID NO: 1359 - DNA, 77 bp, Artificial Sequence
  source: /note="Description of Artificial Sequence: Synthetic oligonucleotide"
  modified_base (48)..(49): a, c, t, or g
  modified_base (51)..(52): a, c, t, or g
  modified_base (54)..(55): a, c, t, or g
gtattccttggttttgaacccaaccggtctgcgcctgtgccttaaamnnmnnmnncaaagtttgggcactctggtgg

SEQ ID NO: 1360 - DNA, 83 bp, Artificial Sequence
  source: /note="Description of Artificial Sequence: Synthetic oligonucleotide"
  modified_base (54)..(55): a, c, t, or g
  modified_base (57)..(58): a, c, t, or g
  modified_base (60)..(61): a, c, t, or g
gtattccttggttttgaacccaaccggtctgcgcctgtgccttaaaaggcacmnnmnnmnnttgggcactctggtggtttgtg

SEQ ID NO: 1361 - DNA, 21 bp, Artificial Sequence
  source: /note="Description of Artificial Sequence: Synthetic oligonucleotide"
cttgcgaaggagcggctttcg

SEQ ID NO: 1362 - protein, 10 aa, Artificial Sequence
  source: /note="Description of Artificial Sequence: Synthetic peptide"
VNLTWSRASG

SEQ ID NO: 1363 - protein, 14 aa, Artificial Sequence
  source: /note="Description of Artificial Sequence: Synthetic peptide"
EFCINHRGYWVCGD

SEQ ID NO: 1364 - protein, 11 aa, Artificial Sequence
  source: /note="Description of Artificial Sequence: Synthetic peptide"
EDGQVMDVDLS

SEQ ID NO: 1365 - protein, 9 aa, Artificial Sequence
  source: /note="Description of Artificial Sequence: Synthetic peptide"
EKQRNGTLT

SEQ ID NO: 1366 - protein, 17 aa, Artificial Sequence
  source: /note="Description of Artificial Sequence: Synthetic peptide"
TYQCRVTHPHLPRALMR

SEQ ID NO: 1367 - protein, 14 aa, Artificial Sequence
  source: /note="Description of Artificial Sequence: Synthetic peptide"
RHSTTQPRKTKGSG

SEQ ID NO: 1368 - protein, 13 aa, Artificial Sequence
  source: /note="Description of Artificial Sequence: Synthetic peptide"
DSNPRGVSAYLSR

SEQ ID NO: 1369 - protein, 12 aa, Artificial Sequence
  source: /note="Description of Artificial Sequence: Synthetic peptide"
TITCLWDLAPSK

SEQ ID NO: 1370 - protein, 10 aa, Artificial Sequence
  source: /note="Description of Artificial Sequence: Synthetic peptide"
KTKGSGFFVF

SEQ ID NO: 1371 - protein, 12 aa, Artificial Sequence
  source: /note="Description of Artificial Sequence: Synthetic peptide"
THPHLPRALMRS

SEQ ID NO: 1372 - protein, 23 aa, Artificial Sequence
  source: /note="Description of Artificial Sequence: Synthetic peptide"
GETYQCRVTHPHLPRALMRSTTK

SEQ ID NO: 1373 - protein, 8 aa, Artificial Sequence
  source: /note="Description of Artificial Sequence: Synthetic peptide"
LPRALMRS

SEQ ID NO: 1374 - protein, 8 aa, Artificial Sequence
  source: /note="Description of Artificial Sequence: Synthetic peptide"
INHRGYWV

SEQ ID NO: 1375 - protein, 12 aa, Artificial Sequence
  source: /note="Description of Artificial Sequence: Synthetic peptide"
CDAGSVRTNAPD

SEQ ID NO: 1376 - protein, 17 aa, Artificial Sequence
  source: /note="Description of Artificial Sequence: Synthetic peptide"
AKAVSNLTESRSESLQS

SEQ ID NO: 1377 - protein, 13 aa, Artificial Sequence
  source: /note="Description of Artificial Sequence: Synthetic peptide"
SLTGDEFKKVLET

SEQ ID NO: 1378 - protein, 11 aa, Artificial Sequence
  source: /note="Description of Artificial Sequence: Synthetic peptide"
REAVAYRFEED

SEQ ID NO: 1379 - protein, 10 aa, Artificial Sequence
  source: /note="Description of Artificial Sequence: Synthetic peptide"
INPEIITLDG

SEQ ID NO: 1380 - protein, 15 aa, Artificial Sequence
  source: /note="Description of Artificial Sequence: Synthetic peptide"
DISVTGAPVITATYL

SEQ ID NO: 1381 - protein, 12 aa, Artificial Sequence
  source: /note="Description of Artificial Sequence: Synthetic peptide"
DISVTGAPVITA

SEQ ID NO: 1382 - protein, 17 aa, Artificial Sequence
  source: /note="Description of Artificial Sequence: Synthetic peptide"
PKTVSNLTESSSESVQS

SEQ ID NO: 1383 - protein, 13 aa, Artificial Sequence
  source: /note="Description of Artificial Sequence: Synthetic peptide"
SLMGDEFKAVLET

SEQ ID NO: 1384 - protein, 11 aa, Artificial Sequence
  source: /note="Description of Artificial Sequence: Synthetic peptide"
QHSVAYTFEED

SEQ ID NO: 1385 - protein, 10 aa, Artificial Sequence
  source: /note="Description of Artificial Sequence: Synthetic peptide"
INPEIITRDG

SEQ ID NO: 1386 - protein, 15 aa, Artificial Sequence
  source: /note="Description of Artificial Sequence: Synthetic peptide"
DISLTGDPVITASYL

SEQ ID NO: 1387 - protein, 12 aa, Artificial Sequence
  source: /note="Description of Artificial Sequence: Synthetic peptide"
DISLTGDPVITA

SEQ ID NO: 1388 - protein, 11 aa, Artificial Sequence
  source: /note="Description of Artificial Sequence: Synthetic peptide"
DQSIDFEIDSA

SEQ ID NO: 1389 - protein, 20 aa, Artificial Sequence
  source: /note="Description of Artificial Sequence: Synthetic peptide"
KNVSEDLPLPTFSPTLLGDS

SEQ ID NO: 1390 - protein, 11 aa, Artificial Sequence
  source: /note="Description of Artificial Sequence: Synthetic peptide"
KNVSEDLPLPT

SEQ ID NO: 1391 - protein, 12 aa, Artificial Sequence
  source: /note="Description of Artificial Sequence: Synthetic peptide"
CDSGRVRTDAPD

SEQ ID NO: 1392 - protein, 14 aa, Artificial Sequence
  source: /note="Description of Artificial Sequence: Synthetic peptide"
FPEHLLVDFLQSLS

SEQ ID NO: 1393 - protein, 9 aa, Artificial Sequence
  source: /note="Description of Artificial Sequence: Synthetic peptide"
DAEFRHDSG

SEQ ID NO: 1394 - protein, 16 aa, Artificial Sequence
  source: /note="Description of Artificial Sequence: Synthetic peptide"
HYAAAQWDFGNTMCQL

SEQ ID NO: 1395 - protein, 13 aa, Artificial Sequence
  source: /note="Description of Artificial Sequence: Synthetic peptide"
YAAQWDFGNTMCQ

SEQ ID NO: 1396 - protein, 10 aa, Artificial Sequence
  source: /note="Description of Artificial Sequence: Synthetic peptide"
RSQKEGLHYT

SEQ ID NO: 1397 - protein, 19 aa, Artificial Sequence
  source: /note="Description of Artificial Sequence: Synthetic peptide"
SSRTPSDKPVAHWANPQAE

SEQ ID NO: 1398 - protein, 15 aa, Artificial Sequence
  source: /note="Description of Artificial Sequence: Synthetic peptide"
SRTPSDKPVAHWANP

SEQ ID NO: 1399 - protein, 9 aa, Artificial Sequence
  source: /note="Description of Artificial Sequence: Synthetic peptide"
SSRTPSDKP

SEQ ID NO: 1400 - protein, 14 aa, Artificial Sequence
  source: /note="Description of Artificial Sequence: Synthetic peptide"
NADGNVDYHMNSVP

SEQ ID NO: 1401 - protein, 11 aa, Artificial Sequence
  source: /note="Description of Artificial Sequence: Synthetic peptide"
DGNVDYHMNSV

SEQ ID NO: 1402 - protein, 16 aa, Artificial Sequence
  source: /note="Description of Artificial Sequence: Synthetic peptide"
RSFKEFLQSSLRALRQ

SEQ ID NO: 1403 - protein, 11 aa, Artificial Sequence
  source: /note="Description of Artificial Sequence: Synthetic peptide"
FKEFLQSSLRA

SEQ ID NO: 1404 - protein, 10 aa, Artificial Sequence
  source: /note="Description of Artificial Sequence: Synthetic peptide"
QMWAPQWGPD

SEQ ID NO: 1405 - protein, 6 aa, Artificial Sequence
  source: /note="Description of Artificial Sequence: Synthetic peptide"
RGNRQA

SEQ ID NO: 1406 - protein, 6 aa, Artificial Sequence
  source: /note="Description of Artificial Sequence: Synthetic peptide"
SSSTDP

SEQ ID NO: 1407 - protein, 6 aa, Artificial Sequence
  source: /note="Description of Artificial Sequence: Synthetic peptide"
SSNTAP

SEQ ID NO: 1408 - protein, 6 aa, Artificial Sequence
  source: /note="Description of Artificial Sequence: Synthetic peptide"
SNSNLP

SEQ ID NO: 1409 - protein, 6 aa, Artificial Sequence
  source: /note="Description of Artificial Sequence: Synthetic peptide"
SSTTAP

SEQ ID NO: 1410 - protein, 6 aa, Artificial Sequence
  source: /note="Description of Artificial Sequence: Synthetic peptide"
AANTAA

SEQ ID NO: 1411 - protein, 6 aa, Artificial Sequence
  source: /note="Description of Artificial Sequence: Synthetic peptide"
QQNTAP

SEQ ID NO: 1412 - protein, 6 aa, Artificial Sequence
  source: /note="Description of Artificial Sequence: Synthetic peptide"
SAQAQA

SEQ ID NO: 1413 - protein, 6 aa, Artificial Sequence
  source: /note="Description of Artificial Sequence: Synthetic peptide"
QANTGP

SEQ ID NO: 1414 - protein, 6 aa, Artificial Sequence
  source: /note="Description of Artificial Sequence: Synthetic peptide"
NATTAP

SEQ ID NO: 1415 - protein, 6 aa, Artificial Sequence
  source: /note="Description of Artificial Sequence: Synthetic peptide"
SSTAGP

SEQ ID NO: 1416 - protein, 6 aa, Artificial Sequence
  source: /note="Description of Artificial Sequence: Synthetic peptide"
QQNTAA

SEQ ID NO: 1417 - protein, 6 aa, Artificial Sequence
  source: /note="Description of Artificial Sequence: Synthetic peptide"
PSTAGP

SEQ ID NO: 1418 - protein, 6 aa, Artificial Sequence
  source: /note="Description of Artificial Sequence: Synthetic peptide"
NQNTAP

SEQ ID NO: 1419 - protein, 6 aa, Artificial Sequence
  source: /note="Description of Artificial Sequence: Synthetic peptide"
QAANAP

SEQ ID NO: 1420 - protein, 6 aa, Artificial Sequence
  source: /note="Description of Artificial Sequence: Synthetic peptide"
SIVGLP

SEQ ID NO: 1421 - protein, 6 aa, Artificial Sequence
  source: /note="Description of Artificial Sequence: Synthetic peptide"
AASTAA

SEQ ID NO: 1422 - protein, 6 aa, Artificial Sequence
  source: /note="Description of Artificial Sequence: Synthetic peptide"
SQNTTA

SEQ ID NO: 1423 - protein, 6 aa, Artificial Sequence
  source: /note="Description of Artificial Sequence: Synthetic peptide"
QQDTAP

SEQ ID NO: 1424 - protein, 6 aa, Artificial Sequence
  source: /note="Description of Artificial Sequence: Synthetic peptide"
QTNTGP

SEQ ID NO: 1425 - protein, 6 aa, Artificial Sequence
  source: /note="Description of Artificial Sequence: Synthetic peptide"
QTNGAP

SEQ ID NO: 1426 - protein, 6 aa, Artificial Sequence
  source: /note="Description of Artificial Sequence: Synthetic peptide"
QQNAAP

SEQ ID NO: 1427 - protein, 6 aa, Artificial Sequence
  source: /note="Description of Artificial Sequence: Synthetic peptide"
AANTQA

SEQ ID NO: 1428 - protein, 6 aa, Artificial Sequence
  source: /note="Description of Artificial Sequence: Synthetic peptide"
NGRAHA

SEQ ID NO: 1429 - protein, 7 aa, Artificial Sequence
  source: /note="Description of Artificial Sequence: Synthetic peptide"
QPEHSST

SEQ ID NO: 1430 - protein, 7 aa, Artificial Sequence
  source: /note="Description of Artificial Sequence: Synthetic peptide"
VNTANST

SEQ ID NO: 1431 - protein, 7 aa, Artificial Sequence
  source: /note="Description of Artificial Sequence: Synthetic peptide"
HGPMQKS

SEQ ID NO: 1432 - protein, 7 aa, Artificial Sequence
  source: /note="Description of Artificial Sequence: Synthetic peptide"
PHKPPLA

SEQ ID NO: 1433 - protein, 7 aa, Artificial Sequence
  source: /note="Description of Artificial Sequence: Synthetic peptide"
IKNNEMW

SEQ ID NO: 1434 - protein, 7 aa, Artificial Sequence
  source: /note="Description of Artificial Sequence: Synthetic peptide"
RNLDTPM

SEQ ID NO: 1435 - protein, 7 aa, Artificial Sequence
  source: /note="Description of Artificial Sequence: Synthetic peptide"
VDSHRQS

SEQ ID NO: 1436 - protein, 7 aa, Artificial Sequence
  source: /note="Description of Artificial Sequence: Synthetic peptide"
YDSKTKT

SEQ ID NO: 1437 - protein, 7 aa, Artificial Sequence
  source: /note="Description of Artificial Sequence: Synthetic peptide"
SQLPHQK

SEQ ID NO: 1438 - protein, 7 aa, Artificial Sequence
  source: /note="Description of Artificial Sequence: Synthetic peptide"
STMQQNT

SEQ ID NO: 1439 - protein, 7 aa, Artificial Sequence
  source: /note="Description of Artificial Sequence: Synthetic peptide"
TERYMTQ

SEQ ID NO: 1440 - protein, 7 aa, Artificial Sequence
  source: /note="Description of Artificial Sequence: Synthetic peptide"
DASLSTS

SEQ ID NO: 1441 - protein, 7 aa, Artificial Sequence
  source: /note="Description of Artificial Sequence: Synthetic peptide"
DLPNKKT

SEQ ID NO: 1442 - protein, 7 aa, Artificial Sequence
  source: /note="Description of Artificial Sequence: Synthetic peptide"
DLTAARL

SEQ ID NO: 1443 - protein, 7 aa, Artificial Sequence
  source: /note="Description of Artificial Sequence: Synthetic peptide"
EPHQFNY

SEQ ID NO: 1444 - protein, 7 aa, Artificial Sequence
  source: /note="Description of Artificial Sequence: Synthetic peptide"
EPQSNHT

SEQ ID NO: 1445 - protein, 7 aa, Artificial Sequence
  source: /note="Description of Artificial Sequence: Synthetic peptide"
MSSWPSQ

SEQ ID NO: 1446 - protein, 7 aa, Artificial Sequence
  source: /note="Description of Artificial Sequence: Synthetic peptide"
NPKHNAT

SEQ ID NO: 1447 - protein, 7 aa, Artificial Sequence
  source: /note="Description of Artificial Sequence: Synthetic peptide"
PDGMRTT

SEQ ID NO: 1448 - protein, 7 aa, Artificial Sequence
  source: /note="Description of Artificial Sequence: Synthetic peptide"
PNNNKTT

SEQ ID NO: 1449 - protein, 7 aa, Artificial Sequence
  source: /note="Description of Artificial Sequence: Synthetic peptide"
QSTTHDS

SEQ ID NO: 1450 - protein, 7 aa, Artificial Sequence
  source: /note="Description of Artificial Sequence: Synthetic peptide"
TGSKQKQ

SEQ ID NO: 1451 - protein, 7 aa, Artificial Sequence
  source: /note="Description of Artificial Sequence: Synthetic peptide"
SLKHQAL

SEQ ID NO: 1452 - protein, 7 aa, Artificial Sequence
  source: /note="Description of Artificial Sequence: Synthetic peptide"
SPIDGEQ

SEQ ID NO: 1453 - protein, 8 aa, Artificial Sequence
  source: /note="Description of Artificial Sequence: Synthetic peptide"
WIFPWIQL

SEQ ID NO: 1454 - protein, 9 aa, Artificial Sequence
  source: /note="Description of Artificial Sequence: Synthetic peptide"
CDCRGDCFC

SEQ ID NO: 1455 - protein, 5 aa, Artificial Sequence
  source: /note="Description of Artificial Sequence: Synthetic peptide"
CNGRC

SEQ ID NO: 1456 - protein, 7 aa, Artificial Sequence
  source: /note="Description of Artificial Sequence: Synthetic peptide"
CPRECES

SEQ ID NO: 1457 - protein, 10 aa, Artificial Sequence
  source: /note="Description of Artificial Sequence: Synthetic peptide"
CTTHWGFTLC

SEQ ID NO: 1458 - protein, 9 aa, Artificial Sequence
  source: /note="Description of Artificial Sequence: Synthetic peptide"
CGRRAGGSC

SEQ ID NO: 1459 - protein, 9 aa, Artificial Sequence
  source: /note="Description of Artificial Sequence: Synthetic peptide"
CKGGRAKDC

SEQ ID NO: 1460 - protein, 9 aa, Artificial Sequence
  source: /note="Description of Artificial Sequence: Synthetic peptide"
CVPELGHEC

SEQ ID NO: 1461 - protein, 9 aa, Artificial Sequence
  source: /note="Description of Artificial Sequence: Synthetic peptide"
CRRETAWAK

SEQ ID NO: 1462 - protein, 14 aa, Artificial Sequence
  source: /note="Description of Artificial Sequence: Synthetic peptide"
VSWFSHRYSPFAVS

SEQ ID NO: 1463 - protein, 13 aa, Artificial Sequence
  source: /note="Description of Artificial Sequence: Synthetic peptide"
GYRDGYAGPILYN

SEQ ID NO: 1464 - protein, 7 aa, Artificial Sequence
  source: /note="Description of Artificial Sequence: Synthetic peptide"
  MOD_RES (1)..(3): Any amino acid
  MOD_RES (5)..(7): Any amino acid
XXXYXXX

SEQ ID NO: 1465 - protein, 4 aa, Artificial Sequence
  source: /note="Description of Artificial Sequence: Synthetic peptide"
  MOD_RES (2)..(2): Any amino acid
YXNW

SEQ ID NO: 1466 - protein, 7 aa, Artificial Sequence
  source: /note="Description of Artificial Sequence: Synthetic peptide"
RPLPPLP

SEQ ID NO: 1467 - protein, 7 aa, Artificial Sequence
  source: /note="Description of Artificial Sequence: Synthetic peptide"
APPLPPR

SEQ ID NO: 1468 - protein, 12 aa, Artificial Sequence
  source: /note="Description of Artificial Sequence: Synthetic peptide"
DVFYPYPYASGS

SEQ ID NO: 1469 - protein, 6 aa, Artificial Sequence
  source: /note="Description of Artificial Sequence: Synthetic peptide"
MYWYPY

SEQ ID NO: 1470 - protein, 12 aa, Artificial Sequence
  source: /note="Description of Artificial Sequence: Synthetic peptide"
DITWDQLWDLMK

SEQ ID NO: 1471 - protein, 8 aa, Artificial Sequence
  source: /note="Description of Artificial Sequence: Synthetic peptide"
  MOD_RES (5)..(5): Any amino acid
CWDDXWLC

SEQ ID NO: 1472 - protein, 14 aa, Artificial Sequence
  source: /note="Description of Artificial Sequence: Synthetic peptide"
EWCEYLGGYLRCYA

SEQ ID NO: 1473 - protein, 14 aa, Artificial Sequence
  source: /note="Description of Artificial Sequence: Synthetic peptide"
  MOD_RES (2)..(2): Any amino acid
  MOD_RES (4)..(5): Any amino acid
  MOD_RES (8)..(8): Any amino acid
  MOD_RES (11)..(11): Any amino acid
  MOD_RES (13)..(13): Any amino acid
YXCXXGPXTWXCXP

SEQ ID NO: 1474 - protein, 14 aa, Artificial Sequence
  source: /note="Description of Artificial Sequence: Synthetic peptide"
IEGPTLRQWLAARA

SEQ ID NO: 1475 - protein, 5 aa, Artificial Sequence
  source: /note="Description of Artificial Sequence: Synthetic peptide"
  MOD_RES (3)..(5): Any amino acid
LWXXX

SEQ ID NO: 1476 - protein, 7 aa, Artificial Sequence
  source: /note="Description of Artificial Sequence: Synthetic peptide"
  MOD_RES (1)..(1): Any amino acid
  MOD_RES (3)..(4): Any amino acid
XFXXYLW

SEQ ID NO: 1477 - protein, 13 aa, Artificial Sequence
  source: /note="Description of Artificial Sequence: Synthetic peptide"
SSIISHFRWGLCD

SEQ ID NO: 1478 - protein, 13 aa, Artificial Sequence
  source: /note="Description of Artificial Sequence: Synthetic peptide"
MSRPACPPNDKYE

SEQ ID NO: 1479 - protein, 8 aa, Artificial Sequence
  source: /note="Description of Artificial Sequence: Synthetic peptide"
CLRSGRGC

SEQ ID NO: 1480 - protein, 9 aa, Artificial Sequence
  source: /note="Description of Artificial Sequence: Synthetic peptide"
CHWMFSPWC

SEQ ID NO: 1481 - protein, 4 aa, Artificial Sequence
  source: /note="Description of Artificial Sequence: Synthetic peptide"
  MOD_RES (2)..(3): Any amino acid
WXXF

SEQ ID NO: 1482 - protein, 8 aa, Artificial Sequence
  source: /note="Description of Artificial Sequence: Synthetic peptide"
CSSRLDAC

SEQ ID NO: 1483 - protein, 7 aa, Artificial Sequence
  source: /note="Description of Artificial Sequence: Synthetic peptide"
CLPVASC

SEQ ID NO: 1484 - protein, 13 aa, Artificial Sequence
  source: /note="Description of Artificial Sequence: Synthetic peptide"
CGFECVRQCPERC

SEQ ID NO: 1485 - protein, 13 aa, Artificial Sequence
  source: /note="Description of Artificial Sequence: Synthetic peptide"
CVALCREACGEGC

SEQ ID NO: 1486 - protein, 9 aa, Artificial Sequence
  source: /note="Description of Artificial Sequence: Synthetic peptide"
SWCEPGWCR

SEQ ID NO: 1487 - protein, 7 aa, Artificial Sequence
  source: /note="Description of Artificial Sequence: Synthetic peptide"
YSGKWGW

SEQ ID NO: 1488 - protein, 7 aa, Artificial Sequence
  source: /note="Description of Artificial Sequence: Synthetic peptide"
GLSGGRS

SEQ ID NO: 1489 - protein, 7 aa, Artificial Sequence
  source: /note="Description of Artificial Sequence: Synthetic peptide"
LMLPRAD

SEQ ID NO: 1490 - protein, 9 aa, Artificial Sequence
  source: /note="Description of Artificial Sequence: Synthetic peptide"
CSCFRDVCC

SEQ ID NO: 1491 - protein, 9 aa, Artificial Sequence
  source: /note="Description of Artificial Sequence: Synthetic peptide"
CRDVVSVIC

SEQ ID NO: 1492 - protein, 6 aa, Artificial Sequence
  source: /note="Description of Artificial Sequence: Synthetic peptide"
MARSGL

SEQ ID NO: 1493 - protein, 6 aa, Artificial Sequence
  source: /note="Description of Artificial Sequence: Synthetic peptide"
MARAKE

SEQ ID NO: 1494 - protein, 6 aa, Artificial Sequence
  source: /note="Description of Artificial Sequence: Synthetic peptide"
MSRTMS

SEQ ID NO: 1495 - protein, 6 aa, Artificial Sequence
  source: /note="Description of Artificial Sequence: Synthetic peptide"
KCCYSL

SEQ ID NO: 1496 - protein, 14 aa, Artificial Sequence
  source: /note="Description of Artificial Sequence: Synthetic peptide"
MYWGDSHWLQYWYE

SEQ ID NO: 1497 - protein, 7 aa, Artificial Sequence
  source: /note="Description of Artificial Sequence: Synthetic peptide"
MQLPLAT

SEQ ID NO: 1498 - protein, 4 aa, Artificial Sequence
  source: /note="Description of Artificial Sequence: Synthetic peptide"
EWLS

SEQ ID NO: 1499 - protein, 4 aa, Artificial Sequence
  source: /note="Description of Artificial Sequence: Synthetic peptide"
SNEW

SEQ ID NO: 1500 - protein, 4 aa, Artificial Sequence
  source: /note="Description of Artificial Sequence: Synthetic peptide"
TNYL

SEQ ID NO: 1501 - protein, 12 aa, Artificial Sequence
  source: /note="Description of Artificial Sequence: Synthetic peptide"
WDLAWMFRLPVG

SEQ ID NO: 1502 - protein, 13 aa, Artificial Sequence
  source: /note="Description of Artificial Sequence: Synthetic peptide"
CTVALPGGYVRVC

SEQ ID NO: 1503 - protein, 13 aa, Artificial Sequence
  source: /note="Description of Artificial Sequence: Synthetic peptide"
CVAYCIEHHCWTC

SEQ ID NO: 1504 - protein, 12 aa, Artificial Sequence
  source: /note="Description of Artificial Sequence: Synthetic peptide"
CVFAHNYDYLVC

SEQ ID NO: 1505 - protein, 10 aa, Artificial Sequence
  source: /note="Description of Artificial Sequence: Synthetic peptide"
CVFTSNYAFC

SEQ ID NO: 1506 - protein, 7 aa, Artificial Sequence
  source: /note="Description of Artificial Sequence: Synthetic peptide"
VHSPNKK

SEQ ID NO: 1507 - protein, 7 aa, Artificial Sequence
  source: /note="Description of Artificial Sequence: Synthetic peptide"
CRGDGWC

SEQ ID NO: 1508 - protein, 6 aa, Artificial Sequence
  source: /note="Description of Artificial Sequence: Synthetic peptide"
  MOD_RES (1)..(1): Any amino acid
  MOD_RES (6)..(6): Any amino acid
XRGCDX

SEQ ID NO: 1509 - protein, 4 aa, Artificial Sequence
  source: /note="Description of Artificial Sequence: Synthetic peptide"
  MOD_RES (2)..(4): Any amino acid
PXXX

SEQ ID NO: 1510 - protein, 11 aa, Artificial Sequence
  source: /note="Description of Artificial Sequence: Synthetic peptide"
SGKGPRQITAL

SEQ ID NO: 1511 - protein, 14 aa, Artificial Sequence
  source: /note="Description of Artificial Sequence: Synthetic peptide"
  MOD_RES (10)..(14): Any amino acid
AAAAAAAAAXXXXX

SEQ ID NO: 1512 - protein, 6 aa, Artificial Sequence
  source: /note="Description of Artificial Sequence: Synthetic peptide"
VYMSPF

SEQ ID NO: 1513 - protein, 7 aa, Artificial Sequence
  source: /note="Description of Artificial Sequence: Synthetic peptide"
ATWLPPR

SEQ ID NO: 1514 - protein, 12 aa, Artificial Sequence
  source: /note="Description of Artificial Sequence: Synthetic peptide"
HTMYYHHYQHHL

SEQ ID NO: 1515 - protein, 19 aa, Artificial Sequence
  source: /note="Description of Artificial Sequence: Synthetic peptide"
SEVGCRAGPLQWLCEKYFG

SEQ ID NO: 1516 - protein, 18 aa, Artificial Sequence
  source: /note="Description of Artificial Sequence: Synthetic peptide"
CGLLPVGRPDRNVWRWLC

SEQ ID NO: 1517 - protein, 15 aa, Artificial Sequence
  source: /note="Description of Artificial Sequence: Synthetic peptide"
CKGQCDRFKGLPWEC

SEQ ID NO: 1518 - protein, 5 aa, Artificial Sequence
  source: /note="Description of Artificial Sequence: Synthetic peptide"
SGRSA

SEQ ID NO: 1519 - protein, 4 aa, Artificial Sequence
  source: /note="Description of Artificial Sequence: Synthetic peptide"
WGFP

SEQ ID NO: 1520 - protein, 17 aa, Artificial Sequence
  source: /note="Description of Artificial Sequence: Synthetic peptide"
AEPMPHSLNFSQYLWYT

SEQ ID NO: 1521 - protein, 6 aa, Artificial Sequence
  source: /note="Description of Artificial Sequence: Synthetic peptide"
  MOD_RES (4)..(4): Any amino acid
WAYXSP

SEQ ID NO: 1522 - protein, 7 aa, Artificial Sequence
  source: /note="Description of Artificial Sequence: Synthetic peptide"
IELLQAR

SEQ ID NO: 1523 - protein, 16 aa, Artificial Sequence
  source: /note="Description of Artificial Sequence: Synthetic peptide"
AYTKCSRQWRTCMTTH

SEQ ID NO: 1524 - protein, 15 aa, Artificial Sequence
  source: /note="Description of Artificial Sequence: Synthetic peptide"
PQNSKIPGPTFLDPH

SEQ ID NO: 1525 - protein, 15 aa, Artificial Sequence
  source: /note="Description of Artificial Sequence: Synthetic peptide"
SMEPALPDWWWKMFK

SEQ ID NO: 1526 - protein, 16 aa, Artificial Sequence
  source: /note="Description of Artificial Sequence: Synthetic peptide"
ANTPCGPYTHDCPVKR

SEQ ID NO: 1527 - protein, 12 aa, Artificial Sequence
  source: /note="Description of Artificial Sequence: Synthetic peptide"
TACHQHVRMVRP

SEQ ID NO: 1528 - protein, 12 aa, Artificial Sequence
  source: /note="Description of Artificial Sequence: Synthetic peptide"
VPWMEPAYQRFL

SEQ ID NO: 1529 - protein, 8 aa, Artificial Sequence
  source: /note="Description of Artificial Sequence: Synthetic peptide"
DPRATPGS

SEQ ID NO: 1530 - protein, 12 aa, Artificial Sequence
  source: /note="Description of Artificial Sequence: Synthetic peptide"
FRPNRAQDYNTN

SEQ ID NO: 1531 - protein, 9 aa, Artificial Sequence
  source: /note="Description of Artificial Sequence: Synthetic peptide"
CTKNSYLMC

SEQ ID NO: 1532 - protein, 11 aa, Artificial Sequence
  source: /note="Description of Artificial Sequence: Synthetic peptide"
  MOD_RES (2)..(3): Any amino acid
  MOD_RES (5)..(7): Any amino acid
  MOD_RES (9)..(9): Any amino acid
CXXTXXXGXGC

SEQ ID NO: 1533 - protein, 9 aa, Artificial Sequence
  source: /note="Description of Artificial Sequence: Synthetic peptide"
CPIEDRPMC

SEQ ID NO: 1534 - protein, 12 aa, Artificial Sequence
  source: /note="Description of Artificial Sequence: Synthetic peptide"
HEWSYLAPYPWF

SEQ ID NO: 1535 - protein, 9 aa, Artificial Sequence
  source: /note="Description of Artificial Sequence: Synthetic peptide"
MCPKHPLGC

SEQ ID NO: 1536 - protein, 15 aa, Artificial Sequence
  source: /note="Description of Artificial Sequence: Synthetic peptide"
RMWPSSTVNLSAGRR

SEQ ID NO: 1537 - protein, 20 aa, Artificial Sequence
  source: /note="Description of Artificial Sequence: Synthetic peptide"
SAKTAVSQRVWLPSHRGGEP

SEQ ID NO: 1538 - protein, 20 aa, Artificial Sequence
  source: /note="Description of Artificial Sequence: Synthetic peptide"
KSREHVNNSACPSKRITAAL

SEQ ID NO: 1539 - protein, 4 aa, Artificial Sequence
  source: /note="Description of Artificial Sequence: Synthetic peptide"
EGFR

SEQ ID NO: 1540 - protein, 6 aa, Artificial Sequence
  source: /note="Description of Artificial Sequence: Synthetic peptide"
AGLGVR

SEQ ID NO: 1541 - protein, 15 aa, Artificial Sequence
  source: /note="Description of Artificial Sequence: Synthetic peptide"
GTRQGHTMRLGVSDG

SEQ ID NO: 1542 - protein, 15 aa, Artificial Sequence
  source: /note="Description of Artificial Sequence: Synthetic peptide"
IAGLATPGWSHWLAL

SEQ ID NO: 1543 - protein, 7 aa, Artificial Sequence
  source: /note="Description of Artificial Sequence: Synthetic peptide"
SMSIARL

SEQ ID NO: 1544 - protein, 7 aa, Artificial Sequence
  source: /note="Description of Artificial Sequence: Synthetic peptide"
HTFEPGV

SEQ ID NO: 1545 - protein, 15 aa, Artificial Sequence
  source: /note="Description of Artificial Sequence: Synthetic peptide"
NTSLKRISNKRIRRK

SEQ ID NO: 1546 - protein, 15 aa, Artificial Sequence
  source: /note="Description of Artificial Sequence: Synthetic peptide"
LRIKRKRRKRKKTRK

SEQ ID NO: 1547 - DNA, 21 bp, Adeno-associated virus 2
agcvvmdcaggarscascaac

SEQ ID NO: 1548 - protein, 7 aa, Artificial Sequence
  source: /note="Description of Artificial Sequence: Synthetic peptide"
SDSGASN

SEQ ID NO: 1549 - protein, 7 aa, Artificial Sequence
  source: /note="Description of Artificial Sequence: Synthetic peptide"
SPSGASN

SEQ ID NO: 1550 - protein, 7 aa, Artificial Sequence
  source: /note="Description of Artificial Sequence: Synthetic peptide"
SHSGASN

SEQ ID NO: 1551 - protein, 7 aa, Artificial Sequence
  source: /note="Description of Artificial Sequence: Synthetic peptide"
SRSGASN

SEQ ID NO: 1552 - protein, 7 aa, Artificial Sequence
  source: /note="Description of Artificial Sequence: Synthetic peptide"
SKSGASN

SEQ ID NO: 1553 - protein, 7 aa, Artificial Sequence
  source: /note="Description of Artificial Sequence: Synthetic peptide"
SNSGASN

SEQ ID NO: 1554 - protein, 7 aa, Artificial Sequence
  source: /note="Description of Artificial Sequence: Synthetic peptide"
SGSGASN

SEQ ID NO: 1555 - protein, 7 aa, Artificial Sequence
  source: /note="Description of Artificial Sequence: Synthetic peptide"
SASGASN

SEQ ID NO: 1556 - protein, 7 aa, Artificial Sequence
  source: /note="Description of Artificial Sequence: Synthetic peptide"
SESGTSN

SEQ ID NO: 1557 - protein, 7 aa, Artificial Sequence
  source: /note="Description of Artificial Sequence: Synthetic peptide"
STTGGSN

SEQ ID NO: 1558 - protein, 7 aa, Artificial Sequence
  source: /note="Description of Artificial Sequence: Synthetic peptide"
SSAGSTN

SEQ ID NO: 1559 - protein, 6 aa, Artificial Sequence
  source: /note="Description of Artificial Sequence: Synthetic peptide"
NNDSQA

SEQ ID NO: 1560 - protein, 6 aa, Artificial Sequence
  source: /note="Description of Artificial Sequence: Synthetic peptide"
NNRNQA

SEQ ID NO: 1561 - protein, 6 aa, Artificial Sequence
  source: /note="Description of Artificial Sequence: Synthetic peptide"
NNNKQA

SEQ ID NO: 1562 - protein, 6 aa, Artificial Sequence
  source: /note="Description of Artificial Sequence: Synthetic peptide"
NAKRQA

SEQ ID NO: 1563 - protein, 6 aa, Artificial Sequence
  source: /note="Description of Artificial Sequence: Synthetic peptide"
NDEHQA

SEQ ID NO: 1564 - protein, 6 aa, Artificial Sequence
  source: /note="Description of Artificial Sequence: Synthetic peptide"
NTSQKA

SEQ ID NO: 1565 - protein, 25 aa, Artificial Sequence
  source: /note="Description of Artificial Sequence: Synthetic peptide"
YYLSRTNTPSGTDTQSRLVFSQAGA

SEQ ID NO: 1566 - protein, 25 aa, Artificial Sequence
  source: /note="Description of Artificial Sequence: Synthetic peptide"
YYLSRTNTDSGTETQSGLDFSQAGA

SEQ ID NO: 1567 - protein, 25 aa, Artificial Sequence
  source: /note="Description of Artificial Sequence: Synthetic peptide"
YYLSRTNTESGTPTQSALEFSQAGA

SEQ ID NO: 1568 - protein, 25 aa, Artificial Sequence
  source: /note="Description of Artificial Sequence: Synthetic peptide"
YYLSRTNTHSGTHTQSPLHFSQAGA

SEQ ID NO: 1569 - protein, 25 aa, Artificial Sequence
  source: /note="Description of Artificial Sequence: Synthetic peptide"
YYLSRTNTSSGTITISHLIFSQAGA

SEQ ID NO: 1570 - protein, 25 aa, Artificial Sequence
  source: /note="Description of Artificial Sequence: Synthetic peptide"
YYLSRTNTRSGIMTKSSLMFSQAGA

SEQ ID NO: 1571 - protein, 25 aa, Artificial Sequence
  source: /note="Description of Artificial Sequence: Synthetic peptide"
YYLSRTNTKSGRKTLSNLSFSQAGA

SEQ ID NO: 1572 - protein, 25 aa, Artificial Sequence
  source: /note="Description of Artificial Sequence: Synthetic peptide"
YYLSRTNDGSGPVTPSKLRFSQRGA

SEQ ID NO: 1573 - protein, 25 aa, Artificial Sequence
  source: /note="Description of Artificial Sequence: Synthetic peptide"
YYLSRTNAASGHATHSDLKFSQPGA

SEQ ID NO: 1574 - protein, 25 aa, Artificial Sequence
  source: /note="Description of Artificial Sequence: Synthetic peptide"
YYLSRTNGQAGSLTMSELGFSQVGA

SEQ ID NO: 1575 - protein, 25 aa, Artificial Sequence
  source: /note="Description of Artificial Sequence: Synthetic peptide"
YYLSRTNSTGGNQTTSQLLFSQLSA

SEQ ID NO: 1576 - protein, 25 aa, Artificial Sequence
  source: /note="Description of Artificial Sequence: Synthetic peptide"
YFLSRTNNNTGLNTNSTLNFSQGRA

SEQ ID NO: 1577 - protein, 16 aa, Artificial Sequence
  source: /note="Description of Artificial Sequence: Synthetic peptide"
SKTGADNNNSEYSWTG

SEQ ID NO: 1578 - protein, 16 aa, Artificial Sequence
  source: /note="Description of Artificial Sequence: Synthetic peptide"
SKTDADNNNSEYSWTG

SEQ ID NO: 1579 - protein, 16 aa, Artificial Sequence
  source: /note="Description of Artificial Sequence: Synthetic peptide"
SKTEADNNNSEYSWTG

SEQ ID NO: 1580 - protein, 16 aa, Artificial Sequence
  source: /note="Description of Artificial Sequence: Synthetic peptide"
SKTPADNNNSEYSWTG

SEQ ID NO: 1581 - protein, 16 aa, Artificial Sequence
  source: /note="Description of Artificial Sequence: Synthetic peptide"
SKTHADNNNSEYSWTG

SEQ ID NO: 1582 - protein, 16 aa, Artificial Sequence
  source: /note="Description of Artificial Sequence: Synthetic peptide"
SKTQADNNNSEYSWTG

SEQ ID NO: 1583 - protein, 16 aa, Artificial Sequence
  source: /note="Description of Artificial Sequence: Synthetic peptide"
SKTIADNNNSEYSWTG

SEQ ID NO: 1584 - protein, 16 aa, Artificial Sequence
  source: /note="Description of Artificial Sequence: Synthetic peptide"
SKTMADNNNSEYSWTG

SEQ ID NO: 1585 - protein, 16 aa, Artificial Sequence
  source: /note="Description of Artificial Sequence: Synthetic peptide"
SKTRADNNNSEYSWTG

SEQ ID NO: 1586 - protein, 16 aa, Artificial Sequence
  source: /note="Description of Artificial Sequence: Synthetic peptide"
SKTNADNNNSEYSWTG

SEQ ID NO: 1587 - protein, 16 aa, Artificial Sequence
  source: /note="Description of Artificial Sequence: Synthetic peptide"
SKTVGRNNNSEYSWTG

SEQ ID NO: 1588 - protein, 16 aa, Artificial Sequence
  source: /note="Description of Artificial Sequence: Synthetic peptide"
SKTADRNNNSEYSWTG

SEQ ID NO: 1589 - protein, 16 aa, Artificial Sequence
  source: /note="Description of Artificial Sequence: Synthetic peptide"
SKKLSQNNNSKYSWQG

SEQ ID NO: 1590 - protein, 16 aa, Artificial Sequence
  source: /note="Description of Artificial Sequence: Synthetic peptide"
SKPTTGNNNSDYSWPG

SEQ ID NO: 1591 - protein, 16 aa, Artificial Sequence
  source: /note="Description of Artificial Sequence: Synthetic peptide"
STQKNENNNSNYSWPG

SEQ ID NO: 1592 - protein, 8 aa, Artificial Sequence
  source: /note="Description of Artificial Sequence: Synthetic peptide"
HKDDEGKF

SEQ ID NO: 1593 - protein, 8 aa, Artificial Sequence
  source: /note="Description of Artificial Sequence: Synthetic peptide"
HKDDNRKF

SEQ ID NO: 1594 - protein, 8 aa, Artificial Sequence
  source: /note="Description of Artificial Sequence: Synthetic peptide"
HKDDTNKF

SEQ ID NO: 1595 - protein, 8 aa, Artificial Sequence
  source: /note="Description of Artificial Sequence: Synthetic peptide"
HEDSDKNF

SEQ ID NO: 1596 - protein, 8 aa, Artificial Sequence
  source: /note="Description of Artificial Sequence: Synthetic peptide"
HRDGADSF

SEQ ID NO: 1597 - protein, 8 aa, Artificial Sequence
  source: /note="Description of Artificial Sequence: Synthetic peptide"
HGDNKSRF

SEQ ID NO: 1598 - protein, 14 aa, Artificial Sequence
  source: /note="Description of Artificial Sequence: Synthetic peptide"
KQGSEKTNVDFEEV

SEQ ID NO: 1599 - protein, 14 aa, Artificial Sequence
  source: /note="Description of Artificial Sequence: Synthetic peptide"
KQGSEKTNVDSEEV

SEQ ID NO: 1600 - protein, 14 aa, Artificial Sequence
  source: /note="Description of Artificial Sequence: Synthetic peptide"
KQGSEKTNVDVEEV

SEQ ID NO: 1601 - protein, 14 aa, Artificial Sequence
  source: /note="Description of Artificial Sequence: Synthetic peptide"
KQGSDKTNVDDAGV

SEQ ID NO: 1602 - protein, 14 aa, Artificial Sequence
  source: /note="Description of Artificial Sequence: Synthetic peptide"
KQGSSKTNVDPREV

SEQ ID NO: 1603 - protein, 14 aa, Artificial Sequence
  source: /note="Description of Artificial Sequence: Synthetic peptide"
KQGSRKTNVDHKQV

SEQ ID NO: 1604 - protein, 14 aa, Artificial Sequence
  source: /note="Description of Artificial Sequence: Synthetic peptide"
KQGSKGGNVDTNRV

SEQ ID NO: 1605 - protein, 14 aa, Artificial Sequence
  source: /note="Description of Artificial Sequence: Synthetic peptide"
KQGSGEANVDNGDV

SEQ ID NO: 1606 - protein, 14 aa, Artificial Sequence
  source: /note="Description of Artificial Sequence: Synthetic peptide"
KQDAAADNIDYDHV

SEQ ID NO: 1607 - protein, 14 aa, Artificial Sequence
  source: /note="Description of Artificial Sequence: Synthetic peptide"
KQSGTRSNAAASSV

SEQ ID NO: 1608 - protein, 14 aa, Artificial Sequence
  source: /note="Description of Artificial Sequence: Synthetic peptide"
KENTNTNDTELTNV

SEQ ID NO: 1609 - protein, 14 aa, Artificial Sequence
  source: /note="Description of Artificial Sequence: Synthetic peptide"
QRGNNVAATADVNT

SEQ ID NO: 1610 - protein, 14 aa, Artificial Sequence
  source: /note="Description of Artificial Sequence: Synthetic peptide"
QRGNNEAATADVNT

SEQ ID NO: 1611 - protein, 14 aa, Artificial Sequence
  source: /note="Description of Artificial Sequence: Synthetic peptide"
QRGNNPAATADVNT

SEQ ID NO: 1612 - protein, 14 aa, Artificial Sequence
  source: /note="Description of Artificial Sequence: Synthetic peptide"
QRGNNHAATADVNT

SEQ ID NO: 1613 - protein, 14 aa, Artificial Sequence
  source: /note="Description of Artificial Sequence: Synthetic peptide"
QEENNIAATPGVNT

SEQ ID NO: 1614 - protein, 14 aa, Artificial Sequence
  source: /note="Description of Artificial Sequence: Synthetic peptide"
QPPNNMAATHEVNT

SEQ ID NO: 1615 - protein, 14 aa, Artificial Sequence
  source: /note="Description of Artificial Sequence: Synthetic peptide"
QHHNNSAATTIVNT

SEQ ID NO: 1616 - protein, 14 aa, Artificial Sequence
  source: /note="Description of Artificial Sequence: Synthetic peptide"
QTTNNRAAFNMVET

SEQ ID NO: 1617 - protein, 14 aa, Artificial Sequence
  source: /note="Description of Artificial Sequence: Synthetic peptide"
QKKNNNAASKKVAT

SEQ ID NO: 1618 - protein, 14 aa, Artificial Sequence
  source: /note="Description of Artificial Sequence: Synthetic peptide"
QGGNNKAADDAVKT

SEQ ID NO: 1619 - protein, 14 aa, Artificial Sequence
  source: /note="Description of Artificial Sequence: Synthetic peptide"
QAAKGGAADDAVKT

SEQ ID NO: 1620 - protein, 14 aa, Artificial Sequence
  source: /note="Description of Artificial Sequence: Synthetic peptide"
QDDRAAAANESVDT

SEQ ID NO: 1621 - protein, 14 aa, Artificial Sequence
  source: /note="Description of Artificial Sequence: Synthetic peptide"
QQQHDDAAYQRVHT

SEQ ID NO: 1622 - protein, 14 aa, Artificial Sequence
  source: /note="Description of Artificial Sequence: Synthetic peptide"
QSSSSLAAVSTVQT

SEQ ID NO: 1623 - protein, 14 aa, Artificial Sequence
  source: /note="Description of Artificial Sequence: Synthetic peptide"
QNNQTTAAIRNVTT

SEQ ID NO: 1624 - protein, 12 aa, Artificial Sequence
  source: /note="Description of Artificial Sequence: Synthetic peptide"
NYNKKSDNVDFT

SEQ ID NO: 1625 - protein, 12 aa, Artificial Sequence
  source: /note="Description of Artificial Sequence: Synthetic peptide"
NYNKKSENVDFT

SEQ ID NO: 1626 - protein, 12 aa, Artificial Sequence
  source: /note="Description of Artificial Sequence: Synthetic peptide"
NYNKKSLNVDFT

SEQ ID NO: 1627 - protein, 12 aa, Artificial Sequence
  source: /note="Description of Artificial Sequence: Synthetic peptide"
NYNKKSPNVDFT

SEQ ID NO: 1628 - protein, 12 aa, Artificial Sequence
  source: /note="Description of Artificial Sequence: Synthetic peptide"
NYSKKSHCVDFT

SEQ ID NO: 1629 - protein, 11 aa, Artificial Sequence
  source: /note="Description of Artificial Sequence: Synthetic peptide"
NYRKTIYVDFT

SEQ ID NO: 1630 - protein, 11 aa, Artificial Sequence
  source: /note="Description of Artificial Sequence: Synthetic peptide"
NYKEKKDVHFT

SEQ ID NO: 1631 - protein, 11 aa, Artificial Sequence
  source: /note="Description of Artificial Sequence: Synthetic peptide"
NYGHRAIVQFT

SEQ ID NO: 1632 - protein, 11 aa, Artificial Sequence
  source: /note="Description of Artificial Sequence: Synthetic peptide"
NYANHQFVVCT

SEQ ID NO: 1633 - protein, 12 aa, Artificial Sequence
  source: /note="Description of Artificial Sequence: Synthetic peptide"
NYDDDPTGVLLT

SEQ ID NO: 1634 - protein, 11 aa, Artificial Sequence
  source: /note="Description of Artificial Sequence: Synthetic peptide"
NYDDPTGVLLT

SEQ ID NO: 1635 - protein, 11 aa, Artificial Sequence
  source: /note="Description of Artificial Sequence: Synthetic peptide"
NFEQQNSVEWT

SEQ ID NO: 1636 - protein, 7 aa, Artificial Sequence
  source: /note="Description of Artificial Sequence: Synthetic peptide"
SQSGASN

SEQ ID NO: 1637 - protein, 6 aa, Artificial Sequence
  source: /note="Description of Artificial Sequence: Synthetic peptide"
NNGSQA

SEQ ID NO: 1638 - protein, 25 aa, Artificial Sequence
  source: /note="Description of Artificial Sequence: Synthetic peptide"
YYLSRTNTPSGTTTWSRLQFSQAGA

SEQ ID NO: 1639 - protein, 16 aa, Artificial Sequence
  source: /note="Description of Artificial Sequence: Synthetic peptide"
SKTSADNNNSEYSWTG

SEQ ID NO: 1640 - protein, 8 aa, Artificial Sequence
  source: /note="Description of Artificial Sequence: Synthetic peptide"
HKDDEEKF

SEQ ID NO: 1641 - protein, 14 aa, Artificial Sequence
  source: /note="Description of Artificial Sequence: Synthetic peptide"
KQGSEKTNVDIEEV

SEQ ID NO: 1642 - protein, 14 aa, Artificial Sequence
  source: /note="Description of Artificial Sequence: Synthetic peptide"
QRGNNQAATADVNT

SEQ ID NO: 1643 - protein, 12 aa, Artificial Sequence
  source: /note="Description of Artificial Sequence: Synthetic peptide"
NYNKKSVNVDFT

SEQ ID NO: 1644 - protein, 42 aa, Artificial Sequence
  source: /note="Description of Artificial Sequence: Synthetic polypeptide"
SQSGASNYNTPSGTTTQSRLQFSTSADNNNSEYSWTGATKYH

SEQ ID NO: 1645 - protein, 42 aa, Artificial Sequence
  source: /note="Description of Artificial Sequence: Synthetic polypeptide"
SASGASNFNSEGGSLTQSSLGFSTDGENNNSDFSWTGATKYH

SEQ ID NO: 1646 - protein, 42 aa, Artificial Sequence
  source: /note="Description of Artificial Sequence: Synthetic polypeptide"
SQSGASNYNTPSGTTTQSRLQFSTDGENNNSDFSWTGATKYH

SEQ ID NO: 1647 - protein, 42 aa, Artificial Sequence
  source: /note="Description of Artificial Sequence: Synthetic polypeptide"
SASGASNYNTPSGTTTQSRLQFSTSADNNNSEFSWPGATTYH

SEQ ID NO: 1648 - protein, 42 aa, Artificial Sequence
  source: /note="Description of Artificial Sequence: Synthetic polypeptide"
SQSGASNFNSEGGSLTQSSLGFSTDGENNNSDFSWTGATKYH

SEQ ID NO: 1649 - protein, 42 aa, Artificial Sequence
  source: /note="Description of Artificial Sequence: Synthetic polypeptide"
SASGASNYNTPSGSLTQSSLGFSTDGENNNSDFSWTGATKYH

SEQ ID NO: 1650 - protein, 42 aa, Artificial Sequence
  source: /note="Description of Artificial Sequence: Synthetic polypeptide"
SQSGASNYNTPSGTTTQSRLQFSTSADNNNSDFSWTGATKYH

SEQ ID NO: 1651 - protein, 42 aa, Artificial Sequence
  source: /note="Description of Artificial Sequence: Synthetic polypeptide"
SGAGASNFNSEGGSLTQSSLGFSTDGENNNSDFSWTGATKYH

SEQ ID NO: 1652 - protein, 7 aa, Artificial Sequence
  source: /note="Description of Artificial Sequence: Synthetic peptide"
SGAGASN

SEQ ID NO: 1653 - protein, 15 aa, Artificial Sequence
  source: /note="Description of Artificial Sequence: Synthetic peptide"
NSEGGSLTQSSLGFS

SEQ ID NO: 1654 - protein, 11 aa, Artificial Sequence
  source: /note="Description of Artificial Sequence: Synthetic peptide"
TDGENNNSDFS

SEQ ID NO: 1655 - protein, 10 aa, Artificial Sequence
  source: /note="Description of Artificial Sequence: Synthetic peptide"
SEFSWPGATT

SEQ ID NO: 1656 - protein, 13 aa, Artificial Sequence
  source: /note="Description of Artificial Sequence: Synthetic peptide"
TSADNNNSDFSWT

SEQ ID NO: 1657 - protein, 8 aa, Artificial Sequence
  source: /note="Description of Artificial Sequence: Synthetic peptide"
SQSGASNY

SEQ ID NO: 1658 - protein, 15 aa, Artificial Sequence
  source: /note="Description of Artificial Sequence: Synthetic peptide"
NTPSGTTTQSRLQFS

SEQ ID NO: 1659 - protein, 19 aa, Artificial Sequence
  source: /note="Description of Artificial Sequence: Synthetic peptide"
TSADNNNSEYSWTGATKYH

SEQ ID NO: 1660 - protein, 8 aa, Artificial Sequence
  source: /note="Description of Artificial Sequence: Synthetic peptide"
SASGASNF

SEQ ID NO: 1661 - protein, 19 aa, Artificial Sequence
  source: /note="Description of Artificial Sequence: Synthetic peptide"
TDGENNNSDFSWTGATKYH

SEQ ID NO: 1662 - protein, 8 aa, Artificial Sequence
  source: /note="Description of Artificial Sequence: Synthetic peptide"
SASGASNY

SEQ ID NO: 1663 - protein, 19 aa, Artificial Sequence
  source: /note="Description of Artificial Sequence: Synthetic peptide"
TSADNNNSEFSWPGATTYH

SEQ ID NO: 1664 - protein, 15 aa, Artificial Sequence
  source: /note="Description of Artificial Sequence: Synthetic peptide"
NTPSGSLTQSSLGFS

SEQ ID NO: 1665 - protein, 19 aa, Artificial Sequence
  source: /note="Description of Artificial Sequence: Synthetic peptide"
TSADNNNSDFSWTGATKYH

SEQ ID NO: 1666 - protein, 8 aa, Artificial Sequence
  source: /note="Description of Artificial Sequence: Synthetic peptide"
SGAGASNF

SEQ ID NO: 1667 - DNA, 48 bp, Artificial Sequence
  source: /note="Description of Artificial Sequence: Synthetic oligonucleotide"
  modified_base (20)..(20): a, c, t, or g
  modified_base (35)..(35): a, c, t, or g
ctccagvvsvvsmrsrvcvnsgcagctdhcvvsrnsgtcvmsacacaa

SEQ ID NO: 1668 - DNA, 48 bp, Artificial Sequence
  source: /note="Description of Artificial Sequence: Synthetic oligonucleotide"
ctccagagaggcaacagacaagcagctaccgcagatgtcaacacacaa

SEQ ID NO: 1669 - protein, 7 aa, Artificial Sequence
  source: /note="Description of Artificial Sequence: Synthetic peptide"
SAAGASN

SEQ ID NO: 1670 - protein, 24 aa, Artificial Sequence
  source: /note="Description of Artificial Sequence: Synthetic peptide"
YFLSRTNTESGSTTQSTLRFSQAG

SEQ ID NO: 1671 - protein, 13 aa, Artificial Sequence
  source: /note="Description of Artificial Sequence: Synthetic peptide"
SKTSADNNNSDFS

SEQ ID NO: 1672 - protein, 14 aa, Artificial Sequence
  source: /note="Description of Artificial Sequence: Synthetic peptide"
KQGSEKTDVDIDKV

SEQ ID NO: 1673 - protein, 7 aa, Artificial Sequence
  source: /note="Description of Artificial Sequence: Synthetic peptide"
STAGASN

SEQ ID NO: 1674 - protein, 24 aa, Artificial Sequence
  source: /note="Description of Artificial Sequence: Synthetic peptide"
YFLSRTNTTSGIETQSTLRFSQAG

SEQ ID NO: 1675 - protein, 13 aa, Artificial Sequence
  source: /note="Description of Artificial Sequence: Synthetic peptide"
SKTDGENNNSDFS

SEQ ID NO: 1676 - protein, 14 aa, Artificial Sequence
  source: /note="Description of Artificial Sequence: Synthetic peptide"
KQGAAADDVEIDGV

SEQ ID NO: 1677 - protein, 7 aa, Artificial Sequence
  source: /note="Description of Artificial Sequence: Synthetic peptide"
SEAGASN

SEQ ID NO: 1678 - protein, 24 aa, Artificial Sequence
  source: /note="Description of Artificial Sequence: Synthetic peptide"
YYLSRTNTPSGTTTQSRLQFSQAG

SEQ ID NO: 1679 - protein, 13 aa, Artificial Sequence
  source: /note="Description of Artificial Sequence: Synthetic peptide"
SKTSADNNNSEYS

SEQ ID NO: 1680 - protein, 14 aa, Artificial Sequence
  source: /note="Description of Artificial Sequence: Synthetic peptide"
KQGSEKTNVDIEKV

SEQ ID NO: 1681 - protein, 24 aa, Artificial Sequence
  source: /note="Description of Artificial Sequence: Synthetic peptide"
YFLSRTNDASGSDTKSTLLFSQAG

SEQ ID NO: 1682 - protein, 13 aa, Artificial Sequence
  source: /note="Description of Artificial Sequence: Synthetic peptide"
STTPSENNNSEYS

SEQ ID NO: 1683 - protein, 7 aa, Artificial Sequence
  source: /note="Description of Artificial Sequence: Synthetic peptide"
SAAGATN

SEQ ID NO: 1684 - protein, 24 aa, Artificial Sequence
  source: /note="Description of Artificial Sequence: Synthetic peptide"
YFLSRTNGEAGSATLSELRFSQAG

SEQ ID NO: 1685 - protein, 8 aa, Artificial Sequence
  source: /note="Description of Artificial Sequence: Synthetic peptide"
HGDDADRF

SEQ ID NO: 1686 - protein, 14 aa, Artificial Sequence
  source: /note="Description of Artificial Sequence: Synthetic peptide"
KQGAEKSDVEVDRV

SEQ ID NO: 1687 - protein, 14 aa, Artificial Sequence
  source: /note="Description of Artificial Sequence: Synthetic peptide"
KQDSGGDNIDIDQV

SEQ ID NO: 1688 - protein, 7 aa, Artificial Sequence
  source: /note="Description of Artificial Sequence: Synthetic peptide"
SDAGASN

SEQ ID NO: 1689 - protein, 24 aa, Artificial Sequence
  source: /note="Description of Artificial Sequence: Synthetic peptide"
YFLSRTNTEGGHDTQSTLRFSQAG

SEQ ID NO: 1690 - protein, 14 aa, Artificial Sequence
  source: /note="Description of Artificial Sequence: Synthetic peptide"
KEDGGGSDVAIDEV

SEQ ID NO: 1691 - protein, 7 aa, Artificial Sequence
  source: /note="Description of Artificial Sequence: Synthetic peptide"
SNAGASN

SEQ ID NO: 1692 - protein, 24 aa, Artificial Sequence
  source: /note="Description of Artificial Sequence: Synthetic peptide"
YFLSRTNGEAGSATLSELRFSQPG

SEQ ID NO: 1693 - DNA, 21 bp, Artificial Sequence
  source: /note="Description of Artificial Sequence: Synthetic oligonucleotide"
agcvvmdcaggarscascaac

SEQ ID NO: 1694 - DNA, 18 bp, Artificial Sequence
  source: /note="Description of Artificial Sequence: Synthetic oligonucleotide"
aacracrrsmrsmaggca

SEQ ID NO: 1695 - DNA, 24 bp, Artificial Sequence
  source: /note="Description of Artificial Sequence: Synthetic oligonucleotide"
cacrrggacrrcrmsrrsarsttt

SEQ ID NO: 1696 - DNA, 75 bp, Artificial Sequence
  source: /note="Description of Artificial Sequence: Synthetic oligonucleotide"
  modified_base (35)..(35): a, c, t, or g
tatttcttgagcagaacaaacrvcvvsrscggamncvhsacgmhstcavvscttvdsttttctcagsbcrgsgcg

SEQ ID NO: 1697 - DNA, 48 bp, Artificial Sequence
  source: /note="Description of Artificial Sequence: Synthetic oligonucleotide"
  modified_base (11)..(11): a, c, t, or g
tcaamammavnsrvcsrsaacaacaacagtrasttctcgtggmmagga

SEQ ID NO: 1698 - DNA, 42 bp, Artificial Sequence
  source: /note="Description of Artificial Sequence: Synthetic oligonucleotide"
  modified_base (31)..(31): a, c, t, or g
aagsaarrcrscrvsrvarvcratrycgmsnhcrvmvrsgtc

SEQ ID NO: 1699 - DNA, 42 bp, Artificial Sequence
  source: /note="Description of Artificial Sequence: Synthetic oligonucleotide"
  modified_base (17)..(17): a, c, t, or g
  modified_base (32)..(32): a, c, t, or g
cagvvsvvsmrsrvcvnsgcagctdhcvvsrnsgtcvmsaca

SEQ ID NO: 1700 - DNA, 33 bp, Artificial Sequence
  source: /note="Description of Artificial Sequence: Synthetic oligonucleotide"
aactwcrvsvasmvsvhsddtgtgswstksact

SEQ ID NO: 1701 - DNA, 30 bp, Artificial Sequence
  source: /note="Description of Artificial Sequence: Synthetic oligonucleotide"
ttgttgaacatcaccacgtgacgcacgttc

SEQ ID NO: 1702 - DNA, 30 bp, Artificial Sequence
  source: /note="Description of Artificial Sequence: Synthetic oligonucleotide"
tccccgtggttctactacataatgtggccg

SEQ ID NO: 1703 - DNA, 30 bp, Artificial Sequence
  source: /note="Description of Artificial Sequence: Synthetic oligonucleotide"
ttccacactccgttttggataatgttgaac

SEQ ID NO: 1704 - DNA, 30 bp, Artificial Sequence
  source: /note="Description of Artificial Sequence: Synthetic oligonucleotide"
agggacatccccagctccatgctgtggtcg

SEQ ID NO: 1705 - DNA, 30 bp, Artificial Sequence
  source: /note="Description of Artificial Sequence: Synthetic oligonucleotide"
agggacaacccctccgactcgccctaatcc

SEQ ID NO: 1706 - DNA, 30 bp, Artificial Sequence
  source: /note="Description of Artificial Sequence: Synthetic oligonucleotide"
tcctagtagaagacaccctctcactgcccg

SEQ ID NO: 1707 - DNA, 30 bp, Artificial Sequence
  source: /note="Description of Artificial Sequence: Synthetic oligonucleotide"
agtaccatgtacacccactctcccagtgcc

SEQ ID NO: 1708 - DNA, 30 bp, Artificial Sequence
  source: /note="Description of Artificial Sequence: Synthetic oligonucleotide"
atatggacgttcatgctgatcaccataccg

SEQ ID NO: 1709 - DNA, 30 bp, Artificial Sequence
  source: /note="Description of Artificial Sequence: Synthetic oligonucleotide"
agcaggagctccttggcctcagcgtgcgag

SEQ ID NO: 1710 - DNA, 30 bp, Artificial Sequence
  source: /note="Description of Artificial Sequence: Synthetic oligonucleotide"
acaagcagcttcactatgacaaccactgac

SEQ ID NO: 1711 - DNA, 284 bp, Artificial Sequence
  source: /note="Description of Artificial Sequence: Synthetic polynucleotide"
  modified_base (59)..(59): a, c, t, g, unknown or other
  modified_base (244)..(244): a, c, t, g, unknown or other
cagcctaggaactggcttcctggaccctgttaccgccagcagagagtctcaamammavnsrvcsrsaacaacaacagtrasttctcctggmmaggagctaccaagtaccacctcaatggcagagactctctggtgaatcccggaccagctatggcaagccacrrggacrrcrmsrrsarsttttttcctcagagcggggttctcatctttgggaagsaarrcrscrvsrvarvcratrycgmsnhcrvmvrsgtcatgattacagacgaagaggagatctggac

SEQ ID NO: 1712 - DNA, 34 bp, Artificial Sequence
  source: /note="Description of Artificial Sequence: Synthetic oligonucleotide"
tgggacaatggcggtcgtctctcagagttktkkt

SEQ ID NO: 1713 - DNA, 35 bp, Artificial Sequence
  source: /note="Description of Artificial Sequence: Synthetic oligonucleotide"
agaggacckktcctcgatggttcatggtggagtta

SEQ ID NO: 1714 - DNA, 31 bp, Artificial Sequence
  source: /note="Description of Artificial Sequence: Synthetic oligonucleotide"
ccacttagggcctggtcgataccgttcggtg

SEQ ID NO: 1715 - DNA, 32 bp, Artificial Sequence
  source: /note="Description of Artificial Sequence: Synthetic oligonucleotide"
tctcgccccaagagtagaaacccttcsttyyg

SEQ ID NO: 1716 - protein, 735 aa, Adeno-associated virus 2 [sequence omitted]

SEQ ID NO: 1717 - protein, 736 aa, Adeno-associated virus 9; identical to SEQ ID NO: 132

SEQ ID NO: 1718 - protein, 7 aa, Artificial Sequence
  source: /note="Description of Artificial Sequence: Synthetic peptide"
GSTPPPM

SEQ ID NO: 1719 - protein, 7 aa, Artificial Sequence
  source: /note="Description of Artificial Sequence: Synthetic peptide"
GETRAPL

SEQ ID NO: 1720 - protein, 6 aa, Artificial Sequence
  source: /note="Description of Artificial Sequence: Synthetic peptide"
SPAKFA

SEQ ID NO: 1721 - protein, 6 aa, Artificial Sequence
  source: /note="Description of Artificial Sequence: Synthetic peptide"
NKDKLN

SEQ ID NO: 1722 - DNA, 2232 bp, Artificial Sequence
  source: /note="Description of Artificial Sequence: Synthetic polynucleotide"
atggctgccgatggttatcttccagattggctcgaggacaaccttagtgaaggaattcgcgagtggtgggctttgaaacctggagcccctcaacccaaggcaaatcaacaacatcaagacaacgctcgaggtcttgtgcttccgggttacaaataccttggacccggcaacggactcgacaagggggagccggtcaacgcagcagacgcggcggccctcgagcacgacaaggcctacgaccagcagctcaaggccggagacaacccgtacctcaagtacaaccacgccgacgccgagttccaggagcggctcaaagaagatacgtcttttgggggcaacctcgggcgagcagtcttccaggccaaaaagaggcttcttgaacctcttggtctggttgaggaagcggctaagacggctcctggaaagaagaggcctgtagagcagtctcctcaggaaccggactcctccgcgggtattggcaaatcgggtgcacagcccgctaaaaagagactcaatttcggtcagactggcgacacagagtcagtcccagaccctcaaccaatcggagaacctcccgcagccccctcaggtgtgggatctcttacaatggcttcaggtggtggcgcaccagtggcagacaataacgaaggtgccgatggagtgggtagttcctcgggaaattggcattgcgattcccaatggctgggggacagagtcatcaccaccagcacccgaacctgggccctgcccacctacaacaatcacctctacaagcaaatctccaacagcacatctggaggatcttcaaatgacaacgcctacttcggctacagcaccccctgggggtattttgacttcaacagattccactgccacttctcaccacgtgactggcagcgactcatcaacaacaactggggattccggcctaagcgactcaacttcaagctcttcaacattcaggtcaaagaggttacggacaacaatggagtcaagaccatcgccaataaccttaccagcacggtccaggtcttcacggactcagactatcagctcccgtacgtgctcgggtcggctcacgagggctgcctcccgccgttcccagcggacgttttcatgattcctcagtacgggtatctgacgcttaatgatggaagccaggccgtgggtcgttcgtccttttactgcctggaatatttcccgtcgcaaatgctaagaacgggtaacaacttccagttcagctacgagtttgagaacgtacctttccatagcagctacgctcacagccaaagcctggaccgactaatgaatccactcatcgaccaatacttgtactatctctcaaagactattaacggttctggacagaatcaacaaacgctaaaattcagtgtggccggacccagcaacatggctgtccagggaagaaactacatacctggacccagctaccgacaacaacgtgtctcaaccactgtgactcaaaacaacaacagcgaatttgcttggcctggagcttcttcttgggctctcaatggacgtaatagcttgatgaatcctggacctgctatggccagccacaaagaaggagaggaccgtttctttcctttgtctggatctttaatttttggcaaacaaggaactggaagagacaacgtggatgcggacaaagtcatgataaccaacgaagaagaaattaaaactactaacccggtagcaacggagtcctatggacaagtggccacaaaccaccagagtgatgggactttggcggtgccttttaaggcacaggcgcagaccggctgggttcaaaaccaaggaatacttccgggtatggtttggcaggacagagatgtgtacctgcaaggacccatttgggccaaaattcctcacacggacggcaactttcacccttctccgctgatgggagggtttggaatgaagcacccgcctcctcagatcctcatcaaaaacacacctgtacctgcggatcctccaacggccttcaacaaggacaagctgaactctttcatcacccagtattctactggccaagtcagcgtggagatcgagtgggagctgcagaaggaaaacagcaagcgctggaacccggagatccagtacacttccaactattacaagtctaataatgttgaatttgctgttaatactgaaggtgtatatagtgaaccccgccccattggcaccagatacctgactcgtaatctgtaa

SEQ ID NO: 1723 - DNA, 2232 bp, Artificial Sequence
  source: /note="Description of Artificial Sequence: Synthetic polynucleotide"
atggctgccgatggttatcttccagattggctcgaggacaaccttagtgaaggaattcgcgagtggtgggctttgaaacctggagcccctcaacccaaggcaaatcaacaacatcaagacaacgctcgaggtcttgtgcttccgggttacaaataccttggacccggcaacggactcgacaagggggagccggtcaacgcagcagacgcggcggccctcgagcacgacaaggcctacgaccagcagctcaaggccggagacaacccgtacctcaagtacaaccacgccgacgccgagttccaggagcggctcaaagaagatacgtcttttgggggcaacctcgggcgagcagtcttccaggccaaaaagaggcttcttgaacctcttggtctggttgaggaagcggctaagacggctcctggaaagaagaggcctgtagagcagtctcctcaggaaccggactcctccgcgggtattggcaaatcgggtgcacagcccgctaaaaagagactcaatttcggtcagactggcgacacagagtcagtcccagaccctcaaccaatcggagaacctcccgcagccccctcaggtgtgggatctcttacaatggcttcaggtggtggcgcaccagtggcagacaataacgaaggtgccgatggagtgggtagttcctcgggaaattggcattgcgattcccaatggctgggggacagagtcatcaccaccagcacccgaacctgggccctgcccacctacaacaatcacctctacaagcaaatctccaacagcacatctggaggatcttcaaatgacaacgcctacttcggctacagcaccccctgggggtattttgacttcaacagattccactgccacttctcaccacgtgactggcagcgactcatcaacaacaactggggattccggcctaagcgactcaacttcaagctcttcaacattcaggtcaaagaggttacggacaacaatggagtcaagaccatcgccaataaccttaccagcacggtccaggtcttcacggactcagactatcagctcccgtacgtgctcgggtcggctcacgagggctgcctcccgccgttcccagcggacgttttcatgattcctcagtacgggtatctgacgcttaatgatggaagccaggccgtgggtcgttcgtccttttactgcctggaatatttcccgtcgcaaatgctaagaacgggtaacaacttccagttcagctacgagtttgagaacgtacctttccatagcagctacgctcacagccaaagcctggaccgactaatgaatccactcatcgaccaatacttgtactatctctcaaagactattaacggttctggacagaatcaacaaacgctaaaattcagtgtggccggacccagcaacatggctgtccagggaagaaactacatacctggacccagctaccgacaacaacgtgtctcaaccactgtgactcaaaacaacaacagcgaatttgcttggcctggagcttcttcttgggctctcaatggacgtaatagcttgatgaatcctggacctgctatggccagccacaaagaaggagaggaccgtttctttcctttgtctggatctttaatttttggcaaacaaggaactggaagagacaacgtggatgcggacaaagtcatgataaccaacgaagaagaaattaaaactactaacccggtagcaacggagtcctatggacaagtggccacaaaccaccagagtgcccaaactttggcggtgccttttaaggcacaggcgcagaccggctgggttcaaaaccaaggaatacttccgggtatggtttggcaggacagagatgtgtacctgcaaggacccatttgggccaaaattcctcacacggacggcaactttcacccttctccgctgatgggagggtttggaatgaagcacccgcctcctcagatcctcatcaaaaacacacctgtacctgcggatcctccaacggccttcaacaaggacaagctgaactctttcatcacccagtattctactggccaagtcagcgtggagatcgagtgggagctgcagaaggaaaacagcaagcgctggaacccggagatccagtacacttccaactattacaagtctaataatgttgaatttgctgttaatactgaaggtgtatatagtgaaccccgccccattggcaccagatacctgactcgtaatctgtaa

SEQ ID NO: 1724 - DNA, 609 bp, Unknown
  source: /note="Description of Unknown: Linker sequence"
aattccgcccctctcccccccccccctctccctcccccccccctaacgttactggccgaagccgcttggaataaggccggtgtgcgtttgtctatatgttattttccaccatattgccgtcttttggcaatgtgagggcccggaaacctggccctgtcttcttgacgagcattcctaggggtctttcccctctcgccaaaggaatgcaaggtctgttgaatgtcgtgaaggaagcagttcctctggaagcttcttgaagacaaacaacgtctgtagcgaccctttgcaggcagcggaaccccccacctggcgacaggtgcctctgcggccaaaagccacgtgtataagatacacctgcaaaggcggcacaaccccagtgccacgttgtgagttggatagttgtggaaagagtcaaatggctctcctcaagcgtattcaacaaggggctgaaggatgcccagaaggtaccccattgtatgggatctgatctggggcctcggtgcacatgctttacatgtgtttagtcgaggttaaaaaaacgtctaggccccccgaaccacggggacgtggttttcctttgaaaaacacgatgataatatggccacaacc

SEQ ID NO: 1725 - DNA, 75 bp, Unknown
  source: /note="Description of Unknown: Linker sequence"
ggaagcggagtgaaacagactttgaattttgaccttctcaagttggcgggagacgtggagtccaaccctggacct

SEQ ID NO: 1726 - DNA, 66 bp, Unknown
  source: /note="Description of Unknown: Linker sequence"
ggaagcggagctactaacttcagcctgctgaagcaggctggagacgtggaggagaaccctggacct

SEQ ID NO: 1727 - DNA, 12 bp, Unknown
  source: /note="Description of Unknown: Linker sequence"
cgggccaagcgg

SEQ ID NO: 1728 - DNA, 75 bp, Unknown
  source: /note="Description of Unknown: Linker sequence"
ggcggaggtggctccggaggcggaggcagcggcggaggtgggtctggcggaggcgggtgcggcggaggtggctcc

SEQ ID NO: 1729 - DNA, 87 bp, Unknown
  source: /note="Description of Unknown: Linker sequence"
cgggccaagcggggaagcggagtgaaacagactttgaattttgaccttctcaagttggcgggagacgtggagtccaaccctggacct

SEQ ID NO: 1730 - DNA, 78 bp, Unknown
  source: /note="Description of Unknown: Linker sequence"
cgggccaagcggggaagcggagctactaacttcagcctgctgaagcaggctggagacgtggaggagaaccctggacct

SEQ ID NO: 1731 - DNA, 12 bp, Unknown
  source: /note="Description of Unknown: Linker sequence"
agaaagaggcga

SEQ ID NO: 1732 - DNA, 66 bp, Unknown
  source: /note="Description of Unknown: Linker sequence"
agaaagaggcgagagggcagaggaagtcttctaacatgcggtgacgtggaggagaatcccggccct

SEQ ID NO: 1733 - DNA, 18 bp, Unknown
  source: /note="Description of Unknown: Linker sequence"
tccggaggcggcggcagc

SEQ ID NO: 1734 - DNA, 45 bp, Unknown
  source: /note="Description of Unknown: Linker sequence"
ggtggtggtggtagcggcggcggcggctctggtggtggtggatcc

SEQ ID NO: 1735 - DNA, 54 bp, Unknown
  source: /note="Description of Unknown: Linker sequence"
gtggagaggaagtgctgcgtggagtgcccaccatgccctgcccctcctgtggcc

SEQ ID NO: 1736 - DNA, 108 bp, Unknown
  source: /note="Description of Unknown: Linker sequence"
gagctcaaaaccccacttggtgacacaactcacacatgcccacggtgcccagagcccaaatcttgtgacacacctcccccgtgcccacggtgcccagcacctgaactc

SEQ ID NO: 1737 - DNA, 153 bp, Unknown
  source: /note="Description of Unknown: Linker sequence"
gagctcaaaaccccacttggtgacacaactcacacatgcccacggtgcccagagcccaaatcttgtgacacacctcccccgtgcccacggtgcccagagcccaaatcttgtgacacacctcccccatgcccacggtgcccagcacctgaactc

SEQ ID NO: 1738 - DNA, 198 bp, Unknown
  source: /note="Description of Unknown: Linker sequence"
gagctcaaaaccccacttggtgacacaactcacacatgcccacggtgcccagagcccaaatcttgtgacacacctcccccgtgcccacggtgcccagagcccaaatcttgtgacacacctcccccatgcccacggtgcccagagcccaaatcttgtgacacacctcccccgtgcccaaggtgcccagcacctgaactc

SEQ ID NO: 1739 - DNA, 623 bp, Unknown
  source: /note="Description of Unknown: Linker sequence"
taacgaattccgcccctctcccccccccccctctccctcccccccccctaacgttactggccgaagccgcttggaataaggccggtgtgcgtttgtctatatgttattttccaccatattgccgtcttttggcaatgtgagggcccggaaacctggccctgtcttcttgacgagcattcctaggggtctttcccctctcgccaaaggaatgcaaggtctgttgaatgtcgtgaaggaagcagttcctctggaagcttcttgaagacaaacaacgtctgtagcgaccctttgcaggcagcggaaccccccacctggcgacaggtgcctctgcggccaaaagccacgtgtataagatacacctgcaaaggcggcacaaccccagtgccacgttgtgagttggatagttgtggaaagagtcaaatggctctcctcaagcgtattcaacaaggggctgaaggatgcccagaaggtaccccattgtatgggatctgatctggggcctcggtgcacatgctttacatgtgtttagtcgaggttaaaaaaacgtctaggccccccgaaccacggggacgtggttttcctttgaaaaacacgatgataatatggccacaaccgccgccacc

SEQ ID NO: 1740 - DNA, 45 bp, Unknown
  source: /note="Description of Unknown: Linker sequence"
gtgcccagggattgtggttgtaagccttgcatatgtacagtccca

SEQ ID NO: 1741 - DNA, 18 bp, Unknown
  source: /note="Description of Unknown: Linker sequence"
gtgcccagggattgtggt

SEQ ID NO: 1742 - DNA, 54 bp, Unknown
  source: /note="Description of Unknown: Linker sequence"
gagggcagaggaagtcttctaacatgcggtgacgtggaggagaatcccggccct

SEQ ID NO: 1743 - protein, 8 aa, Unknown
  source: /note="Description of Unknown: Linker sequence"
LWSLDTTP

SEQ ID NO: 1744 - protein, 4 aa, Unknown
  source: /note="Description of Unknown: Linker sequence"
MDGA

SEQ ID NO: 1745 - protein, 4 aa, Unknown
  source: /note="Description of Unknown: Linker sequence"
QGNY

SEQ ID NO: 1746 - protein, 4 aa, Unknown
  source: /note="Description of Unknown: Linker sequence"
RDGK

SEQ ID NO: 1747 - protein, 5 aa, Unknown
  source: /note="Description of Unknown: Linker sequence"
DLNVG

SEQ ID NO: 1748 - protein, 5 aa, Unknown
  source: /note="Description of Unknown: Linker sequence"
MATDE

SEQ ID NO: 1749 - protein, 6 aa, Unknown
  source: /note="Description of Unknown: Linker sequence"
LTGSGA

SEQ ID NO: 1750 - protein, 7 aa, Unknown
  source: /note="Description of Unknown: Linker sequence"
FAASGEL

SEQ ID NO: 1751 - protein, 7 aa, Unknown
  source: /note="Description of Unknown: Linker sequence"
FNNREEQ

SEQ ID NO: 1752 - protein, 7 aa, Unknown
  source: /note="Description of Unknown: Linker sequence"
GYMARNE

SEQ ID NO: 1753 - protein, 7 aa, Unknown
  source: /note="Description of Unknown: Linker sequence"
VGTEHAK

SEQ ID NO: 1754 - protein, 5 aa, Unknown
  source: /note="Description of Unknown: Linker sequence"
LNLDY

SEQ ID NO: 1755 - protein, 14 aa, Unknown
  source: /note="Description of Unknown: Linker sequence"
KDGVIKGYYAYINP

SEQ ID NO: 1756 - protein, 4 aa, Unknown
  source: /note="Description of Unknown: Linker sequence"
SKAQ

SEQ ID NO: 1757 - protein, 6 aa, Unknown
  source: /note="Description of Unknown: Linker sequence"
LFNASA

SEQ ID NO: 1758 - protein, 6 aa, Unknown
  source: /note="Description of Unknown: Linker sequence"
YQDGSV

SEQ ID NO: 1759 - protein, 7 aa, Unknown
  source: /note="Description of Unknown: Linker sequence"
IHPQSVI

SEQ ID NO: 1760 - protein, 5 aa, Unknown
  source: /note="Description of Unknown: Linker sequence"
KNPMD

SEQ ID NO: 1761 - protein, 7 aa, Unknown
  source: /note="Description of Unknown: Linker sequence"
LGSEVPL

SEQ ID NO: 1762 - protein, 14 aa, Unknown
  source: /note="Description of Unknown: Linker sequence"
LNVNNKVPNGATSM

SEQ ID NO: 1763 - protein, 5 aa, Unknown
  source: /note="Description of Unknown: Linker sequence"
TTDDL

SEQ ID NO: 1764 - protein, 6 aa, Unknown
  source: /note="Description of Unknown: Linker sequence"
AAGIRA

SEQ ID NO: 1765 - protein, 6 aa, Unknown
  source: /note="Description of Unknown: Linker sequence"
QAGVDC

SEQ ID NO: 1766 - protein, 6 aa, Unknown
  source: /note="Description of Unknown: Linker sequence"
YNPTDI

SEQ ID NO: 1767 - protein, 8 aa, Unknown
  source: /note="Description of Unknown: Linker sequence"
EFLPRDTG

SEQ ID NO: 1768 - protein, 9 aa, Unknown
  source: /note="Description of Unknown: Linker sequence"
GSGLPEQTD

SEQ ID NO: 1769 - protein, 5 aa, Unknown
  source: /note="Description of Unknown: Linker sequence"
YSSNV

SEQ ID NO: 1770 - protein, 6 aa, Unknown
  source: /note="Description of Unknown: Linker sequence"
KAGLNP

SEQ ID NO: 1771 - protein, 6 aa, Unknown
  source: /note="Description of Unknown: Linker sequence"
KEEGKF

SEQ ID NO: 1772 - protein, 6 aa, Unknown
  source: /note="Description of Unknown: Linker sequence"
VRGGIW

SEQ ID NO: 1773 - protein, 9 aa, Unknown
  source: /note="Description of Unknown: Linker sequence"
QRYLKPENK

SEQ ID NO: 1774 - protein, 6 aa, Unknown
  source: /note="Description of Unknown: Linker sequence"
EGVGEI

SEQ ID NO: 1775 - protein, 8 aa, Unknown
  source: /note="Description of Unknown: Linker sequence"
PVDPPEKW

SEQ ID NO: 1776 - protein, 9 aa, Unknown
  source: /note="Description of Unknown: Linker sequence"
AHPGVSIPT

SEQ ID NO: 1777 - protein, 15 aa, Unknown
  source: /note="Description of Unknown: Linker sequence"
FKDPELPRNTPKRSI

SEQ ID NO: 1778 - protein, 14 aa, Unknown
  source: /note="Description of Unknown: Linker sequence"
YLEGVERNPVGAGL

SEQ ID NO: 1779 - protein, 5 aa, Unknown
  source: /note="Description of Unknown: Linker sequence"
CPRCP

SEQ ID NO: 1780 - protein, 7 aa, Unknown
  source: /note="Description of Unknown: Linker sequence"
APPVAGP

SEQ ID NO: 1781 - protein, 8 aa, Unknown
  source: /note="Description of Unknown: Linker sequence"
APELLGGP

SEQ ID NO: 1782 - protein, 9 aa, Unknown
  source: /note="Description of Unknown: Linker sequence"
CCVECPPCP

SEQ ID NO: 1783 - protein, 12 aa, Unknown
  source: /note="Description of Unknown: Linker sequence"
ELKTPLGDTTHT

SEQ ID NO: 1784 - protein, 6 aa, Unknown
  source: /note="Description of Unknown: Linker sequence"
HNVDDV

SEQ ID NO: 1785 - protein, 6 aa, Unknown
  source: /note="Description of Unknown: Linker sequence"
AGQKDE

SEQ ID NO: 1786 - protein, 9 aa, Unknown
  source: /note="Description of Unknown: Linker sequence"
KLNLPILPT

SEQ ID NO: 1787 - protein, 9 aa, Unknown
  source: /note="Description of Unknown: Linker sequence"
SSPRVTNEG

SEQ ID NO: 1788 - protein, 17 aa, Unknown
  source: /note="Description of Unknown: Linker sequence"
KAAAALKGSDHRRATNV

SEQ ID NO: 1789 - protein, 4 aa, Unknown
  source: /note="Description of Unknown: Linker sequence"
KKRV

SEQ ID NO: 1790 - protein, 5 aa, Unknown
  source: /note="Description of Unknown: Linker sequence"
QLEVK

SEQ ID NO: 1791 - protein, 5 aa, Unknown
  source: /note="Description of Unknown: Linker sequence"
TNGRL

SEQ ID NO: 1792 - protein, 10 aa, Unknown
  source: /note="Description of Unknown: Linker sequence"
LYTPEIAENQ

SEQ ID NO: 1793 - protein, 4 aa, Unknown
  source: /note="Description of Unknown: Linker sequence"
NSEY

SEQ ID NO: 1794 - protein, 5 aa, Unknown
  source: /note="Description of Unknown: Linker sequence"
SMKDF

SEQ ID NO: 1795 - protein, 12 aa, Unknown
  source: /note="Description of Unknown: Linker sequence"
KDRWQERHILRP

SEQ ID NO: 1796 - protein, 14 aa, Unknown
  source: /note="Description of Unknown: Linker sequence"
DDPEGPVMPGSHSV

SEQ ID NO: 1797 - protein, 23 aa, Unknown
  source: /note="Description of Unknown: Linker sequence"
LCPSNPTCIYKYGDESSNSLPGH

SEQ ID NO: 1798 - protein, 35 aa, Unknown
  source: /note="Description of Unknown: Linker sequence"
LCEALQHNLPPFTPPPHTEDSVYPMPRVIFRMFDY

SEQ ID NO: 1799 - protein, 5 aa, Unknown
  source: /note="Description of Unknown: Linker sequence"
NMVTC

SEQ ID NO: 1800 - protein, 10 aa, Unknown
  source: /note="Description of Unknown: Linker sequence"
NLEEHLGKLN

SEQ ID NO: 1801 - protein, 4 aa, Unknown
  source: /note="Description of Unknown: Linker sequence"
QGAH

SEQ ID NO: 1802 - protein, 6 aa, Unknown
  source: /note="Description of Unknown: Linker sequence"
QRIPLY

SEQ ID NO: 1803 - protein, 8 aa, Unknown
  source: /note="Description of Unknown: Linker sequence"
QRKPLFYI

SEQ ID NO: 1804 - protein, 4 aa, Unknown
  source: /note="Description of Unknown: Linker sequence"
AGGR

SEQ ID NO: 1805 - protein, 6 aa, Unknown
  source: /note="Description of Unknown: Linker sequence"
YPYKGE

SEQ ID NO: 1806 - protein, 7 aa, Unknown
  source: /note="Description of Unknown: Linker sequence"
NHETGEL

SEQ ID NO: 1807 - protein, 8 aa, Unknown
  source: /note="Description of Unknown: Linker sequence"
TFELKTDV

SEQ ID NO: 1808 - protein, 25 aa, Unknown
  source: /note="Description of Unknown: Linker sequence"
ALGLPHSDVFRQAKDVAESDRGFSL

SEQ ID NO: 1809 - protein, 4 aa, Unknown
  source: /note="Description of Unknown: Linker sequence"
LKDW

SEQ ID NO: 1810 - protein, 4 aa, Unknown
  source: /note="Description of Unknown: Linker sequence"
WTGM

SEQ ID NO: 1811 - protein, 4 aa, Unknown
  source: /note="Description of Unknown: Linker sequence"
YNGL

SEQ ID NO: 1812 - protein, 5 aa, Unknown
  source: /note="Description of Unknown: Linker sequence"
DRPGE

SEQ ID NO: 1813 - protein, 5 aa, Unknown
  source: /note="Description of Unknown: Linker sequence"
LGVSI

SEQ ID NO: 1814 - protein, 5 aa, Unknown
  source: /note="Description of Unknown: Linker sequence"
RSTGR

SEQ ID NO: 1815 - protein, 5 aa, Unknown
  source: /note="Description of Unknown: Linker sequence"
YRMLP

SEQ ID NO: 1816 - protein, 5 aa, Unknown
  source: /note="Description of Unknown: Linker sequence"
YVNDF

SEQ ID NO: 1817 - protein, 6 aa, Unknown
  source: /note="Description of Unknown: Linker sequence"
EYGSPR

SEQ ID NO: 1818 - protein, 6 aa, Unknown
  source: /note="Description of Unknown: Linker sequence"
IDRGRV

SEQ ID NO: 1819 - protein, 7 aa, Unknown
  source: /note="Description of Unknown: Linker sequence"
RAADGQM

SEQ ID NO: 1820 - protein, 7 aa, Unknown
  source: /note="Description of Unknown: Linker sequence"
TKEKNNV

SEQ ID NO: 1821 - protein, 8 aa, Unknown
  source: /note="Description of Unknown: Linker sequence"
DQAGLGHE

SEQ ID NO: 1822 - protein, 8 aa, Unknown
  source: /note="Description of Unknown: Linker sequence"
FSQIKDAM

SEQ ID NO: 1823 - protein, 8 aa, Unknown
  source: /note="Description of Unknown: Linker sequence"
QAAPGKST

SEQ ID NO: 1824 - protein, 8 aa, Unknown
  source: /note="Description of Unknown: Linker sequence"
QLPAGATQ

SEQ ID NO: 1825 - protein, 9 aa, Unknown
  source: /note="Description of Unknown: Linker sequence"
AAKHPDMLT

SEQ ID NO: 1826 - protein, 9 aa, Unknown
  source: /note="Description of Unknown: Linker sequence"
LASKLPTGV

SEQ ID NO: 1827 - protein, 9 aa, Unknown
  source: /note="Description of Unknown: Linker sequence"
PNGLEDTPQ

SEQ ID NO: 1828 - protein, 9 aa, Unknown
  source: /note="Description of Unknown: Linker sequence"
QERLSGNQA

SEQ ID NO: 1829 - protein, 12 aa, Unknown
  source: /note="Description of Unknown: Linker sequence"
NGFGFAGRGQNT

SEQ ID NO: 1830 - protein, 14 aa, Unknown
  source: /note="Description of Unknown: Linker sequence"
RLPSSFLPDEDQGV

SEQ ID NO: 1831 - protein, 15 aa, Unknown
  source: /note="Description of Unknown: Linker sequence"
FNLPAIVELGTATGF

SEQ ID NO: 1832 - protein, 17 aa, Unknown
  source: /note="Description of Unknown: Linker sequence"
MLKPIAKGDHGEGKKGF

SEQ ID NO: 1833 - protein, 7 aa, Unknown
  source: /note="Description of Unknown: Linker sequence"
LAHLLPP

SEQ ID NO: 1834 - protein, 9 aa, Unknown
  source: /note="Description of Unknown: Linker sequence"
QAPEAGFEH

SEQ ID NO: 1835 - protein, 10 aa, Unknown
  source: /note="Description of Unknown: Linker sequence"
KDKFICDRPL

SEQ ID NO: 1836 - protein, 16 aa, Unknown
  source: /note="Description of Unknown: Linker sequence"
PVEFHNPLKGHVAEPH

SEQ ID NO: 1837 - protein, 16 aa, Unknown
  source: /note="Description of Unknown: Linker sequence"
QKTMPSAPAPDGLPSE

SEQ ID NO: 1838 - protein, 4 aa, Unknown
  source: /note="Description of Unknown: Linker sequence"
AGRV

SEQ ID NO: 1839 - protein, 6 aa, Unknown
  source: /note="Description of Unknown: Linker sequence"
AGHGFA

SEQ ID NO: 1840 - protein, 10 aa, Unknown
  source: /note="Description of Unknown: Linker sequence"
LPPGPGPFPG

SEQ ID NO: 1841 - protein, 11 aa, Unknown
  source: /note="Description of Unknown: Linker sequence"
IFGIGGGLLEY

SEQ ID NO: 1842 - protein, 15 aa, Unknown
  source: /note="Description of Unknown: Linker sequence"
AYYNFEDLPNNMDNI

SEQ ID NO: 1843 - protein, 10 aa, Unknown
  source: /note="Description of Unknown: Linker sequence"
MICTRSKPKC

SEQ ID NO: 1844 - protein, 6 aa, Unknown
  source: /note="Description of Unknown: Linker sequence"
QSSLDL

SEQ ID NO: 1845 - protein, 6 aa, Unknown
  source: /note="Description of Unknown: Linker sequence"
IPDGDE

SEQ ID NO: 1846 - protein, 15 aa, Unknown
  source: /note="Description of Unknown: Linker sequence"
PTNPVTGEIPTLSAL

SEQ ID NO: 1847 - protein, 9 aa, Unknown
  source: /note="Description of Unknown: Linker sequence"
GGPCRADIK

SEQ ID NO: 1848 - protein, 11 aa, Unknown
  source: /note="Description of Unknown: Linker sequence"
SGACSTDKPCG

SEQ ID NO: 1849 - protein, 11 aa, Unknown
  source: /note="Description of Unknown: Linker sequence"
EGSKTVPIADK

SEQ ID NO: 1850 - protein, 7 aa, Unknown
  source: /note="Description of Unknown: Linker sequence"
INGKKPE

SEQ ID NO: 1851 - protein, 8 aa, Unknown
  source: /note="Description of Unknown: Linker sequence"
ELPAYMSG

SEQ ID NO: 1852 - protein, 8 aa, Unknown
  source: /note="Description of Unknown: Linker sequence"
VTGTLDYG

SEQ ID NO: 1853 - protein, 15 aa, Unknown
  source: /note="Description of Unknown: Linker sequence"
AAEDAIEIHPGTPNV

SEQ ID NO: 1854 - protein, 21 aa, Unknown
  source: /note="Description of Unknown: Linker sequence"
LEFKMPADGRIWGSKYPRPTA

SEQ ID NO: 1855 - protein, 5 aa, Unknown
  source: /note="Description of Unknown: Linker sequence"
SDYDV

SEQ ID NO: 1856 - protein, 5 aa, Unknown
  source: /note="Description of Unknown: Linker sequence"
VGSGP

SEQ ID NO: 1857 - protein, 6 aa, Unknown
  source: /note="Description of Unknown: Linker sequence"
IDSQSA

SEQ ID NO: 1858 - protein, 6 aa, Unknown
  source: /note="Description of Unknown: Linker sequence"
NKRDAY

SEQ ID NO: 1859 - protein, 6 aa, Unknown
  source: /note="Description of Unknown: Linker sequence"
RKGIRT

SEQ ID NO: 1860 - protein, 7 aa, Unknown
  source: /note="Description of Unknown: Linker sequence"
MGERFGG

SEQ ID NO: 1861 - protein, 8 aa, Unknown
  source: /note="Description of Unknown: Linker sequence"
VDTGAEKR

SEQ ID NO: 1862 - protein, 10 aa, Unknown
  source: /note="Description of Unknown: Linker sequence"
TGGHPSKEAQ

SEQ ID NO: 1863 - protein, 10 aa, Unknown
  source: /note="Description of Unknown: Linker sequence"
VPAATEGGLH

SEQ ID NO: 1864 - protein, 18 aa, Unknown
  source: /note="Description of Unknown: Linker sequence"
VLDTVDIENYISVPKTEG

SEQ ID NO: 1865 - protein, 5 aa, Unknown
  source: /note="Description of Unknown: Linker sequence"
DLAYV

SEQ ID NO: 1866 - protein, 13 aa, Unknown
  source: /note="Description of Unknown: Linker sequence"
VVPPELKTKDHII

SEQ ID NO: 1867 - protein, 5 aa, Unknown
  source: /note="Description of Unknown: Linker sequence"
WKQHK

SEQ ID NO: 1868 - protein, 7 aa, Unknown
  source: /note="Description of Unknown: Linker sequence"
KIQGCSA

SEQ ID NO: 1869 - protein, 8 aa, Unknown
  source: /note="Description of Unknown: Linker sequence"
DVASGDGL

SEQ ID NO: 1870 - protein, 20 aa, Unknown
  source: /note="Description of Unknown: Linker sequence"
VSPWHRMSYFFNPVSNFISF

SEQ ID NO: 1871 - protein, 5 aa, Unknown
  source: /note="Description of Unknown: Linker sequence"
YDNDE

SEQ ID NO: 1872 - protein, 10 aa, Unknown
  source: /note="Description of Unknown: Linker sequence"
RNGDSRRPGL

SEQ ID NO: 1873 - protein, 4 aa, Unknown
  source: /note="Description of Unknown: Linker sequence"
VEET

SEQ ID NO: 1874 - protein, 6 aa, Unknown
  source: /note="Description of Unknown: Linker sequence"
AIQDIS

SEQ ID NO: 1875 - protein, 6 aa, Unknown
  source: /note="Description of Unknown: Linker sequence"
KLPITL

SEQ ID NO: 1876 - protein, 11 aa, Unknown
  source: /note="Description of Unknown: Linker sequence"
ADSAYITYAND

SEQ ID NO: 1877 - protein, 4 aa, Unknown
  source: /note="Description of Unknown: Linker sequence"
FGGV

SEQ ID NO: 1878 - protein, 4 aa, Unknown
  source: /note="Description of Unknown: Linker sequence"
YGIK

SEQ ID NO: 1879 - protein, 5 aa, Unknown
  source: /note="Description of Unknown: Linker sequence"
INFNS

SEQ ID NO: 1880 - protein, 5 aa, Unknown
  source: /note="Description of Unknown: Linker sequence"
YGRDH

SEQ ID NO: 1881 - protein, 6 aa, Unknown
  source: /note="Description of Unknown: Linker sequence"
GMSRTN

SEQ ID NO: 1882 - protein, 7 aa, Unknown
  source: /note="Description of Unknown: Linker sequence"
ASLGING

SEQ ID NO: 1883 - protein, 7 aa, Unknown
  source: /note="Description of Unknown: Linker sequence"
SAPRLQH

SEQ ID NO: 1884 - protein, 7 aa, Unknown
  source: /note="Description of Unknown: Linker sequence"
YIPDFGG

SEQ ID NO: 1885 - protein, 8 aa, Unknown
  source: /note="Description of Unknown: Linker sequence"
SLPNYLAP

SEQ ID NO: 1886 - protein, 9 aa, Unknown
  source: /note="Description of Unknown: Linker sequence"
LDGKFADNV

SEQ ID NO: 1887 - protein, 9 aa, Unknown
  source: /note="Description of Unknown: Linker sequence"
VINNVNADP

SEQ ID NO: 1888 - protein, 10 aa, Unknown
  source: /note="Description of Unknown: Linker sequence"
QTQHALEKLS

SEQ ID NO: 1889 - protein, 11 aa, Unknown
  source: /note="Description of Unknown: Linker sequence"
EGKVFKTRHTG

SEQ ID NO: 1890 - protein, 11 aa, Unknown
  source: /note="Description of Unknown: Linker sequence"
VKADSEGQPGP

SEQ ID NO: 1891 - protein, 12 aa, Unknown
  source: /note="Description of Unknown: Linker sequence"
RAFVYHPDIEDR

SEQ ID NO: 1892 - protein, 13 aa, Unknown
  source: /note="Description of Unknown: Linker sequence"
AFGDVDTADPLDP

SEQ ID NO: 1893 - protein, 13 aa, Unknown
  source: /note="Description of Unknown: Linker sequence"
LKTETHARGEGST

SEQ ID NO: 1894 - protein, 16 aa, Unknown
  source: /note="Description of Unknown: Linker sequence"
KNGPIDFQPREPFSAL

SEQ ID NO: 1895 - protein, 16 aa, Unknown
  source: /note="Description of Unknown: Linker sequence"
VINPGTDRNWTGHPFV

SEQ ID NO: 1896 - protein, 17 aa, Unknown
  source: /note="Description of Unknown: Linker sequence"
QITQEYFGFATHLAYQG

SEQ ID NO: 1897 - protein, 22 aa, Unknown
  source: /note="Description of Unknown: Linker sequence"
NHWDNLNRVVERGYAGLSLWDW

SEQ ID NO: 1898 - protein, 15 aa, Unknown
  source: /note="Description of Unknown: Linker sequence"
VGSLVSGPSFTSGEV

SEQ ID NO: 1899 - protein, 13 aa, Unknown
  source: /note="Description of Unknown: Linker sequence"
ITSQETDGWYTLA

SEQ ID NO: 1900 - protein, 21 aa, Unknown
  source: /note="Description of Unknown: Linker sequence"
RNKEGQDVNEQGQPIRGRTQD

SEQ ID NO: 1901 - protein, 5 aa, Unknown
  source: /note="Description of Unknown: Linker sequence"
HFQPF

SEQ ID NO: 1902 - protein, 5 aa, Unknown
  source: /note="Description of Unknown: Linker sequence"
TGTPV

SEQ ID NO: 1903 - protein, 7 aa, Unknown
  source: /note="Description of Unknown: Linker sequence"
PLSHFDA

SEQ ID NO: 1904 - protein, 4 aa, Unknown
  source: /note="Description of Unknown: Linker sequence"
FNPI

SEQ ID NO: 1905 - protein, 4 aa, Unknown
  source: /note="Description of Unknown: Linker sequence"
KNGS

SEQ ID NO: 1906 - protein, 5 aa, Unknown
  source: /note="Description of Unknown: Linker sequence"
DRFQG

SEQ ID NO: 1907 - protein, 5 aa, Unknown
  source: /note="Description of Unknown: Linker sequence"
EVPDI

SEQ ID NO: 1908 - protein, 6 aa, Unknown
  source: /note="Description of Unknown: Linker sequence"
ACELHT

SEQ ID NO: 1909 - protein, 6 aa, Unknown
  source: /note="Description of Unknown: Linker sequence"
LPATLT

SEQ ID NO: 1910 - protein, 6 aa, Unknown
  source: /note="Description of Unknown: Linker sequence"
LPDPYG

SEQ ID NO: 1911 - protein, 6 aa, Unknown
  source: /note="Description of Unknown: Linker sequence"
LPHAQP

SEQ ID NO: 1912 - protein, 6 aa, Unknown
  source: /note="Description of Unknown: Linker sequence"
RQQASF

SEQ ID NO: 1913 - protein, 6 aa, Unknown
  source: /note="Description of Unknown: Linker sequence"
YIGGNL

SEQ ID NO: 1914 - protein, 7 aa, Unknown
  source: /note="Description of Unknown: Linker sequence"
FGRTCKE

SEQ ID NO: 1915 - protein, 7 aa, Unknown
  source: /note="Description of Unknown: Linker sequence"
VDKGDNV

SEQ ID NO: 1916 - protein, 7 aa, Unknown
  source: /note="Description of Unknown: Linker sequence"
WGPECNH

SEQ ID NO: 1917 - protein, 8 aa, Unknown
  source: /note="Description of Unknown: Linker sequence"
VRRCEAQK

SEQ ID NO: 1918 - protein, 9 aa, Unknown
  source: /note="Description of Unknown: Linker sequence"
KVLIKEEDA

SEQ ID NO: 1919 - protein, 9 aa, Unknown
  source: /note="Description of Unknown: Linker sequence"
SCATGWKGL

SEQ ID NO: 1920 - protein, 10 aa, Unknown
  source: /note="Description of Unknown: Linker sequence"
IVDLPDHIEV

SEQ ID NO: 1921 - protein, 10 aa, Unknown
  source: /note="Description of Unknown: Linker sequence"
LCTACMNNGV

SEQ ID NO: 1922 - protein, 13 aa, Unknown
  source: /note="Description of Unknown: Linker sequence"
RCSGQEGCKSYVF

SEQ ID NO: 1923 - protein, 22 aa, Unknown
  source: /note="Description of Unknown: Linker sequence"
LCSPGWQGLQCEREGIPRMTPK

SEQ ID NO: 1924 - protein, 25 aa, Unknown
  source: /note="Description of Unknown: Linker sequence"
CNEACHPGFYGPDCKLRCSCNNGEM

SEQ ID NO: 1925 - protein, 4 aa, Unknown
  source: /note="Description of Unknown: Linker sequence"
LKTP

SEQ ID NO: 1926 - protein, 14 aa, Unknown
  source: /note="Description of Unknown: Linker sequence"
AKGRRAEDGSVIDY

SEQ ID NO: 1927 - protein, 12 aa, Unknown
  source: /note="Description of Unknown: Linker sequence"
AARPLRVHRRPL

SEQ ID NO: 1928 - protein, 4 aa, Unknown
  source: /note="Description of Unknown: Linker sequence"
LIPL

SEQ ID NO: 1929 - protein, 5 aa, Unknown
  source: /note="Description of Unknown: Linker sequence"
FGEGA

SEQ ID NO: 1930 - protein, 6 aa, Unknown
  source: /note="Description of Unknown: Linker sequence"
AFDDAK

SEQ ID NO: 1931 - protein, 6 aa, Unknown
  source: /note="Description of Unknown: Linker sequence"
KVNGKR

SEQ ID NO: 1932 - protein, 7 aa, Unknown
  source: /note="Description of Unknown: Linker sequence"
LSKTGMP

SEQ ID NO: 1933 - protein, 8 aa, Unknown
  source: /note="Description of Unknown: Linker sequence"
VLPYPRMR

SEQ ID NO: 1934 - protein, 8 aa, Unknown
  source: /note="Description of Unknown: Linker sequence"
VRADDGLL

SEQ ID NO: 1935 - protein, 16 aa, Unknown
  source: /note="Description of Unknown: Linker sequence"
EAEDDFKIEKPTKEDA

SEQ ID NO: 1936 - protein, 5 aa, Unknown
  source: /note="Description of Unknown: Linker sequence"
IRFGR

SEQ ID NO: 1937 - protein, 6 aa, Unknown
  source: /note="Description of Unknown: Linker sequence"
QTETHV

SEQ ID NO: 1938 - protein, 13 aa, Unknown
  source: /note="Description of Unknown: Linker sequence"
PLKGRYTPSVGDV

SEQ ID NO: 1939 - protein, 7 aa, Unknown
  source: /note="Description of Unknown: Linker sequence"
KNPALSD

SEQ ID NO: 1940 - protein, 12 aa, Unknown
  source: /note="Description of Unknown: Linker sequence"
RFGSSEIGKGKK

SEQ ID NO: 1941 - protein, 14 aa, Unknown
  source: /note="Description of Unknown: Linker sequence"
GKFSGRKGTWVGFT

SEQ ID NO: 1942 - protein, 9 aa, Unknown
  source: /note="Description of Unknown: Linker sequence"
QFFMSDKPL

SEQ ID NO: 1943 - protein, 11 aa, Unknown
  source: /note="Description of Unknown: Linker sequence"
HAPRDMGPQPR

SEQ ID NO: 1944 - protein, 12 aa, Unknown
  source: /note="Description of Unknown: Linker sequence"
HFKPAPWNGLPA

SEQ ID NO: 1945 - protein, 6 aa, Unknown
  source: /note="Description of Unknown: Linker sequence"
ATKASK

SEQ ID NO: 1946 - protein, 7 aa, Unknown
  source: /note="Description of Unknown: Linker sequence"
ATKGATK

SEQ ID NO: 1947 - protein, 7 aa, Unknown
  source: /note="Description of Unknown: Linker sequence"
IAKAFKN

SEQ ID NO: 1948 - protein, 14 aa, Unknown
  source: /note="Description of Unknown: Linker sequence"
VRGSPAINVAVHVF

SEQ ID NO: 1949 - protein, 18 aa, Unknown
  source: /note="Description of Unknown: Linker sequence"
GSTSGSGKPGSGEGSTKG

SEQ ID NO: 1950 - protein, 18 aa, Unknown
  source: /note="Description of Unknown: Linker sequence"
KESGSVSSEQLAQFRSLD

SEQ ID NO: 1951 - protein, 6 aa, Unknown
  source: /note="Description of Unknown: Linker sequence"
LDPPKQ

SEQ ID NO: 1952 - protein, 6 aa, Unknown
  source: /note="Description of Unknown: Linker sequence"
TATADD

SEQ ID NO: 1953 - protein, 7 aa, Unknown
  source: /note="Description of Unknown: Linker sequence"
AEAQTCR

SEQ ID NO: 1954 - protein, 7 aa, Unknown
  source: /note="Description of Unknown: Linker sequence"
EEKPQGQ

SEQ ID NO: 1955 - protein, 7 aa, Unknown
  source: /note="Description of Unknown: Linker sequence"
LGLNDPL

SEQ ID NO: 1956 - protein, 7 aa, Unknown
  source: /note="Description of Unknown: Linker sequence"
RFPTLPF

SEQ ID NO: 1957 - protein, 9 aa, Unknown
  source: /note="Description of Unknown: Linker sequence"
ISSFDRPNI

SEQ ID NO: 1958 - protein, 13 aa, Unknown
  source: /note="Description of Unknown: Linker sequence"
YFGEGRQEPCGNC

SEQ ID NO: 1959 - protein, 7 aa, Unknown
  source: /note="Description of Unknown: Linker sequence"
LGLNRKW

SEQ ID NO: 1960 - protein, 12 aa, Unknown
  source: /note="Description of Unknown: Linker sequence"
YFGSYGTRGVGY

SEQ ID NO: 1961 - protein, 4 aa, Unknown
  source: /note="Description of Unknown: Linker sequence"
NIKG

SEQ ID NO: 1962 - protein, 5 aa, Unknown
  source: /note="Description of Unknown: Linker sequence"
NPVPQ

SEQ ID NO: 1963 - protein, 6 aa, Unknown
  source: /note="Description of Unknown: Linker sequence"
AKFPAD

SEQ ID NO: 1964 - protein, 6 aa, Unknown
  source: /note="Description of Unknown: Linker sequence"
IQNVDF

SEQ ID NO: 1965 - protein, 6 aa, Unknown
  source: /note="Description of Unknown: Linker sequence"
LTGQMV

SEQ ID NO: 1966 - protein, 8 aa, Unknown
  source: /note="Description of Unknown: Linker sequence"
AAEDARQY

SEQ ID NO: 1967 - protein, 16 aa, Unknown
  source: /note="Description of Unknown: Linker sequence"
KLDGSQTSKWLSSEPL

SEQ ID NO: 1968 - protein, 4 aa, Unknown
  source: /note="Description of Unknown: Linker sequence"
DIFK

SEQ ID NO: 1969 - protein, 4 aa, Unknown
  source: /note="Description of Unknown: Linker sequence"
LPGM

SEQ ID NO: 1970 - protein, 6 aa, Unknown
  source: /note="Description of Unknown: Linker sequence"
IPGNGG

SEQ ID NO: 1971 - protein, 6 aa, Unknown
  source: /note="Description of Unknown: Linker sequence"
VEDWVE

SEQ ID NO: 1972 - protein, 15 aa, Unknown
  source: /note="Description of Unknown: Linker sequence"
RLKADETYTSPEDYF

SEQ ID NO: 1973 - protein, 5 aa, Unknown
  source: /note="Description of Unknown: Linker sequence"
RKPTE

SEQ ID NO: 1974 - protein, 6 aa, Unknown
  source: /note="Description of Unknown: Linker sequence"
YARTIV

SEQ ID NO: 1975 - protein, 4 aa, Unknown
  source: /note="Description of Unknown: Linker sequence"
REDG

SEQ ID NO: 1976 - protein, 4 aa, Unknown
  source: /note="Description of Unknown: Linker sequence"
YKTL

SEQ ID NO: 1977 - protein, 6 aa, Unknown
  source: /note="Description of Unknown: Linker sequence"
DRAKRI

SEQ ID NO: 1978 - protein, 11 aa, Unknown
  source: /note="Description of Unknown: Linker sequence"
KAPQTEPPASI

SEQ ID NO: 1979 - protein, 21 aa, Unknown
  source: /note="Description of Unknown: Linker sequence"
AAQSDRPAHAQGVPLTRIERT

SEQ ID NO: 1980 - protein, 8 aa, Unknown
  source: /note="Description of Unknown: Linker sequence"
DWDKDADP

SEQ ID NO: 1981 - protein, 14 aa, Unknown
  source: /note="Description of Unknown: Linker sequence"
LFDRHVSSSVRLND

SEQ ID NO: 1982 - protein, 26 aa, Unknown
  source: /note="Description of Unknown: Linker sequence"
LVEESSRQLPTAAPEPAKVDQDAGRL

SEQ ID NO: 1983 - protein, 6 aa, Unknown
  source: /note="Description of Unknown: Linker sequence"
LLGVTP

SEQ ID NO: 1984 - protein, 4 aa, Unknown
  source: /note="Description of Unknown: Linker sequence"
DTLP

SEQ ID NO: 1985 - protein, 4 aa, Unknown
  source: /note="Description of Unknown: Linker sequence"
ENGL

SEQ ID NO: 1986 - protein, 4 aa, Unknown
  source: /note="Description of Unknown: Linker sequence"
FREV

SEQ ID NO: 1987 - protein, 4 aa, Unknown
  source: /note="Description of Unknown: Linker sequence"
KVSP

SEQ ID NO: 1988 - protein, 4 aa, Unknown
  source: /note="Description of Unknown: Linker sequence"
LDGK

SEQ ID NO: 1989 - protein, 4 aa, Unknown
  source: /note="Description of Unknown: Linker sequence"
LNGK

SEQ ID NO: 1990 - protein, 4 aa, Unknown
  source: /note="Description of Unknown: Linker sequence"
PLLI

SEQ ID NO: 1991 - protein, 4 aa, Unknown
  source: /note="Description of Unknown: Linker sequence"
SGQT

SEQ ID NO: 1992 - protein, 5 aa, Unknown
  source: /note="Description of Unknown: Linker sequence"
KNPRG

SEQ ID NO: 1993 - protein, 5 aa, Unknown
  source: /note="Description of Unknown: Linker sequence"
KPTTQ

SEQ ID NO: 1994 - protein, 5 aa, Unknown
  source: /note="Description of Unknown: Linker sequence"
SLKWK

SEQ ID NO: 1995 - protein, 5 aa, Unknown
  source: /note="Description of Unknown: Linker sequence"
TSEMD

SEQ ID NO: 1996 - protein, 6 aa, Unknown
  source: /note="Description of Unknown: Linker sequence"
LSGQEA

SEQ ID NO: 1997 - protein, 9 aa, Unknown
  source: /note="Description of Unknown: Linker sequence"
PLDVAPQGK

SEQ ID NO: 1998 - protein, 11 aa, Unknown
  source: /note="Description of Unknown: Linker sequence"
AKNTYDDSAWT

SEQ ID NO: 1999 - protein, 12 aa, Unknown
  source: /note="Description of Unknown: Linker sequence"
ELPELPQPESAG

SEQ ID NO: 2000 - protein, 12 aa, Unknown
  source: /note="Description of Unknown: Linker sequence"
QPNATAWSEAGH

SEQ ID NO: 2001 - protein, 12 aa, Unknown
  source: /note="Description of Unknown: Linker sequence"
SEYLFRHSDNEL

SEQ ID NO: 2002 - protein, 13 aa, Unknown
  source: /note="Description of Unknown: Linker sequence"
VAYTAPKVQLPSL

SEQ ID NO: 2003 - protein, 15 aa, Unknown
  source: /note="Description of Unknown: Linker sequence"
NLSVTLPAASHAIPH

SEQ ID NO: 2004 - protein, 16 aa, Unknown
  source: /note="Description of Unknown: Linker sequence"
IDNMGLDEDWTIGSED

SEQ ID NO: 2005 - protein, 23 aa, Unknown
  source: /note="Description of Unknown: Linker sequence"
TGNLGGENYRDTVRGPLNEGGLY

SEQ ID NO: 2006 - protein, 10 aa, Unknown
  source: /note="Description of Unknown: Linker sequence"
SNADLQTLPA

SEQ ID NO: 2007 - protein, 11 aa, Unknown
  source: /note="Description of Unknown: Linker sequence"
LRGKIVPTPMQ

SEQ ID NO: 2008 - protein, 12 aa, Unknown
  source: /note="Description of Unknown: Linker sequence"
KGGVAYRLPVPG

SEQ ID NO: 2009 - protein, 11 aa, Unknown
  source: /note="Description of Unknown: Linker sequence"
QAWATAPYAPT

SEQ ID NO: 2010 - protein, 7 aa, Unknown
  source: /note="Description of Unknown: Linker sequence"
YSKGVSQ

SEQ ID NO: 2011 - protein, 6 aa, Unknown
  source: /note="Description of Unknown: Linker sequence"
QKGRVL

SEQ ID NO: 2012 - protein, 6 aa, Unknown
  source: /note="Description of Unknown: Linker sequence"
VLGKEL

SEQ ID NO: 2013 - protein, 4 aa, Unknown
  source: /note="Description of Unknown: Linker sequence"
ANTP

SEQ ID NO: 2014 - protein, 4 aa, Unknown
  source: /note="Description of Unknown: Linker sequence"
DAPT

SEQ ID NO: 2015 - protein, 5 aa, Unknown
  source: /note="Description of Unknown: Linker sequence"
LDPIK

SEQ ID NO: 2016 - protein, 5 aa, Unknown
  source: /note="Description of Unknown: Linker sequence"
TTDFQ

SEQ ID NO: 2017 - protein, 6 aa, Unknown
  source: /note="Description of Unknown: Linker sequence"
PWNKEV

SEQ ID NO: 2018 - protein, 6 aa, Unknown
  source: /note="Description of Unknown: Linker sequence"
QQLLPP

SEQ ID NO: 2019 - protein, 8 aa, Unknown
  source: /note="Description of Unknown: Linker sequence"
TDPQTGKT

SEQ ID NO: 2020 - protein, 9 aa, Unknown
  source: /note="Description of Unknown: Linker sequence"
GRHGIVPTR

SEQ ID NO: 2021 - protein, 9 aa, Unknown
  source: /note="Description of Unknown: Linker sequence"
TADGSWFFK

SEQ ID NO: 2022 - protein, 12 aa, Unknown
  source: /note="Description of Unknown: Linker sequence"
LFSMGVTRGKWG

SEQ ID NO: 2023 - protein, 18 aa, Unknown
  source: /note="Description of Unknown: Linker sequence"
LAPGMGEDGELEETGVPA

SEQ ID NO: 2024 - protein, 21 aa, Unknown
  source: /note="Description of Unknown: Linker sequence"
CWVMHPGESWHGFKDIPDNWS

SEQ ID NO: 2025 - protein, 7 aa, Unknown
  source: /note="Description of Unknown: Linker sequence"
EVHVRGH

SEQ ID NO: 2026 - protein, 17 aa, Unknown
  source: /note="Description of Unknown: Linker sequence"
VGDPGPICRPWECCDKA

SEQ ID NO: 2027 - protein, 7 aa, Unknown
  source: /note="Description of Unknown: Linker sequence"
KYEIPEG

SEQ ID NO: 2028 - protein, 7 aa, Unknown
  source: /note="Description of Unknown: Linker sequence"
RKVCEQE

SEQ ID NO: 2029 - protein, 12 aa, Unknown
  source: /note="Description of Unknown: Linker sequence"
EQLLPKLFDGCY

SEQ ID NO: 2030 - protein, 5 aa, Unknown
  source: /note="Description of Unknown: Linker sequence"
SLHFS

SEQ ID NO: 2031 - protein, 6 aa, Unknown
  source: /note="Description of Unknown: Linker sequence"
VYPLQW

SEQ ID NO: 2032 - protein, 7 aa, Unknown
  source: /note="Description of Unknown: Linker sequence"
KTVSGLY

SEQ ID NO: 2033 - protein, 12 aa, Unknown
  source: /note="Description of Unknown: Linker sequence"
SDPAFQPPCSEV

SEQ ID NO: 2034 - protein, 13 aa, Unknown
  source: /note="Description of Unknown: Linker sequence"
SVVKPIGLAPLVY

SEQ ID NO: 2035 - protein, 30 aa, Unknown
  source: /note="Description of Unknown: Linker sequence"
ARWHSRLGFFRDPRPFPLPLSSLFSDGGNV

SEQ ID NO: 2036 - protein, 15 aa, Unknown
  source: /note="Description of Unknown: Linker sequence"
ELRSLTRHPKYKTEL

SEQ ID NO: 2037 - protein, 7 aa, Unknown
  source: /note="Description of Unknown: Linker sequence"
VYNTFCI

SEQ ID NO: 2038 - protein, 4 aa, Unknown
  source: /note="Description of Unknown: Linker sequence"
AATM

SEQ ID NO: 2039 - protein, 4 aa, Unknown
  source: /note="Description of Unknown: Linker sequence"
FAGT

SEQ ID NO: 2040 - protein, 4 aa, Unknown
  source: /note="Description of Unknown: Linker sequence"
RGDF

SEQ ID NO: 2041 - protein, 4 aa, Unknown
  source: /note="Description of Unknown: Linker sequence"
SNPW

SEQ ID NO: 2042 - protein, 4 aa, Unknown
  source: /note="Description of Unknown: Linker sequence"
SPDK

SEQ ID NO: 2043 - protein, 7 aa, Unknown
  source: /note="Description of Unknown: Linker sequence"
KTADQQD

SEQ ID NO: 2044 - protein, 8 aa, Unknown
  source: /note="Description of Unknown: Linker sequence"
QGAGAVDA

SEQ ID NO: 2045 - protein, 9 aa, Unknown
  source: /note="Description of Unknown: Linker sequence"
AKQDDDSHY

SEQ ID NO: 2046 - protein, 9 aa, Unknown
  source: /note="Description of Unknown: Linker sequence"
DKDNTSSKV

SEQ ID NO: 2047 - protein, 9 aa, Unknown
  source: /note="Description of Unknown: Linker sequence"
NLSALEKPI

SEQ ID NO: 2048 - protein, 11 aa, Unknown
  source: /note="Description of Unknown: Linker sequence"
IHRHANGKPYA

SEQ ID NO: 2049 - protein, 16 aa, Unknown
  source: /note="Description of Unknown: Linker sequence"
EGVENIEDIESSEITE

SEQ ID NO: 2050 - protein, 36 aa, Unknown
  source: /note="Description of Unknown: Linker sequence"
DSKDGSSYYHEANSDAKDQLDGDGLQFYALKNNFTA

SEQ ID NO: 2051 - protein, 9 aa, Unknown
  source: /note="Description of Unknown: Linker sequence"
GSIQGQDLS

SEQ ID NO: 2052 - protein, 4 aa, Unknown
  source: /note="Description of Unknown: Linker sequence"
RFDT

SEQ ID NO: 2053 - protein, 15 aa, Unknown
  source: /note="Description of Unknown: Linker sequence"
TLTTPASNQLLALPR

SEQ ID NO: 2054 - protein, 4 aa, Unknown
  source: /note="Description of Unknown: Linker sequence"
ELPF

SEQ ID NO: 2055 - protein, 7 aa, Unknown
  source: /note="Description of Unknown: Linker sequence"
AGDNPDA

SEQ ID NO: 2056 - protein, 7 aa, Unknown
  source: /note="Description of Unknown: Linker sequence"
VTTAEAY

SEQ ID NO: 2057 - protein, 11 aa, Unknown
  source: /note="Description of Unknown: Linker sequence"
AFPGLNGMDLA

SEQ ID NO: 2058 - protein, 18 aa, Unknown
  source: /note="Description of Unknown: Linker sequence"
WTQGSWTLTGGLPQAKKE

SEQ ID NO: 2059 - protein, 16 aa, Unknown
  source: /note="Description of Unknown: Linker sequence"
RGIKLTKIKLDLPINF

SEQ ID NO: 2060 - protein, 4 aa, Unknown
  source: /note="Description of Unknown: Linker sequence"
FLDV

SEQ ID NO: 2061 - protein, 5 aa, Unknown
  source: /note="Description of Unknown: Linker sequence"
QTSLS

SEQ ID NO: 2062 - protein, 26 aa, Unknown
  source: /note="Description of Unknown: Linker sequence"
YTGKWGLNDVNPEAWPRDLKGMAAVR

SEQ ID NO: 2063 - protein, 17 aa, Unknown
  source: /note="Description of Unknown: Linker sequence"
VKEGAGQPDFCDGHSPA

SEQ ID NO: 2064 - protein, 9 aa, Unknown
  source: /note="Description of Unknown: Linker sequence"
VDGSRGDGS

SEQ ID NO: 2065 - protein, 41 aa, Unknown
  source: /note="Description of Unknown: Linker sequence"
LKARVGSADDAKKDAAKKDDAKKDDAKKDGSQTNKAKNLVQ

SEQ ID NO: 2066 - protein, 7 aa, Unknown
  source: /note="Description of Unknown: Linker sequence"
VAKEGET

SEQ ID NO: 2067 - protein, 14 aa, Unknown
  source: /note="Description of Unknown: Linker sequence"
TMKNTGRNVNDRPV

SEQ ID NO: 2068 - protein, 4 aa, Unknown
  source: /note="Description of Unknown: Linker sequence"
EVND

SEQ ID NO: 2069 - protein, 4 aa, Unknown
  source: /note="Description of Unknown: Linker sequence"
NSDG

SEQ ID NO: 2070 - protein, 4 aa, Unknown
  source: /note="Description of Unknown: Linker sequence"
TPYG

SEQ ID NO: 2071 - protein, 5 aa, Unknown
  source: /note="Description of Unknown: Linker sequence"
GRGNP

SEQ ID NO: 2072 - protein, 5 aa, Unknown
  source: /note="Description of Unknown: Linker sequence"
SENPV

SEQ ID NO: 2073 - protein, 6 aa, Unknown
  source: /note="Description of Unknown: Linker sequence"
RAQMDL

SEQ ID NO: 2074 - protein, 6 aa, Unknown
  source: /note="Description of Unknown: Linker sequence"
RTSRNP

SEQ ID NO: 2075 - protein, 6 aa, Unknown
  source: /note="Description of Unknown: Linker sequence"
YVLNDI

SEQ ID NO: 2076 - protein, 7 aa, Unknown
  source: /note="Description of Unknown: Linker sequence"
AKKDGTH

SEQ ID NO: 2077 - protein, 8 aa, Unknown
  source: /note="Description of Unknown: Linker sequence"
DATHIGKL

SEQ ID NO: 2078 - protein, 8 aa, Unknown
  source: /note="Description of Unknown: Linker sequence"
KQIGGDGM

SEQ ID NO: 2079 - protein, 8 aa, Unknown
  source: /note="Description of Unknown: Linker sequence"
VLTIPEII

SEQ ID NO: 2080 - protein, 8 aa, Unknown
  source: /note="Description of Unknown: Linker sequence"
YKFQEGQE

SEQ ID NO: 2081 - protein, 9 aa, Unknown
  source: /note="Description of Unknown: Linker sequence"
NAKDDEGVL

SEQ ID NO: 2082 - protein, 9 aa, Unknown
  source: /note="Description of Unknown: Linker sequence"
SYGQFEDGI

SEQ ID NO: 2083 - protein, 10 aa, Unknown
  source: /note="Description of Unknown: Linker sequence"
HGHVCFQFDA

SEQ ID NO: 2084 - protein, 16 aa, Unknown
  source: /note="Description of Unknown: Linker sequence"
LFNPWCEDDAVYLDNE

SEQ ID NO: 2085 - protein, 20 aa, Unknown
  source: /note="Description of Unknown: Linker sequence"
GSWDNIYAYGVPPSAWTGSV

SEQ ID NO: 2086 - protein, 20 aa, Unknown
  source: /note="Description of Unknown: Linker sequence"
MYGAKKPLNTEGVMKSRSNV

SEQ ID NO: 2087 - protein, 5 aa, Unknown
  source: /note="Description of Unknown: Linker sequence"
CPPCP

SEQ ID NO: 2088 - protein, 6 aa, Unknown
  source: /note="Description of Unknown: Linker sequence"
QPKAAP

SEQ ID NO: 2089 - protein, 25 aa, Unknown
  source: /note="Description of Unknown: Linker sequence"
PPPPPASSTTFSTTRRSSTTSSSPS

SEQ ID NO: 2090 - protein, 27 aa, Unknown
  source: /note="Description of Unknown: Linker sequence"
GGNPPGGNPPGTTTPRPATSTGSSPGP

SEQ ID NO: 2091 - protein, 33 aa, Unknown
  source: /note="Description of Unknown: Linker sequence"
GTSTGGSTTTTASGTTSTKASTTSTSSTSTGTG

SEQ ID NO: 2092 - protein, 33 aa, Unknown
  source: /note="Description of Unknown: Linker sequence"
TVSSSSVSSSHSSTSTSSSHSSSSTPPTQPTGV

SEQ ID NO: 2093 - protein, 34 aa, Unknown
  source: /note="Description of Unknown: Linker sequence"
GSSGTPPSNPSSSASPTSSTAKPSSTSTASNPSG

SEQ ID NO: 2094 - protein, 41 aa, Unknown
  source: /note="Description of Unknown: Linker sequence"
ASSSSSTRAASTTSRVSPTTSRSSSATPPPGSTTTRVPPVG

SEQ ID NO: 2095 - protein, 48 aa, Unknown
  source: /note="Description of Unknown: Linker sequence"
PSSGGTSSSSSAAPQSTSTKASTTTSAVRTTSTATTKTTSSAPAQGTN

SEQ ID NO: 2096 - protein, 6 aa, Unknown
  source: /note="Description of Unknown: Linker sequence"
ASTKGP

SEQ ID NO: 2097 - protein, 12 aa, Unknown
  source: /note="Description of Unknown: Linker sequence"
TVAAPSVFIFPP

SEQ ID NO: 2098 - protein, 13 aa, Unknown
  source: /note="Description of Unknown: Linker sequence"
ASTKGPSVFPLAP

SEQ ID NO: 2099 - protein, 13 aa, Unknown
  source: /note="Description of Unknown: Linker sequence"
QPKAAPSVTLFPP

SEQ ID NO: 2100 - protein, 5 aa, Unknown
  source: /note="Description of Unknown: Linker sequence"
RSANS

SEQ ID NO: 2101 - protein, 9 aa, Unknown
  source: /note="Description of Unknown: Linker sequence"
RPAKLALPP

SEQ ID NO: 2102 - protein, 17 aa, Unknown
  source: /note="Description of Unknown: Linker sequence"
SLHGFDLASEQHTVRDT

SEQ ID NO: 2103 - protein, 4 aa, Unknown
  source: /note="Description of Unknown: Linker sequence"
RARI

SEQ ID NO: 2104 - protein, 11 aa, Unknown
  source: /note="Description of Unknown: Linker sequence"
TKPQLGIREGM

SEQ ID NO: 2105 - protein, 21 aa, Unknown
  source: /note="Description of Unknown: Linker sequence"
HKPMAAPTTLKAGPLLSSEKL

SEQ ID NO: 2106 - protein, 12 aa, Unknown
  source: /note="Description of Unknown: Linker sequence"
SLPADRKPGEPV

SEQ ID NO: 2107 - protein, 6 aa, Unknown
  source: /note="Description of Unknown: Linker sequence"
RRHGEY

SEQ ID NO: 2108 - protein, 7 aa, Unknown
  source: /note="Description of Unknown: Linker sequence"
ANQNSAE

SEQ ID NO: 2109 - protein, 14 aa, Unknown
  source: /note="Description of Unknown: Linker sequence"
LTTNLTAFFREAHH

SEQ ID NO: 2110 - protein, 4 aa, Unknown
  source: /note="Description of Unknown: Linker sequence"
PNQR

SEQ ID NO: 2111 - protein, 5 aa, Unknown
  source: /note="Description of Unknown: Linker sequence"
ARNDP

SEQ ID NO: 2112 - protein, 5 aa, Unknown
  source: /note="Description of Unknown: Linker sequence"
LNWTR

SEQ ID NO: 2113 - protein, 6 aa, Unknown
  source: /note="Description of Unknown: Linker sequence"
DAATDR

SEQ ID NO: 2114 - protein, 6 aa, Unknown
  source: /note="Description of Unknown: Linker sequence"
DKASGA

SEQ ID NO: 2115 - protein, 6 aa, Unknown
  source: /note="Description of Unknown: Linker sequence"
GPNGNI

SEQ ID NO: 2116 - protein, 9 aa, Unknown
  source: /note="Description of Unknown: Linker sequence"
AWDNSDSSV

SEQ ID NO: 2117 - protein, 9 aa, Unknown
  source: /note="Description of Unknown: Linker sequence"
LAHVGRSLI

SEQ ID NO: 2118 - protein, 9 aa, Unknown
  source: /note="Description of Unknown: Linker sequence"
TKNPQRGTF

SEQ ID NO: 2119 - protein, 11 aa, Unknown
  source: /note="Description of Unknown: Linker sequence"
APMPAGLETWV

SEQ ID NO: 2120 - protein, 16 aa, Unknown
  source: /note="Description of Unknown: Linker sequence"
DTGTLPNLNSEVGAGW

SEQ ID NO: 2121 - protein, 18 aa, Unknown
  source: /note="Description of Unknown: Linker sequence"
ANHMWNPTGAHQSSIPAL

SEQ ID NO: 2122 - protein, 4 aa, Unknown
  source: /note="Description of Unknown: Linker sequence"
DATE

SEQ ID NO: 2123 - protein, 7 aa, Unknown
  source: /note="Description of Unknown: Linker sequence"
RNYLINS

SEQ ID NO: 2124 - protein, 14 aa, Unknown
  source: /note="Description of Unknown: Linker sequence"
SSPKNLDDKVKLSE

SEQ ID NO: 2125 - protein, 5 aa, Unknown
  source: /note="Description of Unknown: Linker sequence"
QYQIV

SEQ ID NO: 2126 - protein, 8 aa, Unknown
  source: /note="Description of Unknown: Linker sequence"
RWLKNASP

SEQ ID NO: 2127 - protein, 4 aa, Unknown
  source: /note="Description of Unknown: Linker sequence"
GFLG

SEQ ID NO: 2128 - protein, 6 aa, Unknown
  source: /note="Description of Unknown: Linker sequence"
PLGLWA

SEQ ID NO: 2129 - protein, 6 aa, Unknown
  source: /note="Description of Unknown: Linker sequence"
RVLAEA

SEQ ID NO: 2130 - protein, 8 aa, Unknown
  source: /note="Description of Unknown: Linker sequence"
GGIEGRGS

SEQ ID NO: 2131 - protein, 9 aa, Unknown
  source: /note="Description of Unknown: Linker sequence"
RRRRRRRRR

SEQ ID NO: 2132 - protein, 10 aa, Unknown
  source: /note="Description of Unknown: Linker sequence"
EDVVCCSMSY

SEQ ID NO: 2133 - protein, 10 aa, Unknown
  source: /note="Description of Unknown: Linker sequence"
TRHRQPRGWE

SEQ ID NO: 2134 - protein, 10 aa, Unknown
  source: /note="Description of Unknown: Linker sequence"
AGNRVRRSVG

SEQ ID NO: 2135 - protein, 12 aa, Unknown
  source: /note="Description of Unknown: Linker sequence"
CRRRRRREAEAC

SEQ ID NO: 2136 - protein, 17 aa, Unknown
  source: /note="Description of Unknown: Linker sequence"
VSQTSKLTRAETVFPDV

SEQ ID NO: 2137 - protein, 20 aa, Unknown
  source: /note="Description of Unknown: Linker sequence"
LEAGCKNFFPRSFTSCGSLE

SEQ ID NO: 2138 - protein, 14 aa, Unknown
  source: /note="Description of Unknown: Linker sequence"
NILNDRNPVVTEDV

SEQ ID NO: 2139 - protein, 5 aa, Unknown
  source: /note="Description of Unknown: Linker sequence"
YTPGE

SEQ ID NO: 2140 - protein, 4 aa, Unknown
  source: /note="Description of Unknown: Linker sequence"
FGTQ

SEQ ID NO: 2141 - protein, 6 aa, Unknown
  source: /note="Description of Unknown: Linker sequence"
SLQSGY

SEQ ID NO: 2142 - protein, 6 aa, Unknown
  source: /note="Description of Unknown: Linker sequence"
TIPANR

SEQ ID NO: 2143 - protein, 9 aa, Unknown
  source: /note="Description of Unknown: Linker sequence"
KSEKGRNKF

SEQ ID NO: 2144 - protein, 7 aa, Unknown
  source: /note="Description of Unknown: Linker sequence"
YFNKYSS

SEQ ID NO: 2145 - protein, 8 aa, Unknown
  source: /note="Description of Unknown: Linker sequence"
YRNPSRNI

SEQ ID NO: 2146 - protein, 4 aa, Unknown
  source: /note="Description of Unknown: Linker sequence"
YGLN

SEQ ID NO: 2147 - protein, 5 aa, Unknown
  source: /note="Description of Unknown: Linker sequence"
IMGSV

SEQ ID NO: 2148 - protein, 5 aa, Unknown
  source: /note="Description of Unknown: Linker sequence"
SGRDA

SEQ ID NO: 2149 - protein, 6 aa, Unknown
  source: /note="Description of Unknown: Linker sequence"
LIEKGG

SEQ ID NO: 2150 - protein, 7 aa, Unknown
  source: /note="Description of Unknown: Linker sequence"
DINNISP

SEQ ID NO: 2151 - protein, 7 aa, Unknown
  source: /note="Description of Unknown: Linker sequence"
GRHVRGI

SEQ ID NO: 2152 - protein, 8 aa, Unknown
  source: /note="Description of Unknown: Linker sequence"
VRGREPGD

SEQ ID NO: 2153 - protein, 6 aa, Unknown
  source: /note="Description of Unknown: Linker sequence"
EMEIPE

SEQ ID NO: 2154 - protein, 6 aa, Unknown
  source: /note="Description of Unknown: Linker sequence"
RMIKSA

SEQ ID NO: 2155 - protein, 4 aa, Unknown
  source: /note="Description of Unknown: Linker sequence"
GFTP

SEQ ID NO: 2156 - protein, 5 aa, Unknown
  source: /note="Description of Unknown: Linker sequence"
FKIDV

SEQ ID NO: 2157 - protein, 5 aa, Unknown
  source: /note="Description of Unknown: Linker sequence"
NLDDP

SEQ ID NO: 2158 - protein, 11 aa, Unknown
  source: /note="Description of Unknown: Linker sequence"
LQNQQDNRGNI

SEQ ID NO: 2159 - protein, 19 aa, Unknown
  source: /note="Description of Unknown: Linker sequence"
NPQGQVWIEGREQQPQKNI

SEQ ID NO: 2160 - protein, 35 aa, Unknown
  source: /note="Description of Unknown: Linker sequence"
RVQGPFSVIRPPLRSQRPQEEVNGLEETICSARCT

SEQ ID NO: 2161 - protein, 53 aa, Unknown
  source: /note="Description of Unknown: Linker sequence"
DSSVFQPGGGSPFGEGQGQGQQGQGQGHQGQGQGQQGQQGQQGQQSQGQGFRD

SEQ ID NO: 2162 - protein, 5 aa, Unknown
  source: /note="Description of Unknown: Linker sequence"
CEGSD

SEQ ID NO: 2163 - protein, 7 aa, Unknown
  source: /note="Description of Unknown: Linker sequence"
VQQQETI

SEQ ID NO: 2164 - protein, 8 aa, Unknown
  source: /note="Description of Unknown: Linker sequence"
KGINSKKT

SEQ ID NO: 2165 - protein, 12 aa, Unknown
  source: /note="Description of Unknown: Linker sequence"
RLKLEDRQVDLT

SEQ ID NO: 2166 - protein, 8 aa, Unknown
  source: /note="Description of Unknown: Linker sequence"
TDSTQIKM

SEQ ID NO: 2167 - protein, 11 aa, Unknown
  source: /note="Description of Unknown: Linker sequence"
ILLQYNTEDAY

SEQ ID NO: 2168 - protein, 14 aa, Unknown
  source: /note="Description of Unknown: Linker sequence"
ELVTNCFKNRYTLQ

SEQ ID NO: 2169 - protein, 23 aa, Unknown
  source: /note="Description of Unknown: Linker sequence"
IKLYLGYKNKKLRVNINVPMKTE

SEQ ID NO: 2170 - protein, 24 aa, Unknown
  source: /note="Description of Unknown: Linker sequence"
KSKLLVLEDENANVDEVELKPDTL

SEQ ID NO: 2171 - protein, 11 aa, Unknown
  source: /note="Description of Unknown: Linker sequence"
VLTFDLAAPTV

SEQ ID NO: 2172 - protein, 27 aa, Unknown
  source: /note="Description of Unknown: Linker sequence"
CPAGNFIGKTATPYTSGTPCGDCPSDC

SEQ ID NO: 2173 - protein, 8 aa, Unknown
  source: /note="Description of Unknown: Linker sequence"
HLPGREAH

SEQ ID NO: 2174 - protein, 8 aa, Unknown
  source: /note="Description of Unknown: Linker sequence"
YLPDAFGP

SEQ ID NO: 2175 - protein, 21 aa, Unknown
  source: /note="Description of Unknown: Linker sequence"
LEIKTLLMDEQDHGYALTGDA

SEQ ID NO: 2176 - protein, 7 aa, Unknown
  source: /note="Description of Unknown: Linker sequence"
VLAMAKV

SEQ ID NO: 2177 - protein, 4 aa, Unknown
  source: /note="Description of Unknown: Linker sequence"
FAFG

SEQ ID NO: 2178 - protein, 4 aa, Unknown
  source: /note="Description of Unknown: Linker sequence"
GPNQ

SEQ ID NO: 2179 - protein, 8 aa, Unknown
  source: /note="Description of Unknown: Linker sequence"
DEINNPSL

SEQ ID NO: 2180 - protein, 24 aa, Unknown
  source: /note="Description of Unknown: Linker sequence"
VIPAGKLERVDPTTVRQEGPWADP

SEQ ID NO: 2181 - protein, 15 aa, Unknown
  source: /note="Description of Unknown: Linker sequence"
LGVSSSEVSRVEADS

SEQ ID NO: 2182 - protein, 6 aa, Unknown
  source: /note="Description of Unknown: Linker sequence"
AIPDFG

SEQ ID NO: 2183 - protein, 6 aa, Unknown
  source: /note="Description of Unknown: Linker sequence"
VDPAYR

SEQ ID NO: 2184 - protein, 6 aa, Unknown
  source: /note="Description of Unknown: Linker sequence"
YAPSSP

SEQ ID NO: 2185 - protein, 23 aa, Unknown
  source: /note="Description of Unknown: Linker sequence"
ATPQMEEDKGPINHPQYPGDVGL

SEQ ID NO: 2186 - protein, 4 aa, Unknown
  source: /note="Description of Unknown: Linker sequence"
IWEP

SEQ ID NO: 2187 - protein, 6 aa, Unknown
  source: /note="Description of Unknown: Linker sequence"
RTDIQT

SEQ ID NO: 2188 - protein, 13 aa, Unknown
  source: /note="Description of Unknown: Linker sequence"
KIPFTANKFEKNY

SEQ ID NO: 2189 - protein, 10 aa, Unknown
  source: /note="Description of Unknown: Linker sequence"
LEGDKNALNQ

SEQ ID NO: 2190 - protein, 4 aa, Unknown
  source: /note="Description of Unknown: Linker sequence"
AGGD

SEQ ID NO: 2191 - protein, 4 aa, Unknown
  source: /note="Description of Unknown: Linker sequence"
KADV

SEQ ID NO: 2192 - protein, 4 aa, Unknown
  source: /note="Description of Unknown: Linker sequence"
KGGR

SEQ ID NO: 2193 - protein, 4 aa, Unknown
  source: /note="Description of Unknown: Linker sequence"
LGTF

SEQ ID NO: 2194 - protein, 4 aa, Unknown
  source: /note="Description of Unknown: Linker sequence"
LPFL

SEQ ID NO: 2195 - protein, 4 aa, Unknown
  source: /note="Description of Unknown: Linker sequence"
QKGK

SEQ ID NO: 2196 - protein, 5 aa, Unknown
  source: /note="Description of Unknown: Linker sequence"
EEKCE

SEQ ID NO: 2197 - protein, 5 aa, Unknown
  source: /note="Description of Unknown: Linker sequence"
LGAGD

SEQ ID NO: 2198 - protein, 5 aa, Unknown
  source: /note="Description of Unknown: Linker sequence"
LKSIE

SEQ ID NO: 2199 - protein, 5 aa, Unknown
  source: /note="Description of Unknown: Linker sequence"
PKTDD

SEQ ID NO: 2200 - protein, 5 aa, Unknown
  source: /note="Description of Unknown: Linker sequence"
SAFGS

SEQ ID NO: 2201 - protein, 5 aa, Unknown
  source: /note="Description of Unknown: Linker sequence"
VLRDP

SEQ ID NO: 2202 - protein, 6 aa, Unknown
  source: /note="Description of Unknown: Linker sequence"
EEGYKA

SEQ ID NO: 2203 - protein, 6 aa, Unknown
  source: /note="Description of Unknown: Linker sequence"
KDLGVK

SEQ ID NO: 2204 - protein, 6 aa, Unknown
  source: /note="Description of Unknown: Linker sequence"
LVDISV

SEQ ID NO: 2205 - protein, 6 aa, Unknown
  source: /note="Description of Unknown: Linker sequence"
NIRAVP

SEQ ID NO: 2206 - protein, 6 aa, Unknown
  source: /note="Description of Unknown: Linker sequence"
RCGARR

SEQ ID NO: 2207 - protein, 6 aa, Unknown
  source: /note="Description of Unknown: Linker sequence"
VFRKGF

SEQ ID NO: 2208 - protein, 6 aa, Unknown
  source: /note="Description of Unknown: Linker sequence"
VIGKAL

SEQ ID NO: 2209 - protein, 7 aa, Unknown
  source: /note="Description of Unknown: Linker sequence"
IGIGLPE

SEQ ID NO: 2210 - protein, 7 aa, Unknown
  source: /note="Description of Unknown: Linker sequence"
QDETGKW

SEQ ID NO: 2211 - protein, 7 aa, Unknown
  source: /note="Description of Unknown: Linker sequence"
VGMANTT

SEQ ID NO: 2212 - protein, 8 aa, Unknown
  source: /note="Description of Unknown: Linker sequence"
ELSNIEQV

SEQ ID NO: 2213 - protein, 10 aa, Unknown
  source: /note="Description of Unknown: Linker sequence"
FQGLTQDQGF

SEQ ID NO: 2214 - protein, 12 aa, Unknown
  source: /note="Description of Unknown: Linker sequence"
CGKSLSENEITL

SEQ ID NO: 2215 - protein, 14 aa, Unknown
  source: /note="Description of Unknown: Linker sequence"
LQGWDGQSPGTESH

SEQ ID NO: 2216 - protein, 17 aa, Unknown
  source: /note="Description of Unknown: Linker sequence"
PVPRIAELMGKKLPNFG

SEQ ID NO: 2217 - protein, 18 aa, Unknown
  source: /note="Description of Unknown: Linker sequence"
QYGASVSAKPELPLFYTP

SEQ ID NO: 2218 - protein, 18 aa, Unknown
  source: /note="Description of Unknown: Linker sequence"
SKAGMCACHSPLPSIRGA

SEQ ID NO: 2219 - protein, 23 aa, Unknown
  source: /note="Description of Unknown: Linker sequence"
EQNAAFPPLERKPFIPKKPIPAI

SEQ ID NO: 2220 - protein, 28 aa, Unknown
  source: /note="Description of Unknown: Linker sequence"
EALSPIKFNRWDLPEVDPETMQTSEPWV

SEQ ID NO: 2221 - protein, 7 aa, Unknown
  source: /note="Description of Unknown: Linker sequence"
NTGSGKR

SEQ ID NO: 2222 - protein, 7 aa, Unknown
  source: /note="Description of Unknown: Linker sequence"
TQPVQSS

SEQ ID NO: 2223 - protein, 7 aa, Unknown
  source: /note="Description of Unknown: Linker sequence"
YTGDNCA

SEQ ID NO: 2224 - protein, 18 aa, Unknown
  source: /note="Description of Unknown: Linker sequence"
LPRDGLKDPQGKPLHYDR

SEQ ID NO: 2225 - protein, 7 aa, Unknown
  source: /note="Description of Unknown: Linker sequence"
DDDRIKD

SEQ ID NO: 2226 - protein, 7 aa, Unknown
  source: /note="Description of Unknown: Linker sequence"
EAEKNQQ

SEQ ID NO: 2227 - protein, 11 aa, Unknown
  source: /note="Description of Unknown: Linker sequence"
NHLGIDLGETP

SEQ ID NO: 2228 - protein, 13 aa, Unknown
  source: /note="Description of Unknown: Linker sequence"
RLFESSGCAGKLA

SEQ ID NO: 2229 - protein, 13 aa, Unknown
  source: /note="Description of Unknown: Linker sequence"
VRHDGRHAHDYDY

SEQ ID NO: 2230 - protein, 15 aa, Unknown
  source: /note="Description of Unknown: Linker sequence"
RDIEADTPARYNADP

SEQ ID NO: 2231 - protein, 4 aa, Unknown
  source: /note="Description of Unknown: Linker sequence"
LSSR

SEQ ID NO: 2232 - protein, 4 aa, Unknown
  source: /note="Description of Unknown: Linker sequence"
SILM

SEQ ID NO: 2233 - protein, 5 aa, Unknown
  source: /note="Description of Unknown: Linker sequence"
DTSGG

SEQ ID NO: 2234 - protein, 5 aa, Unknown
  source: /note="Description of Unknown: Linker sequence"
LGDGA

SEQ ID NO: 2235 - protein, 6 aa, Unknown
  source: /note="Description of Unknown: Linker sequence"
ANNSTL

SEQ ID NO: 2236 - protein, 6 aa, Unknown
  source: /note="Description of Unknown: Linker sequence"
IDEIQK

SEQ ID NO: 2237 - protein, 6 aa, Unknown
  source: /note="Description of Unknown: Linker sequence"
KLPSFE

SEQ ID NO: 2238 - protein, 6 aa, Unknown
  source: /note="Description of Unknown: Linker sequence"
QEVSQC

SEQ ID NO: 2239 - protein, 6 aa, Unknown
  source: /note="Description of Unknown: Linker sequence"
RSLSTT

SEQ ID NO: 2240 - protein, 6 aa, Unknown
  source: /note="Description of Unknown: Linker sequence"
SSNHKL

SEQ ID NO: 2241 - protein, 6 aa, Unknown
  source: /note="Description of Unknown: Linker sequence"
TFESSH

SEQ ID NO: 2242 - protein, 7 aa, Unknown
  source: /note="Description of Unknown: Linker sequence"
TALRPSA

SEQ ID NO: 2243 - protein, 8 aa, Unknown
  source: /note="Description of Unknown: Linker sequence"
PLYESPRK

SEQ ID NO: 2244 - protein, 9 aa, Unknown
  source: /note="Description of Unknown: Linker sequence"
LNSDGYPDS

SEQ ID NO: 2245 - protein, 9 aa, Unknown
  source: /note="Description of Unknown: Linker sequence"
LWTDISARI

SEQ ID NO: 2246 - protein, 11 aa, Unknown
  source: /note="Description of Unknown: Linker sequence"
HKEMLGGEIIP

SEQ ID NO: 2247 - protein, 12 aa, Unknown
  source: /note="Description of Unknown: Linker sequence"
TLGTQPTVLRTF

SEQ ID NO: 2248 - protein, 12 aa, Unknown
  source: /note="Description of Unknown: Linker sequence"
VFSNVNLKEVNY

SEQ ID NO: 2249 - protein, 13 aa, Unknown
  source: /note="Description of Unknown: Linker sequence"
NVFACSDRPTVIY

SEQ ID NO: 2250 - protein, 14 aa, Unknown
  source: /note="Description of Unknown: Linker sequence"
DITPLGDSNGLSPL

SEQ ID NO: 2251 - protein, 14 aa, Unknown
  source: /note="Description of Unknown: Linker sequence"
FGLNIETGLLSDRK

SEQ ID NO: 2252 - protein, 29 aa, Unknown
  source: /note="Description of Unknown: Linker sequence"
TQALSSSVSSSKLFSSSTAPHETSFGEEV

SEQ ID NO: 2253 - protein, 4 aa, Unknown
  source: /note="Description of Unknown: Linker sequence"
EHGV

SEQ ID NO: 2254 - protein, 4 aa, Unknown
  source: /note="Description of Unknown: Linker sequence"
REGK

SEQ ID NO: 2255 - protein, 5 aa, Unknown
  source: /note="Description of Unknown: Linker sequence"
TVLHA

SEQ ID NO: 2256 - protein, 6 aa, Unknown
  source: /note="Description of Unknown: Linker sequence"
ETEKTG

SEQ ID NO: 2257 - protein, 6 aa, Unknown
  source: /note="Description of Unknown: Linker sequence"
FHYEGG

SEQ ID NO: 2258 - protein, 6 aa, Unknown
  source: /note="Description of Unknown: Linker sequence"
LDSGVS

SEQ ID NO: 2259 - protein, 6 aa, Unknown
  source: /note="Description of Unknown: Linker sequence"
PQAPLA

SEQ ID NO: 2260 - protein, 7 aa, Unknown
  source: /note="Description of Unknown: Linker sequence"
DKRDGKE

SEQ ID NO: 2261 - protein, 8 aa, Unknown
  source: /note="Description of Unknown: Linker sequence"
IHPEEGVS

SEQ ID NO: 2262 - protein, 14 aa, Unknown
  source: /note="Description of Unknown: Linker sequence"
PSLETFTNVTEFEY

SEQ ID NO: 2263 - protein, 19 aa, Unknown
  source: /note="Description of Unknown: Linker sequence"
GGKFDDNSYKVSGGLHGVG

SEQ ID NO: 2264 - protein, 5 aa, Unknown
  source: /note="Description of Unknown: Linker sequence"
MKPEN

SEQ ID NO: 2265 - protein, 6 aa, Unknown
  source: /note="Description of Unknown: Linker sequence"
TNISRA

SEQ ID NO: 2266 - protein, 7 aa, Unknown
  source: /note="Description of Unknown: Linker sequence"
LLESGRL

SEQ ID NO: 2267 - protein, 15 aa, Unknown
  source: /note="Description of Unknown: Linker sequence"
VWGTKGLANEGKVIG

SEQ ID NO: 2268 - protein, 28 aa, Unknown
  source: /note="Description of Unknown: Linker sequence"
TLSQWGFFSPYGIGDNDACTINPYDGWA

SEQ ID NO: 2269 - protein, 4 aa, Unknown
  source: /note="Description of Unknown: Linker sequence"
MERE

SEQ ID NO: 2270 - protein, 7 aa, Unknown
  source: /note="Description of Unknown: Linker sequence"
FIDKPGI

SEQ ID NO: 2271 - protein, 8 aa, Unknown
  source: /note="Description of Unknown: Linker sequence"
TLNYTCPT

SEQ ID NO: 2272 - protein, 10 aa, Unknown
  source: /note="Description of Unknown: Linker sequence"
LLQERQDNLL

SEQ ID NO: 2273 - protein, 12 aa, Unknown
  source: /note="Description of Unknown: Linker sequence"
QRTTLPHIRSIT

SEQ ID NO: 2274 - protein, 4 aa, Unknown
  source: /note="Description of Unknown: Linker sequence"
VGGF

SEQ ID NO: 2275 - protein, 5 aa, Unknown
  source: /note="Description of Unknown: Linker sequence"
AKIQI

SEQ ID NO: 2276 - protein, 5 aa, Unknown
  source: /note="Description of Unknown: Linker sequence"
KEQNK

SEQ ID NO: 2277 - protein, 7 aa, Unknown
  source: /note="Description of Unknown: Linker sequence"
PGPKCPF

SEQ ID NO: 2278 - protein, 9 aa, Unknown
  source: /note="Description of Unknown: Linker sequence"
QLNYISIAS

SEQ ID NO: 2279 - protein, 9 aa, Unknown
  source: /note="Description of Unknown: Linker sequence"
SANNIAKYD

SEQ ID NO: 2280 - protein, 16 aa, Unknown
  source: /note="Description of Unknown: Linker sequence"
AIKGNIDAPQVVEGEK

SEQ ID NO: 2281 - protein, 18 aa, Unknown
  source: /note="Description of Unknown: Linker sequence"
VIPQGRSHPVQPYPGAFV

SEQ ID NO: 2282 - protein, 4 aa, Unknown
  source: /note="Description of Unknown: Linker sequence"
ETSR

SEQ ID NO: 2283 - protein, 5 aa, Unknown
  source: /note="Description of Unknown: Linker sequence"
GVGRR

SEQ ID NO: 2284 - protein, 6 aa, Unknown
  source: /note="Description of Unknown: Linker sequence"
FFLGQI

SEQ ID NO: 2285 - protein, 6 aa, Unknown
  source: /note="Description of Unknown: Linker sequence"
LEGSSL

SEQ ID NO: 2286 - protein, 8 aa, Unknown
  source: /note="Description of Unknown: Linker sequence"
DLSQVNEL

SEQ ID NO: 2287 - protein, 8 aa, Unknown
  source: /note="Description of Unknown: Linker sequence"
KNANGDYF

SEQ ID NO: 2288 - protein, 11 aa, Unknown
  source: /note="Description of Unknown: Linker sequence"
ILPLPYPNSPV

SEQ ID NO: 2289 - protein, 12 aa, Unknown
  source: /note="Description of Unknown: Linker sequence"
FADPTIQSQSEI

SEQ ID NO: 2290 - protein, 13 aa, Unknown
  source: /note="Description of Unknown: Linker sequence"
CGPYFANDNFSLE

SEQ ID NO: 2291 - protein, 15 aa, Unknown
  source: /note="Description of Unknown: Linker sequence"
PDSPTYDKFLNPESL

SEQ ID NO: 2292 - protein, 4 aa, Unknown
  source: /note="Description of Unknown: Linker sequence"
TGDL

SEQ ID NO: 2293 - protein, 6 aa, Unknown
  source: /note="Description of Unknown: Linker sequence"
FDNEYE

SEQ ID NO: 2294 - protein, 7 aa, Unknown
  source: /note="Description of Unknown: Linker sequence"
SLKFEGD

SEQ ID NO: 2295 - protein, 13 aa, Unknown
  source: /note="Description of Unknown: Linker sequence"
VFNPEGRDLITDW

SEQ ID NO: 2296 - protein, 15 aa, Unknown
  source: /note="Description of Unknown: Linker sequence"
GGNYDINSHLPLIPE

SEQ ID NO: 2297 - protein, 5 aa, Unknown
  source: /note="Description of Unknown: Linker sequence"
RNEQD

SEQ ID NO: 2298 - protein, 4 aa, Unknown
  source: /note="Description of Unknown: Linker sequence"
KEGK

SEQ ID NO: 2299 - protein, 5 aa, Unknown
  source: /note="Description of Unknown: Linker sequence"
MEQAM

SEQ ID NO: 2300 - protein, 6 aa, Unknown
  source: /note="Description of Unknown: Linker sequence"
ILRVNV

SEQ ID NO: 2301 - protein, 7 aa, Unknown
  source: /note="Description of Unknown: Linker sequence"
LPDGEDP

SEQ ID NO: 2302 - protein, 7 aa, Unknown
  source: /note="Description of Unknown: Linker sequence"
LSIGIRR

SEQ ID NO: 2303 - protein, 8 aa, Unknown
  source: /note="Description of Unknown: Linker sequence"
DNAEPNRL

SEQ ID NO: 2304 - protein, 17 aa, Unknown
  source: /note="Description of Unknown: Linker sequence"
GFVRKAILASFPEGVGI

SEQ ID NO: 2305 - protein, 4 aa, Unknown
  source: /note="Description of Unknown: Linker sequence"
VDGV

SEQ ID NO: 2306 - protein, 5 aa, Unknown
  source: /note="Description of Unknown: Linker sequence"
LWNGG

SEQ ID NO: 2307 - protein, 5 aa, Unknown
  source: /note="Description of Unknown: Linker sequence"
RGISK

SEQ ID NO: 2308 - protein, 7 aa, Unknown
  source: /note="Description of Unknown: Linker sequence"
CYVCEKW

SEQ ID NO: 2309 - protein, 7 aa, Unknown
  source: /note="Description of Unknown: Linker sequence"
RDQNGNI

SEQ ID NO: 2310 - protein, 8 aa, Unknown
  source: /note="Description of Unknown: Linker sequence"
RDKDKNFK

SEQ ID NO: 2311 - protein, 8 aa, Unknown
  source: /note="Description of Unknown: Linker sequence"
TAGNEDTK

SEQ ID NO: 2312 - protein, 9 aa, Unknown
  source: /note="Description of Unknown: Linker sequence"
ESNGRYSAL

SEQ ID NO: 2313 - protein, 11 aa, Unknown
  source: /note="Description of Unknown: Linker sequence"
GSHKSDALFGK

SEQ ID NO: 2314 - protein, 18 aa, Unknown
  source: /note="Description of Unknown: Linker sequence"
SKRKPSGGKPGTYNVWNF

SEQ ID NO: 2315 - protein, 4 aa, Unknown
  source: /note="Description of Unknown: Linker sequence"
FYNM

SEQ ID NO: 2316 - protein, 4 aa, Unknown
  source: /note="Description of Unknown: Linker sequence"
KFTW

SEQ ID NO: 2317 - protein, 6 aa, Unknown
  source: /note="Description of Unknown: Linker sequence"
FITPII

SEQ ID NO: 2318 - protein, 6 aa, Unknown
  source: /note="Description of Unknown: Linker sequence"
FSKKKA

SEQ ID NO: 2319 - protein, 7 aa, Unknown
  source: /note="Description of Unknown: Linker sequence"
SNLDRHL

SEQ ID NO: 2320 - protein, 8 aa, Unknown
  source: /note="Description of Unknown: Linker sequence"
FHSLQGND

SEQ ID NO: 2321 - protein, 8 aa, Unknown
  source: /note="Description of Unknown: Linker sequence"
ITKPTKNT

SEQ ID NO: 2322 - protein, 10 aa, Unknown
  source: /note="Description of Unknown: Linker sequence"
YYKGLGTSLA

SEQ ID NO: 2323 - protein, 14 aa, Unknown
  source: /note="Description of Unknown: Linker sequence"
QYEPGTVLDPTLKE

SEQ ID NO: 2324 - protein, 6 aa, Unknown
  source: /note="Description of Unknown: Linker sequence"
LNPSSR

SEQ ID NO: 2325 - protein, 8 aa, Unknown
  source: /note="Description of Unknown: Linker sequence"
QRAPPKTF

SEQ ID NO: 2326 - protein, 12 aa, Unknown
  source: /note="Description of Unknown: Linker sequence"
ADAKVMKDAKTK

SEQ ID NO: 2327 - protein, 4 aa, Unknown
  source: /note="Description of Unknown: Linker sequence"
LNGN

SEQ ID NO: 2328 - protein, 5 aa, Unknown
  source: /note="Description of Unknown: Linker sequence"
AGEME

SEQ ID NO: 2329 - protein, 6 aa, Unknown
  source: /note="Description of Unknown: Linker sequence"
MDNMGR

SEQ ID NO: 2330 - protein, 6 aa, Unknown
  source: /note="Description of Unknown: Linker sequence"
SREYKK

SEQ ID NO: 2331 - protein, 6 aa, Unknown
  source: /note="Description of Unknown: Linker sequence"
STKDVK

SEQ ID NO: 2332 - protein, 7 aa, Unknown
  source: /note="Description of Unknown: Linker sequence"
KLPVKGF

SEQ ID NO: 2333 - protein, 7 aa, Unknown
  source: /note="Description of Unknown: Linker sequence"
PFNGEDY

SEQ ID NO: 2334 - protein, 8 aa, Unknown
  source: /note="Description of Unknown: Linker sequence"
FKMQSLDK

SEQ ID NO: 2335 - protein, 4 aa, Unknown
  source: /note="Description of Unknown: Linker sequence"
TPEG

SEQ ID NO: 2336 - protein, 5 aa, Unknown
  source: /note="Description of Unknown: Linker sequence"
VGPLK

SEQ ID NO: 2337 - protein, 6 aa, Unknown
  source: /note="Description of Unknown: Linker sequence"
ETDADF

SEQ ID NO: 2338 - protein, 8 aa, Unknown
  source: /note="Description of Unknown: Linker sequence"
IPEEDGSS

SEQ ID NO: 2339 - protein, 9 aa, Unknown
  source: /note="Description of Unknown: Linker sequence"
DCTKLGTGA

SEQ ID NO: 2340 - protein, 10 aa, Unknown
  source: /note="Description of Unknown: Linker sequence"
NIPNDVTKLN

SEQ ID NO: 2341 - protein, 15 aa, Unknown
  source: /note="Description of Unknown: Linker sequence"
GAARPGLRLPGCVDA

SEQ ID NO: 2342 - protein, 12 aa, Unknown
  source: /note="Description of Unknown: Linker sequence"
RLRRNDDEPAEM

SEQ ID NO: 2343 - protein, 4 aa, Unknown
  source: /note="Description of Unknown: Linker sequence"
LDQR

SEQ ID NO: 2344 - protein, 5 aa, Unknown
  source: /note="Description of Unknown: Linker sequence"
VDGNR

SEQ ID NO: 2345 - protein, 6 aa, Unknown
  source: /note="Description of Unknown: Linker sequence"
PLRRFY

SEQ ID NO: 2346 - protein, 6 aa, Unknown
  source: /note="Description of Unknown: Linker sequence"
YAEEDG

SEQ ID NO: 2347 - protein, 6 aa, Unknown
  source: /note="Description of Unknown: Linker sequence"
YEDGRL

SEQ ID NO: 2348 - protein, 7 aa, Unknown
  source: /note="Description of Unknown: Linker sequence"
RSNQGTA

SEQ ID NO: 2349 - protein, 10 aa, Unknown
  source: /note="Description of Unknown: Linker sequence"
DGPASENGFL

SEQ ID NO: 2350 - protein, 14 aa, Unknown
  source: /note="Description of Unknown: Linker sequence"
PRVVVGQRVRKGDL

SEQ ID NO: 2351 - protein, 16 aa, Unknown
  source: /note="Description of Unknown: Linker sequence"
ELITNIGETAGVVQDI

SEQ ID NO: 2352 - protein, 20 aa, Unknown
  source: /note="Description of Unknown: Linker sequence"
SDPTLPRSDRECPKCHSREN

SEQ ID NO: 2353 - protein, 5 aa, Unknown
  source: /note="Description of Unknown: Linker sequence"
VEGEV

SEQ ID NO: 2354 - protein, 8 aa, Unknown
  source: /note="Description of Unknown: Linker sequence"
YVPVVQEV

SEQ ID NO: 2355 - protein, 4 aa, Unknown
  source: /note="Description of Unknown: Linker sequence"
YQNN

SEQ ID NO: 2356 - protein, 5 aa, Unknown
  source: /note="Description of Unknown: Linker sequence"
LVVNI

SEQ ID NO: 2357 - protein, 6 aa, Unknown
  source: /note="Description of Unknown: Linker sequence"
EKNFQT

SEQ ID NO: 2358 - protein, 11 aa, Unknown
  source: /note="Description of Unknown: Linker sequence"
MKLVPSIPPAT

SEQ ID NO: 2359 - protein, 14 aa, Unknown
  source: /note="Description of Unknown: Linker sequence"
TQPDVPFKNPDNVV

SEQ ID NO: 2360 - protein, 32 aa, Unknown
  source: /note="Description of Unknown: Linker sequence"
YPEDHNEPQSVRAASSDPGEVVPSACAADEPV

SEQ ID NO: 2361 - protein, 4 aa, Unknown
  source: /note="Description of Unknown: Linker sequence"
ALCL

SEQ ID NO: 2362 - protein, 4 aa, Unknown
  source: /note="Description of Unknown: Linker sequence"
LLSL

SEQ ID NO: 2363 - protein, 7 aa, Unknown
  source: /note="Description of Unknown: Linker sequence"
LNNVRFS

SEQ ID NO: 2364 - protein, 7 aa, Unknown
  source: /note="Description of Unknown: Linker sequence"
SLCKAHL

SEQ ID NO: 2365 - protein, 8 aa, Unknown
  source: /note="Description of Unknown: Linker sequence"
EHNNLVNV

SEQ ID NO: 2366 - protein, 8 aa, Unknown
  source: /note="Description of Unknown: Linker sequence"
YDTGRTGR

SEQ ID NO: 2367 - protein, 11 aa, Unknown
  source: /note="Description of Unknown: Linker sequence"
QHNLKQNDQPQ

SEQ ID NO: 2368 - protein, 11 aa, Unknown
  source: /note="Description of Unknown: Linker sequence"
LYPNAQTGHGH

SEQ ID NO: 2369 - protein, 13 aa, Unknown
  source: /note="Description of Unknown: Linker sequence"
AEVTYKHHEPTGC

SEQ ID NO: 2370 - protein, 4 aa, Unknown
  source: /note="Description of Unknown: Linker sequence"
MITP

SEQ ID NO: 2371 - protein, 8 aa, Unknown
  source: /note="Description of Unknown: Linker sequence"
LQHPKIIK

SEQ ID NO: 2372 - protein, 12 aa, Unknown
  source: /note="Description of Unknown: Linker sequence"
REDEEMGLTTTS

SEQ ID NO: 2373 - protein, 5 aa, Unknown
  source: /note="Description of Unknown: Linker sequence"
GSREE

SEQ ID NO: 2374 - protein, 4 aa, Unknown
  source: /note="Description of Unknown: Linker sequence"
ENTC

SEQ ID NO: 2375 - protein, 11 aa, Unknown
  source: /note="Description of Unknown: Linker sequence"
PVSGAKTFKNE

SEQ ID NO: 2376 - protein, 5 aa, Unknown
  source: /note="Description of Unknown: Linker sequence"
LSQDD

SEQ ID NO: 2377 - protein, 8 aa, Unknown
  source: /note="Description of Unknown: Linker sequence"
LLGADDDL

SEQ ID NO: 2378 - protein, 4 aa, Unknown
  source: /note="Description of Unknown: Linker sequence"
GHGE

SEQ ID NO: 2379 - protein, 4 aa, Unknown
  source: /note="Description of Unknown: Linker sequence"
PKGR

SEQ ID NO: 2380 - protein, 5 aa, Unknown
  source: /note="Description of Unknown: Linker sequence"
ALPSP

SEQ ID NO: 2381 - protein, 6 aa, Unknown
  source: /note="Description of Unknown: Linker sequence"
DYGVEV

SEQ ID NO: 2382 - protein, 6 aa, Unknown
  source: /note="Description of Unknown: Linker sequence"
EDPSLK

SEQ ID NO: 2383 - protein, 7 aa, Unknown
  source: /note="Description of Unknown: Linker sequence"
FGDGPPL

SEQ ID NO: 2384 - protein, 8 aa, Unknown
  source: /note="Description of Unknown: Linker sequence"
RQEETGEL

SEQ ID NO: 2385 - protein, 8 aa, Unknown
  source: /note="Description of Unknown: Linker sequence"
SVPKVPYR

SEQ ID NO: 2386 - protein, 8 aa, Unknown
  source: /note="Description of Unknown: Linker sequence"
WQGEKPES

SEQ ID NO: 2387 - protein, 12 aa, Unknown
  source: /note="Description of Unknown: Linker sequence"
EVPFARLPDPNV

SEQ ID NO: 2388 - protein, 4 aa, Unknown
  source: /note="Description of Unknown: Linker sequence"
DIYV

SEQ ID NO: 2389 - protein, 6 aa, Unknown
  source: /note="Description of Unknown: Linker sequence"
IGENIN

SEQ ID NO: 2390 - protein, 7 aa, Unknown
  source: /note="Description of Unknown: Linker sequence"
AGKITDV

SEQ ID NO: 2391 - protein, 8 aa, Unknown
  source: /note="Description of Unknown: Linker sequence"
KAGNVAAD

SEQ ID NO: 2392 - protein, 14 aa, Unknown
  source: /note="Description of Unknown: Linker sequence"
YIPVPTRDLEKPFL

SEQ ID NO: 2393 - protein, 4 aa, Unknown
  source: /note="Description of Unknown: Linker sequence"
GEHI

SEQ ID NO: 2394 - protein, 4 aa, Unknown
  source: /note="Description of Unknown: Linker sequence"
EGPE

SEQ ID NO: 2395 - protein, 4 aa, Unknown
  source: /note="Description of Unknown: Linker sequence"
FEWT

SEQ ID NO: 2396 - protein, 4 aa, Unknown
  source: /note="Description of Unknown: Linker sequence"
KATY

SEQ ID NO: 2397 - protein, 4 aa, Unknown
  source: /note="Description of Unknown: Linker sequence"
KDGV

SEQ ID NO: 2398 - protein, 4 aa, Unknown
  source: /note="Description of Unknown: Linker sequence"
LLGS

SEQ ID NO: 2399 - protein, 4 aa, Unknown
  source: /note="Description of Unknown: Linker sequence"
VSKS

SEQ ID NO: 2400 - protein, 7 aa, Unknown
  source: /note="Description of Unknown: Linker sequence"
KAPDGRI

SEQ ID NO: 2401 - protein, 8 aa, Unknown
  source: /note="Description of Unknown: Linker sequence"
RKASNKAY

SEQ ID NO: 2402 - protein, 10 aa, Unknown
  source: /note="Description of Unknown: Linker sequence"
YAPILYENDH

SEQ ID NO: 2403 - protein, 4 aa, Unknown
  source: /note="Description of Unknown: Linker sequence"
YSLG

SEQ ID NO: 2404 - protein, 6 aa, Unknown
  source: /note="Description of Unknown: Linker sequence"
LDPQWS

SEQ ID NO: 2405 - protein, 7 aa, Unknown
  source: /note="Description of Unknown: Linker sequence"
REGNGPT

SEQ ID NO: 2406 - protein, 7 aa, Unknown
  source: /note="Description of Unknown: Linker sequence"
RGEQVAF

SEQ ID NO: 2407 - protein, 8 aa, Unknown
  source: /note="Description of Unknown: Linker sequence"
QQPHGPYY

SEQ ID NO: 2408 - protein, 11 aa, Unknown
  source: /note="Description of Unknown: Linker sequence"
LDTWPPETQNW

SEQ ID NO: 2409 - protein, 13 aa, Unknown
  source: /note="Description of Unknown: Linker sequence"
CFHPASGFAWQFS

SEQ ID NO: 2410 - protein, 16 aa, Unknown
  source: /note="Description of Unknown: Linker sequence"
GIQSPRPNGPMQTAAN

SEQ ID NO: 2411 - protein, 17 aa, Unknown
  source: /note="Description of Unknown: Linker sequence"
IDAEEDSTRRMGFETIL

SEQ ID NO: 2412 - protein, 22 aa, Unknown
  source: /note="Description of Unknown: Linker sequence"
EMPDAPLQPGWDRPETPYSPPL

SEQ ID NO: 2413 - protein, 6 aa, Unknown
  source: /note="Description of Unknown: Linker sequence"
LLDAPV

SEQ ID NO: 2414 - protein, 5 aa, Unknown
  source: /note="Description of Unknown: Linker sequence"
EHIDL

SEQ ID NO: 2415 - protein, 5 aa, Unknown
  source: /note="Description of Unknown: Linker sequence"
FGCDK

SEQ ID NO: 2416 - protein, 7 aa, Unknown
  source: /note="Description of Unknown: Linker sequence"
CDCKHTT

SEQ ID NO: 2417 - protein, 9 aa, Unknown
  source: /note="Description of Unknown: Linker sequence"
LNGNDNTIK

SEQ ID NO: 2418 - protein, 10 aa, Unknown
  source: /note="Description of Unknown: Linker sequence"
ISENKNDAKV

SEQ ID NO: 2419 - protein, 8 aa, Unknown
  source: /note="Description of Unknown: Linker sequence"
TAACTNTS

SEQ ID NO: 2420 - protein, 4 aa, Unknown
  source: /note="Description of Unknown: Linker sequence"
LTLL

SEQ ID NO: 2421 - protein, 12 aa, Unknown
  source: /note="Description of Unknown: Linker sequence"
DWENWQNVGQWR

SEQ ID NO: 2422 - protein, 8 aa, Unknown
  source: /note="Description of Unknown: Linker sequence"
STKNPVHA

SEQ ID NO: 2423 - protein, 5 aa, Unknown
  source: /note="Description of Unknown: Linker sequence"
THRNK

SEQ ID NO: 2424 - protein, 12 aa, Unknown
  source: /note="Description of Unknown: Linker sequence"
IDHVLGVPYTTV

SEQ ID NO: 2425 - protein, 4 aa, Unknown
  source: /note="Description of Unknown: Linker sequence"
IDGR

SEQ ID NO: 2426 - protein, 4 aa, Unknown
  source: /note="Description of Unknown: Linker sequence"
KGTQ

SEQ ID NO: 2427 - protein, 5 aa, Unknown
  source: /note="Description of Unknown: Linker sequence"
ETIKG

SEQ ID NO: 2428 - protein, 6 aa, Unknown
  source: /note="Description of Unknown: Linker sequence"
ECSSES

SEQ ID NO: 2429 - protein, 7 aa, Unknown
  source: /note="Description of Unknown: Linker sequence"
LDPTKTI

SEQ ID NO: 2430 - protein, 8 aa, Unknown
  source: /note="Description of Unknown: Linker sequence"
SKPEAEET

SEQ ID NO: 2431 - protein, 10 aa, Unknown
  source: /note="Description of Unknown: Linker sequence"
ETAVTQTYGG

SEQ ID NO: 2432 - protein, 11 aa, Unknown
  source: /note="Description of Unknown: Linker sequence"
FCTDHTVLVQT

SEQ ID NO: 2433 - protein, 4 aa, Unknown
  source: /note="Description of Unknown: Linker sequence"
SGGT

SEQ ID NO: 2434 - protein, 6 aa, Unknown
  source: /note="Description of Unknown: Linker sequence"
FNENGI

SEQ ID NO: 2435 - protein, 6 aa, Unknown
  source: /note="Description of Unknown: Linker sequence"
SFLNSM

SEQ ID NO: 2436 - protein, 7 aa, Unknown
  source: /note="Description of Unknown: Linker sequence"
QNTGANN

SEQ ID NO: 2437 - protein, 9 aa, Unknown
  source: /note="Description of Unknown: Linker sequence"
QNGYKPGDL

SEQ ID NO: 2438 - protein, 12 aa, Unknown
  source: /note="Description of Unknown: Linker sequence"
TTGTINGATAAT

SEQ ID NO: 2439 - protein, 15 aa, Unknown
  source: /note="Description of Unknown: Linker sequence"
DSSDPAATAPTTAST

SEQ ID NO: 2440 - protein, 11 aa, Unknown
  source: /note="Description of Unknown: Linker sequence"
AEQPGGWKGWR

SEQ ID NO: 2441 - protein, 4 aa, Unknown
  source: /note="Description of Unknown: Linker sequence"
GGGS

SEQ ID NO: 2442 - protein, 4 aa, Unknown
  source: /note="Description of Unknown: Linker sequence"
GGGG

SEQ ID NO: 2443 - protein, 5 aa, Unknown
  source: /note="Description of Unknown: Linker sequence"
GGGGS

SEQ ID NO: 2444 - protein, 6 aa, Unknown
  source: /note="Description of Unknown: Linker sequence"
GGGGGG

SEQ ID NO: 2445 - protein, 8 aa, Unknown
  source: /note="Description of Unknown: Linker sequence"
GGGGGGGG

SEQ ID NO: 2446 - protein, 10 aa, Unknown
  source: /note="Description of Unknown: Linker sequence"
GGGGSGGGGS

SEQ ID NO: 2447 - protein, 12 aa, Unknown
  source: /note="Description of Unknown: Linker sequence"
GSAGSAAGSGEF

SEQ ID NO: 2448 - protein, 14 aa, Unknown
  source: /note="Description of Unknown: Linker sequence"
EGKSSGSGSESKST

SEQ ID NO: 2449 - protein, 15 aa, Unknown
  source: /note="Description of Unknown: Linker sequence"
GGGGSGGGGSGGGGS

SEQ ID NO: 2450 - protein, 18 aa, Unknown
  source: /note="Description of Unknown: Linker sequence"
KESGSVSSEQLAQFRSLD

SEQ ID NO: 2451 - protein, 20 aa, Unknown
  source: /note="Description of Unknown: Linker sequence"
NSGAGSGGSSGSDGASGSRD

SEQ ID NO: 2452 - protein, 20 aa, Unknown
  source: /note="Description of Unknown: Linker sequence"
GGGGSGGGGSGGGGSGGGGS

SEQ ID NO: 2453 - protein, 36 aa, Unknown
  source: /note="Description of Unknown: Linker sequence"
GGSGGGSEGGGSEGGGSEGGGSEGGGSEGGGSGGGS

SEQ ID NO: 2454 - protein, 36 aa, Unknown
  source: /note="Description of Unknown: Linker sequence"
GGSAGGSGSGSSGGSSGASGTGTAGGTGSGSGTGSG

SEQ ID NO: 2455 - protein, 7 aa, Unknown
  source: /note="Description of Unknown: Linker sequence"
VYRFDKE

SEQ ID NO: 2456 - protein, 4 aa, Unknown
  source: /note="Description of Unknown: Linker sequence"
DAHG

SEQ ID NO: 2457 - protein, 4 aa, Unknown
  source: /note="Description of Unknown: Linker sequence"
KGAL

SEQ ID NO: 2458 - protein, 5 aa, Unknown
  source: /note="Description of Unknown: Linker sequence"
RGVEW

SEQ ID NO: 2459 - protein, 6 aa, Unknown
  source: /note="Description of Unknown: Linker sequence"
VTDHDW

SEQ ID NO: 2460 - protein, 7 aa, Unknown
  source: /note="Description of Unknown: Linker sequence"
SGLEVSE

SEQ ID NO: 2461 - protein, 8 aa, Unknown
  source: /note="Description of Unknown: Linker sequence"
LPLPLVPQ

SEQ ID NO: 2462 - protein, 8 aa, Unknown
  source: /note="Description of Unknown: Linker sequence"
VGEPEMPS

SEQ ID NO: 2463 - protein, 9 aa, Unknown
  source: /note="Description of Unknown: Linker sequence"
SAILPGRFQ

SEQ ID NO: 2464 - protein, 18 aa, Unknown
  source: /note="Description of Unknown: Linker sequence"
QGKCKKTCRDVFCPGSST

SEQ ID NO: 2465 - protein, 4 aa, Unknown
  source: /note="Description of Unknown: Linker sequence"
EEGL

SEQ ID NO: 2466 - protein, 4 aa, Unknown
  source: /note="Description of Unknown: Linker sequence"
FAGY

SEQ ID NO: 2467 - protein, 6 aa, Unknown
  source: /note="Description of Unknown: Linker sequence"
NKETRK

SEQ ID NO: 2468 - protein, 7 aa, Unknown
  source: /note="Description of Unknown: Linker sequence"
EKELYFK

SEQ ID NO: 2469 - protein, 7 aa, Unknown
  source: /note="Description of Unknown: Linker sequence"
FQGKIKG

SEQ ID NO: 2470 - protein, 7 aa, Unknown
  source: /note="Description of Unknown: Linker sequence"
MWPDADL

SEQ ID NO: 2471 - protein, 7 aa, Unknown
  source: /note="Description of Unknown: Linker sequence"
VGEGFAF

SEQ ID NO: 2472 - protein, 10 aa, Unknown
  source: /note="Description of Unknown: Linker sequence"
GTARASIPTY

SEQ ID NO: 2473 - protein, 13 aa, Unknown
  source: /note="Description of Unknown: Linker sequence"
FTPVSKDPQSANW

SEQ ID NO: 2474 - protein, 13 aa, Unknown
  source: /note="Description of Unknown: Linker sequence"
YLPKGEDGKDYSW

SEQ ID NO: 2475 - protein, 22 aa, Unknown
  source: /note="Description of Unknown: Linker sequence"
WGFERDENGNPKRDETLKHPRC

SEQ ID NO: 2476 - protein, 55 aa, Unknown
  source: /note="Description of Unknown: Linker sequence"
AYLYGPGREDGPLPEYYEPMECPVIEHPFSKTLHNPTALHFATEEKAVCDPRYPF

SEQ ID NO: 2477 - protein, 44 aa, Unknown
  source: /note="Description of Unknown: Linker sequence"
GRLFAINKMAEGPFPEHYEPIETPLGTNPLHPNVVSNPVVRLYE

SEQ ID NO: 2478 - protein, 4 aa, Unknown
  source: /note="Description of Unknown: Linker sequence"
AAQK

SEQ ID NO: 2479 - protein, 4 aa, Unknown
  source: /note="Description of Unknown: Linker sequence"
EDGL

SEQ ID NO: 2480 - protein, 4 aa, Unknown
  source: /note="Description of Unknown: Linker sequence"
FSGY

SEQ ID NO: 2481 - protein, 5 aa, Unknown
  source: /note="Description of Unknown: Linker sequence"
TNASL

SEQ ID NO: 2482 - protein, 6 aa, Unknown
  source: /note="Description of Unknown: Linker sequence"
DAEKRQ

SEQ ID NO: 2483 - protein, 7 aa, Unknown
  source: /note="Description of Unknown: Linker sequence"
DEGKVTG

SEQ ID NO: 2484 - protein, 7 aa, Unknown
  source: /note="Description of Unknown: Linker sequence"
ENNKINA

SEQ ID NO: 2485 - protein, 7 aa, Unknown
  source: /note="Description of Unknown: Linker sequence"
VRDDFAF

SEQ ID NO: 2486 - protein, 10 aa, Unknown
  source: /note="Description of Unknown: Linker sequence"
TLPSEKQVDL

SEQ ID NO: 2487 - protein, 11 aa, Unknown
  source: /note="Description of Unknown: Linker sequence"
WLPKWDQTYDV

SEQ ID NO: 2488 - protein, 12 aa, Unknown
  source: /note="Description of Unknown: Linker sequence"
ALRMGKKEQFPY

SEQ ID NO: 2489 - protein, 13 aa, Unknown
  source: /note="Description of Unknown: Linker sequence"
NTPKATLADQVNY

SEQ ID NO: 2490 - protein, 27 aa, Unknown
  source: /note="Description of Unknown: Linker sequence"
YDKSSWNYQLDENGYAKRDETLTHPRC

SEQ ID NO: 2491 - protein, 9 aa, Unknown
  source: /note="Description of Unknown: Linker sequence"
HLPATIGDY

SEQ ID NO: 2492 - protein, 4 aa, Unknown
  source: /note="Description of Unknown: Linker sequence"
SNRG

SEQ ID NO: 2493 - protein, 6 aa, Unknown
  source: /note="Description of Unknown: Linker sequence"
DAVKGK

SEQ ID NO: 2494 - protein, 7 aa, Unknown
  source: /note="Description of Unknown: Linker sequence"
LLPDGRV

SEQ ID NO: 2495 - protein, 7 aa, Unknown
  source: /note="Description of Unknown: Linker sequence"
MDGNGQI

SEQ ID NO: 2496 - protein, 7 aa, Unknown
  source: /note="Description of Unknown: Linker sequence"
QAGPSTA

SEQ ID NO: 2497 - protein, 7 aa, Unknown
  source: /note="Description of Unknown: Linker sequence"
SDNHAWL

SEQ ID NO: 2498 - protein, 7 aa, Unknown
  source: /note="Description of Unknown: Linker sequence"
VLPDGST

SEQ ID NO: 2499 - protein, 7 aa, Unknown
  source: /note="Description of Unknown: Linker sequence"
YNSNGNL

SEQ ID NO: 2500 - protein, 7 aa, Unknown
  source: /note="Description of Unknown: Linker sequence"
YTSGSGD

SEQ ID NO: 2501 - protein, 8 aa, Unknown
  source: /note="Description of Unknown: Linker sequence"
DLPIVPAA

SEQ ID NO: 2502 - protein, 8 aa, Unknown
  source: /note="Description of Unknown: Linker sequence"
IEPTSGRV

SEQ ID NO: 2503 - protein, 8 aa, Unknown
  source: /note="Description of Unknown: Linker sequence"
WDPSTGIV

SEQ ID NO: 2504 - protein, 9 aa, Unknown
  source: /note="Description of Unknown: Linker sequence"
EANGQPWTS

SEQ ID NO: 2505 - protein, 9 aa, Unknown
  source: /note="Description of Unknown: Linker sequence"
MLTADKQGL

SEQ ID NO: 2506 - protein, 9 aa, Unknown
  source: /note="Description of Unknown: Linker sequence"
VAPDAMCGN

SEQ ID NO: 2507 - protein, 10 aa, Unknown
  source: /note="Description of Unknown: Linker sequence"
TLGEPGTSPN

SEQ ID NO: 2508 - protein, 12 aa, Unknown
  source: /note="Description of Unknown: Linker sequence"
VTVTKHDMFCPG

SEQ ID NO: 2509 - protein, 13 aa, Unknown
  source: /note="Description of Unknown: Linker sequence"
KQNPNSIVRVYHS

SEQ ID NO: 2510 - protein, 14 aa, Unknown
  source: /note="Description of Unknown: Linker sequence"
FASNGLYFARTFHT

SEQ ID NO: 2511 - protein, 14 aa, Unknown
  source: /note="Description of Unknown: Linker sequence"
GGGLCGDCTTNHFD

SEQ ID NO: 2512 - protein, 14 aa, Unknown
  source: /note="Description of Unknown: Linker sequence"
QASSYTAPQPGLGR

SEQ ID NO: 2513 - protein, 16 aa, Unknown
  source: /note="Description of Unknown: Linker sequence"
FGGSPDYQDSDATTNA

SEQ ID NO: 2514 - protein, 17 aa, Unknown
  source: /note="Description of Unknown: Linker sequence"
WSSYRNDAFGGSPGGIT

SEQ ID NO: 2515 - protein, 20 aa, Unknown
  source: /note="Description of Unknown: Linker sequence"
TGGQRRGIPFEDSTPVFTPE

SEQ ID NO: 2516 - protein, 10 aa, Unknown
  source: /note="Description of Unknown: Linker sequence"
LIPQHTGTFR

SEQ ID NO: 2517 - protein, 11 aa, Unknown
  source: /note="Description of Unknown: Linker sequence"
EPRSQPHTKPS

SEQ ID NO: 2518 - protein, 4 aa, Unknown
  source: /note="Description of Unknown: Linker sequence"
KPAP

SEQ ID NO: 2519 - protein, 6 aa, Unknown
  source: /note="Description of Unknown: Linker sequence"
IEGANG

SEQ ID NO: 2520 - protein, 8 aa, Unknown
  source: /note="Description of Unknown: Linker sequence"
PIKNMPID

SEQ ID NO: 2521 - protein, 12 aa, Unknown
  source: /note="Description of Unknown: Linker sequence"
DQPTAHPTVRDE

SEQ ID NO: 2522 - protein, 8 aa, Unknown
  source: /note="Description of Unknown: Linker sequence"
LVRTLVPT

SEQ ID NO: 2523 - protein, 9 aa, Unknown
  source: /note="Description of Unknown: Linker sequence"
AGAPVETPQ

SEQ ID NO: 2524 - protein, 11 aa, Unknown
  source: /note="Description of Unknown: Linker sequence"
SLDAPATSLTG

SEQ ID NO: 2525 - protein, 12 aa, Unknown
  source: /note="Description of Unknown: Linker sequence"
YAAGTPLSSPEL

SEQ ID NO: 2526 - protein, 4 aa, Unknown
  source: /note="Description of Unknown: Linker sequence"
KVEH

SEQ ID NO: 2527 - protein, 4 aa, Unknown
  source: /note="Description of Unknown: Linker sequence"
SHGQ

SEQ ID NO: 2528 - protein, 4 aa, Unknown
  source: /note="Description of Unknown: Linker sequence"
VDLS

SEQ ID NO: 2529 - protein, 5 aa, Unknown
  source: /note="Description of Unknown: Linker sequence"
KGLDA

SEQ ID NO: 2530 - protein, 5 aa, Unknown
  source: /note="Description of Unknown: Linker sequence"
LGPNA

SEQ ID NO: 2531 - protein, 5 aa, Unknown
  source: /note="Description of Unknown: Linker sequence"
LTGRI

SEQ ID NO: 2532 - protein, 6 aa, Unknown
  source: /note="Description of Unknown: Linker sequence"
ITRRSV

SEQ ID NO: 2533 - protein, 6 aa, Unknown
  source: /note="Description of Unknown: Linker sequence"
VKRQDI

SEQ ID NO: 2534 - protein, 7 aa, Unknown
  source: /note="Description of Unknown: Linker sequence"
FDKTGAE

SEQ ID NO: 2535 - protein, 17 aa, Unknown
  source: /note="Description of Unknown: Linker sequence"
ESNLQYDAGDKGIYRHY

SEQ ID NO: 2536 - protein, 5 aa, Unknown
  source: /note="Description of Unknown: Linker sequence"
DIGTI

SEQ ID NO: 2537 - protein, 27 aa, Unknown
  source: /note="Description of Unknown: Linker sequence"
TKKPVPDFSFYDRSAPIYTQPRYLPPS

SEQ ID NO: 2538 - protein, 4 aa, Unknown
  source: /note="Description of Unknown: Linker sequence"
KTPL

SEQ ID NO: 2539 - protein, 7 aa, Unknown
  source: /note="Description of Unknown: Linker sequence"
NCYGCET

SEQ ID NO: 2540 - protein, 16 aa, Unknown
  source: /note="Description of Unknown: Linker sequence"
YGIDVKIPEGLEPPNE

SEQ ID NO: 2541 - protein, 6 aa, Unknown
  source: /note="Description of Unknown: Linker sequence"
VGGFYN

SEQ ID NO: 2542 - protein, 7 aa, Unknown
  source: /note="Description of Unknown: Linker sequence"
VLTGKAR

SEQ ID NO: 2543 - protein, 14 aa, Unknown
  source: /note="Description of Unknown: Linker sequence"
FDVAESVIPSSGTF

SEQ ID NO: 2544 - protein, 5 aa, Unknown
  source: /note="Description of Unknown: Linker sequence"
TLKPW

SEQ ID NO: 2545 - protein, 9 aa, Unknown
  source: /note="Description of Unknown: Linker sequence"
VQNTTHLDE

SEQ ID NO: 2546 - protein, 11 aa, Unknown
  source: /note="Description of Unknown: Linker sequence"
LKGEPSDMDKA

SEQ ID NO: 2547 - protein, 14 aa, Unknown
  source: /note="Description of Unknown: Linker sequence"
HFPAMVSRISGIGL

SEQ ID NO: 2548 - protein, 15 aa, Unknown
  source: /note="Description of Unknown: Linker sequence"
QVSRGAEHLDDLDLN

SEQ ID NO: 2549 - protein, 26 aa, Unknown
  source: /note="Description of Unknown: Linker sequence"
LAQVDPGENARYCTLQGRNEVPDTLD

SEQ ID NO: 2550 - protein, 27 aa, Unknown
  source: /note="Description of Unknown: Linker sequence"
YNEEVVALPVGGFYRFRKSGDRHGWEG

SEQ ID NO: 2551 - protein, 13 aa, Unknown
  source: /note="Description of Unknown: Linker sequence"
HDPFTLEPYSRDP

SEQ ID NO: 2552 - protein, 13 aa, Unknown
  source: /note="Description of Unknown: Linker sequence"
YTPAGEPIPTNKR

SEQ ID NO: 2553 - protein, 4 aa, Unknown
  source: /note="Description of Unknown: Linker sequence"
NIPP

SEQ ID NO: 2554 - protein, 4 aa, Unknown
  source: /note="Description of Unknown: Linker sequence"
RGWA

SEQ ID NO: 2555 - protein, 5 aa, Unknown
  source: /note="Description of Unknown: Linker sequence"
AFETP

SEQ ID NO: 2556 - protein, 5 aa, Unknown
  source: /note="Description of Unknown: Linker sequence"
DELRG

SEQ ID NO: 2557 - protein, 6 aa, Unknown
  source: /note="Description of Unknown: Linker sequence"
EIPDVV

SEQ ID NO: 2558 - protein, 7 aa, Unknown
  source: /note="Description of Unknown: Linker sequence"
KGGYDGR

SEQ ID NO: 2559 - protein, 7 aa, Unknown
  source: /note="Description of Unknown: Linker sequence"
RRGEPHV

SEQ ID NO: 2560 - protein, 8 aa, Unknown
  source: /note="Description of Unknown: Linker sequence"
LKVPRPGT

SEQ ID NO: 2561 - protein, 14 aa, Unknown
  source: /note="Description of Unknown: Linker sequence"
NLDGKPLLTGKRNP

SEQ ID NO: 2562 - protein, 6 aa, Unknown
  source: /note="Description of Unknown: Linker sequence"
DHSDVA

SEQ ID NO: 2563 - protein, 8 aa, Unknown
  source: /note="Description of Unknown: Linker sequence"
FKPAYGSI

SEQ ID NO: 2564 - protein, 19 aa, Unknown
  source: /note="Description of Unknown: Linker sequence"
AFPGTPHLLPPANSGDADA

SEQ ID NO: 2565 - protein, 12 aa, Unknown
  source: /note="Description of Unknown: Linker sequence"
YGKDDKLYPKDP

SEQ ID NO: 2566 - protein, 9 aa, Unknown
  source: /note="Description of Unknown: Linker sequence"
KYNLYGKDI

SEQ ID NO: 2567 - protein, 6 aa, Unknown
  source: /note="Description of Unknown: Linker sequence"
LREGNL

SEQ ID NO: 2568 - protein, 6 aa, Unknown
  source: /note="Description of Unknown: Linker sequence"
DCNEKL

SEQ ID NO: 2569 - protein, 6 aa, Unknown
  source: /note="Description of Unknown: Linker sequence"
LYPSDP

SEQ ID NO: 2570 - protein, 6 aa, Unknown
  source: /note="Description of Unknown: Linker sequence"
YGAHDA

SEQ ID NO: 2571 - protein, 9 aa, Unknown
  source: /note="Description of Unknown: Linker sequence"
QFKMMGETD

SEQ ID NO: 2572 - protein, 6 aa, Unknown
  source: /note="Description of Unknown: Linker sequence"
FETEYF

SEQ ID NO: 2573 - protein, 11 aa, Unknown
  source: /note="Description of Unknown: Linker sequence"
TSPHDHQTHAY

SEQ ID NO: 2574 - protein, 9 aa, Unknown
  source: /note="Description of Unknown: Linker sequence"
KADPKGITE

SEQ ID NO: 2575 - protein, 34 aa, Unknown
  source: /note="Description of Unknown: Linker sequence"
LTAKEPTEVESVECPHIAVGVWEANEKLPETPDR

SEQ ID NO: 2576 - protein, 4 aa, Unknown
  source: /note="Description of Unknown: Linker sequence"
VVPN

SEQ ID NO: 2577 - protein, 5 aa, Unknown
  source: /note="Description of Unknown: Linker sequence"
LSPPV

SEQ ID NO: 2578 - protein, 7 aa, Unknown
  source: /note="Description of Unknown: Linker sequence"
DVKNGEC

SEQ ID NO: 2579 - protein, 7 aa, Unknown
  source: /note="Description of Unknown: Linker sequence"
KDDIVDR

SEQ ID NO: 2580 - protein, 7 aa, Unknown
  source: /note="Description of Unknown: Linker sequence"
SDKKCSV

SEQ ID NO: 2581 - protein, 7 aa, Unknown
  source: /note="Description of Unknown: Linker sequence"
TKVPLVA

SEQ ID NO: 2582 - protein, 9 aa, Unknown
  source: /note="Description of Unknown: Linker sequence"
LAQLDNYGQ

SEQ ID NO: 2583 - protein, 12 aa, Unknown
  source: /note="Description of Unknown: Linker sequence"
NYNVKSPITGND

SEQ ID NO: 2584 - protein, 85 aa, Unknown
  source: /note="Description of Unknown: Linker sequence"
KPLKEPKTVNVVQFEPSKGAIGKAYKKDAKLVMEYLAICDECYITEMEMLLNEKGEFTIETEGKTFQLTKDMINVKRFQKTLYVE

SEQ ID NO: 2585 - protein, 4 aa, Unknown
  source: /note="Description of Unknown: Linker sequence"
SNGG

SEQ ID NO: 2586 - protein, 13 aa, Unknown
  source: /note="Description of Unknown: Linker sequence"
FSVDEIVQPDPPI

SEQ ID NO: 2587 - protein, 10 aa, Unknown
  source: /note="Description of Unknown: Linker sequence"
LTPRRSRKLK

SEQ ID NO: 2588 - protein, 6 aa, Unknown
  source: /note="Description of Unknown: Linker sequence"
DEPRSV

SEQ ID NO: 2589 - protein, 29 aa, Unknown
  source: /note="Description of Unknown: Linker sequence"
LPTANGDGGALALDSLTVLGAGGNNANDW

SEQ ID NO: 2590 - protein, 6 aa, Unknown
  source: /note="Description of Unknown: Linker sequence"
RNNLTR

SEQ ID NO: 2591 - protein, 8 aa, Unknown
  source: /note="Description of Unknown: Linker sequence"
RAMTDVHQ

SEQ ID NO: 2592 - protein, 24 aa, Unknown
  source: /note="Description of Unknown: Linker sequence"
TTENPELQLEPLSAPEVTEPTATD

SEQ ID NO: 2593 - protein, 6 aa, Unknown
  source: /note="Description of Unknown: Linker sequence"
VPRDCG

SEQ ID NO: 2594 - protein, 7 aa, Unknown
  source: /note="Description of Unknown: Linker sequence"
VRSRGPE

SEQ ID NO: 2595 - protein, 40 aa, Unknown
  source: /note="Description of Unknown: Linker sequence"
QEPEFQRMSALRLAACKRKEQEHGKDRGNTPKKPRLVFTD

SEQ ID NO: 2596 - protein, 14 aa, Unknown
  source: /note="Description of Unknown: Linker sequence"
AEGFGLPEEKGPDL

SEQ ID NO: 2597 - protein, 4 aa, Unknown
  source: /note="Description of Unknown: Linker sequence"
KGGK

SEQ ID NO: 2598 - protein, 6 aa, Unknown
  source: /note="Description of Unknown: Linker sequence"
KNQKPI

SEQ ID NO: 2599 - protein, 7 aa, Unknown
  source: /note="Description of Unknown: Linker sequence"
RGTLNVS

SEQ ID NO: 2600 - protein, 9 aa, Unknown
  source: /note="Description of Unknown: Linker sequence"
TVGAGLPII

SEQ ID NO: 2601 - protein, 4 aa, Unknown
  source: /note="Description of Unknown: Linker sequence"
LDGE

SEQ ID NO: 2602 - protein, 4 aa, Unknown
  source: /note="Description of Unknown: Linker sequence"
LGNW

SEQ ID NO: 2603 - protein, 7 aa, Unknown
  source: /note="Description of Unknown: Linker sequence"
HLFPDCA

SEQ ID NO: 2604 - protein, 18 aa, Unknown
  source: /note="Description of Unknown: Linker sequence"
IPKAELLTSESRGVLPDT

SEQ ID NO: 2605 - protein, 5 aa, Unknown
  source: /note="Description of Unknown: Linker sequence"
ETVAP

SEQ ID NO: 2606 - protein, 6 aa, Unknown
  source: /note="Description of Unknown: Linker sequence"
QGLTSF

SEQ ID NO: 2607 - protein, 7 aa, Unknown
  source: /note="Description of Unknown: Linker sequence"
VSKPKME

SEQ ID NO: 2608 - protein, 5 aa, Unknown
  source: /note="Description of Unknown: Linker sequence"
TVAAP

SEQ ID NO: 2609 - protein, 26 aa, Unknown
  source: /note="Description of Unknown: Linker sequence"
GGNPPGGNRGTTTTRRPATTTGSSPG

SEQ ID NO: 2610 - protein, 7 aa, Unknown
  source: /note="Description of Unknown: Linker sequence"
CKPCICT

SEQ ID NO: 2611 - protein, 6 aa, Unknown
  source: /note="Description of Unknown: Linker sequence"
VPSEVS

SEQ ID NO: 2612 - protein, 10 aa, Unknown
  source: /note="Description of Unknown: Linker sequence"
EPKSCDKTHT

SEQ ID NO: 2613 - protein, 7 aa, Unknown
  source: /note="Description of Unknown: Linker sequence"
CPPCKCP

SEQ ID NO: 2614 - protein, 9 aa, Unknown
  source: /note="Description of Unknown: Linker sequence"
EPRGPTIKP

SEQ ID NO: 2615 - protein, 5 aa, Unknown
  source: /note="Description of Unknown: Linker sequence"
ATENE

SEQ ID NO: 2616 - protein, 6 aa, Unknown
  source: /note="Description of Unknown: Linker sequence"
AKSVGI

SEQ ID NO: 2617 - protein, 7 aa, Unknown
  source: /note="Description of Unknown: Linker sequence"
ATWTGDS

SEQ ID NO: 2618 - protein, 10 aa, Unknown
  source: /note="Description of Unknown: Linker sequence"
ATITNANWDD

SEQ ID NO: 2619 - protein, 11 aa, Unknown
  source: /note="Description of Unknown: Linker sequence"
NGKDFSEPLPE

SEQ ID NO: 2620 - protein, 6 aa, Unknown
  source: /note="Description of Unknown: Linker sequence"
KQPLRR

SEQ ID NO: 2621 - protein, 8 aa, Unknown
  source: /note="Description of Unknown: Linker sequence"
LSPYTESS

SEQ ID NO: 2622 - protein, 4 aa, Unknown
  source: /note="Description of Unknown: Linker sequence"
VDSE

SEQ ID NO: 2623 - protein, 5 aa, Unknown
  source: /note="Description of Unknown: Linker sequence"
FVTGP

SEQ ID NO: 2624 - protein, 7 aa, Unknown
  source: /note="Description of Unknown: Linker sequence"
IKGDAYY

SEQ ID NO: 2625 - protein, 8 aa, Unknown
  source: /note="Description of Unknown: Linker sequence"
TKSGVVHF

SEQ ID NO: 2626 - protein, 9 aa, Unknown
  source: /note="Description of Unknown: Linker sequence"
VVLGEEVSF

SEQ ID NO: 2627 - protein, 12 aa, Unknown
  source: /note="Description of Unknown: Linker sequence"
IVPNDAAKPYNM

SEQ ID NO: 2628 - protein, 26 aa, Unknown
  source: /note="Description of Unknown: Linker sequence"
YLPSNNMEEPPYIDTGDPADRDATGV

SEQ ID NO: 2629 - protein, 4 aa, Unknown
  source: /note="Description of Unknown: Linker sequence"
GALP

SEQ ID NO: 2630 - protein, 8 aa, Unknown
  source: /note="Description of Unknown: Linker sequence"
FGVDWLKG

SEQ ID NO: 2631 - protein, 4 aa, Unknown
  source: /note="Description of Unknown: Linker sequence"
ILPQ

SEQ ID NO: 2632 - protein, 7 aa, Unknown
  source: /note="Description of Unknown: Linker sequence"
EAPLDNS

SEQ ID NO: 2633 - protein, 14 aa, Unknown
  source: /note="Description of Unknown: Linker sequence"
AAERVPLANPFAGE

SEQ ID NO: 2634 - protein, 4 aa, Unknown
  source: /note="Description of Unknown: Linker sequence"
EGVL

SEQ ID NO: 2635 - protein, 6 aa, Unknown
  source: /note="Description of Unknown: Linker sequence"
LVKIEP

SEQ ID NO: 2636 - protein, 6 aa, Unknown
  source: /note="Description of Unknown: Linker sequence"
RSLIGD

SEQ ID NO: 2637 - protein, 7 aa, Unknown
  source: /note="Description of Unknown: Linker sequence"
DASAVHP

SEQ ID NO: 2638 - protein, 7 aa, Unknown
  source: /note="Description of Unknown: Linker sequence"
EFPELDV

SEQ ID NO: 2639 - protein, 7 aa, Unknown
  source: /note="Description of Unknown: Linker sequence"
FSDYFEH

SEQ ID NO: 2640 - protein, 7 aa, Unknown
  source: /note="Description of Unknown: Linker sequence"
KVSRLGE

SEQ ID NO: 2641 - protein, 7 aa, Unknown
  source: /note="Description of Unknown: Linker sequence"
NGAFRTR

SEQ ID NO: 2642 - protein, 7 aa, Unknown
  source: /note="Description of Unknown: Linker sequence"
PLKSAPS

SEQ ID NO: 2643 - protein, 8 aa, Unknown
  source: /note="Description of Unknown: Linker sequence"
ARISGLNS

SEQ ID NO: 2644 - protein, 10 aa, Unknown
  source: /note="Description of Unknown: Linker sequence"
QRIAADTERD

SEQ ID NO: 2645 - protein, 11 aa, Unknown
  source: /note="Description of Unknown: Linker sequence"
ERFGLSNQGRA

SEQ ID NO: 2646 - protein, 11 aa, Unknown
  source: /note="Description of Unknown: Linker sequence"
LLAAPAGPRAT

SEQ ID NO: 2647 - protein, 12 aa, Unknown
  source: /note="Description of Unknown: Linker sequence"
KVGEEAPGTLHP

SEQ ID NO: 2648 - protein, 12 aa, Unknown
  source: /note="Description of Unknown: Linker sequence"
NAVGVDVNTASA

SEQ ID NO: 2649 - protein, 13 aa, Unknown
  source: /note="Description of Unknown: Linker sequence"
AAGFLRVMNGDNP

SEQ ID NO: 2650 - protein, 13 aa, Unknown
  source: /note="Description of Unknown: Linker sequence"
GVESLKDLKPGMV

SEQ ID NO: 2651 - protein, 13 aa, Unknown
  source: /note="Description of Unknown: Linker sequence"
SIGVGQYQHDVSQ

SEQ ID NO: 2652 - protein, 17 aa, Unknown
  source: /note="Description of Unknown: Linker sequence"
LDKPGRDPRPEFKTAEF

SEQ ID NO: 2653 - protein, 23 aa, Unknown
  source: /note="Description of Unknown: Linker sequence"
LKRLDPKKFTDETFGLPTVTDIL

SEQ ID NO: 2654 - protein, 4 aa, Unknown
  source: /note="Description of Unknown: Linker sequence"
LEGE

SEQ ID NO: 2655 - protein, 5 aa, Unknown
  source: /note="Description of Unknown: Linker sequence"
RLGFK

SEQ ID NO: 2656 - protein, 9 aa, Unknown
  source: /note="Description of Unknown: Linker sequence"
RGRPFEPPV

SEQ ID NO: 2657 - protein, 15 aa, Unknown
  source: /note="Description of Unknown: Linker sequence"
RGEVEETLKEDLPNV

SEQ ID NO: 2658 - protein, 4 aa, Unknown
  source: /note="Description of Unknown: Linker sequence"
LEYE

SEQ ID NO: 2659 - protein, 9 aa, Unknown
  source: /note="Description of Unknown: Linker sequence"
SYGLPPLNA

SEQ ID NO: 2660 - protein, 5 aa, Unknown
  source: /note="Description of Unknown: Linker sequence"
ILHDE

SEQ ID NO: 2661 - protein, 13 aa, Unknown
  source: /note="Description of Unknown: Linker sequence"
KGWGGLPIGTEGR

SEQ ID NO: 2662 - protein, 4 aa, Unknown
  source: /note="Description of Unknown: Linker sequence"
PQSP

SEQ ID NO: 2663 - protein, 6 aa, Unknown
  source: /note="Description of Unknown: Linker sequence"
DGFEAL

SEQ ID NO: 2664 - protein, 6 aa, Unknown
  source: /note="Description of Unknown: Linker sequence"
EQNPWK

SEQ ID NO: 2665 - protein, 6 aa, Unknown
  source: /note="Description of Unknown: Linker sequence"
SEHWQR

SEQ ID NO: 2666 - protein, 9 aa, Unknown
  source: /note="Description of Unknown: Linker sequence"
LDPQACPTV

SEQ ID NO: 2667 - protein, 5 aa, Unknown
  source: /note="Description of Unknown: Linker sequence"
KTPLT

SEQ ID NO: 2668 - protein, 6 aa, Unknown
  source: /note="Description of Unknown: Linker sequence"
LRQLTT

SEQ ID NO: 2669 - protein, 4 aa, Unknown
  source: /note="Description of Unknown: Linker sequence"
QNDI

SEQ ID NO: 2670 - protein, 7 aa, Unknown
  source: /note="Description of Unknown: Linker sequence"
INARAPV

SEQ ID NO: 2671 - protein, 9 aa, Unknown
  source: /note="Description of Unknown: Linker sequence"
TVTHGDIDL

SEQ ID NO: 2672 - protein, 10 aa, Unknown
  source: /note="Description of Unknown: Linker sequence"
TKTDVAGEAE

SEQ ID NO: 2673 - protein, 24 aa, Unknown
  source: /note="Description of Unknown: Linker sequence"
LFNTNGFMLEENVVSTKPRFHFIA

SEQ ID NO: 2674 - protein, 7 aa, Unknown
  source: /note="Description of Unknown: Linker sequence"
ASLDQPF

SEQ ID NO: 2675 - protein, 9 aa, Unknown
  source: /note="Description of Unknown: Linker sequence"
VKPGRQYQE

SEQ ID NO: 2676 - protein, 4 aa, Unknown
  source: /note="Description of Unknown: Linker sequence"
DGFE

SEQ ID NO: 2677 - protein, 5 aa, Unknown
  source: /note="Description of Unknown: Linker sequence"
LRRFN

SEQ ID NO: 2678 - protein, 6 aa, Unknown
  source: /note="Description of Unknown: Linker sequence"
KRTGET

SEQ ID NO: 2679 - protein, 16 aa, Unknown
  source: /note="Description of Unknown: Linker sequence"
VEGEQSIPMVSRLGMK

SEQ ID NO: 2680 - protein, 22 aa, Unknown
  source: /note="Description of Unknown: Linker sequence"
AEGHITTNHVAATRAAKSKVRR

SEQ ID NO: 2681 - protein, 8 aa, Unknown
  source: /note="Description of Unknown: Linker sequence"
VDKSDEPL

SEQ ID NO: 2682 - protein, 7 aa, Unknown
  source: /note="Description of Unknown: Linker sequence"
IVSPANE

SEQ ID NO: 2683 - protein, 11 aa, Unknown
  source: /note="Description of Unknown: Linker sequence"
VENEPNLCYNA

SEQ ID NO: 2684 - protein, 13 aa, Unknown
  source: /note="Description of Unknown: Linker sequence"
FITLEENKPTRPV

SEQ ID NO: 2685 - protein, 4 aa, Unknown
  source: /note="Description of Unknown: Linker sequence"
EDGI

SEQ ID NO: 2686 - protein, 4 aa, Unknown
  source: /note="Description of Unknown: Linker sequence"
HKLK

SEQ ID NO: 2687 - protein, 4 aa, Unknown
  source: /note="Description of Unknown: Linker sequence"
KGGE

SEQ ID NO: 2688 - protein, 4 aa, Unknown
  source: /note="Description of Unknown: Linker sequence"
SHSL

SEQ ID NO: 2689 - protein, 6 aa, Unknown
  source: /note="Description of Unknown: Linker sequence"
WSTDIL

SEQ ID NO: 2690 - protein, 9 aa, Unknown
  source: /note="Description of Unknown: Linker sequence"
DIIKPDPPK

SEQ ID NO: 2691 - protein, 13 aa, Unknown
  source: /note="Description of Unknown: Linker sequence"
KDQKEPKNKTFLR

SEQ ID NO: 2692 - protein, 7 aa, Unknown
  source: /note="Description of Unknown: Linker sequence"
WDNQCQC

SEQ ID NO: 2693 - protein, 42 aa, Unknown
  source: /note="Description of Unknown: Linker sequence"
SSATRSTTKQVTPQPEEQKERKTTEMQSPMQPVDQASLPGHC

SEQ ID NO: 2694 - protein, 5 aa, Unknown
  source: /note="Description of Unknown: Linker sequence"
LNKPI

SEQ ID NO: 2695 - protein, 5 aa, Unknown
  source: /note="Description of Unknown: Linker sequence"
NHQSN

SEQ ID NO: 2696 - protein, 5 aa, Unknown
  source: /note="Description of Unknown: Linker sequence"
NSIDQ

SEQ ID NO: 2697 - protein, 7 aa, Unknown
  source: /note="Description of Unknown: Linker sequence"
YLPNVTK

SEQ ID NO: 2698 - protein, 9 aa, Unknown
  source: /note="Description of Unknown: Linker sequence"
LANLKNLGW

SEQ ID NO: 2699 - protein, 9 aa, Unknown
  source: /note="Description of Unknown: Linker sequence"
LKDLKKLKS

SEQ ID NO: 2700 - protein, 10 aa, Unknown
  source: /note="Description of Unknown: Linker sequence"
FLDENKVKDL

SEQ ID NO: 2701 - protein, 10 aa, Unknown
  source: /note="Description of Unknown: Linker sequence"
NLKKKSVTDA

SEQ ID NO: 2702 - protein, 11 aa, Unknown
  source: /note="Description of Unknown: Linker sequence"
FLNGNKLTDIK

SEQ ID NO: 2703 - protein, 11 aa, Unknown
  source: /note="Description of Unknown: Linker sequence"
PNTVKNTDGSL

SEQ ID NO: 2704 - protein, 11 aa, Unknown
  source: /note="Description of Unknown: Linker sequence"
SLEHNGISDIN

SEQ ID NO: 2705 - protein, 13 aa, Unknown
  source: /note="Description of Unknown: Linker sequence"
IANNSDIKSVQGI

SEQ ID NO: 2706 - protein, 5 aa, Unknown
  source: /note="Description of Unknown: Linker sequence"
FTTLT

SEQ ID NO: 2707 - protein, 5 aa, Unknown
  source: /note="Description of Unknown: Linker sequence"
KAPEV

SEQ ID NO: 2708 - protein, 9 aa, Unknown
  source: /note="Description of Unknown: Linker sequence"
VSDVAVDVV

SEQ ID NO: 2709 - protein, 6 aa, Unknown
  source: /note="Description of Unknown: Linker sequence"
INTSYF

SEQ ID NO: 2710 - protein, 22 aa, Unknown
  source: /note="Description of Unknown: Linker sequence"
SGIISLEDLPDYTRSDEPLNSI

SEQ ID NO: 2711 - protein, 4 aa, Unknown
  source: /note="Description of Unknown: Linker sequence"
VNGQ

SEQ ID NO: 2712 - protein, 5 aa, Unknown
  source: /note="Description of Unknown: Linker sequence"
FKNAT

SEQ ID NO: 2713 - protein, 5 aa, Unknown
  source: /note="Description of Unknown: Linker sequence"
FYPNR

SEQ ID NO: 2714 - protein, 5 aa, Unknown
  source: /note="Description of Unknown: Linker sequence"
MDNDV

SEQ ID NO: 2715 - protein, 6 aa, Unknown
  source: /note="Description of Unknown: Linker sequence"
FPVPTL

SEQ ID NO: 2716 - protein, 6 aa, Unknown
  source: /note="Description of Unknown: Linker sequence"
VNDQGQ

SEQ ID NO: 2717 - protein, 7 aa, Unknown
  source: /note="Description of Unknown: Linker sequence"
SSFTPNV

SEQ ID NO: 2718 - protein, 7 aa, Unknown
  source: /note="Description of Unknown: Linker sequence"
VKGTIAA

SEQ ID NO: 2719 - protein, 8 aa, Unknown
  source: /note="Description of Unknown: Linker sequence"
SKKFPSYS

SEQ ID NO: 2720 - protein, 9 aa, Unknown
  source: /note="Description of Unknown: Linker sequence"
ITYQTYSEV

SEQ ID NO: 2721 - protein, 10 aa, Unknown
  source: /note="Description of Unknown: Linker sequence"
FATDKGFPKT

SEQ ID NO: 2722 - protein, 12 aa, Unknown
  source: /note="Description of Unknown: Linker sequence"
TADPIPDAGRSS

SEQ ID NO: 2723 - protein, 4 aa, Unknown
  source: /note="Description of Unknown: Linker sequence"
EKCF

SEQ ID NO: 2724 - protein, 4 aa, Unknown
  source: /note="Description of Unknown: Linker sequence"
KNGK

SEQ ID NO: 2725 - protein, 5 aa, Unknown
  source: /note="Description of Unknown: Linker sequence"
EKSHM

SEQ ID NO: 2726 - protein, 5 aa, Unknown
  source: /note="Description of Unknown: Linker sequence"
NTNSD

SEQ ID NO: 2727 - protein, 6 aa, Unknown
  source: /note="Description of Unknown: Linker sequence"
NAPEKH

SEQ ID NO: 2728 - protein, 7 aa, Unknown
  source: /note="Description of Unknown: Linker sequence"
ACPVAAL

SEQ ID NO: 2729 - protein, 7 aa, Unknown
  source: /note="Description of Unknown: Linker sequence"
DERSKSL

SEQ ID NO: 2730 - protein, 7 aa, Unknown
  source: /note="Description of Unknown: Linker sequence"
KCLLCGR

SEQ ID NO: 2731 - protein, 7 aa, Unknown
  source: /note="Description of Unknown: Linker sequence"
TETYAMK

SEQ ID NO: 2732 - protein, 9 aa, Unknown
  source: /note="Description of Unknown: Linker sequence"
DTNCLLCGQ

SEQ ID NO: 2733 - protein, 10 aa, Unknown
  source: /note="Description of Unknown: Linker sequence"
NGGGQPHVNP

SEQ ID NO: 2734 - protein, 14 aa, Unknown
  source: /note="Description of Unknown: Linker sequence"
YKARASKPFLPKDK

SEQ ID NO: 2735 - protein, 18 aa, Unknown
  source: /note="Description of Unknown: Linker sequence"
LDIHEFKCGPCNRRENCE

SEQ ID NO: 2736 - protein, 6 aa, Unknown
  source: /note="Description of Unknown: Linker sequence"
VVGGEL

SEQ ID NO: 2737 - protein, 5 aa, Unknown
  source: /note="Description of Unknown: Linker sequence"
HNGFF

SEQ ID NO: 2738 - protein, 11 aa, Unknown
  source: /note="Description of Unknown: Linker sequence"
VKGKEGDEEEE

SEQ ID NO: 2739 - protein, 4 aa, Unknown
  source: /note="Description of Unknown: Linker sequence"
KLIV

SEQ ID NO: 2740 - protein, 6 aa, Unknown
  source: /note="Description of Unknown: Linker sequence"
TIGNRA

SEQ ID NO: 2741 - protein, 13 aa, Unknown
  source: /note="Description of Unknown: Linker sequence"
VPPSKPTVNIPSS

SEQ ID NO: 2742 - protein, 5 aa, Unknown
  source: /note="Description of Unknown: Linker sequence"
FFSIL

SEQ ID NO: 2743 - protein, 6 aa, Unknown
  source: /note="Description of Unknown: Linker sequence"
TTGEWK

SEQ ID NO: 2744 - protein, 7 aa, Unknown
  source: /note="Description of Unknown: Linker sequence"
MSTEEAE

SEQ ID NO: 2745 - protein, 8 aa, Unknown
  source: /note="Description of Unknown: Linker sequence"
ASQVESDW

SEQ ID NO: 2746 - protein, 7 aa, Unknown
  source: /note="Description of Unknown: Linker sequence"
KLHLSNC

SEQ ID NO: 2747 - protein, 4 aa, Unknown
  source: /note="Description of Unknown: Linker sequence"
DANF

SEQ ID NO: 2748 - protein, 7 aa, Unknown
  source: /note="Description of Unknown: Linker sequence"
VGLEKNA

SEQ ID NO: 2749 - protein, 8 aa, Unknown
  source: /note="Description of Unknown: Linker sequence"
TNSTEETL

SEQ ID NO: 2750 - protein, 9 aa, Unknown
  source: /note="Description of Unknown: Linker sequence"
KTWENVNAQ

SEQ ID NO: 2751 - protein, 9 aa, Unknown
  source: /note="Description of Unknown: Linker sequence"
YLPTLYVSQ

SEQ ID NO: 2752 - protein, 11 aa, Unknown
  source: /note="Description of Unknown: Linker sequence"
SHRYGFGKIDA

SEQ ID NO: 2753 - protein, 12 aa, Unknown
  source: /note="Description of Unknown: Linker sequence"
GDWRDSAMGKKY

SEQ ID NO: 2754 - protein, 4 aa, Unknown
  source: /note="Description of Unknown: Linker sequence"
KGTL

SEQ ID NO: 2755 - protein, 7 aa, Unknown
  source: /note="Description of Unknown: Linker sequence"
KLNKDIV

SEQ ID NO: 2756 - protein, 8 aa, Unknown
  source: /note="Description of Unknown: Linker sequence"
ETRKRALS

SEQ ID NO: 2757 - protein, 33 aa, Unknown
  source: /note="Description of Unknown: Linker sequence"
VYPPDYNPEGKVTKRKHDNEGSGSKRPKVEYSE

SEQ ID NO: 2758 - protein, 8 aa, Unknown
  source: /note="Description of Unknown: Linker sequence"
IERHSIHW

SEQ ID NO: 2759 - protein, 9 aa, Unknown
  source: /note="Description of Unknown: Linker sequence"
DLTGTPLFV

SEQ ID NO: 2760 - protein, 10 aa, Unknown
  source: /note="Description of Unknown: Linker sequence"
NGPASLPYDI

SEQ ID NO: 2761 - protein, 14 aa, Unknown
  source: /note="Description of Unknown: Linker sequence"
VNGSDINVDWGKPI

SEQ ID NO: 2762 - protein, 44 aa, Unknown
  source: /note="Description of Unknown: Linker sequence"
YAGAPGGLPTDEGTPPVDHQCLDTLDVRPVVPRSVPVNSFVKRP

SEQ ID NO: 2763 - protein, 6 aa, Unknown
  source: /note="Description of Unknown: Linker sequence"
QFGRKG

SEQ ID NO: 2764 - protein, 9 aa, Unknown
  source: /note="Description of Unknown: Linker sequence"
IASGAIGGL

SEQ ID NO: 2765 - protein, 4 aa, Unknown
  source: /note="Description of Unknown: Linker sequence"
SGNP

SEQ ID NO: 2766 - protein, 6 aa, Unknown
  source: /note="Description of Unknown: Linker sequence"
VTGISP

SEQ ID NO: 2767 - protein, 6 aa, Unknown
  source: /note="Description of Unknown: Linker sequence"
IKRADA

SEQ ID NO: 2768 - protein, 7 aa, Unknown
  source: /note="Description of Unknown: Linker sequence"
VQPKLTA

SEQ ID NO: 2769 - protein, 14 aa, Unknown
  source: /note="Description of Unknown: Linker sequence"
TGVMKNDTNENLKK

SEQ ID NO: 2770 - protein, 24 aa, Unknown
  source: /note="Description of Unknown: Linker sequence"
FLPRVGVGTSFGLPQTRRISLASP

SEQ ID NO: 2771 - protein, 4 aa, Unknown
  source: /note="Description of Unknown: Linker sequence"
ASNM

SEQ ID NO: 2772 - protein, 6 aa, Unknown
  source: /note="Description of Unknown: Linker sequence"
ESKPSV

SEQ ID NO: 2773 - protein, 7 aa, Unknown
  source: /note="Description of Unknown: Linker sequence"
IKMLGSK

SEQ ID NO: 2774 - protein, 7 aa, Unknown
  source: /note="Description of Unknown: Linker sequence"
LRREPNL

SEQ ID NO: 2775 - protein, 7 aa, Unknown
  source: /note="Description of Unknown: Linker sequence"
LSRSSNP

SEQ ID NO: 2776 - protein, 8 aa, Unknown
  source: /note="Description of Unknown: Linker sequence"
RLGCRYSK

SEQ ID NO: 2777 - protein, 4 aa, Unknown
  source: /note="Description of Unknown: Linker sequence"
ETPA

SEQ ID NO: 2778 - protein, 8 aa, Unknown
  source: /note="Description of Unknown: Linker sequence"
FANHTYVP

SEQ ID NO: 2779 - protein, 5 aa, Unknown
  source: /note="Description of Unknown: Linker sequence"
LFEWL

SEQ ID NO: 2780 - protein, 14 aa, Unknown
  source: /note="Description of Unknown: Linker sequence"
HELGGKNASGGYGG

SEQ ID NO: 2781 - protein, 5 aa, Unknown
  source: /note="Description of Unknown: Linker sequence"
RGDVG

SEQ ID NO: 2782 - protein, 4 aa, Unknown
  source: /note="Description of Unknown: Linker sequence"
DYTR

SEQ ID NO: 2783 - protein, 8 aa, Unknown
  source: /note="Description of Unknown: Linker sequence"
QTQAVSQQ

SEQ ID NO: 2784 - protein, 8 aa, Unknown
  source: /note="Description of Unknown: Linker sequence"
YTDHQMLV

SEQ ID NO: 2785 - protein, 4 aa, Unknown
  source: /note="Description of Unknown: Linker sequence"
LNNR

SEQ ID NO: 2786 - protein, 12 aa, Unknown
  source: /note="Description of Unknown: Linker sequence"
TCRKTNKLSPYD

SEQ ID NO: 2787 - protein, 5 aa, Unknown
  source: /note="Description of Unknown: Linker sequence"
VVNNV

SEQ ID NO: 2788 - protein, 7 aa, Unknown
  source: /note="Description of Unknown: Linker sequence"
VQARASS

SEQ ID NO: 2789 - protein, 8 aa, Unknown
  source: /note="Description of Unknown: Linker sequence"
TYIPRKEV

SEQ ID NO: 2790 - protein, 10 aa, Unknown
  source: /note="Description of Unknown: Linker sequence"
IQATIIRQNQ

SEQ ID NO: 2791 - protein, 4 aa, Unknown
  source: /note="Description of Unknown: Linker sequence"
KGDD

SEQ ID NO: 2792 - protein, 4 aa, Unknown
  source: /note="Description of Unknown: Linker sequence"
SDVV

SEQ ID NO: 2793 - protein, 6 aa, Unknown
  source: /note="Description of Unknown: Linker sequence"
VAQSSY

SEQ ID NO: 2794 - protein, 8 aa, Unknown
  source: /note="Description of Unknown: Linker sequence"
TSRDYDTQ

SEQ ID NO: 2795 - protein, 11 aa, Unknown
  source: /note="Description of Unknown: Linker sequence"
YAPFLPKTWTS

SEQ ID NO: 2796 - protein, 5 aa, Unknown
  source: /note="Description of Unknown: Linker sequence"
AGVNL

SEQ ID NO: 2797 - protein, 11 aa, Unknown
  source: /note="Description of Unknown: Linker sequence"
TLLLKSPTTHP

SEQ ID NO: 2798 - protein, 5 aa, Unknown
  source: /note="Description of Unknown: Linker sequence"
VESAM

SEQ ID NO: 2799 - protein, 6 aa, Unknown
  source: /note="Description of Unknown: Linker sequence"
GPLWSN

SEQ ID NO: 2800 - protein, 9 aa, Unknown
  source: /note="Description of Unknown: Linker sequence"
QVENTGIHE

SEQ ID NO: 2801 - protein, 8 aa, Unknown
  source: /note="Description of Unknown: Linker sequence"
SCDNLPHN

SEQ ID NO: 2802 - protein, 16 aa, Unknown
  source: /note="Description of Unknown: Linker sequence"
ICDRNHTWLPVSDDAC

SEQ ID NO: 2803 - protein, 4 aa, Unknown
  source: /note="Description of Unknown: Linker sequence"
YYPA

SEQ ID NO: 2804 - protein, 5 aa, Unknown
  source: /note="Description of Unknown: Linker sequence"
SGQPL

SEQ ID NO: 2805 - protein, 5 aa, Unknown
  source: /note="Description of Unknown: Linker sequence"
VYSGK

SEQ ID NO: 2806 - protein, 7 aa, Unknown
  source: /note="Description of Unknown: Linker sequence"
VNDQGKE

SEQ ID NO: 2807 - protein, 11 aa, Unknown
  source: /note="Description of Unknown: Linker sequence"
FGNKYWLMLNE

SEQ ID NO: 2808 - protein, 19 aa, Unknown
  source: /note="Description of Unknown: Linker sequence"
QSFAPVKGASAVPLVGRAS

SEQ ID NO: 2809 - protein, 4 aa, Unknown
  source: /note="Description of Unknown: Linker sequence"
PVSE

SEQ ID NO: 2810 - protein, 5 aa, Unknown
  source: /note="Description of Unknown: Linker sequence"
AGKLV

SEQ ID NO: 2811 - protein, 7 aa, Unknown
  source: /note="Description of Unknown: Linker sequence"
LEKDGSN

SEQ ID NO: 2812 - protein, 14 aa, Unknown
  source: /note="Description of Unknown: Linker sequence"
NNDPSWNPGPTWDP

SEQ ID NO: 2813 - protein, 4 aa, Unknown
  source: /note="Description of Unknown: Linker sequence"
GVPF

SEQ ID NO: 2814 - protein, 4 aa, Unknown
  source: /note="Description of Unknown: Linker sequence"
ICQS

SEQ ID NO: 2815 - protein, 6 aa, Unknown
  source: /note="Description of Unknown: Linker sequence"
VNYEDP

SEQ ID NO: 2816 - protein, 8 aa, Unknown
  source: /note="Description of Unknown: Linker sequence"
RARGENEP

SEQ ID NO: 2817 - protein, 6 aa, Unknown
  source: /note="Description of Unknown: Linker sequence"
LAGTGP

SEQ ID NO: 2818 - protein, 10 aa, Unknown
  source: /note="Description of Unknown: Linker sequence"
AAGGSVKGKK

SEQ ID NO: 2819 - protein, 8 aa, Unknown
  source: /note="Description of Unknown: Linker sequence"
LMTPEYVA

SEQ ID NO: 2820 - protein, 17 aa, Unknown
  source: /note="Description of Unknown: Linker sequence"
GFESVLEAVTALAFYVP

SEQ ID NO: 2821 - protein, 18 aa, Unknown
  source: /note="Description of Unknown: Linker sequence"
HKLGAVDVPDLVYSEAGP

SEQ ID NO: 2822 - protein, 35 aa, Unknown
  source: /note="Description of Unknown: Linker sequence"
QHPPKDSSGQRVAVSPTSQRLQLLEPFDKWDGKDL

SEQ ID NO: 2823 - protein, 41 aa, Unknown
  source: /note="Description of Unknown: Linker sequence"
TLKFNPETDFLTGKDGKKFKLEAPDADELPRAEFDPGQDTY

SEQ ID NO: 2824 - protein, 4 aa, Unknown
  source: /note="Description of Unknown: Linker sequence"
LVLE

SEQ ID NO: 2825 - protein, 4 aa, Unknown
  source: /note="Description of Unknown: Linker sequence"
SESG

SEQ ID NO: 2826 - protein, 5 aa, Unknown
  source: /note="Description of Unknown: Linker sequence"
EISGM

SEQ ID NO: 2827 - protein, 5 aa, Unknown
  source: /note="Description of Unknown: Linker sequence"
FAARS

SEQ ID NO: 2828 - protein, 7 aa, Unknown
  source: /note="Description of Unknown: Linker sequence"
QKSGKGL

SEQ ID NO: 2829 - protein, 11 aa, Unknown
  source: /note="Description of Unknown: Linker sequence"
GEVFPQKKVSA

SEQ ID NO: 2830 - protein, 13 aa, Unknown
  source: /note="Description of Unknown: Linker sequence"
KHPAVRKEPGPGL

SEQ ID NO: 2831 - protein, 14 aa, Unknown
  source: /note="Description of Unknown: Linker sequence"
YPHWEGEIIRFETE

SEQ ID NO: 2832 - protein, 9 aa, Unknown
  source: /note="Description of Unknown: Linker sequence"
EYPALGEVF

SEQ ID NO: 2833 - protein, 7 aa, Unknown
  source: /note="Description of Unknown: Linker sequence"
QDDDCTP

SEQ ID NO: 2834 - protein, 4 aa, Unknown
  source: /note="Description of Unknown: Linker sequence"
HNGK

SEQ ID NO: 2835 - protein, 5 aa, Unknown
  source: /note="Description of Unknown: Linker sequence"
SSVSR

SEQ ID NO: 2836 - protein, 6 aa, Unknown
  source: /note="Description of Unknown: Linker sequence"
AAHPVG

SEQ ID NO: 2837 - protein, 6 aa, Unknown
  source: /note="Description of Unknown: Linker sequence"
ARFDVT

SEQ ID NO: 2838 - protein, 6 aa, Unknown
  source: /note="Description of Unknown: Linker sequence"
EGRDMN

SEQ ID NO: 2839 - protein, 6 aa, Unknown
  source: /note="Description of Unknown: Linker sequence"
KFLRTE

SEQ ID NO: 2840 - protein, 8 aa, Unknown
  source: /note="Description of Unknown: Linker sequence"
LDLFYNTP

SEQ ID NO: 2841 - protein, 8 aa, Unknown
  source: /note="Description of Unknown: Linker sequence"
RTAEQQEA

SEQ ID NO: 2842 - protein, 11 aa, Unknown
  source: /note="Description of Unknown: Linker sequence"
YRAVPEGGQKE

SEQ ID NO: 2843 - protein, 8 aa, Unknown
  source: /note="Description of Unknown: Linker sequence"
HDPRRFGR

SEQ ID NO: 2844 - protein, 10 aa, Unknown
  source: /note="Description of Unknown: Linker sequence"
RRGDYREIPL

SEQ ID NO: 2845 - protein, 11 aa, Unknown
  source: /note="Description of Unknown: Linker sequence"
RHAVYGREGLP

SEQ ID NO: 2846 - protein, 23 aa, Unknown
  source: /note="Description of Unknown: Linker sequence"
ELGGSTLSDQSYRQPDGLPGGFQ

SEQ ID NO: 2847 - protein, 6 aa, Unknown
  source: /note="Description of Unknown: Linker sequence"
ESGKTS

SEQ ID NO: 2848 - protein, 7 aa, Unknown
  source: /note="Description of Unknown: Linker sequence"
FLDIHNI

SEQ ID NO: 2849 - protein, 7 aa, Unknown
  source: /note="Description of Unknown: Linker sequence"
VYPNIEE

SEQ ID NO: 2850 - protein, 9 aa, Unknown
  source: /note="Description of Unknown: Linker sequence"
RQGIPNESW

SEQ ID NO: 2851 - protein, 17 aa, Unknown
  source: /note="Description of Unknown: Linker sequence"
TKINERYELCDTYPALL

SEQ ID NO: 2852 - protein, 4 aa, Unknown
  source: /note="Description of Unknown: Linker sequence"
NGIV

SEQ ID NO: 2853 - protein, 5 aa, Unknown
  source: /note="Description of Unknown: Linker sequence"
SRRVP

SEQ ID NO: 2854 - protein, 17 aa, Unknown
  source: /note="Description of Unknown: Linker sequence"
LEKEKQFEKYSELKGTV

SEQ ID NO: 2855 - protein, 12 aa, Unknown
  source: /note="Description of Unknown: Linker sequence"
KDSPKGVGRPTK

SEQ ID NO: 2856 - protein, 4 aa, Unknown
  source: /note="Description of Unknown: Linker sequence"
ILIP

SEQ ID NO: 2857 - protein, 4 aa, Unknown
  source: /note="Description of Unknown: Linker sequence"
LAPA

SEQ ID NO: 2858 - protein, 5 aa, Unknown
  source: /note="Description of Unknown: Linker sequence"
CSGEY

SEQ ID NO: 2859 - protein, 5 aa, Unknown
  source: /note="Description of Unknown: Linker sequence"
STPHP

SEQ ID NO: 2860 - protein, 5 aa, Unknown
  source: /note="Description of Unknown: Linker sequence"
WGCDK

SEQ ID NO: 2861 - protein, 6 aa, Unknown
  source: /note="Description of Unknown: Linker sequence"
YFAMDE

SEQ ID NO: 2862 - protein, 9 aa, Unknown
  source: /note="Description of Unknown: Linker sequence"
RAETIDDIR

SEQ ID NO: 2863 - protein, 6 aa, Unknown
  source: /note="Description of Unknown: Linker sequence"
NDDIQG

SEQ ID NO: 2864 - protein, 7 aa, Unknown
  source: /note="Description of Unknown: Linker sequence"
YREKYCT

SEQ ID NO: 2865 - protein, 4 aa, Unknown
  source: /note="Description of Unknown: Linker sequence"
DADL

SEQ ID NO: 2866 - protein, 4 aa, Unknown
  source: /note="Description of Unknown: Linker sequence"
PNTA

SEQ ID NO: 2867 - protein, 5 aa, Unknown
  source: /note="Description of Unknown: Linker sequence"
VAVGV

SEQ ID NO: 2868 - protein, 6 aa, Unknown
  source: /note="Description of Unknown: Linker sequence"
VNIALA

SEQ ID NO: 2869 - protein, 17 aa, Unknown
  source: /note="Description of Unknown: Linker sequence"
KNLEEPVKPFPGVQGSS

SEQ ID NO: 2870 - protein, 26 aa, Unknown
  source: /note="Description of Unknown: Linker sequence"
LKGTLELHPNGLIKTDEYMRTSEPDV

SEQ ID NO: 2871 - protein, 6 aa, Unknown
  source: /note="Description of Unknown: Linker sequence"
YYPQIA

SEQ ID NO: 2872 - protein, 4 aa, Unknown
  source: /note="Description of Unknown: Linker sequence"
LGDA

SEQ ID NO: 2873 - protein, 7 aa, Unknown
  source: /note="Description of Unknown: Linker sequence"
FKHSGGL

SEQ ID NO: 2874 - protein, 20 aa, Unknown
  source: /note="Description of Unknown: Linker sequence"
FEAERKENCPACSQLPQNIQ

SEQ ID NO: 2875 - protein, 8 aa, Unknown
  source: /note="Description of Unknown: Linker sequence"
YGLDTINK

SEQ ID NO: 2876 - protein, 9 aa, Unknown
  source: /note="Description of Unknown: Linker sequence"
SMDNPDNEI

SEQ ID NO: 2877 - protein, 10 aa, Unknown
  source: /note="Description of Unknown: Linker sequence"
QQGRYPGVSN

SEQ ID NO: 2878 - protein, 8 aa, Unknown
  source: /note="Description of Unknown: Linker sequence"
TKLQNPDL

SEQ ID NO: 2879 - protein, 10 aa, Unknown
  source: /note="Description of Unknown: Linker sequence"
GGRGYGSESG

SEQ ID NO: 2880 - protein, 12 aa, Unknown
  source: /note="Description of Unknown: Linker sequence"
LQQHRPSPELTL

SEQ ID NO: 2881 - protein, 17 aa, Unknown
  source: /note="Description of Unknown: Linker sequence"
LGGKWQPGRGPCVLQEY

SEQ ID NO: 2882 - protein, 5 aa, Unknown
  source: /note="Description of Unknown: Linker sequence"
YQKLT

SEQ ID NO: 2883 - protein, 7 aa, Unknown
  source: /note="Description of Unknown: Linker sequence"
FISNQTI

SEQ ID NO: 2884 - protein, 7 aa, Unknown
  source: /note="Description of Unknown: Linker sequence"
SWEGNPI

SEQ ID NO: 2885 - protein, 8 aa, Unknown
  source: /note="Description of Unknown: Linker sequence"
FREVVSPQ

SEQ ID NO: 2886 - protein, 9 aa, Unknown
  source: /note="Description of Unknown: Linker sequence"
LADVPSSPY

SEQ ID NO: 2887 - protein, 4 aa, Unknown
  source: /note="Description of Unknown: Linker sequence"
FVSA

SEQ ID NO: 2888 - protein, 4 aa, Unknown
  source: /note="Description of Unknown: Linker sequence"
HKRS

SEQ ID NO: 2889 - protein, 5 aa, Unknown
  source: /note="Description of Unknown: Linker sequence"
KAAPD

SEQ ID NO: 2890 - protein, 19 aa, Unknown
  source: /note="Description of Unknown: Linker sequence"
PLDSPDETEDPEPNYAGEP

SEQ ID NO: 2891 - protein, 6 aa, Unknown
  source: /note="Description of Unknown: Linker sequence"
EVGNEE

SEQ ID NO: 2892 - protein, 13 aa, Unknown
  source: /note="Description of Unknown: Linker sequence"
ALPDEETGLELNE

SEQ ID NO: 2893 - protein, 4 aa, Unknown
  source: /note="Description of Unknown: Linker sequence"
QVDA

SEQ ID NO: 2894 - protein, 5 aa, Unknown
  source: /note="Description of Unknown: Linker sequence"
WRKDP

SEQ ID NO: 2895 - protein, 6 aa, Unknown
  source: /note="Description of Unknown: Linker sequence"
PSHGII

SEQ ID NO: 2896 - protein, 7 aa, Unknown
  source: /note="Description of Unknown: Linker sequence"
EGQGKAK

SEQ ID NO: 2897 - protein, 8 aa, Unknown
  source: /note="Description of Unknown: Linker sequence"
KINLAIKT

SEQ ID NO: 2898 - protein, 8 aa, Unknown
  source: /note="Description of Unknown: Linker sequence"
TEMYDTPT

SEQ ID NO: 2899 - protein, 6 aa, Unknown
  source: /note="Description of Unknown: Linker sequence"
AHELPM

SEQ ID NO: 2900 - protein, 12 aa, Unknown
  source: /note="Description of Unknown: Linker sequence"
EKPKGRDSKKVR

SEQ ID NO: 2901 - protein, 14 aa, Unknown
  source: /note="Description of Unknown: Linker sequence"
IEGTSPEIVVNPVR

SEQ ID NO: 2902 - protein, 7 aa, Unknown
  source: /note="Description of Unknown: Linker sequence"
QRTKVQI

SEQ ID NO: 2903 - protein, 26 aa, Unknown
  source: /note="Description of Unknown: Linker sequence"
VDMGFDTSKLGSYQRVAEPVVPPQEM

SEQ ID NO: 2904 - protein, 5 aa, Unknown
  source: /note="Description of Unknown: Linker sequence"
MNAHI

SEQ ID NO: 2905 - protein, 6 aa, Unknown
  source: /note="Description of Unknown: Linker sequence"
ADDYQA

SEQ ID NO: 2906 - protein, 6 aa, Unknown
  source: /note="Description of Unknown: Linker sequence"
YEGFTG

SEQ ID NO: 2907 - protein, 7 aa, Unknown
  source: /note="Description of Unknown: Linker sequence"
QVDDPLK

SEQ ID NO: 2908 - protein, 11 aa, Unknown
  source: /note="Description of Unknown: Linker sequence"
YKPKRFEYVTW

SEQ ID NO: 2909 - protein, 13 aa, Unknown
  source: /note="Description of Unknown: Linker sequence"
ILPLWHHDDTYLF

SEQ ID NO: 2910 - protein, 22 aa, Unknown
  source: /note="Description of Unknown: Linker sequence"
DMILPKKSVSKVKQTQLLTTEG

SEQ ID NO: 2911 - protein, 4 aa, Unknown
  source: /note="Description of Unknown: Linker sequence"
IDNP

SEQ ID NO: 2912 - protein, 4 aa, Unknown
  source: /note="Description of Unknown: Linker sequence"
GMDH

SEQ ID NO: 2913 - protein, 4 aa, Unknown
  source: /note="Description of Unknown: Linker sequence"
IGDC

SEQ ID NO: 2914 - protein, 5 aa, Unknown
  source: /note="Description of Unknown: Linker sequence"
EGVLH

SEQ ID NO: 2915 - protein, 5 aa, Unknown
  source: /note="Description of Unknown: Linker sequence"
NQKEL

SEQ ID NO: 2916 - protein, 5 aa, Unknown
  source: /note="Description of Unknown: Linker sequence"
QGNAL

SEQ ID NO: 2917 - protein, 5 aa, Unknown
  source: /note="Description of Unknown: Linker sequence"
QSGYQ

SEQ ID NO: 2918 - protein, 6 aa, Unknown
  source: /note="Description of Unknown: Linker sequence"
ARPDDE

SEQ ID NO: 2919 - protein, 6 aa, Unknown
  source: /note="Description of Unknown: Linker sequence"
MGVSAI

SEQ ID NO: 2920 - protein, 6 aa, Unknown
  source: /note="Description of Unknown: Linker sequence"
RNFQGY

SEQ ID NO: 2921 - protein, 7 aa, Unknown
  source: /note="Description of Unknown: Linker sequence"
TTQGDTD

SEQ ID NO: 2922 - protein, 5 aa, Unknown
  source: /note="Description of Unknown: Linker sequence"
IRDAN

SEQ ID NO: 2923 - protein, 7 aa, Unknown
  source: /note="Description of Unknown: Linker sequence"
YARPSSA

SEQ ID NO: 2924 - protein, 4 aa, Unknown
  source: /note="Description of Unknown: Linker sequence"
RGKF

SEQ ID NO: 2925 - protein, 4 aa, Unknown
  source: /note="Description of Unknown: Linker sequence"
THAV

SEQ ID NO: 2926 - protein, 5 aa, Unknown
  source: /note="Description of Unknown: Linker sequence"
ETPKI

SEQ ID NO: 2927 - protein, 5 aa, Unknown
  source: /note="Description of Unknown: Linker sequence"
SDTAN

SEQ ID NO: 2928 - protein, 7 aa, Unknown
  source: /note="Description of Unknown: Linker sequence"
TKQLAPT

SEQ ID NO: 2929 - protein, 10 aa, Unknown
  source: /note="Description of Unknown: Linker sequence"
AGDYKNLGGE

SEQ ID NO: 2930 - protein, 19 aa, Unknown
  source: /note="Description of Unknown: Linker sequence"
TYYTFNFSLEGAKMSLPGT

SEQ ID NO: 2931 - protein, 5 aa, Unknown
  source: /note="Description of Unknown: Linker sequence"
YNKSS

SEQ ID NO: 2932 - protein, 8 aa, Unknown
  source: /note="Description of Unknown: Linker sequence"
YGTPDYKY

SEQ ID NO: 2933 - protein, 11 aa, Unknown
  source: /note="Description of Unknown: Linker sequence"
PYGKAHTLGLK

SEQ ID NO: 2934 - protein, 6 aa, Unknown
  source: /note="Description of Unknown: Linker sequence"
DTEEKK

SEQ ID NO: 2935 - protein, 19 aa, Unknown
  source: /note="Description of Unknown: Linker sequence"
DIPNRRRKVSKHKHANFYP

SEQ ID NO: 2936 - protein, 6 aa, Unknown
  source: /note="Description of Unknown: Linker sequence"
PCSHVV

SEQ ID NO: 2937 - protein, 6 aa, Unknown
  source: /note="Description of Unknown: Linker sequence"
ANENGT

SEQ ID NO: 2938 - protein, 6 aa, Unknown
  source: /note="Description of Unknown: Linker sequence"
NRKNNI

SEQ ID NO: 2939 - protein, 8 aa, Unknown
  source: /note="Description of Unknown: Linker sequence"
LAPEDYTG

SEQ ID NO: 2940 - protein, 4 aa, Unknown
  source: /note="Description of Unknown: Linker sequence"
IGGK

SEQ ID NO: 2941 - protein, 4 aa, Unknown
  source: /note="Description of Unknown: Linker sequence"
VGDD

SEQ ID NO: 2942 - protein, 6 aa, Unknown
  source: /note="Description of Unknown: Linker sequence"
INTTKY

SEQ ID NO: 2943 - protein, 7 aa, Unknown
  source: /note="Description of Unknown: Linker sequence"
AATVTGY

SEQ ID NO: 2944 - protein, 7 aa, Unknown
  source: /note="Description of Unknown: Linker sequence"
GGADGKT

SEQ ID NO: 2945 - protein, 7 aa, Unknown
  source: /note="Description of Unknown: Linker sequence"
QNKDGSI

SEQ ID NO: 2946 - protein, 7 aa, Unknown
  source: /note="Description of Unknown: Linker sequence"
TDNNGKT

SEQ ID NO: 2947 - protein, 8 aa, Unknown
  source: /note="Description of Unknown: Linker sequence"
AAGVTGTA

SEQ ID NO: 2948 - protein, 9 aa, Unknown
  source: /note="Description of Unknown: Linker sequence"
QVGANDGET

SEQ ID NO: 2949 - protein, 11 aa, Unknown
  source: /note="Description of Unknown: Linker sequence"
TADDGTSKTAL

SEQ ID NO: 2950 - protein, 21 aa, Unknown
  source: /note="Description of Unknown: Linker sequence"
LKQINSQTLGLDTLNVQQKYK

SEQ ID NO: 2951 - protein, 23 aa, Unknown
  source: /note="Description of Unknown: Linker sequence"
AEGHNFKAQPDLAEAAATTTENP

SEQ ID NO: 2952 - protein, 4 aa, Unknown
  source: /note="Description of Unknown: Linker sequence"
AGAR

SEQ ID NO: 2953 - protein, 5 aa, Unknown
  source: /note="Description of Unknown: Linker sequence"
AEALL

SEQ ID NO: 2954 - protein, 6 aa, Unknown
  source: /note="Description of Unknown: Linker sequence"
AWPEEV

SEQ ID NO: 2955 - protein, 6 aa, Unknown
  source: /note="Description of Unknown: Linker sequence"
NRGVEA

SEQ ID NO: 2956 - protein, 8 aa, Unknown
  source: /note="Description of Unknown: Linker sequence"
EALPLPFA

SEQ ID NO: 2957 - protein, 8 aa, Unknown
  source: /note="Description of Unknown: Linker sequence"
RGVDPLGQ

SEQ ID NO: 2958 - protein, 9 aa, Unknown
  source: /note="Description of Unknown: Linker sequence"
LEVTPNRPD

SEQ ID NO: 2959 - protein, 9 aa, Unknown
  source: /note="Description of Unknown: Linker sequence"
VEDPEGAPH

SEQ ID NO: 2960 - protein, 10 aa, Unknown
  source: /note="Description of Unknown: Linker sequence"
AGSPKPPEAI

SEQ ID NO: 2961 - protein, 10 aa, Unknown
  source: /note="Description of Unknown: Linker sequence"
FGLRVAPSPL

SEQ ID NO: 2962 - protein, 13 aa, Unknown
  source: /note="Description of Unknown: Linker sequence"
TIPLALPAFFPAP

SEQ ID NO: 2963 - protein, 14 aa, Unknown
  source: /note="Description of Unknown: Linker sequence"
LGYALVEPEAALKA

SEQ ID NO: 2964 - protein, 19 aa, Unknown
  source: /note="Description of Unknown: Linker sequence"
LPLPDKPLAFQDPSRHPAA

SEQ ID NO: 2965 - protein, 5 aa, Unknown
  source: /note="Description of Unknown: Linker sequence"
GLQSA

SEQ ID NO: 2966 - protein, 6 aa, Unknown
  source: /note="Description of Unknown: Linker sequence"
HGELTR

SEQ ID NO: 2967 - protein, 7 aa, Unknown
  source: /note="Description of Unknown: Linker sequence"
LKDKQLN

SEQ ID NO: 2968 - protein, 5 aa, Unknown
  source: /note="Description of Unknown: Linker sequence"
FYPQY

SEQ ID NO: 2969 - protein, 7 aa, Unknown
  source: /note="Description of Unknown: Linker sequence"
DFHYDEK

SEQ ID NO: 2970 - protein, 10 aa, Unknown
  source: /note="Description of Unknown: Linker sequence"
DYLLDFSAVY

SEQ ID NO: 2971 - protein, 10 aa, Unknown
  source: /note="Description of Unknown: Linker sequence"
PLDVTNRPRT

SEQ ID NO: 2972 - protein, 17 aa, Unknown
  source: /note="Description of Unknown: Linker sequence"
NGEYSLKSAVKLPNVLS

SEQ ID NO: 2973 - protein, 6 aa, Unknown
  source: /note="Description of Unknown: Linker sequence"
DRRAGL

SEQ ID NO: 2974 - protein, 7 aa, Unknown
  source: /note="Description of Unknown: Linker sequence"
FLASMDE

SEQ ID NO: 2975 - protein, 8 aa, Unknown
  source: /note="Description of Unknown: Linker sequence"
IMRETINV

SEQ ID NO: 2976 - protein, 11 aa, Unknown
  source: /note="Description of Unknown: Linker sequence"
RFPNARTSYTM

SEQ ID NO: 2977 - protein, 6 aa, Unknown
  source: /note="Description of Unknown: Linker sequence"
SDPAKV

SEQ ID NO: 2978 - protein, 11 aa, Unknown
  source: /note="Description of Unknown: Linker sequence"
TSNGASCMPSM

SEQ ID NO: 2979 - protein, 12 aa, Unknown
  source: /note="Description of Unknown: Linker sequence"
AGSAPAEPTGDV

SEQ ID NO: 2980 - protein, 7 aa, Unknown
  source: /note="Description of Unknown: Linker sequence"
MRVKNDF

SEQ ID NO: 2981 - protein, 14 aa, Unknown
  source: /note="Description of Unknown: Linker sequence"
YEGKDVHIKEDERY

SEQ ID NO: 2982 - protein, 15 aa, Unknown
  source: /note="Description of Unknown: Linker sequence"
LGLKIIDLSAIQDEV

SEQ ID NO: 2983 - protein, 5 aa, Unknown
  source: /note="Description of Unknown: Linker sequence"
LEPSR

SEQ ID NO: 2984 - protein, 6 aa, Unknown
  source: /note="Description of Unknown: Linker sequence"
CSNVAA

SEQ ID NO: 2985 - protein, 8 aa, Unknown
  source: /note="Description of Unknown: Linker sequence"
QKVTINPV

SEQ ID NO: 2986 - protein, 11 aa, Unknown
  source: /note="Description of Unknown: Linker sequence"
ALPPGAAKQQL

SEQ ID NO: 2987 - protein, 11 aa, Unknown
  source: /note="Description of Unknown: Linker sequence"
ALRRGTAGSVT

SEQ ID NO: 2988 - protein, 16 aa, Unknown
  source: /note="Description of Unknown: Linker sequence"
ESFGATNTNARENTPF

SEQ ID NO: 2989 - protein, 4 aa, Unknown
  source: /note="Description of Unknown: Linker sequence"
DCDY

SEQ ID NO: 2990 - protein, 4 aa, Unknown
  source: /note="Description of Unknown: Linker sequence"
DWSD

SEQ ID NO: 2991 - protein, 4 aa, Unknown
  source: /note="Description of Unknown: Linker sequence"
FAGQ

SEQ ID NO: 2992 - protein, 4 aa, Unknown
  source: /note="Description of Unknown: Linker sequence"
HEGV

SEQ ID NO: 2993 - protein, 4 aa, Unknown
  source: /note="Description of Unknown: Linker sequence"
RDGE

SEQ ID NO: 2994 - protein, 4 aa, Unknown
  source: /note="Description of Unknown: Linker sequence"
SATR

SEQ ID NO: 2995 - protein, 4 aa, Unknown
  source: /note="Description of Unknown: Linker sequence"
SIPA

SEQ ID NO: 2996 - protein, 4 aa, Unknown
  source: /note="Description of Unknown: Linker sequence"
VYGQ

SEQ ID NO: 2997 - protein, 5 aa, Unknown
  source: /note="Description of Unknown: Linker sequence"
ACGAT

SEQ ID NO: 2998 - protein, 5 aa, Unknown
  source: /note="Description of Unknown: Linker sequence"
VYQAA

SEQ ID NO: 2999 - protein, 6 aa, Unknown
  source: /note="Description of Unknown: Linker sequence"
EAGVDR

SEQ ID NO: 3000 - protein, 6 aa, Unknown
  source: /note="Description of Unknown: Linker sequence"
SGGKTV

SEQ ID NO: 3001 - protein, 7 aa, Unknown
  source: /note="Description of Unknown: Linker sequence"
VPLSEKV

SEQ ID NO: 3002 - protein, 8 aa, Unknown
  source: /note="Description of Unknown: Linker sequence"
ANHPRGFA

SEQ ID NO: 3003 - protein, 9 aa, Unknown
  source: /note="Description of Unknown: Linker sequence"
HDLQGERPY

SEQ ID NO: 3004 - protein, 10 aa, Unknown
  source: /note="Description of Unknown: Linker sequence"
GCDGFHGISR

SEQ ID NO: 3005 - protein, 11 aa, Unknown
  source: /note="Description of Unknown: Linker sequence"
ADTPPVSHELI

SEQ ID NO: 3006 - protein, 4 aa, Unknown
  source: /note="Description of Unknown: Linker sequence"
GHRQ

SEQ ID NO: 3007 - protein, 4 aa, Unknown
  source: /note="Description of Unknown: Linker sequence"
LTGA

SEQ ID NO: 3008 - protein, 6 aa, Unknown
  source: /note="Description of Unknown: Linker sequence"
ALPSEL

SEQ ID NO: 3009 - protein, 6 aa, Unknown
  source: /note="Description of Unknown: Linker sequence"
RAGGSI

SEQ ID NO: 3010 - protein, 6 aa, Unknown
  source: /note="Description of Unknown: Linker sequence"
VSADNV

SEQ ID NO: 3011 - protein, 11 aa, Unknown
  source: /note="Description of Unknown: Linker sequence"
HTQTDTSSPDP

SEQ ID NO: 3012 - protein, 12 aa, Unknown
  source: /note="Description of Unknown: Linker sequence"
LKREKQDESCSL

SEQ ID NO: 3013 - protein, 13 aa, Unknown
  source: /note="Description of Unknown: Linker sequence"
FNPLKTGVCQLDN

SEQ ID NO: 3014 - protein, 4 aa, Unknown
  source: /note="Description of Unknown: Linker sequence"
ALGI

SEQ ID NO: 3015 - protein, 4 aa, Unknown
  source: /note="Description of Unknown: Linker sequence"
KDGV

SEQ ID NO: 3016 - protein, 4 aa, Unknown
  source: /note="Description of Unknown: Linker sequence"
NLRS

SEQ ID NO: 3017 - protein, 6 aa, Unknown
  source: /note="Description of Unknown: Linker sequence"
EIPKPS

SEQ ID NO: 3018 - protein, 7 aa, Unknown
  source: /note="Description of Unknown: Linker sequence"
EKMVEPQ

SEQ ID NO: 3019 - protein, 10 aa, Unknown
  source: /note="Description of Unknown: Linker sequence"
KSKVYTRTPT

SEQ ID NO: 3020 - protein, 6 aa, Unknown
  source: /note="Description of Unknown: Linker sequence"
ELVPKP

SEQ ID NO: 3021 - protein, 6 aa, Unknown
  source: /note="Description of Unknown: Linker sequence"
FGFPGG

SEQ ID NO: 3022 - protein, 6 aa, Unknown
  source: /note="Description of Unknown: Linker sequence"
LRNLDE

SEQ ID NO: 3023 - protein, 7 aa, Unknown
  source: /note="Description of Unknown: Linker sequence"
FSNKKSW

SEQ ID NO: 3024 - protein, 7 aa, Unknown
  source: /note="Description of Unknown: Linker sequence"
LFEKNDF

SEQ ID NO: 3025 - protein, 7 aa, Unknown
  source: /note="Description of Unknown: Linker sequence"
LYPNACS

SEQ ID NO: 3026 - protein, 7 aa, Unknown
  source: /note="Description of Unknown: Linker sequence"
RRAVYAN

SEQ ID NO: 3027 - protein, 7 aa, Unknown
  source: /note="Description of Unknown: Linker sequence"
RSHRMPV

SEQ ID NO: 3028 - protein, 8 aa, Unknown
  source: /note="Description of Unknown: Linker sequence"
EWNWPQPV

SEQ ID NO: 3029 - protein, 16 aa, Unknown
  source: /note="Description of Unknown: Linker sequence"
ITPAYPSMCATHNITE

SEQ ID NO: 3030 - protein, 16 aa, Unknown
  source: /note="Description of Unknown: Linker sequence"
RLDQPQVPLSLTLSDK

SEQ ID NO: 3031 - protein, 21 aa, Unknown
  source: /note="Description of Unknown: Linker sequence"
ILKPIEDGPLQVRVWNPKIYA

SEQ ID NO: 3032 - protein, 16 aa, Unknown
  source: /note="Description of Unknown: Linker sequence"
ISSSMTNSTAASRPPV

SEQ ID NO: 3033 - protein, 5 aa, Unknown
  source: /note="Description of Unknown: Linker sequence"
ELVTV

SEQ ID NO: 3034 - protein, 11 aa, Unknown
  source: /note="Description of Unknown: Linker sequence"
HDDLWQTLPDP

SEQ ID NO: 3035 - protein, 4 aa, Unknown
  source: /note="Description of Unknown: Linker sequence"
QGTN

SEQ ID NO: 3036 - protein, 16 aa, Unknown
  source: /note="Description of Unknown: Linker sequence"
NVYPELRVPDHQDIAF

SEQ ID NO: 3037 - protein, 6 aa, Unknown
  source: /note="Description of Unknown: Linker sequence"
QLSVNQ

SEQ ID NO: 3038 - protein, 8 aa, Unknown
  source: /note="Description of Unknown: Linker sequence"
DKAQFRNG

SEQ ID NO: 3039 - protein, 13 aa, Unknown
  source: /note="Description of Unknown: Linker sequence"
ENPYRPVTFDYLM

SEQ ID NO: 3040 - protein, 27 aa, Unknown
  source: /note="Description of Unknown: Linker sequence"
DYGNSPLHRFKKPGSKNFQNIFPPSAT

SEQ ID NO: 3041 - protein, 10 aa, Unknown
  source: /note="Description of Unknown: Linker sequence"
FKPLPAQESE

SEQ ID NO: 3042 - protein, 7 aa, Unknown
  source: /note="Description of Unknown: Linker sequence"
KAAGLEM

SEQ ID NO: 3043 - protein, 8 aa, Unknown
  source: /note="Description of Unknown: Linker sequence"
EIPPQAII

SEQ ID NO: 3044 - protein, 27 aa, Unknown
  source: /note="Description of Unknown: Linker sequence"
ESGEPSSLPRPATHWPFKTAFQHHYLV

SEQ ID NO: 3045 - protein, 8 aa, Unknown
  source: /note="Description of Unknown: Linker sequence"
EVHYARPI

SEQ ID NO: 3046 - protein, 25 aa, Unknown
  source: /note="Description of Unknown: Linker sequence"
WSRLKAKDWGSSSGSQGREDSVLSY

SEQ ID NO: 3047 - protein, 4 aa, Unknown
  source: /note="Description of Unknown: Linker sequence"
LGTA

SEQ ID NO: 3048 - protein, 5 aa, Unknown
  source: /note="Description of Unknown: Linker sequence"
LGRRF

SEQ ID NO: 3049 - protein, 6 aa, Unknown
  source: /note="Description of Unknown: Linker sequence"
ANTDNT

SEQ ID NO: 3050 - protein, 6 aa, Unknown
  source: /note="Description of Unknown: Linker sequence"
KRTIPA

SEQ ID NO: 3051 - protein, 7 aa, Unknown
  source: /note="Description of Unknown: Linker sequence"
AIDDSNI

SEQ ID NO: 3052 - protein, 7 aa, Unknown
  source: /note="Description of Unknown: Linker sequence"
PLTKTDV

SEQ ID NO: 3053 - protein, 8 aa, Unknown
  source: /note="Description of Unknown: Linker sequence"
NYLVSDGI

SEQ ID NO: 3054 - protein, 9 aa, Unknown
  source: /note="Description of Unknown: Linker sequence"
LLDDEGFNW

SEQ ID NO: 3055 - protein, 4 aa, Unknown
  source: /note="Description of Unknown: Linker sequence"
TKAE

SEQ ID NO: 3056 - protein, 4 aa, Unknown
  source: /note="Description of Unknown: Linker sequence"
TVAV

SEQ ID NO: 3057 - protein, 4 aa, Unknown
  source: /note="Description of Unknown: Linker sequence"
YRTM

SEQ ID NO: 3058 - protein, 5 aa, Unknown
  source: /note="Description of Unknown: Linker sequence"
ARTPL

SEQ ID NO: 3059 - protein, 5 aa, Unknown
  source: /note="Description of Unknown: Linker sequence"
DRPDL

SEQ ID NO: 3060 - protein, 5 aa, Unknown
  source: /note="Description of Unknown: Linker sequence"
TGTAK

SEQ ID NO: 3061 - protein, 5 aa, Unknown
  source: /note="Description of Unknown: Linker sequence"
VAMQK

SEQ ID NO: 3062 - protein, 5 aa, Unknown
  source: /note="Description of Unknown: Linker sequence"
YNMQV

SEQ ID NO: 3063 - protein, 6 aa, Unknown
  source: /note="Description of Unknown: Linker sequence"
FRMYEK

SEQ ID NO: 3064 - protein, 6 aa, Unknown
  source: /note="Description of Unknown: Linker sequence"
QAAKST

SEQ ID NO: 3065 - protein, 7 aa, Unknown
  source: /note="Description of Unknown: Linker sequence"
YMTGQPV

SEQ ID NO: 3066 - protein, 8 aa, Unknown
  source: /note="Description of Unknown: Linker sequence"
VVEDGQVV

SEQ ID NO: 3067 - protein, 10 aa, Unknown
  source: /note="Description of Unknown: Linker sequence"
KEGLEIQNES

SEQ ID NO: 3068 - protein, 11 aa, Unknown
  source: /note="Description of Unknown: Linker sequence"
AFGIDNLFDVK

SEQ ID NO: 3069 - protein, 11 aa, Unknown
  source: /note="Description of Unknown: Linker sequence"
TIPTNRPVVRD

SEQ ID NO: 3070 - protein, 15 aa, Unknown
  source: /note="Description of Unknown: Linker sequence"
VDSFTGRLMKGRRYS

SEQ ID NO: 3071 - protein, 24 aa, Unknown
  source: /note="Description of Unknown: Linker sequence"
VRTLKAEKDYTYDIKTKAVQLTEE

SEQ ID NO: 3072 - protein, 12 aa, Unknown
  source: /note="Description of Unknown: Linker sequence"
DLPPLEEGRYYY

SEQ ID NO: 3073 - protein, 18 aa, Unknown
  source: /note="Description of Unknown: Linker sequence"
HGTALEHRRVVSPYGHRF

SEQ ID NO: 3074 - protein, 7 aa, Unknown
  source: /note="Description of Unknown: Linker sequence"
AEANVEY

SEQ ID NO: 3075 - protein, 9 aa, Unknown
  source: /note="Description of Unknown: Linker sequence"
IPLVTGPGV

SEQ ID NO: 3076 - protein, 4 aa, Unknown
  source: /note="Description of Unknown: Linker sequence"
INDV

SEQ ID NO: 3077 - protein, 4 aa, Unknown
  source: /note="Description of Unknown: Linker sequence"
KARL

SEQ ID NO: 3078 - protein, 5 aa, Unknown
  source: /note="Description of Unknown: Linker sequence"
HPEHG

SEQ ID NO: 3079 - protein, 5 aa, Unknown
  source: /note="Description of Unknown: Linker sequence"
YIGKP

SEQ ID NO: 3080 - protein, 7 aa, Unknown
  source: /note="Description of Unknown: Linker sequence"
YGYRRLR

SEQ ID NO: 3081 - protein, 8 aa, Unknown
  source: /note="Description of Unknown: Linker sequence"
EYLKRPLI

SEQ ID NO: 3082 - protein, 8 aa, Unknown
  source: /note="Description of Unknown: Linker sequence"
FADLPRKY

SEQ ID NO: 3083 - protein, 8 aa, Unknown
  source: /note="Description of Unknown: Linker sequence"
SGLQDVAH

SEQ ID NO: 3084 - protein, 13 aa, Unknown
  source: /note="Description of Unknown: Linker sequence"
VGGGLSTNPMLAQ

SEQ ID NO: 3085 - protein, 15 aa, Unknown
  source: /note="Description of Unknown: Linker sequence"
DDVGLQTTEACGDCP

SEQ ID NO: 3086 - protein, 16 aa, Unknown
  source: /note="Description of Unknown: Linker sequence"
DGPAPEPVKHPIDHVG

SEQ ID NO: 3087 - protein, 16 aa, Unknown
  source: /note="Description of Unknown: Linker sequence"
GSPLAGESLDEVLDPT

SEQ ID NO: 3088 - protein, 4 aa, Unknown
  source: /note="Description of Unknown: Linker sequence"
EVRE

SEQ ID NO: 3089 - protein, 4 aa, Unknown
  source: /note="Description of Unknown: Linker sequence"
HGEV

SEQ ID NO: 3090 - protein, 4 aa, Unknown
  source: /note="Description of Unknown: Linker sequence"
KLPP

SEQ ID NO: 3091 - protein, 6 aa, Unknown
  source: /note="Description of Unknown: Linker sequence"
FGREGN

SEQ ID NO: 3092 - protein, 6 aa, Unknown
  source: /note="Description of Unknown: Linker sequence"
LGKGSS

SEQ ID NO: 3093 - protein, 6 aa, Unknown
  source: /note="Description of Unknown: Linker sequence"
PFPKDV

SEQ ID NO: 3094 - protein, 6 aa, Unknown
  source: /note="Description of Unknown: Linker sequence"
SEHFGE

SEQ ID NO: 3095 - protein, 6 aa, Unknown
  source: /note="Description of Unknown: Linker sequence"
YTGVRR

SEQ ID NO: 3096 - protein, 7 aa, Unknown
  source: /note="Description of Unknown: Linker sequence"
DTHTLDY

SEQ ID NO: 3097 - protein, 8 aa, Unknown
  source: /note="Description of Unknown: Linker sequence"
ESDYEVGG

SEQ ID NO: 3098 - protein, 11 aa, Unknown
  source: /note="Description of Unknown: Linker sequence"
GNLPLGAGLSS

SEQ ID NO: 3099 - protein, 13 aa, Unknown
  source: /note="Description of Unknown: Linker sequence"
FSLNDLRKENSWI

SEQ ID NO: 3100 - protein, 9 aa, Unknown
  source: /note="Description of Unknown: Linker sequence"
EHGLAPPDR

SEQ ID NO: 3101 - protein, 12 aa, Unknown
  source: /note="Description of Unknown: Linker sequence"
AYPQTPLLPRDP

SEQ ID NO: 3102 - protein, 5 aa, Unknown
  source: /note="Description of Unknown: Linker sequence"
QFATV

SEQ ID NO: 3103 - protein, 4 aa, Unknown
  source: /note="Description of Unknown: Linker sequence"
LLTA

SEQ ID NO: 3104 - protein, 6 aa, Unknown
  source: /note="Description of Unknown: Linker sequence"
ARHPLL

SEQ ID NO: 3105 - protein, 6 aa, Unknown
  source: /note="Description of Unknown: Linker sequence"
LGGLEV

SEQ ID NO: 3106 - protein, 6 aa, Unknown
  source: /note="Description of Unknown: Linker sequence"
WTEGWE

SEQ ID NO: 3107 - protein, 7 aa, Unknown
  source: /note="Description of Unknown: Linker sequence"
YDEGLTS

SEQ ID NO: 3108 - protein, 8 aa, Unknown
  source: /note="Description of Unknown: Linker sequence"
TLGLRSPV

SEQ ID NO: 3109 - protein, 14 aa, Unknown
  source: /note="Description of Unknown: Linker sequence"
HLDLSAPKLRLREE

SEQ ID NO: 3110 - protein, 21 aa, Unknown
  source: /note="Description of Unknown: Linker sequence"
YATEKEEPKPERTEVVAKLRR

SEQ ID NO: 3111 - protein, 6 aa, Unknown
  source: /note="Description of Unknown: Linker sequence"
ELGVSL

SEQ ID NO: 3112 - protein, 6 aa, Unknown
  source: /note="Description of Unknown: Linker sequence"
MSSKGT

SEQ ID NO: 3113 - protein, 7 aa, Unknown
  source: /note="Description of Unknown: Linker sequence"
LKLGRAF

SEQ ID NO: 3114 - protein, 8 aa, Unknown
  source: /note="Description of Unknown: Linker sequence"
GFNIEKFP

SEQ ID NO: 3115 - protein, 15 aa, Unknown
  source: /note="Description of Unknown: Linker sequence"
TAPLPGYNTEFASGI

SEQ ID NO: 3116 - protein, 22 aa, Unknown
  source: /note="Description of Unknown: Linker sequence"
CFRNEVGLPDSSKTEKVTSETV

SEQ ID NO: 3117 - protein, 4 aa, Unknown
  source: /note="Description of Unknown: Linker sequence"
KSRT

SEQ ID NO: 3118 - protein, 5 aa, Unknown
  source: /note="Description of Unknown: Linker sequence"
DRAGA

SEQ ID NO: 3119 - protein, 5 aa, Unknown
  source: /note="Description of Unknown: Linker sequence"
FYVSA

SEQ ID NO: 3120 - protein, 5 aa, Unknown
  source: /note="Description of Unknown: Linker sequence"
IATGG

SEQ ID NO: 3121 - protein, 5 aa, Unknown
  source: /note="Description of Unknown: Linker sequence"
IGGGT

SEQ ID NO: 3122 - protein, 5 aa, Unknown
  source: /note="Description of Unknown: Linker sequence"
LFRKI

SEQ ID NO: 3123 - protein, 5 aa, Unknown
  source: /note="Description of Unknown: Linker sequence"
PRSLS

SEQ ID NO: 3124 - protein, 5 aa, Unknown
  source: /note="Description of Unknown: Linker sequence"
TGKKV

SEQ ID NO: 3125 - protein, 6 aa, Unknown
  source: /note="Description of Unknown: Linker sequence"
DVRGNM

SEQ ID NO: 3126 - protein, 6 aa, Unknown
  source: /note="Description of Unknown: Linker sequence"
LNDGSQ

SEQ ID NO: 3127 - protein, 6 aa, Unknown
  source: /note="Description of Unknown: Linker sequence"
NIENGG

SEQ ID NO: 3128 - protein, 6 aa, Unknown
  source: /note="Description of Unknown: Linker sequence"
RDPGAR

SEQ ID NO: 3129 - protein, 6 aa, Unknown
  source: /note="Description of Unknown: Linker sequence"
SREVKS

SEQ ID NO: 3130 - protein, 7 aa, Unknown
  source: /note="Description of Unknown: Linker sequence"
RQWNGKE

SEQ ID NO: 3131 - protein, 7 aa, Unknown
  source: /note="Description of Unknown: Linker sequence"
SIYFQPP

SEQ ID NO: 3132 - protein, 8 aa, Unknown
  source: /note="Description of Unknown: Linker sequence"
VPQIRAPS

SEQ ID NO: 3133 - protein, 8 aa, Unknown
  source: /note="Description of Unknown: Linker sequence"
WFSDDPNV

SEQ ID NO: 3134 - protein, 11 aa, Unknown
  source: /note="Description of Unknown: Linker sequence"
SEDPELPYMRP

SEQ ID NO: 3135 - protein, 8 aa, Unknown
  source: /note="Description of Unknown: Linker sequence"
AFDGPFDE

SEQ ID NO: 3136 - protein, 6 aa, Unknown
  source: /note="Description of Unknown: Linker sequence"
HGDDRG

SEQ ID NO: 3137 - protein, 5 aa, Unknown
  source: /note="Description of Unknown: Linker sequence"
LRPSP

SEQ ID NO: 3138 - protein, 4 aa, Unknown
  source: /note="Description of Unknown: Linker sequence"
LNVA

SEQ ID NO: 3139 - protein, 6 aa, Unknown
  source: /note="Description of Unknown: Linker sequence"
LSTSQK

SEQ ID NO: 3140 - protein, 21 aa, Unknown
  source: /note="Description of Unknown: Linker sequence"
GAADIGLGYPNGNQGWGRVTL

SEQ ID NO: 3141 - protein, 4 aa, Unknown
  source: /note="Description of Unknown: Linker sequence"
YIGI

SEQ ID NO: 3142 - protein, 7 aa, Unknown
  source: /note="Description of Unknown: Linker sequence"
DGRVIRG

SEQ ID NO: 3143 - protein, 17 aa, Unknown
  source: /note="Description of Unknown: Linker sequence"
TLSFDKSNDGETPEGIG

SEQ ID NO: 3144 - protein, 18 aa, Unknown
  source: /note="Description of Unknown: Linker sequence"
EIAPLHAQGGGIDQLQGI

SEQ ID NO: 3145 - protein, 4 aa, Unknown
  source: /note="Description of Unknown: Linker sequence"
ANNG

SEQ ID NO: 3146 - protein, 4 aa, Unknown
  source: /note="Description of Unknown: Linker sequence"
ESNL

SEQ ID NO: 3147 - protein, 4 aa, Unknown
  source: /note="Description of Unknown: Linker sequence"
KISA

SEQ ID NO: 3148 - protein, 4 aa, Unknown
  source: /note="Description of Unknown: Linker sequence"
MDSA

SEQ ID NO: 3149 - protein, 4 aa, Unknown
  source: /note="Description of Unknown: Linker sequence"
MMTP

SEQ ID NO: 3150 - protein, 4 aa, Unknown
  source: /note="Description of Unknown: Linker sequence"
VGGI

SEQ ID NO: 3151 - protein, 5 aa, Unknown
  source: /note="Description of Unknown: Linker sequence"
YTQRL

SEQ ID NO: 3152 - protein, 6 aa, Unknown
  source: /note="Description of Unknown: Linker sequence"
AEKGKA

SEQ ID NO: 3153 - protein, 6 aa, Unknown
  source: /note="Description of Unknown: Linker sequence"
MIRVPV

SEQ ID NO: 3154 - protein, 7 aa, Unknown
  source: /note="Description of Unknown: Linker sequence"
SYTATED

SEQ ID NO: 3155 - protein, 8 aa, Unknown
  source: /note="Description of Unknown: Linker sequence"
ETINPAHP

SEQ ID NO: 3156 - protein, 8 aa, Unknown
  source: /note="Description of Unknown: Linker sequence"
SKFSGGNL

SEQ ID NO: 3157 - protein, 8 aa, Unknown
  source: /note="Description of Unknown: Linker sequence"
TAYFVDAP

SEQ ID NO: 3158 - protein, 9 aa, Unknown
  source: /note="Description of Unknown: Linker sequence"
ISPKEPHNK

SEQ ID NO: 3159 - protein, 9 aa, Unknown
  source: /note="Description of Unknown: Linker sequence"
LSDKPGNPV

SEQ ID NO: 3160 - protein, 9 aa, Unknown
  source: /note="Description of Unknown: Linker sequence"
RYPSITRDM

SEQ ID NO: 3161 - protein, 10 aa, Unknown
  source: /note="Description of Unknown: Linker sequence"
MLSQVPYFSR

SEQ ID NO: 3162 - protein, 11 aa, Unknown
  source: /note="Description of Unknown: Linker sequence"
APSRYFASEPK

SEQ ID NO: 3163 - protein, 14 aa, Unknown
  source: /note="Description of Unknown: Linker sequence"
HTLDAVNIADRYDA

SEQ ID NO: 3164 - protein, 31 aa, Unknown
  source: /note="Description of Unknown: Linker sequence"
ADIALSLPELNPYIPDDFSLIKSEKKYDHPE

SEQ ID NO: 3165 - protein, 7 aa, Unknown
  source: /note="Description of Unknown: Linker sequence"
DVQPMQY

SEQ ID NO: 3166 - protein, 11 aa, Unknown
  source: /note="Description of Unknown: Linker sequence"
HMSPSWTLLKL

SEQ ID NO: 3167 - protein, 8 aa, Unknown
  source: /note="Description of Unknown: Linker sequence"
LEMVSKPM

SEQ ID NO: 3168 - protein, 51 aa, Unknown
  source: /note="Description of Unknown: Linker sequence"
YGPKGKGKGMGAGTLSTDKGESLGIKYEEGQSHRPTNPNASRMAQKVGGSD

SEQ ID NO: 3169 - protein, 5 aa, Unknown
  source: /note="Description of Unknown: Linker sequence"
VGQSL

SEQ ID NO: 3170 - protein, 6 aa, Unknown
  source: /note="Description of Unknown: Linker sequence"
VSRSST

SEQ ID NO: 3171 - protein, 12 aa, Unknown
  source: /note="Description of Unknown: Linker sequence"
ERNDVAPNKPDE

SEQ ID NO: 3172 - protein, 12 aa, Unknown
  source: /note="Description of Unknown: Linker sequence"
TETAAAADPGLS

SEQ ID NO: 3173 - protein, 14 aa, Unknown
  source: /note="Description of Unknown: Linker sequence"
VAESDRPELTSARR

SEQ ID NO: 3174 - protein, 4 aa, Unknown
  source: /note="Description of Unknown: Linker sequence"
PFYP

SEQ ID NO: 3175 - protein, 6 aa, Unknown
  source: /note="Description of Unknown: Linker sequence"
GVSEKP

SEQ ID NO: 3176 - protein, 9 aa, Unknown
  source: /note="Description of Unknown: Linker sequence"
LGMGDVASL

SEQ ID NO: 3177 - protein, 15 aa, Unknown
  source: /note="Description of Unknown: Linker sequence"
ALGGEARLPVLKDRN

SEQ ID NO: 3178 - protein, 17 aa, Unknown
  source: /note="Description of Unknown: Linker sequence"
AAGLEAEAPKSAKELSL

SEQ ID NO: 3179 - protein, 4 aa, Unknown
  source: /note="Description of Unknown: Linker sequence"
KGRF

SEQ ID NO: 3180 - protein, 5 aa, Unknown
  source: /note="Description of Unknown: Linker sequence"
KAGSL

SEQ ID NO: 3181 - protein, 6 aa, Unknown
  source: /note="Description of Unknown: Linker sequence"
NTGIFI

SEQ ID NO: 3182 - protein, 6 aa, Unknown
  source: /note="Description of Unknown: Linker sequence"
QLVKSE

SEQ ID NO: 3183 - protein, 7 aa, Unknown
  source: /note="Description of Unknown: Linker sequence"
KLKYVPH

SEQ ID NO: 3184 - protein, 7 aa, Unknown
  source: /note="Description of Unknown: Linker sequence"
LGFDEVI

SEQ ID NO: 3185 - protein, 9 aa, Unknown
  source: /note="Description of Unknown: Linker sequence"
MLATNLTDK

SEQ ID NO: 3186 - protein, 16 aa, Unknown
  source: /note="Description of Unknown: Linker sequence"
LKDHILQFVIPNRGVT

SEQ ID NO: 3187 - protein, 17 aa, Unknown
  source: /note="Description of Unknown: Linker sequence"
RAKGSTKFTRVPKRVYW

SEQ ID NO: 3188 - protein, 5 aa, Unknown
  source: /note="Description of Unknown: Linker sequence"
FQKLM

SEQ ID NO: 3189 - protein, 6 aa, Unknown
  source: /note="Description of Unknown: Linker sequence"
NAPTPQ

SEQ ID NO: 3190 - protein, 8 aa, Unknown
  source: /note="Description of Unknown: Linker sequence"
EFKEGEDA

SEQ ID NO: 3191 - protein, 6 aa, Unknown
  source: /note="Description of Unknown: Linker sequence"
AGTLLP

SEQ ID NO: 3192 - protein, 6 aa, Unknown
  source: /note="Description of Unknown: Linker sequence"
LAPYKV

SEQ ID NO: 3193 - protein, 7 aa, Unknown
  source: /note="Description of Unknown: Linker sequence"
ESIKDDK

SEQ ID NO: 3194 - protein, 7 aa, Unknown
  source: /note="Description of Unknown: Linker sequence"
FHDKPEI

SEQ ID NO: 3195 - protein, 8 aa, Unknown
  source: /note="Description of Unknown: Linker sequence"
ITTPKDDE

SEQ ID NO: 3196 - protein, 9 aa, Unknown
  source: /note="Description of Unknown: Linker sequence"
HDITPSMTP

SEQ ID NO: 3197 - protein, 10 aa, Unknown
  source: /note="Description of Unknown: Linker sequence"
AEATVAPVSP

SEQ ID NO: 3198 - protein, 11 aa, Unknown
  source: /note="Description of Unknown: Linker sequence"
IDALADKYEPS

SEQ ID NO: 3199 - protein, 4 aa, Unknown
  source: /note="Description of Unknown: Linker sequence"
FYGK

SEQ ID NO: 3200 - protein, 8 aa, Unknown
  source: /note="Description of Unknown: Linker sequence"
ALSNTGEI

SEQ ID NO: 3201 - protein, 15 aa, Unknown
  source: /note="Description of Unknown: Linker sequence"
TATPPGSVTVPHPNI

SEQ ID NO: 3202 - protein, 19 aa, Unknown
  source: /note="Description of Unknown: Linker sequence"
RSPVFTDNSSPPAVPQSFQ

SEQ ID NO: 3203 - protein, 8 aa, Unknown
  source: /note="Description of Unknown: Linker sequence"
IRNIDQDV

SEQ ID NO: 3204 - protein, 8 aa, Unknown
  source: /note="Description of Unknown: Linker sequence"
REETNLMD

SEQ ID NO: 3205 - protein, 6 aa, Unknown
  source: /note="Description of Unknown: Linker sequence"
HALPLV

SEQ ID NO: 3206 - protein, 6 aa, Unknown
  source: /note="Description of Unknown: Linker sequence"
EGRSKK

SEQ ID NO: 3207 - protein, 27 aa, Unknown
  source: /note="Description of Unknown: Linker sequence"
NKEKKAVSPLLLTTTNSSEGLSMGNYI

SEQ ID NO: 3208 - protein, 7 aa, Unknown
  source: /note="Description of Unknown: Linker sequence"
DLASGQI

SEQ ID NO: 3209 - protein, 7 aa, Unknown
  source: /note="Description of Unknown: Linker sequence"
TLANGAV

SEQ ID NO: 3210 - protein, 8 aa, Unknown
  source: /note="Description of Unknown: Linker sequence"
DYDGYNQF

SEQ ID NO: 3211 - protein, 9 aa, Unknown
  source: /note="Description of Unknown: Linker sequence"
DTGGAPGTV

SEQ ID NO: 3212 - protein, 9 aa, Unknown
  source: /note="Description of Unknown: Linker sequence"
QTNGGQFPY

SEQ ID NO: 3213 - protein, 10 aa, Unknown
  source: /note="Description of Unknown: Linker sequence"
TGIKGAFRTR

SEQ ID NO: 3214 - protein, 5 aa, Unknown
  source: /note="Description of Unknown: Linker sequence"
SLPAR

SEQ ID NO: 3215 - protein, 4 aa, Unknown
  source: /note="Description of Unknown: Linker sequence"
IYPD

SEQ ID NO: 3216 - protein, 4 aa, Unknown
  source: /note="Description of Unknown: Linker sequence"
KCAV

SEQ ID NO: 3217 - protein, 4 aa, Unknown
  source: /note="Description of Unknown: Linker sequence"
MAPK

SEQ ID NO: 3218 - protein, 4 aa, Unknown
  source: /note="Description of Unknown: Linker sequence"
TESL

SEQ ID NO: 3219 - protein, 5 aa, Unknown
  source: /note="Description of Unknown: Linker sequence"
ASADQ

SEQ ID NO: 3220 - protein, 10 aa, Unknown
  source: /note="Description of Unknown: Linker sequence"
YTLRQPPPAT

SEQ ID NO: 3221 - protein, 11 aa, Unknown
  source: /note="Description of Unknown: Linker sequence"
DQSDPNDPKSR

SEQ ID NO: 3222 - protein, 24 aa, Unknown
  source: /note="Description of Unknown: Linker sequence"
SLHDMADEAGLPVQTEDGEATGTI

SEQ ID NO: 3223 - protein, 5 aa, Unknown
  source: /note="Description of Unknown: Linker sequence"
DGIEE

SEQ ID NO: 3224 - protein, 6 aa, Unknown
  source: /note="Description of Unknown: Linker sequence"
VEHLPK

SEQ ID NO: 3225 - protein, 4 aa, Unknown
  source: /note="Description of Unknown: Linker sequence"
QAHS

SEQ ID NO: 3226 - protein, 7 aa, Unknown
  source: /note="Description of Unknown: Linker sequence"
AKEAFVS

SEQ ID NO: 3227 - protein, 9 aa, Unknown
  source: /note="Description of Unknown: Linker sequence"
QGILLHRSR

SEQ ID NO: 3228 - protein, 4 aa, Unknown
  source: /note="Description of Unknown: Linker sequence"
ESEY

SEQ ID NO: 3229 - protein, 5 aa, Unknown
  source: /note="Description of Unknown: Linker sequence"
DGPTP

SEQ ID NO: 3230 - protein, 8 aa, Unknown
  source: /note="Description of Unknown: Linker sequence"
VGSEKVSK

SEQ ID NO: 3231 - protein, 4 aa, Unknown
  source: /note="Description of Unknown: Linker sequence"
IGQS

SEQ ID NO: 3232 - protein, 15 aa, Unknown
  source: /note="Description of Unknown: Linker sequence"
VSNINNTVSPSSASF

SEQ ID NO: 3233 - protein, 16 aa, Unknown
  source: /note="Description of Unknown: Linker sequence"
ALPTNARPLLPPISNP

SEQ ID NO: 3234 - protein, 8 aa, Unknown
  source: /note="Description of Unknown: Linker sequence"
VRERPVPR

SEQ ID NO: 3235 - protein, 9 aa, Unknown
  source: /note="Description of Unknown: Linker sequence"
EQADGAVRG

SEQ ID NO: 3236 - protein, 13 aa, Unknown
  source: /note="Description of Unknown: Linker sequence"
ARSGYRPDSGATP

SEQ ID NO: 3237 - protein, 8 aa, Unknown
  source: /note="Description of Unknown: Linker sequence"
PDIDKLGY

SEQ ID NO: 3238 - protein, 5 aa, Unknown
  source: /note="Description of Unknown: Linker sequence"
LGYSM

SEQ ID NO: 3239 - protein, 13 aa, Unknown
  source: /note="Description of Unknown: Linker sequence"
SGVIKKFTAIIDP

SEQ ID NO: 3240 - protein, 6 aa, Unknown
  source: /note="Description of Unknown: Linker sequence"
RTSRQL

SEQ ID NO: 3241 - protein, 4 aa, Unknown
  source: /note="Description of Unknown: Linker sequence"
SGCK

SEQ ID NO: 3242 - protein, 5 aa, Unknown
  source: /note="Description of Unknown: Linker sequence"
VSTGV

SEQ ID NO: 3243 - protein, 10 aa, Unknown
  source: /note="Description of Unknown: Linker sequence"
QALDGDITDM

SEQ ID NO: 3244 - protein, 8 aa, Unknown
  source: /note="Description of Unknown: Linker sequence"
HTAGSIPM

SEQ ID NO: 3245 - protein, 8 aa, Unknown
  source: /note="Description of Unknown: Linker sequence"
WEGHVPHY

SEQ ID NO: 3246 - protein, 9 aa, Unknown
  source: /note="Description of Unknown: Linker sequence"
VEGKREEAL

SEQ ID NO: 3247 - protein, 13 aa, Unknown
  source: /note="Description of Unknown: Linker sequence"
PMQTFSKQREVDF

SEQ ID NO: 3248 - protein, 10 aa, Unknown
  source: /note="Description of Unknown: Linker sequence"
VYFNERINVD

SEQ ID NO: 3249 - protein, 6 aa, Unknown
  source: /note="Description of Unknown: Linker sequence"
SGGPAT

SEQ ID NO: 3250 - protein, 8 aa, Unknown
  source: /note="Description of Unknown: Linker sequence"
YAATSTGR

SEQ ID NO: 3251 - protein, 9 aa, Unknown
  source: /note="Description of Unknown: Linker sequence"
TGGTEAAGG

SEQ ID NO: 3252 - protein, 6 aa, Unknown
  source: /note="Description of Unknown: Linker sequence"
FDPTEF

SEQ ID NO: 3253 - protein, 7 aa, Unknown
  source: /note="Description of Unknown: Linker sequence"
VDLDFNR

SEQ ID NO: 3254 - protein, 10 aa, Unknown
  source: /note="Description of Unknown: Linker sequence"
SNDAGFAMTS

SEQ ID NO: 3255 - protein, 11 aa, Unknown
  source: /note="Description of Unknown: Linker sequence"
NGFDPATGDLS

SEQ ID NO: 3256 - protein, 8 aa, Unknown
  source: /note="Description of Unknown: Linker sequence"
FSQPAPDR

SEQ ID NO: 3257 - protein, 5 aa, Unknown
  source: /note="Description of Unknown: Linker sequence"
CQPNE

SEQ ID NO: 3258 - protein, 5 aa, Unknown
  source: /note="Description of Unknown: Linker sequence"
KGVPC

SEQ ID NO: 3259 - protein, 5 aa, Unknown
  source: /note="Description of Unknown: Linker sequence"
PFITE

SEQ ID NO: 3260 - protein, 6 aa, Unknown
  source: /note="Description of Unknown: Linker sequence"
SIPTCE

SEQ ID NO: 3261 - protein, 6 aa, Unknown
  source: /note="Description of Unknown: Linker sequence"
VEEHNI

SEQ ID NO: 3262 - protein, 7 aa, Unknown
  source: /note="Description of Unknown: Linker sequence"
SNKEVIQ

SEQ ID NO: 3263 - protein, 7 aa, Unknown
  source: /note="Description of Unknown: Linker sequence"
TAKGDTK

SEQ ID NO: 3264 - protein, 9 aa, Unknown
  source: /note="Description of Unknown: Linker sequence"
GRWYPAFAD

SEQ ID NO: 3265 - protein, 16 aa, Unknown
  source: /note="Description of Unknown: Linker sequence"
IFYDFLHVNVIPTVSF

SEQ ID NO: 3266 - protein, 5 aa, Unknown
  source: /note="Description of Unknown: Linker sequence"
PGPAS

SEQ ID NO: 3267 - protein, 7 aa, Unknown
  source: /note="Description of Unknown: Linker sequence"
KVSKKTG

SEQ ID NO: 3268 - protein, 8 aa, Unknown
  source: /note="Description of Unknown: Linker sequence"
ACNIASMP

SEQ ID NO: 3269 - protein, 8 aa, Unknown
  source: /note="Description of Unknown: Linker sequence"
FNDEASDE

SEQ ID NO: 3270 - protein, 18 aa, Unknown
  source: /note="Description of Unknown: Linker sequence"
SLNAGELKKAAPADPSAP

SEQ ID NO: 3271 - protein, 10 aa, Unknown
  source: /note="Description of Unknown: Linker sequence"
DKYYMASPDL

SEQ ID NO: 3272 - protein, 10 aa, Unknown
  source: /note="Description of Unknown: Linker sequence"
NATNATQPIH

SEQ ID NO: 3273 - protein, 4 aa, Unknown
  source: /note="Description of Unknown: Linker sequence"
EFPP

SEQ ID NO: 3274 - protein, 9 aa, Unknown
  source: /note="Description of Unknown: Linker sequence"
ENELMYGVP

SEQ ID NO: 3275 - protein, 13 aa, Unknown
  source: /note="Description of Unknown: Linker sequence"
QSKDFLIPIGKAK

SEQ ID NO: 3276 - protein, 4 aa, Unknown
  source: /note="Description of Unknown: Linker sequence"
AGEV

SEQ ID NO: 3277 - protein, 4 aa, Unknown
  source: /note="Description of Unknown: Linker sequence"
LHPT

SEQ ID NO: 3278 - protein, 4 aa, Unknown
  source: /note="Description of Unknown: Linker sequence"
RIEA

SEQ ID NO: 3279 - protein, 4 aa, Unknown
  source: /note="Description of Unknown: Linker sequence"
SPGA

SEQ ID NO: 3280 - protein, 4 aa, Unknown
  source: /note="Description of Unknown: Linker sequence"
YFTA

SEQ ID NO: 3281 - protein, 6 aa, Unknown
  source: /note="Description of Unknown: Linker sequence"
DGSTGK

SEQ ID NO: 3282 - protein, 6 aa, Unknown
  source: /note="Description of Unknown: Linker sequence"
EKGERV

SEQ ID NO: 3283 - protein, 6 aa, Unknown
  source: /note="Description of Unknown: Linker sequence"
KGDIET

SEQ ID NO: 3284 - protein, 7 aa, Unknown
  source: /note="Description of Unknown: Linker sequence"
DEGMITE

SEQ ID NO: 3285 - protein, 7 aa, Unknown
  source: /note="Description of Unknown: Linker sequence"
QEASVSG

SEQ ID NO: 3286 - protein, 4 aa, Unknown
  source: /note="Description of Unknown: Linker sequence"
EAAN

SEQ ID NO: 3287 - protein, 4 aa, Unknown
  source: /note="Description of Unknown: Linker sequence"
RYGL

SEQ ID NO: 3288 - protein, 5 aa, Unknown
  source: /note="Description of Unknown: Linker sequence"
EVLDY

SEQ ID NO: 3289 - protein, 5 aa, Unknown
  source: /note="Description of Unknown: Linker sequence"
RPFVS

SEQ ID NO: 3290 - protein, 5 aa, Unknown
  source: /note="Description of Unknown: Linker sequence"
SLVNQ

SEQ ID NO: 3291 - protein, 5 aa, Unknown
  source: /note="Description of Unknown: Linker sequence"
SMGSS

SEQ ID NO: 3292 - protein, 6 aa, Unknown
  source: /note="Description of Unknown: Linker sequence"
SKEFSP

SEQ ID NO: 3293 - protein, 7 aa, Unknown
  source: /note="Description of Unknown: Linker sequence"
AAKGEKI

SEQ ID NO: 3294 - protein, 7 aa, Unknown
  source: /note="Description of Unknown: Linker sequence"
GAPDAER

SEQ ID NO: 3295 - protein, 7 aa, Unknown
  source: /note="Description of Unknown: Linker sequence"
RGEAMPK

SEQ ID NO: 3296 - protein, 8 aa, Unknown
  source: /note="Description of Unknown: Linker sequence"
SGAKKNHF

SEQ ID NO: 3297 - protein, 8 aa, Unknown
  source: /note="Description of Unknown: Linker sequence"
TGRSYKLF

SEQ ID NO: 3298 - protein, 9 aa, Unknown
  source: /note="Description of Unknown: Linker sequence"
AALPASAKV

SEQ ID NO: 3299 - protein, 9 aa, Unknown
  source: /note="Description of Unknown: Linker sequence"
DGFRTSHEI

SEQ ID NO: 3300 - protein, 10 aa, Unknown
  source: /note="Description of Unknown: Linker sequence"
KSMNPEHPHV

SEQ ID NO: 3301 - protein, 10 aa, Unknown
  source: /note="Description of Unknown: Linker sequence"
RGTAQNPDIY

SEQ ID NO: 3302 - protein, 11 aa, Unknown
  source: /note="Description of Unknown: Linker sequence"
WVPENCIQCNQ

SEQ ID NO: 3303 - protein, 12 aa, Unknown
  source: /note="Description of Unknown: Linker sequence"
DRTKEPGAPGDP

SEQ ID NO: 3304 - protein, 28 aa, Unknown
  source: /note="Description of Unknown: Linker sequence"
TVGIEDDVTGTSLPVDNAFADTTPKGTI

SEQ ID NO: 3305 - protein, 4 aa, Unknown
  source: /note="Description of Unknown: Linker sequence"
AGED

SEQ ID NO: 3306 - protein, 4 aa, Unknown
  source: /note="Description of Unknown: Linker sequence"
DADS

SEQ ID NO: 3307 - protein, 4 aa, Unknown
  source: /note="Description of Unknown: Linker sequence"
DGTV

SEQ ID NO: 3308 - protein, 4 aa, Unknown
  source: /note="Description of Unknown: Linker sequence"
QDGR

SEQ ID NO: 3309 - protein, 5 aa, Unknown
  source: /note="Description of Unknown: Linker sequence"
LGAGE

SEQ ID NO: 3310 - protein, 5 aa, Unknown
  source: /note="Description of Unknown: Linker sequence"
QPGRG

SEQ ID NO: 3311 - protein, 6 aa, Unknown
  source: /note="Description of Unknown: Linker sequence"
DFADGS

SEQ ID NO: 3312 - protein, 6 aa, Unknown
  source: /note="Description of Unknown: Linker sequence"
YDRPDR

SEQ ID NO: 3313 - protein, 7 aa, Unknown
  source: /note="Description of Unknown: Linker sequence"
KADAAPQ

SEQ ID NO: 3314 - protein, 15 aa, Unknown
  source: /note="Description of Unknown: Linker sequence"
PLGEAPDAYADDASG

SEQ ID NO: 3315 - protein, 4 aa, Unknown
  source: /note="Description of Unknown: Linker sequence"
PCFP

SEQ ID NO: 3316 - protein, 7 aa, Unknown
  source: /note="Description of Unknown: Linker sequence"
DLESPVK

SEQ ID NO: 3317 - protein, 7 aa, Unknown
  source: /note="Description of Unknown: Linker sequence"
FLRIQNV

SEQ ID NO: 3318 - protein, 10 aa, Unknown
  source: /note="Description of Unknown: Linker sequence"
LGHPCTRTPH

SEQ ID NO: 3319 - protein, 6 aa, Unknown
  source: /note="Description of Unknown: Linker sequence"
HFPKTF

SEQ ID NO: 3320 - protein, 7 aa, Unknown
  source: /note="Description of Unknown: Linker sequence"
RKLLGVK

SEQ ID NO: 3321 - protein, 7 aa, Unknown
  source: /note="Description of Unknown: Linker sequence"
SATPIPR

SEQ ID NO: 3322 - protein, 8 aa, Unknown
  source: /note="Description of Unknown: Linker sequence"
FYGDLDVT

SEQ ID NO: 3323 - protein, 8 aa, Unknown
  source: /note="Description of Unknown: Linker sequence"
SLPFKLTN

SEQ ID NO: 3324 - protein, 9 aa, Unknown
  source: /note="Description of Unknown: Linker sequence"
CSLKETLPE

SEQ ID NO: 3325 - protein, 9 aa, Unknown
  source: /note="Description of Unknown: Linker sequence"
ISEKPMNRL

SEQ ID NO: 3326 - protein, 9 aa, Unknown
  source: /note="Description of Unknown: Linker sequence"
TMLVPMDRV

SEQ ID NO: 3327 - protein, 10 aa, Unknown
  source: /note="Description of Unknown: Linker sequence"
IYRLTSGISQ

SEQ ID NO: 3328 - protein, 11 aa, Unknown
  source: /note="Description of Unknown: Linker sequence"
HGGIPKKIEGK

SEQ ID NO: 3329 - protein, 12 aa, Unknown
  source: /note="Description of Unknown: Linker sequence"
IDEMPPGRKEVQ

SEQ ID NO: 3330 - protein, 12 aa, Unknown
  source: /note="Description of Unknown: Linker sequence"
TPKEGEYVRRIL

SEQ ID NO: 3331 - protein, 9 aa, Unknown
  source: /note="Description of Unknown: Linker sequence"
KSDYTQNNI

SEQ ID NO: 3332 - protein, 15 aa, Unknown
  source: /note="Description of Unknown: Linker sequence"
EGMGPVLAPVTPVPV

SEQ ID NO: 3333 - protein, 7 aa, Unknown
  source: /note="Description of Unknown: Linker sequence"
MLNQNWH

SEQ ID NO: 3334 - protein, 10 aa, Unknown
  source: /note="Description of Unknown: Linker sequence"
NMTNATDASP

SEQ ID NO: 3335 - protein, 14 aa, Unknown
  source: /note="Description of Unknown: Linker sequence"
LLYDERTTNLTLDE

SEQ ID NO: 3336 - protein, 6 aa, Unknown
  source: /note="Description of Unknown: Linker sequence"
EAGYPG

SEQ ID NO: 3337 - protein, 7 aa, Unknown
  source: /note="Description of Unknown: Linker sequence"
LFDSLSP

SEQ ID NO: 3338 - protein, 7 aa, Unknown
  source: /note="Description of Unknown: Linker sequence"
TREGKST

SEQ ID NO: 3339 - protein, 5 aa, Unknown
  source: /note="Description of Unknown: Linker sequence"
AEGDM

SEQ ID NO: 3340 - protein, 6 aa, Unknown
  source: /note="Description of Unknown: Linker sequence"
AALDKK

SEQ ID NO: 3341 - protein, 6 aa, Unknown
  source: /note="Description of Unknown: Linker sequence"
ENEGLE

SEQ ID NO: 3342 - protein, 7 aa, Unknown
  source: /note="Description of Unknown: Linker sequence"
RFRPLRD

SEQ ID NO: 3343 - protein, 7 aa, Unknown
  source: /note="Description of Unknown: Linker sequence"
VASRARP

SEQ ID NO: 3344 - protein, 4 aa, Unknown
  source: /note="Description of Unknown: Linker sequence"
TKNI

SEQ ID NO: 3345 - protein, 6 aa, Unknown
  source: /note="Description of Unknown: Linker sequence"
VSAGST

SEQ ID NO: 3346 - protein, 9 aa, Unknown
  source: /note="Description of Unknown: Linker sequence"
SGSVKTGTT

SEQ ID NO: 3347 - protein, 10 aa, Unknown
  source: /note="Description of Unknown: Linker sequence"
DLDIKGYVAA

SEQ ID NO: 3348 - protein, 13 aa, Unknown
  source: /note="Description of Unknown: Linker sequence"
SRSGTPSTSIDTS

SEQ ID NO: 3349 - protein, 9 aa, Unknown
  source: /note="Description of Unknown: Linker sequence"
CDGDEYKPV

SEQ ID NO: 3350 - protein, 14 aa, Unknown
  source: /note="Description of Unknown: Linker sequence"
DGPCEPDEDEDVCQ

SEQ ID NO: 3351 - protein, 14 aa, Unknown
  source: /note="Description of Unknown: Linker sequence"
RAVLSSTRMGGHFV

SEQ ID NO: 3352 - protein, 4 aa, Unknown
  source: /note="Description of Unknown: Linker sequence"
QLRT

SEQ ID NO: 3353 - protein, 5 aa, Unknown
  source: /note="Description of Unknown: Linker sequence"
DITNA

SEQ ID NO: 3354 - protein, 6 aa, Unknown
  source: /note="Description of Unknown: Linker sequence"
QEVVAP

SEQ ID NO: 3355 - protein, 4 aa, Unknown
  source: /note="Description of Unknown: Linker sequence"
ILGE

SEQ ID NO: 3356 - protein, 5 aa, Unknown
  source: /note="Description of Unknown: Linker sequence"
SQGGK

SEQ ID NO: 3357 - protein, 6 aa, Unknown
  source: /note="Description of Unknown: Linker sequence"
IARPPA

SEQ ID NO: 3358 - protein, 7 aa, Unknown
  source: /note="Description of Unknown: Linker sequence"
PTFAVER

SEQ ID NO: 3359 - protein, 12 aa, Unknown
  source: /note="Description of Unknown: Linker sequence"
EGTYGDRPHRPY

SEQ ID NO: 3360 - protein, 24 aa, Unknown
  source: /note="Description of Unknown: Linker sequence"
YSGDLGNREKDVLPDPSLPPLADL

SEQ ID NO: 3361 - protein, 4 aa, Unknown
  source: /note="Description of Unknown: Linker sequence"
DYTE

SEQ ID NO: 3362 - protein, 4 aa, Unknown
  source: /note="Description of Unknown: Linker sequence"
TFSY

SEQ ID NO: 3363 - protein, 6 aa, Unknown
  source: /note="Description of Unknown: Linker sequence"
DTFIDH

SEQ ID NO: 3364 - protein, 8 aa, Unknown
  source: /note="Description of Unknown: Linker sequence"
EMGKYDNH

SEQ ID NO: 3365 - protein, 9 aa, Unknown
  source: /note="Description of Unknown: Linker sequence"
YGQFEPPAL

SEQ ID NO: 3366 - protein, 16 aa, Unknown
  source: /note="Description of Unknown: Linker sequence"
KYLVQNRVTGEIYESA

SEQ ID NO: 3367 - protein, 13 aa, Unknown
  source: /note="Description of Unknown: Linker sequence"
DLSVFPELEEGDY

SEQ ID NO: 3368 - protein, 9 aa, Unknown
  source: /note="Description of Unknown: Linker sequence"
DYGFIEPNE

SEQ ID NO: 3369 - protein, 5 aa, Unknown
  source: /note="Description of Unknown: Linker sequence"
PAPAP

SEQ ID NO: 3370 - protein, 10 aa, Unknown
  source: /note="Description of Unknown: Linker sequence"
APAPAPAPAP

SEQ ID NO: 3371 - protein, 12 aa, Unknown
  source: /note="Description of Unknown: Linker sequence"
APAPAPAPAPAP

SEQ ID NO: 3372 - protein, 14 aa, Unknown
  source: /note="Description of Unknown: Linker sequence"
APAPAPAPAPAPAP

SEQ ID NO: 3373 - protein, 16 aa, Unknown
  source: /note="Description of Unknown: Linker sequence"
APAPAPAPAPAPAPAP

SEQ ID NO: 3374 - protein, 18 aa, Unknown
  source: /note="Description of Unknown: Linker sequence"
APAPAPAPAPAPAPAPAP

SEQ ID NO: 3375 - protein, 20 aa, Unknown
  source: /note="Description of Unknown: Linker sequence"
APAPAPAPAPAPAPAPAPAP

SEQ ID NO: 3376 - protein, 22 aa, Unknown
  source: /note="Description of Unknown: Linker sequence"
APAPAPAPAPAPAPAPAPAPAP

SEQ ID NO: 3377 - protein, 24 aa, Unknown
  source: /note="Description of Unknown: Linker sequence"
APAPAPAPAPAPAPAPAPAPAPAP

SEQ ID NO: 3378 - protein, 26 aa, Unknown
  source: /note="Description of Unknown: Linker sequence"
APAPAPAPAPAPAPAPAPAPAPAPAP

SEQ ID NO: 3379 - protein, 28 aa, Unknown
  source: /note="Description of Unknown: Linker sequence"
APAPAPAPAPAPAPAPAPAPAPAPAPAP

SEQ ID NO: 3380 - protein, 30 aa, Unknown
  source: /note="Description of Unknown: Linker sequence"
APAPAPAPAPAPAPAPAPAPAPAPAPAPAP

SEQ ID NO: 3381 - protein, 32 aa, Unknown
  source: /note="Description of Unknown: Linker sequence"
APAPAPAPAPAPAPAPAPAPAPAPAPAPAPAP

SEQ ID NO: 3382 - protein, 33 aa, Unknown
  source: /note="Description of Unknown: Linker sequence"
EPEPEPEPIPEPPKEAPVVIEKPKPKPKPKPKP

SEQ ID NO: 3383 - protein, 34 aa, Unknown
  source: /note="Description of Unknown: Linker sequence"
APAPAPAPAPAPAPAPAPAPAPAPAPAPAPAPAP

SEQ ID NO: 3384 - protein, 5 aa, Unknown
  source: /note="Description of Unknown: Linker sequence"
EAAAK

SEQ ID NO: 3385 - protein, 10 aa, Unknown
  source: /note="Description of Unknown: Linker sequence"
EAAAKEAAAK

SEQ ID NO: 3386 - protein, 12 aa, Unknown
  source: /note="Description of Unknown: Linker sequence"
AEAAAKEAAAKA

SEQ ID NO: 3387 - protein, 15 aa, Unknown
  source: /note="Description of Unknown: Linker sequence"
EAAAKEAAAKEAAAK

SEQ ID NO: 3388 - protein, 17 aa, Unknown
  source: /note="Description of Unknown: Linker sequence"
AEAAAKEAAAKEAAAKA

SEQ ID NO: 3389 - protein, 22 aa, Unknown
  source: /note="Description of Unknown: Linker sequence"
AEAAAKEAAAKEAAAKEAAAKA

SEQ ID NO: 3390 - protein, 27 aa, Unknown
  source: /note="Description of Unknown: Linker sequence"
AEAAAKEAAAKEAAAKEAAAKEAAAKA

SEQ ID NO: 3391 - protein, 46 aa, Unknown
  source: /note="Description of Unknown: Linker sequence"
AEAAAKEAAAKEAAAKEAAAKALEAEAAAKEAAAKEAAAKEAAAKA

SEQ ID NO: 3392 - protein, 6 aa, Unknown
  source: /note="Description of Unknown: Linker sequence"
KSGEDI

SEQ ID NO: 3393 - protein, 29 aa, Unknown
  source: /note="Description of Unknown: Linker sequence"
INQGEDSVPAKKFKAAPAEISDGEDRSKC

SEQ ID NO: 3394 - protein, 5 aa, Unknown
  source: /note="Description of Unknown: Linker sequence"
RSPEW

SEQ ID NO: 3395 - protein, 19 aa, Unknown
  source: /note="Description of Unknown: Linker sequence"
SAFGIRPPLRLGEFTMPEH

SEQ ID NO: 3396 - protein, 12 aa, Unknown
  source: /note="Description of Unknown: Linker sequence"
LNTGASDNFTRW

SEQ ID NO: 3397 - protein, 12 aa, Unknown
  source: /note="Description of Unknown: Linker sequence"
AEKGEDIEIKKV

SEQ ID NO: 3398 - protein, 15 aa, Unknown
  source: /note="Description of Unknown: Linker sequence"
VDRADPLEQGAGDQG

SEQ ID NO: 3399 - protein, 4 aa, Unknown
  source: /note="Description of Unknown: Linker sequence"
DGDF

SEQ ID NO: 3400 - protein, 4 aa, Unknown
  source: /note="Description of Unknown: Linker sequence"
KNDK

SEQ ID NO: 3401 - protein, 4 aa, Unknown
  source: /note="Description of Unknown: Linker sequence"
PIRS

SEQ ID NO: 3402 - protein, 4 aa, Unknown
  source: /note="Description of Unknown: Linker sequence"
PMTG

SEQ ID NO: 3403 - protein, 4 aa, Unknown
  source: /note="Description of Unknown: Linker sequence"
RACC

SEQ ID NO: 3404 - protein, 4 aa, Unknown
  source: /note="Description of Unknown: Linker sequence"
VGTT

SEQ ID NO: 3405 - protein, 5 aa, Unknown
  source: /note="Description of Unknown: Linker sequence"
DAGIR

SEQ ID NO: 3406 - protein, 5 aa, Unknown
  source: /note="Description of Unknown: Linker sequence"
DDLPL

SEQ ID NO: 3407 - protein, 5 aa, Unknown
  source: /note="Description of Unknown: Linker sequence"
GCTSV

SEQ ID NO: 3408 - protein, 5 aa, Unknown
  source: /note="Description of Unknown: Linker sequence"
ITAFV

SEQ ID NO: 3409 - protein, 5 aa, Unknown
  source: /note="Description of Unknown: Linker sequence"
TASEM

SEQ ID NO: 3410 - protein, 5 aa, Unknown
  source: /note="Description of Unknown: Linker sequence"
TGDNK

SEQ ID NO: 3411 - protein, 5 aa, Unknown
  source: /note="Description of Unknown: Linker sequence"
YETDL

SEQ ID NO: 3412 - protein, 6 aa, Unknown
  source: /note="Description of Unknown: Linker sequence"
LADDNF

SEQ ID NO: 3413 - protein, 6 aa, Unknown
  source: /note="Description of Unknown: Linker sequence"
MGSGTA

SEQ ID NO: 3414 - protein, 7 aa, Unknown
  source: /note="Description of Unknown: Linker sequence"
ARVEPSH

SEQ ID NO: 3415 - protein, 7 aa, Unknown
  source: /note="Description of Unknown: Linker sequence"
EMVLDDS

SEQ ID NO: 3416 - protein, 7 aa, Unknown
  source: /note="Description of Unknown: Linker sequence"
RDTPPKR

SEQ ID NO: 3417 - protein, 7 aa, Unknown
  source: /note="Description of Unknown: Linker sequence"
TGRDTLR

SEQ ID NO: 3418 - protein, 8 aa, Unknown
  source: /note="Description of Unknown: Linker sequence"
LDPPRKEV

SEQ ID NO: 3419 - protein, 9 aa, Unknown
  source: /note="Description of Unknown: Linker sequence"
LAWFEEGEE

SEQ ID NO: 3420 - protein, 10 aa, Unknown
  source: /note="Description of Unknown: Linker sequence"
ALGLPEALIP

SEQ ID NO: 3421 - protein, 12 aa, Unknown
  source: /note="Description of Unknown: Linker sequence"
DKTGTLTTNQMS

SEQ ID NO: 3422 - protein, 12 aa, Unknown
  source: /note="Description of Unknown: Linker sequence"
ITGSTYAPEGEV

SEQ ID NO: 3423 - protein, 14 aa, Unknown
  source: /note="Description of Unknown: Linker sequence"
IGIFGENEEVADRA

SEQ ID NO: 3424 - protein, 6 aa, Unknown
  source: /note="Description of Unknown: Linker sequence"
YLRQDL

SEQ ID NO: 3425 - protein, 8 aa, Unknown
  source: /note="Description of Unknown: Linker sequence"
ESQSLSIQ

SEQ ID NO: 3426 - protein, 6 aa, Unknown
  source: /note="Description of Unknown: Linker sequence"
SGKQSY

SEQ ID NO: 3427 - protein, 14 aa, Unknown
  source: /note="Description of Unknown: Linker sequence"
FRARGKAVSTVFDQ

SEQ ID NO: 3428 - protein, 6 aa, Unknown
  source: /note="Description of Unknown: Linker sequence"
DANSEM

SEQ ID NO: 3429 - protein, 7 aa, Unknown
  source: /note="Description of Unknown: Linker sequence"
DITAQKE

SEQ ID NO: 3430 - protein, 8 aa, Unknown
  source: /note="Description of Unknown: Linker sequence"
TVESTGKV

SEQ ID NO: 3431 - protein, 5 aa, Unknown
  source: /note="Description of Unknown: Linker sequence"
AQDRK

SEQ ID NO: 3432 - protein, 4 aa, Unknown
  source: /note="Description of Unknown: Linker sequence"
FYGK

SEQ ID NO: 3433 - protein, 8 aa, Unknown
  source: /note="Description of Unknown: Linker sequence"
ALSSTGEI

SEQ ID NO: 3434 - protein, 15 aa, Unknown
  source: /note="Description of Unknown: Linker sequence"
TATPPGSVTVPHPNI

SEQ ID NO: 3435 - protein, 5 aa, Unknown
  source: /note="Description of Unknown: Linker sequence"
SSSSG

SEQ ID NO: 3436 - protein, 10 aa, Unknown
  source: /note="Description of Unknown: Linker sequence"
SSSSGSSSSG

SEQ ID NO: 3437 - protein, 13 aa, Unknown
  source: /note="Description of Unknown: Linker sequence"
SGSSSSGSSSSGS

SEQ ID NO: 3438 - protein, 15 aa, Unknown
  source: /note="Description of Unknown: Linker sequence"
SSSSGSSSSGSSSSG

SEQ ID NO: 3439 - protein, 19 aa, Unknown
  source: /note="Description of Unknown: Linker sequence"
SVTVSSSGSSSSGSSSSGS

SEQ ID NO: 3440 - protein, 20 aa, Unknown
  source: /note="Description of Unknown: Linker sequence"
SSSSGSSSSGSSSSGSSSSG

SEQ ID NO: 3441 - protein, 25 aa, Unknown
  source: /note="Description of Unknown: Linker sequence"
SSSSGSSSSGSSSSGSSSSGSSSSG

SEQ ID NO: 3442 - protein, 17 aa, Unknown
  source: /note="Description of Unknown: Linker sequence"
LLQVPLPPWPGAPVGGE

SEQ ID NO: 3443 - protein, 6 aa, Unknown
  source: /note="Description of Unknown: Linker sequence"
FRGPDR

SEQ ID NO: 3444 - protein, 4 aa, Unknown
  source: /note="Description of Unknown: Linker sequence"
EGGK

SEQ ID NO: 3445 - protein, 6 aa, Unknown
  source: /note="Description of Unknown: Linker sequence"
INDKYE

SEQ ID NO: 3446 - protein, 6 aa, Unknown
  source: /note="Description of Unknown: Linker sequence"
NETTNK

SEQ ID NO: 3447 - protein, 8 aa, Unknown
  source: /note="Description of Unknown: Linker sequence"
DFDSGSLR

SEQ ID NO: 3448 - protein, 9 aa, Unknown
  source: /note="Description of Unknown: Linker sequence"
KNGDNDFRY

SEQ ID NO: 3449 - protein, 11 aa, Unknown
  source: /note="Description of Unknown: Linker sequence"
PMNVFYKDSLF

SEQ ID NO: 3450 - protein, 4 aa, Unknown
  source: /note="Description of Unknown: Linker sequence"
GGEA

SEQ ID NO: 3451 - protein, 4 aa, Unknown
  source: /note="Description of Unknown: Linker sequence"
LGDV

SEQ ID NO: 3452 - protein, 5 aa, Unknown
  source: /note="Description of Unknown: Linker sequence"
YSNVE

SEQ ID NO: 3453 - protein, 6 aa, Unknown
  source: /note="Description of Unknown: Linker sequence"
DPVSKE

SEQ ID NO: 3454 - protein, 6 aa, Unknown
  source: /note="Description of Unknown: Linker sequence"
GLPGDK

SEQ ID NO: 3455 - protein, 6 aa, Unknown
  source: /note="Description of Unknown: Linker sequence"
IVPPGQ

SEQ ID NO: 3456 - protein, 9 aa, Unknown
  source: /note="Description of Unknown: Linker sequence"
TVPIAQDQV

SEQ ID NO: 3457 - protein, 11 aa, Unknown
  source: /note="Description of Unknown: Linker sequence"
EVPKNETKENG

SEQ ID NO: 3458 - protein, 12 aa, Unknown
  source: /note="Description of Unknown: Linker sequence"
MYYQQPGQQLAT

SEQ ID NO: 3459 - protein, 16 aa, Unknown
  source: /note="Description of Unknown: Linker sequence"
QPGCSSGQACENALPV

SEQ ID NO: 3460 - protein, 15 aa, Unknown
  source: /note="Description of Unknown: Linker sequence"
ALGGEARLPVLKDRN

SEQ ID NO: 3461 - protein, 8 aa, Unknown
  source: /note="Description of Unknown: Linker sequence"
KYTYEHDP

SEQ ID NO: 3462 - protein, 10 aa, Unknown
  source: /note="Description of Unknown: Linker sequence"
IGGPPNACLD

SEQ ID NO: 3463 - protein, 20 aa, Unknown
  source: /note="Description of Unknown: Linker sequence"
ENAQRFNQAQSGNIQSTVML

SEQ ID NO: 3464 - protein, 25 aa, Unknown
  source: /note="Description of Unknown: Linker sequence"
LQNREHETNGVAKSDQKQEQLLLKK

SEQ ID NO: 3465 - protein, 9 aa, Unknown
  source: /note="Description of Unknown: Linker sequence"
CEMGSTFQL

SEQ ID NO: 3466 - protein, 26 aa, Unknown
  source: /note="Description of Unknown: Linker sequence"
PDGRNQNPDLTGLCEPTPQDHIKVTQ

SEQ ID NO: 3467 - protein, 4 aa, Unknown
  source: /note="Description of Unknown: Linker sequence"
LGTA

SEQ ID NO: 3468 - protein, 4 aa, Unknown
  source: /note="Description of Unknown: Linker sequence"
NHPA

SEQ ID NO: 3469 - protein, 5 aa, Unknown
  source: /note="Description of Unknown: Linker sequence"
CNLTP

SEQ ID NO: 3470 - protein, 5 aa, Unknown
  source: /note="Description of Unknown: Linker sequence"
IRRTS

SEQ ID NO: 3471 - protein, 6 aa, Unknown
  source: /note="Description of Unknown: Linker sequence"
KYLPVK

SEQ ID NO: 3472 - protein, 7 aa, Unknown
  source: /note="Description of Unknown: Linker sequence"
ISGTPIQ

SEQ ID NO: 3473 - protein, 8 aa, Unknown
  source: /note="Description of Unknown: Linker sequence"
RDADASDK

SEQ ID NO: 3474 - protein, 9 aa, Unknown
  source: /note="Description of Unknown: Linker sequence"
TGEEGFDGA

SEQ ID NO: 3475 - protein, 10 aa, Unknown
  source: /note="Description of Unknown: Linker sequence"
ESLQTGKISV

SEQ ID NO: 3476 - protein, 14 aa, Unknown
  source: /note="Description of Unknown: Linker sequence"
DLFPQNYSTKAVEP

SEQ ID NO: 3477 - protein, 4 aa, Unknown
  source: /note="Description of Unknown: Linker sequence"
SATH

SEQ ID NO: 3478 - protein, 7 aa, Unknown
  source: /note="Description of Unknown: Linker sequence"
YIPLPEP

SEQ ID NO: 3479 - protein, 8 aa, Unknown
  source: /note="Description of Unknown: Linker sequence"
RKTDGYSG

SEQ ID NO: 3480 - protein, 9 aa, Unknown
  source: /note="Description of Unknown: Linker sequence"
PSRADPNHL

SEQ ID NO: 3481 - protein, 10 aa, Unknown
  source: /note="Description of Unknown: Linker sequence"
LGTTQNSLTE

SEQ ID NO: 3482 - protein, 9 aa, Unknown
  source: /note="Description of Unknown: Linker sequence"
NLLGQQPLV

SEQ ID NO: 3483 - protein, 10 aa, Unknown
  source: /note="Description of Unknown: Linker sequence"
SSYGPASGPL

SEQ ID NO: 3484 - protein, 11 aa, Unknown
  source: /note="Description of Unknown: Linker sequence"
VAQLPKKQVYI

SEQ ID NO: 3485 - protein, 16 aa, Unknown
  source: /note="Description of Unknown: Linker sequence"
SATPQGQTAKIEVPHT

SEQ ID NO: 3486 - protein, 4 aa, Unknown
  source: /note="Description of Unknown: Linker sequence"
FSCS

SEQ ID NO: 3487 - protein, 8 aa, Unknown
  source: /note="Description of Unknown: Linker sequence"
FWLAIDMS

SEQ ID NO: 3488 - protein, 9 aa, Unknown
  source: /note="Description of Unknown: Linker sequence"
VKAAPQAPV

SEQ ID NO: 3489 - protein, 13 aa, Unknown
  source: /note="Description of Unknown: Linker sequence"
ADQSESQMIPKDS

SEQ ID NO: 3490 - protein, 4 aa, Unknown
  source: /note="Description of Unknown: Linker sequence"
FAFI

SEQ ID NO: 3491 - protein, 4 aa, Unknown
  source: /note="Description of Unknown: Linker sequence"
IQNT

SEQ ID NO: 3492 - protein, 5 aa, Unknown
  source: /note="Description of Unknown: Linker sequence"
GTLSP

SEQ ID NO: 3493 - protein, 6 aa, Unknown
  source: /note="Description of Unknown: Linker sequence"
QVPQDD

SEQ ID NO: 3494 - protein, 8 aa, Unknown
  source: /note="Description of Unknown: Linker sequence"
HLSAGCPH

SEQ ID NO: 3495 - protein, 11 aa, Unknown
  source: /note="Description of Unknown: Linker sequence"
FSTRVLPAQAT

SEQ ID NO: 3496 - protein, 4 aa, Unknown
  source: /note="Description of Unknown: Linker sequence"
EMDS

SEQ ID NO: 3497 - protein, 5 aa, Unknown
  source: /note="Description of Unknown: Linker sequence"
HFPLK

SEQ ID NO: 3498 - protein, 6 aa, Unknown
  source: /note="Description of Unknown: Linker sequence"
DLDNVT

SEQ ID NO: 3499 - protein, 6 aa, Unknown
  source: /note="Description of Unknown: Linker sequence"
FDGQLE

SEQ ID NO: 3500 - protein, 7 aa, Unknown
  source: /note="Description of Unknown: Linker sequence"
ITNECQW

SEQ ID NO: 3501 - protein, 7 aa, Unknown
  source: /note="Description of Unknown: Linker sequence"
SQPFPVV

SEQ ID NO: 3502 - protein, 7 aa, Unknown
  source: /note="Description of Unknown: Linker sequence"
TGARSNF

SEQ ID NO: 3503 - protein, 8 aa, Unknown
  source: /note="Description of Unknown: Linker sequence"
ESDASNPF

SEQ ID NO: 3504 - protein, 8 aa, Unknown
  source: /note="Description of Unknown: Linker sequence"
HFFGNRSI

SEQ ID NO: 3505 - protein, 9 aa, Unknown
  source: /note="Description of Unknown: Linker sequence"
QPIYPATLT

SEQ ID NO: 3506 - protein, 10 aa, Unknown
  source: /note="Description of Unknown: Linker sequence"
FLAGTRKCSV

SEQ ID NO: 3507 - protein, 12 aa, Unknown
  source: /note="Description of Unknown: Linker sequence"
LNPQHSAPKPNV

SEQ ID NO: 3508 - protein, 12 aa, Unknown
  source: /note="Description of Unknown: Linker sequence"
SKGKQLGENQLV

SEQ ID NO: 3509 - protein, 15 aa, Unknown
  source: /note="Description of Unknown: Linker sequence"
ATKQDPVRPKRPLSS

SEQ ID NO: 3510 - protein, 16 aa, Unknown
  source: /note="Description of Unknown: Linker sequence"
ICDSHPTNKNNPTTPL

SEQ ID NO: 3511 - protein, 9 aa, Unknown
  source: /note="Description of Unknown: Linker sequence"
YLDTKPAPV

SEQ ID NO: 3512 - protein, 4 aa, Unknown
  source: /note="Description of Unknown: Linker sequence"
IHKK

SEQ ID NO: 3513 - protein, 5 aa, Unknown
  source: /note="Description of Unknown: Linker sequence"
GIMPG

SEQ ID NO: 3514 - protein, 5 aa, Unknown
  source: /note="Description of Unknown: Linker sequence"
NPGEC

SEQ ID NO: 3515 - protein, 7 aa, Unknown
  source: /note="Description of Unknown: Linker sequence"
IGPNCPG

SEQ ID NO: 3516 - protein, 8 aa, Unknown
  source: /note="Description of Unknown: Linker sequence"
CITEGIPQ

SEQ ID NO: 3517 - protein, 8 aa, Unknown
  source: /note="Description of Unknown: Linker sequence"
LLRQGKTR

SEQ ID NO: 3518 - protein, 4 aa, Unknown
  source: /note="Description of Unknown: Linker sequence"
MRDQ

SEQ ID NO: 3519 - protein, 4 aa, Unknown
  source: /note="Description of Unknown: Linker sequence"
QEDP

SEQ ID NO: 3520 - protein, 5 aa, Unknown
  source: /note="Description of Unknown: Linker sequence"
CLDGK

SEQ ID NO: 3521 - protein, 5 aa, Unknown
  source: /note="Description of Unknown: Linker sequence"
QWELN

SEQ ID NO: 3522 - protein, 6 aa, Unknown
  source: /note="Description of Unknown: Linker sequence"
ALDGNI

SEQ ID NO: 3523 - protein, 6 aa, Unknown
  source: /note="Description of Unknown: Linker sequence"
TKQGDL

SEQ ID NO: 3524 - protein, 31 aa, Unknown
  source: /note="Description of Unknown: Linker sequence"
KGEKYEKRIERLSVRKEEDVKTRSGKLGDNV

SEQ ID NO: 3525 - protein, 27 aa, Unknown
  source: /note="Description of Unknown: Linker sequence"
AEDRPLSRELPAPAGGPVALSLHDEPT

SEQ ID NO: 3526 - protein, 9 aa, Unknown
  source: /note="Description of Unknown: Linker sequence"
PYQKTSIPK

SEQ ID NO: 3527 - protein, 9 aa, Unknown
  source: /note="Description of Unknown: Linker sequence"
RGAGKPNSS

SEQ ID NO: 3528 - protein, 6 aa, Unknown
  source: /note="Description of Unknown: Linker sequence"
AVGKNP

SEQ ID NO: 3529 - protein, 6 aa, Unknown
  source: /note="Description of Unknown: Linker sequence"
DTATNT

SEQ ID NO: 3530 - protein, 6 aa, Unknown
  source: /note="Description of Unknown: Linker sequence"
FLSEPV

SEQ ID NO: 3531 - protein, 6 aa, Unknown
  source: /note="Description of Unknown: Linker sequence"
LSFCNT

SEQ ID NO: 3532 - protein, 7 aa, Unknown
  source: /note="Description of Unknown: Linker sequence"
SNITSGY

SEQ ID NO: 3533 - protein, 7 aa, Unknown
  source: /note="Description of Unknown: Linker sequence"
VTPDGKK

SEQ ID NO: 3534 - protein, 7 aa, Unknown
  source: /note="Description of Unknown: Linker sequence"
YASGQFI

SEQ ID NO: 3535 - protein, 13 aa, Unknown
  source: /note="Description of Unknown: Linker sequence"
SIPVQPVYPSADF

SEQ ID NO: 3536 - protein, 7 aa, Unknown
  source: /note="Description of Unknown: Linker sequence"
EIPTSNI

SEQ ID NO: 3537 - protein, 8 aa, Unknown
  source: /note="Description of Unknown: Linker sequence"
KADFPTPS

SEQ ID NO: 3538 - protein, 10 aa, Unknown
  source: /note="Description of Unknown: Linker sequence"
HPYIQNPDPA

SEQ ID NO: 3539 - protein, 11 aa, Unknown
  source: /note="Description of Unknown: Linker sequence"
DTPPNFLDDDM

SEQ ID NO: 3540 - protein, 7 aa, Unknown
  source: /note="Description of Unknown: Linker sequence"
FCKALNP

SEQ ID NO: 3541 - protein, 13 aa, Unknown
  source: /note="Description of Unknown: Linker sequence"
HHDYSLPAAGESW

SEQ ID NO: 3542 - protein, 4 aa, Unknown
  source: /note="Description of Unknown: Linker sequence"
AEGV

SEQ ID NO: 3543 - protein, 7 aa, Unknown
  source: /note="Description of Unknown: Linker sequence"
LMLIADV

SEQ ID NO: 3544 - protein, 8 aa, Unknown
  source: /note="Description of Unknown: Linker sequence"
EAGEEGEK

SEQ ID NO: 3545 - protein, 22 aa, Unknown
  source: /note="Description of Unknown: Linker sequence"
RSTPPPEMPKPVPRKEVQAGVE

SEQ ID NO: 3546 - protein, 6 aa, Unknown
  source: /note="Description of Unknown: Linker sequence"
CVPLVR

SEQ ID NO: 3547 - protein, 6 aa, Unknown
  source: /note="Description of Unknown: Linker sequence"
KSDPIQ

SEQ ID NO: 3548 - protein, 4 aa, Unknown
  source: /note="Description of Unknown: Linker sequence"
AGVE

SEQ ID NO: 3549 - protein, 12 aa, Unknown
  source: /note="Description of Unknown: Linker sequence"
NAGGELFRDVNV

SEQ ID NO: 3550 - protein, 17 aa, Unknown
  source: /note="Description of Unknown: Linker sequence"
ERGAWSAPLPRQPRADT

SEQ ID NO: 3551 - protein, 19 aa, Unknown
  source: /note="Description of Unknown: Linker sequence"
LAGQQLEHGQTRRFGAISQ

SEQ ID NO: 3552 - protein, 4 aa, Unknown
  source: /note="Description of Unknown: Linker sequence"
IDNG

SEQ ID NO: 3553 - protein, 4 aa, Unknown
  source: /note="Description of Unknown: Linker sequence"
KVSW

SEQ ID NO: 3554 - protein, 5 aa, Unknown
  source: /note="Description of Unknown: Linker sequence"
NRGES

SEQ ID NO: 3555 - protein, 6 aa, Unknown
  source: /note="Description of Unknown: Linker sequence"
ITAKDE

SEQ ID NO: 3556 - protein, 6 aa, Unknown
  source: /note="Description of Unknown: Linker sequence"
LWPHTK

SEQ ID NO: 3557 - protein, 6 aa, Unknown
  source: /note="Description of Unknown: Linker sequence"
MAIGPV

SEQ ID NO: 3558 - protein, 8 aa, Unknown
  source: /note="Description of Unknown: Linker sequence"
AEKNYDVI

SEQ ID NO: 3559 - protein, 8 aa, Unknown
  source: /note="Description of Unknown: Linker sequence"
DLDRTLTQ

SEQ ID NO: 3560 - protein, 9 aa, Unknown
  source: /note="Description of Unknown: Linker sequence"
NIAHDDKPG

SEQ ID NO: 3561 - protein, 4 aa, Unknown
  source: /note="Description of Unknown: Linker sequence"
FFDK

SEQ ID NO: 3562 - protein, 6 aa, Unknown
  source: /note="Description of Unknown: Linker sequence"
LFSNDE

SEQ ID NO: 3563 - protein, 6 aa, Unknown
  source: /note="Description of Unknown: Linker sequence"
VTPGSE

SEQ ID NO: 3564 - protein, 7 aa, Unknown
  source: /note="Description of Unknown: Linker sequence"
ERKERDH

SEQ ID NO: 3565 - protein, 12 aa, Unknown
  source: /note="Description of Unknown: Linker sequence"
FDIDQNISSDDF

SEQ ID NO: 3566 - protein, 17 aa, Unknown
  source: /note="Description of Unknown: Linker sequence"
ELIDAIPEDENVTLYSQ

SEQ ID NO: 3567 - protein, 19 aa, Unknown
  source: /note="Description of Unknown: Linker sequence"
TMKQIVNENMKIERKVVSR

SEQ ID NO: 3568 - protein, 23 aa, Unknown
  source: /note="Description of Unknown: Linker sequence"
AHAIKRLYGNVKFGVGPVIEGGF

SEQ ID NO: 3569 - protein, 21 aa, Unknown
  source: /note="Description of Unknown: Linker sequence"
INGGWGPWSPWDICSVTCGGG

SEQ ID NO: 3570 - protein, 16 aa, Unknown
  source: /note="Description of Unknown: Linker sequence"
LKMKGLTYTMCDKTKF

SEQ ID NO: 3571 - protein, 7 aa, Unknown
  source: /note="Description of Unknown: Linker sequence"
LRGEVVS

SEQ ID NO: 3572 - protein, 10 aa, Unknown
  source: /note="Description of Unknown: Linker sequence"
IHLPKTLEGM

SEQ ID NO: 3573 - protein, 4 aa, Unknown
  source: /note="Description of Unknown: Linker sequence"
PYPV

SEQ ID NO: 3574 - protein, 14 aa, Unknown
  source: /note="Description of Unknown: Linker sequence"
LNKEGEPTKQRTRD

SEQ ID NO: 3575 - protein, 11 aa, Unknown
  source: /note="Description of Unknown: Linker sequence"
RFRDRLPEKLR

SEQ ID NO: 3576 - protein, 12 aa, Unknown
  source: /note="Description of Unknown: Linker sequence"
DAPQQDPEGNKT

SEQ ID NO: 3577 - protein, 4 aa, Unknown
  source: /note="Description of Unknown: Linker sequence"
ELPL

SEQ ID NO: 3578 - protein, 4 aa, Unknown
  source: /note="Description of Unknown: Linker sequence"
VHGK

SEQ ID NO: 3579 - protein, 5 aa, Unknown
  source: /note="Description of Unknown: Linker sequence"
TNTEK

SEQ ID NO: 3580 - protein, 9 aa, Unknown
  source: /note="Description of Unknown: Linker sequence"
DSPLKYWPK

SEQ ID NO: 3581 - protein, 12 aa, Unknown
  source: /note="Description of Unknown: Linker sequence"
SCSEPRCFNGGT

SEQ ID NO: 3582 - protein, 4 aa, Unknown
  source: /note="Description of Unknown: Linker sequence"
IDGK

SEQ ID NO: 3583 - protein, 5 aa, Unknown
  source: /note="Description of Unknown: Linker sequence"
PLEGT

SEQ ID NO: 3584 - protein, 9 aa, Unknown
  source: /note="Description of Unknown: Linker sequence"
AMPGWQDKV

SEQ ID NO: 3585 - protein, 8 aa, Unknown
  source: /note="Description of Unknown: Linker sequence"
YKKTARPK

SEQ ID NO: 3586 - protein, 12 aa, Unknown
  source: /note="Description of Unknown: Linker sequence"
TWAPHPRPLPQA

SEQ ID NO: 3587 - protein, 7 aa, Unknown
  source: /note="Description of Unknown: Linker sequence"
ELNEEMP

SEQ ID NO: 3588 - protein, 17 aa, Unknown
  source: /note="Description of Unknown: Linker sequence"
IVDYSPQQEGKVFFGAW

SEQ ID NO: 3589 - protein, 6 aa, Unknown
  source: /note="Description of Unknown: Linker sequence"
QRVRNR

SEQ ID NO: 3590 - protein, 5 aa, Unknown
  source: /note="Description of Unknown: Linker sequence"
LFVKP

SEQ ID NO: 3591 - protein, 6 aa, Unknown
  source: /note="Description of Unknown: Linker sequence"
NLNLTP

SEQ ID NO: 3592 - protein, 18 aa, Unknown
  source: /note="Description of Unknown: Linker sequence"
YSKKAPPQEEIEFVGEHP

SEQ ID NO: 3593 - protein, 4 aa, Unknown
  source: /note="Description of Unknown: Linker sequence"
IHSP

SEQ ID NO: 3594 - protein, 4 aa, Unknown
  source: /note="Description of Unknown: Linker sequence"
LTDS

SEQ ID NO: 3595 - protein, 5 aa, Unknown
  source: /note="Description of Unknown: Linker sequence"
KDGRL

SEQ ID NO: 3596 - protein, 9 aa, Unknown
  source: /note="Description of Unknown: Linker sequence"
ARINEREET

SEQ ID NO: 3597 - protein, 19 aa, Unknown
  source: /note="Description of Unknown: Linker sequence"
LWNCAPPQSEVVYRPLVSL

SEQ ID NO: 3598 - protein, 5 aa, Unknown
  source: /note="Description of Unknown: Linker sequence"
EFPEV

SEQ ID NO: 3599 - protein, 7 aa, Unknown
  source: /note="Description of Unknown: Linker sequence"
RTASHSI

SEQ ID NO: 3600 - protein, 21 aa, Unknown
  source: /note="Description of Unknown: Linker sequence"
EDGVIRRRVALLDPVKVNTKV

SEQ ID NO: 3601 - protein, 9 aa, Unknown
  source: /note="Description of Unknown: Linker sequence"
VLAGGKSGV

SEQ ID NO: 3602 - protein, 4 aa, Unknown
  source: /note="Description of Unknown: Linker sequence"
QKHV

SEQ ID NO: 3603 - protein, 5 aa, Unknown
  source: /note="Description of Unknown: Linker sequence"
VAPLI

SEQ ID NO: 3604 - protein, 6 aa, Unknown
  source: /note="Description of Unknown: Linker sequence"
AADTGL

SEQ ID NO: 3605 - protein, 6 aa, Unknown
  source: /note="Description of Unknown: Linker sequence"
FANDPQ

SEQ ID NO: 3606 - protein, 6 aa, Unknown
  source: /note="Description of Unknown: Linker sequence"
LLDHHQ

SEQ ID NO: 3607 - protein, 9 aa, Unknown
  source: /note="Description of Unknown: Linker sequence"
SSPHALGVI

SEQ ID NO: 3608 - protein, 11 aa, Unknown
  source: /note="Description of Unknown: Linker sequence"
SERSFPDDLNM

SEQ ID NO: 3609 - protein, 21 aa, Unknown
  source: /note="Description of Unknown: Linker sequence"
DMGYLGPDPVARSLRTRRAGA

SEQ ID NO: 3610 - protein, 4 aa, Unknown
  source: /note="Description of Unknown: Linker sequence"
ELPL

SEQ ID NO: 3611 - protein, 5 aa, Unknown
  source: /note="Description of Unknown: Linker sequence"
EMPSL

SEQ ID NO: 3612 - protein, 5 aa, Unknown
  source: /note="Description of Unknown: Linker sequence"
RREDI

SEQ ID NO: 3613 - protein, 8 aa, Unknown
  source: /note="Description of Unknown: Linker sequence"
IHYDWPGN

SEQ ID NO: 3614 - protein, 9 aa, Unknown
  source: /note="Description of Unknown: Linker sequence"
LLTGEYISE

SEQ ID NO: 3615 - protein, 11 aa, Unknown
  source: /note="Description of Unknown: Linker sequence"
RNRKVVKGFTP

SEQ ID NO: 3616 - protein, 17 aa, Unknown
  source: /note="Description of Unknown: Linker sequence"
IAATPIKTEYSGEIQPL

SEQ ID NO: 3617 - protein, 4 aa, Unknown
  source: /note="Description of Unknown: Linker sequence"
NQYR

SEQ ID NO: 3618 - protein, 7 aa, Unknown
  source: /note="Description of Unknown: Linker sequence"
EMGLSLQ

SEQ ID NO: 3619 - protein, 7 aa, Unknown
  source: /note="Description of Unknown: Linker sequence"
KDSAQNS

SEQ ID NO: 3620 - protein, 11 aa, Unknown
  source: /note="Description of Unknown: Linker sequence"
HDVELNLDYEE

SEQ ID NO: 3621 - protein, 5 aa, Unknown
  source: /note="Description of Unknown: Linker sequence"
PVDAQ

SEQ ID NO: 3622 - protein, 5 aa, Unknown
  source: /note="Description of Unknown: Linker sequence"
VPIIE

SEQ ID NO: 3623 - protein, 7 aa, Unknown
  source: /note="Description of Unknown: Linker sequence"
GVFDGGK

SEQ ID NO: 3624 - protein, 4 aa, Unknown
  source: /note="Description of Unknown: Linker sequence"
YLRE

SEQ ID NO: 3625 - protein, 6 aa, Unknown
  source: /note="Description of Unknown: Linker sequence"
IEEDSP

SEQ ID NO: 3626 - protein, 5 aa, Unknown
  source: /note="Description of Unknown: Linker sequence"
RKSFL

SEQ ID NO: 3627 - protein, 7 aa, Unknown
  source: /note="Description of Unknown: Linker sequence"
DILDDDR

SEQ ID NO: 3628 - protein, 7 aa, Unknown
  source: /note="Description of Unknown: Linker sequence"
SGKGGDK

SEQ ID NO: 3629 - protein, 15 aa, Unknown
  source: /note="Description of Unknown: Linker sequence"
MGGTFTDKDPFRSGR

SEQ ID NO: 3630 - protein, 4 aa, Unknown
  source: /note="Description of Unknown: Linker sequence"
VEER

SEQ ID NO: 3631 - protein, 7 aa, Unknown
  source: /note="Description of Unknown: Linker sequence"
ELPELTA

SEQ ID NO: 3632 - protein, 11 aa, Unknown
  source: /note="Description of Unknown: Linker sequence"
IKRFGVEDGSV

SEQ ID NO: 3633 - protein, 4 aa, Unknown
  source: /note="Description of Unknown: Linker sequence"
AYRW

SEQ ID NO: 3634 - protein, 4 aa, Unknown
  source: /note="Description of Unknown: Linker sequence"
EDAL

SEQ ID NO: 3635 - protein, 7 aa, Unknown
  source: /note="Description of Unknown: Linker sequence"
IRTVGEA

SEQ ID NO: 3636 - protein, 15 aa, Unknown
  source: /note="Description of Unknown: Linker sequence"
ETGLNAYLPGLAGKE

SEQ ID NO: 3637 - protein, 9 aa, Unknown
  source: /note="Description of Unknown: Linker sequence"
LEGRIKGKE

SEQ ID NO: 3638 - protein, 5 aa, Unknown
  source: /note="Description of Unknown: Linker sequence"
RMRNF

SEQ ID NO: 3639 - protein, 6 aa, Unknown
  source: /note="Description of Unknown: Linker sequence"
RGVLPE

SEQ ID NO: 3640 - protein, 6 aa, Unknown
  source: /note="Description of Unknown: Linker sequence"
SLEEQR

SEQ ID NO: 3641 - protein, 7 aa, Unknown
  source: /note="Description of Unknown: Linker sequence"
ANQLQNY

SEQ ID NO: 3642 - protein, 7 aa, Unknown
  source: /note="Description of Unknown: Linker sequence"
NYLLPAG

SEQ ID NO: 3643 - protein, 14 aa, Unknown
  source: /note="Description of Unknown: Linker sequence"
LDWQPRENPFQNLK

SEQ ID NO: 3644 - protein, 4 aa, Unknown
  source: /note="Description of Unknown: Linker sequence"
RIQM

SEQ ID NO: 3645 - protein, 4 aa, Unknown
  source: /note="Description of Unknown: Linker sequence"
WTDP

SEQ ID NO: 3646 - protein, 5 aa, Unknown
  source: /note="Description of Unknown: Linker sequence"
ELGLL

SEQ ID NO: 3647 - protein, 7 aa, Unknown
  source: /note="Description of Unknown: Linker sequence"
APSHGQI

SEQ ID NO: 3648 - protein, 8 aa, Unknown
  source: /note="Description of Unknown: Linker sequence"
ATGMVDER

SEQ ID NO: 3649 - protein, 5 aa, Unknown
  source: /note="Description of Unknown: Linker sequence"
FSLDE

SEQ ID NO: 3650 - protein, 6 aa, Unknown
  source: /note="Description of Unknown: Linker sequence"
HWKLEA

SEQ ID NO: 3651 - protein, 4 aa, Unknown
  source: /note="Description of Unknown: Linker sequence"
SEIG

SEQ ID NO: 3652 - protein, 8 aa, Unknown
  source: /note="Description of Unknown: Linker sequence"
KGIGHSRF

SEQ ID NO: 3653 - protein, 5 aa, Unknown
  source: /note="Description of Unknown: Linker sequence"
EGIKD

SEQ ID NO: 3654 - protein, 7 aa, Unknown
  source: /note="Description of Unknown: Linker sequence"
LSRFPTP

SEQ ID NO: 3655 - protein, 15 aa, Unknown
  source: /note="Description of Unknown: Linker sequence"
LLSPYHHVSGYSPRY

SEQ ID NO: 3656 - protein, 4 aa, Unknown
  source: /note="Description of Unknown: Linker sequence"
PGDW

SEQ ID NO: 3657 - protein, 6 aa, Unknown
  source: /note="Description of Unknown: Linker sequence"
DINKNE

SEQ ID NO: 3658 - protein, 6 aa, Unknown
  source: /note="Description of Unknown: Linker sequence"
ITPYAE

SEQ ID NO: 3659 - protein, 7 aa, Unknown
  source: /note="Description of Unknown: Linker sequence"
EFQSIGD

SEQ ID NO: 3660 - protein, 7 aa, Unknown
  source: /note="Description of Unknown: Linker sequence"
KDPEGNV

SEQ ID NO: 3661 - protein, 7 aa, Unknown
  source: /note="Description of Unknown: Linker sequence"
SLSVIGE

SEQ ID NO: 3662 - protein, 7 aa, Unknown
  source: /note="Description of Unknown: Linker sequence"
SPVNSKR

SEQ ID NO: 3663 - protein, 8 aa, Unknown
  source: /note="Description of Unknown: Linker sequence"
ENTRGFHG

SEQ ID NO: 3664 - protein, 8 aa, Unknown
  source: /note="Description of Unknown: Linker sequence"
NNLKRDYT

SEQ ID NO: 3665 - protein, 10 aa, Unknown
  source: /note="Description of Unknown: Linker sequence"
KYEDFRSPSA

SEQ ID NO: 3666 - protein, 24 aa, Unknown
  source: /note="Description of Unknown: Linker sequence"
YPRLTNKIPKPPQEVKPHPYGVDR

SEQ ID NO: 3667 - protein, 7 aa, Unknown
  source: /note="Description of Unknown: Linker sequence"
ARDRSYE

SEQ ID NO: 3668 - protein, 13 aa, Unknown
  source: /note="Description of Unknown: Linker sequence"
VTSTVKNDIYAHI

SEQ ID NO: 3669 - protein, 22 aa, Unknown
  source: /note="Description of Unknown: Linker sequence"
PYSERYGYRPALIPRPVMAGTL

SEQ ID NO: 3670 - protein, 5 aa, Unknown
  source: /note="Description of Unknown: Linker sequence"
VSQPG

SEQ ID NO: 3671 - protein, 6 aa, Unknown
  source: /note="Description of Unknown: Linker sequence"
LEGLPY

SEQ ID NO: 3672 - protein, 4 aa, Unknown
  source: /note="Description of Unknown: Linker sequence"
QPGV

SEQ ID NO: 3673 - protein, 5 aa, Unknown
  source: /note="Description of Unknown: Linker sequence"
WKLEG

SEQ ID NO: 3674 - protein, 6 aa, Unknown
  source: /note="Description of Unknown: Linker sequence"
TAYNAP

SEQ ID NO: 3675 - protein, 11 aa, Unknown
  source: /note="Description of Unknown: Linker sequence"
HKHDLSETNVY

SEQ ID NO: 3676 - protein, 7 aa, Unknown
  source: /note="Description of Unknown: Linker sequence"
VLQAVTD

SEQ ID NO: 3677 - protein, 4 aa, Unknown
  source: /note="Description of Unknown: Linker sequence"
YKDK

SEQ ID NO: 3678 - protein, 6 aa, Unknown
  source: /note="Description of Unknown: Linker sequence"
NLPFNM

SEQ ID NO: 3679 - protein, 6 aa, Unknown
  source: /note="Description of Unknown: Linker sequence"
WGVKDP

SEQ ID NO: 3680 - protein, 13 aa, Unknown
  source: /note="Description of Unknown: Linker sequence"
QKKKYGDKVPENL

SEQ ID NO: 3681 - protein, 14 aa, Unknown
  source: /note="Description of Unknown: Linker sequence"
NDLVEFNRFTNSPL

SEQ ID NO: 3682 - protein, 10 aa, Unknown
  source: /note="Description of Unknown: Linker sequence"
LKEQESPVKV

SEQ ID NO: 3683 - protein, 6 aa, Unknown
  source: /note="Description of Unknown: Linker sequence"
EEGIAN

SEQ ID NO: 3684 - protein, 11 aa, Unknown
  source: /note="Description of Unknown: Linker sequence"
ADFQGAGRRFD

SEQ ID NO: 3685 - protein, 6 aa, Unknown
  source: /note="Description of Unknown: Linker sequence"
AAGLPR

SEQ ID NO: 3686 - protein, 10 aa, Unknown
  source: /note="Description of Unknown: Linker sequence"
TFTGLPHRFE

SEQ ID NO: 3687 - protein, 4 aa, Unknown
  source: /note="Description of Unknown: Linker sequence"
TTVD

SEQ ID NO: 3688 - protein, 4 aa, Unknown
  source: /note="Description of Unknown: Linker sequence"
DNLR

SEQ ID NO: 3689 - protein, 5 aa, Unknown
  source: /note="Description of Unknown: Linker sequence"
FYHEP

SEQ ID NO: 3690 - protein, 6 aa, Unknown
  source: /note="Description of Unknown: Linker sequence"
ALGYPL

SEQ ID NO: 3691 - protein, 6 aa, Unknown
  source: /note="Description of Unknown: Linker sequence"
LLGEIS

SEQ ID NO: 3692 - protein, 6 aa, Unknown
  source: /note="Description of Unknown: Linker sequence"
MGTVGN

SEQ ID NO: 3693 - protein, 6 aa, Unknown
  source: /note="Description of Unknown: Linker sequence"
TGTNGK

SEQ ID NO: 3694 - protein, 10 aa, Unknown
  source: /note="Description of Unknown: Linker sequence"
RLQPVCGRME

SEQ ID NO: 3695 - protein, 12 aa, Unknown
  source: /note="Description of Unknown: Linker sequence"
TSEAHEKPEEKR

SEQ ID NO: 3696 - protein, 16 aa, Unknown
  source: /note="Description of Unknown: Linker sequence"
NFGGYFPNKLAEYHDF

SEQ ID NO: 3697 - protein, 15 aa, Unknown
  source: /note="Description of Unknown: Linker sequence"
RFAPPTWERIYPLDL

SEQ ID NO: 3698 - protein, 4 aa, Unknown
  source: /note="Description of Unknown: Linker sequence"
VFQP

SEQ ID NO: 3699 - protein, 13 aa, Unknown
  source: /note="Description of Unknown: Linker sequence"
EKASPAFYPQGQE

SEQ ID NO: 3700 - protein, 35 aa, Unknown
  source: /note="Description of Unknown: Linker sequence"
SMAVRFAKVPPDAAKAFIADRSMLFNGGTASRPPV

SEQ ID NO: 3701 - protein, 4 aa, Unknown
  source: /note="Description of Unknown: Linker sequence"
VLKL

SEQ ID NO: 3702 - protein, 6 aa, Unknown
  source: /note="Description of Unknown: Linker sequence"
DLKNSK

SEQ ID NO: 3703 - protein, 9 aa, Unknown
  source: /note="Description of Unknown: Linker sequence"
LKKDFQGVE

SEQ ID NO: 3704 - protein, 4 aa, Unknown
  source: /note="Description of Unknown: Linker sequence"
GYTG

SEQ ID NO: 3705 - protein, 4 aa, Unknown
  source: /note="Description of Unknown: Linker sequence"
PMSD

SEQ ID NO: 3706 - protein, 4 aa, Unknown
  source: /note="Description of Unknown: Linker sequence"
SDPE

SEQ ID NO: 3707 - protein, 5 aa, Unknown
  source: /note="Description of Unknown: Linker sequence"
DAPGQ

SEQ ID NO: 3708 - protein, 5 aa, Unknown
  source: /note="Description of Unknown: Linker sequence"
FEQTL

SEQ ID NO: 3709 - protein, 5 aa, Unknown
  source: /note="Description of Unknown: Linker sequence"
GGLSQ

SEQ ID NO: 3710 - protein, 6 aa, Unknown
  source: /note="Description of Unknown: Linker sequence"
AGENEI

SEQ ID NO: 3711 - protein, 6 aa, Unknown
  source: /note="Description of Unknown: Linker sequence"
QRCGFV

SEQ ID NO: 3712 - protein, 6 aa, Unknown
  source: /note="Description of Unknown: Linker sequence"
RQREGT

SEQ ID NO: 3713 - protein, 7 aa, Unknown
  source: /note="Description of Unknown: Linker sequence"
HGNNPLA

SEQ ID NO: 3714 - protein, 8 aa, Unknown
  source: /note="Description of Unknown: Linker sequence"
GAHYRTSP

SEQ ID NO: 3715 - protein, 8 aa, Unknown
  source: /note="Description of Unknown: Linker sequence"
QYTQDLDY

SEQ ID NO: 3716 - protein, 11 aa, Unknown
  source: /note="Description of Unknown: Linker sequence"
WAGFRRPRGNL

SEQ ID NO: 3717 - protein, 13 aa, Unknown
  source: /note="Description of Unknown: Linker sequence"
MGNHREASSGCYT

SEQ ID NO: 3718 - protein, 17 aa, Unknown
  source: /note="Description of Unknown: Linker sequence"
LVFDDENFTHTPQGNIV

SEQ ID NO: 3719 - protein, 6 aa, Unknown
  source: /note="Description of Unknown: Linker sequence"
ALPGFQ

SEQ ID NO: 3720 - protein, 14 aa, Unknown
  source: /note="Description of Unknown: Linker sequence"
RASSVAERHVSPDT

SEQ ID NO: 3721 - protein, 7 aa, Unknown
  source: /note="Description of Unknown: Linker sequence"
KISSGDW

SEQ ID NO: 3722 - protein, 7 aa, Unknown
  source: /note="Description of Unknown: Linker sequence"
SKSKNPI

SEQ ID NO: 3723 - protein, 11 aa, Unknown
  source: /note="Description of Unknown: Linker sequence"
FMNKDGCAGFT

SEQ ID NO: 3724 - protein, 4 aa, Unknown
  source: /note="Description of Unknown: Linker sequence"
IMGS

SEQ ID NO: 3725 - protein, 4 aa, Unknown
  source: /note="Description of Unknown: Linker sequence"
KPYK

SEQ ID NO: 3726 - protein, 5 aa, Unknown
  source: /note="Description of Unknown: Linker sequence"
EGPPM

SEQ ID NO: 3727 - protein, 5 aa, Unknown
  source: /note="Description of Unknown: Linker sequence"
LGAEI

SEQ ID NO: 3728 - protein, 5 aa, Unknown
  source: /note="Description of Unknown: Linker sequence"
YIPEK

SEQ ID NO: 3729 - protein, 6 aa, Unknown
  source: /note="Description of Unknown: Linker sequence"
GEKLNI

SEQ ID NO: 3730 - protein, 6 aa, Unknown
  source: /note="Description of Unknown: Linker sequence"
NKGYHI

SEQ ID NO: 3731 - protein, 7 aa, Unknown
  source: /note="Description of Unknown: Linker sequence"
CIETGEI

SEQ ID NO: 3732 - protein, 11 aa, Unknown
  source: /note="Description of Unknown: Linker sequence"
TGNPLLWSDDL

SEQ ID NO: 3733 - protein, 8 aa, Unknown
  source: /note="Description of Unknown: Linker sequence"
KHEYQDRF

SEQ ID NO: 3734 - protein, 9 aa, Unknown
  source: /note="Description of Unknown: Linker sequence"
CRFGYRDSI

SEQ ID NO: 3735 - protein, 9 aa, Unknown
  source: /note="Description of Unknown: Linker sequence"
RLDPTTVTP

SEQ ID NO: 3736 - protein, 11 aa, Unknown
  source: /note="Description of Unknown: Linker sequence"
PKEWQPVLTYG

SEQ ID NO: 3737 - protein, 19 aa, Unknown
  source: /note="Description of Unknown: Linker sequence"
CNTTKCNEGPILELENLPQ

SEQ ID NO: 3738 - protein, 24 aa, Unknown
  source: /note="Description of Unknown: Linker sequence"
CGLDLCNQGNSGRAVTYSRSRYLE

SEQ ID NO: 3739 - protein, 7 aa, Unknown
  source: /note="Description of Unknown: Linker sequence"
SFPKDPE

SEQ ID NO: 3740 - protein, 8 aa, Unknown
  source: /note="Description of Unknown: Linker sequence"
VRTEIAKK

SEQ ID NO: 3741 - protein, 14 aa, Unknown
  source: /note="Description of Unknown: Linker sequence"
IIRKDQRLKFGEGI

SEQ ID NO: 3742 - protein, 11 aa, Unknown
  source: /note="Description of Unknown: Linker sequence"
EQLLGTSFLTR

SEQ ID NO: 3743 - protein, 25 aa, Unknown
  source: /note="Description of Unknown: Linker sequence"
PHDQCACGVLTSEKRAPDLQDLPWQ

SEQ ID NO: 3744 - protein, 8 aa, Unknown
  source: /note="Description of Unknown: Linker sequence"
KVSGENHV

SEQ ID NO: 3745 - protein, 6 aa, Unknown
  source: /note="Description of Unknown: Linker sequence"
NVAEDY

SEQ ID NO: 3746 - protein, 4 aa, Unknown
  source: /note="Description of Unknown: Linker sequence"
IDWR

SEQ ID NO: 3747 - protein, 4 aa, Unknown
  source: /note="Description of Unknown: Linker sequence"
RKGS

SEQ ID NO: 3748 - protein, 5 aa, Unknown
  source: /note="Description of Unknown: Linker sequence"
LFKSP

SEQ ID NO: 3749 - protein, 8 aa, Unknown
  source: /note="Description of Unknown: Linker sequence"
QNLTAPAT

SEQ ID NO: 3750 - protein, 6 aa, Unknown
  source: /note="Description of Unknown: Linker sequence"
YAPRPR

SEQ ID NO: 3751 - protein, 7 aa, Unknown
  source: /note="Description of Unknown: Linker sequence"
YGPDGQR

SEQ ID NO: 3752 - protein, 9 aa, Unknown
  source: /note="Description of Unknown: Linker sequence"
VSQKTFPQL

SEQ ID NO: 3753 - protein, 17 aa, Unknown
  source: /note="Description of Unknown: Linker sequence"
GVSDDDAFEVGLTCGGI

SEQ ID NO: 3754 - protein, 4 aa, Unknown
  source: /note="Description of Unknown: Linker sequence"
FNDK

SEQ ID NO: 3755 - protein, 4 aa, Unknown
  source: /note="Description of Unknown: Linker sequence"
HDRN

SEQ ID NO: 3756 - protein, 5 aa, Unknown
  source: /note="Description of Unknown: Linker sequence"
KVKAD

SEQ ID NO: 3757 - protein, 6 aa, Unknown
  source: /note="Description of Unknown: Linker sequence"
EAGISS

SEQ ID NO: 3758 - protein, 6 aa, Unknown
  source: /note="Description of Unknown: Linker sequence"
IKASWA

SEQ ID NO: 3759 - protein, 6 aa, Unknown
  source: /note="Description of Unknown: Linker sequence"
LTRGFA

SEQ ID NO: 3760 - protein, 7 aa, Unknown
  source: /note="Description of Unknown: Linker sequence"
LNGRARA

SEQ ID NO: 3761 - protein, 7 aa, Unknown
  source: /note="Description of Unknown: Linker sequence"
SLATFDS

SEQ ID NO: 3762 - protein, 8 aa, Unknown
  source: /note="Description of Unknown: Linker sequence"
ALPEGHAK

SEQ ID NO: 3763 - protein, 8 aa, Unknown
  source: /note="Description of Unknown: Linker sequence"
ATTGVEGL

SEQ ID NO: 3764 - protein, 8 aa, Unknown
  source: /note="Description of Unknown: Linker sequence"
RPKSTEKL

SEQ ID NO: 3765 - protein, 9 aa, Unknown
  source: /note="Description of Unknown: Linker sequence"
YTSRKKTHE

SEQ ID NO: 3766 - protein, 10 aa, Unknown
  source: /note="Description of Unknown: Linker sequence"
ASPYHLGIND

SEQ ID NO: 3767 - protein, 10 aa, Unknown
  source: /note="Description of Unknown: Linker sequence"
GLQDWNVTPE

SEQ ID NO: 3768 - protein, 10 aa, Unknown
  source: /note="Description of Unknown: Linker sequence"
LDRKSGDYNQ

SEQ ID NO: 3769 - protein, 13 aa, Unknown
  source: /note="Description of Unknown: Linker sequence"
LLDRDLNLNLPPV

SEQ ID NO: 3770 - protein, 13 aa, Unknown
  source: /note="Description of Unknown: Linker sequence"
SEGLLPLDNHYHF

SEQ ID NO: 3771 - protein, 14 aa, Unknown
  source: /note="Description of Unknown: Linker sequence"
ESPVDSEQRGENDL

SEQ ID NO: 3772 - protein, 15 aa, Unknown
  source: /note="Description of Unknown: Linker sequence"
ALHDMNVELEEKTSH

SEQ ID NO: 3773 - protein, 15 aa, Unknown
  source: /note="Description of Unknown: Linker sequence"
VDKAPYRFTHGWTYS

SEQ ID NO: 3774 - protein, 16 aa, Unknown
  source: /note="Description of Unknown: Linker sequence"
HRGAHIYMNSWQSIDF

SEQ ID NO: 3775 - protein, 17 aa, Unknown
  source: /note="Description of Unknown: Linker sequence"
RENGLVRSPGGFPGEDL

SEQ ID NO: 3776 - protein, 18 aa, Unknown
  source: /note="Description of Unknown: Linker sequence"
VAGVGTRSSDGFQTSGDY

SEQ ID NO: 3777 - protein, 21 aa, Unknown
  source: /note="Description of Unknown: Linker sequence"
EIHVEQKLPQKLSAKAKELPI

SEQ ID NO: 3778 - protein, 6 aa, Unknown
  source: /note="Description of Unknown: Linker sequence"
RWQSFN

SEQ ID NO: 3779 - protein, 9 aa, Unknown
  source: /note="Description of Unknown: Linker sequence"
SLTARPGFL

SEQ ID NO: 3780 - protein, 10 aa, Unknown
  source: /note="Description of Unknown: Linker sequence"
LRIPFSEHLG

SEQ ID NO: 3781 - protein, 10 aa, Unknown
  source: /note="Description of Unknown: Linker sequence"
VVGGQQGSLE

SEQ ID NO: 3782 - protein, 13 aa, Unknown
  source: /note="Description of Unknown: Linker sequence"
DDFDKDTLNINFQ

SEQ ID NO: 3783 - protein, 13 aa, Unknown
  source: /note="Description of Unknown: Linker sequence"
YGRESLQSKFTQA

SEQ ID NO: 3784 - protein, 18 aa, Unknown
  source: /note="Description of Unknown: Linker sequence"
VEAPDLPQQEWAPTYEER

SEQ ID NO: 3785 - protein, 31 aa, Unknown
  source: /note="Description of Unknown: Linker sequence"
IGCPGDTQGDTYLSKGDKRVNEDAVRGLKAE

SEQ ID NO: 3786 - protein, 20 aa, Unknown
  source: /note="Description of Unknown: Linker sequence"
FQGYYLVSPSETFLERDVLK

SEQ ID NO: 3787 - protein, 422 aa, Artificial Sequence
  source: /note="Description of Artificial Sequence: Synthetic polypeptide"
MKKLLFAIPLVVPFYSHSAETVESCLAKPHTENSFTNVWKDDKTLDRYANYEGCLWNATGVVVCTGDETQCYGTWVPIGLAIPENEGGGSEGGGSEGGGSEGGGTKPPEYGDTPIPGYTYINPLDGTYPPGTEQNPANPNPSLEESQPLNTFMFQNNRFRNRQGALTVYTGTVTQGTDPVKTYYQYTPVSSKAMYDAYWNGKFRDCAFHSGFNEDPFVCEYQGQSSDLPQPPVNAGGGSGGGSGGGSEGGGSEGGGSEGGGSEGGGSGGGSGSGDFDYEKMANANKGAMTENADENALQSDAKGKLDSVATDYGAAIDGFIGDVSGLANGNGATGDFAGSNSQMAQVGDGDNSPLMNNFRQYLPSLPQSVECRPFSAGKPYEFSIDCDKINLFRGVFAFLLYVATFMYVFSTFANILRNKES

SEQ ID NO: 3788 - protein, 434 aa, Artificial Sequence
  source: /note="Description of Artificial Sequence: Synthetic polypeptide"
MKRKIIAISLFLYIPLSNADNWESITKSYYTGFAMSKTVESKDQDGKTVRKEVITQADLTTACNDAKASAQDVFNQMKLTFSGIWPDSQFRLVTGDTCVYNGSPSEKTESWSIRAQVEGDMQRSVPDEEPSEQTPEEICEAKPPIDGVFNNVSKGDEGGFYINYNGCEYEATGVTVCQNDGTVCASSAWKPTGYVPESGESSSSPVKDGDTGGTGEGGSDTGGDTGGGDTGGGSTGGDTGGSTGGGSTGGGSTGGSTGKSLTKEDVTAAIHDASPSIGDAVKDSLTEDNDQNDNQKKADEQSAKASASVSDAISDGMRGVGNFVDDLGGESSQYGIGNSEMDLSVSLAKGQLGIDLEGHGSAWESFLNDGALRPSIPSGHGCTDFVMFQGSVYQLDIGCDKLGDIKSVLSWVMYCLTFWYVFQSATSLLRKGEQ

SEQ ID NO: 3789 - protein, 330 aa, Artificial Sequence
  source: /note="Description of Artificial Sequence: Synthetic polypeptide"
ASTKGPSVFPLAPSSKSTSGGTAALGCLVKDYFPEPVTVSWNSGALTSGVHTFPAVLQSSGLYSLSSVVTVPSSSLGTQTYICNVNHKPSNTKVDKRVEPKSCDKTHTCPPCPAPELLGGPSVFLFPPKPKDTLMISRTPEVTCVVVDVSHEDPEVKFNWYVDGVEVHNVKTKPREEQYNSTYRVVSVLTVLHQDWLNGKEYKCKVSNKALPAPIEKTISKAKGQPREPQVYTLPPSREEMTKNQVSLTCLVKGFYPSDIAVEWESNGQPENNYKTTPPVLDSDGSFFLYSKLTVDKSRWQQGNVFSCSVMHEALHNHYTQKSLSLSPGK

SEQ ID NO: 3790 - protein, 424 aa, Artificial Sequence
  source: /note="Description of Artificial Sequence: Synthetic polypeptide"
MKKLLFAIPLVVPFYSHSAETVESCLAKPHTENSFTNVWKDDKTLDRYANYEGCLWNATGVVVCTGDETQCYGTWVPIGLAIPENEGGGSEGGGSEGGGSEGGGTKPPEYGDTPIPGYTYINPLDGTYPPGTEQNPANPNPSLEESQPLNTFMFQNNRFRNRQGALTVYTGTVTQGTDPVKTYYQYTPVSSKAMYDAYWNGKFRDCAFHSGFNEDPFVCEYQGQSSDLPQPPVNAGGGSGGGSGGGSEGGGSEGGGSEGGGSEGGGSGGGSGSGDFDYEKMANANKGAMTENADENALQSDAKGKLDSVATDYGAAIDGFIGDVSGLANGNGATGDFAGSNSQMAQVGDGDNSPLMNNFRQYLPSLPQSVECRPFVFSAGKPYEFSIDCDKINLFRGVFAFLLYVATFMYVFSTFANILRNKES

SEQ ID NO: 3791 - protein, 506 aa, Artificial Sequence
  source: /note="Description of Artificial Sequence: Synthetic polypeptide"
MYRMQLLSCIALSLALVTNSMAETVESCLAKPHTENSFTNVWKDDKTLDRYANYEGCLWNATGVVVCTGDETQCYGTWVPIGLAIPENEGGGSEGGGSEGGGSEGGGTKPPEYGDTPIPGYTYINPLDGTYPPGTEQNPANPNPSLEESQPLNTFMFQNNRFRNRQGALTVYTGTFTQGTDPVKTYYQYTPVSSKAMYDAYWNGKFRDCAFHSGFNEDPFVCEYQGQSSDLPQPPVNAGGGSGGGSGGGSEGGGSEGGGSEGGGSEGGGSGGGSGSGAMVRSPPCPSCPAPEFLGGPSVFLFPPKPKDTLMISRTPEVTCVVVDVSQEDPEVQFNWYVDGVEVHNAKTKPREEQFNSTYRVVSVLTVLHQDWLNGKEYKCKVSNKGLPSSIEKTISKAKGQPREPQVYTLPPSQEEMTKNQVSLTCLVKGFYPSDIAVEWESNGQPENNYKTTPPVLDSDGSFFLYSRLTVDKSRWQEGNVFSCSVMHEALHNHYTQKSLSLSPGK

SEQ ID NO: 3792 - protein, 509 aa, Artificial Sequence
  source: /note="Description of Artificial Sequence: Synthetic polypeptide"
MYRMQLLSCIALSLALVTNSMAETVESCLAKPHTENSFTNVWKDDKTLDRYANYEGCLWNATGVVVCTGDETQCYGTWVPIGLAIPENEGGGSEGGGSEGGGSEGGGTKPPEYGDTPIPGYTYINPLDGTYPPGTEQNPANPNPSLEESQPLNTFMFQNNRFRNRQGALTVYTGTFTQGTDPVKTYYQYTPVSSKAMYDAYWNGKFRDCAFHSGFNEDPFVCEYQGQSSDLPQPPVNAGGGSGGGSGGGSEGGGSEGGGSEGGGSEGGGSGGGSGSGAMVRSDKTHTCPPCPAPELLGGPSVFLFPPKPKDTLMISRTPEVTCVVVDVSHEDPEVKFNWYVDGVEVHNAKTKPREEQYNSTYRVVSVLTVLHQDWLNGKEYKCKVSNKALPAPIEKTISKAKGQPREPQVYTLPPSREEMTKNQVSLTCLVKGFYPSDIAVEWESNGQPENNYKTTPPVLDSDGSFFLYSKLTVDKSRWQQGNVFSCSVMHEALHNHYTQKSLSLSPGK

SEQ ID NO: 3793 - protein, 131 aa, Artificial Sequence
  source: /note="Description of Artificial Sequence: Synthetic polypeptide"
TKPPEYGDTPIPGYTYINPLDGTYPPGTEQNPANPNPSLEESQPLNTFMFQNNRFRNRQGALTVYTGTVTQGTDPVKTYYQYTPVSSKAMYDAYWNGKFRDCAFHSGFNEDPFVCEYQGQSSDLPQPPVNA

SEQ ID NO: 3794 - protein, 131 aa, Artificial Sequence; identical to SEQ ID NO: 3793
  source: /note="Description of Artificial Sequence: Synthetic polypeptide"

SEQ ID NO: 3795 - protein, 131 aa, Artificial Sequence; identical to SEQ ID NO: 3793
  source: /note="Description of Artificial Sequence: Synthetic polypeptide"

SEQ ID NO: 3796 - protein, 128 aa, Artificial Sequence
  source: /note="Description of Artificial Sequence: Synthetic polypeptide"
SPGEKTESWSIRAQVEGDIQRSVPDEEPSEQTPEEICEAKPPIDGVFNNVFKGDEGGFYINYNGCEYEATGVTVCQNDGTVCSSSAWKPTGYVPESGEPSSSPLKDGDTGGTGEGGSDTGGDTGGGDT

SEQ ID NO: 3797 - protein, 128 aa, Artificial Sequence
  source: /note="Description of Artificial Sequence: Synthetic polypeptide"
SPSEKTESWSIRAQVEGDMQRSVPDEEPSEQTPEEICEAKPPIDGVFNNVSKGDEGGFYINYNGCEYEATGVTVCQNDGTVCASSAWKPTGYVPESGESSSSPVKDGDTGGTGEGGSDTGGDTGGGDT

SEQ ID NO: 3798 - protein, 161 aa, Artificial Sequence
  source: /note="Description of Artificial Sequence: Synthetic polypeptide"
STPDTVTPGQTVNLPSDLSTLSIPANVVKSDSIGSQFSLYTNASCTMCSGYYLSNNADSIAIANITETVKADYNQPDMWFEQTDSDGNHVKILQNSYKAVSYNVESKQSDVNNPTYINYSYSVNVKQVSYDTSNVCIMNWETFQNKCDASRAVLITDTVTP

SEQ ID NO: 3799 - protein, 424 aa, Artificial Sequence
  source: /note="Description of Artificial Sequence: Synthetic polypeptide"
MKKLLFAIPLVVPFYSHSAETVESCLAKPHTENSFTNVWKDDKTLDRYANYEGCLWNATGVVVCTGDETQCYGTWVPIGLAIPENEGGGSEGGGSEGGGSEGGGTKPPEYGDTPIPGYTYINPLDGTYPPGTEQNPANPNPSLEESQPLNTFMFQNNRFRNRQGALTVYTGTVTQGTDPVKTYYQYTPVSSKAMYDAYWNGKFRDCAFHSGFNEDPFVCEYQGQSSDLPQPPVNAGGGSGGGSGGGSEGGGSEGGGSEGGGSEGGGSGGGSGSGDFDYEKMANANKGAMTENADENALQSDAKGKLDSVATDYGAAIDGFIGDVSGLANGNGATGDFAGSNSQMAQVGDGDNSPLMNNFRQYLPSLPQSVECRPYVFGAGKPYEFSIDCDKINLFRGVFAFLLYVATFMYVFSTFANILRNKES

SEQ ID NO: 3800 - protein, 227 aa, Artificial Sequence
  source: /note="Description of Artificial Sequence: Synthetic polypeptide"
MAETVESCLAKSHTENSFTNVWKDDKTLDRYANYEGCLWNATGVVVCTGDETQCYGTWVPIGLAIPENEGGGSEGGGSEGGGSEGGGTKPPEYGDTPIPGYTYINPLDGTYPPGTEQNPANPNPSLEESQPLNTFMFQNNRFRNRQGALTVYTGTVTQGTDPVKTYYQYTPVSSKAMYDAYWNGKFRDCAFHSGFNEDLFVCEYQGQSSDLPQPPVNAPSGHHHHHH

SEQ ID NO: 3801 - protein, 227 aa, Artificial Sequence; identical to SEQ ID NO: 3800
  source: /note="Description of Artificial Sequence: Synthetic polypeptide"

SEQ ID NO: 3802 - protein, 264 aa, Artificial Sequence
  source: /note="Description of Artificial Sequence: Synthetic polypeptide"
ATTDAECLSKPAFDGTLSNVWKEGDSRYANFENCIYELSGIGIGYDNDTSCNGHWTPVRAADGSGNGGDDNSSGGGSNGDSGNNSTPDTVTPGQTVNLPSDLSTLSIPANVVKSDSIGSQFSLYTNASCTMCSGYYLSNNADSIAIANITETVKADYNQPDMWFEQTDSDGNHVKILQNSYKAVSYNVESKQSDVNNPTYINYSYSVNVKQVSYDTSNVCIMNWETFQNKCDASRAVLITDTVTPSYSRNITIQSNINYQGSNG

SEQ ID NO: 3803 - protein, 424 aa, Artificial Sequence
  source: /note="Description of Artificial Sequence: Synthetic polypeptide"
MKKLLFAIPLVVPFYSHSAETVESCLAKPHTENSFTNVWKDDKTLDRYANYEGCLWNATGVVVCTGDETQCYGTWVPIGLAIPENEGGGSEGGGSEGGGSEGGGTKPPEYGDTPIPGYTYINPLDGTYPPGTEQNPANPNPSLEESQPLNTFMFQNNRFRNRQGALTVYTGTVTQGTDPVKTYYQYTPVSSKAMYDAYWNGKFRDCAFHSGFNEDPFVCEYQGQSSDLPQPPVNAGGGSGGGSGGGSEGGGSEGGGSEGGGSEGGGSGGGSGSGDFDYEKMANANKGAMTENADENALQSDAKGKLDSVATDYGAAIDGFIGDVSGLANGNGATGDFAGSNSQMAQVGDGDNSPLMNNFRQYLPSLPQSVECRPFVFGAGKPYEFSIDCDKINLFRGVFAFLLYVATFMYVFSTFANILRNKES

SEQ ID NO: 3804 - protein, 219 aa, Artificial Sequence
  source: /note="Description of Artificial Sequence: Synthetic polypeptide"
AETVESCLAKPHIENSFTNVWKDDKTLDRYANYEGCLWNATGVVVCTGDETQCYGTWVPIGLAIPENEGGGSEGGGSEGGGSEGGGTKPPEYGDTPIPGYIYINPLDGTYPPGTEQNPANPNPSLEESHPLNTFMFQNNRFRNRQGALTVYTGTVTQGTDPVKTYYQYTPVSSKAMYDAYWNGKFRDCAFHSGFNEDLFVCEYQGQSSYLPQPPVNAPS

SEQ ID NO: 3805 - protein, 528 aa, Artificial Sequence
  source: /note="Description of Artificial Sequence: Synthetic polypeptide"
MYRMQLLSCIALSLALVTNSMATTDAECLSKPAFDGTLSNVWKEGDSRYANFENCIYELSGIGIGYDNDTSWNGHWTPVRAADGSGNGGDDNSSGGGSNGDSGNNSTPDTVTPGQTVNLPSDLSTLSIPANVVKSDSIGSQFSLYTNASCTMCSGYYLSNNADSIAIANITETVKADYNQPDMWFEQTDSDGNHVKILQNSYKAVSYNVESKQSDVNNPTYINYSYSVNVKQVSYDTSNVCIMNWETFQNKCDASRAVLITDTVTPSYSRNITIQSNINYQGSNGSGGSGGSGGSGAMVRSDKTHTCPPCPAPELLGGPSVFLFPPKPKDTLMISRTPEVTCVVVDVSHEDPEVKFNWYVDGVEVHNAKTKPREEQYNSTYRVVSVLTVLHQDWLNGKEYKCKVSNKALPAPIEKTISKAKGQPREPQVYTLPPSREEMTKNQVSLTCLVKGFYPSDIAVEWESNGQPENNYKTTPPVLDSDGSFFLYSKLTVDKSRWQQGNVFSCSVMHEALHNHYTQKSLSLSPGK

SEQ ID NO: 3806 - protein, 434 aa, Artificial Sequence; identical to SEQ ID NO: 3788
  source: /note="Description of Artificial Sequence: Synthetic polypeptide"

SEQ ID NO: 3807 - protein, 434 aa, Artificial Sequence
  source: /note="Description of Artificial Sequence: Synthetic polypeptide"
MKRKIIAISLFLYIPLSNADNWESITKSYYTGFAISKTVESKDKDGKPVRKEVITQADLTTACNDAKASAQNVFNQIKLTLSGTWNDSQFRLVTGDTCVYNGSPGEKTESWSIRAQVEGDIQRSVPDEEPSEQTPEEICEAKPPIDGVFNNVFKGDEGGFYINYNGCEYEATGVTVCQNDGTVCSSSAWKPTGYVPESGEPSSSPLKDGDTGGTGEGGSDTGGDTGGGDTGGGSTGGDTGGSSGGGSSGGGSTGGSTGKSLTKEDVTAAIHVASPSIGDAVKDSLTEDNDQYDNQKKADEQSAKASASVSDAISDGMRGVGNFVDDFGGESSQYGTGNSEMDLSVSLAKGQLGIDREGHGSAWESFLNDGALRPSIPTGHGCTNFVMYQGSVYQIEIGCDKLNDIKSVLSWVMYCLTFWYVFQSVTSLLRKGEQ

SEQ ID NO: 3808 - protein, 460 aa, Artificial Sequence
  source: /note="Description of Artificial Sequence: Synthetic polypeptide"
MKKIIIALFFAPFFTHATTDAECLSKPAFDGTLSNVWKEGDSRYANFENCIYELSGIGIGYDNDTSCNGHWTPVRAADGSGNGGDDNSSGGGSNGDSGNNSTPDTVTPGQTVNLPSDLSTLSIPANVVKSDSIGSQFSLYTNASCTMCSGYYLSNNADSIAIANITETVKADYNQPDMWFEQTDSDGNHVKILQNSYKAVSYNVESKQSDVNNPTYINYSYSVNVKQVSYDTSNVCIMNWETFQNKCDASRAVLITDTVTPSYSRNITIQSNINYQGSNGSGGSGGSGGSGNDGGGTGNNGNGTGDFDYVKMANANKDALTESFDLSALQADTGASLDGSVQGTLDSLSGFSDSIGGLVGNGSAISGEFAGSSAAMNAIGEGDKSPLLDSLSFLKDGLFPALPEFKQCTPFVFAPGKEYEFIIECKYIDMFKGIFAFILYFWTFVTVYDSFSGILRKGRG

SEQ ID NO: 3809 - protein, 506 aa, Artificial Sequence
  source: /note="Description of Artificial Sequence: Synthetic polypeptide"
MYRMQLLSCIALSLALVTNSMAETVESCLAKPHTENSFTNVWKDDKTLDRYANYEGCLWNATGVVVCTGDETQCYGTWVPIGLAIPENEGGGSEGGGSEGGGSEGGGTKPPEYGDTPIPGYTYINPLDGTYPPGTEQNPANPNPSLEESQPLNTFMFQNNRFRNRQGALTVYTGTVTQGTDPVKTYYQYTPVSSKAMYDAYWNGKFRDCAFHSGFNEDPFVCEYQGQSSDLPQPPVNAGGGSGGGSGGGSEGGGSEGGGSEGGGSEGGGSGGGSGSGAMVRSPPCPSCPAPEFLGGPSVFLFPPKPKDTLMISRTPEVTCVVVDVSQEDPEVQFNWYVDGVEVHNAKTKPREEQFNSTYRVVSVLTVLHQDWLNGKEYKCKVSNKGLPSSIEKTISKAKGQPREPQVYTLPPSQEEMTKNQVSLTCLVKGFYPSDIAVEWESNGQPENNYKTTPPVLDSDGSFFLYSRLTVDKSRWQEGNVFSCSVMHEALHNHYTQKSLSLSPGK

SEQ ID NO: 3810 - protein, 115 aa, Artificial Sequence
  source: /note="Description of Artificial Sequence: Synthetic polypeptide"
QVQLVQSGAELKKPGSSVKVSCKASGYTFTNYWMNWVRQAPGQGLEWIGATNPNNGYTDYNQRFKDRATLTADKSTNTAYMELSSLRSEDTAVYYCARGGHLAYWGQGTLVTVSS

SEQ ID NO: 3811 - protein, 115 aa, Artificial Sequence
  source: /note="Description of Artificial Sequence: Synthetic polypeptide"
QVQLVQSGAELKKPGSSVKVSCKASGYTFTNYWMNWVRQAPGQGLEWIGATNPNNGYTDYNQRFKDRVTITADKSTNTAYMELSSLRSEDTAVYYCARGGHLAYWGQGTLVTVSS

SEQ ID NO: 3812 - protein, 115 aa, Artificial Sequence
  source: /note="Description of Artificial Sequence: Synthetic polypeptide"
QVQLVQSGAELKKPGSSVKVSCKASGYTFTNYWMNWVRQAPGQGLEWIGATNPNNGYTDYNQRFKDRATLTADKSTNTAYMELSSLRSEDTAVYFCASGGHLAYWGQGTLVTVSS

SEQ ID NO: 3813 - protein, 115 aa, Artificial Sequence
  source: /note="Description of Artificial Sequence: Synthetic polypeptide"
QVQLVQSGAELKKPGSSVKVSCKASGYTFTNYWMNWVRQAPGQGLEWIGATNPNNGYTDYNQRFKDRATLTADKSTNTAYMELSSLRSEDTAVYYCASGGHLAYWGQGTLVTVSS

SEQ ID NO: 3814 - protein, 115 aa, Artificial Sequence
  source: /note="Description of Artificial Sequence: Synthetic polypeptide"
QVQLVQSGAELKKPGSSVKVSCKASGYTFTNYWMNWVRQAPGQGLEWIGATNPNNGYTDYNQRFKDRVTITADKSTNTAYMELSSLRSEDTAVYYCASGGHLAYWGQGTLVTVSS

SEQ ID NO: 3815 - protein, 128 aa, Artificial Sequence
  source: /note="Description of Artificial Sequence: Synthetic polypeptide"
MERHWIFLFLLSVTGGVHSQVQLQQSGAELAKPGTSVQMSCKASGYTFTNYWMNWIKARPGQGLEWIGATNPNNGYTDYNQRFKDKAILTADKSSNTAYMHLSSLTSEDSAVYFCASGGHLAYWGQGT

SEQ ID NO: 3816 - protein, 451 aa, Artificial Sequence
  source: /note="Description of Artificial Sequence: Synthetic polypeptide"
QSVEESGGRLVTPGTPLTLTCTVSGFSLSSYAMSWVRQAPGEGLEWIGIISDSGSTYYASWAKGRFTISKTSTTVDLRITSPTTEDTATYFCAREPEYGYDDYGDWVSDLWGQGTLVTVSSASTKGPSVFPLAPSSKSTSGGTAALGCLVKDYFPEPVTVSWNSGALTSGVHTFPAVLQSSGLYSLSSVVTVPSSSLGTQTYICNVNHKPSNTKVDARVEPKSCDKTHTCPPCPAPELLGGPSVFLFPPKPKDTLMISRTPEVTCVVVDVSHEDPEVKFNWYVDGVEVHNAKTKPREEQYASTYRVVSVLTVLHQDWLNGKEYKCKVSNKALPAPIEKTISKAKGQPREPQVYTLPPSREEMTKNQVSLTCLVKGFYPSDIAVEWESNGQPENNYKTTPPVLDSDGSFFLYSKLTVDKSRWQQGNVFSCSVMHEALHNHYTQKSLSLSPGK

SEQ ID NO: 3817 - protein, 451 aa, Artificial Sequence
  source: /note="Description of Artificial Sequence: Synthetic polypeptide"
QSVEESGGRLVTPGTPLTLTCTVSGFSLNSYAMSWVRQAPGEGLEWIGIISDSGRTYYASWAKGRFTISKTSTTVDLKITSPTTEDTATYFCAREPEYGYDDYGDWVSDLWGPGTLVTVSSASTKGPSVFPLAPSSKSTSGGTAALGCLVKDYFPEPVTVSWNSGALTSGVHTFPAVLQSSGLYSLSSVVTVPSSSLGTQTYICNVNHKPSNTKVDARVEPKSCDKTHTCPPCPAPELLGGPSVFLFPPKPKDTLMISRTPEVTCVVVDVSHEDPEVKFNWYVDGVEVHNAKTKPREEQYASTYRVVSVLTVLHQDWLNGKEYKCKVSNKALPAPIEKTISKAKGQPREPQVYTLPPSREEMTKNQVSLTCLVKGFYPSDIAVEWESNGQPENNYKTTPPVLDSDGSFFLYSKLTVDKSRWQQGNVFSCSVMHEALHNHYTQKSLSLSPGK

SEQ ID NO: 3818 - protein, 440 aa, Artificial Sequence
  source: /note="Description of Artificial Sequence: Synthetic polypeptide"
QSVEESGGRLVTPGTPLTLTCTVSGFSLSSADMIWVRQAPGKGLESIGMIYDDGDTYYATWAKGRFTISKTSTTVDLKIISPTTEDTATYFCVKGVSSVWGQGTLVTVSSASTKGPSVFPLAPSSKSTSGGTAALGCLVKDYFPEPVTVSWNSGALTSGVHTFPAVLQSSGLYSLSSVVTVPSSSLGTQTYICNVNHKPSNTKVDARVEPKSCDKTHTCPPCPAPELLGGPSVFLFPPKPKDTLMISRTPEVTCVVVDVSHEDPEVKFNWYVDGVEVHNAKTKPREEQYASTYRVVSVLTVLHQDWLNGKEYKCKVSNKALPAPIEKTISKAKGQPREPQVYTLPPSREEMTKNQVSLTCLVKGFYPSDIAVEWESNGQPENNYKTTPPVLDSDGSFFLYSKLTVDKSRWQQGNVFSCSVMHEALHNHYTQKSLSLSPGK

SEQ ID NO: 3819 - protein, 440 aa, Artificial Sequence
  source: /note="Description of Artificial Sequence: Synthetic polypeptide"
QSLEESGGRLVTPGTSLTLTCTASGFSLSAYDILWVRQAPGKGLESIGMMYDDGDTYYATWAKGRFIISRTSTTMDLKIISPTTEDTATYFCVKGVSNIWGQGTLVTVSSASTKGPSVFPLAPSSKSTSGGTAALGCLVKDYFPEPVTVSWNSGALTSGVHTFPAVLQSSGLYSLSSVVTVPSSSLGTQTYICNVNHKPSNTKVDARVEPKSCDKTHTCPPCPAPELLGGPSVFLFPPKPKDTLMISRTPEVTCVVVDVSHEDPEVKFNWYVDGVEVHNAKTKPREEQYASTYRVVSVLTVLHQDWLNGKEYKCKVSNKALPAPIEKTISKAKGQPREPQVYTLPPSREEMTKNQVSLTCLVKGFYPSDIAVEWESNGQPENNYKTTPPVLDSDGSFFLYSKLTVDKSRWQQGNVFSCSVMHEALHNHYTQKSLSLSPGK

SEQ ID NO: 3820 - protein, 440 aa, Artificial Sequence
  source: /note="Description of Artificial Sequence: Synthetic polypeptide"
QSVEESGGRLVTPGTPLTLTCTVSGSSLSDYDMIWVRQAPGKGLESIGIIYDDGDTYYATWAKGRFTISKTSTTVDLRIISPTTEDTATYFCVKGVSNMWGPGTLVTVSSASTKGPSVFPLAPSSKSTSGGTAALGCLVKDYFPEPVTVSWNSGALTSGVHTFPAVLQSSGLYSLSSVVTVPSSSLGTQTYICNVNHKPSNTKVDARVEPKSCDKTHTCPPCPAPELLGGPSVFLFPPKPKDTLMISRTPEVTCVVVDVSHEDPEVKFNWYVDGVEVHNAKTKPREEQYASTYRVVSVLTVLHQDWLNGKEYKCKVSNKALPAPIEKTISKAKGQPREPQVYTLPPSREEMTKNQVSLTCLVKGFYPSDIAVEWESNGQPENNYKTTPPVLDSDGSFFLYSKLTVDKSRWQQGNVFSCSVMHEALHNHYTQKSLSLSPGK

SEQ ID NO: 3821 - protein, 440 aa, Artificial Sequence
  source: /note="Description of Artificial Sequence: Synthetic polypeptide"
QSVEESGGRLVTPGTPLTLTCTVSGFSLSKYDMIWVRQAPGKGLESIGIIYDDGDTYYASWAKGRFTISQTSTTVDLKIISPTTEDTATYFCVKGVSNIWGQGTLVTVSSASTKGPSVFPLAPSSKSTSGGTAALGCLVKDYFPEPVTVSWNSGALTSGVHTFPAVLQSSGLYSLSSVVTVPSSSLGTQTYICNVNHKPSNTKVDARVEPKSCDKTHTCPPCPAPELLGGPSVFLFPPKPKDTLMISRTPEVTCVVVDVSHEDPEVKFNWYVDGVEVHNAKTKPREEQYASTYRVVSVLTVLHQDWLNGKEYKCKVSNKALPAPIEKTISKAKGQPREPQVYTLPPSREEMTKNQVSLTCLVKGFYPSDIAVEWESNGQPENNYKTTPPVLDSDGSFFLYSKLTVDKSRWQQGNVFSCSVMHEALHNHYTQKSLSLSPGK

SEQ ID NO: 3822 - protein, 443 aa, Artificial Sequence
  source: /note="Description of Artificial Sequence: Synthetic polypeptide"
EVQLVESGGGLVQPGGSLRLSCAASGFTVSNYDMIWVRQAPGKGLESIGMIYDDGDTYYASSAKGRFTISRDNSKNTLYLQMNSLRAEDTAVYYCVKGVSNHWGQGTLVTVSSASTKGPSVFPLAPSSKSTSGGTAALGCLVKDYFPEPVTVSWNSGALTSGVHTFPAVLQSSGLYSLSSVVTVPSSSLGTQTYICNVNHKPSNTKVDARVEPKSCDKTHTCPPCPAPELLGGPSVFLFPPKPKDTLMISRTPEVTCVVVDVSHEDPEVKFNWYVDGVEVHNAKTKPREEQYASTYRVVSVLTVLHQDWLNGKEYKCKVSNKALPAPIEKTISKAKGQPREPQVYTLPPSREEMTKNQVSLTCLVKGFYPSDIAVEWESNGQPENNYKTTPPVLDSDGSFFLYSKLTVDKSRWQQGNVFSCSVMHEALHNHYTQKSLSLSPGK

SEQ ID NO: 3823 - protein, 443 aa, Artificial Sequence
  source: /note="Description of Artificial Sequence: Synthetic polypeptide"
EVQLVESGGGLVQPGGSLRLSCAASGFTVSKYDMIWVRQAPGKGLESIGIIYDDGDTYYASSAKGRFTISRDNSKNTLYLQMNSLRAEDTAVYYCVKGVSNIWGQGTLVTVSSASTKGPSVFPLAPSSKSTSGGTAALGCLVKDYFPEPVTVSWNSGALTSGVHTFPAVLQSSGLYSLSSVVTVPSSSLGTQTYICNVNHKPSNTKVDARVEPKSCDKTHTCPPCPAPELLGGPSVFLFPPKPKDTLMISRTPEVTCVVVDVSHEDPEVKFNWYVDGVEVHNAKTKPREEQYASTYRVVSVLTVLHQDWLNGKEYKCKVSNKALPAPIEKTISKAKGQPREPQVYTLPPSREEMTKNQVSLTCLVKGFYPSDIAVEWESNGQPENNYKTTPPVLDSDGSFFLYSKLTVDKSRWQQGNVFSCSVMHEALHNHYTQKSLSLSPGK

SEQ ID NO: 3824 - protein, 443 aa, Artificial Sequence
  source: /note="Description of Artificial Sequence: Synthetic polypeptide"
EVQLVESGGGLVQPGGSLRLSCAASGSSLSNFDMIWVRQAPGKGLESIGIIYDFGSTYYASSAKGRFTISRDNSKNTLYLQMNSLRAEDTAVYYCVKGVSNIWGQGTLVTVSSASTKGPSVFPLAPSSKSTSGGTAALGCLVKDYFPEPVTVSWNSGALTSGVHTFPAVLQSSGLYSLSSVVTVPSSSLGTQTYICNVNHKPSNTKVDARVEPKSCDKTHTCPPCPAPELLGGPSVFLFPPKPKDTLMISRTPEVTCVVVDVSHEDPEVKFNWYVDGVEVHNAKTKPREEQYASTYRVVSVLTVLHQDWLNGKEYKCKVSNKALPAPIEKTISKAKGQPREPQVYTLPPSREEMTKNQVSLTCLVKGFYPSDIAVEWESNGQPENNYKTTPPVLDSDGSFFLYSKLTVDKSRWQQGNVFSCSVMHEALHNHYTQKSLSLSPGK

SEQ ID NO: 3825 - protein, 443 aa, Artificial Sequence
  source: /note="Description of Artificial Sequence: Synthetic polypeptide"
EVQLVESGGGLVQPGGSLRLSCAASGFTVSKHDMIWVRQAPGKGLESIGIIYDDGDTYYANSAKGRFTISRDNSKNTLYLQMNSLRAEDTAVYYCVKGVSNIWGQGTLVTVSSASTKGPSVFPLAPSSKSTSGGTAALGCLVKDYFPEPVTVSWNSGALTSGVHTFPAVLQSSGLYSLSSVVTVPSSSLGTQTYICNVNHKPSNTKVDARVEPKSCDKTHTCPPCPAPELLGGPSVFLFPPKPKDTLMISRTPEVTCVVVDVSHEDPEVKFNWYVDGVEVHNAKTKPREEQYASTYRVVSVLTVLHQDWLNGKEYKCKVSNKALPAPIEKTISKAKGQPREPQVYTLPPSREEMTKNQVSLTCLVKGFYPSDIAVEWESNGQPENNYKTTPPVLDSDGSFFLYSKLTVDKSRWQQGNVFSCSVMHEALHNHYTQKSLSLSPGK

SEQ ID NO: 3826 - protein, 454 aa, Artificial Sequence
  source: /note="Description of Artificial Sequence: Synthetic polypeptide"
EVQLVESGGGLVQPGGSLRLSCAASGFSLTDYAMSWVRQAPGKGLEWIGIISDSGSTYYASSAKGRFTISRDNSKNTLYLQMNSLRAEDTAVYYCAREPEYGYDEYGDWVSDLWGQGTLVTVSSASTKGPSVFPLAPSSKSTSGGTAALGCLVKDYFPEPVTVSWNSGALTSGVHTFPAVLQSSGLYSLSSVVTVPSSSLGTQTYICNVNHKPSNTKVDARVEPKSCDKTHTCPPCPAPELLGGPSVFLFPPKPKDTLMISRTPEVTCVVVDVSHEDPEVKFNWYVDGVEVHNAKTKPREEQYASTYRVVSVLTVLHQDWLNGKEYKCKVSNKALPAPIEKTISKAKGQPREPQVYTLPPSREEMTKNQVSLTCLVKGFYPSDIAVEWESNGQPENNYKTTPPVLDSDGSFFLYSKLTVDKSRWQQGNVFSCSVMHEALHNHYTQKSLSLSPGK

SEQ ID NO: 3827 - protein, 454 aa, Artificial Sequence
  source: /note="Description of Artificial Sequence: Synthetic polypeptide"
EVQLVESGGGLVQPGGSLRLSCAASGFSLSSYAMSWVRQAPGKGLEWIGIISDSGSTYYASSAKGRFTISRDNSKNTLYLQMNSLRAEDTAVYYCAREPEYGYDDYGDWVSDLWGQGTLVTVSSASTKGPSVFPLAPSSKSTSGGTAALGCLVKDYFPEPVTVSWNSGALTSGVHTFPAVLQSSGLYSLSSVVTVPSSSLGTQTYICNVNHKPSNTKVDARVEPKSCDKTHTCPPCPAPELLGGPSVFLFPPKPKDTLMISRTPEVTCVVVDVSHEDPEVKFNWYVDGVEVHNAKTKPREEQYASTYRVVSVLTVLHQDWLNGKEYKCKVSNKALPAPIEKTISKAKGQPREPQVYTLPPSREEMTKNQVSLTCLVKGFYPSDIAVEWESNGQPENNYKTTPPVLDSDGSFFLYSKLTVDKSRWQQGNVFSCSVMHEALHNHYTQKSLSLSPGK

SEQ ID NO: 3828 - protein, 454 aa, Artificial Sequence; identical to SEQ ID NO: 3827
  source: /note="Description of Artificial Sequence: Synthetic polypeptide"

SEQ ID NO: 3829 - protein, 443 aa, Artificial Sequence
  source: /note="Description of Artificial Sequence: Synthetic polypeptide"
EVQLVESGGGLVQPGGSLRLSCAASGFTVSSADMIWVRQAPGKGLESIGMIYDDGDTYYATSAKGRFTISRDNSKNTLYLQMNSLRAEDTAVYYCVKGVSSVWGQGTLVTVSSASTKGPSVFPLAPSSKSTSGGTAALGCLVKDYFPEPVTVSWNSGALTSGVHTFPAVLQSSGLYSLSSVVTVPSSSLGTQTYICNVNHKPSNTKVDARVEPKSCDKTHTCPPCPAPELLGGPSVFLFPPKPKDTLMISRTPEVTCVVVDVSHEDPEVKFNWYVDGVEVHNAKTKPREEQYASTYRVVSVLTVLHQDWLNGKEYKCKVSNKALPAPIEKTISKAKGQPREPQVYTLPPSREEMTKNQVSLTCLVKGFYPSDIAVEWESNGQPENNYKTTPPVLDSDGSFFLYSKLTVDKSRWQQGNVFSCSVMHEALHNHYTQKSLSLSPGK

SEQ ID NO: 3830 - protein, 443 aa, Artificial Sequence
  source: /note="Description of Artificial Sequence: Synthetic polypeptide"
EVQLVESGGGLVQPGGSLRLSCAASGFTVSAYDILWVRQAPGKGLESIGMMYDDGDTYYATSAKGRFTISRDNSKNTLYLQMNSLRAEDTAVYYCVKGVSNIWGQGTLVTVSSASTKGPSVFPLAPSSKSTSGGTAALGCLVKDYFPEPVTVSWNSGALTSGVHTFPAVLQSSGLYSLSSVVTVPSSSLGTQTYICNVNHKPSNTKVDARVEPKSCDKTHTCPPCPAPELLGGPSVFLFPPKPKDTLMISRTPEVTCVVVDVSHEDPEVKFNWYVDGVEVHNAKTKPREEQYASTYRVVSVLTVLHQDWLNGKEYKCKVSNKALPAPIEKTISKAKGQPREPQVYTLPPSREEMTKNQVSLTCLVKGFYPSDIAVEWESNGQPENNYKTTPPVLDSDGSFFLYSKLTVDKSRWQQGNVFSCSVMHEALHNHYTQKSLSLSPGK

SEQ ID NO: 3831 - protein, 443 aa, Artificial Sequence
  source: /note="Description of Artificial Sequence: Synthetic polypeptide"
EVQLVESGGGLVQPGGSLRLSCAASGFTVSAYDILWVRQAPGKGLESIGMMYDDGDTYYATSAKGRFTISRDNSKNTLYLQMNSLRAEDTAVYYCVKGVSNIWGQGTLVTVSSASTKGPSVFPLAPSSKSTSGGTAALGCLVKDYFPEPVTVSWNSGALTSGVHTFPAVLQSSGLYSLSSVVTVPSSSLGTQTYICNVNHKPSNTKVDKKVEPKSCDKTHTCPPCPAPELLGGPSVFLFPPKPKDTLMISRTPEVTCVVVDVSHEDPEVKFNWYVDGVEVHNAKTKPREEQYASTYRVVSVLTVLHQDWLNGKEYKCKVSNKALPAPIEKTISKAKGQPREPQVYTLPPSREEMTKNQVSLTCLVKGFYPSDIAVEWESNGQPENNYKTTPPVLDSDGSFFLYSKLTVDKSRWQQGNVFSCSVMHEALHNHYTQKSLSLSPGK

SEQ ID NO: 3832 - protein, 441 aa, Artificial Sequence
  source: /note="Description of Artificial Sequence: Synthetic polypeptide"
QSLEESGGRLVTPGTPLTLTCTVSGSSLSNFDMIWVRQAPGKGLESIGIIYDFGSTYYASWAKGRFTISRTSSTTVDLKIISPTIEDTATYFCVKGVSNIWGQGTLVTVSSASTKGPSVFPLAPSSKSTSGGTAALGCLVKDYFPEPVTVSWNSGALTSGVHTFPAVLQSSGLYSLSSVVTVPSSSLGTQTYICNVNHKPSNTKVDARVEPKSCDKTHTCPPCPAPELLGGPSVFLFPPKPKDTLMISRTPEVTCVVVDVSHEDPEVKFNWYVDGVEVHNAKTKPREEQYASTYRVVSVLTVLHQDWLNGKEYKCKVSNKALPAPIEKTISKAKGQPREPQVYTLPPSREEMTKNQVSLTCLVKGFYPSDIAVEWESNGQPENNYKTTPPVLDSDGSFFLYSKLTVDKSRWQQGNVFSCSVMHEALHNHYTQKSLSLSPGK

SEQ ID NO: 3833 - protein, 443 aa, Artificial Sequence
  source: /note="Description of Artificial Sequence: Synthetic polypeptide"
EVQLVESGGGLVQPGGSLRLSCAASGSSLSDYDMIWVRQAPGKGLESIGIIYDDGDTYYATSAKGRFTISRDNSKNTLYLQMNSLRAEDTAVYYCVKGVSNMWGQGTLVTVSSASTKGPSVFPLAPSSKSTSGGTAALGCLVKDYFPEPVTVSWNSGALTSGVHTFPAVLQSSGLYSLSSVVTVPSSSLGTQTYICNVNHKPSNTKVDARVEPKSCDKTHTCPPCPAPELLGGPSVFLFPPKPKDTLMISRTPEVTCVVVDVSHEDPEVKFNWYVDGVEVHNAKTKPREEQYASTYRVVSVLTVLHQDWLNGKEYKCKVSNKALPAPIEKTISKAKGQPREPQVYTLPPSREEMTKNQVSLTCLVKGFYPSDIAVEWESNGQPENNYKTTPPVLDSDGSFFLYSKLTVDKSRWQQGNVFSCSVMHEALHNHYTQKSLSLSPGK

SEQ ID NO: 3834 - protein, 440 aa, Artificial Sequence
  source: /note="Description of Artificial Sequence: Synthetic polypeptide"
QSVEESGGRLVTPGTPLTLTYTVSGFSLSKHDMIWVRQAPGKGLESIGIIYDDGDTYYANWAKGRFTISKTSTTVDLKIISPTTEDTATYFCVKGVSNIWGPGTLVTVSSASTKGPSVFPLAPSSKSTSGGTAALGCLVKDYFPEPVTVSWNSGALTSGVHTFPAVLQSSGLYSLSSVVTVPSSSLGTQTYICNVNHKPSNTKVDARVEPKSCDKTHTCPPCPAPELLGGPSVFLFPPKPKDTLMISRTPEVTCVVVDVSHEDPEVKFNWYVDGVEVHNAKTKPREEQYASTYRVVSVLTVLHQDWLNGKEYKCKVSNKALPAPIEKTISKAKGQPREPQVYTLPPSREEMTKNQVSLTCLVKGFYPSDIAVEWESNGQPENNYKTTPPVLDSDGSFFLYSKLTVDKSRWQQGNVFSCSVMHEALHNHYTQKSLSLSPGK

SEQ ID NO: 3835 - protein, 451 aa, Artificial Sequence
  source: /note="Description of Artificial Sequence: Synthetic polypeptide"
QSVEESGGRLVTPGTPLTLTCTVSGFSLSSYAMSWVRQAPGEGLEWIGIISDSGSTYYASWAKGRFTISKTSTTVDLKITSPTTEDTATYFCAREPEYGYDDYGDWVSDLWGQGTLVTVSSASTKGPSVFPLAPSSKSTSGGTAALGCLVKDYFPEPVTVSWNSGALTSGVHTFPAVLQSSGLYSLSSVVTVPSSSLGTQTYICNVNHKPSNTKVDARVEPKSCDKTHTCPPCPAPELLGGPSVFLFPPKPKDTLMISRTPEVTCVVVDVSHEDPEVKFNWYVDGVEVHNAKTKPREEQYASTYRVVSVLTVLHQDWLNGKEYKCKVSNKALPAPIEKTISKAKGQPREPQVYTLPPSREEMTKNQVSLTCLVKGFYPSDIAVEWESNGQPENNYKTTPPVLDSDGSFFLYSKLTVDKSRWQQGNVFSCSVMHEALHNHYTQKSLSLSPGK

SEQ ID NO: 3836 - protein, 451 aa, Artificial Sequence
  source: /note="Description of Artificial Sequence: Synthetic polypeptide"
QSVEESGGRLVTPGTPLTLTCTVSGFSLTDYAMSWVRQAPGEGLEWIGIISDSGSTYYASWAKGRFTFSKTSTTVDLRITSPTTEDTATYFCAREPEYGYDEYGDWVSDLWGPGTLVTVSSASTKGPSVFPLAPSSKSTSGGTAALGCLVKDYFPEPVTVSWNSGALTSGVHTFPAVLQSSGLYSLSSVVTVPSSSLGTQTYICNVNHKPSNTKVDARVEPKSCDKTHTCPPCPAPELLGGPSVFLFPPKPKDTLMISRTPEVTCVVVDVSHEDPEVKFNWYVDGVEVHNAKTKPREEQYASTYRVVSVLTVLHQDWLNGKEYKCKVSNKALPAPIEKTISKAKGQPREPQVYTLPPSREEMTKNQVSLTCLVKGFYPSDIAVEWESNGQPENNYKTTPPVLDSDGSFFLYSKLTVDKSRWQQGNVFSCSVMHEALHNHYTQKSLSLSPGK

SEQ ID NO: 3837 - protein, 440 aa, Artificial Sequence
  source: /note="Description of Artificial Sequence: Synthetic polypeptide"
QSVKESGGRLVTPGTPLTLTCTVSGFSLSNYDMIWVRQAPGKGLESIGMIYDDGDTYYASWAKGRFTISKTSTTVDLKIISPTTEDTATYFCVKGVSNHWGPGTLVTVSSASTKGPSVFPLAPSSKSTSGGTAALGCLVKDYFPEPVTVSWNSGALTSGVHTFPAVLQSSGLYSLSSVVTVPSSSLGTQTYICNVNHKPSNTKVDARVEPKSCDKTHTCPPCPAPELLGGPSVFLFPPKPKDTLMISRTPEVTCVVVDVSHEDPEVKFNWYVDGVEVHNAKTKPREEQYASTYRVVSVLTVLHQDWLNGKEYKCKVSNKALPAPIEKTISKAKGQPREPQVYTLPPSREEMTKNQVSLTCLVKGFYPSDIAVEWESNGQPENNYKTTPPVLDSDGSFFLYSKLTVDKSRWQQGNVFSCSVMHEALHNHYTQKSLSLSPGK

SEQ ID NO: 3838 - protein, 117 aa, Artificial Sequence
  source: /note="Description of Artificial Sequence: Synthetic polypeptide"
QVQLVQSGAELKKPGASVKVSCKASGYSFTSYYIHWVKQAPGQGLEWIGWIYPGSGNTKYSEKFKGRATLTADTSTSTAYMELRSLRSDDTAVYFCARDGCYGFAYWGQGTLVTVSS

SEQ ID NO: 3839 - protein, 117 aa, Artificial Sequence
  source: /note="Description of Artificial Sequence: Synthetic polypeptide"
QVQLVQSGAEVKKPGASVKVSCKASGYSFTSYYIHWVRQAPGQGLEWIGWIYPGSGNTKYSEKFKGRATLTADTSTSTAYMELRSLRSDDTAVYFCARDGCYGFAYWGQGTLVTVSS

SEQ ID NO: 3840 - protein, 117 aa, Artificial Sequence
  source: /note="Description of Artificial Sequence: Synthetic polypeptide"
QVQLVQSGAEVKKPGASVKVSCKASGYTFTSYYIHWVRQAPGQGLEWMGWIYPGSGNTKYSEKFKGRATMTADTSTSTAYMELRSLRSDDTAVYYCARDGCYGFAYWGQGTLVTVSS

SEQ ID NO: 3841 - protein, 117 aa, Artificial Sequence
  source: /note="Description of Artificial Sequence: Synthetic polypeptide"
QVQLVQSGAEVKKPGASVKVSCKASGYSFTSYYIHWVRQAPGQGLEWIGWIYPGSGNTKYSEKFKGRATLTADTSTSTAYMELRSLRSDDTAVYFCARDGSYGFAYWGQGTLVTVSS

SEQ ID NO: 3842 - protein, 117 aa, Artificial Sequence
  source: /note="Description of Artificial Sequence: Synthetic polypeptide"
QVQLVQSGAEVKKPGASVKVSCKASGYTFTSYYIHWVRQAPGQGLEWMGWIYPGSGNTKYSEKFKGRATMTADTSTSTAYMELRSLRSDDTAVYYCARDGSYGFAYWGQGTLVTVSS

SEQ ID NO: 3843 - protein, 117 aa, Artificial Sequence
  source: /note="Description of Artificial Sequence: Synthetic polypeptide"
QVQLVQSGAEVKKPGASVKVSCKASGYSFTSYYIHWVRQAPGQGLEWMGWIYPGSGNTKYSEKFKGRVTMTTDTSTSTAYMELRSLRSDDTAVYYCARDGCYGFAYWGQGTLVTVSS

SEQ ID NO: 3844 - protein, 117 aa, Artificial Sequence
  source: /note="Description of Artificial Sequence: Synthetic polypeptide"
  MOD_RES (11)..(11): Any amino acid
  MOD_RES (28)..(28): Any amino acid
  MOD_RES (38)..(38): Any amino acid
  MOD_RES (48)..(48): Any amino acid
  MOD_RES (68)..(68): Any amino acid
  MOD_RES (70)..(70): Any amino acid
  MOD_RES (72)..(72): Any amino acid
  MOD_RES (95)..(95): Any amino acid
  MOD_RES (101)..(101): Any amino acid
QVQLVQSGAEXKKPGASVKVSCKASGYXFTSYYIHWVXQAPGQGLEWXGWIYPGSGNTKYSEKFKGRXTXTXDTSTSTAYMELRSLRSDDTAVYXCARDGXYGFAYWGQGTLVTVSS

SEQ ID NO: 3845 - protein, 115 aa, Artificial Sequence; identical to SEQ ID NO: 3811
  source: /note="Description of Artificial Sequence: Synthetic polypeptide"

SEQ ID NO: 3846 - protein, 115 aa, Artificial Sequence; identical to SEQ ID NO: 3814
  source: /note="Description of Artificial Sequence: Synthetic polypeptide"

SEQ ID NO: 3847 - protein, 117 aa, Artificial Sequence; identical to SEQ ID NO: 3844
  source: /note="Description of Artificial Sequence: Synthetic polypeptide"
  MOD_RES (11)..(11): Any amino acid
  MOD_RES (28)..(28): Any amino acid
  MOD_RES (38)..(38): Any amino acid
  MOD_RES (48)..(48): Any amino acid
  MOD_RES (68)..(68): Any amino acid
  MOD_RES (70)..(70): Any amino acid
  MOD_RES (72)..(72): Any amino acid
  MOD_RES (95)..(95): Any amino acid
  MOD_RES (101)..(101): Any amino acid

SEQ ID NO: 3848 - protein, 447 aa, Artificial Sequence
  source: /note="Description of Artificial Sequence: Synthetic polypeptide"
QVQLVQSGAEVKKPGASVKVSCKASGYTFTSYYIHWVRQAPGQGLEWMGWIYPGSGNTKYSEKFKGRATMTADTSTSTAYMELRSLRSDDTAVYYCARDGCYGFAYWGQGTLVTVSSASTKGPSVFPLAPSSKSTSGGTAALGCLVKDYFPEPVTVSWNSGALTSGVHTFPAVLQSSGLYSLSSVVTVPSSSLGTQTYICNVNHKPSNTKVDKRVEPKSCDKTHTCPPCPAPELLGGPSVFLFPPKPKDTLMISRTPEVTCVVVDVSHEDPEVKFNWYVDGVEVHNVKTKPREEQYNSTYRVVSVLTVLHQDWLNGKEYKCKVSNKALPAPIEKTISKAKGQPREPQVYTLPPSREEMTKNQVSLTCLVKGFYPSDIAVEWESNGQPENNYKTTPPVLDSDGSFFLYSKLTVDKSRWQQGNVFSCSVMHEALHNHYTQKSLSLSPGK

SEQ ID NO: 3849 - protein, 447 aa, Artificial Sequence
  source: /note="Description of Artificial Sequence: Synthetic polypeptide"
QVQLVQSGAEVKKPGASVKVSCKASGYTFTSYYIHWVRQAPGQGLEWMGWIYPGSGNTKYSEKFKGRATMTADTSTSTAYMELRSLRSDDTAVYYCARDGCYGFAYWGQGTLVTVSSASTKGPSVFPLAPSSKSTSGGTAALGCLVKDYFPEPVTVSWNSGALTSGVHTFPAVLQSSGLYSLSSVVTVPSSSLGTQTYICNVNHKPSNTKVDKRVEPKSCDKTHTCPPCPAPELLGGPSVFLFPPKPKDTLMISRTPEVTCVVVDVSHEDPEVKFNWYVDGVEVHNAKTKPREEQYNSTYRVVSVLTVLHQDWLNGKEYKCKVSNKALPAPIEKTISKAKGQPREPQVYTLPPSREEMTKNQVSLTCLVKGFYPSDIAVEWESNGQPENNYKTTPPVLDSDGSFFLYSKLTVDKSRWQQGNVFSCSVMHEALHNHYTQKSLSLSPGK

SEQ ID NO: 3850 - protein, 116 aa, Artificial Sequence
  source: /note="Description of Artificial Sequence: Synthetic polypeptide"
  MOD_RES (74)..(74): Any amino acid
  MOD_RES (97)..(97): Any amino acid
EVQLVESGGGLVQPGGSLRLSCAASGFTFSNYGMSWVRQAPGKGLEWVASISSGGGSTYYPDNVKGRFTISRDXAKNSLYLQMNSLRAEDTAVYYCXRGGAGIDYWGQGTLVTVSS

SEQ ID NO: 3851 - protein, 446 aa, Artificial Sequence
  source: /note="Description of Artificial Sequence: Synthetic polypeptide"
EVQLVESGGGLVQPGGSLRLSCAASGFTFSNYGMSWVRQAPGKGLEWVASISSGGGSTYYPDNVKGRFTISRDDAKNSLYLQMNSLRAEDTAVYYCARGGAGIDYWGQGTLVTVSSASTKGPSVFPLAPSSKSTSGGTAALGCLVKDYFPEPVTVSWNSGALTSGVHTFPAVLQSSGLYSLSSVVTVPSSSLGTQTYICNVNHKPSNTKVDKRVEPKSCDKTHTCPPCPAPELLGGPSVFLFPPKPKDTLMISRTPEVTCVVVDVSHEDPEVKFNWYVDGVEVHNVKTKPREEQYNSTYRVVSVLTVLHQDWLNGKEYKCKVSNKALPAPIEKTISKAKGQPREPQVYTLPPSREEMTKNQVSLTCLVKGFYPSDIAVEWESNGQPENNYKTTPPVLDSDGSFFLYSKLTVDKSRWQQGNVFSCSVMHEALHNHYTQKSLSLSPGK

SEQ ID NO: 3852 - protein, 446 aa, Artificial Sequence; identical to SEQ ID NO: 3851
  source: /note="Description of Artificial Sequence: Synthetic polypeptide"

SEQ ID NO: 3853 - protein, 446 aa, Artificial Sequence
  source: /note="Description of Artificial Sequence: Synthetic polypeptide"
EVQLVESGGGLVQPGGSLRLSCAASGFTFSNYGMSWVRQAPGKGLEWVASISSGGGSTYYPDNVKGRFTISRDDAKNSLYLQMNSLRAEDTAVYYCARGGAGIDYWGQGTLVTVSSASTKGPSVFPLAPSSKSTSGGTAALGCLVKDYFPEPVTVSWNSGALTSGVHTFPAVLQSSGLYSLSSVVTVPSSSLGTQTYICNVNHKPSNTKVDKRVEPKSCDKTHTCPPCPAPELLGGPSVFLFPPKPKDTLMISRTPEVTCVVVDVSHEDPEVKFNWYVDGVEVHNAKTKPREEQYNSTYRVVSVLTVLHQDWLNGKEYKCKVSNKALPAPIEKTISKAKGQPREPQVYTLPPSREEMTKNQVSLTCLVKGFYPSDIAVEWESNGQPENNYKTTPPVLDSDGSFFLYSKLTVDKSRWQQGNVFSCSVMHEALHNHYTQKSLSLSPGK

SEQ ID NO: 3854 - protein, 115 aa, Artificial Sequence; identical to SEQ ID NO: 3810
  source: /note="Description of Artificial Sequence: Synthetic polypeptide"

SEQ ID NO: 3855 - protein, 115 aa, Artificial Sequence; identical to SEQ ID NO: 3812
  source: /note="Description of Artificial Sequence: Synthetic polypeptide"

SEQ ID NO: 3856 - protein, 115 aa, Artificial Sequence; identical to SEQ ID NO: 3813
  source: /note="Description of Artificial Sequence: Synthetic polypeptide"

SEQ ID NO: 3857 - protein, 226 aa, Artificial Sequence
  source: /note="Description of Artificial Sequence: Synthetic polypeptide"
AAQPAMAQSVEESGGRLVTPGTPLTLTCTVSGFSLSAYEVSWVRQAPGKGLEWIGIIYANGNTVYASWAKGRFTISKTSTKVDLRIPSPTTEDTATYFCARDIYTTTTNLWGPGTLVTVSSGQPKAPSVFPLAPCCGDTHSSTVTLGCLVKGYLPEPVTVTWNSGTLTNGVRTFPSVRQSSGLYSLSSVVSVTSSSQPVTCNVAHPATNTKVDKTVAPSTCSKTSC

SEQ ID NO: 3858 - protein, 251 aa, Artificial Sequence
  source: /note="Description of Artificial Sequence: Synthetic polypeptide"
AAQPAMAQLVEESGGRLVTPGTPLTLTCTVSGFSLSSYAMSWVRQAPGKGLEWIGVISSSGNTYYASWAKGRFTISKTSTTVDLKMTSLTTEDTATYFCARGVVSGRIDTGLTLWGPGTLVTVSSVSLSSPTLYPLVSCEGALTDGNLVAMGCLARDFLPSSITFSWSFKNNSEISSRTVRTFPVVKRGDKYMATSQVLVPSKDVLQGTEEYLVCKVQHDNSNRDLRVSFPGEPRGLPRDGEVDSELPTSV

SEQ ID NO: 3859 - protein, 218 aa, Artificial Sequence
  source: /note="Description of Artificial Sequence: Synthetic polypeptide"
AQAAELVMTQTPSSVSAAVGGTVTISCQSSESVYNNNYLSWYQQKPGQPPKRLIDSASTLDSGVPSRFKGSGSGAQFTLTISDLECDDAATYYCAGAYVNWMRIFGGGTEVVVKGDPVAPTVLIFPPSADLVATGTVTIVCVANKYFPDVTVTWEVDGTTQTTGIENSKTPQNSADCTYNLSSTLTLTSTQYNSHKEYTCKVTQGTTSVVQSFNRGDC

SEQ ID NO: 3860 - protein, 222 aa, Artificial Sequence
  source: /note="Description of Artificial Sequence: Synthetic polypeptide"
MAQSVEESGGRLVTPGTPLTLTCTASGFSLINYYMNWVRQAPGKGLEWIGLITGWADTYYANSAKGRFTISKTSSTTVDLKITSPTTDDTATYFCVRGGHTNIISLWGPGTLVTVSSGQPKAPSVFPLPPCCGDTPSSTVTLGCLVKGYLPEPVTVTWNSGTLTNGVRIFPSVRQSSGLYSLSSVVSVTSSSQPVTCNVAHPATNTKVDKTVAPSTCSKTSC

SEQ ID NO: 3861 - protein, 470 aa, Artificial Sequence
  source: /note="Description of Artificial Sequence: Synthetic polypeptide"
MKLWLNWIFLVTLLNGIQCEVKLVESGGGLVQPGGSLRLSCATSGFTFTDYYMSWVRQPPGKALEWLGFIRNKATGYTTEYSASVKGRFTISRDNSQSILYLQMNTLRAEDSATYYCARDFGSRWYFDVWGQGTLVTVSSASTKGPSVFPLAPSSKSTSGGTAALGCLVKDYFPEPVTVSWNSGALTSGVHTFPAVLQSSGLYSLSSVVTVPSSSLGTQTYICNVNHKPSNTKVDKKVEPKSCDKTHTCPPCPAPELLGGPSVFLFPPKPKDTLMISRTPEVTCVVVDVSHEDPEVKFNWYVDGVEVHNAKTKPREEQYNSTYRVVSVLTVLHQDWLNGKEYKCKVSNKALPAPIEKTISKAKGQPREPQVYTLPPSRDELTKNQVSLTCLVKGFYPSDIAVEWESNGQPENNYKTTPPVLDSDGSFFLYSKLTVDKSRWQQGNVFSCSVMHEALHNHYTQKSLSLSPGK

SEQ ID NO: 3862 - protein, 467 aa, Artificial Sequence
  source: /note="Description of Artificial Sequence: Synthetic polypeptide"
MRVLILLWLFTAFPGILSDVQLQESGPGLVKPSQSLSLTCTVTGYSITSDYAWNWIRQFPGNKLEWMGYISYSGSTIYNPSLKSRISITRDTSKNQFFLQLNSVTTEDTATYYCARFGNYGNTLNYWGQGTLVTVSSASTKGPSVFPLAPSSKSTSGGTAALGCLVKDYFPEPVTVSWNSGALTSGVHTFPAVLQSSGLYSLSSVVTVPSSSLGTQTYICNVNHKPSNTKVDKKVEPKSCDKTHTCPPCPAPELLGGPSVFLFPPKPKDTLMISRTPEVTCVVVDVSHEDPEVKFNWYVDGVEVHNAKTKPREEQYNSTYRVVSVLTVLHQDWLNGKEYKCKVSNKALPAPIEKTISKAKGQPREPQVYTLPPSRDELTKNQVSLTCLVKGFYPSDIAVEWESNGQPENNYKTTPPVLDSDGSFFLYSKLTVDKSRWQQGNVFSCSVMHEALHNHYTQKSLSLSPGK

SEQ ID NO: 3863 - protein, 470 aa, Artificial Sequence
  source: /note="Description of Artificial Sequence: Synthetic polypeptide"
MKLWLNWIFLVTLLNGIQCEVQLVESGGGLVQPGGSLRLSCAASGFTFTDYYMSWVRQAPGKGLEWVGFIRNKATGYTTEYSASVKGRFTISRDDSKNSLYLQMNSLKTEDTAVYYCARDFGSRWYFDVWGQGTLVTVSSASTKGPSVFPLAPSSKSTSGGTAALGCLVKDYFPEPVTVSWNSGALTSGVHTFPAVLQSSGLYSLSSVVTVPSSSLGTQTYICNVNHKPSNTKVDKKVEPKSCDKTHTCPPCPAPELLGGPSVFLFPPKPKDTLMISRTPEVTCVVVDVSHEDPEVKFNWYVDGVEVHNAKTKPREEQYNSTYRVVSVLTVLHQDWLNGKEYKCKVSNKALPAPIEKTISKAKGQPREPQVYTLPPSRDELTKNQVSLTCLVKGFYPSDIAVEWESNGQPENNYKTTPPVLDSDGSFFLYSKLTVDKSRWQQGNVFSCSVMHEALHNHYTQKSLSLSPGK

SEQ ID NO: 3864 - protein, 671 aa, Artificial Sequence
  source: /note="Description of Artificial Sequence: Synthetic polypeptide"
MRVLILLWLFTAFPGILSDVQLQESGPGLVKPSETLSLTCTVSGYSITSDYAWNWIRQPPGKGLEWIGYISYSGSTIYNPSLKSRVTISVDTSKNQFSLKLSSVTAADTAVYYCARFGNYGNTLNYWGQGTLVTVSSASTKGPSVFPLAPSSKSTSGGTAALGCLVKDYFPEPVTVSWNSGALTSGVHTFPAVLQSSGLYSLSSVVTVPSSSLGTQTYICNVNHKPSNTKVDKKVEPKSCDKTHTCPPCPAPELLGGPSVFLFPPKPKDTLMISRTPEVTCVVVDVSHEDPEVKFNWYVDGVEVHNAKTKPREEQYNSTYRVVSVLTVLHQDWLNGKEYKCKVSNKALPAPIEKTISKAKGQPREPQVYTLPPSRDELTKNQVSLTCLVKGFYPSDIAVEWESNGQPENNYKTTPPVLDSDGSFFLYSKLTVMDSQAQVLILLLLWVSGTCGDIVMTQSPLSLPVTPGEPASISCKSSQSLLNSRTRKNYLAWYLQKPGQSPQLLIYWASTRESGVPDRFSGSGSGTDFTLKISRVEAEDVGVYYCKQSYDLRTFGGGTKVEIKRTVAAPSVFIFPPSDEQLKSGTASVVCLLNNFYPREAKVQWKVDNALQSGNSQESVTEQDSKDSTYSLSSTLTLSKADYEKHKVYACEVTHQGLSSPVTKSFNRGEC

SEQ ID NO: 3865 - protein, 470 aa, Artificial Sequence
  source: /note="Description of Artificial Sequence: Synthetic polypeptide"
MKLWLNWIFLVTLLNGIQCEVQLLESGGGLVQPGGSLRLSCAASGFTFTDYYMSWVRQAPGKGLEWVSFIRNKATGYTTEYSASVKGRFTISRDNSKNTLYLQMNSLRAEDTAVYYCAKDFGSRWYFDVWGQGTLVTVSSASTKGPSVFPLAPSSKSTSGGTAALGCLVKDYFPEPVTVSWNSGALTSGVHTFPAVLQSSGLYSLSSVVTVPSSSLGTQTYICNVNHKPSNTKVDKKVEPKSCDKTHTCPPCPAPELLGGPSVFLFPPKPKDTLMISRTPEVTCVVVDVSHEDPEVKFNWYVDGVEVHNAKTKPREEQYNSTYRVVSVLTVLHQDWLNGKEYKCKVSNKALPAPIEKTISKAKGQPREPQVYTLPPSRDELTKNQVSLTCLVKGFYPSDIAVEWESNGQPENNYKTTPPVLDSDGSFFLYSKLTVDKSRWQQGNVFSCSVMHEALHNHYTQKSLSLSPGK

SEQ ID NO: 3866 - protein, 454 aa, Artificial Sequence
  source: /note="Description of Artificial Sequence: Synthetic polypeptide"
MKLWLNWIFLVTLLNGIQCQVTLKESGPVLVKPTETLTLTCTVSGFTFTDYYMSWIRQPPGKALEWLAFIRNKATGYTTEYSASVKGRLTISKDTSKSQVVLTMTNMDPVDTATYYCARDFGSRWYFDVWGQGTLVTVSSASTKGPSVFPLAPSSKSTSGGTAALGCLVKDYFPEPVTVSWNSGALTSGVHTFPAVLQSSGLYSLSSVVTVPSSSLGTQTYICNVNHKPSNTKVDKKVEPKSCDKTHTCPPCPAPELLGGPSVFLFPPKPKDVSHEDPEVKFNWYVDGVEVHNAKTKPREEQYNSTYRVVSVLTVLHQDWLNGKEYKCKVSNKALPAPIEKTISKAKGQPREPQVYTLPPSRDELTKNQVSLTCLVKGFYPSDIAVEWESNGQPENNYKTTPPVLDSDGSFFLYSKLTVDKSRWQQGNVFSCSVMHEALHNHYTQKSLSLSPGK

SEQ ID NO: 3867 - protein, 467 aa, Artificial Sequence
  source: /note="Description of Artificial Sequence: Synthetic polypeptide"
MRVLILLWLFTAFPGILSQVQLVQSGAEVKKPGASVKVSCKASGYSITSDYAWNWVRQAPGQRLEWMGYISYSGSTIYNPSLKSRVTITRDTSASTAYMELSSLRSEDMAVYYCARFGNYGNTLNYWGQGTLVTVSSASTKGPSVFPLAPSSKSTSGGTAALGCLVKDYFPEPVTVSWNSGALTSGVHTFPAVLQSSGLYSLSSVVTVPSSSLGTQTYICNVNHKPSNTKVDKKVEPKSCDKTHTCPPCPAPELLGGPSVFLFPPKPKDTLMISRTPEVTCVVVDVSHEDPEVKFNWYVDGVEVHNAKTKPREEQYNSTYRVVSVLTVLHQDWLNGKEYKCKVSNKALPAPIEKTISKAKGQPREPQVYTLPPSRDELTKNQVSLTCLVKGFYPSDIAVEWESNGQPENNYKTTPPVLDSDGSFFLYSKLTVDKSRWQQGNVFSCSVMHEALHNHYTQKSLSLSPGK

SEQ ID NO: 3868 - protein, 431 aa, Artificial Sequence
  source: /note="Description of Artificial Sequence: Synthetic polypeptide"
MRVLILLWLFTAFPGILSDVQLQESGPGLVKPSQSLSLTCTVTGYSITSDYAWNWIRQFPGNKLEWMGYISYSGSTIYNPSLKSRISITRDTSKNQFFLQLNSVTTEDTATYYCARFGNYGNTLNYWGQGTSVTVSSAKTTPPSVYPLAPGCGDTTGSSVTLGCLVKGYFPESVTVTWNSGSLSSSVHTFPALLQSGLYTMSSSVTVPSSTWPSQTVTCSVAHPASSTTVDKKLEPSGPISTINPCPPCKECHKCPAPNLEGGPSVFIFPPNIKDLMISLTPKVTCVVVDVSEDDPDVQISWFVNNVEVHTAQTQTHREDYNSTIRVVSTLPIQHQDWMSGKEFKCKVNNKDLPSPIERTISKIKGLVRAPQVYILPPPAEQLSRKDVSLTCLVVGFNPGDISVEWTSNGHTEENYKDTAPVLDSDGSYFI

SEQ ID NO: 3869 - protein, 476 aa, Artificial Sequence
  source: /note="Description of Artificial Sequence: Synthetic polypeptide"
MKLWLNWIFLVTLLNGIQCEVKLVESGGGLVQPGGSLRLSCATSGFTFTDYYMSWVRQPPGKALEWLGFIRNKATGYTTEYSASVKGRFTISRDNSQSILYLQMNTLRAEDSATYYCARDFGSRWYFDVWGAGTTVTVSSAKTTPPSVYPLAPGCGDTTGSSVTLGCLVKGYFPESVTVTWNSGSLSSSVHTFPALLQSGLYTMSSSVTVPSSTWPSQTVTCSVAHPASSTTVDKKLEPSGPISTINPCPPCKECHKCPAPNLEGGPSVFIFPPNIKDVLMISLTPKVTCVVVDVSEDDPDVQISWFVNNVEVHTAQTQTHREDYNSTIRVVSTLPIQHQDWMSGKEFKCKVNNKDLPSPIERTISKIKGLVRAPQVYILPPPAEQLSRKDVSLTCLVVGFNPGDISVEWTSNGHTEENYKDTAPVLDSDGSYFIYSKLNMKTSKWEKTDSFSCNVRHEGLKNYYLKKTISRSPGK

SEQ ID NO: 3870 - protein, 462 aa, Artificial Sequence
  source: /note="Description of Artificial Sequence: Synthetic polypeptide"
MGWSCIILFLVATATGVHSQVQLVQSGAEVKKPGASVKVSCKASGYTFTSYWMHWVRQAPGQGLEWIGNINPSNGGTNYNEKFKSRATMTRDTSTSTAYMELSSLRSEDTAVYYCELGQGYWGQGTLVTVSSASTKGPSVFPLAPSSKSTSGGTAALGCLVKDYFPEPVTVSWNSGALTSGVHTFPAVLQSSGLYSLSSVVTVPSSSLGTQTYICNVNHKPSNTKVDKKVEPKSCDKTHTCPPCPAPELAGAPSVFLFPPKPKDTLMISRTPEVTCVVVDVSHEDPEVKFNWYVDGVEVHNAKTKPREEQYNSTYRVVSVLTVLHQDWLNGKEYKCKVSNKALPAPIEKTISKAKGQPREPQVYTLPPSRDELTKNQVSLTCLVKGFYPSDIAVEWESNGQPENNYKTTPPVLDSDGSFFLYSKLTVDKSRWQQGNVFSCSVMHEALHNHYTQKSLSLSPGK

SEQ ID NO: 3871 - protein, 462 aa, Artificial Sequence
  source: /note="Description of Artificial Sequence: Synthetic polypeptide"
MGWSCIILFLVATATGVHSQVQLVQSGAEVKKPGASVKVSCKASGYTFTSYWMHWVKQRPGQGLEWIGNINPSNGGTNYNEKFKSKATLTVDKSTSTAYMELSSLRSEDTAVYYCELGQGYWGQGTLVTVSSASTKGPSVFPLAPSSKSTSGGTAALGCLVKDYFPEPVTVSWNSGALTSGVHTFPAVLQSSGLYSLSSVVTVPSSSLGTQTYICNVNHKPSNTKVDKKVEPKSCDKTHTCPPCPAPELAGAPSVFLFPPKPKDTLMISRTPEVTCVVVDVSHEDPEVKFNWYVDGVEVHNAKTKPREEQYNSTYRVVSVLTVLHQDWLNGKEYKCKVSNKALPAPIEKTISKAKGQPREPQVYTLPPSRDELTKNQVSLTCLVKGFYPSDIAVEWESNGQPENNYKTTPPVLDSDGSFFLYSKLTVDKSRWQQGNVFSCSVMHEALHNHYTQKSLSLSPGK

SEQ ID NO: 3872 - protein, 462 aa, Artificial Sequence
  source: /note="Description of Artificial Sequence: Synthetic polypeptide"
MGWSCIILFLVATATGVHSQVQLVQSGAEVVKPGASVKLSCKASGYTFTSYWMHWVKQRPGQGLEWIGNINPSNGGTNYNEKFKSKATLTVDKSSSTAYMELSSLRSEDSAVYYCELGQGYWGQGTLVTVSSASTKGPSVFPLAPSSKSTSGGTAALGCLVKDYFPEPVTVSWNSGALTSGVHTFPAVLQSSGLYSLSSVVTVPSSSLGTQTYICNVNHKPSNTKVDKKVEPKSCDKTHTCPPCPAPELAGAPSVFLFPPKPKDTLMISRTPEVTCVVVDVSHEDPEVKFNWYVDGVEVHNAKTKPREEQYNSTYRVVSVLTVLHQDWLNGKEYKCKVSNKALPAPIEKTISKAKGQPREPQVYTLPPSRDELTKNQVSLTCLVKGFYPSDIAVEWESNGQPENNYKTTPPVLDSDGSFFLYSKLTVDKSRWQQGNVFSCSVMHEALHNHYTQKSLSLSPGK

SEQ ID NO: 3873 - protein, 462 aa, Artificial Sequence
  source: /note="Description of Artificial Sequence: Synthetic polypeptide"
MGWSCIILFLVATATGVHSQVQLVQSGAEVKKPGASVKVSCKASGYTFTSYWMHWVRQRPGQGLEWIGNINPSNGGTNYNEKFKSRATMTRDTSTSTAYMELSSLRSEDTAVYYCELGQGYWGQGTLVTVSSASTKGPSVFPLAPSSKSTSGGTAALGCLVKDYFPEPVTVSWNSGALTSGVHTFPAVLQSSGLYSLSSVVTVPSSSLGTQTYICNVNHKPSNTKVDKKVEPKSCDKTHTCPPCPAPELAGAPSVFLFPPKPKDTLMISRTPEVTCVVVDVSHEDPEVKFNWYVDGVEVHNAKTKPREEQYNSTYRVVSVLTVLHQDWLNGKEYKCKVSNKALPAPIEKTISKAKGQPREPQVYTLPPSRDELTKNQVSLTCLVKGFYPSDIAVEWESNGQPENNYKTTPPVLDSDGSFFLYSKLTVDKSRWQQGNVFSCSVMHEALHNHYTQKSLSLSPGK

SEQ ID NO: 3874 - protein, 462 aa, Artificial Sequence
  source: /note="Description of Artificial Sequence: Synthetic polypeptide"
MGWSCIILFLVATATGVHSQVQLVQSGAEVKKPGASVKVSCKASGYTFTSYWMHWVRQAPGQGLEWIGNINPSNGGTNYNEKFKSKATMTRDTSTSTAYMELSSLRSEDTAVYYCELGQGYWGQGTLVTVSSASTKGPSVFPLAPSSKSTSGGTAALGCLVKDYFPEPVTVSWNSGALTSGVHTFPAVLQSSGLYSLSSVVTVPSSSLGTQTYICNVNHKPSNTKVDKKVEPKSCDKTHTCPPCPAPELAGAPSVFLFPPKPKDTLMISRTPEVTCVVVDVSHEDPEVKFNWYVDGVEVHNAKTKPREEQYNSTYRVVSVLTVLHQDWLNGKEYKCKVSNKALPAPIEKTISKAKGQPREPQVYTLPPSRDELTKNQVSLTCLVKGFYPSDIAVEWESNGQPENNYKTTPPVLDSDGSFFLYSKLTVDKSRWQQGNVFSCSVMHEALHNHYTQKSLSLSPGK

SEQ ID NO: 3875 - protein, 462 aa, Artificial Sequence
  source: /note="Description of Artificial Sequence: Synthetic polypeptide"
MGWSCIILFLVATATGVHSQVQLVQSGAEVKKPGASVKVSCKASGYTFTSYWMHWVRQRPGQGLEWIGNINPSNGGTNYNEKFKSKATMTRDTSTSTAYMELSSLRSEDTAVYYCELGQGYWGQGTLVTVSSASTKGPSVFPLAPSSKSTSGGTAALGCLVKDYFPEPVTVSWNSGALTSGVHTFPAVLQSSGLYSLSSVVTVPSSSLGTQTYICNVNHKPSNTKVDKKVEPKSCDKTHTCPPCPAPELAGAPSVFLFPPKPKDTLMISRTPEVTCVVVDVSHEDPEVKFNWYVDGVEVHNAKTKPREEQYNSTYRVVSVLTVLHQDWLNGKEYKCKVSNKALPAPIEKTISKAKGQPREPQVYTLPPSRDELTKNQVSLTCLVKGFYPSDIAVEWESNGQPENNYKTTPPVLDSDGSFFLYSKLTVDKSRWQQGNVFSCSVMHEALHNHYTQKSLSLSPGK

SEQ ID NO: 3876 - protein, 462 aa, Artificial Sequence
  source: /note="Description of Artificial Sequence: Synthetic polypeptide"
MGWSCIILFLVATATGVHSQVQLVQSGAEVKKPGASVKVSCKASGYTFTSYWMHWVRQRPGQGLEWMGNINPSNGGTNYNEKFKSRVTMTRDTSTSTAYMELSSLRSEDTAVYYCELGQGYWGQGTLVTVSSASTKGPSVFPLAPSSKSTSGGTAALGCLVKDYFPEPVTVSWNSGALTSGVHTFPAVLQSSGLYSLSSVVTVPSSSLGTQTYICNVNHKPSNTKVDKKVEPKSCDKTHTCPPCPAPELAGAPSVFLFPPKPKDTLMISRTPEVTCVVVDVSHEDPEVKFNWYVDGVEVHNAKTKPREEQYNSTYRVVSVLTVLHQDWLNGKEYKCKVSNKALPAPIEKTISKAKGQPREPQVYTLPPSRDELTKNQVSLTCLVKGFYPSDIAVEWESNGQPENNYKTTPPVLDSDGSFFLYSKLTVDKSRWQQGNVFSCSVMHEALHNHYTQKSLSLSPGK

SEQ ID NO: 3877 - protein, 144 aa, Artificial Sequence
  source: /note="Description of Artificial Sequence: Synthetic polypeptide"
MKLPVRLLVLMFWIPASSSDVVMTQTPLSLPVSLGDQASISCRSSQSLVHSNGYTYLHWYLQRPGQSPKLLIYKVSNRFSGVPDRFSGSGSGTDFTLKISRVDAEDLGVYFCSQSTHVPYTFGGGTKLEIKRADAAPTVSISHH

SEQ ID NO: 3878 - protein, 114 aa, Artificial Sequence
  source: /note="Description of Artificial Sequence: Synthetic polypeptide"
  MOD_RES (3)..(3): Any amino acid
LQXSGAEIVMPGTAVTMSCKASGYTFTDFWMHWVKQRPGQGLEWIGAIDPSDSYSRINQKFKGKATLTVDESSSTAYMQLSSLTSEDSAVYYCARRITEAGAWFAYWGQGTTVT

SEQ ID NO: 3879 - protein, 122 aa, Artificial Sequence
  source: /note="Description of Artificial Sequence: Synthetic polypeptide"
NQVQLQQSGAELMQPGASVKISCKSTGYTFSNFWIEWVKQRPGHGLEWIGEILPGSDNTNYNEKFKGKATFTADTSSNTAYMQLSSLTSEDSAVYYCARKNRNYYGNYVVWGQGTLVTVSAC

SEQ ID NO: 3880 - protein, 122 aa, Artificial Sequence
  source: /note="Description of Artificial Sequence: Synthetic polypeptide"
NQVQLQQSGAELMQPGASVKISCKSTGYTFSNFWIEWVKQRPGHGLEWIGEILPGSDNTNYNEKFKGKATFTADTSSNTAYMQLSSLTSEDSAVYYCARKNRNYYGNYVVWGAGTTLTVSSC

SEQ ID NO: 3881 - protein, 126 aa, Artificial Sequence
  source: /note="Description of Artificial Sequence: Synthetic polypeptide"
NQVQLQQPGAELVKPGASVKLSCKASGYTFTSYWMHWVKQRPGQGLEWIGEIYPSNGRTNYNEKFKSKATLTVDKSSSTAYMQLSSLTSEDSAVYYCARKYYYGNSYRSWYFDVWGAGTTLTVSSC

SEQ ID NO: 3882 - protein, 130 aa, Artificial Sequence
  source: /note="Description of Artificial Sequence: Synthetic polypeptide"
NQVQLQESGPGLVKPSQTLSLTCTVSGGSISSGGYYWSWIRQHPGKGLEWIGYIYYSGSTNYNPSLKSRVTISVDTSKNQFSLKLSSVTAADTAVYYCTRDRDYDSTGDYYSYYGMDVWGQGTTVTVSSC

SEQ ID NO: 3883 - protein, 119 aa, Artificial Sequence
  source: /note="Description of Artificial Sequence: Synthetic polypeptide"
NQVQLQESGPGLVRPSETLSLTCTVSGGSISTYYWNWIRQPAGKGLEWIGRIYTSGSTNYNPSLKSRVTMSVDTSKNQFSLKLSSVTAADTAVYYCARDGGYSNPFDWGQGTLVTVSSC

SEQ ID NO: 3884 - protein, 129 aa, Artificial Sequence
  source: /note="Description of Artificial Sequence: Synthetic polypeptide"
NQVQLQESGPGLVKPSQTLSLTCTVSGGSISSGGYYWSWIRQHPEKGLEWIGYIFYSGRTYYNPSLKSRVTISVDTSKNQFSLKLNSVTAADTAVYYCARERIAAAGADYYYNGLDVWGQGTTVTVSSC

SEQ ID NO: 3885 - protein, 129 aa, Artificial Sequence
  source: /note="Description of Artificial Sequence: Synthetic polypeptide"
NQVQLQESGPGLVKPSQTLSLTCTVSGGSISSGYYYWSWIRQHPGKGLEWIGYIYYSGSTYYNPSLKSRLTISVDTSKNQFSLKLSSVTAADTAVYYCARERIAAAGTDYYYNGLAVWGQGTTVTVSSC

SEQ ID NO: 3886 - protein, 116 aa, Artificial Sequence; identical to SEQ ID NO: 3850
  source: /note="Description of Artificial Sequence: Synthetic polypeptide"
  MOD_RES (74)..(74): Any amino acid
  MOD_RES (97)..(97): Any amino acid

SEQ ID NO: 3887 - protein, 116 aa, Artificial Sequence
  source: /note="Description of Artificial Sequence: Synthetic polypeptide"
EVKLVESGGGLVKPGASLKLSCAASGFTFSNYGMSWVRQTSDKRLEWVASISSGGGSTYYPDNVKGRFTISREDAKNTLYLQMSSLRSEDTALYYCSRGGAGIDYWGQGTTLTVSS

SEQ ID NO: 3888 - protein, 326 aa, Artificial Sequence
  source: /note="Description of Artificial Sequence: Synthetic polypeptide"
ASTKGPSVFPLAPCSRSTSESTAALGCLVKDYFPEPVTVSWNSGALTSGVHTFPAVLQSSGLYSLSSVVTVPSSNFGTQTYTCNVDHKPSNTKVDKTVERKCCVECPPCPAPPVAGPSVFLFPPKPKDTLMISRTPEVTCVVVDVSHEDPEVQFNWYVDGVEVHNAKTKPREEQFNSTFRVVSVLTVVHQDWLNGKEYKCKVSNKGLPAPIEKTISKTKGQPREPQVYTLPPSREEMTKNQVSLTCLVKGFYPSDIAVEWESNGQPENNYKTTPPMLDSDGSFFLYSKLTVDKSRWQQGNVFSCSVMHEALHNHYTQKSLSLSPGK

SEQ ID NO: 3889 - protein, 330 aa, Artificial Sequence
  source: /note="Description of Artificial Sequence: Synthetic polypeptide"
ASTKGPSVFPLAPSSKSTSGGTAALGCLVKDYFPEPVTVSWNSGALTSGVHTFPAVLQSSGLYSLSSVVTVPSSSLGTQTYICNVNHKPSNTKVDKRVEPKSCDKTHTCPPCPAPELLGGPSVFLFPPKPKDTLMISRTPEVTCVVVDVSHEDPEVKFNWYVDGVEVHNAKTKPREEQYNSTYRVVSVLTVLHQDWLNGKEYKCKVSNKALPAPIEKTISKAKGQPREPQVYTLPPSRDELTKNQVSLTCLVKGFYPSDIAVEWESNGQPENNYKTTPPVLDSDGSFFLYSKLTVDKSRWQQGNVFSCSVMHEALHNHYTQKSLSLSPGK

SEQ ID NO: 3890 - protein, 330 aa, Artificial Sequence
  source: /note="Description of Artificial Sequence: Synthetic polypeptide"
ASTKGPSVFPLAPSSKSTSGGTAALGCLVKDYFPEPVTVSWNSGALTSGVHTFPAVLQSSGLYSLSSVVTVPSSSLGTQTYICNVNHKPSNTKVDKRVEPKSCDKTHTCPPCPAPELLGGPSVFLFPPKPKDTLMISRTPEVTCVVVDVSHEDPEVKFNWYVDGVEVHNAKTKPREEQYNSTYRVVSVLTVLHQDWLNGKEYKCKVSNKALPAPIEKTISKAKGQPREPQVYTLPPSREEMTKNQVSLTCLVKGFYPSDIAVEWESNGQPENNYKTTPPVLDSDGSFFLYSKLTVDKSRWQQGNVFSCSVMHEALHNHYTQKSLSLSPGK

SEQ ID NO: 3891 - protein, 330 aa, Artificial Sequence; identical to SEQ ID NO: 3889
  source: /note="Description of Artificial Sequence: Synthetic polypeptide"

SEQ ID NO: 3892 - protein, 330 aa, Artificial Sequence; identical to SEQ ID NO: 3890
  source: /note="Description of Artificial Sequence: Synthetic polypeptide"

SEQ ID NO: 3893 - protein, 330 aa, Artificial Sequence; identical to SEQ ID NO: 3789
  source: /note="Description of Artificial Sequence: Synthetic polypeptide"

SEQ ID NO: 3894 - protein, 326 aa, Artificial Sequence; identical to SEQ ID NO: 3888
  source: /note="Description of Artificial Sequence: Synthetic polypeptide"

SEQ ID NO: 3895 - protein, 582 aa, Artificial Sequence [sequence omitted]

SEQ ID NO: 3896 - protein, 582 aa, Artificial Sequence [sequence omitted]

SEQ ID NO: 3897 - protein, 582 aa, Artificial Sequence [sequence omitted]

SEQ ID NO: 3898 - protein, 582 aa, Artificial Sequence
  source: /note="Description of Artificial Sequence: Synthetic polypeptide"
MECSWVMLFLLSGTAGVHCQVQLQQSGPELVKPGALVKISCKASGYTFTNYDIHWVKQRPGQGLEWIGWIYPGDGSTKYNEKFKGKATLTADKSSSTAYMHLSSLTSEKSAVYFCAREWAYWGQGTLVTVSAASTKGPSVFPLAPSSKSTSGGTAALGCLVKDYFPEPVTVSWNSGALTSGVHTFPAVLQSSGLYSLSSVVTVPSSSLGTQTYICNVNHKPSNTKVDKKVEPKSCDKTHTCPPCPAPELLGGPSVFLFPPKPKDTLMISRTPEVTCVVVDVSHEDPEVKFNWYVDGVEVHNAKTKPREEQYNSTYRVVRVLTVLHQDWLNGKEYKCKVSNKALPAPIEKTISKAKGQPREPQVYTLPPSRDELTKNQVSLTCLVKGFYPSDIAVEWESNGQPENNYKTTPPVLDSDGSFFLYSKLTVDKSRWQQGNVFSCSVMHEALHNHYTQKSLSLSPGKSSMHSDPARRGELSVCDSISEWVTAADKKTAVDMSGGTVTVLEKVPVSKGQLKQYFYETKCNPMGYTKEGCRGIDKRHWNSQCRTTQSYVRALTMDSKKRIGWRFIRIDTSCVCTLTIKR

SEQ ID NO: 3899 - protein, 460 aa, Artificial Sequence
  source: /note="Description of Artificial Sequence: Synthetic polypeptide"
MGWSCIILFLVATATGVHSQVQLVQSGAEVKKPGASVKVSCKASGYTFTSYWMHWVRQAPGQGLEWMGNINPSNGGTNYNEKFKSRVTMTRDTSTSTVYMELSSLRSEDTAVYYCELGQGYWGQGTLVTVSSASTKGPSVFPLAPSSKSTSGGTAALGCLVKDYFPEPVTVSWNSGALTSGVHTFPAVLQSSGLYSLSSWTVPSSSLGTQTYICNVNHKPSNTKVDKKVEPKSCDKTHTCPPCPAPELAGAPSVFLFPPKPKDTLMISRTPEVTCVWDVSHEDPEVKFNWYVDGVEVHNAKTKPREEQYNSTYRVVSVLTVLHQDWLNGKEYKCKVSNKALPAPIEKTISKAKGQPREPQVYTLPPSRDELTKNQVSLTCLVKGFYPSDIAVEWESNGQPENNYKTTPPVLDSDGSFFLYSKLTVDKSRWQQGNVFSCSVMHEALHNHYTQKSLSLSPGK

SEQ ID NO: 3900 - protein, 458 aa, Artificial Sequence
  source: /note="Description of Artificial Sequence: Synthetic polypeptide"
MGWSCIILFLVATATGVHSQVQLVQSGAEWKPGASVKLSCKASGYTFTSYWMHWVKQAPGQGLEWIGNINPSNGGTNYNEKFKSRATLTRDTSTSTAYMELSSLRSEDTAVYYCELGQGYWGQGTLVTVSSASTKGPSVFPLAPSSKSTSGGTAALGCLVKDYFPEPVTVSWNSGALTSGVHTFPAVLQSSGLYSLSSWTVPSSSLGTQTYICNVNHKPSNTKVDKKVEPKSCDKTHTCPPCPAPELAGAPSVFLFPPKPKDTLMISRTPEVTCVWDVSHEDPEVKFNWYVDGVEVHNAKTKPREEQYNSTYRWSVLTVLHQDWLNGKEYKCKVSNKALPAPIEKTISKAKGQPREPQVYTLPPSRDELTKNQVSLTCLVKGFYPSDIAVEWESNGQPENNYKTTPPVLDSDGSFFLYSKLTVDKSRWQQGNVFSCSVMHEALHNHYTQKSLSLSPGK

SEQ ID NO: 3901 - protein, 459 aa, Artificial Sequence
  source: /note="Description of Artificial Sequence: Synthetic polypeptide"
MGWSCIILFLVATATGVHSQVQLVQSGAEWKPGASVKLSCKASGYTFTSYWMHWVKQRPGQGLEWIGNINPSNGGTNYNEKFKSKATLTVDTSSSTAYMELSSLRSEDSAVYYCELGQGYWGQGTLVTVSSASTKGPSVFPLAPSSKSTSGGTAALGCLVKDYFPEPVTVSWNSGALTSGVHTFPAVLQSSGLYSLSSWTVPSSSLGTQTYICNVNHKPSNTKVDKKVEPKSCDKTHTCPPCPAPELAGAPSVFLFPPKPKDTLMISRTPEVTCVWDVSHEDPEVKFNWYVDGVEVHNAKTKPREEQYNSTYRVVSVLTVLHQDWLNGKEYKCKVSNKALPAPIEKTISKAKGQPREPQVYTLPPSRDELTKNQVSLTCLVKGFYPSDIAVEWESNGQPENNYKTTPPVLDSDGSFFLYSKLTVDKSRWQQGNVFSCSVMHEALHNHYTQKSLSLSPGK

SEQ ID NO: 3902 - protein, 459 aa, Artificial Sequence
  source: /note="Description of Artificial Sequence: Synthetic polypeptide"
MGWSCIILFLVATATGVHSQVQLVQSGAEVKKPGASVKVSCKASGYTFTSYWMHWVKQRPGQGLEWIGNINPSNGGTNYNEKFKSKATLTVDKSTSTAYMELSSLRSEDTAVYYCELGQGYWGQGTLVTVSSASTKGPSVFPLAPSSKSTSGGTAALGCLVKDYFPEPVTVSWNSGALTSGVHTFPAVLQSSGLYSLSSWTVPSSSLGTQTYICNVNHKPSNTKVDKKVEPKSCDKTHTCPPCPAPELAGAPSVFLFPPKPKDTLMISRTPEVTCVWDVSHEDPEVKFNWYVDGVEVHNAKTKPREEQYNSTYRWSVLTVLHQDWLNGKEYKCKVSNKALPAPIEKTISKAKGQPREPQVYTLPPSRDELTKNQVSLTCLVKGFYPSDIAVEWESNGQPENNYKTTPPVLDSDGSFFLYSKLTVDKSRWQQGNVFSCSVMHEALHNHYTQKSLSLSPGK

SEQ ID NO: 3903 - protein, 458 aa, Artificial Sequence
  source: /note="Description of Artificial Sequence: Synthetic polypeptide"
MGWSCIILFLVATATGVHSQVQLVQSGAEWKPGASVKLSCKASGYTFTSYWMHWVKQRPGQGLEWIGNINPSNGGTNYNEKFKSKATLTVDKSTSTAYMELSSLRSEDTAVYYCELGQGYWGQGTLVTVSSASTKGPSVFPLAPSSKSTSGGTAALGCLVKDYFPEPVTVSWNSGALTSGVHTFPAVLQSSGLYSLSSWTVPSSSLGTQTYICNVNHKPSNTKVDKKVEPKSCDKTHTCPPCPAPELAGAPSVFLFPPKPKDTLMISRTPEVTCVWDVSHEDPEVKFNWYVDGVEVHNAKTKPREEQYNSTYRWSVLTVLHQDWLNGKEYKCKVSNKALPAPIEKTISKAKGQPREPQVYTLPPSRDELTKNQVSLTCLVKGFYPSDIAVEWESNGQPENNYKTTPPVLDSDGSFFLYSKLTVDKSRWQQGNVFSCSVMHEALHNHYTQKSLSLSPGK

SEQ ID NO: 3904 - protein, 458 aa, Artificial Sequence
  source: /note="Description of Artificial Sequence: Synthetic polypeptide"
MGWSCIILFLVATATGVHSQVQLVQSGAEWKPGASVKLSCKASGYTFTSYWMHWVKQRPGQGLEWIGNINPSNGGTNYNEKFKSKATLTVDKSSSTAYMELSSLRSEDSAVYYCELGQGYWGQGTLVTVSSASTKGPSVFPLAPSSKSTSGGTAALGCLVKDYFPEPVTVSWNSGALTSGVHTFPAVLQSSGLYSLSSWTVPSSSLGTQTYICNVNHKPSNTKVDKKVEPKSCDKTHTCPPCPAPELAGAPSVFLFPPKPKDTLMISRTPEVTCVWDVSHEDPEVKFNWYVDGVEVHNAKTKPREEQYNSTYRWSVLTVLHQDWLNGKEYKCKVSNKALPAPIEKTISKAKGQPREPQVYTLPPSRDELTKNQVSLTCLVKGFYPSDIAVEWESNGQPENNYKTTPPVLDSDGSFFLYSKLTVDKSRWQQGNVFSCSVMHEALHNHYTQKSLSLSPGK

SEQ ID NO: 3905 - protein, 460 aa, Artificial Sequence
  source: /note="Description of Artificial Sequence: Synthetic polypeptide"
MGWSCIILFLVATATGVHSQVQLVQSGAEVKKPGASVKVSCKASGYTFTSYWMHWVRQRPGQGLEWIGNINPSNGGTNYNEKFKSRATMTRDTSTSTAYMELSSLRSEDTAVYYCELGQGYWGQGTLVTVSSASTKGPSVFPLAPSSKSTSGGTAALGCLVKDYFPEPVTVSWNSGALTSGVHTFPAVLQSSGLYSLSSWTVPSSSLGTQTYICNVNHKPSNTKVDKKVEPKSCDKTHTCPPCPAPELAGAPSVFLFPPKPKDTLMISRTPEVTCVWDVSHEDPEVKFNWYVDGVEVHNAKTKPREEQYNSTYRVVSVLTVLHQDWLNGKEYKCKVSNKALPAPIEKTISKAKGQPREPQVYTLPPSRDELTKNQVSLTCLVKGFYPSDIAVEWESNGQPENNYKTTPPVLDSDGSFFLYSKLTVDKSRWQQGNVFSCSVMHEALHNHYTQKSLSLSPGK

SEQ ID NO: 3906 - protein, 459 aa, Artificial Sequence
  source: /note="Description of Artificial Sequence: Synthetic polypeptide"
MGWSCIILFLVATATGVHSQVQLVQSGAEVKKPGASVKVSCKASGYTFTSYWMHWVRQAPGQGLEWIGNINPSNGGTNYNEKFKSKATMTRDTSTSTAYMELSSLRSEDTAVYYCELGQGYWGQGTLVTVSSASTKGPSVFPLAPSSKSTSGGTAALGCLVKDYFPEPVTVSWNSGALTSGVHTFPAVLQSSGLYSLSSWTVPSSSLGTQTYICNVNHKPSNTKVDKKVEPKSCDKTHTCPPCPAPELAGAPSVFLFPPKPKDTLMISRTPEVTCVWDVSHEDPEVKFNWYVDGVEVHNAKTKPREEQYNSTYRWSVLTVLHQDWLNGKEYKCKVSNKALPAPIEKTISKAKGQPREPQVYTLPPSRDELTKNQVSLTCLVKGFYPSDIAVEWESNGQPENNYKTTPPVLDSDGSFFLYSKLTVDKSRWQQGNVFSCSVMHEALHNHYTQKSLSLSPGK

SEQ ID NO: 3907 - protein, 460 aa, Artificial Sequence
  source: /note="Description of Artificial Sequence: Synthetic polypeptide"
MGWSCIILFLVATATGVHSQVQLVQSGAEVKKPGASVKVSCKASGYTFTSYWMHWVRQRPGQGLEWIGNINPSNGGTNYNEKFKSKATMTRDTSTSTAYMELSSLRSEDTAVYYCELGQGYWGQGTLVTVSSASTKGPSVFPLAPSSKSTSGGTAALGCLVKDYFPEPVTVSWNSGALTSGVHTFPAVLQSSGLYSLSSWTVPSSSLGTQTYICNVNHKPSNTKVDKKVEPKSCDKTHTCPPCPAPELAGAPSVFLFPPKPKDTLMISRTPEVTCVWDVSHEDPEVKFNWYVDGVEVHNAKTKPREEQYNSTYRVVSVLTVLHQDWLNGKEYKCKVSNKALPAPIEKTISKAKGQPREPQVYTLPPSRDELTKNQVSLTCLVKGFYPSDIAVEWESNGQPENNYKTTPPVLDSDGSFFLYSKLTVDKSRWQQGNVFSCSVMHEALHNHYTQKSLSLSPGK

SEQ ID NO: 3908 - protein, 460 aa, Artificial Sequence
  source: /note="Description of Artificial Sequence: Synthetic polypeptide"
MGWSCIILFLVATATGVHSQVQLVQSGAEVKKPGASVKVSCKASGYTFTSYWMHWVKQRPGQGLEWIGNINPSNGGTNYNEKFKSKATMTRDTSTSTAYMELSSLRSEDTAVYYCELGQGYWGQGTLVTVSSASTKGPSVFPLAPSSKSTSGGTAALGCLVKDYFPEPVTVSWNSGALTSGVHTFPAVLQSSGLYSLSSWTVPSSSLGTQTYICNVNHKPSNTKVDKKVEPKSCDKTHTCPPCPAPELAGAPSVFLFPPKPKDTLMISRTPEVTCVWDVSHEDPEVKFNWYVDGVEVHNAKTKPREEQYNSTYRVVSVLTVLHQDWLNGKEYKCKVSNKALPAPIEKTISKAKGQPREPQVYTLPPSRDELTKNQVSLTCLVKGFYPSDIAVEWESNGQPENNYKTTPPVLDSDGSFFLYSKLTVDKSRWQQGNVFSCSVMHEALHNHYTQKSLSLSPGK

SEQ ID NO: 3909 - protein, 459 aa, Artificial Sequence
  source: /note="Description of Artificial Sequence: Synthetic polypeptide"
MGWSCIILFLVATATGVHSQVQLVQSGAEVKKPGASVKVSCKASGYTFTSYWMHWVKQRPGQGLEWIGNINPSNGGTNYNEKFKSKATMTVDTSTSTAYMELSSLRSEDTAVYYCELGQGYWGQGTLVTVSSASTKGPSVFPLAPSSKSTSGGTAALGCLVKDYFPEPVTVSWNSGALTSGVHTFPAVLQSSGLYSLSSWTVPSSSLGTQTYICNVNHKPSNTKVDKKVEPKSCDKTHTCPPCPAPELAGAPSVFLFPPKPKDTLMISRTPEVTCVWDVSHEDPEVKFNWYVDGVEVHNAKTKPREEQYNSTYRWSVLTVLHQDWLNGKEYKCKVSNKALPAPIEKTISKAKGQPREPQVYTLPPSRDELTKNQVSLTCLVKGFYPSDIAVEWESNGQPENNYKTTPPVLDSDGSFFLYSKLTVDKSRWQQGNVFSCSVMHEALHNHYTQKSLSLSPGK

SEQ ID NO: 3910 - protein, 459 aa, Artificial Sequence
  source: /note="Description of Artificial Sequence: Synthetic polypeptide"
MGWSCIILFLVATATGVHSQVQLVQSGAEVKKPGASVKVSCKASGYTFTSYWMHWVKQRPGQGLEWIGNINPSNGGTNYNEKFKSKATLTVDTSTSTAYMELSSLRSEDTAVYYCELGQGYWGQGTLVTVSSASTKGPSVFPLAPSSKSTSGGTAALGCLVKDYFPEPVTVSWNSGALTSGVHTFPAVLQSSGLYSLSSWTVPSSSLGTQTYICNVNHKPSNTKVDKKVEPKSCDKTHTCPPCPAPELAGAPSVFLFPPKPKDTLMISRTPEVTCVWDVSHEDPEVKFNWYVDGVEVHNAKTKPREEQYNSTYRWSVLTVLHQDWLNGKEYKCKVSNKALPAPIEKTISKAKGQPREPQVYTLPPSRDELTKNQVSLTCLVKGFYPSDIAVEWESNGQPENNYKTTPPVLDSDGSFFLYSKLTVDKSRWQQGNVFSCSVMHEALHNHYTQKSLSLSPGK

SEQ ID NO: 3911 - protein, 460 aa, Artificial Sequence
  source: /note="Description of Artificial Sequence: Synthetic polypeptide"
MGWSCIILFLVATATGVHSQVQLVQSGAEVKKPGASVKVSCKASGYTFTSYWMHWVRQRPGQGLEWMGNINPSNGGTNYNEKFKSRVTMTRDTSTSTAYMELSSLRSEDTAVYYCELGQGYWGQGTLVTVSSASTKGPSVFPLAPSSKSTSGGTAALGCLVKDYFPEPVTVSWNSGALTSGVHTFPAVLQSSGLYSLSSWTVPSSSLGTQTYICNVNHKPSNTKVDKKVEPKSCDKTHTCPPCPAPELAGAPSVFLFPPKPKDTLMISRTPEVTCVWDVSHEDPEVKFNWYVDGVEVHNAKTKPREEQYNSTYRVVSVLTVLHQDWLNGKEYKCKVSNKALPAPIEKTISKAKGQPREPQVYTLPPSRDELTKNQVSLTCLVKGFYPSDIAVEWESNGQPENNYKTTPPVLDSDGSFFLYSKLTVDKSRWQQGNVFSCSVMHEALHNHYTQKSLSLSPGK

SEQ ID NO: 3912 - protein, 460 aa, Artificial Sequence
  source: /note="Description of Artificial Sequence: Synthetic polypeptide"
MGWSCIILFLVATATGVHSQVQLVQSGAEVKKPGASVKVSCKASGYTFTSYWMHWVRQAPGQGLEWMGNINPSNGGTNYNEKFKSRVTMTRDTSTSTAYMELSSLRSEDTAVYYCELGQGYWGQGTLVTVSSASTKGPSVFPLAPSSKSTSGGTAALGCLVKDYFPEPVTVSWNSGALTSGVHTFPAVLQSSGLYSLSSWTVPSSSLGTQTYICNVNHKPSNTKVDKKVEPKSCDKTHTCPPCPAPELAGAPSVFLFPPKPKDTLMISRTPEVTCVWDVSHEDPEVKFNWYVDGVEVHNAKTKPREEQYNSTYRVVSVLTVLHQDWLNGKEYKCKVSNKALPAPIEKTISKAKGQPREPQVYTLPPSRDELTKNQVSLTCLVKGFYPSDIAVEWESNGQPENNYKTTPPVLDSDGSFFLYSKLTVDKSRWQQGNVFSCSVMHEALHNHYTQKSLSLSPGK

SEQ ID NO: 3913 - protein, 460 aa, Artificial Sequence
  source: /note="Description of Artificial Sequence: Synthetic polypeptide"
MGWSCIILFLVATATGVHSQVQLVQSGAEVKKPGASVKVSCKASGYTFTSYWMHWVRQAPGQGLEWIGNINPSNGGTNYNEKFKSRATMTRDTSTSTAYMELSSLRSEDTAVYYCELGQGYWGQGTLVTVSSASTKGPSVFPLAPSSKSTSGGTAALGCLVKDYFPEPVTVSWNSGALTSGVHTFPAVLQSSGLYSLSSWTVPSSSLGTQTYICNVNHKPSNTKVDKKVEPKSCDKTHTCPPCPAPELAGAPSVFLFPPKPKDTLMISRTPEVTCVWDVSHEDPEVKFNWYVDGVEVHNAKTKPREEQYNSTYRVVSVLTVLHQDWLNGKEYKCKVSNKALPAPIEKTISKAKGQPREPQVYTLPPSRDELTKNQVSLTCLVKGFYPSDIAVEWESNGQPENNYKTTPPVLDSDGSFFLYSKLTVDKSRWQQGNVFSCSVMHEALHNHYTQKSLSLSPGK

SEQ ID NO: 3914 - protein, 459 aa, Artificial Sequence
  source: /note="Description of Artificial Sequence: Synthetic polypeptide"
MGWSCIILFLVATATGVHSQVQLVQSGAEVKKPGASVKVSCKASGYTFTSYWMHWVRQAPGQGLEWIGNINPSNGGTNYNEKFKSRATLTVDKSTSTAYMELSSLRSEDTAVYYCELGQGYWGQGTLVTVSSASTKGPSVFPLAPSSKSTSGGTAALGCLVKDYFPEPVTVSWNSGALTSGVHTFPAVLQSSGLYSLSSWTVPSSSLGTQTYICNVNHKPSNTKVDKKVEPKSCDKTHTCPPCPAPELAGAPSVFLFPPKPKDTLMISRTPEVTCVWDVSHEDPEVKFNWYVDGVEVHNAKTKPREEQYNSTYRWSVLTVLHQDWLNGKEYKCKVSNKALPAPIEKTISKAKGQPREPQVYTLPPSRDELTKNQVSLTCLVKGFYPSDIAVEWESNGQPENNYKTTPPVLDSDGSFFLYSKLTVDKSRWQQGNVFSCSVMHEALHNHYTQKSLSLSPGK

SEQ ID NO: 3915 - protein, 441 aa, Artificial Sequence
  source: /note="Description of Artificial Sequence: Synthetic polypeptide"
EVQLVESGGGLVQPGGSLRLSCAASGFTFSNYWMSWVRQAPGKGLEWVATIKQDGSQKNYVDSVKGRFTISRDNAKNSLYLRLNSLRAEDTAVYYCATELFDLWGRGSLVTVSSASTKGPSVFPLAPCSRSTSESTAALGCLVKDYFPEPVTVSWNSGALTSGVHTFPAVLQSSGLYSLSSVVTVPSSSLGTKTYTCNVDHKPSNTKVDKRVESKYGPPCPSCPAPEFLGGPSVFLFPPKPKDTLMISRTPEVTCVVVDVSQEDPEVQFNWYVDGVEVHNAKTKPREEQFNSTYRVVSVLTVLHQDWLNGKEYKCKVSNKGLPSSIEKTISKAKGQPREPQVYTLPPSQEEMTKNQVSLTCLVKGFYPSDIAVEWESNGQPENNYKTTPPVLDSDGSFFLYSRLTVDKSRWQEGNVFSCSVMHEALHNHYTQKSLSLSLGK

SEQ ID NO: 3916 - protein, 113 aa, Artificial Sequence
  source: /note="Description of Artificial Sequence: Synthetic polypeptide"
EVQLVESGGGLVEPGGSLRLSCAVSGFDFEKAWMSWVRQAPGQGLQWVARIKSTADGGTTSYAAPVEGRFIISRDDSRNMLYLQMNSLKTEDTAVYYCTSAHWGQGTLVTVSS

SEQ ID NO: 3917 - protein, 123 aa, Artificial Sequence
  source: /note="Description of Artificial Sequence: Synthetic polypeptide"
EVQLVESGGGVVQPGRSLRLSCAASGFTFSTYAISWVRQAPGKGLEWVAIISNDGSRKYYADSVKGRFTISRDNSRDTLDLEMNSLRDEDTAVYYCAKKRGTYASRCKAFDFWGQGTLVTVSS

SEQ ID NO: 3918 - protein, 123 aa, Artificial Sequence
  source: /note="Description of Artificial Sequence: Synthetic polypeptide"
QVQLVESGGGVVQPGRSLRLSCAASGFTFSTYAISWVRQAPGKGLEWVAIISNDGSRKYYADSVKGRFTISRDNSRDTLDLEMNSLRDEDTAVYYCAKKRGTYASRCKAFDFWGQGTLVTVSS

SEQ ID NO: 3919 - protein, 121 aa, Artificial Sequence
  source: /note="Description of Artificial Sequence: Synthetic polypeptide"
EVQLVQSGAEVKKPGASVRLSCRASGYNFIDFHIHWVRQAPGEGLEWMGWSNPQSGNSSSAQRFQGRVTMTTDTSMSAAYMDLNWLTLDDTAVYYCTRPHDGAGNYRFDTWGQGTLVTVSS

SEQ ID NO: 3920 - protein, 121 aa, Artificial Sequence
  source: /note="Description of Artificial Sequence: Synthetic polypeptide"
QVQLVQSGAEVKKPGASVRLSCRASGYNFIDFHIHWVRQAPGEGLEWMGWSNPQSGNSSSAQRFQGRVTMTTDTSMSAAYMDLNWLTLDDTAVYYCTRPHDGAGNYRFDTWGQGTLVTVSS

SEQ ID NO: 3921 - protein, 113 aa, Artificial Sequence
  source: /note="Description of Artificial Sequence: Synthetic polypeptide"
EVQLVQSGGGLVEPGGSLRLSCAVSGFDFEKAWMSWVRQAPGQGLQWVARIKSTADGGTTSYAAPVEGRFIISRDDSRNMLYLQMNSLKTEDTAVYYCTSAHWGQGTLVTVSS

SEQ ID NO: 3922 - protein, 116 aa, Artificial Sequence
  source: /note="Description of Artificial Sequence: Synthetic polypeptide"
EVQLVESGGGLVQPGGSLRLSCAASGFTFSNYGMSWVRQAPGKGLEWVASISSGGGSTYYPDNVKGRFTISRDDAKNSLYLQMNSLRAEDTAVYYCARGGAGIDYWGQGTLVTVSS

SEQ ID NO: 3923 - protein, 116 aa, Artificial Sequence
  source: /note="Description of Artificial Sequence: Synthetic polypeptide"
EVQLVESGGGLVQPGGSLRLSCAASGFTFSNYGMSWVRQAPGKGLEWVASISSGGGSTYYPDNVKGRFTISRDNAKNSLYLQMNSLRAEDTAVYYCARGGAGIDYWGQGTLVTVSS

SEQ ID NO: 3924 - protein, 113 aa, Artificial Sequence
  source: /note="Description of Artificial Sequence: Synthetic polypeptide"
DIQMTQSPSSLSASVGDRVTITCKSIQTLLYSSNQKNYLAWFQQKPGKAPKLLIYWASIRKSGVPSRFSGSGSGTDFTLTISSLQPEDLATYYCQQYYSYPLTFGGGTKLEIK

SEQ ID NO: 3925 - protein, 116 aa, Artificial Sequence; identical to SEQ ID NO: 3887
  source: /note="Description of Artificial Sequence: Synthetic polypeptide"

SEQ ID NO: 3926 - protein, 116 aa, Artificial Sequence
  source: /note="Description of Artificial Sequence: Synthetic polypeptide"
EVQLVESGGGLVQPGGSLRLSCAASGFTFSSYWMSWVRQAPGKGLEWVANIKQDGSEKYYVDSVKGRFTISRDNAKNSLYLQMNSLRAEDTAVYYCARGSSDMDYWGQGTLVTVSS

SEQ ID NO: 3927 - protein, 116 aa, Artificial Sequence
  source: /note="Description of Artificial Sequence: Synthetic polypeptide"
EVQLVESGGGLVQPGGSLRLSCAASGFTFSNYGMSWVRQAPGKGLEWVASISSGGGSTYYPDNVKGRFTISRDDAKNSLYLQMNSLRAEDTAVYYCSRGGAGIDYWGQGTLVTVSS

SEQ ID NO: 3928 - protein, 116 aa, Artificial Sequence
  source: /note="Description of Artificial Sequence: Synthetic polypeptide"
EVQLVESGGGLVQPGGSLRLSCAASGFTFSNYGMSWVRQAPGKGLEWVASISSGGGSTYYPDNVKGRFTISRDNAKNSLYLQMNSLRAEDTAVYYCSRGGAGIDYWGQGTLVTVSS

SEQ ID NO: 3929 - protein, 135 aa, Artificial Sequence
  source: /note="Description of Artificial Sequence: Synthetic polypeptide"
MGWSWVFIFLLSGTAGVHCQVQLQQSGPELVKPGTSVKISCKASGYSFTSYYIHWVKQSPGQGLEWIGWIYPGSGNTKYSEKFKGKATLTADTSSSTAYMQLSSLTSEDSAVYFCARDGCYGFAYWGQGTLVTVS

SEQ ID NO: 3930 - protein, 115 aa, Artificial Sequence
  source: /note="Description of Artificial Sequence: Synthetic polypeptide"
VQLQQSGPELVKPGTSVKISCKASGYSFTSYYIHWVKQSPGQGLEWIGWIYPGSGNTKYSEKFKGKATLTADTSSSTAYMQLSSLTSEDSAVYFCARDGCYGFAYWGQGTLVTVS

SEQ ID NO: 3931 - protein, 116 aa, Artificial Sequence; identical to SEQ ID NO: 3922
  source: /note="Description of Artificial Sequence: Synthetic polypeptide"

SEQ ID NO: 3932 - protein, 116 aa, Artificial Sequence
  source: /note="Description of Artificial Sequence: Synthetic polypeptide"
VQLVQSGAEVKKPGASVKVSCKASGYSFTSYYIHWVRQAPGQGLEWIGWIYPGSGNTKYSEKFKGRATLTADTSTSTAYMELRSLRSDDTAVYFCARDGSYGFAYWGQGTLVTVSS

SEQ ID NO: 3933 - protein, 116 aa, Artificial Sequence; identical to SEQ ID NO: 3923
  source: /note="Description of Artificial Sequence: Synthetic polypeptide"

SEQ ID NO: 3934 - protein, 117 aa, Artificial Sequence; identical to SEQ ID NO: 3842
  source: /note="Description of Artificial Sequence: Synthetic polypeptide"

SEQ ID NO: 3935 - protein, 107 aa, Artificial Sequence
  source: /note="Description of Artificial Sequence: Synthetic polypeptide"
DIQMTQSPSSLSASVGDRVTITCRASQSISSYLNWYQQKPGKAPKLLIYAASSLQSGVPSRFSGSGSGTDFTLTISSLQPEDFATYYCQQSYSTPLTFGGGTKLEIK

SEQ ID NO: 3936 - protein, 115 aa, Artificial Sequence
  source: /note="Description of Artificial Sequence: Synthetic polypeptide"
QVQLQQSGAELAKPGTSVQMSCKASGYTFTNYWMNWIKARPGQGLEWIGATNPNNGYTDYNQRFKDKAILTADKSSNTAYMHLSSLTSEDSAVYFCASGGHLAYWGQGTVVTVSA

SEQ ID NO: 3937 - protein, 116 aa, Artificial Sequence; identical to SEQ ID NO: 3926
  source: /note="Description of Artificial Sequence: Synthetic polypeptide"

SEQ ID NO: 3938 - protein, 116 aa, Artificial Sequence; identical to SEQ ID NO: 3927
  source: /note="Description of Artificial Sequence: Synthetic polypeptide"

SEQ ID NO: 3939 - protein, 135 aa, Artificial Sequence; identical to SEQ ID NO: 3929
  source: /note="Description of Artificial Sequence: Synthetic polypeptide"

SEQ ID NO: 3940 - protein, 115 aa, Artificial Sequence; identical to SEQ ID NO: 3930
  source: /note="Description of Artificial Sequence: Synthetic polypeptide"

SEQ ID NO: 3941 - protein, 116 aa, Artificial Sequence; identical to SEQ ID NO: 3928
  source: /note="Description of Artificial Sequence: Synthetic polypeptide"

SEQ ID NO: 3942 - protein, 117 aa, Artificial Sequence; identical to SEQ ID NO: 3838
  source: /note="Description of Artificial Sequence: Synthetic polypeptide"

SEQ ID NO: 3943 - protein, 117 aa, Artificial Sequence; identical to SEQ ID NO: 3839
  source: /note="Description of Artificial Sequence: Synthetic polypeptide"

SEQ ID NO: 3944 - protein, 117 aa, Artificial Sequence; identical to SEQ ID NO: 3840
  source: /note="Description of Artificial Sequence: Synthetic polypeptide"

SEQ ID NO: 3945 - protein, 121 aa, Artificial Sequence
  source: /note="Description of Artificial Sequence: Synthetic polypeptide"
EVQLVETGGGLVQPKGSLKLSCATSGFTFNTYAMNWVRQAPGKGLEWVARIRTKSNDYATYYADSVKGRITISRDDSQSMLYLQMNNLKTEDTAMYYCVRVGYRPYAMDYWGQGTSVTVSS

SEQ ID NO: 3946 - protein, 119 aa, Artificial Sequence
  source: /note="Description of Artificial Sequence: Synthetic polypeptide"
EVQLVESGGDLVKPGGSLKFSCAASGFTFSNYAMSWRQTPDKRLEWATVTSGGSYTYYPDSVRGRFTISRDNAKNTLYLQLSSLKSEDTAMYFCARQNFGSRGWYFDVWGAGTTVTVSS

SEQ ID NO: 3947 - protein, 120 aa, Artificial Sequence
  source: /note="Description of Artificial Sequence: Synthetic polypeptide"
EVMLVESGGGLVKPGGSLKLSCAASGFTFSSYAMSWVRQTPEKRLEWVATISNGGSYTYYPDSVKGRFTISRDNAKNTLYLQMSSLRSEDTAMYYCARHSDYSGAWFAYWGQGTLVTVSA

SEQ ID NO: 3948 - protein, 120 aa, Artificial Sequence
  source: /note="Description of Artificial Sequence: Synthetic polypeptide"
EVQLQESGPSLVKPSQTLSLTCSVTGDSFTSGYWNWIRKFPGNKLEYMGYIRYSGNTYYNPSLKSRISITRDTSKNQYYLQLISVTTEDTATFYCARSYYDYDRAWFAYWGQGALVTVSA

SEQ ID NO: 3949 - protein, 120 aa, Artificial Sequence
  source: /note="Description of Artificial Sequence: Synthetic polypeptide"
EVQLQQSGPELVKPGASVKMSCKASGYTFTDYYMKWVKQSHGKSLEWIGDINPNNGDTFYNQKFKGKATLTVDKSSSTAYMQLNSLTSEDSAVYYCARGVYDGYYAMDYWGQGTSVTVSS

SEQ ID NO: 3950 - protein, 118 aa, Artificial Sequence
  source: /note="Description of Artificial Sequence: Synthetic polypeptide"
EVQLLESGGGLVQPGGSLRLSCAASGFTFSPYWMSWVRQAPGKGLEWVSVIYPSGGHTYYADSVKGRFTISRDNSKNTLYLQMNSLRAEDTAVYYCARPGFGAAFDYWGPGTLVTVSS

SEQ ID NO: 3951 - protein, 119 aa, Artificial Sequence
  source: /note="Description of Artificial Sequence: Synthetic polypeptide"
EVQLLESGGGLVQPGGSLRLSCAASGFTFSDYPMMWVRQAPGKGLEWVSRISPSGGHTIYADSVKGRFTISRDNSKNTLYLQMNSLRAEDTAVYYCAKDWHGGGAFDIWGQGTMVTVSS

SEQ ID NO: 3952 - protein, 128 aa, Artificial Sequence
  source: /note="Description of Artificial Sequence: Synthetic polypeptide"
EVQLLESGGGLVQPGGSLRLSCAASGFTFSRYSMQWVRQAPGKGLEWVSVISPSGGSTMYADSVKGRFTISRDNSKNTLYLQMNSLRAEDTAVYYCARESYSSSWYSGYYYYYGMDVWGQGTTVTVSS

SEQ ID NO: 3953 - protein, 116 aa, Artificial Sequence
  source: /note="Description of Artificial Sequence: Synthetic polypeptide"
EVQLLESGGGLVQPGGSLRLSCAASGFTFSQYMMSWVRQAPGKGLEWVSVIYPSGGSTHYADSVKGRFTISRDNSKNTLYLQMNSLRAEDTAVYYCARGHYGMDVWGQGTTVTVSS

SEQ ID NO: 3954 - protein, 120 aa, Artificial Sequence
  source: /note="Description of Artificial Sequence: Synthetic polypeptide"
EVQLLESGGGLVQPGGSLRLSCAASGFTFSPYAMVWVRQAPGKGLEWVSSISPSGGGTGYADSVKGRFTISRDNSKNTLYLQMNSLRAEDTAVYYCAREGWNYYYGMDVWGQGTTVTVSS

SEQ ID NO: 3955 - protein, 113 aa, Artificial Sequence
  source: /note="Description of Artificial Sequence: Synthetic polypeptide"
QVQLQQSGTELARPGASVKLSCKASGYTFTDYYLNWMKQGTGQGLEWIGEIYPGGDHTYYNEKFKGKATLTADKSSNTAFMQLSSLTSEDSAVYFCTRGVIKWGQGTLVTVSL

SEQ ID NO: 3956 - protein, 113 aa, Artificial Sequence
  source: /note="Description of Artificial Sequence: Synthetic polypeptide"
QVQLQQSGPEVARPGASVKLSCKASGYTFTDYYLNWVKQRTGQGLEWIGEIYPGNNHTYYNEKFKGKATLTADNSSSTAYLQFSSLTSEDSAVYFCTRGVIKWGQGTLVTVSV

SEQ ID NO: 3957 - protein, 122 aa, Artificial Sequence
  source: /note="Description of Artificial Sequence: Synthetic polypeptide"
EVQLVESGGGLVKPGGSLKLSCAASGFTFSDYYMYWVRQTPEKRLEWVATISDGGLYTYYQDSVKGRFTISRDNAKNNLYLQMSSLKSEDTAMYYCAREDDYDGDFYTMDYWGQGTSVTVSS

SEQ ID NO: 3958 - protein, 117 aa, Artificial Sequence
  source: /note="Description of Artificial Sequence: Synthetic polypeptide"
EVQLLESGGGLVQPGGSLRLSCAASGFTFSPYSMTWVRQAPGKGLEWVSSIVPSGGKTWYADSVKGRFTISRDNSKNTLYLQMNSLRAEDTAVYYCARTNLSYFDYWGQGTLVTVSS

SEQ ID NO: 3959 - protein, 115 aa, Artificial Sequence
  source: /note="Description of Artificial Sequence: Synthetic polypeptide"
EVQLLESGGGLVQPGGSLRLSCAASGFTFSNYEMSWVRQAPGKGLEWVSSIYSSGGETLYADSVKGRFTISRDNSKNTLYLQMNSLRAEDTAVYYCARDGAADYWGQGTLVTVSS

SEQ ID NO: 3960 - protein, 117 aa, Artificial Sequence
  source: /note="Description of Artificial Sequence: Synthetic polypeptide"
EVQLLESGGGLVQPGGSLRLSCAASGFTFSEYTMHWVRQAPGKGLEWVSVISSSGGRTVYADSVKGRFTISRDNSKNTLYLQMNSLRAEDTAVYYCARDLSNYMDYWGQGTLVTVSS

SEQ ID NO: 3961 - protein, 116 aa, Artificial Sequence
  source: /note="Description of Artificial Sequence: Synthetic polypeptide"
EVQLLESGGGLVQPGGSLRLSCAASGFTFSMYIMNWVRQAPGKGLEWVSSIVSSGGWTFYADSVKGRFTISRDNSKNTLYLQMNSLRAEDTAVYYCARGHYGMDVWGQGTTVTVSS

SEQ ID NO: 3962 - protein, 121 aa, Artificial Sequence
  source: /note="Description of Artificial Sequence: Synthetic polypeptide"
EVQLLESGGGLVQPGGSLRLSCAASGFTFSQYKMSWVRQAPGKGLEWVSSISSSGGTNYADSVKGRFTISRDNSKNTLYLQMNSLRAEDTAMYYCARRNYGDRPYWYFDLWGRGTLVTVSS

SEQ ID NO: 3963 - protein, 98 aa, Artificial Sequence
  source: /note="Description of Artificial Sequence: Synthetic polypeptide"
LSLVCKASGFTFSSNAMGWVRQAPGKGLEWVAGIDDDGSGTRYAPAVKGRATISRDNGQSTLRLQLNNLRAEDTGIYYCTKCAYSSGCDYEAGYIDAW

SEQ ID NO: 3964 - protein, 125 aa, Artificial Sequence
  source: /note="Description of Artificial Sequence: Synthetic polypeptide"
AVTLDESGGGLQTPGGALSLVCKASGFTFSSNAMGWVRQAPGKGLEWVAGIDDDGSSTRYAPAVKGRATISRDNGQSTVRLQLNNLRAEDTGIYYCTKCAYSSGCDYEAGYIDAWGHGTEVIVSS

SEQ ID NO: 3965 - protein, 126 aa, Artificial Sequence
  source: /note="Description of Artificial Sequence: Synthetic polypeptide"
QVQLVQSGSELKKPGASVKVSCKASGYTFTNYGMNWVRQAPGQGLEWMGWINTYTGEPTYADDFTGRFVFSLDTSVSTAYLQISSLKAEDTAVYYCARNPINYYGINYEGYVMDYWGQGTLVTVSS

SEQ ID NO: 3966 - protein, 126 aa, Artificial Sequence
  source: /note="Description of Artificial Sequence: Synthetic polypeptide"
QVQLVQSGSELKKPGASVKVSCKASGYTFTNYGMNWVRQAPGQGLEWMGWINTYTGEPTYADDFTGRFVFSLDTSVSTAYLQISSLKAEDTAVYFCARNPINYYGINYEGYVMDYWGQGTLVTVSS

SEQ ID NO: 3967 - protein, 126 aa, Artificial Sequence
  source: /note="Description of Artificial Sequence: Synthetic polypeptide"
QVQLVQSGSELKKPGASVKVSCKASGYTFTNYGMNWVRQAPGQGLEWMGWINTYTGEPTYADDFTGRFVFSLDTSVSTAYLQISSLKAEDTATYFCARNPINYYGINYEGYVMDYWGQGTLVTVSS

SEQ ID NO: 3968 - protein, 118 aa, Artificial Sequence
  source: /note="Description of Artificial Sequence: Synthetic polypeptide"
QVQLQESGPGLLKPSETLSLTCTVSGGSVSLYYWSWIRQSPGKEPEWIGYIYSSGSTDYNPSLRSRVTISLDTSNNRFSLNLRSVTAADTAVYWCARSASIRGWFDPWGQGTLVTVSS

SEQ ID NO: 3969 - protein, 133 aa, Artificial Sequence
  source: /note="Description of Artificial Sequence: Synthetic polypeptide"
VQLLESGGGLVQPGGSLRLSCAASGFTFSTYAMSWVRQAPGEGLEWVSDINVGGVTTYYADSVKGRFTISRDNSKNTLYLQMNSLRVEDTAMYYCVRRSGPDRNSSPADFWGQGSLVIVSSGSASAPTLFPLV

SEQ ID NO: 3970 - protein, 109 aa, Artificial Sequence
  source: /note="Description of Artificial Sequence: Synthetic polypeptide"
SGPVLVKPGASVKISCKASGYSFTGYYMFWVKQSPEKSLEWIGEINPSTGGATYNLKFKAKATLTVDKSSNTAYMQLKSLTSEDSAVYYCARLDALDYWGQGTSVTVSS

SEQ ID NO: 3971 - protein, 113 aa, Artificial Sequence
  source: /note="Description of Artificial Sequence: Synthetic polypeptide"
QVQLVQSGAEVKKPGASVKVSCKASGYTFTSYWMHWVRQAPGQGLEWMGNINPSNGGTNYNEKFKSRVTMTRDTSTSTAYMELSSLRSEDTAVYYCELGQGYWGQGTLVTVSS

SEQ ID NO: 3972 - protein, 113 aa, Artificial Sequence
  source: /note="Description of Artificial Sequence: Synthetic polypeptide"
QVQLVQSGAEVKKPGASVKVSCKASGYTFTSYWMHWVRQAPGQGLEWIGNINPSNGGTNYNEKFKSRATMTRDTSTSTAYMELSSLRSEDTAVYYCELGQGYWGQGTLVTVSS

SEQ ID NO: 3973 - protein, 113 aa, Artificial Sequence
  source: /note="Description of Artificial Sequence: Synthetic polypeptide"
QVQLVQSGAEVKKPGASVKVSCKASGYTFTSYWMHWVRQAPGQGLEWIGNINPSNGGTNYNEKFKSRATLTVDKSTSTAYMELSSLRSEDTAVYYCELGQGYWGQGTLVTVSS

SEQ ID NO: 3974 - protein, 113 aa, Artificial Sequence
  source: /note="Description of Artificial Sequence: Synthetic polypeptide"
QVQLVQSGAEVVKPGASVKLSCKASGYTFTSYWMHWVKQAPGQGLEWIGNINPSNGGTNYNEKFKSRATLTRDTSTSTAYMELSSLRSEDTAVYYCELGQGYWGQGTLVTVSS

SEQ ID NO: 3975 - protein, 113 aa, Artificial Sequence
  source: /note="Description of Artificial Sequence: Synthetic polypeptide"
QVQLVQSGAEVVKPGASVKLSCKASGYTFTSYWMHWVKQRPGQGLEWIGNINPSNGGTNYNEKFKSKATLTVDTSSSTAYMELSSLRSEDSAVYYCELGQGYWGQGTLVTVSS

SEQ ID NO: 3976 - protein, 113 aa, Artificial Sequence
  source: /note="Description of Artificial Sequence: Synthetic polypeptide"
QVQLVQSGAEVKKPGASVKVSCKASGYTFTSYWMHWVKQRPGQGLEWIGNINPSNGGTNYNEKFKSKATLTVDKSTSTAYMELSSLRSEDTAVYYCELGQGYWGQGTLVTVSS

SEQ ID NO: 3977 - protein, 113 aa, Artificial Sequence
  source: /note="Description of Artificial Sequence: Synthetic polypeptide"
QVQLVQSGAEVVKPGASVKLSCKASGYTFTSYWMHWVKQRPGQGLEWIGNINPSNGGTNYNEKFKSKATLTVDKSTSTAYMELSSLRSEDTAVYYCELGQGYWGQGTLVTVSS

SEQ ID NO: 3978 - protein, 113 aa, Artificial Sequence
  source: /note="Description of Artificial Sequence: Synthetic polypeptide"
QVQLVQSGAEVVKPGASVKLSCKASGYTFTSYWMHWVKQRPGQGLEWIGNINPSNGGTNYNEKFKSKATLTVDKSSSTAYMELSSLRSEDSAVYYCELGQGYWGQGTLVTVSS

SEQ ID NO: 3979 - protein, 113 aa, Artificial Sequence
  source: /note="Description of Artificial Sequence: Synthetic polypeptide"
QVQLVQSGAEVKKPGASVKVSCKASGYTFTSYWMHWVRQAPGQGLEWMGNINPSNGGTNYNEKFKSRVTMTRDTSTSTVYMELSSLRSEDTAVYYCELGQGYWGQGTLVTVSS

SEQ ID NO: 3980 - protein, 113 aa, Artificial Sequence
  source: /note="Description of Artificial Sequence: Synthetic polypeptide"
QVQLVQSGAEVKKPGASVKVSCKASGYTFTSYWMHWVRQRPGQGLEWIGNINPSNGGTNYNEKFKSRATMTRDTSTSTAYMELSSLRSEDTAVYYCELGQGYWGQGTLVTVSS

SEQ ID NO: 3981 - protein, 113 aa, Artificial Sequence
  source: /note="Description of Artificial Sequence: Synthetic polypeptide"
QVQLVQSGAEVKKPGASVKVSCKASGYTFTSYWMHWVRQAPGQGLEWIGNINPSNGGTNYNEKFKSKATMTRDTSTSTAYMELSSLRSEDTAVYYCELGQGYWGQGTLVTVSS

SEQ ID NO: 3982 - protein, 113 aa, Artificial Sequence
  source: /note="Description of Artificial Sequence: Synthetic polypeptide"
QVQLVQSGAEVKKPGASVKVSCKASGYTFTSYWMHWVRQRPGQGLEWIGNINPSNGGTNYNEKFKSKATMTRDTSTSTAYMELSSLRSEDTAVYYCELGQGYWGQGTLVTVSS

SEQ ID NO: 3983 - protein, 113 aa, Artificial Sequence
  source: /note="Description of Artificial Sequence: Synthetic polypeptide"
QVQLVQSGAEVKKPGASVKVSCKASGYTFTSYWMHWVKQRPGQGLEWIGNINPSNGGTNYNEKFKSKATMTRDTSTSTAYMELSSLRSEDTAVYYCELGQGYWGQGTLVTVSS

SEQ ID NO: 3984 - protein, 113 aa, Artificial Sequence
  source: /note="Description of Artificial Sequence: Synthetic polypeptide"
QVQLVQSGAEVKKPGASVKVSCKASGYTFTSYWMHWVKQRPGQGLEWIGNINPSNGGTNYNEKFKSKATMTVDTSTSTAYMELSSLRSEDTAVYYCELGQGYWGQGTLVTVSS

SEQ ID NO: 3985 - protein, 113 aa, Artificial Sequence
  source: /note="Description of Artificial Sequence: Synthetic polypeptide"
QVQLVQSGAEVKKPGASVKVSCKASGYTFTSYWMHWVKQRPGQGLEWIGNINPSNGGTNYNEKFKSKATLTVDTSTSTAYMELSSLRSEDTAVYYCELGQGYWGQGTLVTVSS

SEQ ID NO: 3986 - protein, 113 aa, Artificial Sequence
  source: /note="Description of Artificial Sequence: Synthetic polypeptide"
QVQLVQSGAEVKKPGASVKVSCKASGYTFTSYWMHWVRQRPGQGLEWMGNINPSNGGTNYNEKFKSRVTMTRDTSTSTAYMELSSLRSEDTAVYYCELGQGYWGQGTLVTVSS

SEQ ID NO: 3987 - protein, 119 aa, Artificial Sequence
  source: /note="Description of Artificial Sequence: Synthetic polypeptide"
QVQLQQPGIEVVKPGASVKLSCKASGYTFISNWMHWLRQRPGQGLEWIGEIDPSDTYTDYNQKFKGKATLTVDKSSTTAYMLLSSLTSEDSAVYFCARGGMIVYVLDSWGQGTSVTVSS

SEQ ID NO: 3988 - protein, 119 aa, Artificial Sequence
  source: /note="Description of Artificial Sequence: Synthetic polypeptide"
QVQLQQPGAELVKPGASVKLSCKASGYTFITYWMHWMKQRPGQGLEWIGEIDPSDSYTDYNQKFKGKATLTVDKSSSTAYMQLSSLTSEDSAVYYCARGSNVLYVLDYWGQGTSVTVSS

SEQ ID NO: 3989 - protein, 460 aa, Artificial Sequence
  source: /note="Description of Artificial Sequence: Synthetic polypeptide"
MAWVWTLPFLMAAAQSVQAEVQLVESGGGLVQPGGSLRLSCAASGFTFSNYWMSWVRQAPGKGLEWVATIKQDGSQKNYVDSVKGRFTISRDNAKNSLYLRLNSLRAEDTAVYYCATELFDLWGRGSLVTVSSASTKGPSVFPLAPCSRSTSESTAALGCLVKDYFPEPVTVSWNSGALTSGVHTFPAVLQSSGLYSLSSVVTVPSSSLGTKTYTCNVDHKPSNTKVDKRVESKYGPPCPSCPAPEFLGGPSVFLFPPKPKDTLMISRTPEVTCVVVDVSQEDPEVQFNWYVDGVEVHNAKTKPREEQFNSTYRVVSVLTVLHQDWLNGKEYKCKVSNKGLPSSIEKTISKAKGQPREPQVYTLPPSQEEMTKNQVSLTCLVKGFYPSDIAVEWESNGQPENNYKTTPPVLDSDGSFFLYSRLTVDKSRWQEGNVFSCSVMHEALHNHYTQKSLSLSLGK

SEQ ID NO: 3990 - protein, 246 aa, Artificial Sequence
  source: /note="Description of Artificial Sequence: Synthetic polypeptide"
MEFGLSWVFLVAILEGVQCEVQLVESGGGLVQPGGSLRLSCAASGFTFSNYWMSWVRQAPGKGLEWVATIKQDGSQKNYVDSVKGRFTISRDNAKNSLYLRLNSLRAEDTAVYYCATELFDLWGRGSLVTVSSASTKGPSVFPLAPSSKSTSGGTAALGCLVKDYFPEPVTVSWNSGALTSGVHTFPAVLQSSGLYSLSSVVTVPSSSLGTQTYICNVNHKPSNTKVDKRVEPKSCDKTHTCPPCP

SEQ ID NO: 3991 - protein, 115 aa, Artificial Sequence
  source: /note="Description of Artificial Sequence: Synthetic polypeptide"
EVQLVESGGGLVQPGGSLRLSCAASGFTFSNYGMNWVRQAPGKGLEWVSMIYYDSSEKHYADSVKGRFTISRDNAKNSLYLQMNSLRDEDTAVYYCARGTTPDYWGQGTMVTVSS

SEQ ID NO: 3992 - protein, 115 aa, Artificial Sequence
  source: /note="Description of Artificial Sequence: Synthetic polypeptide"
EVQLVESGGGLVQPGGSLRLSCAASGFTFSNYGMNWVRQAPGKGLEWVSMIYYDSSEKHYADSVKGRFTISRDNAKNSLYLQMNSLRDEDTAVYYCARGTTPDYWGQGTLVTVSS

SEQ ID NO: 3993 - protein, 115 aa, Artificial Sequence
  source: /note="Description of Artificial Sequence: Synthetic polypeptide"
EVQLVESGGGLVQPGGSLRLSCAASGFTFSNYGMNWVRQAPGKGLEWVSMIYYDSSEKHYADSVKGRFTISRDNAKNSLYLQMNSLRDEDTAVYYCARGTTPDYWGQGTTVTVSS

SEQ ID NO: 3994 - protein, 115 aa, Artificial Sequence
  source: /note="Description of Artificial Sequence: Synthetic polypeptide"
QVQLVESGGGVVQPGRSLRLSCAASGFTFSNYGMNWVRQAPGKGLEWVAMIYYDSSEKHYADSVKGRFTISRDNSKNTLYLQMNSLRAEDTAVYYCARGTTPDYWGQGTMVTVSS

SEQ ID NO: 3995 - protein, 115 aa, Artificial Sequence
  source: /note="Description of Artificial Sequence: Synthetic polypeptide"
QVQLVESGGGVVQPGRSLRLSCAASGFTFSNYGMNWVRQAPGKGLEWVAMIYYDSSEKHYADSVKGRFTISRDNSKNTLYLQMNSLRAEDTAVYYCARGTTPDYWGQGTLVTVSS

SEQ ID NO: 3996 - protein, 115 aa, Artificial Sequence
  source: /note="Description of Artificial Sequence: Synthetic polypeptide"
QVQLVESGGGVVQPGRSLRLSCAASGFTFSNYGMNWVRQAPGKGLEWVAMIYYDSSEKHYADSVKGRFTISRDNSKNTLYLQMNSLRAEDTAVYYCARGTTPDYWGQGTTVTVSS

SEQ ID NO: 3997 - protein, 115 aa, Artificial Sequence
  source: /note="Description of Artificial Sequence: Synthetic polypeptide"
EVQLLESGGGLVQPGGSLRLSCAASGFTFSNYGMNWVRQAPGKGLEWVSMIYYDSSEKHYADSVKGRFTISRDNSKNTLYLQMNSLRAEDTAVYYCAKGTTPDYWGQGTMVTVSS

SEQ ID NO: 3998 - protein, 115 aa, Artificial Sequence
  source: /note="Description of Artificial Sequence: Synthetic polypeptide"
EVQLLESGGGLVQPGGSLRLSCAASGFTFSNYGMNWVRQAPGKGLEWVSMIYYDSSEKHYADSVKGRFTISRDNSKNTLYLQMNSLRAEDTAVYYCAKGTTPDYWGQGTLVTVSS

SEQ ID NO: 3999 - protein, 115 aa, Artificial Sequence
  source: /note="Description of Artificial Sequence: Synthetic polypeptide"
EVQLLESGGGLVQPGGSLRLSCAASGFTFSNYGMNWVRQAPGKGLEWVSMIYYDSSEKHYADSVKGRFTISRDNSKNTLYLQMNSLRAEDTAVYYCAKGTTPDYWGQGTTVTVSS

SEQ ID NO: 4000 - protein, 115 aa, Artificial Sequence
  source: /note="Description of Artificial Sequence: Synthetic polypeptide"
EVQLVESGGGVVQPGRSLRLSCAASGFTFSNYGMNWVRQAPGKGLEWVAMIYYDSSEKHYADSVKGRFTISRDNSKNTLYLQMNSLRAEDTAVYYCARGTTPDYWGQGTMVTVSS

SEQ ID NO: 4001 - protein, 113 aa, Artificial Sequence
  source: /note="Description of Artificial Sequence: Synthetic polypeptide"
DVVLTQSPLSLPVTLGQPASISCRSSQSLEYSDGYTFLEWFLQKPGQSPQLLIYEVSNRFSGVPDRFSGSGSGTDFTLKISRVEAEDVGVYYCFQATHDPLTFGQGTKLEIKR

SEQ ID NO: 4002 - protein, 113 aa, Artificial Sequence; identical to SEQ ID NO: 4001
  source: /note="Description of Artificial Sequence: Synthetic polypeptide"

SEQ ID NO: 4003 - protein, 120 aa, Artificial Sequence
  source: /note="Description of Artificial Sequence: Synthetic polypeptide"
EVQLVQSGAEVKKPGASVKVSCKASGYTFTSHGISWVRQAPGQGLDWMGWISPYSGNTNYAQKLQGRVTMTTDTSTSTAYMELSSLRSEDTAVYYCARVGSGPYYYMDVWGQGTLVTVSS

SEQ ID NO: 4004 - protein, 121 aa, Artificial Sequence
  source: /note="Description of Artificial Sequence: Synthetic polypeptide"
EVQLVQSGSEVKKPGASVKLSCKTSGYTFTNSAIHWVRQAPGQRLEWMGWINAGNGNTKYSQKFQGRVTITRDTSASTAYMELSSLRSEDTAVYYCAWAYCGGDCYSLDYWGQGTLVTVSS

SEQ ID NO: 4005 - protein, 126 aa, Artificial Sequence
  source: /note="Description of Artificial Sequence: Synthetic polypeptide"
EVQLLESGGDLVRPGGSLRLTCEGSGFNFFTQTIHWVRQAPGKGLEWVASISSDSNYIYHADSLKGRFTVSRDNAQDSVFLQMNSLRVEDTAVYYCARDILLEPLAPHYYYGLDVWGQGTTVTVSS

SEQ ID NO: 4006 - protein, 117 aa, Artificial Sequence
  source: /note="Description of Artificial Sequence: Synthetic polypeptide"
EVQLQESGPGLVKPSETLSLTCTVSGGSISGYYWSWIRQSPGKGLEWIGEIFHTGRTYYNPSLRSRLTISVDTSKNQFSLKLSSLTAADTAVYYCARDSAFGSFDYWGQGTLVTVSS

SEQ ID NO: 4007 - protein, 120 aa, Artificial Sequence
  source: /note="Description of Artificial Sequence: Synthetic polypeptide"
EVQLQESGPGLVKPSETLSLTCNVSGGSISSYYWSWIRQPPGKGLEWIGNIYYSGSTNYNPSLKSRVTISVDTSKSQFSLKLSSVTAADTAVYYCARALDFWSGQYFDYWGQGTLVTVSS

SEQ ID NO: 4008 - protein, 126 aa, Artificial Sequence
  source: /note="Description of Artificial Sequence: Synthetic polypeptide"
EVQLVESGGGLVQPGRSLRLSCAASGFTFDDYAMHWVRQAPGKGLEWVAVISYDGSNKYYADSVKGRFTISRDNSKNTLYLQMNSLRAEDTAVYYCARERVYSSGKEGYYYGMDVWGQGTMVTVSS

SEQ ID NO: 4009 - protein, 117 aa, Artificial Sequence
  source: /note="Description of Artificial Sequence: Synthetic polypeptide"
EVQLVESGGGVVQPGTSLRLSCAASGFPFSSYGMHWVRQAPGKGLEWVAAISGDGILKYYTDSVKGRFTISRDNSKNTLYLQMNNLSGEDTGLYYCARNYDNSLDYWGQGTLVTVSS

SEQ ID NO: 4010 - protein, 120 aa, Artificial Sequence
  source: /note="Description of Artificial Sequence: Synthetic polypeptide"
EVQLVQSGAEVKKPGASVKVSCKVSGHSLSELTIHWVRQAPGKGLEWMGGFDPEDGRGTYAPNFRGRVTMTEDTSTDTAYMELSGLRSEDAAVYYCATLLGEYDSYFDLWGRGTLVTVSS

SEQ ID NO: 4011 - protein, 120 aa, Artificial Sequence
  source: /note="Description of Artificial Sequence: Synthetic polypeptide"
EVQLVQSGAEVKKPGASVKVSCKASGYIFTNYDIAWVRQAPGQGLEWMGWMNPDSGNTGFVQKFKGRVTATSNTDITTAYMELSSLTSEDTAVYYCARDRFGSGYDLDHWGQGTLVTVSS

SEQ ID NO: 4012 - protein, 117 aa, Artificial Sequence
  source: /note="Description of Artificial Sequence: Synthetic polypeptide"
EVQLVESGGGLVQPGGSLRLSCAASGFTSSSYAMTWVRQAPGKGLEWVSGISGSGESTYYADSVKGRFTISRDNSKNTLYLQMNSLRVEDTAIYYCARQGYGAHDYWGQGTLVTVSS

SEQ ID NO: 4013 - protein, 126 aa, Artificial Sequence
  source: /note="Description of Artificial Sequence: Synthetic polypeptide"
EVQLLESGGGLVKPGGSLRLSCAASGFTFDDYAMHWVRQAPGKGLEWVSLISWDGGSTYYADSVKGRFTISRDNSKNSLYLQMNSLRAEDTALYYCAKDIPKVGGYSYGYGALGYWGQGTPVTVSS

SEQ ID NO: 4014 - protein, 115 aa, Artificial Sequence
  source: /note="Description of Artificial Sequence: Synthetic polypeptide"
EVQLVQSGAEVKKPGASVKVSCKASGYTFTSYDINWVRQATGQGLEWMGWMNPNSGNTGYAQKFQGRVTMTRNTSISTAYMELSSLRSEDTAVYYCARSTSLSVWGQGTLVTVSS

SEQ ID NO: 4015 - protein, 117 aa, Artificial Sequence
  source: /note="Description of Artificial Sequence: Synthetic polypeptide"
EVQLQESGAGLLKPSETLSLTCAVYGGSFSGYYWSWIRQPPGKGLEWIGEINHSGSTNYNPSLKSRVTISVDTSKNQFSLKLSSVTAADTAVYYCARDDGAGVFDLWGRGTLVTVSS

SEQ ID NO: 4016 - protein, 123 aa, Artificial Sequence
  source: /note="Description of Artificial Sequence: Synthetic polypeptide"
EVQLVQSGAEVKEPGASVKVSCKASGYTFTDYYIQWVRQAPGHGLEWMGWINPKTGGTNYLQKFQGRVTMTRDTSTRTAYMELSSLRSDDTAFYYCVREDMNTVLATSWFDPWGQGTLVTVSS

SEQ ID NO: 4017 - protein, 138 aa, Artificial Sequence
  source: /note="Description of Artificial Sequence: Synthetic polypeptide"
MVLGLKWVFFVVFYQGVHCEVQLVESGGGLVQPKGSLKLSCAASGFTFNTYAMHWVRQAPGKGLEWVARIRSKSSNYATYYADSVKDRFTISRDDSQSMLYLQMNNLKTEDTAMYYCVRPLKWYFDVWGTGTTVTVSS

SEQ ID NO: 4018 - protein, 142 aa, Artificial Sequence
  source: /note="Description of Artificial Sequence: Synthetic polypeptide"
MDSRLNLVFLVLILKGVQCDVQLVESGGDLVQPGGSRKLSCAASGFTFSSFGMHWVRQAPEKGLEWVAYINSGSSTIYYADTVKGRFTISRDNPKNTLFLQMTSLRSEDTAMYYCARGNNPGTGYYYSMDYWGQGTSVTVSS

SEQ ID NO: 4019 - protein, 142 aa, Artificial Sequence
  source: /note="Description of Artificial Sequence: Synthetic polypeptide"
MDSRLNLVFLVLILKGVQCDVQLVESGGGLVQPGGSRKLSCAASGFTFSSFGMHWVRQAPEKGLEWVAYISSGSSTIYYADTVKGRFTISRDNPKNTLFLQMTSLRSEDTAMYYCARGNNPGTGYYYAMDYWGQGTSVTVSS

SEQ ID NO: 4020 - protein, 113 aa, Artificial Sequence; identical to SEQ ID NO: 3979
  source: /note="Description of Artificial Sequence: Synthetic polypeptide"

SEQ ID NO: 4021 - protein, 112 aa, Artificial Sequence
  source: /note="Description of Artificial Sequence: Synthetic polypeptide"
QVQLVQSGAEWKPGASVKLSCKASGYTFTSYWMHWVKQAPGQGLEWIGNINPSNGGTNYNEKFKSRATLTRDTSTSTAYMELSSLRSEDTAVYYCELGQGYWGQGTLVTVSS

SEQ ID NO: 4022 - protein, 112 aa, Artificial Sequence
  source: /note="Description of Artificial Sequence: Synthetic polypeptide"
QVQLVQSGAEWKPGASVKLSCKASGYTFTSYWMHWVKQRPGQGLEWIGNINPSNGGTNYNEKFKSKATLTVDTSSSTAYMELSSLRSEDSAVYYCELGQGYWGQGTLVTVSS

SEQ ID NO: 4023 - protein, 113 aa, Artificial Sequence; identical to SEQ ID NO: 3976
  source: /note="Description of Artificial Sequence: Synthetic polypeptide"

SEQ ID NO: 4024 - protein, 113 aa, Artificial Sequence; identical to SEQ ID NO: 3977
  source: /note="Description of Artificial Sequence: Synthetic polypeptide"

SEQ ID NO: 4025 - protein, 112 aa, Artificial Sequence
  source: /note="Description of Artificial Sequence: Synthetic polypeptide"
QVQLVQSGAEWKPGASVKLSCKASGYTFTSYWMHWVKQRPGQGLEWIGNINPSNGGTNYNEKFKSKATLTVDKSSSTAYMELSSLRSEDSAVYYCELGQGYWGQGTLVTVSS

SEQ ID NO: 4026 - protein, 113 aa, Artificial Sequence; identical to SEQ ID NO: 3980
  source: /note="Description of Artificial Sequence: Synthetic polypeptide"

SEQ ID NO: 4027 - protein, 113 aa, Artificial Sequence; identical to SEQ ID NO: 3981
  source: /note="Description of Artificial Sequence: Synthetic polypeptide"

SEQ ID NO: 4028 - protein, 113 aa, Artificial Sequence; identical to SEQ ID NO: 3982
  source: /note="Description of Artificial Sequence: Synthetic polypeptide"

SEQ ID NO: 4029 - protein, 113 aa, Artificial Sequence; identical to SEQ ID NO: 3983
  source: /note="Description of Artificial Sequence: Synthetic polypeptide"

SEQ ID NO: 4030 - protein, 113 aa, Artificial Sequence; identical to SEQ ID NO: 3984
  source: /note="Description of Artificial Sequence: Synthetic polypeptide"

SEQ ID NO: 4031 - protein, 113 aa, Artificial Sequence; identical to SEQ ID NO: 3985
  source: /note="Description of Artificial Sequence: Synthetic polypeptide"

SEQ ID NO: 4032 - protein, 113 aa, Artificial Sequence; identical to SEQ ID NO: 3986
  source: /note="Description of Artificial Sequence: Synthetic polypeptide"

SEQ ID NO: 4033 - protein, 113 aa, Artificial Sequence; identical to SEQ ID NO: 3971
  source: /note="Description of Artificial Sequence: Synthetic polypeptide"

SEQ ID NO: 4034 - protein, 113 aa, Artificial Sequence; identical to SEQ ID NO: 3972
  source: /note="Description of Artificial Sequence: Synthetic polypeptide"

SEQ ID NO: 4035 - protein, 113 aa, Artificial Sequence; identical to SEQ ID NO: 3973
  source: /note="Description of Artificial Sequence: Synthetic polypeptide"

SEQ ID NO: 4036 - protein, 447 aa, Artificial Sequence; identical to SEQ ID NO: 3848
  source: /note="Description of Artificial Sequence: Synthetic polypeptide"

SEQ ID NO: 4037 - protein, 447 aa, Artificial Sequence; identical to SEQ ID NO: 3849
  source: /note="Description of Artificial Sequence: Synthetic polypeptide"

SEQ ID NO: 4038 - protein, 112 aa, Artificial Sequence
  source: /note="Description of Artificial Sequence: Synthetic polypeptide"
DVVMTQSPLSLSVSPGEPASISCRSSQSLFHSKGNTYLHWYLQKPGQSPKLLINRVSNRFSGVPDRFSGSGSGTDFTLKISRVEAEDVGVYFCSQSAHVPWTFGGGTKVEIK

SEQ ID NO: 4039 - protein, 112 aa, Artificial Sequence
  source: /note="Description of Artificial Sequence: Synthetic polypeptide"
DIVMTQSPLSLSVSPGEPASISCRSSQSLFHSKGNTYLHWYLQKPGQSPKLLIYRVSNRFSGVPDRFSGSGSGTDFTLKISRVEAEDVGVYFCSQSAHVPWTFGGGTKVEIK

SEQ ID NO: 4040 - protein, 112 aa, Artificial Sequence
  source: /note="Description of Artificial Sequence: Synthetic polypeptide"
DVVMTQSPLSLSVSPGEPASISCRSSQSLFHSKGNTYLHWYLQKPGQSPQLLINRVSNRFSGVPDRFSGSGSGTDFTLKISRVEAEDVGVYFCSQSAHVPWTFGGGTKVEIK

SEQ ID NO: 4041 - protein, 112 aa, Artificial Sequence
  source: /note="Description of Artificial Sequence: Synthetic polypeptide"
DIVMTQSPLSLSVSPGEPASISCRSSQSLFHSKGNTYLHWYLQKPGQSPQLLIYRVSNRFSGVPDRFSGSGSGTDFTLKISRVEAEDVGVYFCSQSAHVPWTFGGGTKVEIK

SEQ ID NO: 4042 - protein, 106 aa, Artificial Sequence
  source: /note="Description of Artificial Sequence: Synthetic polypeptide"
TVAAPSVFIFPPSDEQLKSGTASVVCLLNNFYPREAKVQWKVDNALQSGNSQESVTEQDSKDSTYSLSSTLTLSKADYEKHKVYACEVTHQGLSSPVTKSFNRGEC

SEQ ID NO: 4043 - protein, 128 aa, Artificial Sequence
  source: /note="Description of Artificial Sequence: Synthetic polypeptide"
MKLPVRLLVLMFWIPASSSDVVMTQIPLYLSVSPGDQASISCRSSQSLFHSKGNTYLHWYLQKPGQSPKLLINRVSNRFSGVPDRFSGSGSGTDFTLKISGVEAEDLGVYFCSQSAHVPWTFGGGTKL

SEQ ID NO: 4044 - protein, 219 aa, Artificial Sequence
  source: /note="Description of Artificial Sequence: Synthetic polypeptide"
DVVMTQTPASVEAAVGGTVTIKCQASEDISSNLAWYQQKLGQPPKLLIYSASTLASGVPSRFKGSGSGTEFTLAISDLECADAATYYCQSYDGSSSSSYGIGFGGGTEVVVKRTVAAPSVFIFPPSDEQLKSGTASVVCLLNNFYPREAKVQWKVDNALQSGNSQESVTEQDSKDSTYSLSSTLTLSKADYEKHKVYACEVTHQGLSSPVTKSFNRGEC

SEQ ID NO: 4045 - protein, 219 aa, Artificial Sequence
  source: /note="Description of Artificial Sequence: Synthetic polypeptide"
DVVMTQTPASVEAAVGGTVTIKCRASQSISVYLAWYQQKAGQPPKLLIYQASKLASGVPSRFKGSGSGTEFTLTISDLECADAATYYCQSYDGSSSSSYGVGFGGGTEVVVKRTVAAPSVFIFPPSDEQLKSGTASVVCLLNNFYPREAKVQWKVDNALQSGNSQESVTEQDSKDSTYSLSSTLTLSKADYEKHKVYACEVTHQGLSSPVTKSFNRGEC

SEQ ID NO: 4046 - protein, 220 aa, Artificial Sequence
  source: /note="Description of Artificial Sequence: Synthetic polypeptide"
ADIVMTQTPASVSEPVGGTVTIKCQASQSISSYLSWYQQKPGQPPKLLIYRASTLASGVPSRFKGSGSGTQFTLTISDLECADAATYYCQSYYYSSSITYRNAFGGGTEVVVKRTVAAPSVFIFPPSDEQLKSGTASVVCLLNNFYPREAKVQWKVDNALQSGNSQESVTEQDSKDSTYSLSSTLTLSKADYEKHKVYACEVTHQGLSSPVTKSFNRGEC

SEQ ID NO: 4047 - protein, 219 aa, Artificial Sequence
  source: /note="Description of Artificial Sequence: Synthetic polypeptide"
DVVMTQTPASVEAAVGGTVTIKCQASQSISSYLAWYQQKPGQPPKLLIYSASTLASGVPSRFKGRGSGTEFTLTISDLECADAATYYCQSYDGSSGSSYGVGFGGGTEVVVKRTVAAPSVFIFPPSDEQLKSGTASVVCLLNNFYPREAKVQWKVDNALQSGNSQESVTEQDSKDSTYSLSSTLTLSKADYEKHKVYACEVTHQGLSSPVTKSFNRGEC

SEQ ID NO: 4048 - protein, 220 aa, Artificial Sequence
  source: /note="Description of Artificial Sequence: Synthetic polypeptide"
ADIVMTQTPASVEAAVGGAVTIKCQATQSIGNNLAWYQQKPGQPPKLLIYRASTLASGVPSRFKGSGSGTEFTLTISDLECADAATYYCQSYYYSSSITYHNAFGGGTEVVVKRTVAAPSVFIFPPSDEQLKSGTASVVCLLNNFYPREAKVQWKVDNALQSGNSQESVTEQDSKDSTYSLSSTLTLSKADYEKHKVYACEVTHQGLSSPVTKSFNRGEC

SEQ ID NO: 4049 - protein, 220 aa, Artificial Sequence
  source: /note="Description of Artificial Sequence: Synthetic polypeptide"
ADIVMTQTPASVEAAVGGTVTIKCQASQSISDYLSWYQQKPGQPPKLLIYRASTLASGVPSRFKGSGSGTQFTLTISDLECADAATYYCQSYYYSSSITYRNAFGGGTEVVVKRTVAAPSVFIFPPSDEQLKSGTASVVCLLNNFYPREAKVQWKVDNALQSGNSQESVTEQDSKDSTYSLSSTLTLSKADYEKHKVYACEVTHQGLSSPVTKSFNRGEC

SEQ ID NO: 4050 - protein, 220 aa, Artificial Sequence
  source: /note="Description of Artificial Sequence: Synthetic polypeptide"
ADVVMTQTPASVEAAVGGTVTIKCQASQSISSYLSWYQQKPGQPPKLLIYRASTLASGVPSRFKGSGSGTQFTLTISDLECADAATYYCQSYYYSSSITYRNAFGGGTEVVVKRTVAAPSVFIFPPSDEQLKSGTASVVCLLNNFYPREAKVQWKVDNALQSGNSQESVTEQDSKDSTYSLSSTLTLSKADYEKHKVYACEVTHQGLSSPVTKSFNRGEC

SEQ ID NO: 4051 - protein, 219 aa, Artificial Sequence
  source: /note="Description of Artificial Sequence: Synthetic polypeptide"
DVVMTQTPASVEAAVGGTVTINCQASENIYRSLAWYQQKPGQPPKLLIYSASTLASGVPSRFKGSGSGTEFTLTISDLECADAATYYCQSYDGSSSSSYGVGFGGGTEVVVKRTVAAPSVFIFPPSDEQLKSGTASVVCLLNNFYPREAKVQWKVDNALQSGNSQESVTEQDSKDSTYSLSSTLTLSKADYEKHKVYACEVTHQGLSSPVTKSFNRGEC

SEQ ID NO: 4052 - protein, 219 aa, Artificial Sequence
  source: /note="Description of Artificial Sequence: Synthetic polypeptide"
DIVMTQIPASVEAAVGGTVTIKCQASQSIDSSLAWYQQKPGQPPKLLIYSASTLASGVPSRFKGSGSGTEFTLTIGDLECADAATYYCQSYDGSSSSYYGIGFGGGTEVVVKRTVAAPSVFIFPPSDEQLKSGTASVVCLLNNFYPREAKVQWKVDNALQSGNSQESVTEQDSKDSTYSLSSTLTLSKADYEKHKVYACEVTHQGLSSPVTKSFNRGEC

SEQ ID NO: 4053 - protein, 219 aa, Artificial Sequence
  source: /note="Description of Artificial Sequence: Synthetic polypeptide"
DVVMTQTPSSVSAAVGGTVTIKCQASQSIGSSLAWYQQKPGQRPKLLIYAASTLASGVPSRFKGSGSGTEFTLTISDLECADAATYYCQSYDGSSSSSYGVGFGGGTEVVVKRTVAAPSVFIFPPSDEQLKSGTASVVCLLNNFYPREAKVQWKVDNALQSGNSQESVTEQDSKDSTYSLSSTLTLSKADYEKHKVYACEVTHQGLSSPVTKSFNRGEC

SEQ ID NO: 4054 - protein, 219 aa, Artificial Sequence
  source: /note="Description of Artificial Sequence: Synthetic polypeptide"
DIQMTQSPSTLSASVGDRVTITCQASQSISSYLAWYQQKPGKAPKLLIYSASTLASGVPSRFSGSGSGTEFTLTISSLQPDDFATYYCQSYDGSSGSSYGVGFGGGTKVEIKRTVAAPSVFIFPPSDEQLKSGTASVVCLLNNFYPREAKVQWKVDNALQSGNSQESVTEQDSKDSTYSLSSTLTLSKADYEKHKVYACEVTHQGLSSPVTKSFNRGEC

SEQ ID NO: 4055 - protein, 219 aa, Artificial Sequence
  source: /note="Description of Artificial Sequence: Synthetic polypeptide"
DIQMTQSPSTLSASVGDRVTITCQASQSISNYLAWYQQKPGKAPKLLIYSASTLASGVPSRFSGSGSGTEFTLTISSLQPDDFATYYCQSYEGSSSSSYGVGFGGGTKVEIKRTVAAPSVFIFPPSDEQLKSGTASVVCLLNNFYPREAKVQWKVDNALQSGNSQESVTEQDSKDSTYSLSSTLTLSKADYEKHKVYACEVTHQGLSSPVTKSFNRGEC

SEQ ID NO: 4056 - protein, 219 aa, Artificial Sequence
  source: /note="Description of Artificial Sequence: Synthetic polypeptide"
DIQMTQSPSTLSASVGDRVTITCQASEDISSNLAWYQQKPGKAPKLLIYSASTLASGVPSRFSGSGSGTEFTLTISSLQPDDFATYYCQSYDGSSSSSYGIGFGGGTKVEIKRTVAAPSVFIFPPSDEQLKSGTASVVCLLNNFYPREAKVQWKVDNALQSGNSQESVTEQDSKDSTYSLSSTLTLSKADYEKHKVYACEVTHQGLSSPVTKSFNRGEC

SEQ ID NO: 4057 - protein, 219 aa, Artificial Sequence
  source: /note="Description of Artificial Sequence: Synthetic polypeptide"
DIQMTQSPSTLSASVGDRVTITCRASQSISVYLAWYQQKPGKAPKLLIYQASKLASGVPSRFSGSGSGTEFTLTISSLQPDDFATYYCQSYDGSSSSSYGVGFGGGTKVEIKRTVAAPSVFIFPPSDEQLKSGTASVVCLLNNFYPREAKVQWKVDNALQSGNSQESVTEQDSKDSTYSLSSTLTLSKADYEKHKVYACEVTHQGLSSPVTKSFNRGEC

SEQ ID NO: 4058 - protein, 219 aa, Artificial Sequence
  source: /note="Description of Artificial Sequence: Synthetic polypeptide"
DVVMTQTPASVEAAVGGTVTIKCQASQSISNYLAWYQQKTGQPPKLLIYSASTLASGVPSRFKGSGSGTEFTLTISDLECADAATYYCQSYEGSSSSSYGVGFGGGTEVVVKRTVAAPSVFIFPPSDEQLKSGTASVVCLLNNFYPREAKVQWKVDNALQSGNSQESVTEQDSKDSTYSLSSTLTLSKADYEKHKVYACEVTHQGLSSPVTKSFNRGEC

SEQ ID NO: 4059 - protein, 219 aa, Artificial Sequence
  source: /note="Description of Artificial Sequence: Synthetic polypeptide"
DIQMTQSPSTLSASVGDRVTITCQATQSIGNNLAWYQQKPGKAPKLLIYRASTLASGVPSRFSGSGSGTEFTLTISSLQPDDFATYYCQSYYYSSSITYHNAFGGGTKVEIKRTVAAPSVFIFPPSDEQLKSGTASVVCLLNNFYPREAKVQWKVDNALQSGNSQESVTEQDSKDSTYSLSSTLTLSKADYEKHKVYACEVTHQGLSSPVTKSFNRGEC

SEQ ID NO: 4060 - protein, 219 aa, Artificial Sequence
  source: /note="Description of Artificial Sequence: Synthetic polypeptide"
DIQMTQSPSTLSASVGDRVTITCQASQSISDYLSWYQQKPGKAPKLLIYRASTLASGVPSRFSGSGSGTEFTLTISSLQPDDFATYYCQSYYYSSSITYRNAFGGGTKVEIKRTVAAPSVFIFPPSDEQLKSGTASVVCLLNNFYPREAKVQWKVDNALQSGNSQESVTEQDSKDSTYSLSSTLTLSKADYEKHKVYACEVTHQGLSSPVTKSFNRGEC

SEQ ID NO: 4061 - protein, 220 aa, Artificial Sequence
  source: /note="Description of Artificial Sequence: Synthetic polypeptide"
ADIQMTQSPSTLSASVGDRVTITCQASQSISDYLSWYQQKPGKAPKLLIYRASTLASGVPSRFSGSGSGTEFTLTISSLQPDDFATYYCQSYYYSSSITYRNAFGGGTKVEIKRTVAAPSVFIFPPSDEQLKSGTASVVCLLNNFYPREAKVQWKVDNALQSGNSQESVTEQDSKDSTYSLSSTLTLSKADYEKHKVYACEVTHQGLSSPVTKSFNRGEC

SEQ ID NO: 4062 - protein, 219 aa, Artificial Sequence
  source: /note="Description of Artificial Sequence: Synthetic polypeptide"
DIQMTQSPSTLSASVGDRVTITCQASENIYRSLAWYQQKPGKAPKLLIYSASTLASGVPSRFSGSGSGTEFTLTISSLQPDDFATYYCQSYDGSSSSSYGVGFGGGTKVEIKRTVAAPSVFIFPPSDEQLKSGTASVVCLLNNFYPREAKVQWKVDNALQSGNSQESVTEQDSKDSTYSLSSTLTLSKADYEKHKVYACEVTHQGLSSPVTKSFNRGEC

SEQ ID NO: 4063 - protein, 219 aa, Artificial Sequence
  source: /note="Description of Artificial Sequence: Synthetic polypeptide"
DIQMTQSPSTLSASVGDRVTITCQASQSIDSSLAWYQQKPGKAPKLLIYSASTLASGVPSRFSGSGSGTEFTLTISSLQPDDFATYYCQSYDGSSSSYYGIGFGGGTKVEIKRTVAAPSVFIFPPSDEQLKSGTASVVCLLNNFYPREAKVQWKVDNALQSGNSQESVTEQDSKDSTYSLSSTLTLSKADYEKHKVYACEVTHQGLSSPVTKSFNRGEC

SEQ ID NO: 4064 - protein, 219 aa, Artificial Sequence
  source: /note="Description of Artificial Sequence: Synthetic polypeptide"
DIQMTQSPSTLSASVGDRVTITCQASQSIGSSLAWYQQKPGKAPKLLIYSASTLASGVPSRFSGSGSGTEFTLTISSLQPDDFATYYCQSYEGSSSSYYGIGFGGGTKVEIKRTVAAPSVFIFPPSDEQLKSGTASVVCLLNNFYPREAKVQWKVDNALQSGNSQESVTEQDSKDSTYSLSSTLTLSKADYEKHKVYACEVTHQGLSSPVTKSFNRGEC

SEQ ID NO: 4065 - protein, 219 aa, Artificial Sequence
  source: /note="Description of Artificial Sequence: Synthetic polypeptide"
DIQMTQSPSTLSASVGDRVTITCQASQSIGSSLAWYQQKPGKAPKLLIYAASTLASGVPSRFSGSGSGTEFTLTISSLQPDDFATYYCQSYDGSSSSSYGVGFGGGTKVEIKRTVAAPSVFIFPPSDEQLKSGTASVVCLLNNFYPREAKVQWKVDNALQSGNSQESVTEQDSKDSTYSLSSTLTLSKADYEKHKVYACEVTHQGLSSPVTKSFNRGEC

SEQ ID NO: 4066 - protein, 111 aa, Artificial Sequence
  source: /note="Description of Artificial Sequence: Synthetic polypeptide"
DIQLTQSPSSLSASVGDRVTITCKASQSVDYDGDSYMNWYQQKPGKAPKFLICAASNLESGVPSRFSGSGSGTDFTLTISSLQPEDAATYYCQQSNEDPFTFGQGTKLEIK

SEQ ID NO: 4067 - protein, 111 aa, Artificial Sequence
  source: /note="Description of Artificial Sequence: Synthetic polypeptide"
DIQLTQSPSSLSASVGDRVTITCKASQSVDYDGDSYMNWYQQKPGKAPKFLIYAASNLESGVPSRFSGSGSGTDFTLTISSLQPEDAATYYCQQSNEDPFTFGQGTKLEIK

SEQ ID NO: 4068 - protein, 111 aa, Artificial Sequence
  source: /note="Description of Artificial Sequence: Synthetic polypeptide"
DIQLTQSPSSLSASVGDRVTITCKASQSVDYDGDSYMNWYQQKPGKAPKFLICAASNLESGVPSRFSGSGSGTDFTLTISSLQPEDFATYYCQQSNEDPFTFGQGTKLEIK

SEQ ID NO: 4069 - protein, 111 aa, Artificial Sequence
  source: /note="Description of Artificial Sequence: Synthetic polypeptide"
DIQLTQSPSSLSASVGDRVTITCKASQSVDYDGDSYMNWYQQKPGKAPKFLIYAASNLESGVPSRFSGSGSGTDFTLTISSLQPEDFATYYCQQSNEDPFTFGQGTKLEIK

SEQ ID NO: 4070 - protein, 111 aa, Artificial Sequence
  source: /note="Description of Artificial Sequence: Synthetic polypeptide"
DIQLTQSPSSLSASVGDRVTITCKASQSVDYDGDSYMNWYQQKPGKAPKLLIYAASNLESGVPSRFSGSGSGTDFTLTISSLQPEDFATYYCQQSNEDPFTFGQGTKLEIK

SEQ ID NO: 4071 - protein, 111 aa, Artificial Sequence
  source: /note="Description of Artificial Sequence: Synthetic polypeptide"
  MOD_RES (50)..(50): Any amino acid
  MOD_RES (53)..(53): Any amino acid
  MOD_RES (87)..(87): Any amino acid
DIQLTQSPSSLSASVGDRVTITCKASQSVDYDGDSYMNWYQQKPGKAPKXLIXAASNLESGVPSRFSGSGSGTDFTLTISSLQPEDXATYYCQQSNEDPFTFGQGTKLEIK

SEQ ID NO: 4072 - protein, 112 aa, Artificial Sequence; identical to SEQ ID NO: 4038
  source: /note="Description of Artificial Sequence: Synthetic polypeptide"

SEQ ID NO: 4073 - protein, 112 aa, Artificial Sequence; identical to SEQ ID NO: 4039
  source: /note="Description of Artificial Sequence: Synthetic polypeptide"

SEQ ID NO: 4074 - protein, 111 aa, Artificial Sequence; identical to SEQ ID NO: 4071
  source: /note="Description of Artificial Sequence: Synthetic polypeptide"
  MOD_RES (50)..(50): Any amino acid
  MOD_RES (53)..(53): Any amino acid
  MOD_RES (87)..(87): Any amino acid

SEQ ID NO: 4075 - protein, 218 aa, Artificial Sequence
  source: /note="Description of Artificial Sequence: Synthetic polypeptide"
DIQLTQSPSSLSASVGDRVTITCKASQSVDYDGDSYMNWYQQKPGKAPKFLICAASNLESGVPSRFSGSGSGTDFTLTISSLQPEDFATYYCQQSNEDPFTFGQGTKLEIKRTVAAPSVFIFPPSDEQLKSGTASVVCLLNNFYPREAKVQWKVDNALQSGNSQESVTEQDSKDSTYSLSSTLTLSKADYEKHKVYACEVTHQGLSSPVTKSFNRGEC

SEQ ID NO: 4076 - protein, 217 aa, Artificial Sequence
  source: /note="Description of Artificial Sequence: Synthetic polypeptide"
DIQLTQSPSSLSASVGDRVTITCKASQSVDYDGDSYMNWYQQKPGKAPKFLICAASNLESGVPSRFSGSGSGTDFTLTISSLQPEDFATYYCQQSNEDPFTFGQGTKLEIKTVAAPSVFIFPPSDEQLKSGTASVVCLLNNFYPREAKVQWKVDNALQSGNSQESVTEQDSKDSTYSLSSTLTLSKADYEKHKVYACEVTHQGLSSPVTKSFNRGEC

SEQ ID NO: 4077 - protein, 113 aa, Artificial Sequence
  source: /note="Description of Artificial Sequence: Synthetic polypeptide"
  MOD_RES (42)..(42): Any amino acid
  MOD_RES (89)..(89): Any amino acid
DIQMTQSPSSLSASVGDRVTITCKSIQTLLYSSNQKNYLAWXQQKPGKAPKLLIYWASIRKSGVPSRFSGSGSGTDFTLTISSLQPEDXATYYCQQYYSYPLTFGGGTKLEIK

SEQ ID NO: 4078 - protein, 220 aa, Artificial Sequence
  source: /note="Description of Artificial Sequence: Synthetic polypeptide"
DIQMTQSPSSLSASVGDRVTITCKSIQTLLYSSNQKNYLAWFQQKPGKAPKLLIYWASIRKSGVPSRFSGSGSGTDFTLTISSLQPEDLATYYCQQYYSYPLTFGGGTKLEIKRTVAAPSVFIFPPSDEQLKSGTASVVCLLNNFYPREAKVQWKVDNALQSGNSQESVTEQDSKDSTYSLSSTLTLSKADYEKHKVYACEVTHQGLSSPVTKSFNRGEC

SEQ ID NO: 4079 - protein, 219 aa, Artificial Sequence
  source: /note="Description of Artificial Sequence: Synthetic polypeptide"
DIQMTQSPSSLSASVGDRVTITCKSIQTLLYSSNQKNYLAWFQQKPGKAPKLLIYWASIRKSGVPSRFSGSGSGTDFTLTISSLQPEDLATYYCQQYYSYPLTFGGGTKLEIKTVAAPSVFIFPPSDEQLKSGTASVVCLLNNFYPREAKVQWKVDNALQSGNSQESVTEQDSKDSTYSLSSTLTLSKADYEKHKVYACEVTHQGLSSPVTKSFNRGEC

SEQ ID NO: 4080 - protein, 112 aa, Artificial Sequence; identical to SEQ ID NO: 4040
  source: /note="Description of Artificial Sequence: Synthetic polypeptide"

SEQ ID NO: 4081 - protein, 217 aa, Artificial Sequence
  source: /note="Description of Artificial Sequence: Synthetic polypeptide"
AQAAELVMTQTPASVSAAVGGTVTINCQSSESVYNSRLSWFQQKPGQPPKLLIYFASTLASGVSSRFSGSGSGTEFTLTISGVQCDDAATYYCAGHFSNSVYTFGGGTEVVVTGDPVAPTVLIFPPSADLVATGTVTIVCVANKYFPDVTVTWEVDGTTQTTGIENSKTPQNSADCTYNLSSTLTLTSTQYNSHKEYTCKVTQGTTSVVQSFNRGDC

SEQ ID NO: 4082 - protein, 220 aa, Artificial Sequence
  source: /note="Description of Artificial Sequence: Synthetic polypeptide"
AQAAELVMTQTPSSVSEPVGGTVTIKCQASQSIDSYLSWYQQKPGQPPKLLIYSASTLASGVPSRFKGSGSGTQFTLTISDLECADAATYYCQSNYWSTSYSYAVPFGGGTEVVVKGDPVAPTVLIFPPSADLVATGTVTIVCVANKYFPDVTVTWEVDGTTQTTGIENSKTPQNSADCTYNLSSTLTLTSTQYNSHKEYTCKVTQGTTSVVQSFNRGDC

SEQ ID NO: 4083 - protein, 220 aa, Artificial Sequence; identical to SEQ ID NO: 4082
  source: /note="Description of Artificial Sequence: Synthetic polypeptide"

SEQ ID NO: 4084 - protein, 217 aa, Artificial Sequence
  source: /note="Description of Artificial Sequence: Synthetic polypeptide"
AQAAELDMTQTPASVSEPVGGTVTIKCQASQSISSYLAWYQQKPGQRPRLLIYETSTLASGVPSRFKGSGSGTEFTLTISDLECADAATYYCQSTYENPTYVSFGGGTEVGVKGDPVAPTVLIFPPSADLVATGTVTIVCVANKYFPDVTVTWEVDGTTQTTGIENSKTPQNSADCTYNLSSTLTLTSTQYNSHKEYTCKVTQGTTSVVQSFNRGDC

SEQ ID NO: 4085 - protein, 218 aa, Artificial Sequence; identical to SEQ ID NO: 3859
  source: /note="Description of Artificial Sequence: Synthetic polypeptide"

SEQ ID NO: 4086 - protein, 239 aa, Artificial Sequence
  source: /note="Description of Artificial Sequence: Synthetic polypeptide"
MDSQAQVLILLLLWVSGTCGDIVMSQSPSSLAVSAGEKVTMSCKSSQSLLNSRTRKNYLAWYQQKPGQSPKLLIYWASTRESGVPDRFTGSGSGTDFTLTISSVQAEDLAVYYCKQSYDLRTFGGGTKVEIKRTVAAPSVFIFPPSDEQLKSGTASVVCLLNNFYPREAKVQWKVDNALQSGNSQESVTEQDSKDSTYSLSSTLTLSKADYEKHKVYACEVTHQGLSSPVTKSFNRGEC

SEQ ID NO: 4087 - protein, 228 aa, Artificial Sequence
  source: /note="Description of Artificial Sequence: Synthetic polypeptide"
MFWIPASSSDVVMTQTPLSLPVSLGDQASISCRSSQSLVHSNGNTYLHWYLQKPGQSPKLLIYKVSNRFSGVPDRFSGSGSGTDFTLKISRVEAEDLGVYFCSQSTHVPPTFGGGTKVEIKRTVAAPSVFIFPPSDEQLKSGTASVVCLLNNFYPREAKVQWKVDNALQSGNSQESVTEQDSKDSTYSLSSTLTLSKADYEKHKVYACEVTHQGLSSPVTKSFNRGEC

SEQ ID NO: 4088 - protein, 239 aa, Artificial Sequence
  source: /note="Description of Artificial Sequence: Synthetic polypeptide"
MDSQAQVLILLLLWVSGTCGDIVMTQSPDSLAVSLGERATINCKSSQSLLNSRTRKNYLAWYQQKPGQPPKLLIYWASTRESGVPDRFSGSGSGTDFTLTISSLQAEDVAVYYCKQSYDLRTFGGGTKVEIKRTVAAPSVFIFPPSDEQLKSGTASVVCLLNNFYPREAKVQWKVDNALQSGNSQESVTEQDSKDSTYSLSSTLTLSKADYEKHKVYACEVTHQGLSSPVTKSFNRGEC

SEQ ID NO: 4089 - protein, 208 aa, Artificial Sequence
  source: /note="Description of Artificial Sequence: Synthetic polypeptide"
MKLPVRLLVLMFWIPASSSDVVMTQTPLSLPVSLGDQASISCRSSQSLVHSNGNTYLHWYLQKPGQSPKLLIYKVSNRFSGVPDRFSGSGSGTDFTLKISRVEAEDLGVYFCSQSTHVPPTFGGGTKLEIKRADAAPTVSIFPPSSEQLTSGGASVVCFLNNFYPKDINVKWKIDGSERQNGVLNSWTDQDSKDSTYSMSSTLTLTKD

SEQ ID NO: 4090 - protein, 238 aa, Artificial Sequence
  source: /note="Description of Artificial Sequence: Synthetic polypeptide"
MKLPVRLLVLMFWIPASSSDVVMTQSPLSLPVTLGQPASISCRSSQSLVHSNGNTYLHWFQQRPGQSPRRLIYKVSNRFSGVPDRFSGSGSGTDFTLKISRVEAEDVGVYYCSQSTHVPPTFGGGTKVEIKRTVAAPSVFIFPPSDEQLKSGTASVVCLLNNFYPREAKVQWKVDNALQSGNSQESVTEQDSKDSTYSLSSTLTLSKADYEKHKVYACEVTHQGLSSPVTKSFNRGEC

SEQ ID NO: 4091 - protein, 239 aa, Artificial Sequence
  source: /note="Description of Artificial Sequence: Synthetic polypeptide"
MDSQAQVLILLLLWVSGTCGDIVMTQSPLSLPVTPGEPASISCKSSQSLLNSRTRKNYLAWYLQKPGQSPQLLIYWASTRESGVPDRFSGSGSGTDFTLKISRVEAEDVGVYYCKQSYDLRTFGGGTKVEIKRTVAAPSVFIFPPSDEQLKSGTASVVCLLNNFYPREAKVQWKVDNALQSGNSQESVTEQDSKDSTYSLSSTLTLSKADYEKHKVYACEVTHQGLSSPVTKSFNRGEC

SEQ ID NO: 4092 - protein, 239 aa, Artificial Sequence
  source: /note="Description of Artificial Sequence: Synthetic polypeptide"
MDSQAQVLILLLLWVSGTCGDVVMTQSPLSLPVTLGQPASISCKSSQSLLNSRTRKNYLAWFQQRPGQSPRLRIYWASTRESGVPDRFSGSGSGTDFTLTISRVEAEDVGVYYCKQSYDLRTFGGGTKVEIKRTVAAPSVFIFPPSDEQLKSGTASVVCLLNNFYPREAKVQWKVDNALQSGNSQESVTEQDSKDSTYSLSSTLTLSKADYEKHKVYACEVTHQGLSSPVTKSFNRGEC

SEQ ID NO: 4093 - protein, 238 aa, Artificial Sequence
  source: /note="Description of Artificial Sequence: Synthetic polypeptide"
MKLPVRLLVLMFWIPASSSEIVMTQTPLSLSITPGEQASISCRSSQSLVHSNGNTYLHWFLQKARPVSTLLIYKVSNRFSGVPDRFSGSGSGTDFTLKISRVEAEDFGVYYCSQSTHVPPTFGGGTKVEIKRTVAAPSVFIFPPSDEQLKSGTASVVCLLNNFYPREAKVQWKVDNALQSGNSQESVTEQDSKDSTYSLSSTLTLSKADYEKHKVYACEVTHQGLSSPVTKSFNRGEC

SEQ ID NO: 4094 - protein, 238 aa, Artificial Sequence
  source: /note="Description of Artificial Sequence: Synthetic polypeptide"
MKLPVRLLVLMFWIPASSSDIVMTQTPLSLPVTPGEPASISCRSSQSLVHSNGNTYLHWYLQKPGQSPQLLIYKVSNRFSGVPDRFSGSGSGTDFTLKISRVEAEDVGVYYCSQSTHVPPTFGGGTKVEIKRTVAAPSVFIFPPSDEQLKSGTASVVCLLNNFYPREAKVQWKVDNALQSGNSQESVTEQDSKDSTYSLSSTLTLSKADYEKHKVYACEVTHQGLSSPVTKSFNRGEC

SEQ ID NO: 4095 - protein, 239 aa, Artificial Sequence
  source: /note="Description of Artificial Sequence: Synthetic polypeptide"
MDSQAQVLILLLLWVSGTCGDIVMSQSPSSLAVSAGEKVTMSCKSSQSLLNSRTRKNYLAWYQQKPGQSPKLLIYWASTRESGVPDRFTGSGSGTDFTLTISSVQAEDLAVYYCKQSYDLRTFGGGTKLEIKRADAAPTVSIFPPSSEQLTSGGASVVCFLNNFYPKDINVKWKIDGSERQNGVLNSWTDQDSKDSTYSMSSTLTLTKDEYERHNSYTCEATHKTSTSPIVKSFNRNEC

SEQ ID NO: 4096 - protein, 238 aa, Artificial Sequence
  source: /note="Description of Artificial Sequence: Synthetic polypeptide"
MGWSCIILFLVATATGVHSDIVMTQSPLSLPVTLGQPASISCRSSKSLLYKDGKTYLNWFQQRPGQSPQLLIYLMSTRASGVPDRFSGGGSGTDFTLKISRVEAEDVGVYYCQQLVEYPLTFGQGTKLEIKRTVAAPSVFIFPPSDEQLKSGTASVVCLLNNFYPREAKVQWKVDNALQSGNSQESVTEQDSKDSTYSLSSTLTLSKADYEKHKVYACEVTHQGLSSPVTKSFNRGEC

SEQ ID NO: 4097 - protein, 238 aa, Artificial Sequence
  source: /note="Description of Artificial Sequence: Synthetic polypeptide"
MGWSCIILFLVATATGVHSDIVMTQSPLSNPVTLGQPVSISCRSSKSLLYKDGKTYLNWFLQRPGQSPQLLIYLMSTRASGVPDRFSGGGSGTDFTLKISRVEAEDVGVYYCQQLVEYPLTFGQGTKLEIKRTVAAPSVFIFPPSDEQLKSGTASVVCLLNNFYPREAKVQWKVDNALQSGNSQESVTEQDSKDSTYSLSSTLTLSKADYEKHKVYACEVTHQGLSSPVTKSFNRGEC

SEQ ID NO: 4098 - protein, 238 aa, Artificial Sequence
  source: /note="Description of Artificial Sequence: Synthetic polypeptide"
MGWSCIILFLVATATGVHSDIVMTQDPLSNPVTLGQPVSISCRSSKSLLYKDGKTYLNWFLQRPGQSPQLLIYLMSTRASGVSDRFSGSGSGTDFTLKISRVEAEDVGVYYCQQLVEYPLTFGQGTKLEIKRTVAAPSVFIFPPSDEQLKSGTASVVCLLNNFYPREAKVQWKVDNALQSGNSQESVTEQDSKDSTYSLSSTLTLSKADYEKHKVYACEVTHQGLSSPVTKSFNRGEC

SEQ ID NO: 4099 - protein, 144 aa, Artificial Sequence
  source: /note="Description of Artificial Sequence: Synthetic polypeptide"
MKLPVRLLVLMFWIPASSSDVVMTQTPLSLPVSLGDQASISCRSSQSLVHSNGNTYLHWYLQKPGQSPKLLIYKVSNRFSGVPDRFSGSGSGTDFTLKISRVDAEDLGVYFCSQSTHVPFTFGGGTKLEIKRADAAPTVSISHH

SEQ ID NO: 4100 - protein, 116 aa, Artificial Sequence
  source: /note="Description of Artificial Sequence: Synthetic polypeptide"
VQLQESGAELVMPGASVKMSCKASGYTFTDYWMHWVKQRPGQGLEWIGAIDPSDSYSSYNQNFKGKATLTVDGSSSTAYMQLSSLTSEDSAVYYCARRITEAGAWFAYWGQGTTVT

SEQ ID NO: 4101 - protein, 112 aa, Artificial Sequence
  source: /note="Description of Artificial Sequence: Synthetic polypeptide"
NDIVMTQSPASLAVSLGQRATISYRASKSVSTSGYSYMHWNQQKPGQPPRLLIYLVSNLESGVPARFSGSGSGTDFTLNIHPVEEEDAATYYCQHIRELTRSARGQSWKKRC

SEQ ID NO: 4102 - protein, 109 aa, Artificial Sequence
  source: /note="Description of Artificial Sequence: Synthetic polypeptide"
NQIVLTQSPAIMSASPGEKVTITCSASSSVSYMYWFQQKPGTSPKLWIYSTSNLASGVPARFSGSGSGTSYSLTISRMEAEDAATYYCQQRSSYPLTFGAGTKLELKRC

SEQ ID NO: 4103 - protein, 114 aa, Artificial Sequence
  source: /note="Description of Artificial Sequence: Synthetic polypeptide"
NDIVLTQSPASLAVSLGQRATISCRASESVDNYGISFMNWFQQKPGQPPKLLIYAASNQGSGVPARFSGSGSGTDFSLNIHPMEEDDTAMYFCQQSKEVPRTFGGGTKLEMKRC

SEQ ID NO: 4104 - protein, 110 aa, Artificial Sequence
  source: /note="Description of Artificial Sequence: Synthetic polypeptide"
NDIQMTQSPSSLSASVGDRVTITCRASQGIRNDLGWYQQKPGKAPKRLIYAASSLQSGVPSRFSGSGSGTEFTLTISSLQPEDFATFYCLQHNSLPLTFGGGTKVEIKRC

SEQ ID NO: 4105 - protein, 116 aa, Artificial Sequence
  source: /note="Description of Artificial Sequence: Synthetic polypeptide"
NDIQMTQSPDSLAVSLGERATINCKSSQSVSYSSNNKNYLAWYQQKPGQPPKLLIYWASTRESGVPDRISGSGSGTDFTLTISSLQAEDVAVYYCQQHYNTPLTFGGGTKVEIKRC

SEQ ID NO: 4106 - protein, 112 aa, Artificial Sequence
  source: /note="Description of Artificial Sequence: Synthetic polypeptide"
NEIVLTQSPGTLSLSPGERATLSCRASQSVSSNYLTWYQQKPGQAPRLLIYGASSRATGIPDRFSGSGSGTDFTLTISRLEPEDFAVYYCQQYGRSPPITFGQGTRLEIKRC

SEQ ID NO: 4107 - protein, 112 aa, Artificial Sequence
  source: /note="Description of Artificial Sequence: Synthetic polypeptide"
NGIVLTQSPGTLSLSPGERATFSCRASQSGSSTYLAWYQQKPGQAPRLLIYGASSRATGIPDRFSGSGSGTDFTLTISRLEPEDFAVYYCQQYGRSPPITFGQGTRLEIKRC

SEQ ID NO: 4108 - protein, 113 aa, Artificial Sequence; identical to SEQ ID NO: 4077
  source: /note="Description of Artificial Sequence: Synthetic polypeptide"
  MOD_RES (42)..(42): Any amino acid
  MOD_RES (89)..(89): Any amino acid

SEQ ID NO: 4109 - protein, 107 aa, Artificial Sequence [sequence omitted]

SEQ ID NO: 4110 - protein, 330 aa, Artificial Sequence; identical to SEQ ID NO: 3789
  source: /note="Description of Artificial Sequence: Synthetic polypeptide"

SEQ ID NO: 4111 - protein, 107 aa, Artificial Sequence [sequence omitted]

SEQ ID NO: 4112 - protein, 107 aa, Artificial Sequence [sequence omitted]

SEQ ID NO: 4113 - protein, 106 aa, Artificial Sequence; identical to SEQ ID NO: 4042
  source: /note="Description of Artificial Sequence: Synthetic polypeptide"

SEQ ID NO: 4114 - protein, 234 aa, Artificial Sequence
  source: /note="Description of Artificial Sequence: Synthetic polypeptide"
METDTLLLWLLLLMFPGTRCDIQMTQSPSSLSASLGERVSLTCRASQDIGGNLYWLQQGPDGTIKRLIYATSSLDSGVPKRFSGSRSGSDYSLTISSLESEDFVDYYCLQYSSSPWTFGGATKMEIKRTVAAPSVFIFPPSDEQLKSGTASVVCLLNNFYPREAKVQWKVDNALQSGNSQESVTEQDSKDSTYSLSSTLTLSKADYEKHKVYACEVTHQGLSSPVTKSFNRGEC

SEQ ID NO: 4115 - protein, 234 aa, Artificial Sequence; identical to SEQ ID NO: 4114
  source: /note="Description of Artificial Sequence: Synthetic polypeptide"

SEQ ID NO: 4116 - protein, 238 aa, Artificial Sequence
  source: /note="Description of Artificial Sequence: Synthetic polypeptide"
MGWSCIILFLVATATGVHSDIVITQSPLSLPVTLGQPASISCRSSKSLLYKDGKTYLNWFQQRPGQSPQLLIYLMSTRASGVPDRFSGGGSGTDFTLKISRVEAEDVGVYYCQQLVEYPLTFGQGTKLEIKRTVAAPSVFIFPPSDEQLKSGTASVVCLLNNFYPREAKVQWKVDNALQSGNSQESVTEQDSKDSTYSLSSTLTLSKADYEKHKVYACEVTHQGLSSPVTKSFNRGEC

SEQ ID NO: 4117 - protein, 237 aa, Artificial Sequence
  source: /note="Description of Artificial Sequence: Synthetic polypeptide"
MGWSCIILFLVATATGVHSDIVMTQSPLSLPVTLGQPASISCRSSKSLLYKDGKTYLNWFQQRPGQSPQLLIYLMSTRASGVPDRFSGGGSGTDFTLKISRVEAEDVGVYYCQQLVEYPLTFGQGTKLEIKRTVAAPSVFIFPPSDEQLKSGTASWCLLNNFYPREAKVQWKVDNALQSGNSQESVTEQDSKDSTYSLSSTLTLSKADYEKHKVYACEVTHQGLSSPVTKSFNRGEC

SEQ ID NO: 4118 - protein, 238 aa, Artificial Sequence
  source: /note="Description of Artificial Sequence: Synthetic polypeptide"
MGWSCIILFLVATATGVHSDIVMTQSPLSLPVTLGQPASISCRSSKSLLYKDGKTYLNWFLQRPGQSPQLLIYLMSTRASGVPDRFSGGGSGTDFTLKISRVEAEDVGVYYCQQLVEYPLTFGQGTKLEIKRTVAAPSVFIFPPSDEQLKSGTASVVCLLNNFYPREAKVQWKVDNALQSGNSQESVTEQDSKDSTYSLSSTLTLSKADYEKHKVYACEVTHQGLSSPVTKSFNRGEC

SEQ ID NO: 4119 - protein, 237 aa, Artificial Sequence
  source: /note="Description of Artificial Sequence: Synthetic polypeptide"
MGWSCIILFLVATATGVHSDIVMTQSPLSLPVTLGQPASISCRSSKSLLYKDGKTYLNWFLQRPGQSPQLLIYLMSTRASGVSDRFSGGGSGTDFTLKISRVEAEDVGVYYCQQLVEYPLTFGQGTKLEIKRTVAAPSVFIFPPSDEQLKSGTASWCLLNNFYPREAKVQWKVDNALQSGNSQESVTEQDSKDSTYSLSSTLTLSKADYEKHKVYACEVTHQGLSSPVTKSFNRGEC

SEQ ID NO: 4120 - protein, 237 aa, Artificial Sequence
  source: /note="Description of Artificial Sequence: Synthetic polypeptide"
MGWSCIILFLVATATGVHSDIVMTQSPLSNPVTLGQPVSISCRSSKSLLYKDGKTYLNWFLQRPGQSPQLLIYLMSTRASGVPDRFSGGGSGTDFTLKISRVEAEDVGVYYCQQLVEYPLTFGQGTKLEIKRTVAAPSVFIFPPSDEQLKSGTASWCLLNNFYPREAKVQWKVDNALQSGNSQESVTEQDSKDSTYSLSSTLTLSKADYEKHKVYACEVTHQGLSSPVTKSFNRGEC

SEQ ID NO: 4121 - protein, 237 aa, Artificial Sequence
  source: /note="Description of Artificial Sequence: Synthetic polypeptide"
MGWSCIILFLVATATGVHSDIVMTQDPLSLPVTLGQPASISCRSSKSLLYKDGKTYLNWFQQRPGQSPQLLIYLMSTRASGVSDRFSGSGSGTDFTLKISRVEAEDVGVYYCQQLVEYPLTFGQGTKLEIKRTVAAPSVFIFPPSDEQLKSGTASWCLLNNFYPREAKVQWKVDNALQSGNSQESVTEQDSKDSTYSLSSTLTLSKADYEKHKVYACEVTHQGLSSPVTKSFNRGEC

SEQ ID NO: 4122 - protein, 238 aa, Artificial Sequence; identical to SEQ ID NO: 4098
  source: /note="Description of Artificial Sequence: Synthetic polypeptide"

SEQ ID NO: 4123 - protein, 238 aa, Artificial Sequence
  source: /note="Description of Artificial Sequence: Synthetic polypeptide"
MGWSCIILFLVATATGVHSDIVMTQSPLSLPVTPGEPASISCRSSKSLLYKDGKTYLNWFLQRPGQSPQLLIYLMSTRASGVPDRFSGSGSGTDFTLKISRVEAEDVGVYYCQQLVEYPLTFGGGTKVEIKRTVAAPSVFIFPPSDEQLKSGTASVVCLLNNFYPREAKVQWKVDNALQSGNSQESVTEQDSKDSTYSLSSTLTLSKADYEKHKVYACEVTHQGLSSPVTKSFNRGEC

SEQ ID NO: 4124 - protein, 214 aa, Artificial Sequence
  source: /note="Description of Artificial Sequence: Synthetic polypeptide"
EIVLTQSPATLSLSPGERATLSCRASQSVSSYLAWYQQKPGQAPRLLIYDASNRATGIPARFSGSGSGTDFTLTISSLEPEDFAVYYCQQRSNWPITFGQGTKLEIKRTVAAPSVFIFPPSDEQLKSGTASVVCLLNNFYPREAKVQWKVDNALQSGNSQESVTEQDSKDSTYSLSSTLTLSKADYEKHKVYACEVTHQGLSSPVTKSFNRGEC

SEQ ID NO: 4125 - protein, 108 aa, Artificial Sequence
  source: /note="Description of Artificial Sequence: Synthetic polypeptide"
QSVLTQPPSVSVSPGQTARITCSGEALPMQFAHWYQQRPGKAPVIVVYKDSERPSGVPERFSGSSSGTTATLTITGVQAEDEADYYCQSPDSTNTYEVFGGGTKLTVL

SEQ ID NO: 4126 - protein, 108 aa, Artificial Sequence
  source: /note="Description of Artificial Sequence: Synthetic polypeptide"
SYELTQPPSVSVSPGQTARITCSGEALPMQFAHWYQQRPGKAPVIVVYKDSERPSGVPERFSGSSSGTTATLTITGVQAEDEADYYCQSPDSTNTYEVFGGGTKLTVL

SEQ ID NO: 4127 - protein, 106 aa, Artificial Sequence
  source: /note="Description of Artificial Sequence: Synthetic polypeptide"
DIQLTQSPSTLSASVGDRVTITCRASQSISGWLAWYQQKPGKAPKLLIYDASNLESGVPSRFSGSGSGTEFTLTISSLQPDDFATYYCQQYDNYWTFGQGTKVEIK

SEQ ID NO: 4128 - protein, 106 aa, Artificial Sequence
  source: /note="Description of Artificial Sequence: Synthetic polypeptide"
DIQMTQSPSTLSASVGDRVTITCRASQSISGWLAWYQQKPGKAPKLLIYDASNLESGVPSRFSGSGSGTEFTLTISSLQPDDFATYYCQQYDNYWTFGQGTKVEIK

SEQ ID NO: 4129 - protein, 107 aa, Artificial Sequence
  source: /note="Description of Artificial Sequence: Synthetic polypeptide"
EIVMTQSPSSLSASIGDRVTFTCRASHDISNYLAWFRQQPGKAPKSLIYAASSLQSGVPSRFSASGSGTDFTLTISSLQPEDFATYYCVQYRTYPLTFGQGTRLEIK

SEQ ID NO: 4130 - protein, 107 aa, Artificial Sequence
  source: /note="Description of Artificial Sequence: Synthetic polypeptide"
DIQMTQSPSSLSASIGDRVTFTCRASHDISNYLAWFRQQPGKAPKSLIYAASSLQSGVPSRFSASGSGTDFTLTISSLQPEDFATYYCVQYRTYPLTFGQGTRLEIK

SEQ ID NO: 4131 - protein, 108 aa, Artificial Sequence
  source: /note="Description of Artificial Sequence: Synthetic polypeptide"
QSVLTQPPSVSVAPGQTARITCSGDALPKHYAHWYQQKPGQVPIVVIYKDTERPSGIPERFSGSTSGTTVTLTISGVQAEDEAHYYCQSADVSSTYVVFGGGTKLTVL

SEQ ID NO: 4132 - protein, 107 aa, Artificial Sequence
  source: /note="Description of Artificial Sequence: Synthetic polypeptide"
SYELTQPPSVSVAPGQTARITCSGDALPKHYAHWYQQKPGQVPIVVIYKDTERPSGIPERFSGSTSGTTVTLTISGVQAEDEAHYYCQSADVSSTYVVFGGGTKLTV

SEQ ID NO: 4133 - protein, 113 aa, Artificial Sequence
  source: /note="Description of Artificial Sequence: Synthetic polypeptide"
DIVMSQSPSSLAVSVGEKVTMSCKSIQTLLYSSNQKNYLAWFQQKPGQSPKLLIYWASIRKSGVPDRFTGSGSGTDFTLTISSVKAEDLAVYYCQQYYSYPLTFGAGTKLELK

SEQ ID NO: 4134 - protein, 107 aa, Artificial Sequence; identical to SEQ ID NO: 3935
  source: /note="Description of Artificial Sequence: Synthetic polypeptide"

SEQ ID NO: 4135 - protein, 113 aa, Artificial Sequence
  source: /note="Description of Artificial Sequence: Synthetic polypeptide"
DIQMTQSPSSLSASVGDRVTITCKSIQTLLYSSNQKNYLAWFQQKPGKAPKLLIYWASIRKSGVPSRFSGSGSGTDFTLTISSLQPEDFATYYCQQYYSYPLTFGGGTKLEIK

SEQ ID NO: 4136 - protein, 113 aa, Artificial Sequence
  source: /note="Description of Artificial Sequence: Synthetic polypeptide"
DIQMTQSPSSLSASVGDRVTITCKSIQTLLYSSNQKNYLAWYQQKPGKAPKLLIYWASIRKSGVPSRFSGSGSGTDFTLTISSLQPEDFATYYCQQYYSYPLTFGGGTKLEIK

SEQ ID NO: 4137 - protein, 111 aa, Artificial Sequence
  source: /note="Description of Artificial Sequence: Synthetic polypeptide"
DIVLTQSPASLAVSLGQRATISCKASQSVDYDGDSYMNWYQQKPGQPPKFLICAASNLESGIPARFSGSGSGTDFTLNIHPVEEEDAATYYCQQSNEDPFTFGSGTKLEIK

SEQ ID NO: 4138 - protein, 131 aa, Artificial Sequence
  source: /note="Description of Artificial Sequence: Synthetic polypeptide"
METDTLLLWVLLLWVPGSTGDIVLTQSPASLAVSLGQRATISCKASQSVDYDGDSYMNWYQQKPGQPPKFLICAASNLESGIPARFSGSGSGTDFTLNIHPVEEEDAATYYCQQSNEDPFTFGSGTKLEIK

SEQ ID NO: 4139 - protein, 113 aa, Artificial Sequence; identical to SEQ ID NO: 4133
  source: /note="Description of Artificial Sequence: Synthetic polypeptide"

SEQ ID NO: 4140 - protein, 111 aa, Artificial Sequence; identical to SEQ ID NO: 4067
  source: /note="Description of Artificial Sequence: Synthetic polypeptide"

SEQ ID NO: 4141 - protein, 111 aa, Artificial Sequence; identical to SEQ ID NO: 4068
  source: /note="Description of Artificial Sequence: Synthetic polypeptide"

SEQ ID NO: 4142 - protein, 111 aa, Artificial Sequence; identical to SEQ ID NO: 4066
  source: /note="Description of Artificial Sequence: Synthetic polypeptide"

SEQ ID NO: 4143 - protein, 111 aa, Artificial Sequence; identical to SEQ ID NO: 4069
  source: /note="Description of Artificial Sequence: Synthetic polypeptide"

SEQ ID NO: 4144 - protein, 113 aa, Artificial Sequence; identical to SEQ ID NO: 4135
  source: /note="Description of Artificial Sequence: Synthetic polypeptide"

SEQ ID NO: 4145 - protein, 113 aa, Artificial Sequence; identical to SEQ ID NO: 4136
  source: /note="Description of Artificial Sequence: Synthetic polypeptide"

SEQ ID NO: 4146 - protein, 112 aa, Artificial Sequence
  source: /note="Description of Artificial Sequence: Synthetic polypeptide"
DVVMTQIPLYLSVSPGDQASISCRSSQSLFHSKGNTYLHWYLQKPGQSPKLLINRVSNRFSGVPDRFSGSGSGTDFTLKISGVEAEDLGVYFCSQSAHVPWTFGGGTKLEIR

SEQ ID NO: 4147 - protein, 113 aa, Artificial Sequence; identical to SEQ ID NO: 3924
  source: /note="Description of Artificial Sequence: Synthetic polypeptide"

SEQ ID NO: 4148 - protein, 131 aa, Artificial Sequence; identical to SEQ ID NO: 4138
  source: /note="Description of Artificial Sequence: Synthetic polypeptide"

SEQ ID NO: 4149 - protein, 111 aa, Artificial Sequence; identical to SEQ ID NO: 4137
  source: /note="Description of Artificial Sequence: Synthetic polypeptide"

SEQ ID NO: 4150 - protein, 112 aa, Artificial Sequence
  source: /note="Description of Artificial Sequence: Synthetic polypeptide"
DVLMTQTPLSLPVSLGDQASISCRSSQNIVHSNGNTYLEWYLQKPGQSPTLLIYKVSNRFSGVPDRFSGSGSGTDFTLKISRVEAEDLGVYYCFQGSHVPLTFGAGTKLELK

SEQ ID NO: 4151 - protein, 112 aa, Artificial Sequence
  source: /note="Description of Artificial Sequence: Synthetic polypeptide"
DVLMTQTPLSLPVSLGDQASISCRSSQSIVNSNGNTYLEWYLQKPGQSPKLLIYKVSNRFSGVPDRFSGSGSGTDFTLKISRVEAEDLGVYYCFQGSHVPLTFGAGTTLELK

SEQ ID NO: 4152 - protein, 106 aa, Artificial Sequence
  source: /note="Description of Artificial Sequence: Synthetic polypeptide"
QIVLTQSPAIMSASPGEKVTISCSASSSVSYMYWYQQKPGSSPKPWIYRTSNLASGVPARFSGSGSGTSYSLTISSMEAEDAATYYCQQYHSYPYTFGGGTKLEIK

SEQ ID NO: 4153 - protein, 111 aa, Artificial Sequence
  source: /note="Description of Artificial Sequence: Synthetic polypeptide"
DWMTQTPLSLPVSLGDQASISCRSSQSLVHSNGNTYLHWYLQKPGQSPKLLIYKVSNRFSGVPDRFSGSGSGTDFTLKISRVEAEDLGVYFCSQSTHVPWTFGGGTKLEIK

SEQ ID NO: 4154 - protein, 111 aa, Artificial Sequence
  source: /note="Description of Artificial Sequence: Synthetic polypeptide"
DIVMTQAAPSVPVTPGESVSISCRSSKSLLHSNGNTYLYWFLQRPGQSPQLLIYRMSNLASGVPDRFSGSGSGTAFTLRISRVEAEDVGVYYCMQHLEYPLTFGAGTKLEL

SEQ ID NO: 4155 - protein, 107 aa, Artificial Sequence
  source: /note="Description of Artificial Sequence: Synthetic polypeptide"
DIQMTQSPATLSLSPGERATLSCRASQSVSSYLAWYQQKPGQAPRLLIYDASNRATGIPARFSGSGSGTDFTLAISSLQPEDSATYYCLQDFIYPYTFGQGTKLEIR

SEQ ID NO: 4156 - protein, 107 aa, Artificial Sequence
  source: /note="Description of Artificial Sequence: Synthetic polypeptide"
DILMTQSPPSMSVSLGDTVSITCHASQGISSNIGWLQQKPGKSFKGLIYHGSTLEDGVPSRFSGSGSGAEFSLTISSLESEDFADYYCVQYAQFPYTFGGGTKLEIK

SEQ ID NO: 4157 - protein, 107 aa, Artificial Sequence
  source: /note="Description of Artificial Sequence: Synthetic polypeptide"
DIQMTQSPSSVSASVGDRVTITCRASQGIRSWLAWYQQKPGKAPKLLIYDASTLQSGVPSRFRGGGSGTDFTLTISSLQPEDFATYYCQQSYSTPLTFGGGTKVEIK

SEQ ID NO: 4158 - protein, 107 aa, Artificial Sequence
  source: /note="Description of Artificial Sequence: Synthetic polypeptide"
DILMTQSPSSMSVSLGDTVSITCHASQGIRNSIGWLQQKPGKSFKGLIYHATTLEDGVPSRFTGSGSGADFSLTISSLESEDFADYYCVQYAQFPYTFGGGTKLEIK

SEQ ID NO: 4159 - protein, 106 aa, Artificial Sequence
  source: /note="Description of Artificial Sequence: Synthetic polypeptide"
QIVLTQSPAIMSASPGEKVTITCSASSSVSYMHWFQQKPGTSPKLWIYSTSNLASGVPARFSGSGSGTSYSLTISRMEAEDAATYYCQQRSSYPLTFGAGTKLELK

SEQ ID NO: 4160 - protein, 110 aa, Artificial Sequence
  source: /note="Description of Artificial Sequence: Synthetic polypeptide"
QSELTQPPSASGSPGQSVTISCTGTSNDVGSYNYISWFQQHPGKAPKLMIYEVNKRPSGVPDRFSGSKSDNTASLTVSGLQAEDEADYYCTSYAGSHKWVFGGGTKLTVL

SEQ ID NO: 4161 - protein, 110 aa, Artificial Sequence
  source: /note="Description of Artificial Sequence: Synthetic polypeptide"
QSELTQPPSASGTPGQWVTISCSGSTSNIGNNYVYWYQQLPGTAPKLLIYTNNQRPSGVPDRFSGSKSGTSASLAISGLRSEDEADYYCATWDDSLYAPVFGGGTKVTVL

SEQ ID NO: 4162 - protein, 106 aa, Artificial Sequence
  source: /note="Description of Artificial Sequence: Synthetic polypeptide"
DIQMTQSPATLSLSPGERATLSCRASQTVSNYLAWYQQKPGQAPRLLIYDASNRATGIPARFSGSGSGTDFTLTISSLEPEDFAVYYCQQRSKWLSFGGGTKVEIK

SEQ ID NO: 4163 - protein, 113 aa, Artificial Sequence
  source: /note="Description of Artificial Sequence: Synthetic polypeptide"
DIQMTQSPDSLAVSLGERATINCKSSRSVLYSSNNKNYLAWYQQKPGQPPKLLIYWASTRESGVPDRFSGSGSGTDFTLTISSLQAEDVAVYYCQQYYSTPLTFGGGTKVEIK

SEQ ID NO: 4164 - protein, 107 aa, Artificial Sequence
  source: /note="Description of Artificial Sequence: Synthetic polypeptide"
DIQMTQSPSTLSASVGDRVTITCRASQTISRWLAWYQHKPGKAPKLLIYKTSNLESGVPSRFSGSGSGTEFTLTISSLQPDDFATYYCQQYKSYSITFGPGTKVDIK

SEQ ID NO: 4165 - protein, 107 aa, Artificial Sequence
  source: /note="Description of Artificial Sequence: Synthetic polypeptide"
DIQMTQSPSSVSASVGDRVTITCRASQGISSWLAWYQQKPGKAPKLLIYAASSLQSGVPSRFSGSGSGTDFTLTISSLQPEDFATYYCQQANSFPLTFGGGTKVEIK

SEQ ID NO: 4166 - protein, 107 aa, Artificial Sequence
  source: /note="Description of Artificial Sequence: Synthetic polypeptide"
DIQMTQSPASLSASVGDRVTITCRASQTIAGYLNWYQQTPGKAPNLLIYDASRLQSGVPSRFSGSGSGTDFTLSISGLQPEDFGTYYCQQSYTIPLTFGGGTKVEIK

SEQ ID NO: 4167 - protein, 113 aa, Artificial Sequence
  source: /note="Description of Artificial Sequence: Synthetic polypeptide"
DIQMTQSPDSLAVSLGERATINCKSSQSVLYSSNNKNYLAWYQHKAGQPPKLLIHWASSRASGVPDRFSGSGSGTDFTLTISSLQAEDVAVYYCQQFYSLPLTFGGGTKVEIR

SEQ ID NO: 4168 - protein, 116 aa, Artificial Sequence
  source: /note="Description of Artificial Sequence: Synthetic polypeptide"
AALTQPASVSANPGETVKITCSGGGSYAGSYYYGWYHGSYYYGWYQQKAPGSAPVTVIYDNTNRPSNIPSRFSGSLSGSTNTLTITGVRAEDEAVYFCGSADNSGAAFGAGTTLTV

SEQ ID NO: 4169 - protein, 111 aa, Artificial Sequence
  source: /note="Description of Artificial Sequence: Synthetic polypeptide"
AVTQPASVSANPGETVRITCSGGGSYAGTYYYGYRYGWYQQKSPGSAPVTVIYYNDKRPSDIPSRFSGSLSGSTNTLTITGVRADDEAVYFCGSYDNSGAAFGAGTTLTVL

SEQ ID NO: 4170 - protein, 115 aa, Artificial Sequence
  source: /note="Description of Artificial Sequence: Synthetic polypeptide"
DIVMTQSPDSLAVSLGERATINCKSSHSVLYSSNQKNYLAWYQQKPGQPPKLLIYWASTRESGVPDRFSGSGSGTDFTLTISSLQAEDVAVYYCHQYLSSLTFGQGTKLEIKRTV

SEQ ID NO: 4171 - protein, 115 aa, Artificial Sequence
  source: /note="Description of Artificial Sequence: Synthetic polypeptide"
DIVMTQSPDSLAVSLGERATINCKSSHSVLYSSNQKNYLAWYQQKPGQPPKLLIYWASTRESGVPDRFSGSGSGTDFTLTIINLQAEDVAVYYCHQYLSSLTFGQGTKLEIKRTV

SEQ ID NO: 4172 - protein, 115 aa, Artificial Sequence
  source: /note="Description of Artificial Sequence: Synthetic polypeptide"
DIVMTQSPDSLAVSLGERATINCKSSHSVLYSSNQKNYLAWYQQKPGQPPKLLIYWASTRESGVPDRFSGSGSGTDFTLTISSLHTEDVAVYYCHQYLSSLTFGQGTKLEIKRTV

SEQ ID NO: 4173 - protein, 115 aa, Artificial Sequence
  source: /note="Description of Artificial Sequence: Synthetic polypeptide"
DIVMTQSPDSLAVSLGERATINCKSSHSVLYSSNQKNYLAWYQQKPGQPPKLLIYWASTRESGVPDRFSGSGSGTDFTLTIINLHTEDVAVYYCHQYLSSLTFGQGTKLEIKRTV

SEQ ID NO: 4174 - protein, 105 aa, Artificial Sequence
  source: /note="Description of Artificial Sequence: Synthetic polypeptide"
DIQMTQSPSSLSASVGDRVTITCRASQSISSYLNWYQQKPGKAPKVLIYAASTLRSGVPSRFSGSGSGTDFTLSVSSLQPEDFATYYCQQSYHTPWTFGQGTKVE

SEQ ID NO: 4175 - protein, 105 aa, Artificial Sequence
  source: /note="Description of Artificial Sequence: Synthetic polypeptide"
DIQMTQSPSSLSASVGDRVTITCRASQGIGNYLAWYQQKPGKVPKLLIYTTSILQSGVPSRFSGSGSGTDFTLTISSLQPEDFATYYCQKYNSAPRTFGQGTRVD

SEQ ID NO: 4176 - protein, 108 aa, Artificial Sequence
  source: /note="Description of Artificial Sequence: Synthetic polypeptide"
TQTPLSLPVSLGDQASISCRSSQSLVHSNGNTYLHWYLQKPGQSPKLLIYRVSNRFSGVPDRFSGSRSGTDFTLKISRVEAEDLGVYFCSQSTHVPFTFGSGTKLEIK

SEQ ID NO: 4177 - protein, 112 aa, Artificial Sequence
  source: /note="Description of Artificial Sequence: Synthetic polypeptide"
DIVMTQSPLSLPVTPGEPASISCRSSKSLLYKDGKTYLNWFLQRPGQSPQLLIYLMSTRASGVPDRFSGSGSGTDFTLKISRVEAEDVGVYYCQQLVEYPLTFGGGTKVEIK

SEQ ID NO: 4178 - protein, 112 aa, Artificial Sequence
  source: /note="Description of Artificial Sequence: Synthetic polypeptide"
DIVMTQSPLSLPVTLGQPASISCRSSKSLLYKDGKTYLNWFQQRPGQSPQLLIYLMSTRASGVPDRFSGGGSGTDFTLKISRVEAEDVGVYYCQQLVEYPLTFGQGTKLEIK

SEQ ID NO: 4179 - protein, 112 aa, Artificial Sequence
  source: /note="Description of Artificial Sequence: Synthetic polypeptide"
DIVMTQSPLSLPVTLGQPASISCRSSKSLLYKDGKTYLNWFLQRPGQSPQLLIYLMSTRASGVPDRFSGGGSGTDFTLKISRVEAEDVGVYYCQQLVEYPLTFGQGTKLEIK

SEQ ID NO: 4180 - protein, 112 aa, Artificial Sequence
  source: /note="Description of Artificial Sequence: Synthetic polypeptide"
DIVMTQSPLSLPVTLGQPASISCRSSKSLLYKDGKTYLNWFLQRPGQSPQLLIYLMSTRASGVSDRFSGGGSGTDFTLKISRVEAEDVGVYYCQQLVEYPLTFGQGTKLEIK

SEQ ID NO: 4181 - protein, 112 aa, Artificial Sequence [sequence omitted]

SEQ ID NO: 4182 - protein, 112 aa, Artificial Sequence
  source: /note="Description of Artificial Sequence: Synthetic polypeptide"
DIVMTQDPLSLPVTLGQPASISCRSSKSLLYKDGKTYLNWFQQRPGQSPQLLIYLMSTRASGVSDRFSGSGSGTDFTLKISRVEAEDVGVYYCQQLVEYPLTFGQGTKLEIK

SEQ ID NO: 4183 - protein, 112 aa, Artificial Sequence
  source: /note="Description of Artificial Sequence: Synthetic polypeptide"
DIVMTQDPLSNPVTLGQPVSISCRSSKSLLYKDGKTYLNWFLQRPGQSPQLLIYLMSTRASGVSDRFSGSGSGTDFTLKISRVEAEDVGVYYCQQLVEYPLTFGQGTKLEIK

SEQ ID NO: 4184 - protein, 112 aa, Artificial Sequence
  source: /note="Description of Artificial Sequence: Synthetic polypeptide"
DIVITQSPLSLPVTLGQPASISCRSSKSLLYKDGKTYLNWFQQRPGQSPQLLIYLMSTRASGVPDRFSGGGSGTDFTLKISRVEAEDVGVYYCQQLVEYPLTFGQGTKLEIK

SEQ ID NO: 4185 - protein, 114 aa, Artificial Sequence
  source: /note="Description of Artificial Sequence: Synthetic polypeptide"
DIVMYQSPSSLAMSVGQKVIMNCKSSQSLLSSNNQKNYLAWYQQKPGQSPKLLVYFASTRDSGVPDRFIGSGSGTDFTLTISSVQAEDLADYFCQQHYTTPLTFGAGTKLELKR

SEQ ID NO: 4186 - protein, 113 aa, Artificial Sequence
  source: /note="Description of Artificial Sequence: Synthetic polypeptide"
DIVMTQSPSSLAMSVGQKVTMSCKSSQSLLNSRNQKNYLAWYQQKPGQSPKLLLYFASTRESGVPDRFIGSGSGTDFTLTISSVQAEDLADYFCQQHYTTPLTFGAGTKELKR

SEQ ID NO: 4187 - protein, 234 aa, Artificial Sequence
  source: /note="Description of Artificial Sequence: Synthetic polypeptide"
MSVLTQVLALLLLWLTGTRCEIVLTQSPATLSLSPGERATLSCRASQSVSSYLAWYQQKPGQAPRLLIYDASNRATGIPARFSGSGSGTDFTLTISSLEPEDFAVYYCQQRSNWPITFGQGTKLEIKRTVAAPSVFIFPPSDEQLKSGTASVVCLLNNFYPREAKVQWKVDNALQSGNSQESVTEQDSKDSTYSLSSTLTLSKADYEKHKVYACEVTHQGLSSPVTKSFNRGEC

SEQ ID NO: 4188 - protein, 246 aa, Artificial Sequence
  source: /note="Description of Artificial Sequence: Synthetic polypeptide"
MEAPAQLLFLLLLWLPDTTGEIVLTQSPATLSLSPGERATCDRLLSCRASQSVSSYLAWYQQKPCDRLGQAPRLLIYDASNRATGIPARFSGSGSGTDFTLTISSLEPCDRLEDFAVYYCQQRSNWPITFGQGTRLEIKRTVAAPSVFIFPPSDEQLKSGTASVVCLLNNFYPREAKVQWKVDNALQSGNSQESVTEQDSKDSTYSLSSTLTLSKADYEKHKVYACEVTHQGLSSPVTKSFNRGEC

SEQ ID NO: 4189 - protein, 113 aa, Artificial Sequence
  source: /note="Description of Artificial Sequence: Synthetic polypeptide"
DIVMTQTPLSLSVTPGQPASISCRSSQSLEYSDGYTFLEWYLQKPGQSPQLLIYEVSNRFSGVPDRFSGSGSGTDFTLKISRVEAEDVGVYYCFQATHDPLTFGQGTKLEIKR

SEQ ID NO: 4190 - protein, 113 aa, Artificial Sequence
  source: /note="Description of Artificial Sequence: Synthetic polypeptide"
DVVMTQSPLSLPVTLGQPASISCRSSQSLEYSDGYTFLEWFQQRPGQSPRRLIYEVSNRFSGVPDRFSGSGSGTDFTLKISRVEAEDVGVYYCFQATHDPLTFGQGTKLEIKR

SEQ ID NO: 4191 - protein, 113 aa, Artificial Sequence
  source: /note="Description of Artificial Sequence: Synthetic polypeptide"
DVVMTQSPLSLPVTLGQPASISCRSSQSLEYSDGYTFLEWYLQKPGQSPQLLIYEVSNRFSGVPDRFSGSGSGTDFTLKISRVEAEDVGVYYCFQATHDPLTFGQGTKLEIKR

SEQ ID NO: 4192 - protein, 115 aa, Artificial Sequence
  source: /note="Description of Artificial Sequence: Synthetic polypeptide"
EVQLVESGGGVVQPGRSLRLSCAASGFTFSNYGMNWIRQAPGKGLEWIGMIYYDSSEKHYADSVKGRFTISRDNSKNTLYLQMNSLRAEDTAVYYCAKGTTPDYWGQGTMVTVSS

SEQ ID NO: 4193 - protein, 115 aa, Artificial Sequence
  source: /note="Description of Artificial Sequence: Synthetic polypeptide"
EVQLVESGGGLVQPGGSLRLSCAASGFTFSNYGMNWVRQAPGKGLEWVSMIYYDSSEKHYADSVKGRFTISRDNSKNTLYLQMNSLRAEDTAVYYCAKGTTPDYWGQGTMVTVSS

SEQ ID NO: 4194 - protein, 115 aa, Artificial Sequence
  source: /note="Description of Artificial Sequence: Synthetic polypeptide"
EVQLVESGGGLVQPGGSLRLSCAASGFTFSNYGMNWIRQAPGKGLEWIGMIYYDSSEKHYADSVKGRFTISRDNSKNTLYLQMNSLRAEDTAVYYCAKGTTPDYWGQGTMVTVSS

SEQ ID NO: 4195 - protein, 113 aa, Artificial Sequence
  source: /note="Description of Artificial Sequence: Synthetic polypeptide"
DVVLTQSPLSLPVTLGQPASISCRSSQSLEYSDGYTFLEWFQQRPGQSPRLLIYEVSNRFSGVPDRFSGSGSGTDFTLKISRVEAEDVGVYYCFQATHDPLTFGQGTKLEIKR

SEQ ID NO: 4196 - protein, 113 aa, Artificial Sequence
  source: /note="Description of Artificial Sequence: Synthetic polypeptide"
DVVLTQSPLSLPVTLGQPASISCRSSQSLEYSDGYTFLEWFQQRPGQSPRRLIYEVSNRFSGVPDRFSGSGSGTDFTLKISRVEAEDVGVYYCFQATHDPLTFGQGTKLEIKR

SEQ ID NO: 4197 - protein, 109 aa, Artificial Sequence
  source: /note="Description of Artificial Sequence: Synthetic polypeptide"
SYELTQPPSVSVSPGQTARITCSGNQLGHKFASWYQQKPGQSPVVVIYEDKKRPSGIPERFSGSNSGNTATLTISGTQAMDEADYYCQVWDVITDHYVFGTGTKVTVLG

SEQ ID NO: 4198 - protein, 108 aa, Artificial Sequence
  source: /note="Description of Artificial Sequence: Synthetic polypeptide"
DIQVTQSPSSLAASVGDRVTITCQASQDISNYLNWYQQRPGKAPKLLIYDASNLETGVPPRFSGDGSGTHFSFTITNVQPEDVGTYYCQQYDSLPLTFGQGTRLEIKR

SEQ ID NO: 4199 - protein, 108 aa, Artificial Sequence
  source: /note="Description of Artificial Sequence: Synthetic polypeptide"
DIQVTQSPSSLSASVGDRVTITCRASQPISTYVNWYQQKPGKAPKLLIYDASTLEIGVPSRISGSGSGTDFTFTISSLQPEDIATYYCQQYDNFPLTFGGGTKVDIKR

SEQ ID NO: 4200 - protein, 108 aa, Artificial Sequence
  source: /note="Description of Artificial Sequence: Synthetic polypeptide"
DIRVTQSPSSLSASVGDRVTITCQANEDISIYLNWYQQRPGKAPKLLIYDASNLETGVPSRFSGSGSGTDFTFTISSLQPEDFATYYCQQYHTYPFTFGGGTKVDIKR

SEQ ID NO: 4201 - protein, 106 aa, Artificial Sequence
  source: /note="Description of Artificial Sequence: Synthetic polypeptide"
SYELTQPPSVSVSPGQTASITCSGDKLGDKYACWYQQKPGQSPVLVIYQDSKRPSGIPKRFSGSNSGDTATLTISGTQAMDEADYYCQAWDSSTGVFGPGTKVTVL

SEQ ID NO: 4202 - protein, 108 aa, Artificial Sequence
  source: /note="Description of Artificial Sequence: Synthetic polypeptide"
DIVMTQTPSSLSASVGDRVTITCQASQDISDYLNWYQQKPGKAPKLLIYDASTLESGVPSRFSGSGSGTDFTLTISGLQPEDFATYYCQQSYSIPPTFGPGTRLEIKR

SEQ ID NO: 4203 - protein, 111 aa, Artificial Sequence
  source: /note="Description of Artificial Sequence: Synthetic polypeptide"
QSGLTQPPSVSAAPGQRVTISCTGSGSNIGAGYGVHWYQQLPATAPKILIYGDYNRPSGVPDRFSGSRSGTSASLTITGLQAEDEADYYCQSYDNSLRGVLFGGGTKLTVL

SEQ ID NO: 4204 - protein, 111 aa, Artificial Sequence
  source: /note="Description of Artificial Sequence: Synthetic polypeptide"
QPVLTQSPSVSASLGASVKVTCTLSSGHSAYAIAWHQQQPEKGPRYLMKVNSDGSHNKGDGVPDRFSGSSSGAERYLIISGLQSEDEADYYCQTWGPGIRVFGGGTKLTVL

SEQ ID NO: 4205 - protein, 107 aa, Artificial Sequence
  source: /note="Description of Artificial Sequence: Synthetic polypeptide"
DVVMTQSPDFQSVTPEDKVTITCRASQSIGSCLHWYQQKPDQSPKLLIKYASQSISGVPSRFSGSGSGTDFTLTINSLEAEDAATYYCHQSSSLPYTFGQGTKLEIK

SEQ ID NO: 4206 - protein, 108 aa, Artificial Sequence
  source: /note="Description of Artificial Sequence: Synthetic polypeptide"
SYELTQPPSVSVAPGQTARITCGGNNIGSKSVHWYQQKPGQAPVLVVYDDSDRPSGIPERFSGSNSGNTATLTISRVEAGDEADYYCQVWGSSSDHYVFGTGTKVTVL

SEQ ID NO: 4207 - protein, 109 aa, Artificial Sequence
  source: /note="Description of Artificial Sequence: Synthetic polypeptide"
QSALTQPRSVSGSPGQSVTISCTGTSSSVGDSIYVSWYQQHPGKAPKLMLYDVTKRPSGVPDRFSGSKSGNTASLTISGLQAEDEADYYCCSYAGTDTLFGGGTKVTVL

SEQ ID NO: 4208 - protein, 110 aa, Artificial Sequence
  source: /note="Description of Artificial Sequence: Synthetic polypeptide"
QSVLTQPPSASGTPGQRVTISCSGASSNVGSNRVNWYQQFPGMAPKLLIYSNNQRPSGVPDRFSGSKSGTSASLAISGLQSEDEADYYCAAWDDSLNGYVFGTGTKVTVL

SEQ ID NO: 4209 - protein, 108 aa, Artificial Sequence
  source: /note="Description of Artificial Sequence: Synthetic polypeptide"
SYELTQPPSVSVAPGQTARITCGGNNIGDISVHWYQQKSGQAPMLVVHDDSDRPSGIPERFSGSNSGSSATLTISRVEAGDEADYHCQVWDSGSGHHVFGTGTKVTVL

SEQ ID NO: 4210 - protein, 108 aa, Artificial Sequence
  source: /note="Description of Artificial Sequence: Synthetic polypeptide"
DIQLTQSPSSLSASVGDGVTITCQASQDISNYLNWYQQKPGKAPKLLIYDASNLETGVPSRFSGSGSGTFFTLTINNLQPEDFATYYCQQSGNTPWTFGQGTKVEINR

SEQ ID NO: 4211 - protein, 126 aa, Artificial Sequence
  source: /note="Description of Artificial Sequence: Synthetic polypeptide"
MDFQVQIFSFLLISASVSRGQIVLTQSPAILSASPGEKVTMTCSASSTVNYMHWYQQKSGTSPKIWIYDTSKLASGVPARFSGSGSWTSYSLTISSMEAEDAATYYCQQWNSNPPTFGAGTKLELK

SEQ ID NO: 4212 - protein, 131 aa, Artificial Sequence
  source: /note="Description of Artificial Sequence: Synthetic polypeptide"
MMSPAQFLFLLVLWIQETNGDVVMTQTPLTLSVTIGQPASISCKSSQSLLYSNGKTYLNWLLQRPGQSPKRLIYLVSKLDSGVPDRFTGSGSGTDFTLKISRVEAEDLGVYYCVQGTHFPTFGVGTKLEIK

SEQ ID NO: 4213 - protein, 131 aa, Artificial Sequence
  source: /note="Description of Artificial Sequence: Synthetic polypeptide"
MMSPAQFLFLLVLWIQETNGDVVMTQTPLTLSVTIGQPASISCKSSQSLLYSNGKTYLNWLLQRPGQSPKRLIYLVSKLDSGVPDRFTGSGSGTDFTLKISRVEAEDLGVYYCVQGTHFPTFGGGTKLEIK

SEQ ID NO: 4214 - protein, 112 aa, Artificial Sequence; identical to SEQ ID NO: 4184
  source: /note="Description of Artificial Sequence: Synthetic polypeptide"

SEQ ID NO: 4215 - protein, 112 aa, Artificial Sequence; identical to SEQ ID NO: 4178
  source: /note="Description of Artificial Sequence: Synthetic polypeptide"

SEQ ID NO: 4216 - protein, 112 aa, Artificial Sequence; identical to SEQ ID NO: 4179
  source: /note="Description of Artificial Sequence: Synthetic polypeptide"

SEQ ID NO: 4217 - protein, 112 aa, Artificial Sequence; identical to SEQ ID NO: 4180
  source: /note="Description of Artificial Sequence: Synthetic polypeptide"

SEQ ID NO: 4218 - protein, 112 aa, Artificial Sequence [sequence omitted]

SEQ ID NO: 4219 - protein, 112 aa, Artificial Sequence; identical to SEQ ID NO: 4182
  source: /note="Description of Artificial Sequence: Synthetic polypeptide"

SEQ ID NO: 4220 - protein, 112 aa, Artificial Sequence; identical to SEQ ID NO: 4183
  source: /note="Description of Artificial Sequence: Synthetic polypeptide"

SEQ ID NO: 4221 - protein, 112 aa, Artificial Sequence; identical to SEQ ID NO: 4177
  source: /note="Description of Artificial Sequence: Synthetic polypeptide"

SEQ ID NO: 4222 - protein, 218 aa, Artificial Sequence; identical to SEQ ID NO: 4075
  source: /note="Description of Artificial Sequence: Synthetic polypeptide"

SEQ ID NO: 4223 - protein, 217 aa, Artificial Sequence; identical to SEQ ID NO: 4076
  source: /note="Description of Artificial Sequence: Synthetic polypeptide"

SEQ ID NO: 4224 - protein, 422 aa, Artificial Sequence; identical to SEQ ID NO: 3787
  source: /note="Description of Artificial Sequence: Synthetic polypeptide"

SEQ ID NO: 4225 - protein, 434 aa, Artificial Sequence; identical to SEQ ID NO: 3788
  source: /note="Description of Artificial Sequence: Synthetic polypeptide"

SEQ ID NO: 4226 - protein, 109 aa, Artificial Sequence
  source: /note="Description of Artificial Sequence: Synthetic polypeptide"
DIQDRVLAWYAASGSEDFTFGMTQSTITCYQQKSSLQGTDFATYYQGTKPSSLSASVGRASQGISSYPGKAPKLLISGVPSRFSGTLTISSLQPCQQHYTTPPVEIKRT

SEQ ID NO: 4227 - protein, 114 aa, Artificial Sequence
  source: /note="Description of Artificial Sequence: Synthetic polypeptide"
DIVMTQSPLSLPVTPGEPASISCRSSQSLLHSNGYNYLDWYLQKPGQSPQLLIYLGSNRASGVPDRFSGSGSGTDFTLKISRVEAEDVGVYYCQQHYTTPPTFGQGTKVEIKRT

SEQ ID NO: 4228 - protein, 110 aa, Artificial Sequence
  source: /note="Description of Artificial Sequence: Synthetic polypeptide"
DIVLTQSPATLSLSPGERATLSCRASQSVSSSYLAWYQQKPGQAPRLLIYGASSRATGVPARFSGSGSGTDFTLTISSLEPEDFAVYYCQQHYTTPPTFGQGTKVEIKRT

SEQ ID NO: 4229 - protein, 115 aa, Artificial Sequence
  source: /note="Description of Artificial Sequence: Synthetic polypeptide"
DIVMTQSPDSLAVSLGERATINCRSSQSVLYSSNNKNYLAWYQQKPGQPPKLLIYWASTRESGVPDRFSGSGSGTDFTLTISSLQAEDVAVYYCQQHYTTPPTFGQGTKVEIKRT

SEQ ID NO: 4230 - protein, 109 aa, Artificial Sequence
  source: /note="Description of Artificial Sequence: Synthetic polypeptide"
QSVLTQPPSVSGAPGQRVTISCSGSSSNIGSNYVSWYQQLPGTAPKLLIYDNNQRPSGVPDRFSGSKSGTSASLAITGLQSEDEADYYCQQHYTTPPVFGGGTKLTVLG

SEQ ID NO: 4231 - protein, 110 aa, Artificial Sequence
  source: /note="Description of Artificial Sequence: Synthetic polypeptide"
QSALTQPASVSGSPGQSITISCTGTSSDVGGYNYVSWYQQHPGKAPKLMIYDVSNRPSGVSNRFSGSKSGNTASLTISGLQAEDEADYYCQQHYTTPPVFGGGTKLTVLG

SEQ ID NO: 4232 - protein, 107 aa, Artificial Sequence
  source: /note="Description of Artificial Sequence: Synthetic polypeptide"
SYELTQPPSVTARISCSGDASVAPGQLGDKYASWYQQKPGQAPVLVIYDDSDRPSGIPERFSGSNSGNTATLTISGTQAEDEADYYCQQHYTTPPVFGGGTKLTVLG

SEQ ID NO: 4233 - protein, 330 aa, Artificial Sequence; identical to SEQ ID NO: 3789
  source: /note="Description of Artificial Sequence: Synthetic polypeptide"

SEQ ID NO: 4234 - protein, 456 aa, Artificial Sequence
  source: /note="Description of Artificial Sequence: Synthetic polypeptide"
QVELVESGGGLVQPGGSLRLSCAASGFTFSSYAMSWVRQAPGKGLEWVSAINASGTRTYYADSVKGRFTISRDNSKNTLYLQMNSLRAEDTAVYYCARGKGNTHKPYGYVRYFDVWGQGTLVTVSSASTKGPSVFPLAPSSKSTSGGTAALGCLVKDYFPEPVTVSWNSGALTSGVHTFPAVLQSSGLYSLSSVVTVPSSSLGTQTYICNVNHKPSNTKVDKKVEPKSCDKTHTCPPCPAPELLGGPSVFLFPPKPKDTLMISRTPEVTCVVVDVSHEDPEVKFNWYVDGVEVHNAKTKPREEQYNSTYRVVSVLTVLHQDWLNGKEYKCKVSNKALPAPIEKTISKAKGQPREPQVYTLPPSRDELTKNQVSLTCLVKGFYPSDIAVEWESNGQPENNYKTTPPVLDSDGSFFLYSKLTVDKSRWQQGNVFSCSVMHEALHNHYTQKSLSLSPGK

SEQ ID NO: 4235 - protein, 424 aa, Artificial Sequence; identical to SEQ ID NO: 3790
  source: /note="Description of Artificial Sequence: Synthetic polypeptide"

SEQ ID NO: 4236 - protein, 506 aa, Artificial Sequence; identical to SEQ ID NO: 3791
  source: /note="Description of Artificial Sequence: Synthetic polypeptide"

SEQ ID NO: 4237 - protein, 509 aa, Artificial Sequence; identical to SEQ ID NO: 3792
  source: /note="Description of Artificial Sequence: Synthetic polypeptide"

SEQ ID NO: 4238 - protein, 131 aa, Artificial Sequence; identical to SEQ ID NO: 3793
  source: /note="Description of Artificial Sequence: Synthetic polypeptide"

SEQ ID NO: 4239 - protein, 131 aa, Artificial Sequence; identical to SEQ ID NO: 3793
  source: /note="Description of Artificial Sequence: Synthetic polypeptide"

SEQ ID NO: 4240 - protein, 131 aa, Artificial Sequence; identical to SEQ ID NO: 3793
  source: /note="Description of Artificial Sequence: Synthetic polypeptide"

SEQ ID NO: 4241 - protein, 128 aa, Artificial Sequence; identical to SEQ ID NO: 3796
  source: /note="Description of Artificial Sequence: Synthetic polypeptide"

SEQ ID NO: 4242 - protein, 128 aa, Artificial Sequence; identical to SEQ ID NO: 3797
  source: /note="Description of Artificial Sequence: Synthetic polypeptide"

SEQ ID NO: 4243 - protein, 161 aa, Artificial Sequence; identical to SEQ ID NO: 3798
  source: /note="Description of Artificial Sequence: Synthetic polypeptide"

SEQ ID NO: 4244 - protein, 424 aa, Artificial Sequence; identical to SEQ ID NO: 3799
  source: /note="Description of Artificial Sequence: Synthetic polypeptide"

SEQ ID NO: 4245 - protein, 227 aa, Artificial Sequence; identical to SEQ ID NO: 3800
  source: /note="Description of Artificial Sequence: Synthetic polypeptide"

SEQ ID NO: 4246 - protein, 227 aa, Artificial Sequence; identical to SEQ ID NO: 3800
  source: /note="Description of Artificial Sequence: Synthetic polypeptide"

SEQ ID NO: 4247 - protein, 264 aa, Artificial Sequence; identical to SEQ ID NO: 3802
  source: /note="Description of Artificial Sequence: Synthetic polypeptide"

SEQ ID NO: 4248 - protein, 424 aa, Artificial Sequence; identical to SEQ ID NO: 3803
  source: /note="Description of Artificial Sequence: Synthetic polypeptide"

SEQ ID NO: 4249 - protein, 219 aa, Artificial Sequence; identical to SEQ ID NO: 3804
  source: /note="Description of Artificial Sequence: Synthetic polypeptide"

SEQ ID NO: 4250 - protein, 528 aa, Artificial Sequence; identical to SEQ ID NO: 3805
  source: /note="Description of Artificial Sequence: Synthetic polypeptide"

SEQ ID NO: 4251 - protein, 434 aa, Artificial Sequence; identical to SEQ ID NO: 3788
  source: /note="Description of Artificial Sequence: Synthetic polypeptide"

SEQ ID NO: 4252 - protein, 434 aa, Artificial Sequence; identical to SEQ ID NO: 3807
  source: /note="Description of Artificial Sequence: Synthetic polypeptide"

SEQ ID NO: 4253 - protein, 460 aa, Artificial Sequence; identical to SEQ ID NO: 3808
  source: /note="Description of Artificial Sequence: Synthetic polypeptide"

SEQ ID NO: 4254 - protein, 506 aa, Artificial Sequence; identical to SEQ ID NO: 3809
  source: /note="Description of Artificial Sequence: Synthetic polypeptide"

SEQ ID NO: 4255 - protein, 440 aa, Artificial Sequence; identical to SEQ ID NO: 3834
  source: /note="Description of Artificial Sequence: Synthetic polypeptide"

SEQ ID NO: 4256 - protein, 451 aa, Artificial Sequence; identical to SEQ ID NO: 3835
  source: /note="Description of Artificial Sequence: Synthetic polypeptide"

SEQ ID NO: 4257 - protein, 451 aa, Artificial Sequence; identical to SEQ ID NO: 3836
  source: /note="Description of Artificial Sequence: Synthetic polypeptide"

SEQ ID NO: 4258 - protein, 451 aa, Artificial Sequence; identical to SEQ ID NO: 3816
  source: /note="Description of Artificial Sequence: Synthetic polypeptide"

SEQ ID NO: 4259 - protein, 451 aa, Artificial Sequence; identical to SEQ ID NO: 3817
  source: /note="Description of Artificial Sequence: Synthetic polypeptide"

SEQ ID NO: 4260 - protein, 440 aa, Artificial Sequence; identical to SEQ ID NO: 3818
  source: /note="Description of Artificial Sequence: Synthetic polypeptide"

SEQ ID NO: 4261 - protein, 440 aa, Artificial Sequence; identical to SEQ ID NO: 3819
  source: /note="Description of Artificial Sequence: Synthetic polypeptide"

SEQ ID NO: 4262 - protein, 440 aa, Artificial Sequence; identical to SEQ ID NO: 3820
  source: /note="Description of Artificial Sequence: Synthetic polypeptide"

SEQ ID NO: 4263 - protein, 440 aa, Artificial Sequence; identical to SEQ ID NO: 3821
  source: /note="Description of Artificial Sequence: Synthetic polypeptide"

SEQ ID NO: 4264 - protein, 443 aa, Artificial Sequence; identical to SEQ ID NO: 3822
  source: /note="Description of Artificial Sequence: Synthetic polypeptide"

SEQ ID NO: 4265 - protein, 443 aa, Artificial Sequence; identical to SEQ ID NO: 3823
  source: /note="Description of Artificial Sequence: Synthetic polypeptide"

SEQ ID NO: 4266 - protein, 443 aa, Artificial Sequence; identical to SEQ ID NO: 3824
  source: /note="Description of Artificial Sequence: Synthetic polypeptide"

SEQ ID NO: 4267 - protein, 443 aa, Artificial Sequence; identical to SEQ ID NO: 3825
  source: /note="Description of Artificial Sequence: Synthetic polypeptide"

SEQ ID NO: 4268 - protein, 454 aa, Artificial Sequence; identical to SEQ ID NO: 3826
  source: /note="Description of Artificial Sequence: Synthetic polypeptide"

SEQ ID NO: 4269 - protein, 454 aa, Artificial Sequence; identical to SEQ ID NO: 3827
  source: /note="Description of Artificial Sequence: Synthetic polypeptide"

SEQ ID NO: 4270 - protein, 454 aa, Artificial Sequence; identical to SEQ ID NO: 3827
  source: /note="Description of Artificial Sequence: Synthetic polypeptide"

SEQ ID NO: 4271 - protein, 443 aa, Artificial Sequence; identical to SEQ ID NO: 3829
  source: /note="Description of Artificial Sequence: Synthetic polypeptide"

SEQ ID NO: 4272 - protein, 443 aa, Artificial Sequence; identical to SEQ ID NO: 3830
  source: /note="Description of Artificial Sequence: Synthetic polypeptide"

SEQ ID NO: 4273 - protein, 443 aa, Artificial Sequence; identical to SEQ ID NO: 3831
  source: /note="Description of Artificial Sequence: Synthetic polypeptide"

SEQ ID NO: 4274 - protein, 441 aa, Artificial Sequence; identical to SEQ ID NO: 3832
  source: /note="Description of Artificial Sequence: Synthetic polypeptide"

SEQ ID NO: 4275 - protein, 443 aa, Artificial Sequence; identical to SEQ ID NO: 3833
  source: /note="Description of Artificial Sequence: Synthetic polypeptide"

SEQ ID NO: 4276 - protein, 440 aa, Artificial Sequence; identical to SEQ ID NO: 3837
  source: /note="Description of Artificial Sequence: Synthetic polypeptide"

SEQ ID NO: 4277 - protein, 456 aa, Artificial Sequence; identical to SEQ ID NO: 4234
  source: /note="Description of Artificial Sequence: Synthetic polypeptide"

SEQ ID NO: 4278 - protein, 442 aa, Artificial Sequence
  source: /note="Description of Artificial Sequence: Synthetic polypeptide"
EVQLVESGGGLVQPGGSLRLSCAASGFTFSRYSMSWVRQAPGKGLELVAQINSVGNSTYYPDTVKGRFTISRDNAKNTLYLQMNSLRAEDTAVYYCASGDYWGQGTLVTVSSASTKGPSVFPLAPSSKSTSGGTAALGCLVKDYFPEPVTVSWNSGALTSGVHTFPAVLQSSGLYSLSSVVTVPSSSLGTQTYICNVNHKPSNTKVDKKVEPKSCDKTHTCPPCPAPELLGGPSVFLFPPKPKDTLMISRTPEVTCVVVDVSHEDPEVKFNWYVDGVEVHNAKTKPREEQYNSTYRVVSVLTVLHQDWLNGKEYKCKVSNKALPAPIEKTISKAKGQPREPQVYTLPPSRDELTKNQVSLTCLVKGFYPSDIAVEWESNGQPENNYKTTPPVLDSDGSFFLYSKLTVDKSRWQQGNVFSCSVMHEALHNHYTQKSLSLSPGK

SEQ ID NO: 4279 - protein, 222 aa, Artificial Sequence
  source: /note="Description of Artificial Sequence: Synthetic polypeptide"
EVQLVESGGGLVQPGGSLRLSCAASGFTFLGYGIHWVRQAPGKGLEWVGWISPAGGSTDYADSVKGRFTISADTSKNTAYLQMNSLRAEDTAVYYCARGPFSPWVMDYWGQGTLVTVSSASTKGPSVFPLAPSSKSTSGGTAALGCLVKDYFPEPVTVSWNSGALTSGVHTFPAVLQSSGLYSLSSVVTVPSSSLGTQTYICNVNHKPSNTKVDKKVEPKSC

SEQ ID NO: 4280 - protein, 439 aa, Artificial Sequence
  source: /note="Description of Artificial Sequence: Synthetic polypeptide"
EVQLVESGGGLVQPGGSLRLSCAASGFTFSSYGMSWVRQAPGKGLELVASINSNGGSTYYPDSVKGRFTISRDNAKNSLYLQMNSLRAEDTAVYYCASGDYWGQGTTVTVSSASTKGPSVFPLAPCSRSTSESTAALGCLVKDYFPEPVTVSWNSGALTSGVHTFPAVLQSSGLYSLSSVVTVPSSSLGTKTYTCNVDHKPSNTKVDKRVESKYGPPCPPCPAPEFLGGPSVFLFPPKPKDTLMISRTPEVTCVVVDVSQEDPEVQFNWYVDGVEVHNAKTKPREEQFNSTYRVVSVLTVLHQDWLNGKEYKCKVSNKGLPSSIEKTISKAKGQPREPQVYTLPPSQEEMTKNQVSLTCLVKGFYPSDIAVEWESNGQPENNYKTTPPVLDSDGSFFLYSRLTVDKSRWQEGNVFSCSVMHEALHNHYTQKSLSLSLGK

SEQ ID NO: 4281 - protein, 439 aa, Artificial Sequence; identical to SEQ ID NO: 4280
  source: /note="Description of Artificial Sequence: Synthetic polypeptide"

SEQ ID NO: 4282 - protein, 226 aa, Artificial Sequence; identical to SEQ ID NO: 3857
  source: /note="Description of Artificial Sequence: Synthetic polypeptide"

SEQ ID NO: 4283 - protein, 251 aa, Artificial Sequence; identical to SEQ ID NO: 3858
  source: /note="Description of Artificial Sequence: Synthetic polypeptide"

SEQ ID NO: 4284 - protein, 218 aa, Artificial Sequence; identical to SEQ ID NO: 3859
  source: /note="Description of Artificial Sequence: Synthetic polypeptide"

SEQ ID NO: 4285 - protein, 222 aa, Artificial Sequence; identical to SEQ ID NO: 3860
  source: /note="Description of Artificial Sequence: Synthetic polypeptide"

SEQ ID NO: 4286 - protein, 458 aa, Artificial Sequence
  source: /note="Description of Artificial Sequence: Synthetic polypeptide"
MGRSWIFLFLLSGTAGVHSEVQLQQSGPELVKPGASVKISCKASGYTFTDYNMHWVKQSHGKRLEWIGYIYPHNGGTGYNQRFKSKATLTVDKSSSTAYMELRSLTSEDSAVYYCARPGTEAYWGQGTLVTVSAAKTTPPSVYPLAPGSAAQTNSMVTLGCLVKGYFPEPVTVTWNSGSLSSGVHTFPAVLQSDLYTLSSSVTVPSSTWPSETVTCNVAHPASSTKVDKKIVPRDCGCKPCICTVPEVSSVFIFPPKPKDVLTITLTPKVTCVVVDISKDDPEVQFSWFVDDVEVHTAQTQPREEQFNSTFRSVSELPIMHQDWLNGKEFKCRVNSAAFPAPIEKTISKTKGRPKAPQVYTIPPPKEQMAKDKVSLTCMITDFFPEDITVEWQWNGQPAENYKNTQPIMDTDGSYFVYSKLNVQKSNWEAGNTFTCSVLHEGLHNHHTEKSLSHSPGK

SEQ ID NO: 4287 - protein, 341 aa, Artificial Sequence
  source: /note="Description of Artificial Sequence: Synthetic polypeptide"
VHSEVQLQQSGPELVKPGASVKISCKASGYTFTDYNMHWVKRLEWIGYIYPHNGGTGYNQRKSKATLTVDKSSSTAYMELRSLTSEDSAVYYCARPGTEAYWGQGTLVTVSAAKTTPPSVYPLAPGSAAQTNSMVTLGCLVKGYFPEPVTVTWNSGSLSSGVHTFPAVLVTVPSSTWPPKPKDVLTITLTPKVTCVVVDISKDDPEVQFSWFVDDVEVHTAQTQPRRSVSELPIMHQDWLNGKEFKCRVNSAAFPAPIEKTISKTKGRPKAPQVYTIPPPKEQMAKDKVSLQWNGQPAENYKNTQPIMDTDGSYFVYSKLNVQKSNWEAGNTFTCSVLHEG

SEQ ID NO: 4288 - protein, 117 aa, Artificial Sequence
  source: /note="Description of Artificial Sequence: Synthetic polypeptide"
EVKLEESGGGLVQPGGSMKLSCAASGFTFSNAWMDWVRQSPEKGLEWVAEIRSKANNHATYYGESVKGRFTISRDDSKSSVYLQMNSLRAEDTGIYYCTATVRGGYWGQGTTLTVSS

SEQ ID NO: 4289 - protein, 460 aa, Artificial Sequence
  source: /note="Description of Artificial Sequence: Synthetic polypeptide"
MYLGLNYVFIVFLLNGVQSEVKLEESGGGLVQPGGSMKLSCAASGFTFSNAWMDWVRQSPEKGLEWVAEIRSKANNHATYYGESVKGRFTISRDDSKSSVYLQMNSLRAEDTGIYYCTATVRGGYWGQGTTLTVSSAKTTPPSVYPLAPGSAAQTNSMVTLGCLVKGYFPEPVTVTWNSGSLSSGVHTFPAVLQSDLYTLSSSVTVPSSTWPSETVTCNVAHPASSTKVDKKIVPRDCGCKPCICTVPEVSSVFIFPPKPKDVLTITLTPKVTCVVVDISKDDPEVQFSWFVDDVEVHTAQTQPREEQFNSTFRSVSELPIMHQDWLNGKEFKCRVNSAAFPAPIEKTISKTKGRPKAPQVYTIPPPKEQMAKDKVSLTCMITDFFPEDITVEWQWNGQPAENYKNTQPIMDTDGSYFVYSKLNVQKSNWEAGNTFTCSVLHEGLHNHHTEKSLSHSPGK

SEQ ID NO: 4290 - protein, 120 aa, Artificial Sequence
  source: /note="Description of Artificial Sequence: Synthetic polypeptide"
QVQLVESGGGVVQPGRSLRLSCAFSGFSLSTSGMSVGWIRQAPGKGLEWVAHIWWDDDKYYNPSLKSRLTISKDTSKNTVYLQMNSLRAEDTAVYYCARRTTTADYFAYWGQGTTVTVSS

SEQ ID NO: 4291 - protein, 120 aa, Artificial Sequence
  source: /note="Description of Artificial Sequence: Synthetic polypeptide"
QVQLVESGGGVVQPGRSLRLSCAFSGFSLSTSGMSVGWIRQAPGKGLEWLAHIWWDDDKYYNPSLKSRFTISKDTSKNTVYLQMNSLRAEDTAVYYCARRTTTADYFAYWGQGTTVTVSS

SEQ ID NO: 4292 - protein, 120 aa, Artificial Sequence
  source: /note="Description of Artificial Sequence: Synthetic polypeptide"
QVQLVESGGGVVQPGRSLRLSCAFSGFSLSTSGMSVGWIRQAPGKGLEWLAHIWWDDDKYYNPSLKSRLTISKDTSKNTLYLQMNSLRAEDTAVYYCARRTTTADYFAYWGQGTTVTVSS

SEQ ID NO: 4293 - protein, 120 aa, Artificial Sequence
  source: /note="Description of Artificial Sequence: Synthetic polypeptide"
QVQLVESGGGVVQPGRSLRLSCAFSGFTLSTSGMSVGWIRQAPGKGLEWVAHIWWDDDKYYNPSLKSRLTISKDTSKNTVYLQMNSLRAEDTAVYYCARRTTTADYFAYWGQGTTVTVSS

SEQ ID NO: 4294 - protein, 120 aa, Artificial Sequence
  source: /note="Description of Artificial Sequence: Synthetic polypeptide"
QVQLVESGGGVVQPGRSLRLSCAFSGFTLSTSGMSVGWIRQAPGKGLEWLAHIWWDDDKYYNPSLKSRFTISKDTSKNTVYLQMNSLRAEDTAVYYCARRTTTADYFAYWGQGTTVTVSS

SEQ ID NO: 4295 - protein, 121 aa, Artificial Sequence
  source: /note="Description of Artificial Sequence: Synthetic polypeptide"
QVQLVESGGGVVQPGRSLRLSCAFSGFTLSTSGMSVGWIRQAPGKGLEWLAHIWWDDDKYYNPSLKSRLTISKDTSKNTLYLQMNSLRAEDTAVYYCARRTTTADYFAYWGQGTTVTVSSV

SEQ ID NO: 4296 - protein, 121 aa, Artificial Sequence
  source: /note="Description of Artificial Sequence: Synthetic polypeptide"
QVQLVESGGGVVQPGRSLRLSCAFSGFSLSTSGMSVGWIRQAPGKGLEWVAHIWWDDDKYYNPSLKSRFTISKDTSKNTVYLQMNSLRAEDTAVYYCARRTTTADYFAYWGQGTTVTVSSV

SEQ ID NO: 4297 - protein, 120 aa, Artificial Sequence
  source: /note="Description of Artificial Sequence: Synthetic polypeptide"
QVQLVESGGGVVQPGRSLRLSCAFSGFSLSTSGMSVGWIRQAPGKGLEWVAHIWWDDDKYYNPSLKSRLTISKDTSKNTLYLQMNSLRAEDTAVYYCARRTTTADYFAYWGQGTTVTVSS

SEQ ID NO: 4298 - protein, 120 aa, Artificial Sequence
  source: /note="Description of Artificial Sequence: Synthetic polypeptide"
QVQLVESGGGVVQPGRSLRLSCAFSGFSLSTSGMSVGWIRQAPGKGLEWLAHIWWDDDKYYNPSLKSRFTISKDTSKNTLYLQMNSLRAEDTAVYYCARRTTTADYFAYWGQGTTVTVSS

SEQ ID NO: 4299 - protein, 120 aa, Artificial Sequence
  source: /note="Description of Artificial Sequence: Synthetic polypeptide"
QVQLVESGGGVVQPGRSLRLSCAFSGFTLSTSGMSVGWIRQAPGKGLEWVAHIWWDDDKYYNPSLKSRFTISKDTSKNTVYLQMNSLRAEDTAVYYCARRTTTADYFAYWGQGTTVTVSS

SEQ ID NO: 4300 - protein, 120 aa, Artificial Sequence
  source: /note="Description of Artificial Sequence: Synthetic polypeptide"
QVQLVESGGGVVQPGRSLRLSCAFSGFTLSTSGMSVGWIRQAPGKGLEWVAHIWWDDDKYYNPSLKSRLTISKDTSKNTLYLQMNSLRAEDTAVYYCARRTTTADYFAYWGQGTTVTVSS

SEQ ID NO: 4301 - protein, 120 aa, Artificial Sequence
  source: /note="Description of Artificial Sequence: Synthetic polypeptide"
QVQLVESGGGVVQPGRSLRLSCAFSGFTLSTSGMSVGWIRQAPGKGLEWLAHIWWDDDKYYNPSLKSRFTISKDTSKNTLYLQMNSLRAEDTAVYYCARRTTTADYFAYWGQGTTVTVSS

SEQ ID NO: 4302 - protein, 120 aa, Artificial Sequence
  source: /note="Description of Artificial Sequence: Synthetic polypeptide"
QVQLVESGGGVVQPGRSLRLSCAFSGFSLSTSGMSVGWIRQAPGKGLEWVAHIWWDDDKYYNPSLKSRFTISKDTSKNTLYLQMNSLRAEDTAVYYCARRTTTADYFAYWGQGTTVTVSS

SEQ ID NO: 4303 - protein, 120 aa, Artificial Sequence
  source: /note="Description of Artificial Sequence: Synthetic polypeptide"
QVQLVESGGGVVQPGRSLRLSCAFSGFTLSTSGMSVGWVRQAPGKGLEWLAHIWWDDDKYYNPSLKSRLTISKDTSKNTVYLQMNSLRAEDTAVYYCARRTTTADYFAYWGQGTTVTVSS

SEQ ID NO: 4304 - protein, 120 aa, Artificial Sequence
  source: /note="Description of Artificial Sequence: Synthetic polypeptide"
QVQLVESGGGVVQPGRSLRLSCAFSGFSLSTSGMSVGWIRQAPGKGLEWLAHIWWDDDKYYNPSLKSRLTISKDNSKNTVYLQMNSLRAEDTAVYYCARRTTTADYFAYWGQGTTVTVSS

SEQ ID NO: 4305 - protein, 112 aa, Artificial Sequence
  source: /note="Description of Artificial Sequence: Synthetic polypeptide"
DVLMTQTPLSLPVSLGDQASISCRSSQNIIHSNGNTYLEWYLQKPGQSPKLLIYKVSNRFSGVPDRFSGSGSGTDFTLKIKKVEAEDLGIYYCFQGSHVPLTFGAGTKLELE

SEQ ID NO: 4306 - protein, 123 aa, Artificial Sequence
  source: /note="Description of Artificial Sequence: Synthetic polypeptide"
QATLKESGPGILQSSQTLSLTCSFSGFSLSTSGMGVSWIRQPSGKGLEWLAHIYWDDDKRYNPSLKSRLTISKDTSRKQVFLKITSVDPADTATYYCVRRPITPVLVDAMDYWGQGTSVTVSS

SEQ ID NO: 4307 - protein, 219 aa, Artificial Sequence
  source: /note="Description of Artificial Sequence: Synthetic polypeptide"
DVVMTQSPLSLPVTLGQPASISCKSSQSLLDSDGKTYLNWLQQRPGQSPRRLIYLVSKLDSGVPDRFSGSGSGTDFTLKISRVEAEDVGVYYCWQGTHFPRTFGGGTKVEIKRTVAAPSVFIFPPSDEQLKSGTASVVCLLNNFYPREAKVQWKVDNALQSGNSQESVTEQDSKDSTYSLSSTLTLSKADYEKHKVYACEVTHQGLSSPVTKSFNRGEC

SEQ ID NO: 4308 - protein, 120 aa, Artificial Sequence
  source: /note="Description of Artificial Sequence: Synthetic polypeptide"
QVQLVESGGGVVQPGRSLRLSCAFSGFTLSTSGMSVGWIRQAPGKGLEWVAHIWWDDDKYYNPSLKSRFTISRDNSKNTLYLQMNSLRAEDTAVYYCARRTTTADYFAYWGQGTTVTVSS

SEQ ID NO: 4309 - protein, 468 aa, Artificial Sequence
  source: /note="Description of Artificial Sequence: Synthetic polypeptide"
MNFGLSLIFLVLVLKGVQCEVQLVESGGGLVQPGGSLRLSCAGSGFTFSNYGMSWVRQAPGKGLEWVASIRSGGGRTYYSDNVKGRFTISRENAKNSLYLQMNSLRAEDTAVYYCVRYDHYSGSSDYWGQGTLVTVSSASTKGPSVFPLAPSSKSTSGGTAALGCLVKDYFPEPVTVSWNSGALTSGVHTFPAVLQSSGLYSLSSVVTVPSSSLGTQTYICNVNHKPSNTKVDKKVEPKSCDKTHTCPPCPAPELLGGPSVFLFPPKPKDTLMISRTPEVTCVVVDVSHEDPEVKFNWYVDGVEVHNAKTKPREEQYNSTYRVVSVLTVLHQDWLNGKEYKCKVSNKALPAPIEKTISKAKGQPREPQVYTLPPSRDELTKNQVSLTCLVKGFYPSDIAVEWESNGQPENNYKTTPPVLDSDGSFFLYSKLTVDKSRWQQGNVFSCSVMHEALHNHYTQKSLSLSPGK

SEQ ID NO: 4310 - protein, 441 aa, Artificial Sequence
  source: /note="Description of Artificial Sequence: Synthetic polypeptide"
EVQLQQSGPEVVKPGVSVKISCKGSGYTFTDYAMHWVKQSPGKSLEWIGVISTKYGKTNYNPSFQGQATMTVDKSSSTAYMELASLKASDSAIYYCARGDDGYSWGQGTSVTVSSASTKGPSVFPLAPCSRSTSESTAALGCLVKDYFPEPVTVSWNSGALTSGVHTFPAVLQSSGLYSLSSVVTVPSSSLGTKTYTCNVDHKPSNTKVDKRVESKYGPPCPPCPAPEFEGGPSVFLFPPKPKDTLMISRTPEVTCVVVDVSQEDPEVQFNWYVDGVEVHNAKTKPREEQFNSTYRVVSVLTVLHQDWLNGKEYKCKVSNKGLPSSIEKTISKAKGQPREPQVYTLPPSQEEMTKNQVSLTCLVKGFYPSDIAVEWESNGQPENNYKTTPPVLDSDGSFFLYSRLTVDKSRWQEGNVFSCSVMHEALHNHYTQKSLSLSLG

SEQ ID NO: 4311 - protein, 441 aa, Artificial Sequence
  source: /note="Description of Artificial Sequence: Synthetic polypeptide"
EVQLQQSGPEVVKPGVSVKISCKGSGYTFTDYAMHWVKQSPGKSLEWIGVISTKYGKTNYNPSFQGQATMTVDKSSSTAYMELASLKASDSAIYYCARGDEGYSWGQGTSVTVSSASTKGPSVFPLAPCSRSTSESTAALGCLVKDYFPEPVTVSWNSGALTSGVHTFPAVLQSSGLYSLSSVVTVPSSSLGTKTYTCNVDHKPSNTKVDKRVESKYGPPCPPCPAPEFEGGPSVFLFPPKPKDTLMISRTPEVTCVVVDVSQEDPEVQFNWYVDGVEVHNAKTKPREEQFNSTYRVVSVLTVLHQDWLNGKEYKCKVSNKGLPSSIEKTISKAKGQPREPQVYTLPPSQEEMTKNQVSLTCLVKGFYPSDIAVEWESNGQPENNYKTTPPVLDSDGSFFLYSRLTVDKSRWQEGNVFSCSVMHEALHNHYTQKSLSLSLG

SEQ ID NO: 4312 - protein, 448 aa, Artificial Sequence
  source: /note="Description of Artificial Sequence: Synthetic polypeptide"
EVQLVESGGGLVQPGGSLKLSCAASGFTFSSYGMSWVRQTPDKRLELVASINSNGGSTYYPDSVKGRFTISRDNAKNTLYLQMSSLKSEDTAMYYCASGDYWGQGSTLTVSSAKTTPPSVYPLAPGCGDTTGSSVTLGCLVKGYFPESVTVTWNSGSLSSSVHTFPALLQSGLYTMSSSVTVPSSTWPSQTVTCSVAHPASSTTVDKKLEPSGPISTINPCPPCKECHKCPAPNLEGGPSVFIFPPNIKDVLMISLTPKVTCVVVDVSEDDPDVQISWFVNNVEVHTAQTQTHREDYNSTIRVVSTLPIQHQDWMSGKEFKCKVNNKDLPSPIERTISKIKGLVRAPQVYILPPPAEQLSRKDVSLTCLVVGFNPGDISVEWTSNGHTEENYKDTAPVLDSDGSYFIYSKLNMKTSKWEKTDSFSCNVRHEGLKNYYLKKTISRSPGK

SEQ ID NO: 4313 - protein, 442 aa, Artificial Sequence; identical to SEQ ID NO: 4278
  source: /note="Description of Artificial Sequence: Synthetic polypeptide"

SEQ ID NO: 4314 - protein, 445 aa, Artificial Sequence
  source: /note="Description of Artificial Sequence: Synthetic polypeptide"
EVQLVESGGGLVQPGGSLRLSCAASGFTFSDNGMAWVRQAPGKGLEWVSFISNLAYSIDYADTVTGRFTISRDNAKNSLYLQMNSLRAEDTAVYYCVSGTWFAYWGQGTLVTVSSASTKGPSVFPLAPSSKSTSGGTAALGCLVKDYFPEPVTVSWNSGALTSGVHTFPAVLQSSGLYSLSSVVTVPSSSLGTQTYICNVNHKPSNTKVDKKVEPKSCDKTHTCPPCPAPELAGAPSVFLFPPKPKDTLMISRTPEVTCVVVDVSHEDPEVKFNWYVDGVEVHNAKTKPREEQYNSTYRVVSVLTVLHQDWLNGKEYKCKVSNKALPAPIEKTISKAKGQPREPQVYTLPPSRDELTKNQVSLTCLVKGFYPSDIAVEWESNGQPENNYKTTPPVLDSDGSFFLYSKLTVDKSRWQQGNVFSCSVMHEALHNHYTQKSLSLSPGK

SEQ ID NO: 4315 - protein, 445 aa, Artificial Sequence
  source: /note="Description of Artificial Sequence: Synthetic polypeptide"
EVQLVESGGGLVQPGGSLRLSCAASGFTFSDNGMAWVRQAPGKGLEWISFISNLAYSIDYADTVTGRFTISRDNAKNSLYLQMNSLRAEDTAVYYCVSGTWFAYWGQGTLVTVSSASTKGPSVFPLAPSSKSTSGGTAALGCLVKDYFPEPVTVSWNSGALTSGVHTFPAVLQSSGLYSLSSVVTVPSSSLGTQTYICNVNHKPSNTKVDKKVEPKSCDKTHTCPPCPAPELAGAPSVFLFPPKPKDTLMISRTPEVTCVVVDVSHEDPEVKFNWYVDGVEVHNAKTKPREEQYNSTYRVVSVLTVLHQDWLNGKEYKCKVSNKALPAPIEKTISKAKGQPREPQVYTLPPSRDELTKNQVSLTCLVKGFYPSDIAVEWESNGQPENNYKTTPPVLDSDGSFFLYSKLTVDKSRWQQGNVFSCSVMHEALHNHYTQKSLSLSPGK

SEQ ID NO: 4316 - protein, 453 aa, Artificial Sequence
  source: /note="Description of Artificial Sequence: Synthetic polypeptide"
QVQLVESGGGVVQPGRSLRLSCAASGFAFSSYGMHWVRQAPGKGLEWVAVIWFDGTKKYYTDSVKGRFTISRDNSKNTLYLQMNTLRAEDTAVYYCARDRGIGARRGPYYMDVWGKGTTVTVSSASTKGPSVFPLAPSSKSTSGGTAALGCLVKDYFPEPVTVSWNSGALTSGVHTFPAVLQSSGLYSLSSVVTVPSSSLGTQTYICNVNHKPSNTKVDKRVEPKSCDKTHTCPPCPAPELLGGPSVFLFPPKPKDTLMISRTPEVTCVVVDVSHEDPEVKFNWYVDGVEVHNAKTKPREEQYNSTYRVVSVLTVLHQDWLNGKEYKCKVSNKALPAPIEKTISKAKGQPREPQVYTLPPSREEMTKNQVSLTCLVKGFYPSDIAVEWESNGQPENNYKTTPPVLDSDGSFFLYSKLTVDKSRWQQGNVFSCSVMHEALHNHYTQKSLSLSPG

SEQ ID NO: 4317 - protein, 470 aa, Artificial Sequence; identical to SEQ ID NO: 3861
  source: /note="Description of Artificial Sequence: Synthetic polypeptide"

SEQ ID NO: 4318 - protein, 467 aa, Artificial Sequence; identical to SEQ ID NO: 3862
  source: /note="Description of Artificial Sequence: Synthetic polypeptide"

SEQ ID NO: 4319 - protein, 470 aa, Artificial Sequence; identical to SEQ ID NO: 3863
  source: /note="Description of Artificial Sequence: Synthetic polypeptide"

SEQ ID NO: 4320 - protein, 671 aa, Artificial Sequence; identical to SEQ ID NO: 3864
  source: /note="Description of Artificial Sequence: Synthetic polypeptide"

SEQ ID NO: 4321 - protein, 470 aa, Artificial Sequence; identical to SEQ ID NO: 3865
  source: /note="Description of Artificial Sequence: Synthetic polypeptide"

SEQ ID NO: 4322 - protein, 454 aa, Artificial Sequence; identical to SEQ ID NO: 3866
  source: /note="Description of Artificial Sequence: Synthetic polypeptide"

SEQ ID NO: 4323 - protein, 467 aa, Artificial Sequence; identical to SEQ ID NO: 3867
  source: /note="Description of Artificial Sequence: Synthetic polypeptide"

SEQ ID NO: 4324 - protein, 431 aa, Artificial Sequence; identical to SEQ ID NO: 3868
  source: /note="Description of Artificial Sequence: Synthetic polypeptide"

SEQ ID NO: 4325 - protein, 476 aa, Artificial Sequence; identical to SEQ ID NO: 3869
  source: /note="Description of Artificial Sequence: Synthetic polypeptide"

SEQ ID NO: 4326 - protein, 442 aa, Artificial Sequence
  source: /note="Description of Artificial Sequence: Synthetic polypeptide"
QVQLVQSGAEVKKPGASVKVSCKASGYYTEAYYIHWVRQAPGQGLEWMGRIDPATGNTKYAPRLQDRVTMTRDTSTSTVYMELSSLRSEDTAVYYCASLYSLPVYWGQGTTVTVSSASTKGPSVFPLAPCSRSTSESTAALGCLVKDYFPEPVTVSWNSGALTSGVHTFPAVLQSSGLYSLSSVVTVPSSNFGTQTYTCNVDHKPSNTKVDKTVERKCCVECPPCPAPPVAGPSVFLFPPKPKDTLMISRTPEVTCVVVDVSHEDPEVQFNWYVDGVEVHNAKTKPREEQFNSTFRVVSVLTVVHQDWLNGKEYKCKVSNKGLPSSIEKTISKTKGQPREPQVYTLPPSREEMTKNQVSLTCLVKGFYPSDIAVEWESNGQPENNYKTTPPMLDSDGSFFLYSKLTVDKSRWQQGNVFSCSVMHEALHNHYTQKSLSLSPGK

SEQ ID NO: 4327 - protein, 439 aa, Artificial Sequence; identical to SEQ ID NO: 4280
  source: /note="Description of Artificial Sequence: Synthetic polypeptide"

SEQ ID NO: 4328 - protein, 462 aa, Artificial Sequence; identical to SEQ ID NO: 3870
  source: /note="Description of Artificial Sequence: Synthetic polypeptide"

SEQ ID NO: 4329 - protein, 462 aa, Artificial Sequence; identical to SEQ ID NO: 3871
  source: /note="Description of Artificial Sequence: Synthetic polypeptide"

SEQ ID NO: 4330 - protein, 462 aa, Artificial Sequence; identical to SEQ ID NO: 3872
  source: /note="Description of Artificial Sequence: Synthetic polypeptide"

SEQ ID NO: 4331 - protein, 462 aa, Artificial Sequence; identical to SEQ ID NO: 3873
  source: /note="Description of Artificial Sequence: Synthetic polypeptide"

SEQ ID NO: 4332 - protein, 462 aa, Artificial Sequence; identical to SEQ ID NO: 3874
  source: /note="Description of Artificial Sequence: Synthetic polypeptide"

SEQ ID NO: 4333 - protein, 462 aa, Artificial Sequence; identical to SEQ ID NO: 3875
  source: /note="Description of Artificial Sequence: Synthetic polypeptide"

SEQ ID NO: 4334 - protein, 462 aa, Artificial Sequence; identical to SEQ ID NO: 3876
  source: /note="Description of Artificial Sequence: Synthetic polypeptide"

SEQ ID NO: 4335 - protein, 144 aa, Artificial Sequence; identical to SEQ ID NO: 3877
  source: /note="Description of Artificial Sequence: Synthetic polypeptide"

SEQ ID NO: 4336 - protein, 114 aa, Artificial Sequence; identical to SEQ ID NO: 3878
  source: /note="Description of Artificial Sequence: Synthetic polypeptide"
  MOD_RES (3)..(3): Any amino acid

SEQ ID NO: 4337 - protein, 450 aa, Artificial Sequence
  source: /note="Description of Artificial Sequence: Synthetic polypeptide"
METGLRWLLLVAVLKGVQCQSVEESGGHLVTPGTPLTLTCTVSGIDLSTYAMGWVRQAPGKGLEWIGVITKSGNTYYASWAKGRFAISKTSTTVDLKITSPTTEDTATYFCGRYGIGVSYYDIWGPGTLVTVSSGQPKAPSVFPLAPCCGDTPSSTVTLGCLVKGYLPEPVTVTWNSGTLTNGVRTFPSVRQSSGLYSLSSVVSVTSSSQPVTCNVAHPATNTKVDKTVAPSTCSKPTCPPPELLGGPSVFIFPPKPKDTLMISRTPEVTCVVVDVSQDDPEVQFTWYINNEQVRTARPPLREQQFNSTIRVVSTLPIAHQDWLRGKEEKCKVHNKALPAPIEKTISKARGQPLEPKVYTMGPPREELSSRSVSLTCMINGFYPSDISVEWEKNGKAEDNYKTTPAVLDSDGSYFLYSKLSVPTSEWQRGDVFTCSVMHEALHNHYTQKS

SEQ ID NO: 4338 - protein, 179 aa, Artificial Sequence
  source: /note="Description of Artificial Sequence: Synthetic polypeptide"
MKYLLPTAAAGLLLLAAQPAMAMAEVQLQQSGAELARPGTSVNLSCKTSGYSFTGYGVSWVKQRIGQGLEWIGEIYPRSGNTYYNEKFKGKATLTADKSSNTAYMELRSLTSEDSAVYFCARWNWERDAMDYWGQGTSVTVSSAKTTPPSDYPLAGGGGSGGGGSGGGGSDIVMTQTPL

SEQ ID NO: 4339 - protein, 121 aa, Artificial Sequence
  source: /note="Description of Artificial Sequence: Synthetic polypeptide"
EVQLVESGGGLVQPGGSLKLSCAASGFNFQISAIHWVRQASGKGLEWVGRIRSKSHNYATLYAASLKGRFTLSRDDSRNTAYLQMSSLQTEDMAVYYCTVLSANYDTFDYWGQGTLVTVSS

SEQ ID NO: 4340 - protein, 441 aa, Artificial Sequence
  source: /note="Description of Artificial Sequence: Synthetic polypeptide"
QVQLVQSGAEVKKPGSSVKVSCKASGYTFTDYYMNWVRQAPGQGLEWIGDINPNRGGTTYNQKFKGRVTITVDKSTSTAYMELSSLRSEDTAVYYCASYYAVGYWGQGTTVTVSSASTKGPSVFPLAPCSRSTSESTAALGCLVKDYFPEPVTVSWNSGALTSGVHTFPAVLQSSGLYSLSSVVTVPSSSLGTKTYTCNVDHKPSNTKVDKRVESKYGPPCPPCPAPEFLGGPSVFLFPPKPKDTLMISRTPEVTCVVVDVSQEDPEVQFNWYVDGVEVHNAKTKPREEQFNSTYRVVSVLTVLHQDWLNGKEYKCKVSNKGLPSSIEKTISKAKGQPREPQVYTLPPSQEEMTKNQVSLTCLVKGFYPSDIAVEWESNGQPENNYKTTPPVLDSDGSFFLYSRLTVDKSRWQEGNVFSCSVMHEALHNHYTQKSLSLSLG

SEQ ID NO: 4341 - protein, 440 aa, Artificial Sequence
  source: /note="Description of Artificial Sequence: Synthetic polypeptide"
QVQLVQSGAEVKKPGSSVKVSCKASGYTFTDYYMNWVRQAPGQGLEWIGDINPNRGGTTYNQKFKGRVTITVDKSTSTAYMELSSLRSEDTAVYYCASYYAVGYWGQGTTVTVSSASTKGPSVFPLAPCSRSTSESTAALGCLVKDYFPEPVTVSWNSGALTSGVHTFPAVLQSSGLYSLSSVVTVPSSSLGTKTYTCNVDHKPSNTKVDKRVESKYGPPCPPCPAPEFLGGPSVFLFPPKPKDTLMISRTPEVTCVVVDVSQEDPEVQFNWYVDGVEVHNAKTKPREEQFNSTYRWSVLTVLHQDWLNGKEYKCKVSNKGLPSSIEKTISKAKGQPREPQVYTLPPSQEEMTKNQVSLTCLVKGFYPSDIAVEWESNGQPENNYKTTPPVLDSDGSFFLYSRLTVDKSRWQEGNVFSCSVMHEALHNHYTQKSLSLSLG

SEQ ID NO: 4342 - protein, 416 aa, Artificial Sequence
  source: /note="Description of Artificial Sequence: Synthetic polypeptide"
EVQLVQSGAEVKKPGSSVKVSCKASGYTFTDYYMNWVRQAPGQGLEWIGDINPNRGGTTYNQKFKGRVTITVDKSTSTAYMELSSLRSSASTKGPSVFPLAPCSRSTSESTAALGCLVKDYFPEPVTVSWNSGALTSGVHTFPAVLQSSGLYSLSSVVTVPSSSLGTKTYTCNVDNKPSNTKVDKRVESKYGPPCPPCPAPEFLGGPSVFLFPPKPKDTLMISRTPEVICVVVDVSQEDPEVQFNWYVDGVEVHNAKTKPREEQFNSTYRVVSVLTVLHQDWLNGKEYKCKVSNKGLPSSIEKTISKAKGQPREPQVYTLPPSQEEMTKNQVSLTCLVKGFYPSDIAVEWESNGQPENNYKTTPPVLDSDGSFFLYSRLIVDKSRWQEGNVESCSVMHEALHNHYTQKSLSLSLGK

SEQ ID NO: 4343 - protein, 446 aa, Artificial Sequence
  source: /note="Description of Artificial Sequence: Synthetic polypeptide"
EVQLVQSGAEVKKPGSSVKVSCKASGYTFTDYYMNWVRQAPGQGLEWIGDINPNRGGTTYNQKFKGRVTITVDKSTSTAYMELSSLRSEDTAVYYCASYYAVGYWGQGTTVTVSSASTKGPSVFPLAPSSKSTSGGTAALGCLVKDYFPEPVTVSWNSGALTSGVHTFPAVLQSSGLYSLSSVVTVPSSSLGTQTYICNVNHKPSNTKVDKKVEPKSCDKTHTCPPCPAPELLGGPSVFLFPPKPKDTLMISRTPEVTCVVVDVSHEDPEVKFNWYVDGVEVHNAKTKPREEQYNSTYRVVSVLTVLFHQDWLNGKEYKCKVSNKALPAPIEKTISKAKGQPREPQVYTLPPSREEMTKNQVSLTCLVKGFYPSDIAVEWESNGQPENNYKTTPPVLDSDGSFELYSKLTVDKSRWQQGNVFSCSVMHEALHNHYTQKSLSLSPGK

SEQ ID NO: 4344 - protein, 445 aa, Artificial Sequence
  source: /note="Description of Artificial Sequence: Synthetic polypeptide"
EVQLVQSGAEVKKPGSSVKVSCKASGYTFTDYYMNWVRQAPGQGLEWIGDINPNRGGTTYNQKFKGRVTITVDKSTSTAYMELSSLRSEDTAVYYCASYYAVGYWGQGTTVTVSSASTKGPSVFPLAPSSKSTSGGTAALGCLVKDYFPEPVTVSWNSGALTSGVHTFPAVLQSSGLYSLSSVVTVPSSSLGTQTYICNVNHKPSNTKVDKKVEPKSCDKTHTCPPCPAPELLGGPSVFLFPPKPKDTLMISRTPEVICVVVDVSHEDPEVKFNWYVDGVEVHNAKTKPREEQYGSTYRVVSVLTVLHQDWLNGKEYKCKVSNKALPAPIEKTISKAKGQPREPQVYTLPPSREEMTKNQVSLTCLVKGFYPSDIAVEWESNGQPENNYKTTPPVLDSDGSFFLYSKLTVDKSRWQQGNVFSCSVMHEALHNHYTQKSLSLSPGK

SEQ ID NO: 4345 - protein, 442 aa, Artificial Sequence
  source: /note="Description of Artificial Sequence: Synthetic polypeptide"
EVQLVQSGAEVKKPGSSVKVSCKASGYTFTDYYMNWVRQAPGQGLEWIGDINPNRGGTTYNQKFKGRVTITVDKSTSTAYMELSSLRSEDTAVYYCASYYAVGYWGQGTTVTVSSASTKGPSVFPLAPSSKSTSGGTAALGCLVKDYFPEPVTVSWNSGALTSGVHTFPAVLQSSGLYSLSSVVTVPSSSLGTQTYICNVNHKPSNTKVDKKVEPKSCDKTHTCPPCPAPELLSVFLFPPKPKDTLMISRTPEVTCVVVDVSQEDPEVQFNWYVDGVEVHNAKTKPREEQFNSTYRVVSVLTVLHQDWLNGKEYKCKVSNKGLPSSIEKTISKAKGQPREPQVYTLPPSQEEMTKNQVSLTCLVKGEYPSDIAVEWESNGQPENNYKTTPPVLDSDGSFFLYSRLTVDKSRWQEGNVFSCSVMHEALHNHYTQKSLSLSLGK

SEQ ID NO: 4346 - protein, 445 aa, Artificial Sequence
  source: /note="Description of Artificial Sequence: Synthetic polypeptide"
EVQLVQSGAEVKKPGSSVKVSCKASGYTFTDYYMNWVRQAPGQGLEWIGDINPNRGGTTYNQKFKGRVTITVDKSTSTAYMELSSLRSEDTAVYYCASYYAVGYWGQGTTVTVSSASTKGPSVFPLAPSSKSTSGGTAALGCLVKDYFPEPVTVSWNSGALTSGVHTFPAVLQSSGLYSLSSVVTVPSSSLGTQTYICNVNHKPSNTKVDKKVEPKSCDKTHTCPPCPAPELLGGPSVFLFPPKPKDTLMISRTPEVTCVVVDVSHEDPEVKFNWYVDGVEVHNAKTKPREEQYNSTYRVVSVLTVLHQDWLNGKEYKCKVSNKALPAPIEKTISKAKGQPREPQVYTLPPSREEMTKNQVSLTCLVKGFYPSDIAVEWESNGQPENNYKTTPPVLDSDGSFFLYSKLTVDKSRWQQGNVESCSVMHEALHNHYTQKSLSLSPGK

SEQ ID NO: 4347 - protein, 444 aa, Artificial Sequence
  source: /note="Description of Artificial Sequence: Synthetic polypeptide"
EVQLVQSGAEVKKPGSSVKVSCKASGYTFTDYYMNWVRQAPGQGLEWIGDINPNRGGTTYNKFKGRVTITVDKSTSTAYMELSSLRSEDTAVYYCASYYAVGYWGQGTTVTVSSASTKGPSVFPLAPSSKSTSGGTAALGCLVKDYFPEPVTVSWNSGALTSGVHTFPAVLQSSGLYSLSSVVTVPSSSLGTQTYICNVNHKPSNTKVDKKVEPKSCDKTHTCPPCPAPELLGGPSVFLFPPKPKDTLMISRTPEVTCVVVDVSHEDPEVKFNWYVDGVEVHNAKTKPREEQYGSTYRVVSVLTVLHQDWLNGKEYKCKVSNKALPAPIEKTISKAKGQPREPQVYTLPPSREEMTKNQVSLTCLVKGFYPSDIAVEWESNGQPENNYKTTPPVLDSDGSFFLYSKLTVDKSRWQQGNVFSCSVMHEALHNHYTQKSLSLSPGK

SEQ ID NO: 4348 - protein, 117 aa, Artificial Sequence
  source: /note="Description of Artificial Sequence: Synthetic polypeptide"
EVQLVESGEDLVKPGGSLKLSCVASGFAFSSYGMSWVRQTPDMRLEWVATISSSGSRTYFPDSVKGRLTISRDNDKNILYLQMSSLRSEDTAMYYCTITWDGAMDYWGRGISVTVSS

SEQ ID NO: 4349 - protein, 112 aa, Artificial Sequence
  source: /note="Description of Artificial Sequence: Synthetic polypeptide"
DVLMTQTPLSLPVSLGDQASISCKSSQSIVHSNGNTYLEWYLQKPGQSPKLLVYKVSNRFSGVPDRFSGSGSGTDFTLKISRVEAEDLGTYYCFQGSLVPWAFGGGTKLEIK

SEQ ID NO: 4350 - protein, 110 aa, Artificial Sequence
  source: /note="Description of Artificial Sequence: Synthetic polypeptide"
APEFLGGPSVFLFPPKPKDTLMISRTPEVTCVVVDVSQEDPEVQFNWYVDGVEVHNAKTKPREEQFNSTYRVVSVLTVLHQDWLNGKEYKCKVSNKGLPSSIEKTISKAK

SEQ ID NO: 4351 - protein, 106 aa, Artificial Sequence
  source: /note="Description of Artificial Sequence: Synthetic polypeptide"
GQPREPQVYTLPPSQEEMTKNQVSLTCLVKGFYPSDIAVEWESNGQPENNYKTTPPVLDSDGSFFLYSRLTVDKSRWQEGNVFSCSVMHEALHNHYTQKSLSLSLG

SEQ ID NO: 4352 - protein, 441 aa, Artificial Sequence; identical to SEQ ID NO: 4340
  source: /note="Description of Artificial Sequence: Synthetic polypeptide"

SEQ ID NO: 4353 - protein, 442 aa, Artificial Sequence
  source: /note="Description of Artificial Sequence: Synthetic polypeptide"
EVQLVQSGAEVKKPGSSVKVSCKASGYTFTDYYMNWVRQAPGQGLEWIGDINPNRGGTTYNQKFKGRVTITVDKSTSTAYMELSSLRSEDTAVYYCASYYAVGYWGQGTTVTVSSASTKGPSVFPLAPCSRSTSESTAALGCLVKDYFPEPVTVSWNSGALTSGVHTFPAVLQSSGLYSLSSVVTVPSSSLGTKTYTCNVDHKPSNTKVDKRVESKYGPPCPPCPAPEFLGGPSVFLFPPKPKDTLMISRTPEVTCVVVDVSQEDPEVQFNWYVDGVEVHNAKTKPREEQFNSTYRVVSVLTVLHQDWLNGKEYKCKVSNKGLPSSIEKTISKAKGQPREPQVYTLPPSQEEMTKNQVSLTCLVKGFYPSDIAVEWESNGQPENNYKTTPPVLDSDGSFFLYSRLTVDKSRWQEGNVFSCSVMHEALHNHYTQKSLSLSLGK

SEQ ID NO: 4354 - protein, 445 aa, Artificial Sequence
  source: /note="Description of Artificial Sequence: Synthetic polypeptide"
EVQLVQSGAEVKKPGSSVKVSCKASGYTFTDYYMNWVRQAPGQGLEWIGDINPNRGGTTYNQKFKGRVTITVDKSTSTAYMELSSLRSEDTAVYYCASYYAVGYWGQGTTVTVSSASTKGPSVFPLAPSSKSTSGGTAALGCLVKDYFPEPVTVSWNSGALTSGVHTFPAVLQSSGLYSLSSVVTVPSSSLGTQTYICNVNHKPSNTKVDKKVEPKSCDKTHTCPPCPAPELLGGPSVFLFPPKPKDTLMISRTPEVTCVVVDVSHEDPEVKFNWYVDGVEVHNAKTKPREEQYNSTYRVVSVLTVLHQDWLNGKEYKCKVSNKALPAPIEKTISKAKGQPREPQVYTLPPSREEMTKNQVSLTCLVKGFYPSDIAVEWESNGQPENNYKTTPPVLDSDGSFFLYSKLTVDKSRWQQGNVFSCSVMHEALHNHYTQKSLSLSPGK

SEQ ID NO: 4355 - protein, 445 aa, Artificial Sequence
  source: /note="Description of Artificial Sequence: Synthetic polypeptide"
EVQLVQSGAEVKKPGSSVKVSCKASGYTFTDYYMNWVRQAPGQGLEWIGDINPNRGGTTYNQKFKGRVTITVDKSTSTAYMELSSLRSEDTAVYYCASYYAVGYWGQGTTVTVSSASTKGPSVFPLAPSSKSTSGGTAALGCLVKDYFPEPVTVSWNSGALTSGVHTFPAVLQSSGLYSLSSVVTVPSSSLGTQTYICNVNHKPSNTKVDKKVEPKSCDKTHTCPPCPAPELLGGPSVFLFPPKPKDTLMISRTPEVTCVVVDVSHEDPEVKFNWYVDGVEVHNAKTKPREEQYGSTYRVVSVLTVLHQDWLNGKEYKCKVSNKALPAPIEKTISKAKGQPREPQVYTLPPSREEMTKNQVSLTCLVKGFYPSDIAVEWESNGQPENNYKTTPPVLDSDGSFFLYSKLTVDKSRWQQGNVFSCSVMHEALHNHYTQKSLSLSPGK

SEQ ID NO: 4356 - protein, 442 aa, Artificial Sequence; identical to SEQ ID NO: 4353
  source: /note="Description of Artificial Sequence: Synthetic polypeptide"

SEQ ID NO: 4357 - protein, 408 aa, Artificial Sequence
  source: /note="Description of Artificial Sequence: Synthetic polypeptide"
RQAPGQGLEWIGDINPNRGGTTYNQKFKGRVTITVDKSTSTAYMELSSLRSEDTAVYYCASYYAVGYWGQGTTVTVSSASTKGPSVFPLAPSSKSTSGGTAALGCLVKDYFPEPVTVSWNSGALTSGVHTFPAVLQSSGLYSLSSVVTVPSSSLGTQTYICNVNHKPSNTKVDKKVEPKSCDKTHTCPPCPAPELLGGPSVFLFPPKPKDTLMISRTPEVTCVVVDVSHEDPEVKFNWYVDGVEVHNAKTKPREEQYNSTYRVVSVLTVLHQDWLNGKEYKCKVSNKALPAPIEKTISKAKGQPREPQVYTLPPSREEMTKNQVSLTCLVKGFYPSDIAVEWESNGQPENNYKTTPPVLDSDGSFFLYSKLTVDKSRWQQGNVFSCSVMHEALHNHYTQKSLSLSPGK

SEQ ID NO: 4358 - protein, 445 aa, Artificial Sequence; identical to SEQ ID NO: 4355
  source: /note="Description of Artificial Sequence: Synthetic polypeptide"

SEQ ID NO: 4359 - protein, 123 aa, Artificial Sequence
  source: /note="Description of Artificial Sequence: Synthetic polypeptide"
EVKLLESGGGLVQPGGSLRLSCAASGFTFSTYTMSWVRQTPGKGLEWVAYISKGGGSTYYPDTVKGRFTISRDNSKNTLYLQMNSLRAEDTAVYYCAKGAMYGNDFFYPMDYWGQGTTVTVSS

SEQ ID NO: 4360 - protein, 123 aa, Artificial Sequence
  source: /note="Description of Artificial Sequence: Synthetic polypeptide"
EVKLMESGGGLVQPGGSLKLSCAASGFTFSTYTMSWARQTPEKRLEWVAYISKGGGSTYYPDTVKGRFTISRDNAKNTLYLQMSSLKSEDTALYYCARGAMYGNDFFYPMDYWGQQTSVTVSS

SEQ ID NO: 4361 - protein, 123 aa, Artificial Sequence
  source: /note="Description of Artificial Sequence: Synthetic polypeptide"
EVQLLESGGGLVQPGGSLRLSCAASGFTFSTYTMSWVRQTPGKRLEWVAYISKGGGSTYYPDTVKGRFTISRDNSKNTLYLQMNSLRAEDTAVYYCAKGAMYGNDFFYPMDYWGQGTTVTVSS

SEQ ID NO: 4362 - protein, 123 aa, Artificial Sequence
  source: /note="Description of Artificial Sequence: Synthetic polypeptide"
EVQLLESGGGLVQPGGSLRLSCAASGFTFSTYTMSWVRQAPGKRLEWVAYISKGGGSTYYPDTVKGRFTISRDNSKNTLYLQMNSLRAEDTAVYYCARGAMYGNDFFYPMDYWGQGTTVTVSS

SEQ ID NO: 4363 - protein, 123 aa, Artificial Sequence
  source: /note="Description of Artificial Sequence: Synthetic polypeptide"
EVKLLESGGGLVQPGGSLRLSCAASGFTFSTYTMSWVRQTPGKRLEWVAYISKGGGSTYYPDTVKGRFTISRDNSKNTLYLQMNSLRAEDTAVYYCARGAMYGNDFFYPMDYWGQGTTVTVSS

SEQ ID NO: 4364 - protein, 123 aa, Artificial Sequence
  source: /note="Description of Artificial Sequence: Synthetic polypeptide"
EVQLLESGGGLVQPGGSLRLSCAASGFTFSTYTMSWARQAPGKGLEWVAYISKGGGSTYYPDTVKGRFTISRDNSKNTLYLQMNSLRAEDSAVYYCARGAMFGNDFFFPMDRWGQGTLVTVSS

SEQ ID NO: 4365 - protein, 123 aa, Artificial Sequence
  source: /note="Description of Artificial Sequence: Synthetic polypeptide"
EVQLLESGGGLVQPGGSLRLSCAASGFTFSTYTMSWARQAPGKGLEWVAYISKGGGSTYYPDTVKGRFTISRDNSKNTLYLQMNSLRAEDSAVYYCARGAMYGNDFFYPMDYWGQGTLVTVSS

SEQ ID NO: 4366 - protein, 122 aa, Artificial Sequence; identical to SEQ ID NO: 3879
  source: /note="Description of Artificial Sequence: Synthetic polypeptide"

SEQ ID NO: 4367 - protein, 122 aa, Artificial Sequence; identical to SEQ ID NO: 3880
  source: /note="Description of Artificial Sequence: Synthetic polypeptide"

SEQ ID NO: 4368 - protein, 126 aa, Artificial Sequence; identical to SEQ ID NO: 3881
  source: /note="Description of Artificial Sequence: Synthetic polypeptide"

SEQ ID NO: 4369 - protein, 130 aa, Artificial Sequence; identical to SEQ ID NO: 3882
  source: /note="Description of Artificial Sequence: Synthetic polypeptide"

SEQ ID NO: 4370 - protein, 119 aa, Artificial Sequence; identical to SEQ ID NO: 3883
  source: /note="Description of Artificial Sequence: Synthetic polypeptide"

SEQ ID NO: 4371 - protein, 129 aa, Artificial Sequence; identical to SEQ ID NO: 3884
  source: /note="Description of Artificial Sequence: Synthetic polypeptide"

SEQ ID NO: 4372 - protein, 129 aa, Artificial Sequence; identical to SEQ ID NO: 3885
  source: /note="Description of Artificial Sequence: Synthetic polypeptide"

SEQ ID NO: 4373 - protein, 438 aa, Artificial Sequence
  source: /note="Description of Artificial Sequence: Synthetic polypeptide"
EVQLVESGGGLVQPGGSLRLSCAASGFTFSSYGMSWVRQAPGKGLELVASINSNGGSTYYPDSVKGRFTISRDNAKNSLYLQMNSLRAEDTAVYYCASGDYWGQGTTVTVSSASTKGPSVFPLAPCSRSTSESTAALGCLVKDYFPEPVTVSWNSGALTSGVHTFPAVLQSSGLYSLSSVVTVPSSSLGTKTYTCNVDHKPSNTKVDKRVESKYGPPCPPCPAPEFLGGPSVFLFPPKPKDTLMISRTPEVTCVVVDVSQEDPEVQFNWYVDGVEVHNAKTKPREEQFNSTYRVVSVLTVLHQDWLNGKEYKCKVSNKGLPSSIEKTISKAKGQPREPQVYTLPPSQEEMTKNQVSLTCLVKGFYPSDIAVEWESNGQPENNYKTTPPVLDSDGSFFLYSRLTVDKSRWQEGNVFSCSVMHEALHNHYTQKSLSLSLG

SEQ ID NO: 4374 - protein, 456 aa, Artificial Sequence; identical to SEQ ID NO: 4234
  source: /note="Description of Artificial Sequence: Synthetic polypeptide"

SEQ ID NO: 4375 - protein, 442 aa, Artificial Sequence; identical to SEQ ID NO: 4326
  source: /note="Description of Artificial Sequence: Synthetic polypeptide"

SEQ ID NO: 4376 - protein, 442 aa, Artificial Sequence; identical to SEQ ID NO: 4278
  source: /note="Description of Artificial Sequence: Synthetic polypeptide"

SEQ ID NO: 4377 - protein, 120 aa, Artificial Sequence
  source: /note="Description of Artificial Sequence: Synthetic polypeptide"
QVQLVQSGAEVKKPGSSVKVSCKASGGTFSSYAISWVRQAPGQGLEWMGGIIPIFGTANYAQKFQGRVTITADESTSTAYMELSSLRSEDTAVYYCARWGGDGFYAMDYWGQGTLVTVSS

SEQ ID NO: 4378 - protein, 120 aa, Artificial Sequence
  source: /note="Description of Artificial Sequence: Synthetic polypeptide"
QVQLVQSGAESVKVSCKASGVKKPGAYTFTSYYMHWVRQAPGQGLEWMGWINPNSGGTNYAQKFQGRVTMTRDTSISTAYMELSSLRSEDTAVYYCARWGGDGFYAMDYWGQGTLVTVSS

SEQ ID NO: 4379 - protein, 121 aa, Artificial Sequence
  source: /note="Description of Artificial Sequence: Synthetic polypeptide"
QVQLKESGPALVKPTQTLTLTCTFSGFSLSTSGVGVGWIRQPPGKALEWLALIDWDDDKYYSTSLKTRLTISKDTSKNQVVLTMTNMDPVDTATYYCARWGGDGFYAMDYWGQGTLVTVSS

SEQ ID NO: 4380 - protein, 120 aa, Artificial Sequence
  source: /note="Description of Artificial Sequence: Synthetic polypeptide"
EVQLVESGGGLVQPGGSLRLSCAASGFTFSSYAMSWVRQASAISGSGGPGKGLEWVSTYYADSVKGRFTISRDNSKNTLYLQMNSLRAEDTAVYYCARWGGDGFYAMDYWGQGTLVTVSS

SEQ ID NO: 4381 - protein, 119 aa, Artificial Sequence
  source: /note="Description of Artificial Sequence: Synthetic polypeptide"
QVQLQESGPGLVKPSETLSLTCTVSGGSISSYYWSWIRQPPGKGLEWIGYIYYSGSTNYNPSLKSRVTISVDTSKNQFSLKLSSVTAADTAVYYCARWGGDGFYAMDYWGQGTLVTVSS

SEQ ID NO: 4382 - protein, 120 aa, Artificial Sequence
  source: /note="Description of Artificial Sequence: Synthetic polypeptide"
EVQLVQSGAEVKKPGESLKISCKGSGYSFTSYWIGWVRQMPGKGLEWMGIIYPGDSDTRYSPSFQGQVTISADKSISTAYLQWSSARWGGLKASDTAMYYCDGFYAMDYWGQGTLVTVSS

SEQ ID NO: 4383 - protein, 123 aa, Artificial Sequence
  source: /note="Description of Artificial Sequence: Synthetic polypeptide"
QVQLQQSGPGLVKPSQTLSLTCAISGDSVSSNSAAWNWIRQSPGRGLEWLGRTYYRSKWYNDYAVSVKSRITINPDTSKNQFSLQLNSVTPEDTAVYYCARWGGDGFYAMDYWGQGTLVTVSS

SEQ ID NO: 4384 - protein, 126 aa, Artificial Sequence
  source: /note="Description of Artificial Sequence: Synthetic polypeptide"
DVQLQESGGGSVQAGGSLRLSCVASGWTYSSNSLSMAWFRQAPGKEREGVATITSYVGRTYYADSVKGRFTISRDHAKSTVYLQIDSLKPEDTATYYCAAEYLGGSFLSTGAYKYWGQGTQVTVSS

SEQ ID NO: 4385 - protein, 129 aa, Artificial Sequence
  source: /note="Description of Artificial Sequence: Synthetic polypeptide"
DVQLQESGGGSVQAGGSLRLSCAASGYSYSYYIGWFRQAPGKEREGVAAIAIVNSGGGRTYYADSVKGRFTISQGNDKNTVYLQMNSLKPEDTAIYYCAARSLSWYSHPLLQPSQFNNWGQGTQVTVSS

SEQ ID NO: 4386 - protein, 128 aa, Artificial Sequence
  source: /note="Description of Artificial Sequence: Synthetic polypeptide"
DVQLQESGGGSVQAEGSLRLSCTASGYTYSLMGWFRQAPGKEREGVAVINSGVGTTYYADSVKGRFTISQDNAKSTVYLQMNSLKPEDTAIYYCAARRSWFTGMTTTQALDPDWFSYWGQGTQVTVSS

SEQ ID NO: 4387 - protein, 125 aa, Artificial Sequence
  source: /note="Description of Artificial Sequence: Synthetic polypeptide"
DVQLQESGGGSVQAGGSLRLSCAASGYTSEMNRFAWLRQAPGKDREVVAVIFPTARGAKFYSDSVNGRFTISQDTAKNTVYLQMNSLEPEDTAMYFCAASANAMTGFQPSGYTYWGQGTQVTVSS

SEQ ID NO: 4388 - protein, 129 aa, Artificial Sequence
  source: /note="Description of Artificial Sequence: Synthetic polypeptide"
QVQLQESGGGTVQAGGSLRLSCAASGYTYRSYCMGWFRQAPGKEREEVASINSDQGSTRYAASVKGRFTSSQDNANNTVTVYLQMNSLKPEDTAIYYCAANDGCAYRVYRGGAYGYNFWGQGTQVTVSS

SEQ ID NO: 4389 - protein, 129 aa, Artificial Sequence
  source: /note="Description of Artificial Sequence: Synthetic polypeptide"
DVQLQESGGGSVQAGGSLRLSCAASGYAFSSYYMGWFRQAPGREREEVTGITQIGGTTYYADSVKGRFTISRDNAKNTVYLQMDSLKPEDTAIYYCAKLRRPFYYPLLERPSEGDFDYWGQGTQVTVSS

SEQ ID NO: 4390 - protein, 126 aa, Artificial Sequence
  source: /note="Description of Artificial Sequence: Synthetic polypeptide"
QVQLQESGGGSVQAGGSLRLSCAASEYTDSTYYMAWFRQAPGKERGGVATLASRYDTTYYADSVKGRFTISQDRAKNTVYLQMNSLKPEDTGIYYCAASPRRPGFFPLDPSQYNYWGQGTQVTVSS

SEQ ID NO: 4391 - protein, 127 aa, Artificial Sequence
  source: /note="Description of Artificial Sequence: Synthetic polypeptide"
QVQLQESGGGSVQAGGSLRLSCAASRDILTLYYMGWFRQAPGKEREGVAAISSDIIFTSYANSVKGRFTISRDKDKNTVYLQMNSLKPEDTAIYYCAAASTWVPGFFPLFASQYNSWGQGTQVTVSS

SEQ ID NO: 4392 - protein, 127 aa, Artificial Sequence
  source: /note="Description of Artificial Sequence: Synthetic polypeptide"
QVQLQESGGGSVQAGGSLRLSCAASRDILTLYYMGWFRQAPGKEREGVAAISSDIIFTSYANSVKGRFTISRDEDKNTVYLQMNSLKPEDTAIYYCAAASTWVPGFFPLFASQYNSWGQGTQVTVSS

SEQ ID NO: 4393 - protein, 125 aa, Artificial Sequence
  source: /note="Description of Artificial Sequence: Synthetic polypeptide"
QVQLQESGGGSVQAGGSLRLSCAHSNTYPTYMGWFRQAPGKEREGVAAIYTGDGTTYYGDSVKGRFTISQDNAKNTVYLQMNSLKPEDTAIYYCAAALSRVPGFFPLFPSQYNYWGQGTQVTVSS

SEQ ID NO: 4394 - protein, 125 aa, Artificial Sequence; identical to SEQ ID NO: 4393
  source: /note="Description of Artificial Sequence: Synthetic polypeptide"

SEQ ID NO: 4395 - protein, 127 aa, Artificial Sequence
  source: /note="Description of Artificial Sequence: Synthetic polypeptide"
DVQLQESGGGSVQAGGSLRLSCAVSGFSYSPYYMGWFRQAPGKEREGVAAIRKGIGTTYYADSVKGRFTFSQDDAKNTMYLQMNSLKPEDTAIYFCAVGHYRAYATTSFDPRRYDYWGQGTQVTVSS

SEQ ID NO: 4396 - protein, 127 aa, Artificial Sequence
  source: /note="Description of Artificial Sequence: Synthetic polypeptide"
QVQLQESGGGSVQAGGSLRLSCAASGFTSSVYYISWFRQAPGKEREGVAAINSGGGITFYADSVKGRFTISQDNAKNTVYLQMNSLKPEDTAIYYCAAALSRVPGFFPLFPSQYNYWGQGTQVTVSS

SEQ ID NO: 4397 - protein, 115 aa, Artificial Sequence
  source: /note="Description of Artificial Sequence: Synthetic polypeptide"
QVQLQESGGGLVQPGGSLRLSCAASGFTFSNYWMYWVRQAPGKGLEWVSQINSGGGTTYSTDSVKGRFTISRDNAKNTLYLQMNSLKPEDTAMYYCATDSTGSHRGQGTQVTVSS

SEQ ID NO: 4398 - protein, 124 aa, Artificial Sequence
  source: /note="Description of Artificial Sequence: Synthetic polypeptide"
QVQLQESGGGSVQAGGFLRLSCAASGYTYSTCSMAWYRQAPGKERELVSSIRNDGSTAYADSVKGRFTISQDNAKNTVYLQMNSLKPEDTAMYYCNIRIGVGPGGTCSIYAPYWGEGTQVTVSS

SEQ ID NO: 4399 - protein, 127 aa, Artificial Sequence
  source: /note="Description of Artificial Sequence: Synthetic polypeptide"
QVQLQESGGGSVQAGGSLRLSCAASGISRSTYFMGWFRQAPGKEREGVAVINYGTTTPYYPDSVKGRFTVSRDSSKNTVYLRMNSLKPEDTAIYYCAAASTWVPGFFPLFASQYNSWGQGTQVTVSS

SEQ ID NO: 4400 - protein, 128 aa, Artificial Sequence
  source: /note="Description of Artificial Sequence: Synthetic polypeptide"
QVQLQESGGGSVQAGGSLRLSCAASGATASDYCMGWFRQAPGKEREGVAAISRGGMTYHVDSVRGRFTISRNNAQNTVYLQMNSLKPEDTATYSCAAVSCAGAWFANRALRESAFTYWGPGTQVTVSS

SEQ ID NO: 4401 - protein, 120 aa, Artificial Sequence
  source: /note="Description of Artificial Sequence: Synthetic polypeptide"
QVQLQESGGGLVQAGGSLRLSCAASGRIFDLRDMGWYRQVPGKQRELVAAITSGGTSNYADSVKGRFTISRDNAKNTVYLQMNSLKPEDTAVYYCNAKNFFSASGYFLYWGKGTQVTVSS

SEQ ID NO: 4402 - protein, 121 aa, Artificial Sequence
  source: /note="Description of Artificial Sequence: Synthetic polypeptide"
QVQLQESGGGLVQPGGSLRLSCAASGFTFETQYMTWVRQAPGKGPEYVSSINSGGTIKYYANSSVKGRFTISRDNAKNTLYLQMNNLRPEDTAIYYCQLGQWAGVGAASSRGQGTQVTVSS

SEQ ID NO: 4403 - protein, 122 aa, Artificial Sequence
  source: /note="Description of Artificial Sequence: Synthetic polypeptide"
QVQLQESGGGLVQPGGSLRLSCAASGFTFSTYWMYWVRQAPGKGLEWVSAISTEGGSTRYAGSVKGRFTISRDNAKSTLYLQMDSLKSEDTAVYYCSKGTGPFTDIRSTGSRGKGTQVTVSS

SEQ ID NO: 4404 - protein, 122 aa, Artificial Sequence
  source: /note="Description of Artificial Sequence: Synthetic polypeptide"
QVQLQESGGGLVQPGGSLRLSCAASGFTFSSYWMYWFRQAPGKGLERVSAINFGGDVTYYTDSVKGRFTISRDNAKNTLYLQMNSLKSEDTAVYYCTKGLSPYRDLESSGSRGQGTQVTVSS

SEQ ID NO: 4405 - protein, 125 aa, Artificial Sequence
  source: /note="Description of Artificial Sequence: Synthetic polypeptide"
DVQLQESGGGSVQAGGSLRLSCAVSGYTYNIYTMAWFRQAPGKEREGVAGIYSPGGTTYYADSVKGRFTISQDNAKNTVYLQMNSLAPEDTAIYYCAARGGLLSRVLKEAGYNAWGQGTQVTVSS

SEQ ID NO: 4406 - protein, 125 aa, Artificial Sequence
  source: /note="Description of Artificial Sequence: Synthetic polypeptide"
DVQLQESGGGSVQAGGSLRLSCAASGYTFTKYPMGWFRQAPGKECELVSSIISGGVTTYASSVKGRFTISRDNAKNTVYLQMNSLKPEDTAVYYCAAQYPYSSSWPRCPFRIGYWGQGTQVTVSS

SEQ ID NO: 4407 - protein, 123 aa, Artificial Sequence
  source: /note="Description of Artificial Sequence: Synthetic polypeptide"
DVQLQESGGGSVQAGGSLRLSCARSGGTVSIPYMAWFRQGPGKEREGVAAIYDGRAKTYAGSLQGRFTISQDNDKNTLYLQMNSLKPDDTAVYYCAAGNGGGNWLRPSEYNYWGKGTQVTVSS

SEQ ID NO: 4408 - protein, 121 aa, Artificial Sequence
  source: /note="Description of Artificial Sequence: Synthetic polypeptide"
DVQLQESGGGSVQAGGSLRLSCAASEYTYGYCSMGWYRQAPGKERELVSTITSDGSTSYVDSVKGRFTISQDNAKNTVYLQMNSLKPEDTAKYYCYTKTCANKLGAKFISWGQGTQVTVSS

SEQ ID NO: 4409 - protein, 127 aa, Artificial Sequence
  source: /note="Description of Artificial Sequence: Synthetic polypeptide"
DVQLQESGGGSVQPGGSLRLSCAASGYFYSRWYMGWFRQAPGKEREGVAAINSGGSITSYADSVKGRFTISQDNAKNTVYLQMNSLKPEDTAIYYCAAALSRVPGFFPLFPSQYNYWGQGTQVTVSS

SEQ ID NO: 4410 - protein, 129 aa, Artificial Sequence
  source: /note="Description of Artificial Sequence: Synthetic polypeptide"
DVQLQESGGGSAQAGGSLRLSCEVSGYTYSGYFMGWFRQAPGEEREGVAAIDTNGGRTWYADSVKGRFTISHDNAESTVYLQMNSLQPEDTAIYFCAARRPPGGSWYPPPLRKYSYNFWGQGTQVTVSS

SEQ ID NO: 4411 - protein, 128 aa, Artificial Sequence
  source: /note="Description of Artificial Sequence: Synthetic polypeptide"
DVQLQESGGGSVQAGGSLRLSCVASGFTYRRYFMGWFRQAPGKEREAVATMFSCGGTTYYADSVKGRFTATQDNAKNTVYLQMNNLKPEDTAIYYCAAASGCWYDGSPAARSVDVSFWGHGTQVTVSS

SEQ ID NO: 4412 - protein, 326 aa, Artificial Sequence
  source: /note="Description of Artificial Sequence: Synthetic polypeptide"
ASTKGPSVFPLAPCSRSTSESTAALGCLVKDYFPEPVTVSWNSGALTSGVHTFPAVLQSSGLYSLSSVVTVPSSSLGTKTYTCNVDHKPSNTKVDKRVESKYGPPCPPCPAPEFLGGPSVFLFPPKPKDTLMISRTPEVTCVVVDVSQEDPEVQFNWYVDGVEVHNAKTKPREEQFNSTYRVVSVLTVLHQDWLNGKEYKCKVSNKGLPSSIEKTISKAKGQPREPQVYTLPPSQEEMTKNQVSLTCLVKGFYPSDIAVEWESNGQPENNYKTTPPVLDSDGSFFLYSRLTVDKSRWQEGNVFSCSVMHEALHNHYTQKSLSLSLG

SEQ ID NO: 4413 - protein, 98 aa, Artificial Sequence
  source: /note="Description of Artificial Sequence: Synthetic polypeptide"
ASTKGPSVFPLAPCSRSTSESTAALGCLVKDYFPEPVTVSWNSGALTSGVHTFPAVLQSSGLYSLSSVVTVPSSSLGTKTYTCNVDHKPSNTKVDKRV

SEQ ID NO: 4414 - protein, 221 aa, Artificial Sequence
  source: /note="Description of Artificial Sequence: Synthetic polypeptide"
EVQLQQSGAEVVRSGASVKLSCTASGFNIKDYYIHWVKQRPEKGLEWIGWIDPEIGDTEYVPKFQGKATMTADTSSNTAYLQLSSLTSEDTAVYYCNAGHDYDRGRFPYWGQGTLVTVSAAKTTPPSVYPLAPGSAAQTNSMVTLGCLVKGYFPEPVTVTWNSGSLSSGVHTFPAVLQSDLYTLSSSVTVPSSTWPSETVTCNVAHPASSTKVDKKIVPRD

SEQ ID NO: 4415 - protein, 582 aa, Artificial Sequence [sequence omitted]

SEQ ID NO: 4416 - protein, 582 aa, Artificial Sequence [sequence omitted]

SEQ ID NO: 4417 - protein, 582 aa, Artificial Sequence [sequence omitted]

SEQ ID NO: 4418 - protein, 582 aa, Artificial Sequence; identical to SEQ ID NO: 3898
  source: /note="Description of Artificial Sequence: Synthetic polypeptide"

SEQ ID NO: 4419 - protein, 460 aa, Artificial Sequence; identical to SEQ ID NO: 3899
  source: /note="Description of Artificial Sequence: Synthetic polypeptide"

SEQ ID NO: 4420 - protein, 458 aa, Artificial Sequence; identical to SEQ ID NO: 3900
  source: /note="Description of Artificial Sequence: Synthetic polypeptide"

SEQ ID NO: 4421 - protein, 459 aa, Artificial Sequence; identical to SEQ ID NO: 3901
  source: /note="Description of Artificial Sequence: Synthetic polypeptide"

SEQ ID NO: 4422 - protein, 459 aa, Artificial Sequence; identical to SEQ ID NO: 3902
  source: /note="Description of Artificial Sequence: Synthetic polypeptide"

SEQ ID NO: 4423 - protein, 458 aa, Artificial Sequence; identical to SEQ ID NO: 3903
  source: /note="Description of Artificial Sequence: Synthetic polypeptide"

SEQ ID NO: 4424 - protein, 458 aa, Artificial Sequence; identical to SEQ ID NO: 3904
  source: /note="Description of Artificial Sequence: Synthetic polypeptide"

SEQ ID NO: 4425 - protein, 460 aa, Artificial Sequence; identical to SEQ ID NO: 3905
  source: /note="Description of Artificial Sequence: Synthetic polypeptide"

SEQ ID NO: 4426 - protein, 459 aa, Artificial Sequence; identical to SEQ ID NO: 3906
  source: /note="Description of Artificial Sequence: Synthetic polypeptide"

SEQ ID NO: 4427 - protein, 460 aa, Artificial Sequence; identical to SEQ ID NO: 3907
  source: /note="Description of Artificial Sequence: Synthetic polypeptide"

SEQ ID NO: 4428 - protein, 460 aa, Artificial Sequence; identical to SEQ ID NO: 3908
  source: /note="Description of Artificial Sequence: Synthetic polypeptide"

SEQ ID NO: 4429 - protein, 459 aa, Artificial Sequence; identical to SEQ ID NO: 3909
  source: /note="Description of Artificial Sequence: Synthetic polypeptide"

SEQ ID NO: 4430 - protein, 459 aa, Artificial Sequence; identical to SEQ ID NO: 3910
  source: /note="Description of Artificial Sequence: Synthetic polypeptide"

SEQ ID NO: 4431 - protein, 460 aa, Artificial Sequence; identical to SEQ ID NO: 3911
  source: /note="Description of Artificial Sequence: Synthetic polypeptide"

SEQ ID NO: 4432 - protein, 460 aa, Artificial Sequence; identical to SEQ ID NO: 3912
  source: /note="Description of Artificial Sequence: Synthetic polypeptide"

SEQ ID NO: 4433 - protein, 460 aa, Artificial Sequence; identical to SEQ ID NO: 3913
  source: /note="Description of Artificial Sequence: Synthetic polypeptide"

SEQ ID NO: 4434 - protein, 459 aa, Artificial Sequence; identical to SEQ ID NO: 3914
  source: /note="Description of Artificial Sequence: Synthetic polypeptide"

SEQ ID NO: 4435 - protein, 441 aa, Artificial Sequence; identical to SEQ ID NO: 3915
  source: /note="Description of Artificial Sequence: Synthetic polypeptide"

SEQ ID NO: 4436 - protein, 451 aa, Artificial Sequence
  source: /note="Description of Artificial Sequence: Synthetic polypeptide"
EVQLVESGGGLVQPGGSLKLSCAASGFNFNISAIHWVRQASGKGLEWVGRIRSKSHNYATLYAASLKGRFTLSRDDSRNTAYLQMSSLQTEDMAVYYCTVLSANYDTFDYWGQGTLVTVSSAKTTAPSVYPLAPVCGDTTGSSVTLGCLVKGYFPEPVTLTWNSGSLSSGVHTFPAVLQSDLYTLSSSVTVTSSTWPSQSITCNVAHPASSTKVDKKIEPRGPTIKPCPPCKCPAPNLLGGPSVFIFPPKIKDVLMISLSPIVTCVVVDVSEDDPDVQISWFVNNVEVHTAQTQTHREDYNSTLRVVSALPIQHQDWMSGKEFKCKVNNKDLPAPIERTISKPKGSVRAPQVYVLPPPEEEMTKKQVTLTCMVTDFMPEDIYVEWTNNGKTELNYKNTEPVLDSDGSYFMYSKLRVEKKNWVERNSYSCSVVHEGLHNHHTTKSFSRTPGK

SEQ ID NO: 4437 - protein, 451 aa, Artificial Sequence
  source: /note="Description of Artificial Sequence: Synthetic polypeptide"
EVQLVESGGGLVQPGGSLKLSCAASGFNFQISAIHWVRQASGKGLEWVGRIRSKSHNYATLYAASLKGRFTLSRDDSRNTAYLQMSSLQTEDMAVYYCTVLSANYDTFDYWGQGTLVTVSSAKTTAPSVYPLAPVCGDTTGSSVTLGCLVKGYFPEPVTLTWNSGSLSSGVHTFPAVLQSDLYTLSSSVTVTSSTWPSQSITCNVAHPASSTKVDKKIEPRGPTIKPCPPCKCPAPNLLGGPSVFIFPPKIKDVLMISLSPIVTCVVVDVSEDDPDVQISWFVNNVEVHTAQTQTHREDYNSTLRVVSALPIQHQDWMSGKEFKCKVNNKDLPAPIERTISKPKGSVRAPQVYVLPPPEEEMTKKQVTLTCMVTDFMPEDIYVEWTNNGKTELNYKNTEPVLDSDGSYFMYSKLRVEKKNWVERNSYSCSVVHEGLHNHHTTKSFSRTPGK

SEQ ID NO: 4438 - protein, 142 aa, Artificial Sequence
  source: /note="Description of Artificial Sequence: Synthetic polypeptide"
MDRLTSSFLLLIVPAYVLSQVTLKESGPGILQPSQTLSLTCSFSGFSLSTSGMGVSWIRQPSGKGLEWLAHIYWDDDKRYNPSLKSRLTISKDTSRNQVFLKITSVDTADTATYYCARRALLLRYPNAMDYWGQGTSVTVSS

SEQ ID NO: 4439 - protein, 138 aa, Artificial Sequence
  source: /note="Description of Artificial Sequence: Synthetic polypeptide"
MDSRLNLVFLVLILKGVQCDVQLVESGGGLVQPGGSRKLSCAASGFTFSSFGMHWVRQAPEKGLEWVAYISSGSSTIYYADTVKGRFTISRDNPKNTLFLQMTSLRSEDTAMYYCARSEVRRGAMDYWGQGTSVTVSS

SEQ ID NO: 4440 - protein, 138 aa, Artificial Sequence
  source: /note="Description of Artificial Sequence: Synthetic polypeptide"
MDSRLNLVFLVLILKGVQCDVQLVESGGGLVQPGGSRKLSCAASGFTFSSFGMHWVRQAPEKGLEWVAYISSGSSTIYYADTVKGRFTISRDNPKNTLFLQMTSLRSEDTAMYYCARSAYYGNHFDYWGQGTTLTVSS

SEQ ID NO: 4441 - protein, 136 aa, Artificial Sequence
  source: /note="Description of Artificial Sequence: Synthetic polypeptide"
MDRLTSSFLLLIVPAYVLSQVTLKESGPGILQPSQTLSLTCSFSGFSLSTSGMGVSWIRQPSGKGLEWLAHIYWDDDKRYNPSLKSRLTISKDTSRNQVFLKITSVDTADTATYYCARLYGNIAYWGQGTLVTVSA

SEQ ID NO: 4442 - protein, 139 aa, Artificial Sequence
  source: /note="Description of Artificial Sequence: Synthetic polypeptide"
MGRLTSSFLLLIVPAYVLSQVTLKESGPGILQPSQTLSLTCSFSGFSLSTSGMGVGWIRQPSGKGLEWLAHIWWDDVKRYNPALKSRLTISKDTSSSQVFLKIASVDTADTATYYCARIGRTTGNFDVWGAGTTVTVSS

SEQ ID NO: 4443 - protein, 104 aa, Artificial Sequence
  source: /note="Description of Artificial Sequence: Synthetic polypeptide"
MKPGASVKISCKATGYTFSSYWIEWVKQRPGHGLEWIGDILPGIGTTNYNEKFKGKATFTADTSSNTAYMQLSSLTSEDSAVYYCASTGPVDYWGQGTTLRVSS

SEQ ID NO: 4444 - protein, 139 aa, Artificial Sequence; identical to SEQ ID NO: 4442
  source: /note="Description of Artificial Sequence: Synthetic polypeptide"

SEQ ID NO: 4445 - protein, 136 aa, Artificial Sequence
  source: /note="Description of Artificial Sequence: Synthetic polypeptide"
MNRLASSLLLLIVPAYVLSQVTLKESGPGILQPSQTLSLTCSFSGFSLSTSGMGVSWIRQPSGKGLEWLAHIYWDDDKRYNPSLKSRLTISKDTSSNQVFLKITSVDTADTATYYCARYGNGFAYWGQGTLVTVSA

SEQ ID NO: 4446 - protein, 143 aa, Artificial Sequence
  source: /note="Description of Artificial Sequence: Synthetic polypeptide"
MDRLTSSFLLLIVPAYVLSQVTLKESGPGILQPSQTLSLTCSFSGFSLSTSGMGVSWIRQPSGKGLEWLAHIYWDDDKRYNPSLKSRLTISKDTSRNQVFLKITSVDTADTATYYCARRANYYGYGMDAMDYWGQGTSVTVSS

SEQ ID NO: 4447 - protein, 134 aa, Artificial Sequence
  source: /note="Description of Artificial Sequence: Synthetic polypeptide"
MDSRLNLVFLVLILKGVQCDVQLVESGGGLVQPGGSRKLSCAASGFTFSSFGMHWVRQAPEKGLEWVAYISSGSSTIYYADTVKGRFTISRDNPKNTLFLQMTSLRSEDTAMYYCARDGTMDYWGQGTSVTVSS

SEQ ID NO: 4448 - protein, 137 aa, Artificial Sequence
  source: /note="Description of Artificial Sequence: Synthetic polypeptide"
MDRLTSSFLLLIVPAYVLSQVTLKESGPGILQPSQTLSLTCSFSGFSLSTSGMGVSWIRQPSGKGLEWLAHIYWDDDKRYNPSLKSRLTISKDTSRNQVFLKITSVDTADTATYYCARGITTGFAYWGQGTLVTVSA

SEQ ID NO: 4449 - protein, 136 aa, Artificial Sequence
  source: /note="Description of Artificial Sequence: Synthetic polypeptide"
MDRLTSSFLLLIVPAYVLSQVTLKESGPGILQPSQTLSLTCSFSGFSLSTSGMGVSWIRQPSGKSLEWLAHIYWDDDKRYNPSLKSRLTISKDTSRNQVFLKITSVDTADTATYYCARLRQGFAYWGQGTLVTVSA

SEQ ID NO: 4450 - protein, 137 aa, Artificial Sequence
  source: /note="Description of Artificial Sequence: Synthetic polypeptide"
MDSRLNLVFLVLILKGVQCDVQLVESGGGLVQPGGSRKLSCAASGFTFSSFGMHWVRQAPEKGLEWVAYISSGSSTIYYADTVKGRFTISRDNPKNTLFLQMTSLRSEDTAMYYCARRWGEGAMDYWGQGTSVTVSS

SEQ ID NO: 4451 - protein, 141 aa, Artificial Sequence
  source: /note="Description of Artificial Sequence: Synthetic polypeptide"
MDRLTSSFLLLIVPAYVLSQVTLKESGPGILQPSQTLSLTCSFSGFSLSTSGMGVSWIRQPSGKGLEWLAHIYWDDDKRYNPSLKSRLTISKDTSRNQVFLKITSVDTADTATYYCARRRQLGLRDAMDYWGQGTSVTVSS

SEQ ID NO: 4452 - protein, 139 aa, Artificial Sequence; identical to SEQ ID NO: 4442
  source: /note="Description of Artificial Sequence: Synthetic polypeptide"

SEQ ID NO: 4453 - protein, 137 aa, Artificial Sequence
  source: /note="Description of Artificial Sequence: Synthetic polypeptide"
MDRLTSSFLLLIVPAYVLSQVTLKESGPGILQPSQTLSLTCSFSGFSLSTSGMGVSWIRQPSGKGLEWLAHIYWDDDKRYNPSLKSRLTISKDTSRNQVFLKITSVDTADTATYYCARRGYYALSYWGQGTLVTVSA

SEQ ID NO: 4454 - protein, 139 aa, Artificial Sequence
  source: /note="Description of Artificial Sequence: Synthetic polypeptide"
MDRLTSSFLLLIVPAYVLSQVTLKESGPGILQPSQTLSLTCSFSGFSLSTSGMGVSWIRQPSGKGLEWLAHIYWDDDKRYNPSLKSRLTISKDTSRNQVFLKITSVDTADTATYYCARRGLKKDYFDYWGQGTTLTVSS

SEQ ID NO: 4455 - protein, 140 aa, Artificial Sequence
  source: /note="Description of Artificial Sequence: Synthetic polypeptide"
MDRLTSSFLLLIVPAYVLSQVTLKESGPGILKPSQTLSLTCSFSGFSLSTSGMGVGWIRQPSGKGLEWLAHIWWDDDKYYNPSLKSQLTISKDTSRNQVFLKITSVDTADTATYYCARRASRGTDAMDYWGQGTSVTVSS

SEQ ID NO: 4456 - protein, 137 aa, Artificial Sequence
  source: /note="Description of Artificial Sequence: Synthetic polypeptide"
MRVLILLCLFTAFPGILSDVQLQESGPDLVKPSQSLSLTCTVTGYSITSGYSWHWIRQFPGNKLEWMGYIHYSGSTNYNPSLKSRISITRDTSKNQFFLQLNSVTTEDTATYYCARYLYYYGSSYEWGQGTTLTVSS

SEQ ID NO: 4457 - protein, 141 aa, Artificial Sequence; identical to SEQ ID NO: 4451
  source: /note="Description of Artificial Sequence: Synthetic polypeptide"

SEQ ID NO: 4458 - protein, 140 aa, Artificial Sequence
  source: /note="Description of Artificial Sequence: Synthetic polypeptide"
MDRLTSSFLLLIAPAYVLSQVTLKESGPGILKPSQTLSLTCSFSGFSLSTSGMGVGWIRQPSGKGLEWLAHIWWDDDKYYNPSLKSQLTISKDTSRNQVFLKITSVDTADTATYYCARRNLYRYDLFDYWGQGTTLTVSS

SEQ ID NO: 4459 - protein, 139 aa, Artificial Sequence; identical to SEQ ID NO: 4454
  source: /note="Description of Artificial Sequence: Synthetic polypeptide"

SEQ ID NO: 4460 - protein, 138 aa, Artificial Sequence
  source: /note="Description of Artificial Sequence: Synthetic polypeptide"
MDSRLNLVFLVLILKGVQCDVQLVESGGGLVQPGGSRKLSCAASGFTFSSFGMHWVRQAPEKGLEWVAYISSGSSTIYYADTVKGRFTISRDNPKNTLFLQMTSLRSEDTAMYYCARGYRYDEGFAYWGQGTLVTVSA

SEQ ID NO: 4461 - protein, 134 aa, Artificial Sequence
  source: /note="Description of Artificial Sequence: Synthetic polypeptide"
MDSRLNLVFLVLILKGVQCDVQLVESGGGLVQPGGSRKLSCAASGFTFSSFGMHWVRQAPEKGLEWVAYISSGSSTIYYADTVKGRFTISRDNPKNTLFLQMTSLRSEDTAMYYCARSNLLDYWGQGTTLTVSS

SEQ ID NO: 4462 - protein, 136 aa, Artificial Sequence
  source: /note="Description of Artificial Sequence: Synthetic polypeptide"
MNRLTSSLLLLIVPAYVLSQVTLKESGPGILQPSQTLSLTCSFSGFSLSTSGMGVSWIRQPSGKGLEWLAHIYWDDDKRYNPSLKSRLTISKDTSSNQVFLKITSVDTADTATYYCARYGSSFAYWGQGTLVTVSA

SEQ ID NO: 4463 - protein, 137 aa, Artificial Sequence
  source: /note="Description of Artificial Sequence: Synthetic polypeptide"
MNRLTSSLLLLIVPAYVLSQVTLKESGPGILQPSQTLSLTCSFSGFSLSTSGMGVSWIRQPSGKGLEWLAHIYWDDDKHYNPSLKSRLTISKDTSSNQLFLKITSVDTADTATYYCARYVYDSFAYWGQGTLVTVSA

SEQ ID NO: 4464 - protein, 141 aa, Artificial Sequence
  source: /note="Description of Artificial Sequence: Synthetic polypeptide"
MDRLTSSFLLLIVPAYVLSQVTLKESGPGILKPSQTLSLTCSFSGFSLSTSGMGVGWIRQPSGKGLEWLAHIWWDDDKYYNPSLKSQLTISKDTSRNQVFLKITSVDTADTATYYCARRTTARARDYFDYWGQGTTLTVSS

SEQ ID NO: 4465 - protein, 138 aa, Artificial Sequence
  source: /note="Description of Artificial Sequence: Synthetic polypeptide"
MDSRLNLVFLVLILKGVQCDVQLVESGGGLVQPGGSRKLSCAASGFTFSSFGMHWVRQAPEKGLEWVAYISSGSSTIYYADTVKGRFTISRDNPKNTLFLQMTSLRSEDTAMYYCARYYGRGGAMDYWGQGTSVTVSS

SEQ ID NO: 4466 - protein, 137 aa, Artificial Sequence
  source: /note="Description of Artificial Sequence: Synthetic polypeptide"
MDSRLNLVFLVLILKGVQCDVQLVESGGGLVQPGGSRKLSCAASGFTFSSFGMHWVRQAPEKGLEWVAYISSGSSTIYYADTVKGRFTISRDNPKNTLFLQMTSLRSEDTAMYYCAREGYRYLFDYWGQGTTLTVSS

SEQ ID NO: 4467 - protein, 139 aa, Artificial Sequence
  source: /note="Description of Artificial Sequence: Synthetic polypeptide"
MNRLTSSLLLLIVPAYVLSQVTLKESGPGILQPSQTLSLTCSFSGFSLSTSGMGVSWIRQPSGKGLEWLAHIYWDDDKRYNPSLKSRLTISKDTSSNQVFLKITSVDTADTATYYCARRALWYPWFAYWGQGTLVTVSA

SEQ ID NO: 4468 - protein, 138 aa, Artificial Sequence
  source: /note="Description of Artificial Sequence: Synthetic polypeptide"
MDSRLNLVFLVLILKGVQCDVQLVESGGGLVQPGGSRKLSCAASGFTFSSFGMHWVRQAPEKGLEWVAYISSGSSTIYYADTVKGRFTISRDNPKNTLFLQMTSLRSEDTAMYYCARSARSYGAMDYWGQGTSVTVSS

SEQ ID NO: 4469 - protein, 136 aa, Artificial Sequence
  source: /note="Description of Artificial Sequence: Synthetic polypeptide"
MDSRLNLVFLVLILKGVQCDVQLVESGGGLVQPGGSRKLSCAASGFTFSSFGMHWVRQAPEKGLEWVAYISSGSSTIYYADTVKGRFTISRDNPKNTLFLQMTSLRSEDTAMYYCARYGNYAMDYWGQGTSVTVSS

SEQ ID NO: 4470 - protein, 134 aa, Artificial Sequence
  source: /note="Description of Artificial Sequence: Synthetic polypeptide"
MDSRLNLVFLVLILKGVQCDVQLVESGGGLVQPGGSRKLSCAASGFTFSSFGMHWVRQAPEKGLEWVAYISSGSSTIYYADTVKGRFTISRDNPKNTLFLQMTSLRSEDTAMYYCAREGNMDYWGQGTSVTVSS

SEQ ID NO: 4471 - protein, 137 aa, Artificial Sequence
  source: /note="Description of Artificial Sequence: Synthetic polypeptide"
MNRLTSSLLLLIVPAYVLSQVTLKESGPGILQPSQTLSLTCSFSGFSLSTSGMGVSWIRQPSGKGLEWLAHIYWDDDKRYNPSLKSRLTISKDTSSNQVFLKITSVDTADTATYYCARRRGYGYDYWGQGTTLTVSS

SEQ ID NO: 4472 - protein, 137 aa, Artificial Sequence
  source: /note="Description of Artificial Sequence: Synthetic polypeptide"
MDSRLNLVFLVLILKGVQCDVQLVESGGGLVQPGGSRKLSCAASGFTFSRFGMYWVRQAPEKGLEWVAYISSGSSTIYYADIVKGRFTISRDNPKNTLFLQMTSLRSEDTAMYYCARRGYYEAMDYWGQGTSVTVSS

SEQ ID NO: 4473 - protein, 140 aa, Artificial Sequence
  source: /note="Description of Artificial Sequence: Synthetic polypeptide"
MDSRLNLVFLVLILKGVQCDVQLVESGGGLVQPGGSRKLSCAASGFTFSSFGMHWVRQAPEKGLEWVAYISSGSSTIYYADTVKGRFTISRDNPKNTLFLQMTSLRSEDTAMYYCARGGNYLRYYAMDYWGQGTSVTVSS

SEQ ID NO: 4474 - protein, 140 aa, Artificial Sequence
  source: /note="Description of Artificial Sequence: Synthetic polypeptide"
MDRLTSSFLLLIVPAYVLSQVTLKESGPGILQPSQTLSLTCSFSGFSLSTSGMGVSWIRQPSGKGLEWLAHIYWDDDKRYNPSLKSRLTISKDTSRNQVFLKITSVDTADTATYYCARRGLLRRDAMDYWGQGTSVTVSS

SEQ ID NO: 4475 - protein, 139 aa, Artificial Sequence
  source: /note="Description of Artificial Sequence: Synthetic polypeptide"
MDSRLNLVFLVLILKGVQCDVQLVESGGGLVQPGGSRKLSCAASGFTFSSFGMHWVRQAPEKGLEWVAYISSGSSTIYYADTVKGRFTISRDNPKNTLFLQMTSLRSEDTAMYYCARAPTMITGGFAYWGQGTLVTVSA

SEQ ID NO: 4476 - protein, 136 aa, Artificial Sequence
  source: /note="Description of Artificial Sequence: Synthetic polypeptide"
MDSRLNLVFLVLILKGVQCDVQLVESGGGLVQPGGSRKLSCAASGFTFSSFGMHWVRQAPEKGLEWVAYISSGSSTIYYADTVKGRFTISRDNPKNTLFLQMTSLRSEDTAMYYCARYYHYAMDYWGQGTSVTVSS

SEQ ID NO: 4477 - protein, 134 aa, Artificial Sequence
  source: /note="Description of Artificial Sequence: Synthetic polypeptide"
MDSRLNLVFLVLILKGVQCDVQLVESGGGLVQPGGSRKLSCAASGFTFSSFGMHWVRQAPEKGLEWVAYISSGSSTIYYADTVKGRFTISRDNPKNTLFLQMTSLRSEDTAMYYCAREGDFDYWGQGTTLTVSS

SEQ ID NO: 4478 - protein, 136 aa, Artificial Sequence
  source: /note="Description of Artificial Sequence: Synthetic polypeptide"
MDRLTSSFLLLIVPAYVLSQVTLKESGPGILQPSQTLSLTCSFSGFSLSTSGMGVSWIRQPSGKGLEWLAHIYWDDDKRYNPSLKSRLTISKDTSRNQVFLKITSVDTADTATYYCARRAGGFAYWGQGTLVTVSA

SEQ ID NO: 4479 - protein, 138 aa, Artificial Sequence
  source: /note="Description of Artificial Sequence: Synthetic polypeptide"
MDSRLNLVFLVLILKGVQCDVQLVESGGGLVQPGGSRKLSCAASGFTFSSFGMHWVRQAPEKGLEWVAYISSGSSTIYYADTVKGRFTISRDNPKNTLFLQMTSLRSEDTAMYYCARYYGSSYAMDYWGQGTSVTVSS

SEQ ID NO: 4480 - protein, 139 aa, Artificial Sequence
  source: /note="Description of Artificial Sequence: Synthetic polypeptide"
MAVLGLLFCLVTFPSCVLSQVQLKQSGPGLVQPSQSLSITCTVSGFSLTSYGVHWVRQSPGKGLEWLGVIWSGGSTDYNAAFISRLSISKDNSKSQVFFKMNSLQANDTAIYYCARKAYYRYGYAMDYWGQGTSVTVSS

SEQ ID NO: 4481 - protein, 137 aa, Artificial Sequence
  source: /note="Description of Artificial Sequence: Synthetic polypeptide"
MDSRLNLVFLVLILKGVQCDVQLVESGGGLVQPGGSRKLSCAASGFTFSSFGMHWVRQAPEKGLEWVAYISSGSSTIYYADTVKGRFTISRDNPKNTLFLQMTSLRSEDTAMYYCARSGGNYLMDYWGQGTSVTVSS

SEQ ID NO: 4482 - protein, 137 aa, Artificial Sequence
  source: /note="Description of Artificial Sequence: Synthetic polypeptide"
MDSRLNLVFLVLILKGVQCDVQLVESGGGLVQPGGSRKLSCAASGFTFSSFGMHWVRQAPEKGLEWVAYISSGSSTIYYADTVKGRFTISRDNPKNTLFLQMTSLRSEDTAMYYCARSGTTATIDYWGQGTTLTVSS

SEQ ID NO: 4483 - protein, 138 aa, Artificial Sequence
  source: /note="Description of Artificial Sequence: Synthetic polypeptide"
MDSRLNLVFLVLILKGVQCDVQLVESGGGLVQPGGSRKLSCAASGFTFSSFGMHWVRQAPEKGLEWVAYISSGSSTIYYADTVKGRFTISRDNPKNTLFLQMTSLRSEDTAMYYCARFITTRGAMDYWGQGTSVTVSS

SEQ ID NO: 4484 - protein, 137 aa, Artificial Sequence
  source: /note="Description of Artificial Sequence: Synthetic polypeptide"
MDSRLNLVFLVLILKGVQCDVQLVESGGGLVQPGGSRKLSCAASGFTFSSFGMHWVRQAPEKGLEWVAYISSGSSTIYYADTVKGRFTISRDNPKNTLFLQMTSLRSEDTAMYYCARRHWNYAMDYWGQGTSVTVSS

SEQ ID NO: 4485 - protein, 137 aa, Artificial Sequence
  source: /note="Description of Artificial Sequence: Synthetic polypeptide"
MDSRLNLVFLVLILKGVQCDVQLVESGGGLVQPGGSRKLSCAASGFTFSSFGMHWVRQAPEKGLEWVAYISSGSSTIYYADTVKGRFTISRDNPKNTLFLQMTSLRSEDTAMYYCARDETTATFAYWGQGTLVTVSA

SEQ ID NO: 4486 - protein, 141 aa, Artificial Sequence
  source: /note="Description of Artificial Sequence: Synthetic polypeptide"
MDRLTSSFLLLIVPAYVLSQVTLKESGPGILKPSQTLSLTCSFSGFSLSTSGMGVGWIRQPSGKGLEWLAHIWWDDDKYYNPSLKSQLTISKDTSRNQVFLKITSVDTADTATYYCARRALYGNLDYFDYWGQGTTLTVSS

SEQ ID NO: 4487 - protein, 136 aa, Artificial Sequence
  source: /note="Description of Artificial Sequence: Synthetic polypeptide"
MDSRLNLVFLVLILKGVQCDVQLVESGGGLVQPGGSRKLSCAASGFTFSSFGMHWVRQAPEKGLEWVAYISSGSSTIYYVDTVKGRFTISRDNPKNTLFLQMTSLRSEDTAMYYCATVWSGAMDYWGQGTSVTVSS

SEQ ID NO: 4488 - protein, 98 aa, Artificial Sequence
  source: /note="Description of Artificial Sequence: Synthetic polypeptide"
TCTVSGFSLTSYGVHWVRQSPGKGLEWLGVIWSGGSTDYNAAFISRLSISKDNSKSQVFFKMNSLQANDTAIYYCARKTSPEGGFAYWGQGTLVTVSA

SEQ ID NO: 4489 - protein, 117 aa, Artificial Sequence
  source: /note="Description of Artificial Sequence: Synthetic polypeptide"
DVQLVESGGGLVQPGGSRKLSCAASGFTFSSFGMHWVRQAPEKGLEWVAYISSGSSTIYYADTLKGRFTISRDNPKNTLFLQMTSLRSEDTAMYYCARYGNYAMDYWGQGTSVTVSS

SEQ ID NO: 4490 - protein, 140 aa, Artificial Sequence
  source: /note="Description of Artificial Sequence: Synthetic polypeptide"
MDSRLNLVFLVLILKGVQCDVQLVESGGGLVQPGGSRKLSCAASGFTFSSFGMHWVRQAPEKGLEWVAYISSGSSTFYYADTVKGRFTISRDNPKNTLFLQMTSLRSEDTAMYYCARDGYGRGGYAMDYWGQGTSVTVSS

SEQ ID NO: 4491 - protein, 137 aa, Artificial Sequence
  source: /note="Description of Artificial Sequence: Synthetic polypeptide"
MDSRLNLVFLVLILKGVQCDVQLVESGGGLVQPGGSRKLSCAASGFTFSSFGMHWVRQAPEKGLEWVAYISSGSSTIYYADTVKGRFTISRDNPKNTLFLQMTSLRSEDTAMYYCARRGYYEAMDYWGQGTSVTVSS

SEQ ID NO: 4492 - protein, 137 aa, Artificial Sequence
  source: /note="Description of Artificial Sequence: Synthetic polypeptide"
MGRLTSSFLLLIVPAYVLSQVTLKESGPGILQPSQTLSLTCSFSGFSLSTSGMSVGWIRQPSGKGLEWLAHIWWDDDKRYNPALKSRLTISKDTSSNQVFLKIASVDTADTATYYCARYSSRAMDYWGQGTSVTVSS

SEQ ID NO: 4493 - protein, 128 aa, Artificial Sequence
  source: /note="Description of Artificial Sequence: Synthetic polypeptide"
MAVVTGVNSEVQLQQSGAELVKPGASVKLSCTASGFNIKDTYIHWVKQRPEQGLEWIGRIDPANGNTKYDPKFQGKATITADTSSITACLQLSSLTSEDTAVYYCARRIYGSGLFAYWGQGTLVTVSA

SEQ ID NO: 4494 - protein, 138 aa, Artificial Sequence
  source: /note="Description of Artificial Sequence: Synthetic polypeptide"
MDSRLNLVFLVLILKGVQCDVQLVESGGGLVQPGGSRKLSCAASGFTFSSFGMHWVRQAPEKGLEWVAYISSGSSTIYYADTVKGRFTISRDNPKNTLFLQMTSLRSEDTAMYYCARSGTGTGAMDYWGQGTSVTVSS

SEQ ID NO: 4495 - protein, 139 aa, Artificial Sequence
  source: /note="Description of Artificial Sequence: Synthetic polypeptide"
MDSRLNLVFLVLILKGVQCDVQLVESGGGLVQPGGSRKLSCAASGFTFSSFGMHWVRQAPEKGLEWVAYISSGSSTIYYADTVKGRFTISRDNPKNTLFLQMTSLRSEDTAMYYCARYGYYLYYAMDYWGQGTSVTVSS

SEQ ID NO: 4496 - protein, 109 aa, Artificial Sequence
  source: /note="Description of Artificial Sequence: Synthetic polypeptide"
MTQTPLSLPVSLGDQASISCRSSQSIVHSNGNTYLEWYLQKPGQSPKLLIYKVSNRFSGVPDRFSGSGSGTDFTLKISRVEAEDLGVYYCFQGSHVPLTFGAGTKLELK

SEQ ID NO: 4497 - protein, 140 aa, Artificial Sequence
  source: /note="Description of Artificial Sequence: Synthetic polypeptide"
MDRLTSSFLLLIVPAYVLSQVTLKESGPGILKPSQTLSLTCSFSGFSLSTSGMGVGWIRQPSGKGLEWLAHIWWDDDKYYNPSLKSQLTISKDTSRNQVFLKITSVDTADTATYYCARRALYDYDYFDYWGQGTTLTVSS

SEQ ID NO: 4498 - protein, 109 aa, Artificial Sequence; identical to SEQ ID NO: 4496
  source: /note="Description of Artificial Sequence: Synthetic polypeptide"

SEQ ID NO: 4499 - protein, 109 aa, Artificial Sequence
  source: /note="Description of Artificial Sequence: Synthetic polypeptide"
MTQTPLSLPVSLGDQASISCRSSQSLVHSNGNTYLHWYLQKPGQSPKLLIYKVSNRFSGVPDRFSGSGSGTDFTLKISRVEAEDLGVYFCSQSTHVPFTFGSGTKLEIK

SEQ ID NO: 4500 - protein, 93 aa, Artificial Sequence
  source: /note="Description of Artificial Sequence: Synthetic polypeptide"
MSCKSSQSLLYSSNQKNYLAWYQQKPGQSPKLLIYWASTRESGVPDRFTGSGSGTDFTLTISSVKAEDLAVYYCQQYYSYPWTFGGGTKLEIK

SEQ ID NO: 4501 - protein, 109 aa, Artificial Sequence; identical to SEQ ID NO: 4496
  source: /note="Description of Artificial Sequence: Synthetic polypeptide"

SEQ ID NO: 4502 - protein, 109 aa, Artificial Sequence; identical to SEQ ID NO: 4496
  source: /note="Description of Artificial Sequence: Synthetic polypeptide"

SEQ ID NO: 4503 - protein, 109 aa, Artificial Sequence; identical to SEQ ID NO: 4496
  source: /note="Description of Artificial Sequence: Synthetic polypeptide"

SEQ ID NO: 4504 - protein, 134 aa, Artificial Sequence
  source: /note="Description of Artificial Sequence: Synthetic polypeptide"
MDSRLNLVFLVLILKGVQCDVQLVESGGGLVQPGGSRKLSCAASGFTFSSFGMHWVRQAPEKGLEWVAYISSGSSTIYYADTVKGRFTISRDNPKNTLFLQMTSLRSEDTAMYYCARSELLAYWGQGTLVTVSA

SEQ ID NO: 4505 - protein, 140 aa, Artificial Sequence
  source: /note="Description of Artificial Sequence: Synthetic polypeptide"
MDRLTSSFLLLIVPAYVLSQVTLKESGPGILQPSQTLSLTCSFSGFSLSTSGMGVSWIRQPSGKGLEWLAHIYWDDDKRYNPSLKSRLTISKDTSRNQVFLKITSVDTADTATYYCARRGLRLRDAMDYWGQGTSVTVSS

SEQ ID NO: 4506 - protein, 138 aa, Artificial Sequence
  source: /note="Description of Artificial Sequence: Synthetic polypeptide"
MNRLTSSLLLLIVPAYVLSQVTLKESGPGILQPSQTLSLTCSFSGFSLSTSGMGVSWIRQPSGKGLEWLAHIYWDDDKRYNPSLKSRLTISKDTSSNQVFLKITSVDTADTATYYCAPLLRLGYFDVWGAGTTVTVSS

SEQ ID NO: 4507 - protein, 137 aa, Artificial Sequence
  source: /note="Description of Artificial Sequence: Synthetic polypeptide"
MDRLTSSFLLLIVPAYVLSQVTLKESGPGILQPSQTLSLTCSFSGFSLSTSGMGVSWIRQPSGKGLEWLAHIYWDDDKRYNPSLKSRLTISKDTSRNQVFLKITSVDTADTATYYCARRARTGLDYWGQGTSVTVSS

SEQ ID NO: 4508 - protein, 132 aa, Artificial Sequence
  source: /note="Description of Artificial Sequence: Synthetic polypeptide"
MGWSYIILFLVATATDVHSQVQLQQPGAELVKPGASVKLSCKASGYTFTSYWMHWVKQRPGQGLEWIGEINPSNGRTNYNEKFKSKATLTVDKSSSTAYMQLSSLTSEDSAVYYCARYDAYWGQGTLVTVSA

SEQ ID NO: 4509 - protein, 83 aa, Artificial Sequence
  source: /note="Description of Artificial Sequence: Synthetic polypeptide"
IRQPSGKGLEWLAHIWWDDDKYYNPSLKSQLTISKDTSRNQVFLKITSVDTADTATYYCARGITTRYYTMDYWGQGTSVTVSS

SEQ ID NO: 4510 - protein, 138 aa, Artificial Sequence
  source: /note="Description of Artificial Sequence: Synthetic polypeptide"
MNRLTSSLLLLIVPAYVLSQVTLKESGPGILQPSQTLSLTCSFSGFSLSTSGMGVSWIRQPSGKGLEWLAHIYWDDDKRYNPSLKSRLTISKDTSSNQVFLKITSVDTADTATYYCARSPRGTSFAYWGQGTLVTVSA

SEQ ID NO: 4511 - protein, 135 aa, Artificial Sequence
  source: /note="Description of Artificial Sequence: Synthetic polypeptide"
MDSRLNLVFLVLILKGVQCDVQLVESGGGLVQPGGSRKLSCAASGFTFSSFGMHWVRQAPEKGLEWVAYISSGSSTIYYADTVKGRFTISRDNPKNTLFLQMTSLRSEDTAMYYCARYGYAMDYWGQGTSVTVSS

SEQ ID NO: 4512 - protein, 140 aa, Artificial Sequence
  source: /note="Description of Artificial Sequence: Synthetic polypeptide"
MDRLTSSFLLLIVPAYVLSQVTLKESGPGILKPSQTLSLTCSFSGFSLSTSGMGVGWIRQPSGKGLEWLAHIWWDDDKYYNPSLKSQLTISKDTSRNQVFLKITSVDTADTATYYCARRGLRRGDYFDYWGQGTTLTVSS

SEQ ID NO: 4513 - protein, 136 aa, Artificial Sequence
  source: /note="Description of Artificial Sequence: Synthetic polypeptide"
MDRLTSSFLLLIVPAYVLSQVTLKESGPGILQPSQTLSLTCSFSGFSLSTSGMGVSWIRQPSGKGLEWLAHIYWDDDKRYNPSLKSRLTISKDTSRNQVFLKITSVDTADTATYYCARYYYAMDYWGQGTSVTVSS

SEQ ID NO: 4514 - protein, 135 aa, Artificial Sequence
  source: /note="Description of Artificial Sequence: Synthetic polypeptide"
MDSRLNLVFLVLILKGVQCDVQLVESGGGLVQPGGSRKLSCAASGFTFSSFGMHWVRQAPEKGLEWVAYISSGSSTIYYADTVKGRFTISRDNPKNTLFLQMTSLRSEDTAMYYCASYGNYGAYWGQGTLVTVSA

SEQ ID NO: 4515 - protein, 141 aa, Artificial Sequence
  source: /note="Description of Artificial Sequence: Synthetic polypeptide"
MDRLTSSFLLLIVPAYVLSQVTLKESGPGILKPSQTLSLTCSFSGFSLSTSGMGVGWIRQPSGKGLEWLAHIWWDDDKYYNPSLKSQLTISKDTSRNQVFLKITSVDTADTATYYCARRSMITTNDYFDYWGQGTTLTVSS

SEQ ID NO: 4516 - protein, 136 aa, Artificial Sequence
  source: /note="Description of Artificial Sequence: Synthetic polypeptide"
MDSRLNLVFLVLILKGVQCDVQLVESGGGLVQPGGSRKLSCAASGFTFSSFGMHWVRQAPEKGLEWVAYISSGSSTIYYADTVKGRFTISRDNPKNTLFLQMTSLRSEDTAMYYCARYGYYAMDYWGQGTSVTVSS

SEQ ID NO: 4517 - protein, 138 aa, Artificial Sequence
  source: /note="Description of Artificial Sequence: Synthetic polypeptide"
MDSRLNLVFLVLILKGVQCDVQLVESGGGLVQPGGSRKLSCAASGFTFSSFGMHWVRQAPEKGLEWVAYISSGSSTIYYADTVKGRFTISRDNPKNTLFLQMTSLRSEDTAMYYCARLGTGTGAMDYWGQGTSVTVSS

SEQ ID NO: 4518 - protein, 137 aa, Artificial Sequence
  source: /note="Description of Artificial Sequence: Synthetic polypeptide"
MDSRLNLVFLVLILKGVQCDVQLVESGGGLVQPGGSRKLSCAASGFTFSSFGMHWVRQAPEKGLEWVAYISSGSSTIYYADTVKGRFTISRDNPKNTLFLQMTSLRSEDTAMYYCTRSDYGNSFAYWGQGTLVTVSA

SEQ ID NO: 4519 - protein, 138 aa, Artificial Sequence
  source: /note="Description of Artificial Sequence: Synthetic polypeptide"
MNRLTSSLLLLIVPAYVLSQVTLKESGPGILQPSQTLSLTCSFSGFSLSTSGMGVSWIRQPSGKGLEWLAHIYWDDDKRYNPSLKSRLTISKDTSSNQVFLKITSVDTADTATYYCARLWYDGGPAYWGQGTLVTVSA

SEQ ID NO: 4520 - protein, 137 aa, Artificial Sequence
  source: /note="Description of Artificial Sequence: Synthetic polypeptide"
MDRLTSSFLLLIVPAYVLSQVTLKESGPGILQPSQTLSLTCSFSGFSLSTSGMGVSWIRQPSGKGLEWLAHIYWDDDKRYNPSLKSRLTISKDTSRNQVFLKITSVDTADTATYYCARYGYDAMDYWGQGTSVTVSS

SEQ ID NO: 4521 - protein, 140 aa, Artificial Sequence
  source: /note="Description of Artificial Sequence: Synthetic polypeptide"
MDRLTSSFLLLIVPAYVLSQVTLKESGPGILKPSQTLSLTCSFSGFSLSTSGMGVGWIRQPSGKGLEWLAHIWWDDDKYYNPSLKSQLTISKDTSRNQVFLKITSVDTADTATYYCVRRGLYDYDRFAYWGQGTLVTVSA

SEQ ID NO: 4522 - protein, 137 aa, Artificial Sequence
  source: /note="Description of Artificial Sequence: Synthetic polypeptide"
MAVLGLLLCLVTFPSCVLSQVQLKESGPGLVAPSQSLSITCTISGFSLTSYGVHWVRQPPGKGLEWLVVIWSDGSTTYNSALKSRLSISKDNSKSQLFLKMNSLQTDDTAMYYCARHSYRYGLMDYWGQGTSVTVSS

SEQ ID NO: 4523 - protein, 138 aa, Artificial Sequence
  source: /note="Description of Artificial Sequence: Synthetic polypeptide"
MDSRLNLVFLVLILKGVQCDVQLVESGGGLVQPGGSRKLSCAASGFTFSSFGMHWVRQAPEKGLEWVAYISSGSSTIYYADTVKGRFTISRDNPKNTLFLQMTSLRSEDTAMYYCAIPRTGTGAMDYWGQGTSVTVSS

SEQ ID NO: 4524 - protein, 252 aa, Artificial Sequence
  source: /note="Description of Artificial Sequence: Synthetic polypeptide"
MNRLTSSLLLLIVPAYVLSQVTLKESGPGILQPSQTLSLTCSFSGFSLSTSGMGVSWIRQPSGKGLEWLAHIYWDYDKRYNPSLKSRLTISKDTSNNQVFLKITSVDTADTATYYCARRKVTGTLGLDAMDYWGQGTSVTVSSMTQTPLSLPVSLGDQASISCRSSQSIVHSNGNTYLEWYLQKSGQSPKLLIYKVSNRFSGVPDRFSGSGSGTDFTLKISRVEAEDLGVYYCFQGSLVPPTFGAGTKLELK

SEQ ID NO: 4525 - protein, 109 aa, Artificial Sequence
  source: /note="Description of Artificial Sequence: Synthetic polypeptide"
MTQTPLSLPVSLGDQASISCRSSQSIVHSNGNTYLEWYLQKPGQSPKLLIYKVSNRFSGVPDRFSGSGSGTDFTLKISRVEAEDLGVYYCFQGSHVPPTFGGGTKLEIK

SEQ ID NO: 4526 - protein, 109 aa, Artificial Sequence; identical to SEQ ID NO: 4496
  source: /note="Description of Artificial Sequence: Synthetic polypeptide"

SEQ ID NO: 4527 - protein, 109 aa, Artificial Sequence; identical to SEQ ID NO: 4525
  source: /note="Description of Artificial Sequence: Synthetic polypeptide"

SEQ ID NO: 4528 - protein, 139 aa, Artificial Sequence
  source: /note="Description of Artificial Sequence: Synthetic polypeptide"
MDSRLNLVFLVLILKGVQCDVQLVESGGGLVQPGGSRKLSCAASGFTFSSFGMHWVRQAPEKGLEWVAYISSGSSTIYYADTVKGRFTISRDNPKNTLFLQMTSLRSEDTAMYYCARRGIYGYYAMDYWGQGTSVTVSS

SEQ ID NO: 4529 - protein, 140 aa, Artificial Sequence
  source: /note="Description of Artificial Sequence: Synthetic polypeptide"
MDSRLNLVFLVLILKGVQCDVQLVESGGGLVQPGGSRKLSCAASGFTFSSFGMHWVRQAPEKGLEWVAYISSGSSTIYYADTVKGRFTISRDNPKNTLFLQMTSLRSEDTAMYYCARAGGYSLSYAMDYWGQGTSVTVSS

SEQ ID NO: 4530 - protein, 138 aa, Artificial Sequence; identical to SEQ ID NO: 4519
  source: /note="Description of Artificial Sequence: Synthetic polypeptide"

SEQ ID NO: 4531 - protein, 140 aa, Artificial Sequence
  source: /note="Description of Artificial Sequence: Synthetic polypeptide"
MDSRLNLVFLVLILKGVQCDVQLVESGGGLVQPGGSRKLSCAASGFTFSSFGMHWVRQAPEKGLEWVAYISSGSSTIYYADTVKGRFTISRDNPKNTLFLQMTSLRSEDTAMYYCARKGTYYRYDAFDYWGQGTTLTVSS

SEQ ID NO: 4532 - protein, 134 aa, Artificial Sequence
  source: /note="Description of Artificial Sequence: Synthetic polypeptide"
MDSRLNLVFLVLILKGVQCDVQLVESGGGLVQPGGSRKLSCAASGFTFSSFGMHWVRQAPEKGLEWVAYISSGSSTIYYADTVKGRFTISRDNPKNTLFLQMTSLRSEDTAMYYCAREGHFDYWGQGTTLTVSS

SEQ ID NO: 4533 - protein, 140 aa, Artificial Sequence
  source: /note="Description of Artificial Sequence: Synthetic polypeptide"
MDRLTSSFLLLIVPAYVLSQVTLKESGPGILKPSQTLSLTCSFSGFSLSTSGMGVGWIRQPSGKGLEWLAHIWWDDDKYYNPSLKSQLTISKDTSRNQVFLKITSVDTADTATYYCARGITTRYYTMDYWGQGTSVTVSS

SEQ ID NO: 4534 - protein, 131 aa, Artificial Sequence
  source: /note="Description of Artificial Sequence: Synthetic polypeptide"
MDSRLNLVFLVLILKGVQCDVQLVESGGGLVQPGGSRKLSCAASGFTFSSFGMHWVRQAPEKGLEWVAYISSGSTTIYYADTVKGRFTISRDNPKNTLFLQMTSLRSEDTAMYYCGGFAYWGQGTLVTVSA

SEQ ID NO: 4535 - protein, 139 aa, Artificial Sequence
  source: /note="Description of Artificial Sequence: Synthetic polypeptide"
MNFGLSLIFLALILKGVQCEVQLVESGGDLVKPGGSLKLSCAASGFTFSSYGMSWVRQTPDKRLDWVATISSGGSYTYYPDSVKGRFTISRDNAKNTLYLQMSSLKSEDTAMYYCARSTMIATGTFAYWGQGTLVTVSA

SEQ ID NO: 4536 - protein, 143 aa, Artificial Sequence
  source: /note="Description of Artificial Sequence: Synthetic polypeptide"
MNLGLSLIFLVLVLKGVQCEVKLVESGGGLVQPGGSLKLSCATSGFTFSDYYMYWVRQTPEKRLEWVAYISNGGGSTYYPDTVKGRFTISRDNAKNTLYLQMSRLKSEDTAMYYCARGTSYGSGLHYYAMDYWGQGTSVTVSS

SEQ ID NO: 4537 - protein, 138 aa, Artificial Sequence
  source: /note="Description of Artificial Sequence: Synthetic polypeptide"
MDSRLNLVFLVLILKGVQCDVQLVESGGGLVQPGGSRKLSCAASGFTFSSFGMHWVRQAPEKGLEWVAYISSGSSTIYYADTVKGRFTISRDNPKNTLFLQMTSLRSEDTAMYYCARDGNYVGWFAYWGQGTLVTVSA

SEQ ID NO: 4538 - protein, 109 aa, Artificial Sequence; identical to SEQ ID NO: 4496
  source: /note="Description of Artificial Sequence: Synthetic polypeptide"

SEQ ID NO: 4539 - protein, 140 aa, Artificial Sequence
  source: /note="Description of Artificial Sequence: Synthetic polypeptide"
MDSRLNLVFLVLILKGVQCDVQLVESGGGLVQPGGSRKLSCAASGFTFSSFGMHWVRQAPEKGLEWVAYISSGSSTIYYADTVKGRFTISRDNPKNTLFLQMTSLRSEDTAMYYCARSGYRYSYYAMDYWGQGTSVTVSS

SEQ ID NO: 4540 - protein, 92 aa, Artificial Sequence
  source: /note="Description of Artificial Sequence: Synthetic polypeptide"
MSCKSSQSLLNSGNQKNYLTWYQQKPGQPPKLLIYWASTRESGVPDRFTGSGSGTDFTLTISSVQAEDLAVYYCQNDYSYPTFGGGTKLEIK

SEQ ID NO: 4541 - protein, 109 aa, Artificial Sequence
  source: /note="Description of Artificial Sequence: Synthetic polypeptide"
MTQTPLSLPVSLGDQASISCRSSQSLVHSNGNTYLHWYLQKPGQSPKLLIYKVSNRFSGVPDRFSGSGSGTDFTLKISRVEAEDLGVFFCSQSTHVPLTFGAGTKLELK

SEQ ID NO: 4542 - protein, 109 aa, Artificial Sequence; identical to SEQ ID NO: 4496
  source: /note="Description of Artificial Sequence: Synthetic polypeptide"

SEQ ID NO: 4543 - protein, 109 aa, Artificial Sequence
  source: /note="Description of Artificial Sequence: Synthetic polypeptide"
MTQTPLSLPVSLGDQASISCRSSQSLVHSNGNTYLHWYLQKPGQSPKLLIYKVSNRFSGVPDRFSGSGSGTDFTLKISRVEAEDLGVYFCSQSTHVPWTFGGGTKLEIK

SEQ ID NO: 4544 - protein, 109 aa, Artificial Sequence; identical to SEQ ID NO: 4496
  source: /note="Description of Artificial Sequence: Synthetic polypeptide"

SEQ ID NO: 4545 - protein, 109 aa, Artificial Sequence
  source: /note="Description of Artificial Sequence: Synthetic polypeptide"
MTQTPLSLPVSLGDQASISCRSSQSLVHSNGNTYLHWYLQKPGQSPKLLIYKVSNRFSGVPDRFSGSGSGTDFTLKISRVEAEDLGVYFCSQSTHVPLTFGAGTKLELK

SEQ ID NO: 4546 - protein, 136 aa, Artificial Sequence; identical to SEQ ID NO: 4462
  source: /note="Description of Artificial Sequence: Synthetic polypeptide"

SEQ ID NO: 4547 - protein, 109 aa, Artificial Sequence; identical to SEQ ID NO: 4525
  source: /note="Description of Artificial Sequence: Synthetic polypeptide"

SEQ ID NO: 4548 - protein, 109 aa, Artificial Sequence; identical to SEQ ID NO: 4545
  source: /note="Description of Artificial Sequence: Synthetic polypeptide"

SEQ ID NO: 4549 - protein, 109 aa, Artificial Sequence; identical to SEQ ID NO: 4496
  source: /note="Description of Artificial Sequence: Synthetic polypeptide"

SEQ ID NO: 4550 - protein, 99 aa, Artificial Sequence
  source: /note="Description of Artificial Sequence: Synthetic polypeptide"
MSCKASGYTFTSYWMHWVKQRPGQGLEWIGYINPSTGYTEYNQKFKDKATLTADKSSSTAYMQLSSLTSEDSAVYYCARWDGRGYFDYWGQGTTLTVSS

SEQ ID NO: 4551 - protein, 109 aa, Artificial Sequence; identical to SEQ ID NO: 4545
  source: /note="Description of Artificial Sequence: Synthetic polypeptide"

SEQ ID NO: 4552 - protein, 109 aa, Artificial Sequence
  source: /note="Description of Artificial Sequence: Synthetic polypeptide"
MTQTPLSLPVSLGDQASISCRSSQSIVHSNGNTYLEWYLQKPGQSPKLLIYKVSNRFSGVPDRFSGSGSGTDFTLKISRVEAEDLGVYYCFQGSHVPYTFGGGTKLEIK

SEQ ID NO: 4553 - protein, 109 aa, Artificial Sequence; identical to SEQ ID NO: 4525
  source: /note="Description of Artificial Sequence: Synthetic polypeptide"

SEQ ID NO: 4554 - protein, 109 aa, Artificial Sequence; identical to SEQ ID NO: 4525
  source: /note="Description of Artificial Sequence: Synthetic polypeptide"

SEQ ID NO: 4555 - protein, 109 aa, Artificial Sequence; identical to SEQ ID NO: 4496
  source: /note="Description of Artificial Sequence: Synthetic polypeptide"

SEQ ID NO: 4556 - protein, 128 aa, Artificial Sequence
  source: /note="Description of Artificial Sequence: Synthetic polypeptide"
MVFTPHILGLLLFWISASTGDILLTQSPATLSVTPGETVSLSCRASQSIYKNLHWYQQKSHRSPRLLIKYASDSISGIPSRFTGSGSGTDYTLSINSVKPEDEGIYYCLQGYSTPMYTFGGGTKLEIK

SEQ ID NO: 4557 - protein, 109 aa, Artificial Sequence; identical to SEQ ID NO: 4545
  source: /note="Description of Artificial Sequence: Synthetic polypeptide"

SEQ ID NO: 4558 - protein, 142 aa, Artificial Sequence
  source: /note="Description of Artificial Sequence: Synthetic polypeptide"
MDRLTSSFLLLIVPAYVLSQVTLKESGPGILQPSQTHSLTCSFSGFSLSTSGMGVSWIRQPSGKGLEWLAHIYWDDDKRYNPSLKSRLTISKDTSRNQVFLKITSVDTADTATYYCARKGVYYDYDVGFAYWGQGTLVTVSA

SEQ ID NO: 4559 - protein, 109 aa, Artificial Sequence; identical to SEQ ID NO: 4496
  source: /note="Description of Artificial Sequence: Synthetic polypeptide"

SEQ ID NO: 4560 - protein, 109 aa, Artificial Sequence; identical to SEQ ID NO: 4543
  source: /note="Description of Artificial Sequence: Synthetic polypeptide"

SEQ ID NO: 4561 - protein, 139 aa, Artificial Sequence
  source: /note="Description of Artificial Sequence: Synthetic polypeptide"
MDSRLNLVFLVLILKGVQCDVQLVESGGGLVQPGGSRKLSCAASGFTFSSFGMHWVRQAPEKGLEWVAYISSGSSTIYYADTVKGRFTISRDNPKNTLFLQMTSLRSEDTAMYYCARYGTLYYYAMDYWGQGTSVTVSS

SEQ ID NO: 4562 - protein, 109 aa, Artificial Sequence; identical to SEQ ID NO: 4496
  source: /note="Description of Artificial Sequence: Synthetic polypeptide"

SEQ ID NO: 4563 - protein, 109 aa, Artificial Sequence; identical to SEQ ID NO: 4499
  source: /note="Description of Artificial Sequence: Synthetic polypeptide"

SEQ ID NO: 4564 - protein, 121 aa, Artificial Sequence
  source: /note="Description of Artificial Sequence: Synthetic polypeptide"
MFWIPASSSDVVMTQTPLSLPVSLGDQASISCRSSQSLVHSNGNTYLHWYLQKPGQSPKLLIYKVSNRFSGVPDRFSGSGSGTDFTLKISRVEAEDLGVYFCSQSTHVPLTFGSGTKLEIK

SEQ ID NO: 4565 - protein, 109 aa, Artificial Sequence; identical to SEQ ID NO: 4545
  source: /note="Description of Artificial Sequence: Synthetic polypeptide"

SEQ ID NO: 4566 - protein, 109 aa, Artificial Sequence; identical to SEQ ID NO: 4525
  source: /note="Description of Artificial Sequence: Synthetic polypeptide"

SEQ ID NO: 4567 - protein, 109 aa, Artificial Sequence; identical to SEQ ID NO: 4525
  source: /note="Description of Artificial Sequence: Synthetic polypeptide"

SEQ ID NO: 4568 - protein, 109 aa, Artificial Sequence; identical to SEQ ID NO: 4496
  source: /note="Description of Artificial Sequence: Synthetic polypeptide"

SEQ ID NO: 4569 - protein, 112 aa, Artificial Sequence
  source: /note="Description of Artificial Sequence: Synthetic polypeptide"
DIVMSQSPSSLAVSAGEKVTMSCKSSQSLLNSRTRKNYLAWYQQKPGQSPKLLIYWASTRESGVPDRFTGSGSGTDFTLTISSVQAEDLAVYYCKQSYNLYTFGGGTKLEIK

SEQ ID NO: 4570 - protein, 141 aa, Artificial Sequence
  source: /note="Description of Artificial Sequence: Synthetic polypeptide"
MDRLTSSFLLLIVPAYVLSQVTLKESGPGILKPSQTLSLTCSFSGFSLSTSGMGVGWIRQPSGKGLEWLAHIWWDDDKYYNPSLKSQLTISKDTSRNQVFLKITSVDTADTATYYCARRALYYYGDYFDYWGQGTTLTVSS

SEQ ID NO: 4571 - protein, 119 aa, Artificial Sequence
  source: /note="Description of Artificial Sequence: Synthetic polypeptide"
QVTLKESGPGILQPSQTLSLTCSFSGFSLSTSGMGVSWIRQPSGKGLEWLAHIYWDDDKRYNPSLKSRLTISKDTSSNQVFLKITSVDTADTATYYCARYYGSSPFDYWGQGTTLTVSS

SEQ ID NO: 4572 - protein, 138 aa, Artificial Sequence
  source: /note="Description of Artificial Sequence: Synthetic polypeptide"
MDRLTSSFLLLIVPAYVLSQVTLKESGPGILQPSQTLSLTCSFSGFSLSTSGMGVSWIRQPSGKGLEWLAHIYWDDDKRYNPSLKSRLTISKDTSRNQVFLKITSVDTADTATYYCARGMITTAFAYWGQGTLVTVSA

SEQ ID NO: 4573 - protein, 140 aa, Artificial Sequence
  source: /note="Description of Artificial Sequence: Synthetic polypeptide"
MDRLTSSFLLLIVPAYILSQVTLKESGPGILKPSQTLSLTCSFSGFSLSTSGMGVGWIRQPSGKGLEWLAHIWWDDDKYYNPSLKSQLTISKDTSRNQVFLKITSVDTADTATYYCARRGMITTDAMDYWGQGTSVTVSS

SEQ ID NO: 4574 - protein, 136 aa, Artificial Sequence
  source: /note="Description of Artificial Sequence: Synthetic polypeptide"
MNRLTSSLLLLIVPAYVLSQVTLKESGPGILQPSQTLSLTCSFSGFSLSTSGMGVSWIRQPSGKGLEWLAHIYWDDDKRYNPSLKSRLTISKDTSSNQVFLKITSVDTADTATYYCARYGRGFAYWGQGTLVTVSA

SEQ ID NO: 4575 - protein, 136 aa, Artificial Sequence
  source: /note="Description of Artificial Sequence: Synthetic polypeptide"
MNFVLSLIFLALILKGVQCEVQLVESGGGLVKPGGSLKLSCAASGFTFSSYAMSWVRQTPEKRLEWVATISSGGSYTYYPDSVKGRFTISRDNAKNTLYLQMSSLRSEDTAMYYCARQNWDGFAYWGQGTLVTVSA

SEQ ID NO: 4576 - protein, 115 aa, Artificial Sequence
  source: /note="Description of Artificial Sequence: Synthetic polypeptide"
DVQLVESGGGLVQPGGSRKLSCAASGFTFSSFGMHWVRQAPEKGLEWVAYISSGSSTIYYADTVKGRFTISRDNPKNTLFLQMTSLRSEDTAMYYCARGNYPDYWGQGTTLTVSS

SEQ ID NO: 4577 - protein, 140 aa, Artificial Sequence
  source: /note="Description of Artificial Sequence: Synthetic polypeptide"
MDRLTSSFLLLIVPAYVLSQVTLKESGPGILKPSQTLSLTCSFSGFSLSTSGMGVGWIRQPSGKGLEWLAHIWWDDDKYYNPSLKSQLTISKDTSRNQVFLKITSVDTADTATYYCTRRALYDYDAMDYWGQGTSVTVSS

SEQ ID NO: 4578 - protein, 138 aa, Artificial Sequence; identical to SEQ ID NO: 4440
  source: /note="Description of Artificial Sequence: Synthetic polypeptide"

SEQ ID NO: 4579 - protein, 138 aa, Artificial Sequence; identical to SEQ ID NO: 4460
  source: /note="Description of Artificial Sequence: Synthetic polypeptide"

SEQ ID NO: 4580 - protein, 136 aa, Artificial Sequence
  source: /note="Description of Artificial Sequence: Synthetic polypeptide"
MDSRLNLVFLVLILKGVQCDVQLVESGGGLVQPGGSRKLSCAASGFTFSSFGMHWVRQAPEKGLEWVAYISSGSSTIYYADTVKGRFTISRDNPKNTLFLQMTSLRSEDTAMYYCARTGTGAMDYWGQGTSVTVSS

SEQ ID NO: 4581 - protein, 138 aa, Artificial Sequence
  source: /note="Description of Artificial Sequence: Synthetic polypeptide"
MNRLTSSLLLLIVPAYVLSQVTLKESGPGILQPSQTLSLTCSFSGFSLSTSGMGVSWIRQPSGKGLEWLAHIYWDDDKRYNPSLKSRLTISKDTSSNQVFLKITSVDTADTATYYCARYYGSSPFDYWGQGTTLTVSS

SEQ ID NO: 4582 - protein, 139 aa, Artificial Sequence; identical to SEQ ID NO: 4454
  source: /note="Description of Artificial Sequence: Synthetic polypeptide"

SEQ ID NO: 4583 - protein, 112 aa, Artificial Sequence
  source: /note="Description of Artificial Sequence: Synthetic polypeptide"
EVQLVESGGGLVQPGGSLRLSCAASGFTFSSYGMSWVRQAPGKGLELVASINSNGGSTYYPDSVKGRFTISRDNAKNTLYLQMNSLRAEDTAVYYCASGDYWGQGTLVTVSS

SEQ ID NO: 4584 - protein, 112 aa, Artificial Sequence
  source: /note="Description of Artificial Sequence: Synthetic polypeptide"
EVQLVESGGGLVQPGGSLRLSCAASGFTFSSYGMSWVRQAPGKGLEWVASINSNGGSTYYPDSVKGRFTISRDNAKNTLYLQMNSLRAEDTAVYYCASGDYWGQGTLVTVSS

SEQ ID NO: 4585 - protein, 112 aa, Artificial Sequence; identical to SEQ ID NO: 4583
  source: /note="Description of Artificial Sequence: Synthetic polypeptide"

SEQ ID NO: 4586 - protein, 131 aa, Artificial Sequence
  source: /note="Description of Artificial Sequence: Synthetic polypeptide"
MEFGLSWLFLVAILKGVQCEVQLVESGGGLVQPGGSLRLSCAASGFTFSSYGMSWVRQAPGKGLEWVASINSNGGSTYYPDSVKGRFTISRDNAKNTLYLQMNSLRAEDTAVYYCASGDYWGQGTLVTVSS

SEQ ID NO: 4587 - protein, 131 aa, Artificial Sequence
  source: /note="Description of Artificial Sequence: Synthetic polypeptide"
MEFGLSWLFLVAILKGVQCEVQLVESGGGLVQPGGSLRLSCAASGFTFSSYGMSWVRQAPGKGLELVASINSNGGSTYYPDSVKGRFTISRDNAKNTLYLQMNSLRAEDTAVYYCASGDYWGQGTLVTVSS

SEQ ID NO: 4588 - protein, 120 aa, Artificial Sequence
  source: /note="Description of Artificial Sequence: Synthetic polypeptide"
EVQLVQSGAEVKKPGASVKVSCKASGYTFTTFYIHWVRQAPGQGLEWIGMIGPGSGNTYYNEMFKDKATLTVDTSTSTAYMELSSLRSEDTAVYYCARAKSARAAWFAYWGQGTLVTVSS

SEQ ID NO: 4589 - protein, 118 aa, Artificial Sequence
  source: /note="Description of Artificial Sequence: Synthetic polypeptide"
EVKLVESGGGLVKPGGSLRLSCAASGFTFSSYAMSWVRQAPGKGLEWVASIHNRGTIFYLDSVKGRFTISRDNVRNTLYLQMNSLRAEDTAVYYCTRGRSNSYAMDYWGQGTSVTVSS

SEQ ID NO: 4590 - protein, 123 aa, Artificial Sequence
  source: /note="Description of Artificial Sequence: Synthetic polypeptide"
QVTLKESGPGLLKPTQTLTLTCTLSGFSLSTSGMGVGWFRQPPGKGLEWLAHIWWDDDKSYNPSLKSRLTISKDTSKNQVVLTITNVDPVDTATYYCARRQLGTRGTDAMDYWGQGTTVTVSS

SEQ ID NO: 4591 - protein, 433 aa, Artificial Sequence
  source: /note="Description of Artificial Sequence: Synthetic polypeptide"
QVTLKESGPGLLKPTQTLTLTCTLSGFSLSTSGMGVGWFRQPPGKGLEWLAHIWWDDDKSYNPSLKSRLTISKDTSKNQVVLTITNVDPVDTATYYCARRQLGTRGTDAMDYWGQGTTVTVSSASTKGPSVFPLAPCSRSTSESTAALGCLVKDYFPEPVTVSWNSGALTSGVHTFPAVLQSSGLYSLSSVVTVTSSNFGTQTYTCNVDHKPSNTKVDKTVERKCCVECPPCPAPPVAGPSVFLFPPKPKDTLMISRTPEVTCVVVDVSQEDPEVQFNWYVDGVEVHNAKTKPREEQFNSTFRVVSVLTVLHQDWLNGKEYKCKVSNKGLPSSIEKTISKTKGQPREPQVYTLPPSREEMTKNQVSLTCLVKGFYPSDIAVEWESNGQPENNYKTTPPMLDSDGSFFLYSKLTVDKALHNHYTQKSLSLSPGK

SEQ ID NO: 4592 - protein, 112 aa, Artificial Sequence
  source: /note="Description of Artificial Sequence: Synthetic polypeptide"
EVQLVESGGGLVQPGGSLRLSCAASGFTFSRYSMSWVRQAPGKGLELVAQINSVGNSTYYPDTVKGRFTISRDNAKNTLYLQMNSLRAEDTAVYYCASGDYWGQGTLVTVSS

SEQ ID NO: 4593 - protein, 112 aa, Artificial Sequence
  source: /note="Description of Artificial Sequence: Synthetic polypeptide"
  MOD_RES (1)..(1): Any amino acid
  MOD_RES (7)..(7): Any amino acid
  MOD_RES (46)..(46): Any amino acid
  MOD_RES (63)..(63): Any amino acid
  MOD_RES (75)..(76): Any amino acid
  MOD_RES (89)..(89): Any amino acid
  MOD_RES (107)..(107): Any amino acid
XVQLVEXGGGLVQPGGSLRLSCAASGFTFSRYSMSWVRQAPGKGLXLVAQINSVGNSTYYPDXVKGRFTISRDNXXNTLYLQMNSLRAXDTAVYYCASGDYWGQGTXVTVSS

SEQ ID NO: 4594 - protein, 120 aa, Artificial Sequence; identical to SEQ ID NO: 3949
  source: /note="Description of Artificial Sequence: Synthetic polypeptide"

SEQ ID NO: 4595 - protein, 112 aa, Artificial Sequence
  source: /note="Description of Artificial Sequence: Synthetic polypeptide"
EVQLVESGGGLVQPGGSLRLSCAASGFTFSSYGMSWVRQAPGKGLELVASINSNGGSTYYPDSVKGRFTISRDNAKNSLYLQMNSLRAEDTAVYYCASGDYWGQGTTVTVSS

SEQ ID NO: 4596 - protein, 112 aa, Artificial Sequence; identical to SEQ ID NO: 4595
  source: /note="Description of Artificial Sequence: Synthetic polypeptide"

SEQ ID NO: 4597 - protein, 118 aa, Artificial Sequence
  source: /note="Description of Artificial Sequence: Synthetic polypeptide"
QVQLVQSGAEVKKPGSSVKVSCKASGGTFSSYAISWVRQAPGQGLEWMGRIIPIFGIANYAQKFQGRVTITADKSTSTAYMELSSLRSEDTAVYYCARGTTASPLDYWGQGTLVTVSS

SEQ ID NO: 4598 - protein, 114 aa, Artificial Sequence
  source: /note="Description of Artificial Sequence: Synthetic polypeptide"
DIVMTQSPDSLAVSLGERATINCKSSQSVIHNSNVKNCLAWYQQKLGQPPNLLIYWASTRESGVPDRFSGSGSGTDFTLKISRVEAEDVGVYYCMQSIQLPRTFGQGTKVEIKR

SEQ ID NO: 4599 - protein, 123 aa, Artificial Sequence
  source: /note="Description of Artificial Sequence: Synthetic polypeptide"
EVQLVESGTEVKKPGESLKISCKGSEYRFSSYWIAWVRQMPGKGLDWMGLIYPGDSDTRYSPSFQGQVTISADKSISTAYLQWSSLKASDTAMYYCARHQLRGIAARSPFDIWGQGTMVTVSS

SEQ ID NO: 4600 - protein, 122 aa, Artificial Sequence
  source: /note="Description of Artificial Sequence: Synthetic polypeptide"
QVQLQQSGAEVKKPGASVKVSCKASGYTFSSYYMHWVRQAPGQGLEWMGIINPSGGSTSYAQKFQGRVTMTRDTSTSTVYMELSSLRSEDTAVYYCARPRYNWNDGDAFDIWGQGTMVTVSS

SEQ ID NO: 4601 - protein, 123 aa, Artificial Sequence
  source: /note="Description of Artificial Sequence: Synthetic polypeptide"
QVQLVQSGAEVKKPGASVKVSCKASGYTFTSYDINWVRQATGQGLEWMGWMNPNSGNTGYAQKFQGRVTMTRNTSISTAYMELSSLRSEDTAVYYCARGRSIAARPWYYFDYWGQGTLVTVSS

SEQ ID NO: 4602 - protein, 123 aa, Artificial Sequence
  source: /note="Description of Artificial Sequence: Synthetic polypeptide"
QVQLVQSGGGLVQPGRSLRLSCTASGFTFGDYAMSWVRQAPGKGLEWVGFIRSKAYGGTTEYAASVKGRFTISRDDSKSIAYLQMNSLKTEDTAMYYCTRVRSGSYYARPDYWGQGTLVTVSS

SEQ ID NO: 4603 - protein, 121 aa, Artificial Sequence
  source: /note="Description of Artificial Sequence: Synthetic polypeptide"
EVQLVESGGGVVQPGRSLRLSCAASGFTFSDYGMHWVRQAPGKGLEWVFLTSHDGSNTKYADSVKGRFTISRDNSKNTVYLQMNSLRADDTAVYYCANGFCGSNCYYFHHWGRGTTVTVSS

SEQ ID NO: 4604 - protein, 123 aa, Artificial Sequence
  source: /note="Description of Artificial Sequence: Synthetic polypeptide"
QVQLVQSGGGLVQPGGSQRLSCAASGFGFSNYAVSWVRQAPGTGLEWVAGVNGGGQNTFYADSVKGRFTISRDNSKKTVYLQMNSLRVEDTAIYYCAKDGRFRNRRPDGFDTWGQGTLVTVSS

SEQ ID NO: 4605 - protein, 123 aa, Artificial Sequence
  source: /note="Description of Artificial Sequence: Synthetic polypeptide"
QVQLVQSGGGVVQPGGSLRLSCAASGFTFSRYAMSWVRQAPGKGLEWVSAMSGSGDTTYYADSVKGRFTISRDNSKKTVYLQMNRLRVEDTAIYYCAKDGRFRNRRSDGFDTWGQGTLVTVSS

SEQ ID NO: 4606 - protein, 125 aa, Artificial Sequence
  source: /note="Description of Artificial Sequence: Synthetic polypeptide"
QVQLVQSGAEVKKPGSSVKVSCKASGGTFSSYAISWVRQAPGQGLEWMGRIIPILGIANYAQKFQGRVTITADKSTSTAYMELSSLRSEDTAVYYCARAKRFAAARRGLDAFDIWGQGTMVTVSS

SEQ ID NO: 4607 - protein, 117 aa, Artificial Sequence
  source: /note="Description of Artificial Sequence: Synthetic polypeptide"
QVTLKESGGDLVKPGGSLRLSCAASGFTFRKYYMAWIRQAPGKGPEWLSTISNSGDIIDYADSVRGRFSISRDNAQKSLYLQMTSLRPDDSAIYYCAREYFFSFDVWGRGTLVTVSS

SEQ ID NO: 4608 - protein, 123 aa, Artificial Sequence
  source: /note="Description of Artificial Sequence: Synthetic polypeptide"
EVQLLESGGGLVQPGGSLRLSCAASGFTFSFYGMVWVRQAPGKGLEWVSSISPSGGYTLYADSVKGRFTISRDNSKNTLYLQMNSLRAEDTAVYYCAKDGRRPHYGSGRWAYWGQGTLVTVSS

SEQ ID NO: 4609 - protein, 118 aa, Artificial Sequence
  source: /note="Description of Artificial Sequence: Synthetic polypeptide"
EVQLLESGGGLVQPGGSLRLSCAASGFTFSRYLMMWVRQAPGKGLEWVSVISPSGGRTWYADSVKGRFTISRDNSKNTLYLQMNSLRAEDTAVYYCVRSIAAAGTDYWGQGTLVTVSS

SEQ ID NO: 4610 - protein, 113 aa, Artificial Sequence
  source: /note="Description of Artificial Sequence: Synthetic polypeptide"
EVQLLESGGGLVQPGGSLRLSCAASGFTFSNYFMIWVRQAPGKGLEWVSWISPSGGTTQYADSVKGRFTISRDNSKNTLYLQMNSLRAEDTAVYYCAREAGYWGQGTLVTVSS

SEQ ID NO: 4611 - protein, 119 aa, Artificial Sequence
  source: /note="Description of Artificial Sequence: Synthetic polypeptide"
EVQLLESGGGLVQPGGSLRLSCAASGFTFSAYYMGWVRQAPGKGLEWVSVIRPSGGKTKYADSVKGRFTISRDNSKNTLYLQMNSLRAEDTAVYYCARGPHGQGGVDSWGQGTLVTVSS

SEQ ID NO: 4612 - protein, 126 aa, Artificial Sequence
  source: /note="Description of Artificial Sequence: Synthetic polypeptide"
EVQLLESGGGLVQPGGSLRLSCAASGFTFSEYFMTWVRQAPGKGLEWVSSIRPSGGKTRYADSVKGRFTISRDNSKNTLYLQMNSLRAEDTAVYYCARVSRYYNNGAYRLDAFDIWGPGTVVTVSS

SEQ ID NO: 4613 - protein, 118 aa, Artificial Sequence
  source: /note="Description of Artificial Sequence: Synthetic polypeptide"
EVQLLESGGGLVQPGGSLRLSCAASGFTFSAYRMAWVRQAPGKGLEWVSYISSSGGVTSYADSVKGRFTISRDNSKNTLYLQMKSLRAEDTAVYYCARGTHLPGVDYWGQGTLVTVSS

SEQ ID NO: 4614 - protein, 113 aa, Artificial Sequence
  source: /note="Description of Artificial Sequence: Synthetic polypeptide"
EVQLLESGGGLVQPGGSLRLSCAASGFTFSGYIMAWVRQAPGKGLEWVSGIGSSGGLTAYADSVKGRFTISRDNSKNTLYLQMNSLRAEDTAVYYCAREAGYWGQGTLVTVSS

SEQ ID NO: 4615 - protein, 129 aa, Artificial Sequence
  source: /note="Description of Artificial Sequence: Synthetic polypeptide"
EVQLLESGGGLVQPGGSLRLSCAASGFTFSSYPMVWVRQAPGKGLEWVSGIWSSGGLTYYADSVKGRFTISRDNSKNTLYLQMNSLRAEDTAVYYCAREGSAGVVKGPARYYYYYMDVWGKGTTVTVSS

SEQ ID NO: 4616 - protein, 126 aa, Artificial Sequence
  source: /note="Description of Artificial Sequence: Synthetic polypeptide"
EVQLLESGGGLVQPGGSLRLSCAASGFTFSKYQMTWVRQAPGKGLEWVSVISSSGGDTAYADSVKGRFTISRDNSKNTLYLQMNSLRAEDTAVYYCARDRGYCSGNTCYIDAFDIWGQGTMVTVSS

SEQ ID NO: 4617 - protein, 119 aa, Artificial Sequence
  source: /note="Description of Artificial Sequence: Synthetic polypeptide"
EVQLLESGGGLVQPGGSLRLSCAASGFTFSPYWMFWVRQAPGKGLEWVSGIVSSGGMTGYADSVKGRFTISRDNSKNTLYLQMNSLRAEDTAVYYCARVGMSTYAFDIWGQGTMVTVSS

SEQ ID NO: 4618 - protein, 118 aa, Artificial Sequence
  source: /note="Description of Artificial Sequence: Synthetic polypeptide"
EVQLLESGGGLVQLGGSLRLSCAASGFTFSHYGMSWVRQAPGKGLEWVSSIRSSGGRTWYADSVKGRFTISRDNSKNTLYLQMNSLRAEDTAVYYCAKGSLSSGWDYWGQGTLVTVSS

SEQ ID NO: 4619 - protein, 113 aa, Artificial Sequence
  source: /note="Description of Artificial Sequence: Synthetic polypeptide"
EVQLLESGGGLVQPGGSLRLSCAASGFTFSNYRMEWVRQAPGKGLEWVSSIWSSGGLTKEADSVKGRFTISRDNSKNTLYLQMNSLRAEDTAVYYCARGLYRWGQGTLVTVSS

SEQ ID NO: 4620 - protein, 118 aa, Artificial Sequence
  source: /note="Description of Artificial Sequence: Synthetic polypeptide"
EVQLLESGGGLVQPGGSLRLSCAASGFTFSWYLMHWVRQAPGKGLEWVSSIVPSGGTTVYADSVKGRFTISRDNSKNTLYLQMNSLRAEDTAVYYCARDLWFGEWDYWGQGTLVTVSS

SEQ ID NO: 4621 - protein, 122 aa, Artificial Sequence
  source: /note="Description of Artificial Sequence: Synthetic polypeptide"
EVQLLESGGGLVQPGGSLRLSCAASGFTFSWYSMVWVRQAPGKGLEWVSSIGPSGGMTRYADSVKGRFTISRDNSKNTLYLQMNSLRAEDTAVYYCARDQGITMVQGAMGYWGQGTLVTVSS

SEQ ID NO: 4622 - protein, 119 aa, Artificial Sequence
  source: /note="Description of Artificial Sequence: Synthetic polypeptide"
EVQLLESGGGLVQPGGSLRLSCAASGFTFSVYSMAWVRQAPGKGLEWVSGIWPSGGPTAYADSVKGRFTISRDNSKNTLYLQMNSLRAEDTAVYYCAREDFWSGLEDVWGKGTTVTVSS

SEQ ID NO: 4623 - protein, 115 aa, Artificial Sequence
  source: /note="Description of Artificial Sequence: Synthetic polypeptide"
EVQLLESGGGLVQPGGSLRLSCAASGFTFSMYMMDWVRQAPGKGLEWVSSIWPSGGQTWYADSVKGRFTISRDNSKNTLYLQMNSLRAEDTAVYYCARSVLLDYWGQGTLVTVSS

SEQ ID NO: 4624 - protein, 128 aa, Artificial Sequence
  source: /note="Description of Artificial Sequence: Synthetic polypeptide"
EVQLLESGGGLVQPGGSLRLSCAASGFTFSYYAMQWVRQAPGKGLEWVSSLYPSGGNTSYADSVKGRFTISRDNSKNTLYLQMNSLRAEDTAVYYCARGRGNYDFWSAGYYYYYMDVWGKGTTVTVSS

SEQ ID NO: 4625 - protein, 128 aa, Artificial Sequence; identical to SEQ ID NO: 4624
  source: /note="Description of Artificial Sequence: Synthetic polypeptide"

SEQ ID NO: 4626 - protein, 115 aa, Artificial Sequence
  source: /note="Description of Artificial Sequence: Synthetic polypeptide"
EVQLVQSGPELKKPGASVKISCKASGYTFTDYNMHWVKQAHGKGLEWIGYIYPHNGGTGYNQRFKSKATLTVDKSTSTAYMELRSLTSEDSAVYYCARPGTEAYWGQGTLVTVSS

SEQ ID NO: 4627 - protein, 115 aa, Artificial Sequence
  source: /note="Description of Artificial Sequence: Synthetic polypeptide"
EVQLVQSGAEVKKPGASVKISCKASGYTFTDYNMHWVKQAHGKGLEWIGYIYPHNGGTGYNQRFKSKATLTVDKSTSTAYMELSSLRSEDSAVYYCARPGTEAYWGQGTLVTVSS

SEQ ID NO: 4628 - protein, 115 aa, Artificial Sequence
  source: /note="Description of Artificial Sequence: Synthetic polypeptide"
EVQLVQSGAEVKKPGASVKISCKASGYTFTDYNMHWVKQAPGKGLEWIGYIYPHNGGTGYNQRFKSKATLTVDKSTSTAYMELSSLRSEDTAVYYCARPGTEAYWGQGTLVTVSS

SEQ ID NO: 4629 - protein, 115 aa, Artificial Sequence
  source: /note="Description of Artificial Sequence: Synthetic polypeptide"
EVQLVQSGAEVKKPGASVKISCKASGYTFTDYNMHWVRQAPGKGLEWIGYIYPHNGGTGYNQRFKSKATLTVDKSTSTAYMELSSLRSEDTAVYYCARPGTEAYWGQGTLVTVSS

SEQ ID NO: 4630 - protein, 115 aa, Artificial Sequence
  source: /note="Description of Artificial Sequence: Synthetic polypeptide"
EVQLVQSGAEVKKPGASVKVSCKASGYTFTDYNMHWVRQAPGKGLEWIGYIYPHNGGTGYNQRFKSKATITVDKSTSTAYMELSSLRSEDTAVYYCARPGTEAYWGQGTLVTVSS

SEQ ID NO: 4631 - protein, 131 aa, Artificial Sequence
  source: /note="Description of Artificial Sequence: Synthetic polypeptide"
MNFGLSLIFLVLVLKGVLCEVKLVESGGGLVQPGGSLKLSCAASGFTFSRYSMSWVRQTPEKRLELVAKISNSGDNTYYPDTLKGRFTISRDNAQNTLYLQMSSLKSEDTAMYYCASGDYWGQGTTLTVSS

SEQ ID NO: 4632 - protein, 131 aa, Artificial Sequence
  source: /note="Description of Artificial Sequence: Synthetic polypeptide"
MNFGLSLIFLVLVLKGVLCEVKLVESGGGLVQPGGSLKLSCAASGFTFSDYTMSWVRQTPEKRLELVAEISNTGGSTYYPDTVKGRFTISRDNAKNTLYLQMSSLKSEDTAMYYCASGDYWGQGTTLTVSS

SEQ ID NO: 4633 - protein, 131 aa, Artificial Sequence
  source: /note="Description of Artificial Sequence: Synthetic polypeptide"
MNFGLSLIFLVLVLKGVLCEVKLVESGGGLVQPGGSLKLSCAASGFTFSRYSMSWVRQTPEKRLELVAQINSVGNSTYYPDTVKGRFTISRDNAEYTLSLQMSGLRSDDTATYYCASGDYWGQGTTLTVSS

SEQ ID NO: 4634 - protein, 120 aa, Artificial Sequence
  source: /note="Description of Artificial Sequence: Synthetic polypeptide"
QVQLVESGGGVVQPGRSLRLSCAFSGFSLSTSGMSVGWIRQAPGKGLEWLAHIWWDDDKYYNPSLKSRLTISKDTSKNTVYLQMNSLRAEDTAVYYCARRTTTADYFAYWGQGTTVTVSS

SEQ ID NO: 4635 - protein, 120 aa, Artificial Sequence
  source: /note="Description of Artificial Sequence: Synthetic polypeptide"
QVQLVESGGGVVQPGRSLRLSCAFSGFTLSTSGMSVGWIRQAPGKGLEWVAHIWWDDDKYYNPSLKSRFTISKDTSKNTLYLQMNSLRAEDTAVYYCARRTTTADYFAYWGQGTTVTVSS

SEQ ID NO: 4636 - protein, 120 aa, Artificial Sequence
  source: /note="Description of Artificial Sequence: Synthetic polypeptide"
QVQLVESGGGVVQPGRSLRLSCAFSGFTLSTSGMSVGWIRQAPGKGLEWVAHIWWDDDKYYNPSLKSRFTISKDNSKNTLYLQMNSLRAEDTAVYYCARRTTTADYFAYWGQGTTVTVSS

SEQ ID NO: 4637 - protein, 120 aa, Artificial Sequence; identical to SEQ ID NO: 4308
  source: /note="Description of Artificial Sequence: Synthetic polypeptide"

SEQ ID NO: 4638 - protein, 120 aa, Artificial Sequence
  source: /note="Description of Artificial Sequence: Synthetic polypeptide"
QVQLVESGGGVVQPGRSLRLSCAFSGFTLSTSGMSVGWIRQAPGKGLEWLAHIWWDDDKYYNPSLKSRLTISKDTSKNTVYLQMNSLRAEDTAVYYCARRTTTADYFAYWGQGTTVTVSS

SEQ ID NO: 4639 - protein, 120 aa, Artificial Sequence; identical to SEQ ID NO: 4290
  source: /note="Description of Artificial Sequence: Synthetic polypeptide"

SEQ ID NO: 4640 - protein, 120 aa, Artificial Sequence; identical to SEQ ID NO: 4291
  source: /note="Description of Artificial Sequence: Synthetic polypeptide"

SEQ ID NO: 4641 - protein, 120 aa, Artificial Sequence; identical to SEQ ID NO: 4292
  source: /note="Description of Artificial Sequence: Synthetic polypeptide"

SEQ ID NO: 4642 - protein, 120 aa, Artificial Sequence; identical to SEQ ID NO: 4293
  source: /note="Description of Artificial Sequence: Synthetic polypeptide"

SEQ ID NO: 4643 - protein, 120 aa, Artificial Sequence; identical to SEQ ID NO: 4294
  source: /note="Description of Artificial Sequence: Synthetic polypeptide"

SEQ ID NO: 4644 - protein, 121 aa, Artificial Sequence; identical to SEQ ID NO: 4295
  source: /note="Description of Artificial Sequence: Synthetic polypeptide"

SEQ ID NO: 4645 - protein, 121 aa, Artificial Sequence; identical to SEQ ID NO: 4296
  source: /note="Description of Artificial Sequence: Synthetic polypeptide"

SEQ ID NO: 4646 - protein, 120 aa, Artificial Sequence; identical to SEQ ID NO: 4297
  source: /note="Description of Artificial Sequence: Synthetic polypeptide"

SEQ ID NO: 4647 - protein, 120 aa, Artificial Sequence; identical to SEQ ID NO: 4298
  source: /note="Description of Artificial Sequence: Synthetic polypeptide"

SEQ ID NO: 4648 - protein, 120 aa, Artificial Sequence; identical to SEQ ID NO: 4299
  source: /note="Description of Artificial Sequence: Synthetic polypeptide"

SEQ ID NO: 4649 - protein, 120 aa, Artificial Sequence; identical to SEQ ID NO: 4300
  source: /note="Description of Artificial Sequence: Synthetic polypeptide"

SEQ ID NO: 4650 - protein, 120 aa, Artificial Sequence; identical to SEQ ID NO: 4301
  source: /note="Description of Artificial Sequence: Synthetic polypeptide"

SEQ ID NO: 4651 - protein, 120 aa, Artificial Sequence; identical to SEQ ID NO: 4302
  source: /note="Description of Artificial Sequence: Synthetic polypeptide"

SEQ ID NO: 4652 - protein, 120 aa, Artificial Sequence; identical to SEQ ID NO: 4303
  source: /note="Description of Artificial Sequence: Synthetic polypeptide"

SEQ ID NO: 4653 - protein, 120 aa, Artificial Sequence; identical to SEQ ID NO: 4304
  source: /note="Description of Artificial Sequence: Synthetic polypeptide"

SEQ ID NO: 4654 - protein, 120 aa, Artificial Sequence
  source: /note="Description of Artificial Sequence: Synthetic polypeptide"
QVQLVESGGGVVQPGRSLRLSCAFSGFTLSTSGMSVGWIRQAPGKGLEWLAHIWWDDDKYYNPSLKSRFTISKDNSKNTLYLQMNSLRAEDTAVYYCARRTTTADYFAYWGQGTTVTVSS

SEQ ID NO: 4655 - protein, 134 aa, Artificial Sequence
  source: /note="Description of Artificial Sequence: Synthetic polypeptide"
MKYLLPTAAAGLLLLAAQPAMADVVMTQSPLSLPVTPGEPASISCRSSQSLLHSNGYNYLDWYLQKPGQSPQLLIYLGSNRASGVPDRFSGSGSGTDFTLKISRVEAEDVGVYYCMQALQTPYTFGQGTKLEIK

SEQ ID NO: 4656 - protein, 120 aa, Artificial Sequence
  source: /note="Description of Artificial Sequence: Synthetic polypeptide"
MRLPAQLLGLLMLWVSGSSGDIVMTQSPLSLPVTPGEPASISCRSSQSLLHSNGYNYLDWYLQKPGQSPQLLIYLGSNRASGVPDRFSGSGSGTDFTLKISRVEAEDVGVYYCMQALQTP

SEQ ID NO: 4657 - protein, 119 aa, Artificial Sequence [sequence omitted]

SEQ ID NO: 4658 - protein, 120 aa, Artificial Sequence; identical to SEQ ID NO: 4634
  source: /note="Description of Artificial Sequence: Synthetic polypeptide"

SEQ ID NO: 4659 - protein, 119 aa, Artificial Sequence
  source: /note="Description of Artificial Sequence: Synthetic polypeptide"
EVQLLESGGGLVQPGGSLRLSCAASGFTFSNYGMSWVRQAPGKGLEWVASIRSGGGRTYYSDNVKGRFTISRDNAKNSLYLQMNSLRAEDTALYYCVRYDHYSGSSDYWGQGTLVTVSS

SEQ ID NO: 4660 - protein, 120 aa, Artificial Sequence; identical to SEQ ID NO: 4636
  source: /note="Description of Artificial Sequence: Synthetic polypeptide"

SEQ ID NO: 4661 - protein, 112 aa, Artificial Sequence
  source: /note="Description of Artificial Sequence: Synthetic polypeptide"
EVQLVESGGGLVKPGGSLRLSCAASGYTFSRYSMSWVRQAPGKGLEWVGQINIRGCNTYYPDTVKGRFTISRDDSKNTLYLQMNSLKTEDTAVYYCTTGDFWGQGTLVTVSS

SEQ ID NO: 4662 - protein, 112 aa, Artificial Sequence
  source: /note="Description of Artificial Sequence: Synthetic polypeptide"
EVQLVESGGGLVKPGGSLRLSCAASGYTFSRYSMSWVRQAPGKGLEWVGQINIRGNNTYYPDTVKGRFTISRDDSKNTLYLQMNSLKTEDTAVYYCTTGDFWGQGTLVTVSS

SEQ ID NO: 4663 - protein, 120 aa, Artificial Sequence
  source: /note="Description of Artificial Sequence: Synthetic polypeptide"
EVQLVESGGGVVQPGGSLRLSCAASGFTFRNYDMHWVRQGIGKGLEWIGEINRSGATNYNPSLKSRFTISRENAKDSLYLQMNSLRVGDAAVYYCARGAGRWAPLGAFDIWGQGTLVIVS

SEQ ID NO: 4664 - protein, 120 aa, Artificial Sequence
  source: /note="Description of Artificial Sequence: Synthetic polypeptide"
EVQLVESGGGVVQPGGSLRLSCAASGFTFRGYWMSWVRQAPGKGLEWVASVKQDGSEKYYVDSVKGRFTISRDTSKNTLYLQMNSLRAEDTAVYYCARDGSSWYRDWFDPWGQGTLVTVS

SEQ ID NO: 4665 - protein, 120 aa, Artificial Sequence
  source: /note="Description of Artificial Sequence: Synthetic polypeptide"
EVQLVESGGGVVQPGGSLRLSCAASGFTFRSYWMSWVRQAPGKGLEWVASVKQFFSGPLATGSVKGRFTISRDNAKNTLYLQMNSLRAEDTAVYYCARDASSWYRDWFDPWGQGTLVTVS

SEQ ID NO: 4666 - protein, 120 aa, Artificial Sequence
  source: /note="Description of Artificial Sequence: Synthetic polypeptide"
EVQLVESGGGVVQPGGSLRLSCAASGFTFRGYWMSWVRQAPGKGLEWVASVKQDGSEKYYVDSVKGRPTISRDNAKNQFSLKLSSVTAADTAVYYCARDGSSWYRDWFDPWGQGTLVSVS

SEQ ID NO: 4667 - protein, 120 aa, Artificial Sequence
  source: /note="Description of Artificial Sequence: Synthetic polypeptide"
EVQLVESGGGVVQPGGSLRLSCAASGFTFRNYDMHWVRQGIGKGLEWVGRIGTAGRTNYNPSLKGRFTISRENAKDSLYLQMNSLRVGDAAVYYCARGAGRWAPLGAFDIWGQGTLVIVS

SEQ ID NO: 4668 - protein, 120 aa, Artificial Sequence
  source: /note="Description of Artificial Sequence: Synthetic polypeptide"
EVQLVESGGGVVQPGGSLRLSCAASGFTFRNYDMHWVRQGIGKGLVWVSRIGTAGDRYYAGSVKGRFTISRENAKDSLYLQMNSLRVGDAAVYYCARGAGRWAPLGAFDIWGQGTLVIVS

SEQ ID NO: 4669 - protein, 120 aa, Artificial Sequence
  source: /note="Description of Artificial Sequence: Synthetic polypeptide"
EVQLVESGGGVVQPGGSLRLSCAASGFTFSSYWMSWVRQAPGKGLEWVASVKQDGSEKYYVDSVKGRFTISRDNAKNTLYLQMNSLRAEDTAVYYCARDGSSWYRDWFDPWGQGTLVTVS

SEQ ID NO: 4670 - protein, 120 aa, Artificial Sequence
  source: /note="Description of Artificial Sequence: Synthetic polypeptide"
EVQLVESGGGVVQPGGSLRLSCAASGFTFRSYDMSWVRQAPGKGLEWVASVKQFFSGSAATGSVKGRFTISRDNAKNTLYLQMNSLRAEDTAVYYCARDGSSWYRDWFDPWGQGTLVTVS

SEQ ID NO: 4671 - protein, 120 aa, Artificial Sequence
  source: /note="Description of Artificial Sequence: Synthetic polypeptide"
EVQLVESGGGVVQPGGSLRLSCAASGFTFRSYDMSWVRQAPGKGLEWVASVKQDGSEKYYVDSVKGRPTISRDNAKNQLSLKLSSVTAADTAVYYCARDGSSWYRDWFDPWGQGTLVTVS

SEQ ID NO: 4672 - protein, 120 aa, Artificial Sequence
  source: /note="Description of Artificial Sequence: Synthetic polypeptide"
EVQLVESGGGVVQPGGSLRLSCAASGFTFRGYWMSWVRQAPGKGLEWVASVKQDGSEKYYVDSVKGRLTLSVDTSKNQFSLKLSSVTAADTAVYYCARDGSSWYRDWFDPWGQGTLVSVS

SEQ ID NO: 4673 - protein, 120 aa, Artificial Sequence
  source: /note="Description of Artificial Sequence: Synthetic polypeptide"
EVQLVESGGGVVQPGGSLRLSCAASGFTFRGYWMSWVRQAPGKGLEWVASVKQDGSEKYYVDSVKGRVTISVETSKNQFSLKLSSVTAADTAVYYCARDGSSWYRDWFDPWGQGTLVSVS

SEQ ID NO: 4674 - protein, 120 aa, Artificial Sequence
  source: /note="Description of Artificial Sequence: Synthetic polypeptide"
EVQLVESGGGVVQPGGSLRLSCAASGFTFRSYWMHWVRQAPGKGLEWVASVKQDGSEKYYVDSVKGRVTISLDTSKNQFSLKLSSVTAADTAVYYCARDGSSWYRDWFDPWGQGTLVSVS

SEQ ID NO: 4675 - protein, 120 aa, Artificial Sequence
  source: /note="Description of Artificial Sequence: Synthetic polypeptide"
EVQLVESGGGVVQPGGSLRLSCAASGITFRSYDMSWVRQAPGKGLEWVASVKQDGSEKYYVDSVKGRFTVSRDNAKNTLYLQMNSLRAEDTAVYYCARDAGRWADLAFDIWGQGTLVTVS

SEQ ID NO: 4676 - protein, 120 aa, Artificial Sequence
  source: /note="Description of Artificial Sequence: Synthetic polypeptide"
EVQLVESGGGVVQPGGSLRLSCAASGFTFRSYWMHWVRQAPGKGLEWVASVKQDGSEKYYVDSVKGRVTITADRAKNTLYLQMNSLRAEDTAVYYCARDGSSWYRDWFDPWGQGTLVTVS

SEQ ID NO: 4677 - protein, 120 aa, Artificial Sequence
  source: /note="Description of Artificial Sequence: Synthetic polypeptide"
EVQLVESGGGVVQPGGSLRLSCAASGFTFRNYWMSWVRQAPGKGLEWVASVKQFFSGPLATGSVKGRFTISRDTSKNTLYLQMNSLRAEDTAVYYCARDGSSWYRDWFDPWGQGTLVTVS

SEQ ID NO: 4678 - protein, 120 aa, Artificial Sequence
  source: /note="Description of Artificial Sequence: Synthetic polypeptide"
EVQLVESGGGVVQPGGSLRLSCAASGFTFRGYWMSWVRQAPGKGLEWVASVKQFFSGKYYAGSVKGRVTISVETSKNQFSLKLSSVTAADTAVYYCARDASSWYRDWFDPWGQGTLVSVS

SEQ ID NO: 4679 - protein, 125 aa, Artificial Sequence
  source: /note="Description of Artificial Sequence: Synthetic polypeptide"
QVELVESGGGLVQPGGSLRLSCAASGFTFSSYAMSWVRQAPGKGLEWVSAINASGTRTYYADSVKGRFTISRDNSKNTLYLQMSLRAEDTAVYYCARGKGNTHKPYGYVRYFDVWGQGTLVTVSS

SEQ ID NO: 4680 - protein, 135 aa, Artificial Sequence
  source: /note="Description of Artificial Sequence: Synthetic polypeptide"
LLLVAAPRWVLSQLQLQESGPGLVKPSETLSLTCTVSGGSISRGSHYWGWIRQPPGKGLEWIGSIYYSGNTYFNPSLKSRVTISVDTSKNQFSLKLSSVTAADTAVYYCARLGPDDYTLDGMDVWGQGTTVTVSS

SEQ ID NO: 4681 - protein, 118 aa, Artificial Sequence
  source: /note="Description of Artificial Sequence: Synthetic polypeptide"
MKHLWFFLLLVAAPRWVLSQVQLQESGPGLVKPSETLSLTCTVSGGSVSSGGYYWSWIRQPPGKGLEWIGYIYYSGSTNYNPSLKSRVTISVDTSKNQFSLKLSSVTAADTAVYYCAR

SEQ ID NO: 4682 - protein, 118 aa, Artificial Sequence
  source: /note="Description of Artificial Sequence: Synthetic polypeptide"
MKHLWFFLLLVAAPRWVLSQLQLQESGPGLVKPSETLSLTCTVSGGSISSSSYYWGWIRQPPGKGLEWIGSIYYSGSTYYNPSLKSRVTISVDTSKNQFSLKLSSVTAADTAVYYCAR

SEQ ID NO: 4683 - protein, 142 aa, Artificial Sequence
  source: /note="Description of Artificial Sequence: Synthetic polypeptide"
MDRLTSSFLLLIVPAYVLSQVTLKESGPGILQPSQTLSLTCSFSGFSLSTNGMGVSWIRQPSGKGLEWLAHIYWDEDKRYNPSLKSRLTISKDTSNNQVFLKITNVDTADTATYYCARRRIIYDVEDYFDYWGQGTTLTVSS

SEQ ID NO: 4684 - protein, 142 aa, Artificial Sequence
  source: /note="Description of Artificial Sequence: Synthetic polypeptide"
MKHLWFFLLLVAAPRWVLSQVQLQESGPGLVKPSETLSLTCTFSGFSLSTNGMGVSWIRQPPGKGLEWLAHIYWDEDKRYNPSLKSRLTISKDTSKNQVSLKLSSVTAADTAVYYCARRRIIYDVEDYFDYWGQGTTVTVSS

SEQ ID NO: 4685 - protein, 122 aa, Artificial Sequence
  source: /note="Description of Artificial Sequence: Synthetic polypeptide"
QVQLVQSGPEVKKPGASVKVSCTASGYTFTEYTMHWVRQAPGQGLEWMGGVNPYNDNTSYIRKLQGRVTLTVDRSSSTAYMELTSLTSDDTAVYYCARYGGLRPYYFPMDFWGQGTLVTVSS

SEQ ID NO: 4686 - protein, 123 aa, Artificial Sequence
  source: /note="Description of Artificial Sequence: Synthetic polypeptide"
QVQLVQSGAEVKKPGASVKVSCTASGYSFTGYFLHWVRQAPGQGLEWMGRINPDSGDTYAQKFQDRVTLTRDTSIGTVYMELTSLTSDDTAVYYCARVPRGTYLDPWDYFDYWGQGTLVTVSS

SEQ ID NO: 4687 - protein, 122 aa, Artificial Sequence
  source: /note="Description of Artificial Sequence: Synthetic polypeptide"
QVQLQQSGPELVKPGASVKISCKTSGYTFTEYTMHWVKQSHGKSLEWIGGVNPYNDNTSYIRKLQGKVTLTVDRSSSTAYMELRSLTSEDSAVYFCARYGGLRPYYFPMDFWGQGTSVTVSS

SEQ ID NO: 4688 - protein, 124 aa, Artificial Sequence
  source: /note="Description of Artificial Sequence: Synthetic polypeptide"
QVQLVQSGGGLVQPGGSLRLSCAASGFTFSSYAMSWVRQAPGKGLEWVSAISGSGGSTYYADSVKGRFTISRDNSKNTLYLQMNSLRAEDTAVYYCAAHVLRFLEWLPDAFDIWGQGTLVTVSS

SEQ ID NO: 4689 - protein, 108 aa, Artificial Sequence
  source: /note="Description of Artificial Sequence: Synthetic polypeptide"
EIVLTQSPSSLSASLGDRVTITCRASQSISSYLNWYQQKPGKAPKLLIYAASSSQSGVPSRFRGSESGTDFTLTISNLQPEDFATYYCQQSYRTPFTFGPGTKVEIKR

SEQ ID NO: 4690 - protein, 123 aa, Artificial Sequence
  source: /note="Description of Artificial Sequence: Synthetic polypeptide"
VQLVQSGAEVKKPGASVKVSCTASGYSFTGYFLHWVRQAPGQGLEWMGRINPDSGDTIYAQKFQDRVTLTRDTSIGTVYMELTSLTSDDTAVYYCARVPRGTYLDPWDYFDYWGQGTLVTVSS

SEQ ID NO: 4691 - protein, 122 aa, Artificial Sequence
  source: /note="Description of Artificial Sequence: Synthetic polypeptide"
EVQLVESGGGLVQPGGSLRLSCAASGFTFSSYAMSWVRQAPGKGLEWVSAISGSGGSTYYADSVKGRFTISRDNSKNTLYLQMNSLRAEDTAVYYCAKDAGIAVAGTGFDYWGQGTLVTVSS

SEQ ID NO: 4692 - protein, 119 aa, Artificial Sequence
  source: /note="Description of Artificial Sequence: Synthetic polypeptide"
EVQLVESGGGLVQPGGSLRLSCAGSGFTFSNYGMSWVRQAPGKGLEWVASIRSGGGRTYYSDNVKGRFTISRENAKNSLYLQMNSLRAEDTAVYYCVRYDHYSGSSDYWGQGTLVTVSS

SEQ ID NO: 4693 - protein, 219 aa, Artificial Sequence; identical to SEQ ID NO: 4307
  source: /note="Description of Artificial Sequence: Synthetic polypeptide"

SEQ ID NO: 4694 - protein, 449 aa, Artificial Sequence
  source: /note="Description of Artificial Sequence: Synthetic polypeptide"
EVQLVESGGGLVQPGGSLRLSCAGSGFTFSNYGMSWVRQAPGKGLEWVASIRSGGGRTYYSDNVKGRFTISRENAKNSLYLQMNSLRAEDTAVYYCVRYDHYSGSSDYWGQGTLVTVSSASTKGPSVFPLAPSSKSTSGGTAALGCLVKDYFPEPVTVSWNSGALTSGVHTFPAVLQSSGLYSLSSVVTVPSSSLGTQTYICNVNHKPSNTKVDKKVEPKSCDKTHTCPPCPAPELLGGPSVFLFPPKPKDTLMISRTPEVTCVVVDVSHEDPEVKFNWYVDGVEVHNAKTKPREEQYNSTYRVVSVLTVLHQDWLNGKEYKCKVSNKALPAPIEKTISKAKGQPREPQVYTLPPSRDELTKNQVSLTCLVKGFYPSDIAVEWESNGQPENNYKTTPPVLDSDGSFFLYSKLTVDKSRWQQGNVFSCSVMHEALHNHYTQKSLSLSPGK

SEQ ID NO: 4695 - protein, 117 aa, Artificial Sequence
  source: /note="Description of Artificial Sequence: Synthetic polypeptide"
QVQLQQSDAELVKPGASVKISCKVSGYTFTDHTIHWMKQRPEQGLEWIGYIYPRDGSTKYNEKFKGKATLTADKSSSTAYMQLNSLTSEDSAVYFCARDYGYAFDYWGQGTTLTVSS

SEQ ID NO: 4696 - protein, 117 aa, Artificial Sequence; identical to SEQ ID NO: 4695
  source: /note="Description of Artificial Sequence: Synthetic polypeptide"

SEQ ID NO: 4697 - protein, 112 aa, Artificial Sequence
  source: /note="Description of Artificial Sequence: Synthetic polypeptide"
EVQLVESGGGLVQPGGSLKLSCTASGFTFSSYGMSWVRQTPDKRLELVASIKNNGGSTYYPDSLKGRFTISRDNAKNTLYLQMSSLKSEDTAMYYCASGDYWGQGTTLTVSS

SEQ ID NO: 4698 - protein, 112 aa, Artificial Sequence
  source: /note="Description of Artificial Sequence: Synthetic polypeptide"
EVQLVESGGGLVQPGGSLKLSCAASGFTFSSYGMSWVRQTPDKRLELVASINSNGGSTYYPDSVKGRFTISRDNAKNTLYLQMSSLKSEDTAMYYCASGDYWGQGSTLTVSS

SEQ ID NO: 4699 - protein, 98 aa, Artificial Sequence
  source: /note="Description of Artificial Sequence: Synthetic polypeptide"
EVQLLESGGGLVQPGGSLRLSCAASGFTFSSYAMSWVRQAPGKGLEWVSAISGSGGSTYYADSVKGRFTISRDNSKNTLYLQMNSLRAEDTAVYYCAK

SEQ ID NO: 4700 - protein, 138 aa, Artificial Sequence
  source: /note="Description of Artificial Sequence: Synthetic polypeptide"
MNFGLSLIFLVLVLKGVQCEVQLLESGGGLVQPGGSLRLSCAASGFTFSNYGMSWVRQAPGKGLEWVASIRSGGGRTYYSDNVKGRFTISRDNSKNTLYLQMNSLRAEDTAVYYCVRYDHYSGSSDYWGQGTLVTVSS

SEQ ID NO: 4701 - protein, 142 aa, Artificial Sequence
  source: /note="Description of Artificial Sequence: Synthetic polypeptide"
MDRLTSSFLLLIVPAYVLSQATLKESGPGILQSSQTLSLTCSFSGFSLSTSGMGVSWIRQPSGKGLEWLAHIYWDDDKRYNPSLKSRLTISKDTSRKQVFLKITSVDPADTATYYCVRRPITPVLVDAMDYWGQGTSVTVSS

SEQ ID NO: 4702 - protein, 138 aa, Artificial Sequence
  source: /note="Description of Artificial Sequence: Synthetic polypeptide"
MNFGLSLIFLVLVLKGVQCEVKLVESGGGLVKPGASLKLSCAASGFTFSNYGMSWVRQNSDKRLEWVASIRSGGGRTYYSDNVKGRFTISRENAKNTLYLQMSSLKSEDTALYYCVRYDHYSGSSDYWGQGTTVTVSS

SEQ ID NO: 4703 - protein, 138 aa, Artificial Sequence
  source: /note="Description of Artificial Sequence: Synthetic polypeptide"
MNFGLSLIFLVLVLKGVQCEVQLLESGGGLVQPGGSLRLSCAASGFTFSNYGMSWVRQAPGKGLEWVASIRSGGGRTYYSDNVKGRFTISRDNAKNSLYLQMNSLRAEDTALYYCVRYDHYSGSSDYWGQGTLVTVSS

SEQ ID NO: 4704 - protein, 121 aa, Artificial Sequence
  source: /note="Description of Artificial Sequence: Synthetic polypeptide"
EVQLLESGGGLVQPGGSLRLSCAASGFTFSSYAVSWVRQAPGKGLEWVSAISGSGGSTYYADSVKGRFTISRDNAKNSLYLQMNSLRAEDTALYYCAKDNYDFWSGTFDYWGQGTLVTVSS

SEQ ID NO: 4705 - protein, 112 aa, Artificial Sequence [sequence omitted]

SEQ ID NO: 4706 - protein, 98 aa, Artificial Sequence
  source: /note="Description of Artificial Sequence: Synthetic polypeptide"
EVQLVESGGGLVQPGGSLRLSCAASGFTFSSYSMNWVRQAPGKGLEWVSYISSSSSTIYYADSVKGRFTISRDNAKNSLYLQMNSLRAEDTAVYYCAR

SEQ ID NO: 4707 - protein, 115 aa, Artificial Sequence
  source: /note="Description of Artificial Sequence: Synthetic polypeptide"
EVQLVESGGGLVQPGGSLRLSCAASGFTFSDNGMAWVRQAPGKGLEWVSFISNLAYSIDYADTVTGRFTISRDNAKNSLYLQMNSLRAEDTAVYYCVSGTWFAYWGQGTLVTVSS

SEQ ID NO: 4708 - protein, 115 aa, Artificial Sequence
  source: /note="Description of Artificial Sequence: Synthetic polypeptide"
EVQLVESGGGLVQPGGSLRLSCAVSGFTFSDNGMAWVRQAPGKGLEWVSFISNLAYSIDYADTVTGRFTISRDNAKNSLYLQMNSLRAEDTAVYYCVSGTWFAYWGQGTLVTVSS

SEQ ID NO: 4709 - protein, 115 aa, Artificial Sequence
  source: /note="Description of Artificial Sequence: Synthetic polypeptide"
EVQLVESGGGLVQPGGSLRLSCAASGFTFSDNGMAWVRQAPGKGLEWISFISNLAYSIDYADTVTGRFTISRDNAKNSLYLQMNSLRAEDTAVYYCVSGTWFAYWGQGTLVTVSS

SEQ ID NO: 4710 - protein, 127 aa, Artificial Sequence
  source: /note="Description of Artificial Sequence: Synthetic polypeptide"
EVQLVESGPGLVKPAETLSLTCTVSGGSIRSGSICWYWIRQPPGKGLEWIGYFCYSGATFYTPSLRGRLTISVDASKNQLSLSLSSVTAADTAVYYCARRAGENSGGIEPYYGMDVWGQGTTVTVSS

SEQ ID NO: 4711 - protein, 121 aa, Artificial Sequence
  source: /note="Description of Artificial Sequence: Synthetic polypeptide"
QVQLQESGPGLVKPSETLSLTCTVSGGSISRRSYYWGWIRQSPGKGLEWSGSIHYSGSTYYNPSLKSRVTISVDTSKNQFSLKLSSVTAADTAVYYCARSRWGSSWVFDYWGQGTLVTVSS

SEQ ID NO: 4712 - protein, 124 aa, Artificial Sequence
  source: /note="Description of Artificial Sequence: Synthetic polypeptide"
QVQLVESGGGVVQPGRSLRLSCAASGFAFSSYGMHWVRQAPGKGLEWVAVIWFDGTKKYYTDSVKGRFTISRDNSKNTLYLQMNTLRAEDTAVYYCARDRGIGARRGPYYMDVWGKGTTVTVSS

SEQ ID NO: 4713 - protein, 124 aa, Artificial Sequence
  source: /note="Description of Artificial Sequence: Synthetic polypeptide"
EVQLVQSGGGVVQPGRSLRLSCAASGFAFSSYGIHWVRQAPGKGLEWVAVIWFDGTKKYYTDSVKGRFTISRDNSKNTLYLQMNTLRAEDTAVYYCARDRGIGARRGPYYMDVWGKGTTVTVSS

SEQ ID NO: 4714 - protein, 121 aa, Artificial Sequence; identical to SEQ ID NO: 4711
  source: /note="Description of Artificial Sequence: Synthetic polypeptide"

SEQ ID NO: 4715 - protein, 107 aa, Artificial Sequence
  source: /note="Description of Artificial Sequence: Synthetic polypeptide"
DIQLTQSPSSLSASVGDRVTITCRASQSISSYLNWYQQKPGKAPKLLIYAASSLQSGVPSRFSGSGSGTDFTLTISSLQPEDFATYYCQQSYSTRTFGQGTKVEIKR

SEQ ID NO: 4716 - protein, 124 aa, Artificial Sequence
  source: /note="Description of Artificial Sequence: Synthetic polypeptide"
EVQLVQSGGGVVQPGRSLRLSCAASGFAFSSYGMHWVRQAPGKGLEWVAVIWFDGTKKYYTDSVKGRFTISRDNSKNTLYLQMNTLRAEDTAVYYCARDRGIGARRGPYYMDVWGKGTTVTVSS

SEQ ID NO: 4717 - protein, 113 aa, Artificial Sequence; identical to SEQ ID NO: 3955
  source: /note="Description of Artificial Sequence: Synthetic polypeptide"

SEQ ID NO: 4718 - protein, 113 aa, Artificial Sequence; identical to SEQ ID NO: 3956
  source: /note="Description of Artificial Sequence: Synthetic polypeptide"

SEQ ID NO: 4719 - protein, 122 aa, Artificial Sequence; identical to SEQ ID NO: 3957
  source: /note="Description of Artificial Sequence: Synthetic polypeptide"

SEQ ID NO: 4720 - protein, 117 aa, Artificial Sequence; identical to SEQ ID NO: 3958
  source: /note="Description of Artificial Sequence: Synthetic polypeptide"

SEQ ID NO: 4721 - protein, 115 aa, Artificial Sequence; identical to SEQ ID NO: 3959
  source: /note="Description of Artificial Sequence: Synthetic polypeptide"

SEQ ID NO: 4722 - protein, 117 aa, Artificial Sequence; identical to SEQ ID NO: 3960
  source: /note="Description of Artificial Sequence: Synthetic polypeptide"

SEQ ID NO: 4723 - protein, 116 aa, Artificial Sequence; identical to SEQ ID NO: 3961
  source: /note="Description of Artificial Sequence: Synthetic polypeptide"

SEQ ID NO: 4724 - protein, 121 aa, Artificial Sequence; identical to SEQ ID NO: 3962
  source: /note="Description of Artificial Sequence: Synthetic polypeptide"

SEQ ID NO: 4725 - protein, 118 aa, Artificial Sequence; identical to SEQ ID NO: 3950
  source: /note="Description of Artificial Sequence: Synthetic polypeptide"

SEQ ID NO: 4726 - protein, 119 aa, Artificial Sequence; identical to SEQ ID NO: 3951
  source: /note="Description of Artificial Sequence: Synthetic polypeptide"

SEQ ID NO: 4727 - protein, 128 aa, Artificial Sequence; identical to SEQ ID NO: 3952
  source: /note="Description of Artificial Sequence: Synthetic polypeptide"

SEQ ID NO: 4728 - protein, 116 aa, Artificial Sequence; identical to SEQ ID NO: 3953
  source: /note="Description of Artificial Sequence: Synthetic polypeptide"

SEQ ID NO: 4729 - protein, 120 aa, Artificial Sequence; identical to SEQ ID NO: 3954
  source: /note="Description of Artificial Sequence: Synthetic polypeptide"

SEQ ID NO: 4730 - protein, 123 aa, Artificial Sequence
  source: /note="Description of Artificial Sequence: Synthetic polypeptide"
QVTLKESGPVLVKPTETLTLTCTFSGFSLSTSGMGVSWIRQPPGKALEWLAHIYWDDDKRYNPSLKSRLTISKDTSKSQVVLTMTNMDPVDTATYYCVRRPITPVLVDAMDYWGQGTLVTVSS

SEQ ID NO: 4731 - protein, 453 aa, Artificial Sequence
  source: /note="Description of Artificial Sequence: Synthetic polypeptide"
QVTLKESGPVLVKPTETLTLTCTFSGFSLSTSGMGVSWIRQPPGKALEWLAHIYWDDDKRYNPSLKSRLTISKDTSKSQVVLTMTNMDPVDTATYYCVRRPITPVLVDAMDYWGQGTLVTVSSASTKGPSVFPLAPSSKSTSGGTAALGCLVKDYFPEPVTVSWNSGALTSGVHTFPAVLQSSGLYSLSSVVTVPSSSLGTQTYICNVNHKPSNTKVDKKVEPKSCDKTHTCPPCPAPELLGGPSVFLFPPKPKDTLMISRTPEVTCVVVDVSHEDPEVKFNWYVDGVEVHNAKTKPREEQYNSTYRVVSVLTVLHQDWLNGKEYKCKVSNKALPAPIEKTISKAKGQPREPQVYTLPPSRDELTKNQVSLTCLVKGFYPSDIAVEWESNGQPENNYKTTPPVLDSDGSFFLYSKLTVDKSRWQQGNVFSCSVMHEALHNHYTQKSLSLSPGK

SEQ ID NO: 4732 - protein, 123 aa, Artificial Sequence
  source: /note="Description of Artificial Sequence: Synthetic polypeptide"
  MOD_RES (1)..(2): Any amino acid
  MOD_RES (64)..(64): Any amino acid
  MOD_RES (77)..(78): Any amino acid
  MOD_RES (83)..(84): Any amino acid
  MOD_RES (86)..(87): Any amino acid
  MOD_RES (118)..(118): Any amino acid
XXTLKESGPVLVKPTETLTLTCTFSGFSLSTSGMGVSWIRQPPGKALEWLAHIYWDDDKRYNPXLKSRLTISKDTSXXQVVLXXTXXDPVDTATYYCVRRPITPVLVDAMDYWGQGTXVTVSS

SEQ ID NO: 4733 - protein, 98 aa, Artificial Sequence; identical to SEQ ID NO: 3963
  source: /note="Description of Artificial Sequence: Synthetic polypeptide"

SEQ ID NO: 4734 - protein, 125 aa, Artificial Sequence; identical to SEQ ID NO: 3964
  source: /note="Description of Artificial Sequence: Synthetic polypeptide"

SEQ ID NO: 4735 - protein, 126 aa, Artificial Sequence; identical to SEQ ID NO: 3965
  source: /note="Description of Artificial Sequence: Synthetic polypeptide"

SEQ ID NO: 4736 - protein, 126 aa, Artificial Sequence; identical to SEQ ID NO: 3966
  source: /note="Description of Artificial Sequence: Synthetic polypeptide"

SEQ ID NO: 4737 - protein, 126 aa, Artificial Sequence; identical to SEQ ID NO: 3967
  source: /note="Description of Artificial Sequence: Synthetic polypeptide"

SEQ ID NO: 4738 - protein, 118 aa, Artificial Sequence; identical to SEQ ID NO: 3968
  source: /note="Description of Artificial Sequence: Synthetic polypeptide"

SEQ ID NO: 4739 - protein, 133 aa, Artificial Sequence; identical to SEQ ID NO: 3969
  source: /note="Description of Artificial Sequence: Synthetic polypeptide"

SEQ ID NO: 4740 - protein, 109 aa, Artificial Sequence; identical to SEQ ID NO: 3970
  source: /note="Description of Artificial Sequence: Synthetic polypeptide"

SEQ ID NO: 4741 - protein, 113 aa, Artificial Sequence; identical to SEQ ID NO: 3971
  source: /note="Description of Artificial Sequence: Synthetic polypeptide"

SEQ ID NO: 4742 - protein, 113 aa, Artificial Sequence; identical to SEQ ID NO: 3972
  source: /note="Description of Artificial Sequence: Synthetic polypeptide"

SEQ ID NO: 4743 - protein, 113 aa, Artificial Sequence; identical to SEQ ID NO: 3973
  source: /note="Description of Artificial Sequence: Synthetic polypeptide"

SEQ ID NO: 4744 - protein, 113 aa, Artificial Sequence; identical to SEQ ID NO: 3974
  source: /note="Description of Artificial Sequence: Synthetic polypeptide"

SEQ ID NO: 4745 - protein, 113 aa, Artificial Sequence; identical to SEQ ID NO: 3975
  source: /note="Description of Artificial Sequence: Synthetic polypeptide"

SEQ ID NO: 4746 - protein, 113 aa, Artificial Sequence; identical to SEQ ID NO: 3976
  source: /note="Description of Artificial Sequence: Synthetic polypeptide"

SEQ ID NO: 4747 - protein, 113 aa, Artificial Sequence; identical to SEQ ID NO: 3977
  source: /note="Description of Artificial Sequence: Synthetic polypeptide"

SEQ ID NO: 4748 - protein, 113 aa, Artificial Sequence; identical to SEQ ID NO: 3978
  source: /note="Description of Artificial Sequence: Synthetic polypeptide"

SEQ ID NO: 4749 - protein, 113 aa, Artificial Sequence; identical to SEQ ID NO: 3979
  source: /note="Description of Artificial Sequence: Synthetic polypeptide"

SEQ ID NO: 4750 - protein, 113 aa, Artificial Sequence; identical to SEQ ID NO: 3980
  source: /note="Description of Artificial Sequence: Synthetic polypeptide"

SEQ ID NO: 4751 - protein, 113 aa, Artificial Sequence; identical to SEQ ID NO: 3981
  source: /note="Description of Artificial Sequence: Synthetic polypeptide"

SEQ ID NO: 4752 - protein, 113 aa, Artificial Sequence; identical to SEQ ID NO: 3982
  source: /note="Description of Artificial Sequence: Synthetic polypeptide"

SEQ ID NO: 4753 - protein, 113 aa, Artificial Sequence; identical to SEQ ID NO: 3983
  source: /note="Description of Artificial Sequence: Synthetic polypeptide"

SEQ ID NO: 4754 - protein, 113 aa, Artificial Sequence; identical to SEQ ID NO: 3984
  source: /note="Description of Artificial Sequence: Synthetic polypeptide"

SEQ ID NO: 4755 - protein, 113 aa, Artificial Sequence; identical to SEQ ID NO: 3985
  source: /note="Description of Artificial Sequence: Synthetic polypeptide"

SEQ ID NO: 4756 - protein, 113 aa, Artificial Sequence; identical to SEQ ID NO: 3986
  source: /note="Description of Artificial Sequence: Synthetic polypeptide"

SEQ ID NO: 4757 - protein, 119 aa, Artificial Sequence; identical to SEQ ID NO: 3987
  source: /note="Description of Artificial Sequence: Synthetic polypeptide"

SEQ ID NO: 4758 - protein, 119 aa, Artificial Sequence; identical to SEQ ID NO: 3988
  source: /note="Description of Artificial Sequence: Synthetic polypeptide"

SEQ ID NO: 4759 - protein, 460 aa, Artificial Sequence; identical to SEQ ID NO: 3989
  source: /note="Description of Artificial Sequence: Synthetic polypeptide"

SEQ ID NO: 4760 - protein, 246 aa, Artificial Sequence; identical to SEQ ID NO: 3990
  source: /note="Description of Artificial Sequence: Synthetic polypeptide"

SEQ ID NO: 4761 - protein, 111 aa, Artificial Sequence
  source: /note="Description of Artificial Sequence: Synthetic polypeptide"
GGLVQPGGSLRLSCATSGFTFSDFFIEWVRQPPGKRLEWITASRNKNYDYKTEYSASVKGRFIVSRDTSQSILYLQMNALRAEDTAIYYCAIYRHYAMDYWGQGTSVTVSS

SEQ ID NO: 4762 - protein, 111 aa, Artificial Sequence
  source: /note="Description of Artificial Sequence: Synthetic polypeptide"
GGLVQPGGSLRLSCAISGFTFSDFYMEWVRQPPGKRLEWIAASRNKANDYTTEYSASVKGRFIVSRDTSQSILYLQMNALRAEDTAIYYCATYHDYAMDYWGQGTSVTVSS

SEQ ID NO: 4763 - protein, 111 aa, Artificial Sequence
  source: /note="Description of Artificial Sequence: Synthetic polypeptide"
GGLVQPGGSLRLSCATSGFTFSDFYMEWVRQPPGRRLEWIAASRDKAKDYTTEYSASVKGRFIVSRDTSQSIFYLQMNALRSEDTAIYYCATYFSYAMDYWGLGTSVTVSS

SEQ ID NO: 4764 - protein, 110 aa, Artificial Sequence
  source: /note="Description of Artificial Sequence: Synthetic polypeptide"
GGLVQPGGSLRLSCATAGFTFTDQYMSWVRQPPGKALEWLATIRNKAKGFTTEYSASVKGRFTISRDNSQSILYLQMSTLRAGDSATYYCAVYGNYAMDYWGQGTSVNVS

SEQ ID NO: 4765 - protein, 111 aa, Artificial Sequence
  source: /note="Description of Artificial Sequence: Synthetic polypeptide"
GGLVQPGGSLRLSCATSGFTFTDFYMEWVRQPPGKRLEWIAASRNKANGYTTEYSASVKGRFIVSRDTSQGILYLQMSALRAEDTAIYYCAIYRYYAMDYWGQGTSVTVSS

SEQ ID NO: 4766 - protein, 115 aa, Artificial Sequence
  source: /note="Description of Artificial Sequence: Synthetic polypeptide"
QLQQSGAELMKPGASVKISCKATGYTFSSYWIEWVKQRPGHGLEWIGEILPGRGSTHYNEKFKGKATFTADTSSNTAYMQLSSLTSEDSAVYYCARSPITTSDYWGQGTTLTVSS

SEQ ID NO: 4767 - protein, 96 aa, Artificial Sequence
  source: /note="Description of Artificial Sequence: Synthetic polypeptide"
AELKKPGASVKISCKATGYTFRSYWIEWVKQRPGHGLEWIGEILPGRGSTKYNEKFKGKATFTADTSSNTANMQLSSLTSEDSAVYYCARSPITTS

SEQ ID NO: 4768 - protein, 135 aa, Artificial Sequence
  source: /note="Description of Artificial Sequence: Synthetic polypeptide"
MEWSWVFLFLLSGTAGVLSEVQLQQSGPELVKPGSSVKISCKASRNTFTDYNLDWVKQSHGKTLEWIGNVYPNNGVTGYNQKFRGKATLTVDKSSSTAYMELHSLTSEDSAVYYCALYYYDVSYWGQGTLVTVSA

SEQ ID NO: 4769 - protein, 136 aa, Artificial Sequence
  source: /note="Description of Artificial Sequence: Synthetic polypeptide"
METGLRWLLLVAVLKGVQCQSVEESGGHLVTPGTPLTLTCTVSGIDLSTYAMGWVRQAPGKGLEWIGVITKSGNTYYASWAKGRFAISKTSTTVDLKITSPTTEDTATYFCGRYGIGVSYYDIWGPGTLVTVSSGQ

SEQ ID NO: 4770 - protein, 114 aa, Artificial Sequence
  source: /note="Description of Artificial Sequence: Synthetic polypeptide"
EVKLEESGGGLVQPGGSMKLSCTASGLTLSDAWMNWVRQSPEKGLEWVAEIRSKAYKHATYYAESVKGRFTISRDDSKSCIYLQMNTLRAEDTGIYYCTRHGSWGPGTLVTVSA

SEQ ID NO: 4771 - protein, 114 aa, Artificial Sequence
  source: /note="Description of Artificial Sequence: Synthetic polypeptide"
EVKLEESGGGLVQPGGSMKLSCTASGITLNDAWMTWVRQSPEKGLEWVGEIRNKANNHATNYAESVKGRFSISRDDSKGIVYLQMNSLRAEDTGNYYCTRHSYWGPGTLVTVSA

SEQ ID NO: 4772 - protein, 115 aa, Artificial Sequence
  source: /note="Description of Artificial Sequence: Synthetic polypeptide"
QIQLQQSGPELVKPGAAVKISCKASGYTFTDYYLNWVKQKPGQGLEWIGWIYPGSGNVKYNEKFKGKATLTADTSSNTAHMQLSSLTSEDTAVYFCTREGLIVYWGQGTLVTVSA

SEQ ID NO: 4773 - protein, 115 aa, Artificial Sequence
  source: /note="Description of Artificial Sequence: Synthetic polypeptide"
QIQLQQSGPDLVKPGASVKISCKASGYTFTDYYINWVKQKPGQGLEWIGWLNPGSGNTKYNEKFKGKATMTVDTTSSTVYMQLSSLTSEDSAVYFCTREGPIDYWGRGTSVTVSS

SEQ ID NO: 4774 - protein, 115 aa, Artificial Sequence; identical to SEQ ID NO: 3991
  source: /note="Description of Artificial Sequence: Synthetic polypeptide"

SEQ ID NO: 4775 - protein, 115 aa, Artificial Sequence; identical to SEQ ID NO: 3992
  source: /note="Description of Artificial Sequence: Synthetic polypeptide"

SEQ ID NO: 4776 - protein, 115 aa, Artificial Sequence; identical to SEQ ID NO: 3993
  source: /note="Description of Artificial Sequence: Synthetic polypeptide"

SEQ ID NO: 4777 - protein, 115 aa, Artificial Sequence; identical to SEQ ID NO: 3994
  source: /note="Description of Artificial Sequence: Synthetic polypeptide"

SEQ ID NO: 4778 - protein, 115 aa, Artificial Sequence; identical to SEQ ID NO: 3995
  source: /note="Description of Artificial Sequence: Synthetic polypeptide"

SEQ ID NO: 4779 - protein, 115 aa, Artificial Sequence; identical to SEQ ID NO: 3996
  source: /note="Description of Artificial Sequence: Synthetic polypeptide"

SEQ ID NO: 4780 - protein, 115 aa, Artificial Sequence; identical to SEQ ID NO: 3997
  source: /note="Description of Artificial Sequence: Synthetic polypeptide"

SEQ ID NO: 4781 - protein, 115 aa, Artificial Sequence; identical to SEQ ID NO: 3998
  source: /note="Description of Artificial Sequence: Synthetic polypeptide"

SEQ ID NO: 4782 - protein, 115 aa, Artificial Sequence; identical to SEQ ID NO: 3999
  source: /note="Description of Artificial Sequence: Synthetic polypeptide"

SEQ ID NO: 4783 - protein, 115 aa, Artificial Sequence; identical to SEQ ID NO: 4000
  source: /note="Description of Artificial Sequence: Synthetic polypeptide"

SEQ ID NO: 4784 - protein, 113 aa, Artificial Sequence; identical to SEQ ID NO: 4001
  source: /note="Description of Artificial Sequence: Synthetic polypeptide"

SEQ ID NO: 4785 - protein, 113 aa, Artificial Sequence; identical to SEQ ID NO: 4001
  source: /note="Description of Artificial Sequence: Synthetic polypeptide"

SEQ ID NO: 4786 - protein, 120 aa, Artificial Sequence; identical to SEQ ID NO: 4003
  source: /note="Description of Artificial Sequence: Synthetic polypeptide"

SEQ ID NO: 4787 - protein, 121 aa, Artificial Sequence; identical to SEQ ID NO: 4004
  source: /note="Description of Artificial Sequence: Synthetic polypeptide"

SEQ ID NO: 4788 - protein, 126 aa, Artificial Sequence; identical to SEQ ID NO: 4005
  source: /note="Description of Artificial Sequence: Synthetic polypeptide"

SEQ ID NO: 4789 - protein, 117 aa, Artificial Sequence; identical to SEQ ID NO: 4006
  source: /note="Description of Artificial Sequence: Synthetic polypeptide"

SEQ ID NO: 4790 - protein, 120 aa, Artificial Sequence; identical to SEQ ID NO: 4007
  source: /note="Description of Artificial Sequence: Synthetic polypeptide"

SEQ ID NO: 4791 - protein, 126 aa, Artificial Sequence; identical to SEQ ID NO: 4008
  source: /note="Description of Artificial Sequence: Synthetic polypeptide"

SEQ ID NO: 4792 - protein, 117 aa, Artificial Sequence; identical to SEQ ID NO: 4009
  source: /note="Description of Artificial Sequence: Synthetic polypeptide"

SEQ ID NO: 4793 - protein, 120 aa, Artificial Sequence; identical to SEQ ID NO: 4010
  source: /note="Description of Artificial Sequence: Synthetic polypeptide"

SEQ ID NO: 4794 - protein, 120 aa, Artificial Sequence; identical to SEQ ID NO: 4011
  source: /note="Description of Artificial Sequence: Synthetic polypeptide"

SEQ ID NO: 4795 - protein, 117 aa, Artificial Sequence; identical to SEQ ID NO: 4012
  source: /note="Description of Artificial Sequence: Synthetic polypeptide"

SEQ ID NO: 4796 - protein, 126 aa, Artificial Sequence; identical to SEQ ID NO: 4013
  source: /note="Description of Artificial Sequence: Synthetic polypeptide"

SEQ ID NO: 4797 - protein, 115 aa, Artificial Sequence; identical to SEQ ID NO: 4014
  source: /note="Description of Artificial Sequence: Synthetic polypeptide"

SEQ ID NO: 4798 - protein, 117 aa, Artificial Sequence; identical to SEQ ID NO: 4015
  source: /note="Description of Artificial Sequence: Synthetic polypeptide"

SEQ ID NO: 4799 - protein, 123 aa, Artificial Sequence; identical to SEQ ID NO: 4016
  source: /note="Description of Artificial Sequence: Synthetic polypeptide"

SEQ ID NO: 4800 - protein, 120 aa, Artificial Sequence
  source: /note="Description of Artificial Sequence: Synthetic polypeptide"
EVQLVQSGAEVKKPGESLKISCKAFGYSFTNFWIGWVRQVPGKGLEWVGIIYPGDSDTRYSPSFQGQVTISADKSIDTAYLQWGHLKASDSAMYFCARRGFWTGSQIEYWGQGTQVTVSS

SEQ ID NO: 4801 - protein, 115 aa, Artificial Sequence
  source: /note="Description of Artificial Sequence: Synthetic polypeptide"
QVQLVQSGAEVKKPGASVKVSCKASGYTFVNYIIHWVRQAPGQGLEWMGIINPNGGNTSYAEKFQARVTLTSDTSTSTVYMDLSSLTSEDTAVYYCAVLSPSNPWGQGTTVTVSS

SEQ ID NO: 4802 - protein, 126 aa, Artificial Sequence
  source: /note="Description of Artificial Sequence: Synthetic polypeptide"
QVQLVESGGGAVQPGGSLRLSCAASGFTFSDYAMHWVRQAPGKGLQWVAVISYEGTYKYYADSVKGRFTISRDNSKNTLNLQMSSLRVEDTAVYFCVKARAFASGQRSTSTVPDYWGQGTLVTVSS

SEQ ID NO: 4803 - protein, 121 aa, Artificial Sequence
  source: /note="Description of Artificial Sequence: Synthetic polypeptide"
EVQLVESGGGLVQPGGSLKLSCAASGFNFNISAIHWVRQASGKGLEWVGRIRSKSHNYATLYAASLKGRFTLSRDDSRNTAYLQMSSLQTEDMAVYYCTVLSANYDTFDYWGQGTLVTVSS

SEQ ID NO: 4804 - protein, 120 aa, Artificial Sequence
  source: /note="Description of Artificial Sequence: Synthetic polypeptide"
QVQLQQSGPELVKPGTSVKMPCKASGYIFTDYVISWVKQRTGQGLEWIGEIFPRSGSTYYNEKFKGKATLTADKSSNTAYMQLSSVTSEDSAVYFCARDYYGTSFAMDYWGQGTSVTVSS

SEQ ID NO: 4805 - protein, 120 aa, Artificial Sequence
  source: /note="Description of Artificial Sequence: Synthetic polypeptide"
QVQLVQSGAEVKKPGSSVKVSCKASGGTFSSYAISWVRQAPGQGLEWMGGIIPILGIANYAQKFQGRVTITADKSTSTAYMELSSLRSEDTAVYYCARENHCYYYGMDVWGQGTTVTVSS

SEQ ID NO: 4806 - protein, 120 aa, Artificial Sequence
  source: /note="Description of Artificial Sequence: Synthetic polypeptide"
QVQLVQSGPEVKKPGSSVKVPCKASGYIFTDYVISWVRQATGQGLEWMGEIFPRSGSTNYAQKFQGRVTITADKSTSTAYMELSSLRSEDTAVYYCARDYYGTSFAMDYWGQGTTVTVSS

SEQ ID NO: 4807 - protein, 120 aa, Artificial Sequence
  source: /note="Description of Artificial Sequence: Synthetic polypeptide"
QVQLQQSGAELARPGASVKLSCKASGYTFTSYGISWVKQRTGQGLEWIGEIYPRSGNTYYNEKFKGKATLTADKSSSTAYMELRSLTSEDSAVYFCARDYYGTYYAMDYWGQGTSVTVSS

SEQ ID NO: 4808 - protein, 120 aa, Artificial Sequence
  source: /note="Description of Artificial Sequence: Synthetic polypeptide"
QVQLVQSGPEVVKPGSSVKMPCKASGYIFSDYAISWVRQRTGQGLEWMGEIFPRSGSTNYAQKFQGRVTITADKSTSTAYMELSSLRSEDTAVYYCARDYYGTSYGMDVWGQGTTVTVSS

SEQ ID NO: 4809 - protein, 120 aa, Artificial Sequence
  source: /note="Description of Artificial Sequence: Synthetic polypeptide"
QVQLVQSGPEVVKPGSSVKMPCKASGYIFSDYAISWVRQRTGQGLEWMGEIFPRSGSTYYNQKFQGRVTITADKSTNTAYMQLSSLTSEDTAVYYCARDYYGTSYGMDVWGQGTTVTVSS

SEQ ID NO: 4810 - protein, 114 aa, Artificial Sequence
  source: /note="Description of Artificial Sequence: Synthetic polypeptide"
EVQLVESGGGLVQPGGSLRLSCAASGFTFPNYVMTWVRQAPGKGLEWVSGISGSGGSTDYADSVKGRFTISRDNSKNTLYLQMNSLRVEDTALYYCAKGSGGIWGQGTMVTVSS

SEQ ID NO: 4811 - protein, 120 aa, Artificial Sequence
  source: /note="Description of Artificial Sequence: Synthetic polypeptide"
EVQLVQSGAEVKKPGESLKISCKAFGYSFTNFWIGWVRQVPGKGLEWVGIIYPGDSDTRYSPSFQGQVTISADKSIDTAYLQWGHLKASDSAMYFCARRGFWTGSQIEYWGQGTLVTVSS

SEQ ID NO: 4812 - protein, 125 aa, Artificial Sequence
  source: /note="Description of Artificial Sequence: Synthetic polypeptide"
EVQLVESGGGVVQPGRSLRVSCAASGFTFSSYDMHWVRQAPGKGLEWVAVIWFDGSNEFYADSVKGRFTISRDNSKNTLFLQMNSLRAEDTAVYYCARDLGASVTTSNAENFHHWGQGTLVTVSS

SEQ ID NO: 4813 - protein, 125 aa, Artificial Sequence
  source: /note="Description of Artificial Sequence: Synthetic polypeptide"
QVQLVESGGGVVQPGRSLRVSCAASGFTFSSYDMHWVRQAPGKGLEWVAVIWFDGSNEFYADSVKGRFTISRDNSKNTLFLQMNSLRAEDTAVYYCARDLGASVTTSNAENFHHWGQGTLVTVSS

SEQ ID NO: 4814 - protein, 121 aa, Artificial Sequence
  source: /note="Description of Artificial Sequence: Synthetic polypeptide"
EVQLVESGGDLVQPGGSLRLSCAASGFDFSGYSMAWVRQAPGKGLEWVSYISGTYVSGGTGTMYYLDSVKGRFFISRDDATSSLYLQMDSLRDEDTAVYYCARVYDYGEDWGQGTLVTVSS

SEQ ID NO: 4815 - protein, 124 aa, Artificial Sequence
  source: /note="Description of Artificial Sequence: Synthetic polypeptide"
EVQLVESGGGLVQPGGSLRLSCAGTRFTFSTYAMGWVRQAPGRGLEWVSAIGGSGDSTSYADSVKGRFTISRDNSKNTLYLQMNSLRAEDTAVYYCAKGVYDYLWGSYRLFDYWGQGTLVTVSS

SEQ ID NO: 4816 - protein, 114 aa, Artificial Sequence
  source: /note="Description of Artificial Sequence: Synthetic polypeptide"
EVQLVESGGGLVQPGGSLRLSCAASGFTFPNYVMTWVRQAPGKGLEWVSGISGSGGSTDYADSVKGRFTISRDNSKNTLYLQMNSLRVEDTALYYCAKGSGGIRGQGTMVTVSS

SEQ ID NO: 4817 - protein, 118 aa, Artificial Sequence
  source: /note="Description of Artificial Sequence: Synthetic polypeptide"
EVQLVESGGGLVQPGGSLKLSCAASGFTFSGSAMHWVRQASGKGLEWVGRIRSKANSYATAYAASVKGRFTISRDDSKNTAYLQMNSLKTEDTAVYYCTSPTVTTEVWGQGTLVTVSS

SEQ ID NO: 4818 - protein, 122 aa, Artificial Sequence
  source: /note="Description of Artificial Sequence: Synthetic polypeptide"
EVQLVESGGGLVQPGGSLRLSCIGSSGMTFSSYAFNWVRQTPGKGLEWVSSISRFGSTVDYTDSVRGRFTISRDDGQRSLYLQMNSLRVEDTAVYYCVRSTASGSRSPGIIWGQGTTVTVSS

SEQ ID NO: 4819 - protein, 126 aa, Artificial Sequence
  source: /note="Description of Artificial Sequence: Synthetic polypeptide"
EVQLVQSGAEVKKPGESLKISCKGSGYRFTTYWIGWVRQMPGKGLEWMGIIYPGDSDTRYSPSYQGQVTISADKSISTAYLQWSSLKASDTGMYYCARVAGDIGYENYYYYGMDVWGQGTTVTVSS

SEQ ID NO: 4820 - protein, 118 aa, Artificial Sequence
  source: /note="Description of Artificial Sequence: Synthetic polypeptide"
QVQLVESGGGVVQPGRSLRLSCAASGFTFTRYGMHWVRQAPGKGLEWVAVIWYDGTNKYYADSLQGRFTISRDTSTNTLYLQMNGLRVEDRAVYYCAREGFQGAIDYWGQGTLVTVSS

SEQ ID NO: 4821 - protein, 120 aa, Artificial Sequence
  source: /note="Description of Artificial Sequence: Synthetic polypeptide"
EVQLVESGGGLVQPGGSLKLSCAASGFSFSDSAFHWARQASGKGLEWVGRIRSKGNNYATAYAASVKGRFTVSRDDSKNTTYLQMNSLKTDDTAIYYCTRQGPSYGGINWGLGTLVTVSS

SEQ ID NO: 4822 - protein, 115 aa, Artificial Sequence
  source: /note="Description of Artificial Sequence: Synthetic polypeptide"
EVQLVESGGGFVRPGGSITLSCATSGFTFTKAWMTWVRQAPVKGLEWIGHIKTRIEGATTDYAAPVEGRFTISRDDSKNMVYLQMNSLKTEDSGIYYCSTDFDYWGQGTLVTVSS

SEQ ID NO: 4823 - protein, 121 aa, Artificial Sequence
  source: /note="Description of Artificial Sequence: Synthetic polypeptide"
EVQLVQSGAEVKKPGDSLRISCKASGYNFPNYWIGWVRQMPGKGLEWMGIIYPGDSDIRYSPSFQGHVTISSDKSITTAYLQWTSLKVADSAMYYCARVERPDKGGWFGPWGQGTLVTVSS

SEQ ID NO: 4824 - protein, 114 aa, Artificial Sequence
  source: /note="Description of Artificial Sequence: Synthetic polypeptide"
EVQLVESGGGLVQPGGSLRLSCAASGFTFSAYGMNWVRQAPGKGLEWVAHITGSGTPIFYADSVKGRFTISRDNAKSSLYLQMNSLRNDDTALYFCVRGTVDYWGQGTLVTVSS

SEQ ID NO: 4825 - protein, 124 aa, Artificial Sequence
  source: /note="Description of Artificial Sequence: Synthetic polypeptide"
EVQLVQSGAEVKKPGESLKISCKASGYSFISYWVGWVRQMPGKGLEWMGIIYPGDSDTRYSPSFEGQVSISADKSISTAYLQWTSLKASDTAMYYCARHWGPAAVTDSPWFGPWGQGTLVTVSS

SEQ ID NO: 4826 - protein, 117 aa, Artificial Sequence
  source: /note="Description of Artificial Sequence: Synthetic polypeptide"
EVQLVESGAEVKKPGASVKVSCKASGYIFTAFFMHWVRQAPGQGLEWMGWINPDSGATKYAHNFQGRVTMTRDTSISTAFMELSGLKSDDTGVYYCATGMAVTGNFWGQGTLVTVSS

SEQ ID NO: 4827 - protein, 117 aa, Artificial Sequence
  source: /note="Description of Artificial Sequence: Synthetic polypeptide"
QVQLVQSGAEVKKPGASVKVSCKASGYIFTAFFMHWVRQAPGQGLEWMGWINPDSGATKYAHNFQGRVTMTRDTSISTAFMELSGLKSDDTGVYYCATGMAVTGNFWGQGTLVTVSS

SEQ ID NO: 4828 - protein, 117 aa, Artificial Sequence
  source: /note="Description of Artificial Sequence: Synthetic polypeptide"
EVHLVESGGALVKPGGSLRLSCAASGFSFSKYGMSWVRQAPGKGLEWVATISSSGSRTYYPDSVKGRFTISRDNAKNTLYLQMSSLKSEDTAMYYCSISWDGAMDYWGQGTSVTVSS

SEQ ID NO: 4829 - protein, 117 aa, Artificial Sequence
  source: /note="Description of Artificial Sequence: Synthetic polypeptide"
EVHLVESGGALVKPGGSLRLSCAASGFSFSKYGMSWVRQAPGKGLEWVATISSSGSRTYYPDSVKGRFTISRDNAKNTLYLQMNSLRAEDTAMYYCSISWDGAMDYWGQGTTVTVSS

SEQ ID NO: 4830 - protein, 117 aa, Artificial Sequence
  source: /note="Description of Artificial Sequence: Synthetic polypeptide"
EVQLVESGGALVKPGGSLRLSCAASGFSFSKYGMSWVRQAPGKGLEWVATISSSGSRTYYPDSVKGRFTISRDNAKNTLYLQMNSLRAEDTAMYYCSISWDGAMDYWGQGTTVTVSS

SEQ ID NO: 4831 - protein, 117 aa, Artificial Sequence
  source: /note="Description of Artificial Sequence: Synthetic polypeptide"
EVQLVESGGALVKPGGSLRLSCAASGFSFSKYGMSWVRQAPGKGLEWVATISSSGSRTYYPDSVKGRFTISRDNAKNTLYLQMNSLRAEDTAMYYCAISWDGAMDYWGQGTTVTVSS

SEQ ID NO: 4832 - protein, 119 aa, Artificial Sequence
  source: /note="Description of Artificial Sequence: Synthetic polypeptide"
QVQLQQSGTELMKPGASVKISCKATGYTFSSSWMGWVKQRPGHGLEWIGDILPGSGGTNYNERFKGKASFTAETSSNTAYMQLSSLTSEDSAVYYCVRSYYDYDRFANWGQGTLVTVSA

SEQ ID NO: 4833 - protein, 118 aa, Artificial Sequence
  source: /note="Description of Artificial Sequence: Synthetic polypeptide"
EVKLVESGGDLVKPGGSLKLSCAASGFTFSSYAMSWVRQNPEKRLEWVASISKGGNTYYPNSVKGRFTISRDNARNILYLQMSSLRSEDTALYYCARGWGDYGWFAYWGQVTLVTVSA

SEQ ID NO: 4834 - protein, 115 aa, Artificial Sequence
  source: /note="Description of Artificial Sequence: Synthetic polypeptide"
EVQLQQSGPELVKPGASVKISCKASGYTFTDYYMNWVKQSHGKSLEWIGDINPNRGGTTYNQKFKGKATLTVDKSSSTAYMELRSLTSEDSAVYYCASYYAVGYWGQGTTLTVSS

SEQ ID NO: 4835 - protein, 115 aa, Artificial Sequence
  source: /note="Description of Artificial Sequence: Synthetic polypeptide"
EVQLQQSGPELVKPGTSVKISCKASGYTFTDYYMNWVKQSHGKSLEWIGDINPNRGGTTYNQKFKGKATLTVDKSSSTAYMELRSLTSEDSAVYYCASYYAVGYWGQGTTLTVSS

SEQ ID NO: 4836 - protein, 115 aa, Artificial Sequence
  source: /note="Description of Artificial Sequence: Synthetic polypeptide"
EVQLQQSGPELVKPGASVKISCKASGYTFTDYYMNWVKQSHGKSLEWIGDINPNRGGTTYNQKFKGKATLTVDTSSSTAYMELRSLTSEDSAVYYCASYYAVGYWGQGTTLTVSS

SEQ ID NO: 4837 - protein, 120 aa, Artificial Sequence
  source: /note="Description of Artificial Sequence: Synthetic polypeptide"
EVQLVESGGGLVKPGGSLKLSCAPSGFTFSDYGMHWVRQAPEKGLEWVAYISSGSSTIYYGDTVKGRFTISRDNAKNTLFLQMTSLRSEDTAMYYCARRGQLRLRLFAYWGQGTLVTVSA

SEQ ID NO: 4838 - protein, 119 aa, Artificial Sequence
  source: /note="Description of Artificial Sequence: Synthetic polypeptide"
EVKLMESGGGLVHPGASLRLYCAASGFTFTDYYMSWVRQPPGKAPEWLALIRNKANGYTTEYTASVKGRFTISRDNSQNILYLQMNTLRAEDSATYYCVKALGRYFDVWGTGTTVTVSS

SEQ ID NO: 4839 - protein, 117 aa, Artificial Sequence
  source: /note="Description of Artificial Sequence: Synthetic polypeptide"
QVQLQQPGAELLKPGASVKLSCKASGYTFTSYWMHWVKQRPGRGLEWIGRIDPNSDRTKYNEKFKRKATLTVDKSSSTAYMQLSSLTSEDSAVYYCARDDYAWFAYWGQGTLVTVSA

SEQ ID NO: 4840 - protein, 119 aa, Artificial Sequence
  source: /note="Description of Artificial Sequence: Synthetic polypeptide"
QVTLKESGPGILQSSQTLSLTCSFSGFSLSTSGMGVSWIRQPSGKGLEWLAHIYWDDDKRYNASLKSRLTISKDTSRNQVFLKITCVDTADTATYYCARLLRPYALDYWGQGTSVTVSS

SEQ ID NO: 4841 - protein, 115 aa, Artificial Sequence
  source: /note="Description of Artificial Sequence: Synthetic polypeptide"
EVQLQQSGPELVKPGASVKISCKASGYTFTDYYMNWVKQSHGKSLEWIGDINPNNGGTSYNQKFKGKATLTVDKSSSTAYMELRSLTSEDSAVYYCVREGRFAYWGHGTLVTVSA

SEQ ID NO: 4842 - protein, 115 aa, Artificial Sequence
  source: /note="Description of Artificial Sequence: Synthetic polypeptide"
QVQLKQSGAELVRPGASVKLSCKASGYTFTDYYINWVKQRPGQGLEWIARIYPGRGNIYYNEKFKGKATLTAEKSSSTAYMQLSSLTSEDSAVYFCARFWDVTYWGQGTLVTVSA

SEQ ID NO: 4843 - protein, 115 aa, Artificial Sequence
  source: /note="Description of Artificial Sequence: Synthetic polypeptide"
EVQLQQSGPELVKPGASVKISCKASGFTFTDYYMNWVKQSHGKSLEWIGDINPNNGGTSYHQKFKGKATLTVDKSSSTAYMELRSLTSEDSAVYYCVREGRFAYWGQGTLVTVSA

SEQ ID NO: 4844 - protein, 115 aa, Artificial Sequence
  source: /note="Description of Artificial Sequence: Synthetic polypeptide"
QVQLVQSGAEVKKPGSSVKVSCKASGYTFTDYYMNWVRQAPGQGLEWIGDINPNRGGTTYNQKFKGRVTITVDKSTSTAYMELSSLRSEDTAVYYCASYYAVGYWGQGTTVTVSS

SEQ ID NO: 4845 - protein, 115 aa, Artificial Sequence
  source: /note="Description of Artificial Sequence: Synthetic polypeptide"
EVQLVQSGAEVKKPGSSVKVSCKASGYTFTDYYMNWVRQAPGQGLEWIGDINPNRGGTTYNQKFKGRVTITVDKSTSTAYMELSSLRSEDTAVYYCASYYAVGYWGQGTTVTVSS

SEQ ID NO: 4846 - protein, 115 aa, Artificial Sequence; identical to SEQ ID NO: 4845
  source: /note="Description of Artificial Sequence: Synthetic polypeptide"

SEQ ID NO: 4847 - protein, 138 aa, Artificial Sequence
  source: /note="Description of Artificial Sequence: Synthetic polypeptide"
VQLQESGGGLVQPGGSRKLSCAASGFTFSNFGMHWVRQAPDKGLEWVAYITSGSSSIYYADTVKGRFTISRDNPKNTLFLQMTSLRSEDTAMYYCARSVPYGYGLFDYWGRGTTLTVSSAKTTPPSVYPLAPGSAAQT

SEQ ID NO: 4848 - protein, 132 aa, Artificial Sequence
  source: /note="Description of Artificial Sequence: Synthetic polypeptide"
VQLQESGGGLVQPGGSRKLSCAASGFTFSNFGMHWVRQAPDKGLEWVAYITSGSSSIYYADTVKGRFTISRDNPKNTLFLQMTSLRSEDTAMYYCARSVPYGYGLFDYWGRGTTLTVSSAKTTPPSVYPLAP

SEQ ID NO: 4849 - protein, 182 aa, Artificial Sequence
  source: /note="Description of Artificial Sequence: Synthetic polypeptide"
DFGLSWVFLALILKGIQCEVQLVESGGDLVKPGGSLKLSCAASGFNFRSYGMSWVRQTPDKRLEWVATISSGGNYTYYPDSVKGRFTISRDNAKNILYLQMSSLNSEDTALYYCTYSFYGAFDYWGQGTTLTVSSAKTTPPSVYPLAPGSAAQTNSMVTLGCLVKGYFPEPVTVTWNSGSLS

SEQ ID NO: 4850 - protein, 119 aa, Artificial Sequence
  source: /note="Description of Artificial Sequence: Synthetic polypeptide"
QIQLVQSGPELKKPGETVKISCKASGYTFTDYSMNWVKQAPGQGLKWVGWINTETGEPAYADDFKGRFAFSLETSASTAYLQINNLKNEDTATYFCATDFFDFWGQGTSLTVSSAKTTP

SEQ ID NO: 4851 - protein, 121 aa, Artificial Sequence
  source: /note="Description of Artificial Sequence: Synthetic polypeptide"
EVQLVESGGDLVRPGGSLKLSCAASGFTFRTYGMSWVRQTADKRLEWVATISSGGTYTYYADNVRERFTISRDNARDTLYLQMSRLESDDTAMYYCTRRYGYDGGGSFDVWGAGTRVTVSS

SEQ ID NO: 4852 - protein, 108 aa, Artificial Sequence
  source: /note="Description of Artificial Sequence: Synthetic polypeptide"
QSVEESGGRLVTPGTPLTLTCTVSGLSLSSNAINWVRQAPGKGLEWIGYISTSGNTYYASWAKGRFTISKTSTTVDLKITSPTTEDTATYFCGRGDLWGPGTLVTVSS

SEQ ID NO: 4853 - protein, 114 aa, Artificial Sequence
  source: /note="Description of Artificial Sequence: Synthetic polypeptide"
QSVEESGGRLVTPGTPLTLTCTVSGIDLSSYTMNWVRQAPGKGLDWIGFINSGGYTSYASWTRGRFTISKTSTTVDLRITSPTTEDTATYFCARYGGGSGFDLWGPGTLVTVSS

SEQ ID NO: 4854 - protein, 109 aa, Artificial Sequence
  source: /note="Description of Artificial Sequence: Synthetic polypeptide"
QSVEESGGRLVTPGTPLTLTCKVSGFSLSSYDMNWVRQAPGKGLEWVGAISTGGNTYYASWAKGRFTISKTSTTVTLTITSPTTADTATYFCARGSSIWGPGTLVTVSL

SEQ ID NO: 4855 - protein, 108 aa, Artificial Sequence
  source: /note="Description of Artificial Sequence: Synthetic polypeptide"
QSVEESGGRLVTPGTPLTLTCTVSGLSLSSNAINWVRQAPGKGLEWIGYIAVSGNTYYASWAKGRFTISKASTTVDLKMTSPTAEDTGTYFCGKSNIWGPGTLVTVSL

SEQ ID NO: 4856 - protein, 108 aa, Artificial Sequence
  source: /note="Description of Artificial Sequence: Synthetic polypeptide"
QSVEESGGRLVTPGTPLTLTCTVSGFSLSSNAINWVRQAPGKGLEWIGYIAVSGNTYYASWAKGRFTISKASTTVDLKMTSPTAEDTGTYFCGKSNIWGPGTLVTVSL

SEQ ID NO: 4857 - protein, 109 aa, Artificial Sequence
  source: /note="Description of Artificial Sequence: Synthetic polypeptide"
QSVEESGGRLVTPGTPLTLTCTVSGIDLSSYSITWVRQAPGKGLEYIGFIGTGGSTYYASWAKGRFTISRTSTTVDLKITSPTTEDTATYFCARGGDLWGPGTLVTVSS

SEQ ID NO: 4858 - protein, 123 aa, Artificial Sequence; identical to SEQ ID NO: 4364
  source: /note="Description of Artificial Sequence: Synthetic polypeptide"

SEQ ID NO: 4859 - protein, 113 aa, Artificial Sequence; identical to SEQ ID NO: 3979
  source: /note="Description of Artificial Sequence: Synthetic polypeptide"

SEQ ID NO: 4860 - protein, 112 aa, Artificial Sequence; identical to SEQ ID NO: 4021
  source: /note="Description of Artificial Sequence: Synthetic polypeptide"

SEQ ID NO: 4861 - protein, 112 aa, Artificial Sequence; identical to SEQ ID NO: 4022
  source: /note="Description of Artificial Sequence: Synthetic polypeptide"

SEQ ID NO: 4862 - protein, 113 aa, Artificial Sequence; identical to SEQ ID NO: 3976
  source: /note="Description of Artificial Sequence: Synthetic polypeptide"

SEQ ID NO: 4863 - protein, 113 aa, Artificial Sequence; identical to SEQ ID NO: 3977
  source: /note="Description of Artificial Sequence: Synthetic polypeptide"

SEQ ID NO: 4864 - protein, 112 aa, Artificial Sequence; identical to SEQ ID NO: 4025
  source: /note="Description of Artificial Sequence: Synthetic polypeptide"

SEQ ID NO: 4865 - protein, 113 aa, Artificial Sequence; identical to SEQ ID NO: 3980
  source: /note="Description of Artificial Sequence: Synthetic polypeptide"

SEQ ID NO: 4866 - protein, 113 aa, Artificial Sequence; identical to SEQ ID NO: 3981
  source: /note="Description of Artificial Sequence: Synthetic polypeptide"

SEQ ID NO: 4867 - protein, 113 aa, Artificial Sequence; identical to SEQ ID NO: 3982
  source: /note="Description of Artificial Sequence: Synthetic polypeptide"

SEQ ID NO: 4868 - protein, 113 aa, Artificial Sequence; identical to SEQ ID NO: 3983
  source: /note="Description of Artificial Sequence: Synthetic polypeptide"

SEQ ID NO: 4869 - protein, 113 aa, Artificial Sequence; identical to SEQ ID NO: 3984
  source: /note="Description of Artificial Sequence: Synthetic polypeptide"

SEQ ID NO: 4870 - protein, 113 aa, Artificial Sequence; identical to SEQ ID NO: 3985
  source: /note="Description of Artificial Sequence: Synthetic polypeptide"

SEQ ID NO: 4871 - protein, 113 aa, Artificial Sequence; identical to SEQ ID NO: 3986
  source: /note="Description of Artificial Sequence: Synthetic polypeptide"

SEQ ID NO: 4872 - protein, 113 aa, Artificial Sequence; identical to SEQ ID NO: 3971
  source: /note="Description of Artificial Sequence: Synthetic polypeptide"

SEQ ID NO: 4873 - protein, 113 aa, Artificial Sequence; identical to SEQ ID NO: 3972
  source: /note="Description of Artificial Sequence: Synthetic polypeptide"

SEQ ID NO: 4874 - protein, 113 aa, Artificial Sequence; identical to SEQ ID NO: 3973
  source: /note="Description of Artificial Sequence: Synthetic polypeptide"

SEQ ID NO: 4875 - protein, 475 aa, Artificial Sequence
  source: /note="Description of Artificial Sequence: Synthetic polypeptide"
MKHLWFFLLLVAAPRWVLSQVELVESGGGLVQPGGSLRLSCAASGFTFSSYAMSWVRQAPGKGLEWVSAINASGTRTYYADSVKGRFTISRDNSKNTLYLQMNSLRAEDTAVYYCARGKGNTHKPYGYVRYFDVWGQGTLVTVSSASTKGPSVFPLAPSSKSTSGGTAALGCLVKDYFPEPVTVSWNSGALTSGVHTFPAVLQSSGLYSLSSVVTVPSSSLGTQTYICNVNHKPSNTKVDKKVEPKSCDKTHTCPPCPAPELLGGPSVFLFPPKPKDTLMISRTPEVTCVVVDVSHEDPEVKFNWYVDGVEVHNAKTKPREEQYNSTYRVVSVLTVLHQDWLNGKEYKCKVSNKALPAPIEKTISKAKGQPREPQVYTLPPSRDELTKNQVSLTCLVKGFYPSDIAVEWESNGQPENNYKTTPPVLDSDGSFFLYSKLTVDKSRWQQGNVFSCSVMHEALHNHYTQKSLSLSPGK

SEQ ID NO: 4876 - protein, 219 aa, Artificial Sequence; identical to SEQ ID NO: 4044
  source: /note="Description of Artificial Sequence: Synthetic polypeptide"

SEQ ID NO: 4877 - protein, 219 aa, Artificial Sequence; identical to SEQ ID NO: 4045
  source: /note="Description of Artificial Sequence: Synthetic polypeptide"

SEQ ID NO: 4878 - protein, 220 aa, Artificial Sequence; identical to SEQ ID NO: 4046
  source: /note="Description of Artificial Sequence: Synthetic polypeptide"

SEQ ID NO: 4879 - protein, 219 aa, Artificial Sequence; identical to SEQ ID NO: 4047
  source: /note="Description of Artificial Sequence: Synthetic polypeptide"

SEQ ID NO: 4880 - protein, 220 aa, Artificial Sequence; identical to SEQ ID NO: 4048
  source: /note="Description of Artificial Sequence: Synthetic polypeptide"

SEQ ID NO: 4881 - protein, 220 aa, Artificial Sequence; identical to SEQ ID NO: 4049
  source: /note="Description of Artificial Sequence: Synthetic polypeptide"

SEQ ID NO: 4882 - protein, 220 aa, Artificial Sequence; identical to SEQ ID NO: 4050
  source: /note="Description of Artificial Sequence: Synthetic polypeptide"

SEQ ID NO: 4883 - protein, 219 aa, Artificial Sequence; identical to SEQ ID NO: 4051
  source: /note="Description of Artificial Sequence: Synthetic polypeptide"

SEQ ID NO: 4884 - protein, 219 aa, Artificial Sequence; identical to SEQ ID NO: 4052
  source: /note="Description of Artificial Sequence: Synthetic polypeptide"

SEQ ID NO: 4885 - protein, 219 aa, Artificial Sequence; identical to SEQ ID NO: 4053
  source: /note="Description of Artificial Sequence: Synthetic polypeptide"

SEQ ID NO: 4886 - protein, 219 aa, Artificial Sequence; identical to SEQ ID NO: 4054
  source: /note="Description of Artificial Sequence: Synthetic polypeptide"

SEQ ID NO: 4887 - protein, 219 aa, Artificial Sequence; identical to SEQ ID NO: 4055
  source: /note="Description of Artificial Sequence: Synthetic polypeptide"

SEQ ID NO: 4888 - protein, 219 aa, Artificial Sequence; identical to SEQ ID NO: 4056
  source: /note="Description of Artificial Sequence: Synthetic polypeptide"

SEQ ID NO: 4889 - protein, 219 aa, Artificial Sequence; identical to SEQ ID NO: 4057
  source: /note="Description of Artificial Sequence: Synthetic polypeptide"

SEQ ID NO: 4890 - protein, 219 aa, Artificial Sequence; identical to SEQ ID NO: 4058
  source: /note="Description of Artificial Sequence: Synthetic polypeptide"

SEQ ID NO: 4891 - protein, 219 aa, Artificial Sequence; identical to SEQ ID NO: 4059
  source: /note="Description of Artificial Sequence: Synthetic polypeptide"

SEQ ID NO: 4892 - protein, 219 aa, Artificial Sequence; identical to SEQ ID NO: 4060
  source: /note="Description of Artificial Sequence: Synthetic polypeptide"

SEQ ID NO: 4893 - protein, 220 aa, Artificial Sequence; identical to SEQ ID NO: 4061
  source: /note="Description of Artificial Sequence: Synthetic polypeptide"

SEQ ID NO: 4894 - protein, 219 aa, Artificial Sequence; identical to SEQ ID NO: 4062
  source: /note="Description of Artificial Sequence: Synthetic polypeptide"

SEQ ID NO: 4895 - protein, 219 aa, Artificial Sequence; identical to SEQ ID NO: 4063
  source: /note="Description of Artificial Sequence: Synthetic polypeptide"

SEQ ID NO: 4896 - protein, 219 aa, Artificial Sequence; identical to SEQ ID NO: 4064
  source: /note="Description of Artificial Sequence: Synthetic polypeptide"

SEQ ID NO: 4897 - protein, 219 aa, Artificial Sequence; identical to SEQ ID NO: 4065
  source: /note="Description of Artificial Sequence: Synthetic polypeptide"

SEQ ID NO: 4898 - protein, 215 aa, Artificial Sequence
  source: /note="Description of Artificial Sequence: Synthetic polypeptide"
DIVLTQSPATLSLSPGERATLSCRASQSVSSSYLAWYQQKPGQAPRLLIYGASSRATGVPARFSGSGSGTDFTLTISSLEPEDFATYYCLQIYNMPITFGQGTKVEIKRTVAAPSVFIFPPSDEQLKSGTASVVCLLNNFYPREAKVQWKVDNALQSGNSQESVTEQDSKDSTYSLSSTLTLSKADYEKHKVYACEVTHQGLSSPVTKSFNRGEC

SEQ ID NO: 4899 - protein, 219 aa, Artificial Sequence
  source: /note="Description of Artificial Sequence: Synthetic polypeptide"
DVVMTQSPLSLPVTLGQPASISCRSSQSLIYSDGNAYLHWFLQKPGQSPRLLIYKVSNRFSGVPDRFSGSGSGTDFTLKISRVEAEDVGVYYCSQSTHVPWTFGQGTKVEIKRTVAAPSVFIFPPSDEQLKSGTASVVCLLNNFYPREAKVQWKVDNALQSGNSQESVTEQDSKDSTYSLSSTLTLSKADYEKHKVYACEVTHQGLSSPVTKSFNRGEC

SEQ ID NO: 4900 - protein, 214 aa, Artificial Sequence
  source: /note="Description of Artificial Sequence: Synthetic polypeptide"
DIQMTQSPSSLSASVGDRVTITCRASQDVSTAVAWYQQKPGKAPKLLIYSASFLYSGVPSRFSGSGSGTDFTLTISSLQPEDFATYYCQQFPTYLPTFGQGTKVEIKRTVAAPSVFIFPPSDEQLKSGTASVVCLLNNFYPREAKVQWKVDNALQSGNSQESVTEQDSKDSTYSLSSTLTLSKADYEKHKVYACEVTHQGLSSPVTKSFNRGEC

SEQ ID NO: 4901 - protein, 219 aa, Artificial Sequence
  source: /note="Description of Artificial Sequence: Synthetic polypeptide"
DIVMTQSPLSLPVTPGEPASISCRSSQSLVYSNGDTYLHWYLQKPGQSPQLLIYKVSNRFSGVPDRFSGSGSGTDFTLKISRVEAEDVGVYYCSQSTHVPWTFGQGTKVEIKRTVAAPSVFIFPPSDEQLKSGTASVVCLLNNFYPREAKVQWKVDNALQSGNSQESVTEQDSKDSTYSLSSTLTLSKADYEKHKVYACEVTHQGLSSPVTKSFNRGEC

SEQ ID NO: 4902 - protein, 219 aa, Artificial Sequence; identical to SEQ ID NO: 4901
  source: /note="Description of Artificial Sequence: Synthetic polypeptide"

SEQ ID NO: 4903 - protein, 217 aa, Artificial Sequence; identical to SEQ ID NO: 4081
  source: /note="Description of Artificial Sequence: Synthetic polypeptide"

SEQ ID NO: 4904 - protein, 220 aa, Artificial Sequence; identical to SEQ ID NO: 4082
  source: /note="Description of Artificial Sequence: Synthetic polypeptide"

SEQ ID NO: 4905 - protein, 220 aa, Artificial Sequence; identical to SEQ ID NO: 4082
  source: /note="Description of Artificial Sequence: Synthetic polypeptide"

SEQ ID NO: 4906 - protein, 217 aa, Artificial Sequence; identical to SEQ ID NO: 4084
  source: /note="Description of Artificial Sequence: Synthetic polypeptide"

SEQ ID NO: 4907 - protein, 218 aa, Artificial Sequence; identical to SEQ ID NO: 3859
  source: /note="Description of Artificial Sequence: Synthetic polypeptide"

SEQ ID NO: 4908 - protein, 234 aa, Artificial Sequence
  source: /note="Description of Artificial Sequence: Synthetic polypeptide"
MESQTQVFVYMLLWLSGVDGDIVMTQSQKFMSTSVGDRVSVTCKASQNVGTNVAWYQQKPGQSPKPLIYSASYRYSGVPDRFTGSGSGTDFTLTISNVQSEDLAEYFCQQFNSYPLTFGAGTKLELKRADAAPTVSIFPPSSEQLTSGGASVVCFLNNFYPKDINVKWKIDGSERQNGVLNSWTDQDSKDSTYSMSSTLTLTKDEYERHNSYTCEATHKTSTSPIVKSFNRNEC

SEQ ID NO: 4909 - protein, 215 aa, Artificial Sequence
  source: /note="Description of Artificial Sequence: Synthetic polypeptide"
GDIVMTQSQKFMSTSVGDRVSVTCKASQNVGTNVAWYQQKPGQSPKPLIYSASYRYSGVPDRFTGSGSGTDFTLTISNVQSEDLAEYFCQQFNSYPLTFGAGTKLELKRADAAPTVSIFPPSSEQLTSGGASVVCFLNNFYPKDINVKWKIDGSERQNGVLNSWTDQDSKDSTYSMSSTLTLTKDEYERHNSYTCEATHKTSTSPIVKSFNRNEC

SEQ ID NO: 4910 - protein, 107 aa, Artificial Sequence
  source: /note="Description of Artificial Sequence: Synthetic polypeptide"
DIKMTQSPSSMYASLGERVTITCKASQDINSYLSWFQQKPGKSPKTLIYRANRLVDGVPSRFSGSGSGQDYSLTISSLEYEDMGIYYCLQYDEYPYTFGGGTKLEIK

SEQ ID NO: 4911 - protein, 236 aa, Artificial Sequence
  source: /note="Description of Artificial Sequence: Synthetic polypeptide"
MDMRTPAQFLGILLLWFPGIKCDIKMTQSPSSMYASLGERVTITCKASQDINSYLSWFQQKPGKSPKTLIYRANRLVDGVPSRFSGSGSGQDYSLTISSLEYEDMGIYYCLQYDEYPYTFGGGTKLEIKRADAAPTVSIFPPSSEQLTSGGASVVCFLNNFYPKDINVKWKIDGSERQNGVLNSWTDQDSKDSTYSMSSTLTLTKDEYERHNSYTCEATHKTSTSPIVKSFNRNEC

SEQ ID NO: 4912 - protein, 120 aa, Artificial Sequence; identical to SEQ ID NO: 4638
  source: /note="Description of Artificial Sequence: Synthetic polypeptide"

SEQ ID NO: 4913 - protein, 449 aa, Artificial Sequence
  source: /note="Description of Artificial Sequence: Synthetic polypeptide"
QVQLVQSGGGLVQPGGSLRLSCAGSGFTFSNYGMSWVRQAPGKGLEWVASIRSGGGRTYYSDNVKGRFTISRENAKNSLYLQMNSLRAEDTAVYYCVRYDHYSGSSDYWGQGTLVTVSSASTKGPSVFPLAPSSKSTSGGTAALGCLVKDYFPQPVTVSWNSGALTSGVHTFPAVLQSSGLYSLSSVVTVPSSSLGTQTYICNVNHKPSNTKVDKKVEPKSCDKTHTCPPCPAPQLLGGPSVFLFPPKPKDTLMISRTPEVTCVVVDVSHEDPEVKFNWYVDGVEVHNAKTKPREEQYNSTYRVVSVLTVLHQDWLNGKEYKCKVSNKALPAPIEKTISKAKGQPREPQVYTLPPSRDELTKNQVSLTCLVKGFYPSDIAVEWESNGQPENNYKTTPPVLDSDGSFFLYSKLTVDKSRWQQGNVFSCSVMHEALHNHYTQKSLSLSPGK

SEQ ID NO: 4914 - protein, 214 aa, Artificial Sequence
  source: /note="Description of Artificial Sequence: Synthetic polypeptide"
DIVLTQSPATLSLSPGERATLSCRASQSVSSSYLAWYQQKPGQAPRLLIYGASSRATGVPARFSGSGSGTDFTLTISSLEPEDFATYYCLQIYNMPITFGQGTKVEIKRTVAAPSVFIFPPSDEQLKSGTASVVCLLNNFYPREAKVQWKVDNALQSGNSQESTEQDSKDSTYSLSSTLTLSKADYEKHKVYACEVTHQGLSSPVTKSFNRGEC

SEQ ID NO: 4915 - protein, 215 aa, Artificial Sequence; identical to SEQ ID NO: 4898
  source: /note="Description of Artificial Sequence: Synthetic polypeptide"

SEQ ID NO: 4916 - protein, 239 aa, Artificial Sequence
  source: /note="Description of Artificial Sequence: Synthetic polypeptide"
MMSPAQFLFLLVLWIRETNGDVVMTQSPLSLPVTLGQPASISCKSSQSLLDSDGKTYLNWLQQRPGQSPRRLIYLVSKLDSGVPDRFSGSGSGTDFTLKISRVEAEDVGVYYCWQGTHFPRTFGGGTKVEIKRTVAAPSVFIFPPSDEQLKSGTASVVCLLNNFYPREAKVQWKVDNALQSGNSQESVTEQDSKDSTYSLSSTLTLSKADYEKHKVYACEVTHQGLSSPVTKSFNRGEC

SEQ ID NO: 4917 - protein, 219 aa, Artificial Sequence
  source: /note="Description of Artificial Sequence: Synthetic polypeptide"
EIVMTQTPLSLPVSLGDRASISCRSGQSLVHSNTNTYLHWYLQKPGQSPKLLIYTVSNRFSGVPDRFSGSGSGSDFTLTISRVEAEDLGVYFCSQNTFVPWTFGGGTKLEIKRTVAAPSVFIFPPSDEQLKSGTASVVCLLNNFYPREAKVQWKVDNALQSGNSQESVTEQDSKDSTYSLSSTLTLSKADYEKHKVYACEVTHQGLSSPVTKSFNRGEC

SEQ ID NO: 4918 - protein, 219 aa, Artificial Sequence; identical to SEQ ID NO: 4917
  source: /note="Description of Artificial Sequence: Synthetic polypeptide"

SEQ ID NO: 4919 - protein, 219 aa, Artificial Sequence
  source: /note="Description of Artificial Sequence: Synthetic polypeptide"
EIVMTQTPLSLPVSLGDRASISCRSGQSLVHSNGNTYLHWYLQKPGQSPKLLIYTVSNRFSGVPDRFSGSGSGSDFTLTISRVEAEDLGVYFCSQNTFVPWTFGGGTKLEIKRTVAAPSVFIFPPSDEQLKSGTASVVCLLNNFYPREAKVQWKVDNALQSGNSQESVTEQDSKDSTYSLSSTLTLSKADYEKHKVYACEVTHQGLSSPVTKSFNRGEC

SEQ ID NO: 4920 - protein, 219 aa, Artificial Sequence
  source: /note="Description of Artificial Sequence: Synthetic polypeptide"
DVVMTQTPLSLPVSLGDQASISCRSSQSLVYSNGDTYLHWYLQKPGQSPKLLIYKVSNRFSGVPDRFSGSGSGTDFTLKISRVEAEDLGVYFCSQSTHVPWTFGGGTKLEIKRADAAPTVSIFPPSSEQLTSGGASVVCFLNNFYPKDINVKWKIDGSERQNGVLNSWTDQDSKDSTYSMSSTLTLTKDEYERHNSYTCEATHKTSTSPIVKSFNRNEC

SEQ ID NO: 4921 - protein, 219 aa, Artificial Sequence; identical to SEQ ID NO: 4899
  source: /note="Description of Artificial Sequence: Synthetic polypeptide"

SEQ ID NO: 4922 - protein, 219 aa, Artificial Sequence
  source: /note="Description of Artificial Sequence: Synthetic polypeptide"
DIVMTQSPLSLPVTPGEPASISCRVSQSLLHSNGYTYLHWYLQKPGQSPQLLIYKVSNRFSGVPDRFSGSGSGTDFTLKISRVEAEDVGVYYCSQTRHVPYTFGGGTKVEIKRTVAAPSVFIFPPSDEQLKSGTASVVCLLNNFYPREAKVQWKVDNALQSGNSQESVTEQDSKDSTYSLSSTLTLSKADYEKHKVYACEVTHQGLSSPVTKSFNRGEC

SEQ ID NO: 4923 - protein, 214 aa, Artificial Sequence
  source: /note="Description of Artificial Sequence: Synthetic polypeptide"
DIQMTQSPSSLSASVGDRVTITCRASQSISSYLNWYQQKPGKAPKLLIYAASSLQSGVPSRFSGSGSGTDFTLTISSLQPEDFATYYCQQSYSTPLTFGGGTKVEIKRTVAAPSVFIFPPSDEQLKSGTASVVCLLNNFYPREAKVQWKVDNALQSGNSQESVTEQDSKDSTYSLSSTLTLSKADYEKHKVYACEVTHQGLSSPVTKSFNRGEC

SEQ ID NO: 4924 - protein, 239 aa, Artificial Sequence; identical to SEQ ID NO: 4086
  source: /note="Description of Artificial Sequence: Synthetic polypeptide"

SEQ ID NO: 4925 - protein, 228 aa, Artificial Sequence; identical to SEQ ID NO: 4087
  source: /note="Description of Artificial Sequence: Synthetic polypeptide"

SEQ ID NO: 4926 - protein, 239 aa, Artificial Sequence; identical to SEQ ID NO: 4088
  source: /note="Description of Artificial Sequence: Synthetic polypeptide"

SEQ ID NO: 4927 - protein, 208 aa, Artificial Sequence; identical to SEQ ID NO: 4089
  source: /note="Description of Artificial Sequence: Synthetic polypeptide"

SEQ ID NO: 4928 - protein, 238 aa, Artificial Sequence; identical to SEQ ID NO: 4090
  source: /note="Description of Artificial Sequence: Synthetic polypeptide"

SEQ ID NO: 4929 - protein, 239 aa, Artificial Sequence; identical to SEQ ID NO: 4091
  source: /note="Description of Artificial Sequence: Synthetic polypeptide"

SEQ ID NO: 4930 - protein, 239 aa, Artificial Sequence; identical to SEQ ID NO: 4092
  source: /note="Description of Artificial Sequence: Synthetic polypeptide"

SEQ ID NO: 4931 - protein, 238 aa, Artificial Sequence; identical to SEQ ID NO: 4093
  source: /note="Description of Artificial Sequence: Synthetic polypeptide"

SEQ ID NO: 4932 - protein, 238 aa, Artificial Sequence; identical to SEQ ID NO: 4094
  source: /note="Description of Artificial Sequence: Synthetic polypeptide"

SEQ ID NO: 4933 - protein, 239 aa, Artificial Sequence; identical to SEQ ID NO: 4095
  source: /note="Description of Artificial Sequence: Synthetic polypeptide"

SEQ ID NO: 4934 - protein, 219 aa, Artificial Sequence; identical to SEQ ID NO: 4901
  source: /note="Description of Artificial Sequence: Synthetic polypeptide"

SEQ ID NO: 4935 - protein, 238 aa, Artificial Sequence; identical to SEQ ID NO: 4096
  source: /note="Description of Artificial Sequence: Synthetic polypeptide"

SEQ ID NO: 4936 - protein, 238 aa, Artificial Sequence; identical to SEQ ID NO: 4097
  source: /note="Description of Artificial Sequence: Synthetic polypeptide"

SEQ ID NO: 4937 - protein, 238 aa, Artificial Sequence; identical to SEQ ID NO: 4098
  source: /note="Description of Artificial Sequence: Synthetic polypeptide"

SEQ ID NO: 4938 - protein, 144 aa, Artificial Sequence; identical to SEQ ID NO: 4099
  source: /note="Description of Artificial Sequence: Synthetic polypeptide"

SEQ ID NO: 4939 - protein, 116 aa, Artificial Sequence; identical to SEQ ID NO: 4100
  source: /note="Description of Artificial Sequence: Synthetic polypeptide"

SEQ ID NO: 4940 - protein, 239 aa, Artificial Sequence
  source: /note="Description of Artificial Sequence: Synthetic polypeptide"
MDTRAPTQLLGLLLLWLPGATFAQVLTQTPSPVSAAVGGTVTINCQSSQSLYNKNWLSWYQKKPGQPPKLLIYKASTLESGVSSRFKGSGSGTQFTLTISGVQCDDAATYYCQGEFSCSSADCTAFGGGTEVVVKGDPVAPTVLIFPPAADQVATGTVTIVCVANKYFPDVTVTWEVDGTTQTTGIENSKTPQNSADCTYNLSSTLTLTSTQYNSHKEYTCKVTQGTTSVVQSFNRGDC

SEQ ID NO: 4941 - protein, 123 aa, Artificial Sequence
  source: /note="Description of Artificial Sequence: Synthetic polypeptide"
DIVMTQTPLSLPVSLGDQASISCRSSQSLESSSGYPHLNWYLQKPGQSPQLLIYRVSNRFSGVLDRFSGSGSGTDFTLQISRVEAEDLGVYFCLQITHVPWTFGGGTKLEIKRADAAPTVSAA

SEQ ID NO: 4942 - protein, 218 aa, Artificial Sequence
  source: /note="Description of Artificial Sequence: Synthetic polypeptide"
DIVMTQTPLSLPVTPGEPASISCRSSQRLVHSHGKTYLHWYLQKPGQSPQLLIYKVSNRFSGVPDRFSGSGSGTDFTLKISRVEAEDVGWFCSQTAHFPYTFGGGTKVEIKRTVAAPSVFIFPPSDEQLKSGTASVVCLLNNFYPREAKVQWKVDNALQSGNSQESVTEQDSKDSTYSLSSTLTLSKADYEKHKVYACEVTHQGLSSPVTKSFNRGEC

SEQ ID NO: 4943 - protein, 218 aa, Artificial Sequence
  source: /note="Description of Artificial Sequence: Synthetic polypeptide"
DIVMTQTPLSLPVTPGEPASISCRSSQSLVHSHGKTYLHWYLQKPGQSPQLLIYKVSNRFSGVPDRFSGSGSGTDFTLKISRVEAEDVGWFCSQTAHFPYTFGGGTKVEIKRTVAAPSVFIFPPSDEQLKSGTASVVCLLNNFYPREAKVQWKVDNALQSGNSQESVTEGDSKDSTYSLSSTLTLSKADYEKHKVYACEVTHQGLSSPVTKSFNRGEC

SEQ ID NO: 4944 - protein, 112 aa, Artificial Sequence
  source: /note="Description of Artificial Sequence: Synthetic polypeptide"
DVLMTQTPLSLAVNLGDQASLSCRSSQTILHSNGNTYLEWYLQKPGQSPRLLIYKVSKRFSGVPDRFSGSGSGTDFTLKISRVEADDLGIYYCFQGSLVPWAFGGGTKLEIK

SEQ ID NO: 4945 - protein, 112 aa, Artificial Sequence; identical to SEQ ID NO: 4349
  source: /note="Description of Artificial Sequence: Synthetic polypeptide"

SEQ ID NO: 4946 - protein, 107 aa, Artificial Sequence [sequence omitted]

SEQ ID NO: 4947 - protein, 219 aa, Artificial Sequence
  source: /note="Description of Artificial Sequence: Synthetic polypeptide"
DIVMTQTPLSLPVTPGEPASISCRSSQRLVHSHGKTYLHWYLQKPGQSPQLLIYKVSNRFSGVPDRFSGSGSGTDFTLKISRVEAEDVGVYFCSQTAHFPYTFGGGTKVEIKRTVAAPSVFIFPPSDEQLKSGTASVVCLLNNFYPREAKVQWKVDNALQSGNSQESVTEQDSKDSTYSLSSTLTLSKADYEKHKVYACEVTHQGLSSPVTKSFNRGEC

SEQ ID NO: 4948 - protein, 219 aa, Artificial Sequence
  source: /note="Description of Artificial Sequence: Synthetic polypeptide"
DIVMTQTPLSLPVTPGEPASISCRSSQSLVHSHGKTYLHWYLQKPGQSPQLLIYKVSNRFSGVPDRFSGSGSGTDFTLKISRVEAEDVGVYFCSQTAHFPYTFGGGTKVEIKRTVAAPSVFIFPPSDEQLKSGTASVVCLLNNFYPREAKVQWKVDNALQSGNSQESVTEQDSKDSTYSLSSTLTLSKADYEKHKVYACEVTHQGLSSPVTKSFNRGEC

SEQ ID NO: 4949 - protein, 441 aa, Artificial Sequence; identical to SEQ ID NO: 4340
  source: /note="Description of Artificial Sequence: Synthetic polypeptide"

SEQ ID NO: 4950 - protein, 106 aa, Artificial Sequence
  source: /note="Description of Artificial Sequence: Synthetic polypeptide"
QIVLTQSPATLSLSPGERATLSCSASSSVSYMHWYQQKPGQSPRLLIYTTSNLASGIPSRFSGSGSGTFYTLTISSLEPEDFAVYYCHQWSSYPWTFGGGTKLEIK

SEQ ID NO: 4951 - protein, 106 aa, Artificial Sequence
  source: /note="Description of Artificial Sequence: Synthetic polypeptide"
QIVLTQSPATLSLSPGERATLSCSASSSVSYMHWYQQKPGQSPRLLIYTTSNLASGIPSRFSGSGSGTDYTLTISSLEPEDAADYYCHQWSSYPWTFGQGTKLEIK

SEQ ID NO: 4952 - protein, 106 aa, Artificial Sequence
  source: /note="Description of Artificial Sequence: Synthetic polypeptide"
EIVLTQSPATLSLSPGEEATLSCSASSSVSYMHWYQQKPGQSPRLLIYTTSNLASGIPSRFSGSGSGTFYTLTISSLEPEDAADYYCHQWSSYPWTFGGGTKLEIK

SEQ ID NO: 4953 - protein, 106 aa, Artificial Sequence
  source: /note="Description of Artificial Sequence: Synthetic polypeptide"
QIVLTQSPATLSLSPGERATLSCSASSSVSYMHWYQQKPGQSPRLLIYTTSNLASGIPSRFSGSGSGTFYTLTISSLEPEDAADYYCHQWSSYPWTFGGGTKLEIK

SEQ ID NO: 4954 - protein, 106 aa, Artificial Sequence
  source: /note="Description of Artificial Sequence: Synthetic polypeptide"
QIVLTQSPATLSLSPGEEATLSCSASSSVSYMHWYQQKSGTSPRLLIYTTSNLASGIPSRFSGSGSGTFYTLTISSLEPEDAADYYCHQWSSYPWTFGGGTKLEIK

SEQ ID NO: 4955 - protein, 106 aa, Artificial Sequence
  source: /note="Description of Artificial Sequence: Synthetic polypeptide"
DIVLSQSPAIMSASLGEEITLTCSASSSVSYMHWYQQKSGTSPKLLITTTSNLASGVPSRFSGSGSGTFYSLTISSVEAEDAADYYCHQWSSYPWTFGGGTKLEIK

SEQ ID NO: 4956 - protein, 106 aa, Artificial Sequence
  source: /note="Description of Artificial Sequence: Synthetic polypeptide"
EIVLTQSPATLSLSPGERATLSCSASSSVSYMHWYQQKPGQAPRLLIYTTSNLASGIPARFSGSGSGTDFTLTISSLEPEDFAVYYCHQWSSYPWTFGQGTKLEIK

SEQ ID NO: 4957 - protein, 106 aa, Artificial Sequence
  source: /note="Description of Artificial Sequence: Synthetic polypeptide"
EIVLTQSPATLSLSPGERATLSCSASSSVSYMHWYQQKPGQSPRLLIYTTSNLASGIPSRFSGSGSGTDFTLTISSLEPEDAADYYCHQWSSYPWTFGQGTKLEIK

SEQ ID NO: 4958 - protein, 106 aa, Artificial Sequence; identical to SEQ ID NO: 4950
  source: /note="Description of Artificial Sequence: Synthetic polypeptide"

SEQ ID NO: 4959 - protein, 112 aa, Artificial Sequence; identical to SEQ ID NO: 4101
  source: /note="Description of Artificial Sequence: Synthetic polypeptide"

SEQ ID NO: 4960 - protein, 109 aa, Artificial Sequence; identical to SEQ ID NO: 4102
  source: /note="Description of Artificial Sequence: Synthetic polypeptide"

SEQ ID NO: 4961 - protein, 114 aa, Artificial Sequence; identical to SEQ ID NO: 4103
  source: /note="Description of Artificial Sequence: Synthetic polypeptide"

SEQ ID NO: 4962 - protein, 110 aa, Artificial Sequence; identical to SEQ ID NO: 4104
  source: /note="Description of Artificial Sequence: Synthetic polypeptide"

SEQ ID NO: 4963 - protein, 116 aa, Artificial Sequence; identical to SEQ ID NO: 4105
  source: /note="Description of Artificial Sequence: Synthetic polypeptide"

SEQ ID NO: 4964 - protein, 112 aa, Artificial Sequence; identical to SEQ ID NO: 4106
  source: /note="Description of Artificial Sequence: Synthetic polypeptide"

SEQ ID NO: 4965 - protein, 112 aa, Artificial Sequence; identical to SEQ ID NO: 4107
  source: /note="Description of Artificial Sequence: Synthetic polypeptide"

SEQ ID NO: 4966 - protein, 219 aa, Artificial Sequence; identical to SEQ ID NO: 4901
  source: /note="Description of Artificial Sequence: Synthetic polypeptide"

SEQ ID NO: 4967 - protein, 215 aa, Artificial Sequence; identical to SEQ ID NO: 4898
  source: /note="Description of Artificial Sequence: Synthetic polypeptide"

SEQ ID NO: 4968 - protein, 219 aa, Artificial Sequence
  source: /note="Description of Artificial Sequence: Synthetic polypeptide"
DVVMTQSPLSLPVTLGQPASISCKSSQSLLYSDAKTYLNWFQQRPGQSPRRLIYQISRLDPGVPDRFSGSGSGTDFTLKISRVEAEDVGVYYCLQGTHYPVLFGQGTRLEIKRTVAAPSVFIFPPSDEQLKSGTASVVCLLNNFYPREAKVQWKVDNALQSGNSQESVTEQDSKDSTYSLSSTLTLSKADYEKHKVYACEVTHQGLSSPVTKSFNRGEC

SEQ ID NO: 4969 - protein, 219 aa, Artificial Sequence; identical to SEQ ID NO: 4899
  source: /note="Description of Artificial Sequence: Synthetic polypeptide"

SEQ ID NO: 4970 - protein, 107 aa, Artificial Sequence [sequence omitted]

SEQ ID NO: 4971 - protein, 107 aa, Artificial Sequence [sequence omitted]

SEQ ID NO: 4972 - protein, 214 aa, Artificial Sequence
  source: /note="Description of Artificial Sequence: Synthetic polypeptide"
DIVMTQSQKFMSTSVGDRVSITCKASQNVGTAVAWYQQKPGQSPKLMIYSASNRYTGVPDRFTGSGSGTDFTLTISNMQSEDLADYFCQQYSSYPLTFGAGTKLELKRADAAPTVSIFPPSSEQLTSGGASVVCFLNNFYPKDINVKWKIDGSERQNGVLNSATDQDSKDSTYSMSSTLTLTKDEYERHNSYTCEATHKTSTSPIVKSFNRNEC

SEQ ID NO: 4973 - protein, 234 aa, Artificial Sequence; identical to SEQ ID NO: 4114
  source: /note="Description of Artificial Sequence: Synthetic polypeptide"

SEQ ID NO: 4974 - protein, 234 aa, Artificial Sequence; identical to SEQ ID NO: 4114
  source: /note="Description of Artificial Sequence: Synthetic polypeptide"

SEQ ID NO: 4975 - protein, 238 aa, Artificial Sequence; identical to SEQ ID NO: 4116
  source: /note="Description of Artificial Sequence: Synthetic polypeptide"

SEQ ID NO: 4976 - protein, 237 aa, Artificial Sequence; identical to SEQ ID NO: 4117
  source: /note="Description of Artificial Sequence: Synthetic polypeptide"

SEQ ID NO: 4977 - protein, 238 aa, Artificial Sequence; identical to SEQ ID NO: 4118
  source: /note="Description of Artificial Sequence: Synthetic polypeptide"

SEQ ID NO: 4978 - protein, 237 aa, Artificial Sequence; identical to SEQ ID NO: 4119
  source: /note="Description of Artificial Sequence: Synthetic polypeptide"

SEQ ID NO: 4979 - protein, 237 aa, Artificial Sequence; identical to SEQ ID NO: 4120
  source: /note="Description of Artificial Sequence: Synthetic polypeptide"

SEQ ID NO: 4980 - protein, 237 aa, Artificial Sequence; identical to SEQ ID NO: 4121
  source: /note="Description of Artificial Sequence: Synthetic polypeptide"

SEQ ID NO: 4981 - protein, 238 aa, Artificial Sequence; identical to SEQ ID NO: 4098
  source: /note="Description of Artificial Sequence: Synthetic polypeptide"

SEQ ID NO: 4982 - protein, 238 aa, Artificial Sequence; identical to SEQ ID NO: 4123
  source: /note="Description of Artificial Sequence: Synthetic polypeptide"

SEQ ID NO: 4983 - protein, 214 aa, Artificial Sequence; identical to SEQ ID NO: 4124
  source: /note="Description of Artificial Sequence: Synthetic polypeptide"

SEQ ID NO: 4984 - protein, 213 aa, Artificial Sequence
  source: /note="Description of Artificial Sequence: Synthetic polypeptide"
SYELTQPPSVSVSPGQTARISCFGDTLPKQYTYWYQQKPGQAPVLVIYKDTERPSGIPERFSGSSSGTTVTLTISGVQAEDEADYYCLSADNSATWVFGGGTKVTVLGQPKSSPSVTLFPPSSEELETNKATLVCTITDFYPGVVTVDWKVDGTPVTQGMETTQPSKQSNNKYMASSYLTLTARAWERHSSYSCQVTHEGHTVEKSLSRADCS

SEQ ID NO: 4985 - protein, 92 aa, Artificial Sequence
  source: /note="Description of Artificial Sequence: Synthetic polypeptide"
MSCKSSQSLLNSRTRKNYLAWYQQKPGQSPKLLIYWASTRESGVPDRFTGSGSGTDFTLTISSVQAEDLAVYYCKQSYNLYTFGGGTKLEIK

SEQ ID NO: 4986 - protein, 109 aa, Artificial Sequence; identical to SEQ ID NO: 4496
  source: /note="Description of Artificial Sequence: Synthetic polypeptide"

SEQ ID NO: 4987 - protein, 109 aa, Artificial Sequence; identical to SEQ ID NO: 4496
  source: /note="Description of Artificial Sequence: Synthetic polypeptide"

SEQ ID NO: 4988 - protein, 109 aa, Artificial Sequence; identical to SEQ ID NO: 4545
  source: /note="Description of Artificial Sequence: Synthetic polypeptide"

SEQ ID NO: 4989 - protein, 109 aa, Artificial Sequence; identical to SEQ ID NO: 4543
  source: /note="Description of Artificial Sequence: Synthetic polypeptide"

SEQ ID NO: 4990 - protein, 109 aa, Artificial Sequence; identical to SEQ ID NO: 4496
  source: /note="Description of Artificial Sequence: Synthetic polypeptide"

SEQ ID NO: 4991 - protein, 109 aa, Artificial Sequence; identical to SEQ ID NO: 4496
  source: /note="Description of Artificial Sequence: Synthetic polypeptide"

SEQ ID NO: 4992 - protein, 109 aa, Artificial Sequence; identical to SEQ ID NO: 4545
  source: /note="Description of Artificial Sequence: Synthetic polypeptide"

SEQ ID NO: 4993 - protein, 109 aa, Artificial Sequence; identical to SEQ ID NO: 4525
  source: /note="Description of Artificial Sequence: Synthetic polypeptide"

SEQ ID NO: 4994 - protein, 109 aa, Artificial Sequence; identical to SEQ ID NO: 4496
  source: /note="Description of Artificial Sequence: Synthetic polypeptide"

SEQ ID NO: 4995 - protein, 109 aa, Artificial Sequence; identical to SEQ ID NO: 4525
  source: /note="Description of Artificial Sequence: Synthetic polypeptide"

SEQ ID NO: 4996 - protein, 92 aa, Artificial Sequence; identical to SEQ ID NO: 4985
  source: /note="Description of Artificial Sequence: Synthetic polypeptide"

SEQ ID NO: 4997 - protein, 109 aa, Artificial Sequence
  source: /note="Description of Artificial Sequence: Synthetic polypeptide"
MTQTPLSLPVSLGDQASISCRSSQSLENSNGNTYLNWYLQKPGQSPQLLIYRVSNRFSGVLDRFSGSGSGTDFTLKISRVEAEDLGVYFCLQVTHVPPTFGGGTKLEIK

SEQ ID NO: 4998 - protein, 109 aa, Artificial Sequence
  source: /note="Description of Artificial Sequence: Synthetic polypeptide"
MTQTPLSLPVSLGDQASISCRSSQSIVHSNGNTYLEWYLQKPGQSPKLLIYKVSNRFSGVPDRFSGSGSGTDFTLKISRVEADDLGVYYCFQGSHVPPTFGGGTKLEIK

SEQ ID NO: 4999 - protein, 109 aa, Artificial Sequence; identical to SEQ ID NO: 4496
  source: /note="Description of Artificial Sequence: Synthetic polypeptide"

SEQ ID NO: 5000 - protein, 109 aa, Artificial Sequence
  source: /note="Description of Artificial Sequence: Synthetic polypeptide"
MTQTPFSLPVSLGDQASISCRSSQSIVHSNGNTYLEWYLQKPGQSPKPLIYKVSNRFSGVPDRFSGSGSGTDFTLKISRVEAEDLGVYYCFQGSHVPLTFGAGTKLELK

SEQ ID NO: 5001 - protein, 109 aa, Artificial Sequence; identical to SEQ ID NO: 4525
  source: /note="Description of Artificial Sequence: Synthetic polypeptide"

SEQ ID NO: 5002 - protein, 109 aa, Artificial Sequence; identical to SEQ ID NO: 4496
  source: /note="Description of Artificial Sequence: Synthetic polypeptide"

SEQ ID NO: 5003 - protein, 93 aa, Artificial Sequence
  source: /note="Description of Artificial Sequence: Synthetic polypeptide"
MSCKSSQSLLNSGNQKNYLTWYQQKPGQPPKLLIYWASTRESGVPDRFTGSGSGTDFTLTISSVQAEDLAVYYCQNDYSYPLTFGAGTKLELK

SEQ ID NO: 5004 - protein, 249 aa, Artificial Sequence
  source: /note="Description of Artificial Sequence: Synthetic polypeptide"
MTQTPLSLPVSLGDQASISCRSSQSLVHSNGNTYLHWYLQKPGQSPKLLIYKVSNRFSGVPDRFSGSGSGTDFTLKISRVEAEDLGVYFCSQSTHVPWTFGGGTKLEIKMDSRLNLVFLVLILKGVQCDVQLVESGGGLVQPGGSRKLSCAASGFTFSSFGMHWVRQAPEKGLEWVAYISSGSSTIYYADTVKGRFTISRDNPKNTLFLQMTSLRSEDTAMYYCARSGGYRYYYAMDYWGQGTSVTVSS

SEQ ID NO: 5005 - protein, 137 aa, Artificial Sequence
  source: /note="Description of Artificial Sequence: Synthetic polypeptide"
MDRLTSSFLLLIVPAYVLSQVTLKESGPGILQPSQTLSLTCSFSGFSLSTSGMGVSWIRQPSGKGLEWLAHIYWDDDKRYNPSLKSRLTISKDTSRNQVFLKITSVDTADTATYYCARSRYGNFAYWGQGTLVTVSA

SEQ ID NO: 5006 - protein, 138 aa, Artificial Sequence
  source: /note="Description of Artificial Sequence: Synthetic polypeptide"
MDSRLNLVFLVLILKGVQCDVQLVESGGGLVQPGGSRKLSCAASGFTFSSFGMHWVRQAPEKGLEWVAYISSGSSTIYYADTVKGRFTISRDNPKNTLFLQMTSLRSEDTAMYYCARLGLKLGNLDYWGQGTTLTVSS

SEQ ID NO: 5007 - protein, 92 aa, Artificial Sequence; identical to SEQ ID NO: 4985
  source: /note="Description of Artificial Sequence: Synthetic polypeptide"

SEQ ID NO: 5008 - protein, 107 aa, Artificial Sequence
  source: /note="Description of Artificial Sequence: Synthetic polypeptide"
MKLSCVASGFTFSNYWMNWVRQSPEKGLEWVAEIRLKSNNYATHYAESVKGRFTISRDDSKSSVYLQMNNLRAEDTGIYYCTRRGPSGYDRAWFAYWGQGTLVTVSA

SEQ ID NO: 5009 - protein, 143 aa, Artificial Sequence
  source: /note="Description of Artificial Sequence: Synthetic polypeptide"
MDRLTSSFLLLIVPAYVLSQVTLKESGPGILQPSQTLSLTCSFSGFSLSTSGMGVSWIRQPSGKGLEWLAHIYWDDDKRYNPSLKSRLTISKDTSRNQVFLKITSVDTADTATYYCARRAPRLYYGYDAMDYWGQGTSVTVSS

SEQ ID NO: 5010 - protein, 140 aa, Artificial Sequence; identical to SEQ ID NO: 4505
  source: /note="Description of Artificial Sequence: Synthetic polypeptide"

SEQ ID NO: 5011 - protein, 137 aa, Artificial Sequence; identical to SEQ ID NO: 5005
  source: /note="Description of Artificial Sequence: Synthetic polypeptide"

SEQ ID NO: 5012 - protein, 248 aa, Artificial Sequence
  source: /note="Description of Artificial Sequence: Synthetic polypeptide"
MDSRLNLVFLVLILKGVQCDVQLVESGGGLVQPGGSRKLSCAASGFTFSSFGMHWVRQAPEKGLEWVAYISSGSSTIYYADTVKGRFTISRDNPKNTLFLQMTSLRSEDTAMYYCASYGSSYGGTFDYWGQGTTLTVSSMTQTPLSLPVSLGDQASISCRSSQSLVHSNGNTYLHWYLQKPGQSPKLLIYKVSNRFSGVPDRFSGSGSGTDFTLKISRVEAEDLGVYFCSQSTHVPLTFGAGTKLELK

SEQ ID NO: 5013 - protein, 109 aa, Artificial Sequence; identical to SEQ ID NO: 4997
  source: /note="Description of Artificial Sequence: Synthetic polypeptide"

SEQ ID NO: 5014 - protein, 109 aa, Artificial Sequence; identical to SEQ ID NO: 4496
  source: /note="Description of Artificial Sequence: Synthetic polypeptide"

SEQ ID NO: 5015 - protein, 109 aa, Artificial Sequence; identical to SEQ ID NO: 4496
  source: /note="Description of Artificial Sequence: Synthetic polypeptide"

SEQ ID NO: 5016 - protein, 109 aa, Artificial Sequence; identical to SEQ ID NO: 4496
  source: /note="Description of Artificial Sequence: Synthetic polypeptide"

SEQ ID NO: 5017 - protein, 109 aa, Artificial Sequence; identical to SEQ ID NO: 4496
  source: /note="Description of Artificial Sequence: Synthetic polypeptide"

SEQ ID NO: 5018 - protein, 92 aa, Artificial Sequence; identical to SEQ ID NO: 4985
  source: /note="Description of Artificial Sequence: Synthetic polypeptide"

SEQ ID NO: 5019 - protein, 109 aa, Artificial Sequence; identical to SEQ ID NO: 4525
  source: /note="Description of Artificial Sequence: Synthetic polypeptide"

SEQ ID NO: 5020 - protein, 109 aa, Artificial Sequence; identical to SEQ ID NO: 4496
  source: /note="Description of Artificial Sequence: Synthetic polypeptide"

SEQ ID NO: 5021 - protein, 109 aa, Artificial Sequence; identical to SEQ ID NO: 4496
  source: /note="Description of Artificial Sequence: Synthetic polypeptide"

SEQ ID NO: 5022 - protein, 109 aa, Artificial Sequence; identical to SEQ ID NO: 4525
  source: /note="Description of Artificial Sequence: Synthetic polypeptide"

SEQ ID NO: 5023 - protein, 109 aa, Artificial Sequence; identical to SEQ ID NO: 4525
  source: /note="Description of Artificial Sequence: Synthetic polypeptide"

SEQ ID NO: 5024 - protein, 109 aa, Artificial Sequence; identical to SEQ ID NO: 4525
  source: /note="Description of Artificial Sequence: Synthetic polypeptide"

SEQ ID NO: 5025 - protein, 109 aa, Artificial Sequence; identical to SEQ ID NO: 4545
  source: /note="Description of Artificial Sequence: Synthetic polypeptide"

SEQ ID NO: 5026 - protein, 109 aa, Artificial Sequence; identical to SEQ ID NO: 4545
  source: /note="Description of Artificial Sequence: Synthetic polypeptide"

SEQ ID NO: 5027 - protein, 109 aa, Artificial Sequence; identical to SEQ ID NO: 4545
  source: /note="Description of Artificial Sequence: Synthetic polypeptide"

SEQ ID NO: 5028 - protein, 109 aa, Artificial Sequence; identical to SEQ ID NO: 4545
  source: /note="Description of Artificial Sequence: Synthetic polypeptide"

SEQ ID NO: 5029 - protein, 109 aa, Artificial Sequence
  source: /note="Description of Artificial Sequence: Synthetic polypeptide"
MTQTPLSLPVSLGDQASISCRSSQGIVHSTGNTYLEWYLQKPGQSPKLLIYKVSNRFSGVPDRFSGSGSGTDFTLKISRVEAEDLGVYYCFQGSHVPLTFGAGTKLELK

SEQ ID NO: 5030 - protein, 109 aa, Artificial Sequence; identical to SEQ ID NO: 4545
  source: /note="Description of Artificial Sequence: Synthetic polypeptide"

SEQ ID NO: 5031 - protein, 136 aa, Artificial Sequence
  source: /note="Description of Artificial Sequence: Synthetic polypeptide"
MDSRLNLVFLVLILKGVQCDVQLVESGGGLVQPGGSRKLSCAASGFTFSSFGMHWVRQAPEKGLEWVAYISSGSSTIYYADTVKGRFTISRDNPKNTLFLQMTSLRSEDTAMYYCATYGIYAMDYWGQGTSVTVSS

SEQ ID NO: 5032 - protein, 139 aa, Artificial Sequence
  source: /note="Description of Artificial Sequence: Synthetic polypeptide"
MDSRLNLVFLVLILKGVQCDVQLVESGGGLVQPGGSRKLSCAASGFTFSSFGMHWVRQAPEKGLEWVAYISSGSSTIYYADTVKGRFTISRDNPKNTLFLQMTSLRSEDTAMYYCARYGNYGYYAMDYWGQGTSVTVSS

SEQ ID NO: 5033 - protein, 135 aa, Artificial Sequence
  source: /note="Description of Artificial Sequence: Synthetic polypeptide"
MDSRLNLVFLVLILKGVQCDVQLVESGGGLVQPGGSRKLSCAASGFTFSSFGMHWVRQAPEKGLEWVAYISSGSSTIYYADTVKGRFTISRDNPKNTLFLQMTSLRSEDTAMYYCARSRGYFDVWGAGTTVTVSS

SEQ ID NO: 5034 - protein, 245 aa, Artificial Sequence
  source: /note="Description of Artificial Sequence: Synthetic polypeptide"
MDSRLNLVFLVLILKGVQCDAQLVESGGGLVQPGGSRKLSCAASGFTFSSFGMHWVRQAPEKGLEWVAYISSGSSTIYYADTVKGRFTISRDNPKNTLFLQMTSLRSEDTAMYYCAIYYYGSSYYWGQGTTLTVSSMTQTPLSLPVSLGDQASISCRSSQSIVHSNGNTYLEWYLQKPGQSPKLLIYKVSNRFSGVPDRFSGSGSGTDFTLKISRVEAEDLGVYYCFQGSHVPPTFGAGTKLELK

SEQ ID NO: 5035 - protein, 109 aa, Artificial Sequence; identical to SEQ ID NO: 4525
  source: /note="Description of Artificial Sequence: Synthetic polypeptide"

SEQ ID NO: 5036 - protein, 109 aa, Artificial Sequence; identical to SEQ ID NO: 4545
  source: /note="Description of Artificial Sequence: Synthetic polypeptide"

SEQ ID NO: 5037 - protein, 109 aa, Artificial Sequence; identical to SEQ ID NO: 4525
  source: /note="Description of Artificial Sequence: Synthetic polypeptide"

SEQ ID NO: 5038 - protein, 109 aa, Artificial Sequence
  source: /note="Description of Artificial Sequence: Synthetic polypeptide"
MTQTPLSLPVSLGDQASISCRSSQSLVHSNGNTYLHWYLQKPGQSPKLLIYKVSNRFSGVPDRFSGSGSGTDFTLKISRVEAEDLGVYFCSQSTHVPPTFGGGTKLEIK

SEQ ID NO: 5039 - protein, 109 aa, Artificial Sequence
  source: /note="Description of Artificial Sequence: Synthetic polypeptide"
MTQTPLSLPVSLGDQASISCRSSQSIVHSNGNTYLEWYLQKPGQSPKLLIYKVSNRFSGVPDRFSGSGSGTDFTLKISRVEAEDLGVYYCFQGSHVPPTFGAGTKLELK

SEQ ID NO: 5040 - protein, 109 aa, Artificial Sequence
  source: /note="Description of Artificial Sequence: Synthetic polypeptide"
MTQTPLSLPVSLGDQASISCRSSQSIVHSNGNTYLEWYLQKPGQSPKLLIYKVSNRFSGVPDRFSGSGSGTDFTLKISRVEAEDLGVYHCFQGSHVPLTFGAGTKLELK

SEQ ID NO: 5041 - protein, 109 aa, Artificial Sequence
  source: /note="Description of Artificial Sequence: Synthetic polypeptide"
MAQTPLSLPVSLGDQASISCRSSQRLVHSNGNTYLHWYLQKPGQSPKLLIYKVSNRFSGVPDRFSGSGSGTDFTLKISRVEAEDLGVYFCSQSTHVPLTFGAGTKLELK

SEQ ID NO: 5042 - protein, 247 aa, Artificial Sequence
  source: /note="Description of Artificial Sequence: Synthetic polypeptide"
MTQTPLSLPVSLGDQASISCRSSQSLVHSNGNTYLHWYLQKPGQSPKLLIYKVSNRFSGVPDRFSGSGSGTDFTLKISRVEAEDLGVYFCSQSTHVPLTFGAGTKLELKMDRLTSSFLLLIVPAYVLSQVTLKESGPGILQPSQTLSLTCSFSGFSLSTSGMGVSWIRQPSGKGLEWLAHIYWDDDKRYNPSLKSRLTISKDTSRNQVFLKITSVDTADTATYYCARRGRYYAMDYWGQGTSVTVSS

SEQ ID NO: 5043 - protein, 139 aa, Artificial Sequence
  source: /note="Description of Artificial Sequence: Synthetic polypeptide"
MYLGLNCVFIVFLLKGVQSEVKLEESGGGLVQPGGSMKLSCVASGFTFSNYWMNWVRQSPEKGLEWVAEIRLKSNNYATHYAESVKGRFTISRDDSKSSVYLQMNNLRAEDTGIYYCTRARRGYAMDYWGQGTSVTVSS

SEQ ID NO: 5044 - protein, 100 aa, Artificial Sequence
  source: /note="Description of Artificial Sequence: Synthetic polypeptide"
MSCKASGYTFTSYWMHWVKQRPGQGLEWIGYINPSTGYTEYNQKFKDKATLTADKSSSTAYMQLSSLTSEDSAVYYCDYYGSSYGYFDVWGAGTTVTVSS

SEQ ID NO: 5045 - protein, 139 aa, Artificial Sequence
  source: /note="Description of Artificial Sequence: Synthetic polypeptide"
MDSRLNLVFLVLILKGVQCDVQLVESGGGLVQPGGSRKLSCAASGFTFSSFGMHWVRQAPEKGLEWVAYISSGSSTIYYADTVKGRFTISRDNPKNTLFLQMTSLRSEDTAMYYCARSNYVIYYAMDYWGQGTSVTVSS

SEQ ID NO: 5046 - protein, 139 aa, Artificial Sequence
  source: /note="Description of Artificial Sequence: Synthetic polypeptide"
MDSRLNLVFLVLILKGVQCDVQLVESGGGLVQPGGSRKLSCAASGFTFSSFGMHWVRQAPEKGLEWVAYISSGSSTIYYADTVKGRFTISRDNPKNTLFLQMTSLRSEDTAMYYCARIGFGYYYAMDYWGQGTSVTVSS

SEQ ID NO: 5047 - protein, 133 aa, Artificial Sequence
  source: /note="Description of Artificial Sequence: Synthetic polypeptide"
MDSRLNLVFLVLILKGVQCDVQLVESGGGLVQPGGSRKLSCAASGFTFSSFGMHWVRQAPEKGLEWVAYISSGSSTIYYADTVKGRFTISRDNPKNTLFLQMTSLRSEDTAMYYCARYDGYYWGQGTTLTVSS

SEQ ID NO: 5048 - protein, 135 aa, Artificial Sequence
  source: /note="Description of Artificial Sequence: Synthetic polypeptide"
MDSRLNLVFLVLILKGVQCDVQLVESGGGLVQPGGSRKLSCAASGFTFSSFGMHWVRQAPEKGLEWVAYISSGSSTIYYADTVKGRFTISRDNPKNTLFLQMTSLRSEDTAMYYCARDEGYFDYWGQGTTLTVSS

SEQ ID NO: 5049 - protein, 140 aa, Artificial Sequence; identical to SEQ ID NO: 4531
  source: /note="Description of Artificial Sequence: Synthetic polypeptide"

SEQ ID NO: 5050 - protein, 137 aa, Artificial Sequence
  source: /note="Description of Artificial Sequence: Synthetic polypeptide"
MDRLTSSFLLLIVPAYVLSQVTLKESGPGILQPSQTLSLTCSFSGFSLSTSGMGVSWIRQPSGKGLEWLAHIYWDDDKRYNPSLKSRLTISKDTSRNQVFLKITSVDTADTATYYCASYGKIPFDYWGQGTTLTVSS

SEQ ID NO: 5051 - protein, 109 aa, Artificial Sequence; identical to SEQ ID NO: 4496
  source: /note="Description of Artificial Sequence: Synthetic polypeptide"

SEQ ID NO: 5052 - protein, 138 aa, Artificial Sequence
  source: /note="Description of Artificial Sequence: Synthetic polypeptide"
MDRLTSSLLLLIVPAYVLSQVTLKESGPGILQPSQTLSLTCSFSGFSLSTSGMGVSWIRQPSGKGLEWLAHIYWDDDKRYNPSLKSRLTISKDTSSNQVFLKITSVDTADTATYYCARRELRLPWFAYWGQGTLVTVS

SEQ ID NO: 5053 - protein, 136 aa, Artificial Sequence
  source: /note="Description of Artificial Sequence: Synthetic polypeptide"
MDSRLNLVFLVLILKGVQCDVQLVESGGGLVQPGGSRNLSCAASGFTFSSFGMHWVRQAPVKGLEWVAYISSGSSTIYYADTVKGRFTISRDNPKNTLFLQMTSLRSEDTAMYYCASDYGSSSFAYWGQGTLVTVS

SEQ ID NO: 5054 - protein, 109 aa, Artificial Sequence
  source: /note="Description of Artificial Sequence: Synthetic polypeptide"
MTQSPLSLPVSLGDQASISCRSSQSIVHSNGNTYLEWYLQKPGQSPKLLIYKVSNRFSGVPDRFSGSGSGTDFTLKISRVEAEDLGVYYCFQGSHVPWTFGGGTKLEIK

SEQ ID NO: 5055 - protein, 139 aa, Artificial Sequence
  source: /note="Description of Artificial Sequence: Synthetic polypeptide"
MGWSYIILFLVATATGVHSQVQLQQPGAELVKPGASVKLSCKASGYTFTSYYMYWVKQRPGQGLEWIGGINPSNGGTNFNEKFKSKATLTVDKSSSTAYMQLSSLTSEDSAVYYCTRERKIHYYGYDYWGQGTTLTVSS

SEQ ID NO: 5056 - protein, 138 aa, Artificial Sequence
  source: /note="Description of Artificial Sequence: Synthetic polypeptide"
MDSRLNLVFLVLILKGVQCDVQLVESGGGLVQPGGSRKLSCAASGFTFSSFGMHWVRQAPEKGLEWVAYISSGSSTIYYADTVKGRFTISRDNPKNTLFLQMTSLRSEDTAMYYCARIYYGSSGAFAYWGQGTLVTVS

SEQ ID NO: 5057 - protein, 136 aa, Artificial Sequence
  source: /note="Description of Artificial Sequence: Synthetic polypeptide"
MDSRLNLVFLVLILKGVQCDVQLVESGGGLVQPGGSRKLSCAASGFTFSSFGMHWVRQAPEKGLEWVAYISSGSSTIYYADTVKGRFTISRDNPKNTLFLQMTSLRSEDTAMYYCARGGTGAMDYWGQGTSVTVSS

SEQ ID NO: 5058 - protein, 138 aa, Artificial Sequence
  source: /note="Description of Artificial Sequence: Synthetic polypeptide"
MNRLTSSLLLLIVPAYVLSQVTLKESGPGILQPSQTLSLTCSFSGFSLSTSGMGVSWIRQPSGKGLEWLAHIYWDDDKRYNPSLKSRLTISKDTSSNQVFLKITSVDTADTATYYCARRARRYAMDYWGQGTSVTVSS

SEQ ID NO: 5059 - protein, 136 aa, Artificial Sequence; identical to SEQ ID NO: 4478
  source: /note="Description of Artificial Sequence: Synthetic polypeptide"

SEQ ID NO: 5060 - protein, 135 aa, Artificial Sequence
  source: /note="Description of Artificial Sequence: Synthetic polypeptide"
MNRLTSSLLLLIVPAYVLSQVTLKESGPGILQPSQTLSLTCSFSGFSLSTSGMGVSWIRQPSGKGLEWLAHIYWDDDKRYNPSLKSRLTISKDTSSNQVFLKITSVDTADTATYYCARGSNFDYWGQGTTLTVSS

SEQ ID NO: 5061 - protein, 142 aa, Artificial Sequence
  source: /note="Description of Artificial Sequence: Synthetic polypeptide"
MDRLTSSLLLLIVPAYVLSQVTLKESGPGILQPSQTLSLTCSFSGFSLSTSGMGVSWIRQPSGKGLEWLAHIYWDDDKRYNPSLKSRLTISKDTSSNQVFLKITSVDTADTATYYCARRGVYYRYDDAMDYWGQGTSVTVSS

SEQ ID NO: 5062 - protein, 137 aa, Artificial Sequence
  source: /note="Description of Artificial Sequence: Synthetic polypeptide"
MDSRLNLVFLVLILKGVQCDVQLVESGGGLVQPGGSRKLSCAASGFTFSSFGMHWVRQAPEKGLEWVAYISSGSSTIYYADTVKGRFTISRDNPKNTLFLQMTSLRSEDTAMYYCARGGHVGAMDYWGQGTSVTVSS

SEQ ID NO: 5063 - protein, 109 aa, Artificial Sequence; identical to SEQ ID NO: 4496
  source: /note="Description of Artificial Sequence: Synthetic polypeptide"

SEQ ID NO: 5064 - protein, 141 aa, Artificial Sequence
  source: /note="Description of Artificial Sequence: Synthetic polypeptide"
MDRLTSSFLLLIVPAYVLSQVTLKESGPGILKPPQTLSLTCSFSGFSLSTSGMGVGWIRQPSGKGLEWLAHIWWDDDKYYNPSLKSQLTISKDTSRNQVFLKITSVDTADTATYYCARSATTGTKGTMDYWGQGTSVTVSS

SEQ ID NO: 5065 - protein, 139 aa, Artificial Sequence
  source: /note="Description of Artificial Sequence: Synthetic polypeptide"
MDSRLNLVFLVLILKGVQCDVQLVESGGGLVQPGGSRKLSCAASGFSFSSFGMHWVRQAPEKGLEWVAYISSGRSTIYYADTVKGRFTISRDNPKNTLFLQMTSLRSEDTAMYYCARLRGNLDYAMDYWGQGTSVTVSS

SEQ ID NO: 5066 - protein, 136 aa, Artificial Sequence
  source: /note="Description of Artificial Sequence: Synthetic polypeptide"
MDSRLNLVFLVLILKGVQCDVQLVESGGGLVQPGGSRKLSCAASGFTFSSFGMHWVRQAPEKGLEWVAYISSGSSTIYYADTVKGRFTISRDNPKNTLFLQMTSLRSEDTAMYYCARLDGYRGDYWGQGTTLTVSS

SEQ ID NO: 5067 - protein, 147 aa, Artificial Sequence
  source: /note="Description of Artificial Sequence: Synthetic polypeptide"
MNLGLSLIFLVLVLKGVQCEVKLVESGGGLVQPGGSLKLSCATSGFTFSDYYMYWVRQTPEKRLEWVAYISNGGGRTYYPDTVKGRFTISRDNAKNTLYLQMSRLKSEDTAMYYCARGTSYGSGLHYYAMDYWGQGTSVTVSSAKTT

SEQ ID NO: 5068 - protein, 136 aa, Artificial Sequence
  source: /note="Description of Artificial Sequence: Synthetic polypeptide"
MDSRLNLVFLVLILKGVQCDVQLVESGGGLVQPGGSRKLSCAASGFTFSSFGMHWVRQAPEKGLEWVAYISSGSSTIYYADTVKGRFTISRDNPKNTLFLQMTSLRSEDTAMYYCARYYYYAMDYWGQGTSVTVSS

SEQ ID NO: 5069 - protein, 139 aa, Artificial Sequence
  source: /note="Description of Artificial Sequence: Synthetic polypeptide"
MDSRLNLVFLVLILKGVQCDVQLVESGGGLVQPGGSRKLSCAASGFTFSSFGMHWVRQAPEKGLEWVAYISGGSSTIYYADTVKGRFTISRDNPKNTLFLQMTSLRSKDTAMYYCARSPFLRLQGLAYWGQGTLVTVSA

SEQ ID NO: 5070 - protein, 140 aa, Artificial Sequence
  source: /note="Description of Artificial Sequence: Synthetic polypeptide"
MDRLTSSFLLLIVPAYVLPQVTLKESGPGILKPSQTLSLTCSFSGFSLSTSGMGVGWIRQPSGKGLEWLAHIWWDDDKYYNPSLKSQLTISKDTSRNQVFLKITSVDTADTATYYCARRASRGTDAMDYWGQGTSVTVSS

SEQ ID NO: 5071 - protein, 98 aa, Artificial Sequence; identical to SEQ ID NO: 4488
  source: /note="Description of Artificial Sequence: Synthetic polypeptide"

SEQ ID NO: 5072 - protein, 232 aa, Artificial Sequence
  source: /note="Description of Artificial Sequence: Synthetic polypeptide"
EVQLVESGGDLVKPGGSLKLSCAASGFTFSSYGMSWVRQTPDKRLDWVATISSGGSYTYYPDSVKGRFTISRDNAKNTLYLQMSSLKSEDTAMYYCARSTMIATGTFAYWGQGTLVTVSADVLMTQSPLSLPVSLGDQASISCRSSQSIVHSNGNTYLEWYLQKPGQSPKLLIYKVSNRFSGVPDRFSGSGSGTDFTLKISRVEAEDLGVYYCFQGSHVPWTFGGGTKLEIK

SEQ ID NO: 5073 - protein, 112 aa, Artificial Sequence
  source: /note="Description of Artificial Sequence: Synthetic polypeptide"
DVVMTQTPLSLPVSLGDQASISCRSSQSLVHSNGNTYLHWYLQKPGQSPKLLIYKVSNRFSGVPDRFSGSGSGTDFTLKISRVEAEDLGVYFCSQSTHVPLTFGAGTKLELK

SEQ ID NO: 5074 - protein, 109 aa, Artificial Sequence; identical to SEQ ID NO: 4496
  source: /note="Description of Artificial Sequence: Synthetic polypeptide"

SEQ ID NO: 5075 - protein, 109 aa, Artificial Sequence; identical to SEQ ID NO: 4525
  source: /note="Description of Artificial Sequence: Synthetic polypeptide"

SEQ ID NO: 5076 - protein, 109 aa, Artificial Sequence; identical to SEQ ID NO: 4496
  source: /note="Description of Artificial Sequence: Synthetic polypeptide"

SEQ ID NO: 5077 - protein, 92 aa, Artificial Sequence
  source: /note="Description of Artificial Sequence: Synthetic polypeptide"
MSCKSSQSLLNSRTRKNYLAWYQQKPGQSPKLLIYWASTRESGVPDRFTGSGSGTDFTLTISSVQAEDLAVYYCKQSYNLPTFGGGTKLEIK

SEQ ID NO: 5078 - protein, 112 aa, Artificial Sequence
  source: /note="Description of Artificial Sequence: Synthetic polypeptide"
DVVMTQTPLSLPVSLGDQASISCRSSQSLVHSNGNTYLHWYLQKPGQSPKLLIYKVSNRFSGVPDRFSGSGSGTDFTLKISRVEAEDLGVYFCSQSTHVPPTFGGGTKLEIK

SEQ ID NO: 5079 - protein, 111 aa, Artificial Sequence
  source: /note="Description of Artificial Sequence: Synthetic polypeptide"
DIVLTQSPASLAVSLGQRATISCKASQSVDYDGDSYMNWYQQKPGQPPKLLIYAASNLESGIPARFSGSGSGTDFTLNIHPVEEEDAATYYCQQSNEDPRTFGGGTKLEIK

SEQ ID NO: 5080 - protein, 109 aa, Artificial Sequence; identical to SEQ ID NO: 5039
  source: /note="Description of Artificial Sequence: Synthetic polypeptide"

SEQ ID NO: 5081 - protein, 109 aa, Artificial Sequence
  source: /note="Description of Artificial Sequence: Synthetic polypeptide"
MTQTPLSLPVSLGDQASISCRSSQSIVHSNGNTYLEWYLQKPGQSPKLLIYKVSNRFSGVPDRFSGSGSGTDFTLKISRVEAEDLGVYYCFQGSHVPRTFGGGTKLEIK

SEQ ID NO: 5082 - protein, 109 aa, Artificial Sequence; identical to SEQ ID NO: 4525
  source: /note="Description of Artificial Sequence: Synthetic polypeptide"

SEQ ID NO: 5083 - protein, 109 aa, Artificial Sequence; identical to SEQ ID NO: 5038
  source: /note="Description of Artificial Sequence: Synthetic polypeptide"

SEQ ID NO: 5084 - protein, 109 aa, Artificial Sequence; identical to SEQ ID NO: 4496
  source: /note="Description of Artificial Sequence: Synthetic polypeptide"

SEQ ID NO: 5085 - protein, 109 aa, Artificial Sequence; identical to SEQ ID NO: 4545
  source: /note="Description of Artificial Sequence: Synthetic polypeptide"

SEQ ID NO: 5086 - protein, 109 aa, Artificial Sequence; identical to SEQ ID NO: 5081
  source: /note="Description of Artificial Sequence: Synthetic polypeptide"

SEQ ID NO: 5087 - protein, 109 aa, Artificial Sequence; identical to SEQ ID NO: 4496
  source: /note="Description of Artificial Sequence: Synthetic polypeptide"

SEQ ID NO: 5088 - protein, 92 aa, Artificial Sequence; identical to SEQ ID NO: 4985
  source: /note="Description of Artificial Sequence: Synthetic polypeptide"

SEQ ID NO: 5089 - protein, 109 aa, Artificial Sequence
  source: /note="Description of Artificial Sequence: Synthetic polypeptide"
MTQTPLSLPVSLGDQASISCRSSQSLVHSNGNTYLHWYLQKPGQSPKLLIYKVSNRSSGVPDRFSGSGSGTDFTLKISRVEAEDLGVYFCSQSTHVPPTFGGGTKLEIK

SEQ ID NO: 5090 - protein, 109 aa, Artificial Sequence
  source: /note="Description of Artificial Sequence: Synthetic polypeptide"
MTQTPLTLSVTIGQPASISCKSSQSLLYSNGKTYLNWLLQRPGQSPKRLIYLVSKLDSGVPDRFTGSGSGTDFTLKISRVEAEDLGVYYCVQGTHFPFMFGSGTKLEIK

SEQ ID NO: 5091 - protein, 109 aa, Artificial Sequence; identical to SEQ ID NO: 5038
  source: /note="Description of Artificial Sequence: Synthetic polypeptide"

SEQ ID NO: 5092 - protein, 109 aa, Artificial Sequence; identical to SEQ ID NO: 4496
  source: /note="Description of Artificial Sequence: Synthetic polypeptide"

SEQ ID NO: 5093 - protein, 109 aa, Artificial Sequence; identical to SEQ ID NO: 4496
  source: /note="Description of Artificial Sequence: Synthetic polypeptide"

SEQ ID NO: 5094 - protein, 109 aa, Artificial Sequence; identical to SEQ ID NO: 4997
  source: /note="Description of Artificial Sequence: Synthetic polypeptide"

SEQ ID NO: 5095 - protein, 109 aa, Artificial Sequence; identical to SEQ ID NO: 4496
  source: /note="Description of Artificial Sequence: Synthetic polypeptide"

SEQ ID NO: 5096 - protein, 109 aa, Artificial Sequence; identical to SEQ ID NO: 4496
  source: /note="Description of Artificial Sequence: Synthetic polypeptide"

SEQ ID NO: 5097 - protein, 109 aa, Artificial Sequence; identical to SEQ ID NO: 4496
  source: /note="Description of Artificial Sequence: Synthetic polypeptide"

SEQ ID NO: 5098 - protein, 109 aa, Artificial Sequence; identical to SEQ ID NO: 5038
  source: /note="Description of Artificial Sequence: Synthetic polypeptide"

SEQ ID NO: 5099 - protein, 109 aa, Artificial Sequence; identical to SEQ ID NO: 4496
  source: /note="Description of Artificial Sequence: Synthetic polypeptide"

SEQ ID NO: 5100 - protein, 109 aa, Artificial Sequence; identical to SEQ ID NO: 4496
  source: /note="Description of Artificial Sequence: Synthetic polypeptide"

SEQ ID NO: 5101 - protein, 109 aa, Artificial Sequence; identical to SEQ ID NO: 4496
  source: /note="Description of Artificial Sequence: Synthetic polypeptide"

SEQ ID NO: 5102 - protein, 109 aa, Artificial Sequence; identical to SEQ ID NO: 4543
  source: /note="Description of Artificial Sequence: Synthetic polypeptide"

SEQ ID NO: 5103 - protein, 109 aa, Artificial Sequence; identical to SEQ ID NO: 4496
  source: /note="Description of Artificial Sequence: Synthetic polypeptide"

SEQ ID NO: 5104 - protein, 109 aa, Artificial Sequence; identical to SEQ ID NO: 4496
  source: /note="Description of Artificial Sequence: Synthetic polypeptide"

SEQ ID NO: 5105 - protein, 109 aa, Artificial Sequence; identical to SEQ ID NO: 4496
  source: /note="Description of Artificial Sequence: Synthetic polypeptide"

SEQ ID NO: 5106 - protein, 109 aa, Artificial Sequence; identical to SEQ ID NO: 4525
  source: /note="Description of Artificial Sequence: Synthetic polypeptide"

SEQ ID NO: 5107 - protein, 109 aa, Artificial Sequence; identical to SEQ ID NO: 4496
  source: /note="Description of Artificial Sequence: Synthetic polypeptide"

SEQ ID NO: 5108 - protein, 92 aa, Artificial Sequence; identical to SEQ ID NO: 4985
  source: /note="Description of Artificial Sequence: Synthetic polypeptide"

SEQ ID NO: 5109 - protein, 109 aa, Artificial Sequence; identical to SEQ ID NO: 4496
  source: /note="Description of Artificial Sequence: Synthetic polypeptide"

SEQ ID NO: 5110 - protein, 109 aa, Artificial Sequence; identical to SEQ ID NO: 4525
  source: /note="Description of Artificial Sequence: Synthetic polypeptide"

SEQ ID NO: 5111 - protein, 121 aa, Artificial Sequence
  source: /note="Description of Artificial Sequence: Synthetic polypeptide"
MFWIPASSSDVVMTQTPLSLPVSLGDQASISCRSSQSLVHSNGNTYLHWYLQKPGQSPKLLIYKVSNRFSGVPDRFSGSGSGTDFTLKISRVEAEDLGVYFCSQSTHVPWTFGGGTKLEIK

SEQ ID NO: 5112 - protein, 109 aa, Artificial Sequence
  source: /note="Description of Artificial Sequence: Synthetic polypeptide"
MTQTPLSLPVSLGDQASISCRSSQSIVHSNGNTYLEWYLQKPGQSPKLLIYKVSNRFSGVPDRFSGSGSGTDFTLKISRVEAEDLGVYYCFQGSHVPLTFGSGTKLEIK

SEQ ID NO: 5113 - protein, 109 aa, Artificial Sequence; identical to SEQ ID NO: 4496
  source: /note="Description of Artificial Sequence: Synthetic polypeptide"

SEQ ID NO: 5114 - protein, 109 aa, Artificial Sequence; identical to SEQ ID NO: 4525
  source: /note="Description of Artificial Sequence: Synthetic polypeptide"

SEQ ID NO: 5115 - protein, 109 aa, Artificial Sequence; identical to SEQ ID NO: 5038
  source: /note="Description of Artificial Sequence: Synthetic polypeptide"

SEQ ID NO: 5116 - protein, 109 aa, Artificial Sequence; identical to SEQ ID NO: 4496
  source: /note="Description of Artificial Sequence: Synthetic polypeptide"

SEQ ID NO: 5117 - protein, 109 aa, Artificial Sequence; identical to SEQ ID NO: 4496
  source: /note="Description of Artificial Sequence: Synthetic polypeptide"

SEQ ID NO: 5118 - protein, 109 aa, Artificial Sequence; identical to SEQ ID NO: 4496
  source: /note="Description of Artificial Sequence: Synthetic polypeptide"

SEQ ID NO: 5119 - protein, 109 aa, Artificial Sequence; identical to SEQ ID NO: 4496
  source: /note="Description of Artificial Sequence: Synthetic polypeptide"

SEQ ID NO: 5120 - protein, 109 aa, Artificial Sequence; identical to SEQ ID NO: 4525
  source: /note="Description of Artificial Sequence: Synthetic polypeptide"

SEQ ID NO: 5121 - protein, 109 aa, Artificial Sequence; identical to SEQ ID NO: 4545
  source: /note="Description of Artificial Sequence: Synthetic polypeptide"

SEQ ID NO: 5122 - protein, 109 aa, Artificial Sequence; identical to SEQ ID NO: 4496
  source: /note="Description of Artificial Sequence: Synthetic polypeptide"

SEQ ID NO: 5123 - protein, 109 aa, Artificial Sequence; identical to SEQ ID NO: 4496
  source: /note="Description of Artificial Sequence: Synthetic polypeptide"

SEQ ID NO: 5124 - protein, 109 aa, Artificial Sequence; identical to SEQ ID NO: 4496
  source: /note="Description of Artificial Sequence: Synthetic polypeptide"

SEQ ID NO: 5125 - protein, 109 aa, Artificial Sequence; identical to SEQ ID NO: 4496
  source: /note="Description of Artificial Sequence: Synthetic polypeptide"

SEQ ID NO: 5126 - protein, 109 aa, Artificial Sequence
  source: /note="Description of Artificial Sequence: Synthetic polypeptide"
MTQTPLSLPVSLGDQASISCRSSQSIVHSNGNTYLEWYLQKPGQSPKLLIYKVSNRFSGVPDRFSGSGSGTDFTLKISRVEAEDLGVYYCFQGSHVPPTFGSGTKLEIK

SEQ ID NO: 5127 - protein, 109 aa, Artificial Sequence; identical to SEQ ID NO: 4496
  source: /note="Description of Artificial Sequence: Synthetic polypeptide"

SEQ ID NO: 5128 - protein, 109 aa, Artificial Sequence; identical to SEQ ID NO: 5038
  source: /note="Description of Artificial Sequence: Synthetic polypeptide"

SEQ ID NO: 5129 - protein, 109 aa, Artificial Sequence
  source: /note="Description of Artificial Sequence: Synthetic polypeptide"
MTQTPLSLPVSLGDQASISCRSSQSIVHSNGNTYLEWYLQKPGQSPKLLIYKVSNRFSGVPDRFSGSGSGTDFTLKISRVEAEDLGVYYCFQGSHVPPTFGGGTKVEIK

SEQ ID NO: 5130 - protein, 112 aa, Artificial Sequence
  source: /note="Description of Artificial Sequence: Synthetic polypeptide"
DIVMTQSPLSLPVTPGEPASISCRSSQSLVYSNGDTYLHWYLQKPGQSPKLLIYKVSNRFSGVPDRFSGSGSGTDFTLKISRVEAEDVGVYYCSQSTHVPWTFGGGTKVEIK

SEQ ID NO: 5131 - protein, 80 aa, Artificial Sequence
  source: /note="Description of Artificial Sequence: Synthetic polypeptide"
ELVMTQSPLSLPVTPGEPASISCWYLQKPGQSPQLLIYGVPDRFSGSGSGTDFTLKISRVEAEDVGVYYCFGGGTKVEIK

SEQ ID NO: 5132 - protein, 134 aa, Artificial Sequence
  source: /note="Description of Artificial Sequence: Synthetic polypeptide"
MDMRVPAQLLGLLLLWFPGSRCDIVMTQSPLSLPVTPGEPASISCRSSQSLVYSNGDTYLHWYLQKPGQSPKLLIYKVSNRFSGVPDRFSGSGSGTDFTLKISRVEAEDVGVYYCSQSTHVPWTFGGGTKVEIK

SEQ ID NO: 5133 - protein, 113 aa, Artificial Sequence
  source: /note="Description of Artificial Sequence: Synthetic polypeptide"
DIVMTQSPLSLPVTPGEPASISCRSSQSLVYSNGDTYLHWYLQKPGQSPKLLIYKVSNRFSGVPDRFSGSGSGTDFTLKISRVEAEDVGVYYCSQSTHVPWTFGGGTKVEIKR

SEQ ID NO: 5134 - protein, 113 aa, Artificial Sequence
  source: /note="Description of Artificial Sequence: Synthetic polypeptide"
DIVMTQSPLSLPVTPGEPASISCRSSQSVVQSNGNTYLEWYLQKPGQSPQLLIYKVSNRFSGVPDRFSGSGSGTDFTLKISRVEAEDVGVYYCFQGSHVPPTFGGGTKVEIKR

SEQ ID NO: 5135 - protein, 113 aa, Artificial Sequence
  source: /note="Description of Artificial Sequence: Synthetic polypeptide"
DVLVTQSPLSLPVTPGEPASISCRSTQTLVHRNGDTYLEWYLQKPGQSPQSLIYKVSNRFSGVPDRFSGSGSGTDFTLKISRVEAEDVGVYYCFQGSHVPYTFGQGTKLEIKR

SEQ ID NO: 5136 - protein, 112 aa, Artificial Sequence
  source: /note="Description of Artificial Sequence: Synthetic polypeptide"
DVVMTQTPLSLPVTPGQPASISCRSSQSILHSNGNTYLEWYLQKPGQSPQLLIYKVSNRFSGVPDRFSGSGSGTDFTLKISRVEAEDVGVYYCLQTTRVPLTFGQGTKLEIK

SEQ ID NO: 5137 - protein, 219 aa, Artificial Sequence
  source: /note="Description of Artificial Sequence: Synthetic polypeptide"
DVVMTQTPLSLPVTPGQPASISCRSSQSILHSNGNTYLEWYLQKPGQSPQLLIYKVSNRFSGVPDRFSGSGSGTDFTLKISRVEAEDVGVYYCLQTTRVPLTFGQGTKLEIKRTVAAPSVFIFPPSDEQLKSGTASVVCLLNNFYPREAKVQWKVDNALQSGNSQESVTEQDSKDSTYSLSSTLTLSKADYEKHKVYACEVTHQGLSSPVTKSFNRGEC

SEQ ID NO: 5138 - protein, 113 aa, Artificial Sequence
  source: /note="Description of Artificial Sequence: Synthetic polypeptide"
  MOD_RES (2)..(2): Any amino acid
  MOD_RES (7)..(7): Any amino acid
  MOD_RES (14)..(15): Any amino acid
  MOD_RES (30)..(30): Any amino acid
  MOD_RES (50)..(50): Any amino acid
  MOD_RES (88)..(88): Any amino acid
  MOD_RES (105)..(105): Any amino acid
  MOD_RES (108)..(109): Any amino acid
DXVMTQXPLSLPVXXGQPASISCRSSQSLXYSDGNAYLHWFLQKPGQSPXLLIYKVSNRFSGVPDRFSGSGSGTDFTLKISRVEAEDXGVYYCSQSTHVPWTFGXGTXXEIKR

SEQ ID NO: 5139 - protein, 113 aa, Artificial Sequence
  source: /note="Description of Artificial Sequence: Synthetic polypeptide"
DVVMTQSPLSLPVTLGQPASISCRSSQSLIYSDGNAYLHWFLQKPGQSPRLLIYKVSNRFSGVPDRFSGSGSGTDFTLKISRVEAEDVGVYYCSQSTHVPWTFGQGTKVEIKR

SEQ ID NO: 5140 - protein, 111 aa, Artificial Sequence; identical to SEQ ID NO: 4154
  source: /note="Description of Artificial Sequence: Synthetic polypeptide"

SEQ ID NO: 5141 - protein, 112 aa, Artificial Sequence
  source: /note="Description of Artificial Sequence: Synthetic polypeptide"
DIVMTQSPLSLPVTPGEPASISCRSSQSLVYSNGDTYLHWYLQKPGQSPQLLIYKVSNRFSGVPDRFSGSGSGTDFTLKISRVEAEDVGVYYCSQSTHVPWTFGQGTKVEIK

SEQ ID NO: 5142 - protein, 112 aa, Artificial Sequence; identical to SEQ ID NO: 5141
  source: /note="Description of Artificial Sequence: Synthetic polypeptide"

SEQ ID NO: 5143 - protein, 111 aa, Artificial Sequence
  source: /note="Description of Artificial Sequence: Synthetic polypeptide"
QSALTQPPSASGSPGQSVTISCTGTSGDVGRNNYVSWYQHHPGKAPKLMIYDVSKRPSGVSNRFSGSKSGNTASLTISGLQAEDEADYYCSSYTSSSTWVFGGGTKLTVLG

SEQ ID NO: 5144 - protein, 110 aa, Artificial Sequence
  source: /note="Description of Artificial Sequence: Synthetic polypeptide"
QTVVTQEPAVSVALGQTVTITCQGDSLRRYYASWYQQKPGQAPVLVVYGKNKRPSRIPARFSASSSRNTASLTIHGARAEDEADYYCESRDISGNHLYVFGTGTKVTVLG

SEQ ID NO: 5145 - protein, 109 aa, Artificial Sequence
  source: /note="Description of Artificial Sequence: Synthetic polypeptide"
ETTLTQSPRTLSLSPGQRATLSCRASQSVSSSYLAWYQQKPGQAPRLLIYGASSRATGIPDRFRGSGSGTLFTLTISRLEPEDFAVYYCQQFSSSRYIFGQGTKLEIKR

SEQ ID NO: 5146 - protein, 108 aa, Artificial Sequence
  source: /note="Description of Artificial Sequence: Synthetic polypeptide"
QAVLTQPSGTPGQRVTLSCSGSSSNIGSNTVYWYRQLPGTAPRLLIYSYNQRPSGVPDRFSGSKSGTSASLAISGLRSEDEADYYCAAWDDSLSGYVFGTGTKVTVLG

SEQ ID NO: 5147 - protein, 110 aa, Artificial Sequence
  source: /note="Description of Artificial Sequence: Synthetic polypeptide"
QTVVTQEPSLTVSPGGTVTLTCGSSTGAVTSGHYPYWFQQKPGQAPRTLIYDTSNKHSWTPARFSGSLLGGKAALTLSGAQPEDEAEYYCLLSYSGVRVFGGGTKLTVLG

SEQ ID NO: 5148 - protein, 111 aa, Artificial Sequence
  source: /note="Description of Artificial Sequence: Synthetic polypeptide"
LPVLTQPPSASGTPGQRVTISCSGSSSNIGTNYVYWYQQLPGTAPKLLIYRNNQRPSGVPDRFSGSKSGTSDSLAISGLRSEDEADYYCAVWDASLRGWLFGGGTQLTVLG

SEQ ID NO: 5149 - protein, 109 aa, Artificial Sequence
  source: /note="Description of Artificial Sequence: Synthetic polypeptide"
SSELTQDPNVSVALGQTVRITCQGDTLRNNFPTWYQQKPGQAPVLVFYGKDNRPSGIPDRFSGSRSGTTASLVITGAQAQDEADYYCNSRDSGGHHLVFGGGTKLTVLG

SEQ ID NO: 5150 - protein, 109 aa, Artificial Sequence
  source: /note="Description of Artificial Sequence: Synthetic polypeptide"
SSELTQDPAVSVALGQTVRITCQGDSLRSYYASWYQQKPGQAPVLVIYGKDNRPSGIPDRFSGSSSGNAASLTITGAQAEDEADYYCNSRDTSGNHLVFGGGTKVTVLG

SEQ ID NO: 5151 - protein, 109 aa, Artificial Sequence
  source: /note="Description of Artificial Sequence: Synthetic polypeptide"
SSELTQDPAVSVALGQTVRITCQGDSLRSYYASWYQQKPGQAPVLVIYGKNNRPSGIPDRFSGSSSGNTASLTITGAQAEDEADYYCNSRDSSGNHLVFGGGTKLTVLG

SEQ ID NO: 5152 - protein, 109 aa, Artificial Sequence
  source: /note="Description of Artificial Sequence: Synthetic polypeptide"
SSELTQDPAVSVALGQTIRITCQGDSLRSYYASWYQQKPGQAPVLVIYGKNKRPSGIPDRISGSRSGNTASLTITGAQAEDEADYYCNSRDSSGNHLVFGGGTQLTVLG

SEQ ID NO: 5153 - protein, 110 aa, Artificial Sequence
  source: /note="Description of Artificial Sequence: Synthetic polypeptide"
QYELTQPPSVSGTPGQRVTISCSGSSSNIGSEYVYWFQQLPGTAPRLLIYRNDQRPSGVPDRFSGSKSGTSASLAISGLQSEDEADYYCAAWDDSLPGWCFGGGTKLTVL

SEQ ID NO: 5154 - protein, 110 aa, Artificial Sequence
  source: /note="Description of Artificial Sequence: Synthetic polypeptide"
QSELTQPPSASGTPGQRVTISCSGSSSNIGSNTVNWYQQLPGTAPKLLIYNNNQRPSGVPDRFSGSKSGTSASLAISGLQSEDEADYYCAAWHDGLNGPVFGGGTKLTVL

SEQ ID NO: 5155 - protein, 108 aa, Artificial Sequence
  source: /note="Description of Artificial Sequence: Synthetic polypeptide"
QDIQMTQSPATLSLSPGERATLSCKASQSVRAFIAWYQQKPGQAPRLLISGASNRATGIPDRFSGGGSGTDFTLTISRLEPEDFAVYYCQQYGSSRYTFGQGTKLEIK

SEQ ID NO: 5156 - protein, 112 aa, Artificial Sequence
  source: /note="Description of Artificial Sequence: Synthetic polypeptide"
QDIQMTQSPSSLPVTPGEPASISCRSSQSLLHSSGYNYLDWYLQKPGQSPQLLIYLGSNRASGVPDRFTGSGSGTDFTLKISRVEAEDVGVYYCMQALQTPTFGGGTKVDIK

SEQ ID NO: 5157 - protein, 108 aa, Artificial Sequence
  source: /note="Description of Artificial Sequence: Synthetic polypeptide"
QDIQMTQSPATLSVSPGERATLSCRASQSVSSNLAWYQQKPGQAPRLLIYGASTRATGVPARFSGSGSGTDFTLSISSLQPEDFATYYCQQYAGHPITFGQGTRLEIK

SEQ ID NO: 5158 - protein, 105 aa, Artificial Sequence
  source: /note="Description of Artificial Sequence: Synthetic polypeptide"
QSELTQAASVSGSPGQSITLSCTGATRDVSWYQQHPGKAPKLVLYEVSSRPSGVSDRFSGSMSGNTASLTISGLQAEDEADYYCSSTTSRAPRVVFGGGTKLTVL

SEQ ID NO: 5159 - protein, 113 aa, Artificial Sequence
  source: /note="Description of Artificial Sequence: Synthetic polypeptide"
QDIQMTQSPLSLPVTPGEPASISCRSSQSLMHRNGHHFFDWYLQKPGQSPQLLIYWASNRAPGVPDRFSGSGSGTDFTLKISRVEAEDVGIYYCMQALQTPYTFGQGTKLEIK

SEQ ID NO: 5160 - protein, 108 aa, Artificial Sequence
  source: /note="Description of Artificial Sequence: Synthetic polypeptide"
QDIQMTQSPSSLSASIGDRVTISCQASQNIDNYLNWYQQKPGKAPKLLIYAASSLQSGVPSRFSGSGSGTDFTLTISSLQPEDFATYYCQQSYSTPRTFGQGTKVEIK

SEQ ID NO: 5161 - protein, 110 aa, Artificial Sequence
  source: /note="Description of Artificial Sequence: Synthetic polypeptide"
QSELTQPPSASGTPGQRVTISCSGSSSNIGSNYVYWYQQLPGTAPKLLIYRNNQRPSGVPDRFSGSKSGTSASLAISGLQSEDEADYYCAAWDDSLNAWVFGGGTKLTVL

SEQ ID NO: 5162 - protein, 112 aa, Artificial Sequence
  source: /note="Description of Artificial Sequence: Synthetic polypeptide"
QDIQMTQSPLSLPVTPGEPASISCKSSQSLLHSNGYNYLDWYLQKPGQSPQLLISLGSNRASGVPARFSGSGSGTDFTLKISRVEAEDVGVYYCMQALQTITFGQGTRLEIK

SEQ ID NO: 5163 - protein, 108 aa, Artificial Sequence
  source: /note="Description of Artificial Sequence: Synthetic polypeptide"
QDIQMTQSPSTLSASVGDRVTITCRASQSISRWLAWYQQKPGKAPKLLIYAASSLQSGVPSRFSGSGSGTDFTLTISSLQPEDFATYYCQQSYSTPLTFGGGTKVEIK

SEQ ID NO: 5164 - protein, 106 aa, Artificial Sequence
  source: /note="Description of Artificial Sequence: Synthetic polypeptide"
QSALTQPPSVSVSPGQTASITCAGDELGNKYASWYQQKPGQSPVLVIYQDRKRPSGIPERFSGSHSGNTATLTISGTQALDEADYYCQSWDSSSVIFGGGTKVTVL

SEQ ID NO: 5165 - protein, 108 aa, Artificial Sequence
  source: /note="Description of Artificial Sequence: Synthetic polypeptide"
QDIQMTQSPSSLSASVGDRVTITCRASQSISSYLNWYQQKPGKAPKLLIYAASSLQSGVPSRFSGSGSGTEFSLSISSLQPEDFATYYCQQANSFPLTFGGGTKVEIK

SEQ ID NO: 5166 - protein, 110 aa, Artificial Sequence
  source: /note="Description of Artificial Sequence: Synthetic polypeptide"
QYELTQPPSASGSPGQSVTISCTGTSSDVGGYNYVSWYQQHPGKAPKFMIYEVNKRPSGVPDRFSGSKSGNTASLTVSGLQAEDEADYYCSSYAGRNFVVFGGGTKLTVL

SEQ ID NO: 5167 - protein, 108 aa, Artificial Sequence
  source: /note="Description of Artificial Sequence: Synthetic polypeptide"
QSALTQPPSVSVAPGQTARITCGGNNIGTKIVNWYQQRPGQAPVVVVYDNSDRPSGIPERFSGSNSGNTATLTISRVEAGDEADYYCQLWDSSSDHPIFGTGTKVTVL

SEQ ID NO: 5168 - protein, 110 aa, Artificial Sequence
  source: /note="Description of Artificial Sequence: Synthetic polypeptide"
QDIQMTQSPGTLSLSPGERATLSCRASQSIGSRYLAWYQQKPGQAPRLLIYDASKRATGVPVRFSGSGSGTDFTLTISSLGPEDFAVYYCQQGYNWPPWTFGQGTKVEIK

SEQ ID NO: 5169 - protein, 108 aa, Artificial Sequence
  source: /note="Description of Artificial Sequence: Synthetic polypeptide"
QDIQMTQSPSSLSASVGDRVTITCRTSQDIRNHLGWFQQKPGKAPQRLIREASILQSGVPSTFYGSGYGREFTLTISSLQPEDFATYYCLQYDSFPYTFGQGTKVEIK

SEQ ID NO: 5170 - protein, 110 aa, Artificial Sequence; identical to SEQ ID NO: 5168
  source: /note="Description of Artificial Sequence: Synthetic polypeptide"

SEQ ID NO: 5171 - protein, 107 aa, Artificial Sequence
  source: /note="Description of Artificial Sequence: Synthetic polypeptide"
DIVMTQSPSSMSASVGDRVTITCKASQNVGTNVAWYQQKPGKAPKPLIYSASYRYSGVPDRFTGSGSGTDFTLTISSLQAEDVAEYFCQQFNSYPLTFGGGTKVEIK

SEQ ID NO: 5172 - protein, 107 aa, Artificial Sequence
  source: /note="Description of Artificial Sequence: Synthetic polypeptide"
DIVMTQSPSFMSASVGDRVTITCKASQNVGTNVAWYQQKPGKAPKPLIYSASYRYSGVPDRFTGSGSGTDFTLTISSLQSEDVAEYFCQQFNSYPLTFGGGTKVEIK

SEQ ID NO: 5173 - protein, 107 aa, Artificial Sequence
  source: /note="Description of Artificial Sequence: Synthetic polypeptide"
DIVMTQSPSSMSASVGDRVTITCKASQNVGTNVAWYQQKPGKAPKPLIYSASYRYSGVPDRFSGSGSGTDFTLTISSLQAEDVAEYFCQQFNSYPLTFGGGTKVEIK

SEQ ID NO: 5174 - protein, 107 aa, Artificial Sequence
  source: /note="Description of Artificial Sequence: Synthetic polypeptide"
DIQMTQSPSSMSASVGDRVTITCKASQNVGTNVAWYQQKPGKAPKPLIYSASYRYSGVPDRFSGSGSGTDFTLTISSLQAEDVAEYFCQQFNSYPLTFGGGTKVEIK

SEQ ID NO: 5175 - protein, 130 aa, Artificial Sequence
  source: /note="Description of Artificial Sequence: Synthetic polypeptide"
MKLPVRLLVLMFWIPASSSDVVMTQTPLSLPVSLGDQASISCRSSQSLVHSDGNTYLHWYLQKPGQSPKLLIYKVSNRFSGVPDRFSGSGSGTDFTLKISRVEAEDLGVYFCSQSTHVWTFGGGTKLGIK

SEQ ID NO: 5176 - protein, 121 aa, Artificial Sequence
  source: /note="Description of Artificial Sequence: Synthetic polypeptide"
MFWIPASSSDVVMTQTPLSLPVSLGDQASISCRSSQSLVHSNGNTFFHWFLQKPGQSPKLLIYKVSNRFSGVPDRFSGSGSGTDFTLKISRVEAEDLGVYFCSQSAHVPWTFGGGTKLEIK

SEQ ID NO: 5177 - protein, 131 aa, Artificial Sequence
  source: /note="Description of Artificial Sequence: Synthetic polypeptide"
MKLPVRLLVLMFWIPASRCDVVMTQTPLSLPVSLGDQASISCRSSQSLIYSDGNAYLHWFLQKPGQSPKLLIYKVSNRFSGVPDRFSGSGSGTDFTLKISRVETEDLGVYFCSQSTHVPWTFGGGTKLEIK

SEQ ID NO: 5178 - protein, 131 aa, Artificial Sequence
  source: /note="Description of Artificial Sequence: Synthetic polypeptide"
MKLPVRLLVLMFWIPASSSDVLMTQTPLSLPVSLGDQASISCRSSQSIVHSNGNTYLEWYLQKPGQSPKLLIYKVSNRFSGVPDRFSGSGSGTDFTLKISRVEAEDLGIYYCFQSSHVPLTFGAGTKLELK

SEQ ID NO: 5179 - protein, 139 aa, Artificial Sequence
  source: /note="Description of Artificial Sequence: Synthetic polypeptide"
MDRLTTSFLLLIVPAYVLSQVTLKESGPGILKPSQTLSLTCSFSGFSLSTSGMSVGWIRQPSGKGLEWLAHIWWDDDKYYNPSLKSRLTISKDTSRNQVFLKITSVDTADTATYYCARRTTTADYFAYWGQGTTLTVSS

SEQ ID NO: 5180 - protein, 112 aa, Artificial Sequence
  source: /note="Description of Artificial Sequence: Synthetic polypeptide"
DVVMTQSPLSLPVTPGEPASISCRSSQSIVHSNGNTYLEWYLQKPGQSPQLLIYKVSNRFSGVPDRFSGSGSGTDFTLKISRVEAEDVGVYYCFQSSHVPLTFGQGTKLEIK

SEQ ID NO: 5181 - protein, 112 aa, Artificial Sequence [sequence omitted]

SEQ ID NO: 5182 - protein, 112 aa, Artificial Sequence; identical to SEQ ID NO: 5180
  source: /note="Description of Artificial Sequence: Synthetic polypeptide"

SEQ ID NO: 5183 - protein, 112 aa, Artificial Sequence
  source: /note="Description of Artificial Sequence: Synthetic polypeptide"
YVVMTQSPLSLPVTPGEPASISCKSSQSLLDSDGKTYLNWLLQKPGQSPQRLIYLVSKLDSGVPDRFSGSGSGTDFTLKISRVEAEDVGVYYCWQGTHFPRTFGQGTKVEIK

SEQ ID NO: 5184 - protein, 120 aa, Artificial Sequence; identical to SEQ ID NO: 4635
  source: /note="Description of Artificial Sequence: Synthetic polypeptide"

SEQ ID NO: 5185 - protein, 112 aa, Artificial Sequence
  source: /note="Description of Artificial Sequence: Synthetic polypeptide"
DIVMTQTPLSLSVTPGQPASISCSSSQSLIYSDGNAYLHWYLQKPGQSPQLLIYKVSNRFSGVPDRFSGSGSGTDFTLKISRVEAEDVGVYYCTQSTHSPWTFGGGTKVEIK

SEQ ID NO: 5186 - protein, 108 aa, Artificial Sequence
  source: /note="Description of Artificial Sequence: Synthetic polypeptide"
DVVMTQSPSSLSASVGDRVTITCRESQGIRNYLAWYQQKPGKAPKLLIYAASTLQSGVPSRFSGSLLGGKAALTLSGVQPEDFATYYCQQANSFPLTFGGGTKVEIKR

SEQ ID NO: 5187 - protein, 108 aa, Artificial Sequence
  source: /note="Description of Artificial Sequence: Synthetic polypeptide"
DVVMTQSPSSLSASVGDRVTITCRESQGIRNYLAWYQQKPGKAPKLLIYKVSNRFSGVPDRFSGSLLGGKAALTLSGVQPEDFATYYCQQANSFPLTFGGGTKVEIKR

SEQ ID NO: 5188 - protein, 108 aa, Artificial Sequence
  source: /note="Description of Artificial Sequence: Synthetic polypeptide"
DVVMTQSPSSLSASVGDRVTITCRESQGIRNYLAWYQQKPGKAPKLLIYWASTRESGVPDRFSGSLLGGKAALTLSGVQPEDFATYYCQQANSFPLTFGGGTKVEIKR

SEQ ID NO: 5189 - protein, 108 aa, Artificial Sequence
  source: /note="Description of Artificial Sequence: Synthetic polypeptide"
EIVLTQSPATLSLSPGERVTITCRASQSVNSYLAWYQQKPGQAPRLLIYGASTRATGIPDRFSGSGSGTDFTLTISRLEPEDFAVYYCQQYGSSQGTFGPGTKVDIKR

SEQ ID NO: 5190 - protein, 108 aa, Artificial Sequence
  source: /note="Description of Artificial Sequence: Synthetic polypeptide"
EIVLTQSPATLSLSPGERVTITCRESQGIRNYLAWYQQKPGQAPRLLIYAASSRATGIPDRFSGSGSGTDFTLTISRLEPEDFAVYYCQQYGSSQGTFGPGTKVDIKR

SEQ ID NO: 5191 - protein, 111 aa, Artificial Sequence
  source: /note="Description of Artificial Sequence: Synthetic polypeptide"
LPVLTQPPSASALLGASIKLTCTLSSEHSTYTIEWYQQRPGRSPQYIMKVKSDGSHSKGDGIPDRFMGSSSGADRYLTFSNLQSDDEAEYHCGESHTIDGQCWVFGGGTKL

SEQ ID NO: 5192 - protein, 108 aa, Artificial Sequence
  source: /note="Description of Artificial Sequence: Synthetic polypeptide"
DIQMTQSPATLSLSPGERAALSCRASQSVNSYLAWYQQKPGQAPRLLIYGAASRATGIPARFSGSGSGTDFTLTISRLEPEDFAVYYCQQYGSSQGTFGPGTKVDIKR

SEQ ID NO: 5193 - protein, 108 aa, Artificial Sequence
  source: /note="Description of Artificial Sequence: Synthetic polypeptide"
EIVLTQSPATLSLSPGERVTITCRESQGIRNYLAWYQQKPGQAPRLLIYGASTRATGIPDRFSGSGSGTDFTLTISRLEPEDFAVYYCQQYGSSQGTFGPGTKVDIKR

SEQ ID NO: 5194 - protein, 108 aa, Artificial Sequence
  source: /note="Description of Artificial Sequence: Synthetic polypeptide"
EIVMTQSPATLSLSPGERVTITCRESQGIRNYLAWYQQKPGQAPRLLIYAASTLQSGVPSRFSGSGSGTDFTLTISRLEPEDFAVYYCQQYGSSQGTFGPGTKVDIKR

SEQ ID NO: 5195 - protein, 108 aa, Artificial Sequence
  source: /note="Description of Artificial Sequence: Synthetic polypeptide"
DVVMTQSPSSLSASVGDRVTITCRESQGIRNYLAWYQQKPGKAPKLLIYKASSLQSGVPSRFSGSLLGGKAALTLSGVQPEDFATYYCQQANSFPLTFGGGTKVEIKR

SEQ ID NO: 5196 - protein, 108 aa, Artificial Sequence
  source: /note="Description of Artificial Sequence: Synthetic polypeptide"
DIVLTQSPATLSLSPGERVTITCRASQSVNSYLAWYQQKPGQAPRLLIYGASTRATGIPDRFSGSGSGTDFTLTISRLEPEDFAVYYCQQYGSSQGTFGPGTKVDIKR

SEQ ID NO: 5197 - protein, 108 aa, Artificial Sequence
  source: /note="Description of Artificial Sequence: Synthetic polypeptide"
DIQMTQSPGTLSLSPGERAALSCRASQSVSSYLAWYQQKPGQAPRLLIYAASIRATGIPDRFSGSGSGTDFTLTISRLEPEDFAVYYCQQYGSSQGTFGPGTKVDIKR

SEQ ID NO: 5198 - protein, 120 aa, Artificial Sequence
  source: /note="Description of Artificial Sequence: Synthetic polypeptide"
EVQLVESGGGVVQPGGSLRLSCAASGFTFRSYWMSWVRQAPGKGLEWVASVKQDGSEKYYVDSVKGRFTISRDTSKNTLYLQMNSLRAEDTAVYYCARDASSWYRDWFDPWGQGTLVTVS

SEQ ID NO: 5199 - protein, 131 aa, Artificial Sequence
  source: /note="Description of Artificial Sequence: Synthetic polypeptide"
MKLPVRLLVLMFWIPASSSDVLMTQTPLSLPVSLGDQASISCRSSQNIVHSNGNTYLEWYLQKPGQSPKLLIYKVSNRFSGVPDRFSGSGSGTDFTLKISRVEAEDLGVYYCFQGSHVPLTFGAGTKLELK

SEQ ID NO: 5200 - protein, 120 aa, Artificial Sequence; identical to SEQ ID NO: 4656
  source: /note="Description of Artificial Sequence: Synthetic polypeptide"

SEQ ID NO: 5201 - protein, 100 aa, Artificial Sequence
  source: /note="Description of Artificial Sequence: Synthetic polypeptide"
DIVMTQSPLSLPVTPGEPASISCRSSQSLLHRYGYNYLDWYLQKPGQSPQLLIYLGSNRASGVPDRFSGSGSGTDFTLKISRVEAEDVGVYYCMQALQTP

SEQ ID NO: 5202 - protein, 132 aa, Artificial Sequence
  source: /note="Description of Artificial Sequence: Synthetic polypeptide"
MRLPAQLLGLLMLWVSGSSGDVVMTQSPLSLPVTPGEPASISCRSSQNIVHSNGNTYLEWYLQKPGQSPQLLIYKVSNRFSGVPDRFSGSGSGTDFTLKISRVEAEDVGVYYCFQGSHVPLTFGQGTKLEIK

SEQ ID NO: 5203 - protein, 107 aa, Artificial Sequence
  source: /note="Description of Artificial Sequence: Synthetic polypeptide"
EIVMTQSPSTLSASVGDRVIITCRASQSISSWLAWYQQKPGKAPKLLIYKASSLESGVPSRFSGSGSGAEFTLTISSLQPDDFATYYCQQYKSYWTFGQGTKLTVLG

SEQ ID NO: 5204 - protein, 108 aa, Artificial Sequence
  source: /note="Description of Artificial Sequence: Synthetic polypeptide"
EIVLTQSPSSLSASVGDRVTLTCRASQGIRNELAWYQQRPGKAPKRLIYAGSILQSGVPSRFSGSGSGTEFTLTISSLQPEDVAVYYCQQYYSLPYMFGQGTKVDIKR

SEQ ID NO: 5205 - protein, 109 aa, Artificial Sequence
  source: /note="Description of Artificial Sequence: Synthetic polypeptide"
EIVMTQSPATLSVSPGESAALSCRASQGVSTNVAWYQQKPGQAPRLLIYGATTRASGVPARFSGSGSGTEFTLTINSLQSEDFAAYYCQQYKHWPPWTFGQGTKVEIKR

SEQ ID NO: 5206 - protein, 111 aa, Artificial Sequence
  source: /note="Description of Artificial Sequence: Synthetic polypeptide"
QSVLTQPPSVSAAPGQKVTISCSGSTSNIGDNYVSWYQQLPGTAPQLLIYDNTKRPSGIPDRFSGSKSGTSATLGITGLQTGDEADYYCGTWDSSLSGVVFGGGTKLTVLG

SEQ ID NO: 5207 - protein, 108 aa, Artificial Sequence
  source: /note="Description of Artificial Sequence: Synthetic polypeptide"
EIVLTQSPATLSLSPGERATLSCRASQTLTHYLAWYQQKPGQAPRLLIYDTSKRATGVPARFSGSGSGTDFTLTISSLEPEDSALYYCQQRNSWPHTFGGGTKLEIKR

SEQ ID NO: 5208 - protein, 109 aa, Artificial Sequence
  source: /note="Description of Artificial Sequence: Synthetic polypeptide"
SYVLTQPPSVSVAPGQTATVTCGGNNIGSKSVHWYQQKPGQAPVLVVYDDSDRPSGIPERFSGSNSGNTATLTIRRVEAGDEADYYCQVWDSSSDHNVFGSGTKVEIKR

SEQ ID NO: 5209 - protein, 109 aa, Artificial Sequence
  source: /note="Description of Artificial Sequence: Synthetic polypeptide"
LPVLTQPPSVSVAPGQTARISCGGNNIETISVHWYQQKPGQAPVLVVSDDSVRPSGIPERFSGSNSGNTATLTISRVEAGDEADYYCQVWDSSSDYVVFGGGTKLTVLG

SEQ ID NO: 5210 - protein, 108 aa, Artificial Sequence
  source: /note="Description of Artificial Sequence: Synthetic polypeptide"
ADIVLTQSPSSLSASVGDRVTLTCRASSSVNYMHWYQQRPGKPPKALIYATSNLASGVPSRFSGSGSGTEFTLTISSLQPEDVAVYYCQQWRTNPPTFGQGTKLEVKR

SEQ ID NO: 5211 - protein, 108 aa, Artificial Sequence
  source: /note="Description of Artificial Sequence: Synthetic polypeptide"
AEIVLTQSPSSLSASVGDRVTLTCRASQGIRNELAWYQQRPGKAPKRLIYAGSILQSGVPSFSGSGSGTEFTLTISSLQPEDVAVYYCQQYYSLPYMFGQGTKVDIKR

SEQ ID NO: 5212 - protein, 107 aa, Artificial Sequence
  source: /note="Description of Artificial Sequence: Synthetic polypeptide"
DIVLTQSPAILSASPGEKVTLTCRASSSVNYMHWYQQKPGSPPKAWIYATSNLASGVPDRFSASGSGTSYSLTISRVEAEDAATYYCQQWRTNPPTFGAGTKLELKR

SEQ ID NO: 5213 - protein, 113 aa, Artificial Sequence
  source: /note="Description of Artificial Sequence: Synthetic polypeptide"
  MOD_RES (1)..(1): Any amino acid
  MOD_RES (7)..(7): Any amino acid
  MOD_RES (10)..(10): Any amino acid
  MOD_RES (15)..(15): Any amino acid
  MOD_RES (50)..(50): Any amino acid
  MOD_RES (88)..(88): Any amino acid
  MOD_RES (109)..(109): Any amino acid
XVVMTQXPLXLPVTXGQPASISCKSSQSLLDSDGKTYLNWLQQRPGQSPXRLIYLVSKLDSGVPDRFSGSGSGTDFTLKISRVEAEDXGVYYCWQGTHFPRTFGGGTKXEIKR

SEQ ID NO: 5214 - protein, 119 aa, Artificial Sequence
  source: /note="Description of Artificial Sequence: Synthetic polypeptide"
  MOD_RES (3)..(3): Any amino acid
  MOD_RES (78)..(78): Any amino acid
  MOD_RES (87)..(88): Any amino acid
  MOD_RES (114)..(114): Any amino acid
EVXLVESGGGLVQPGGSLRLSCAGSGFTFSNYGMSWVRQAPGKGLEWVASIRSGGGRTYYSDNVKGRFTISRENAKNXLYLQMNSLXXEDTAVYYCVRYDHYSGSSDYWGQGTXVTVSS

SEQ ID NO: 5215 - protein, 113 aa, Artificial Sequence
  source: /note="Description of Artificial Sequence: Synthetic polypeptide"
DVVMTQSPLSLPVTLGQPASISCKSSQSLLDSDGKTYLNWLQQRPGQSPRRLIYLVSKLDSGVPDRFSGSGSGTDFTLKISRVEAEDVGVYYCWQGTHFPRTFGGGTKVEIKR

SEQ ID NO: 5216 - protein, 109 aa, Artificial Sequence
  source: /note="Description of Artificial Sequence: Synthetic polypeptide"
QAVVTQESALTTSPGGTVILTCRSSTGAVTTSNYANWVQEKPDHLFTGLIGGTSNRAPGVPVRFSGSLIGDKAALTITGAQTEDDAMYFCALWYSTHYVFGGGTKVTVL

SEQ ID NO: 5217 - protein, 109 aa, Artificial Sequence; identical to SEQ ID NO: 5216
  source: /note="Description of Artificial Sequence: Synthetic polypeptide"

SEQ ID NO: 5218 - protein, 113 aa, Artificial Sequence
  source: /note="Description of Artificial Sequence: Synthetic polypeptide"
DVVMTQTPLSLPVSLGDQASISCRSSQSLVHSNGDTFLHWYLQKPGQSPKLLIYKVSNRFSGVPDRFSGSGSGTDFTLKISRVEAEDLGIYFCSQSIHVPWTFGGGTKLEIKR

SEQ ID NO: 5219 - protein, 113 aa, Artificial Sequence
  source: /note="Description of Artificial Sequence: Synthetic polypeptide"
DVVMTQTPLSLPVSLGDQASISCRSSQSLVYSNGDTYLHWYLQKPGQSPKLLIYKVSNRFSGVPDRFSGSGSGTDFTLKISRVEAEDLGVYFCSQSTHVPWTFGGGTKLEIKR

SEQ ID NO: 5220 - protein, 132 aa, Artificial Sequence
  source: /note="Description of Artificial Sequence: Synthetic polypeptide"
MMSPAQFLFLLVLWIRETNGDVVMTQSPLSLPVTPGEPASISCKSSQSLLDSDGKTYLNWLLQKPGQSPQRLIYLVSKLDSGVPDRFSGSGSGTDFTLKISRVEAEDVGVYYCWQGTHFPRTFGQGTKVEIK

SEQ ID NO: 5221 - protein, 131 aa, Artificial Sequence
  source: /note="Description of Artificial Sequence: Synthetic polypeptide"
MKLPVRLLVLMFWIPASSSDVLMTQTPLSLPVSLGDQASISCRSSQNIIHSNGNTYLEWYLQKPGQSPKLLIYKVSNRFSGVPDRFSGSGSGTDFTLKIKKVEAEDLGIYYCFQGSHVPLTFGAGTKLELE

SEQ ID NO: 5222 - protein, 132 aa, Artificial Sequence
  source: /note="Description of Artificial Sequence: Synthetic polypeptide"
MMSPAQFLFLLVLWIRETNGYVVMTQTPLTLSVTIGQPASISCKSSQSLLDSDGKTYLNWLLQRPGQSPKRLIYLVSKLDSGVPDRFTGSGSGTDFTLKISRIEAEDLGLYYCWQGTHFPRTFGGGTKLEIK

SEQ ID NO: 5223 - protein, 132 aa, Artificial Sequence
  source: /note="Description of Artificial Sequence: Synthetic polypeptide"
MMSPAQFLFLLVLWIRETNGYVVMTQSPLSLPVTPGEPASISCKSSQSLLDSDGKTYLNWLLQKPGQSPQRLIYLVSKLDSGVPDRFSGSGSGTDFTLKISRVEAEDVGVYYCWQGTHFPRTFGQGTKVEIK

SEQ ID NO: 5224 - protein, 125 aa, Artificial Sequence
  source: /note="Description of Artificial Sequence: Synthetic polypeptide"
MGLLMLWVSGSSGDIVMTQSPLSLPVTPGEPASISCRSSQSLLHSNGYNYLDWYLQKPGQSPQLLIYLGSNRASGVPDRFSGSGSGTDFTLKISRVEAEDVGVYYCMQALQTPRTFGQGTKVEIK

SEQ ID NO: 5225 - protein, 100 aa, Artificial Sequence
  source: /note="Description of Artificial Sequence: Synthetic polypeptide"
DIVMTQSPLSLPVTPGEPASISCRSSQSLLHSNGYNYLDWYLQKPGQSPQLLIYLGSNRASGVPDRFSGSGSGTDFTLKISRVEAEDVGVYYCMQALQTP

SEQ ID NO: 5226 - protein, 119 aa, Artificial Sequence [sequence omitted]

SEQ ID NO: 5227 - protein, 112 aa, Artificial Sequence
  source: /note="Description of Artificial Sequence: Synthetic polypeptide"
DIVMTQSPLSLPVTPGEPASISCRSSQSLLHSNGYNYLDWYLQKPGQSPQLLIYLGSNRASGVPDRFSGSGSGTDFTLKISRVEAEDVGVYYCMQALQTPWTFGQGTKVEIK

SEQ ID NO: 5228 - protein, 112 aa, Artificial Sequence
  source: /note="Description of Artificial Sequence: Synthetic polypeptide"
DIVMTQSPLSLPVTPGEPASISCRVSQSLLHSNGYTYLHWYLQKPGQSPQLLIYKVSNRFSGVPDRFSGSGSGTDFTLKISRVEAEDVGVYYCSQTRHVPYTFGGGTKVEIK

SEQ ID NO: 5229 - protein, 444 aa, Artificial Sequence
  source: /note="Description of Artificial Sequence: Synthetic polypeptide"
EVQLVESGGGLVQPGGSLRLSCAVSGFTFSDNGMAWVRQAPGKGLEWVSFISNLAYSIDYADTVTGRFTISRDNAKNSLYLQMNSLRAEDTAVYYCVSGTWFAYWGQGTLVTVSSASTKGPSVFPLAPSSKSTSGGTAALGCLVKDYFPEPVTVSWNSGALTSGVHTFPAVLQSSGLYSLSSVVTVPSSSLGTQTYICNVNHKPSNTKVDKKVEPKSCDKTHTCPPCPAPELAGAPSVFLFPPKPKDTLMISRTPEVTCWVDVSHEDPEVKFNWYVDGVEVHNAKTKPREEQYNSTYRVVSVLTVLHQDWLNGKEYKCKVSNKALPAPIEKTISKAKGQPREPQVYTLPPSRDELTKNQVSLTCLVKGFYPSDIAVEWESNGQPENNYKTTPPVLDSDGSFFLYSKLTVDKSRWQQGNVFSCSVMHEALHNHYTQKSLSLSPGK

SEQ ID NO: 5230 - protein, 110 aa, Artificial Sequence
  source: /note="Description of Artificial Sequence: Synthetic polypeptide"
DEIVLTQSPSSLSASIGDRVTITCRASESINKYVNWYQQKPGKAPKLLIYAASSLQSGAPSRVSGSGFGRDFSLTISGLQAEDFGAYFCQQSYSAPYTFGQGTKVEIKRT

SEQ ID NO: 5231 - protein, 115 aa, Artificial Sequence
  source: /note="Description of Artificial Sequence: Synthetic polypeptide"
QSVLTQPPSASGTPGQRVTISCSGSSSNIGSNYVYWYQQPPGTAPKLLIYRNNQRPSGVPDRFSGSKSGTSASLAISGLRSEDEADYYCAAWDDSLSGYVFGTGTKVTVLSYGIH

SEQ ID NO: 5232 - protein, 108 aa, Artificial Sequence
  source: /note="Description of Artificial Sequence: Synthetic polypeptide"
DIQMTQSPSSLSASVGDRVTITCRASQSISSYLNWYQQKPGKAPKLLIYAASSLQSGVPSRFSGSGSGTDFTLTISSLQPEDFATYYCQQSYSTPLTFGGGTKVEIKR

SEQ ID NO: 5233 - protein, 121 aa, Artificial Sequence; identical to SEQ ID NO: 4711
  source: /note="Description of Artificial Sequence: Synthetic polypeptide"

SEQ ID NO: 5234 - protein, 108 aa, Artificial Sequence
  source: /note="Description of Artificial Sequence: Synthetic polypeptide"
DIQLTQSPSTLSASVGDRVTITCRASQSISSWLAWYQQIPGKAPKLLIYKASSLESGVPSRFSGSGSGTEFTLTISSLQPDDFATYYCQQYNSYSRTFGQGTKLEIKR

SEQ ID NO: 5235 - protein, 109 aa, Artificial Sequence
  source: /note="Description of Artificial Sequence: Synthetic polypeptide"
EIVLTQSPSSLSASVGDRVTITCRASQSISSYLNWYQQKPGKAPKLLIYAASSLQSGVPSRFSGSGSGTDFTLTISSLQPEDFATYYCQQSYSTPLTFGGGTKLEIKRT

SEQ ID NO: 5236 - protein, 107 aa, Artificial Sequence; identical to SEQ ID NO: 4155
  source: /note="Description of Artificial Sequence: Synthetic polypeptide"

SEQ ID NO: 5237 - protein, 107 aa, Artificial Sequence; identical to SEQ ID NO: 4156
  source: /note="Description of Artificial Sequence: Synthetic polypeptide"

SEQ ID NO: 5238 - protein, 107 aa, Artificial Sequence; identical to SEQ ID NO: 4157
  source: /note="Description of Artificial Sequence: Synthetic polypeptide"

SEQ ID NO: 5239 - protein, 107 aa, Artificial Sequence; identical to SEQ ID NO: 4158
  source: /note="Description of Artificial Sequence: Synthetic polypeptide"

SEQ ID NO: 5240 - protein, 106 aa, Artificial Sequence; identical to SEQ ID NO: 4159
  source: /note="Description of Artificial Sequence: Synthetic polypeptide"

SEQ ID NO: 5241 - protein, 110 aa, Artificial Sequence; identical to SEQ ID NO: 4160
  source: /note="Description of Artificial Sequence: Synthetic polypeptide"

SEQ ID NO: 5242 - protein, 110 aa, Artificial Sequence; identical to SEQ ID NO: 4161
  source: /note="Description of Artificial Sequence: Synthetic polypeptide"

SEQ ID NO: 5243 - protein, 106 aa, Artificial Sequence; identical to SEQ ID NO: 4162
  source: /note="Description of Artificial Sequence: Synthetic polypeptide"

SEQ ID NO: 5244 - protein, 113 aa, Artificial Sequence; identical to SEQ ID NO: 4163
  source: /note="Description of Artificial Sequence: Synthetic polypeptide"

SEQ ID NO: 5245 - protein, 107 aa, Artificial Sequence; identical to SEQ ID NO: 4164
  source: /note="Description of Artificial Sequence: Synthetic polypeptide"

SEQ ID NO: 5246 - protein, 107 aa, Artificial Sequence; identical to SEQ ID NO: 4165
  source: /note="Description of Artificial Sequence: Synthetic polypeptide"

SEQ ID NO: 5247 - protein, 107 aa, Artificial Sequence; identical to SEQ ID NO: 4166
  source: /note="Description of Artificial Sequence: Synthetic polypeptide"

SEQ ID NO: 5248 - protein, 113 aa, Artificial Sequence; identical to SEQ ID NO: 4167
  source: /note="Description of Artificial Sequence: Synthetic polypeptide"

SEQ ID NO: 5249 - protein, 219 aa, Artificial Sequence
  source: /note="Description of Artificial Sequence: Synthetic polypeptide"
DVVMTQSPLSLPVTLGQPASISCRSSQNIIHSNGNTYLEWYLQKPGQSPRLLIYKVSNRFSGVPDRFSGSGSGTDFTLKISRVEAEDVGVYYCFQGSHVPLTFGGGTKVEFKRTVAAPSVFIFPPSDEQLKSGTASVVCLLNNFYPREAKVQWKVDNALQSGNSQESVTEQDSKDSTYSLSSTLTLSKADYEKHKVYACEVTHQGLSSPVTKSFNRGEC

SEQ ID NO: 5250 - protein, 113 aa, Artificial Sequence
  source: /note="Description of Artificial Sequence: Synthetic polypeptide"
  MOD_RES (3)..(3): Any amino acid
  MOD_RES (7)..(7): Any amino acid
  MOD_RES (14)..(14): Any amino acid
  MOD_RES (17)..(17): Any amino acid
  MOD_RES (30)..(30): Any amino acid
  MOD_RES (50)..(50): Any amino acid
  MOD_RES (88)..(88): Any amino acid
  MOD_RES (105)..(105): Any amino acid
  MOD_RES (109)..(109): Any amino acid
DVXMTQXPLSLPVXLGXPASISCRSSQNIXHSNGNTYLEWYLQKPGQSPXLLIYKVSNRFSGVPDRFSGSGSGTDFTLKFSRVEAEDXGVYYCFQGSHVPLTFGXGTKXEIKR

SEQ ID NO: 5251 - protein, 113 aa, Artificial Sequence
  source: /note="Description of Artificial Sequence: Synthetic polypeptide"
DVVMTQSPLSLPVTLGQPASISCRSSQNIIHSNGNTYLEWYLQKPGQSPRLLIYKVSNRFSGVPDRFSGSGSGTDFTLKISRVEAEDVGVYYCFQGSHVPLTFGGGTKVEIKR

SEQ ID NO: 5252 - protein, 116 aa, Artificial Sequence; identical to SEQ ID NO: 4168
  source: /note="Description of Artificial Sequence: Synthetic polypeptide"

SEQ ID NO: 5253 - protein, 111 aa, Artificial Sequence; identical to SEQ ID NO: 4169
  source: /note="Description of Artificial Sequence: Synthetic polypeptide"

SEQ ID NO: 5254 - protein, 115 aa, Artificial Sequence; identical to SEQ ID NO: 4170
  source: /note="Description of Artificial Sequence: Synthetic polypeptide"

SEQ ID NO: 5255 - protein, 115 aa, Artificial Sequence; identical to SEQ ID NO: 4171
  source: /note="Description of Artificial Sequence: Synthetic polypeptide"

SEQ ID NO: 5256 - protein, 115 aa, Artificial Sequence; identical to SEQ ID NO: 4172
  source: /note="Description of Artificial Sequence: Synthetic polypeptide"

SEQ ID NO: 5257 - protein, 115 aa, Artificial Sequence; identical to SEQ ID NO: 4173
  source: /note="Description of Artificial Sequence: Synthetic polypeptide"

SEQ ID NO: 5258 - protein, 105 aa, Artificial Sequence; identical to SEQ ID NO: 4174
  source: /note="Description of Artificial Sequence: Synthetic polypeptide"

SEQ ID NO: 5259 - protein, 105 aa, Artificial Sequence; identical to SEQ ID NO: 4175
  source: /note="Description of Artificial Sequence: Synthetic polypeptide"

SEQ ID NO: 5260 - protein, 108 aa, Artificial Sequence; identical to SEQ ID NO: 4176
  source: /note="Description of Artificial Sequence: Synthetic polypeptide"

SEQ ID NO: 5261 - protein, 112 aa, Artificial Sequence; identical to SEQ ID NO: 4177
  source: /note="Description of Artificial Sequence: Synthetic polypeptide"

SEQ ID NO: 5262 - protein, 112 aa, Artificial Sequence; identical to SEQ ID NO: 4178
  source: /note="Description of Artificial Sequence: Synthetic polypeptide"

SEQ ID NO: 5263 - protein, 112 aa, Artificial Sequence; identical to SEQ ID NO: 4179
  source: /note="Description of Artificial Sequence: Synthetic polypeptide"

SEQ ID NO: 5264 - protein, 112 aa, Artificial Sequence; identical to SEQ ID NO: 4180
  source: /note="Description of Artificial Sequence: Synthetic polypeptide"

SEQ ID NO: 5265 - protein, 112 aa, Artificial Sequence [sequence omitted]

SEQ ID NO: 5266 - protein, 112 aa, Artificial Sequence; identical to SEQ ID NO: 4182
  source: /note="Description of Artificial Sequence: Synthetic polypeptide"

SEQ ID NO: 5267 - protein, 112 aa, Artificial Sequence; identical to SEQ ID NO: 4183
  source: /note="Description of Artificial Sequence: Synthetic polypeptide"

SEQ ID NO: 5268 - protein, 112 aa, Artificial Sequence; identical to SEQ ID NO: 4184
  source: /note="Description of Artificial Sequence: Synthetic polypeptide"

SEQ ID NO: 5269 - protein, 114 aa, Artificial Sequence; identical to SEQ ID NO: 4185
  source: /note="Description of Artificial Sequence: Synthetic polypeptide"

SEQ ID NO: 5270 - protein, 113 aa, Artificial Sequence; identical to SEQ ID NO: 4186
  source: /note="Description of Artificial Sequence: Synthetic polypeptide"

SEQ ID NO: 5271 - protein, 234 aa, Artificial Sequence; identical to SEQ ID NO: 4187
  source: /note="Description of Artificial Sequence: Synthetic polypeptide"

SEQ ID NO: 5272 - protein, 246 aa, Artificial Sequence; identical to SEQ ID NO: 4188
  source: /note="Description of Artificial Sequence: Synthetic polypeptide"

SEQ ID NO: 5273 - protein, 98 aa, Artificial Sequence
  source: /note="Description of Artificial Sequence: Synthetic polypeptide"
SSLTVTAGEKVTMSCKSSQSLLAGRYQKNYLTWYQQKPGQPPKLLIYWASTRDSGVPDRFTGSGSGTDFTLTISSVQAEDLAVYYCQNDYTYPLTFAG

SEQ ID NO: 5274 - protein, 99 aa, Artificial Sequence
  source: /note="Description of Artificial Sequence: Synthetic polypeptide"
SSLTVTAGEKVTMNCKSSQNLLNSGNQVNYLTWFQQKPGQPPKLLIYWASTRESGVPDRFIGSGSGTDFTLTINSVQAEDLAVYYCQNDYRYPLTFGAG

SEQ ID NO: 5275 - protein, 99 aa, Artificial Sequence
  source: /note="Description of Artificial Sequence: Synthetic polypeptide"
SSLAVTAGERVTMSCKSSLTLLNSGSQTNYLTWYQQKPGQPPKLLIYWASTRESGVPDRFTGSGSGTDFTLTISSVQAEDLAVYYCQNDYSYPLTFGAG

SEQ ID NO: 5276 - protein, 99 aa, Artificial Sequence
  source: /note="Description of Artificial Sequence: Synthetic polypeptide"
SSLTVTAGEKVTMSCKSSQSLFNSGRQTNYLTWFQQRPGQAPKLLIYWASTRGSGVPDRFTGSGSGTEFTLTISSVQAEDLAVYYCQNDYTYPLTFGAG

SEQ ID NO: 5277 - protein, 99 aa, Artificial Sequence
  source: /note="Description of Artificial Sequence: Synthetic polypeptide"
SSLTVTAGEKVTMSCTSSQSLFNSGTQTNYLTWYQQKPGQPPKLLIYWASTRESGVPDRFTGSGSGTDFTLTISSVQAEDLAVYYCQNDYTYPLTFGAG

SEQ ID NO: 5278 - protein, 107 aa, Artificial Sequence
  source: /note="Description of Artificial Sequence: Synthetic polypeptide"
DVVMTQTPLSLPVSLGDQASISCRSSQSLLHSNGNTYLHWYLQKPGQSPKLLIYKVSNRFSGVPDRFSGSGSGTDFTLKISRVEAEDLGVYFCSQSTHVPLTFGAGT

SEQ ID NO: 5279 - protein, 86 aa, Artificial Sequence
  source: /note="Description of Artificial Sequence: Synthetic polypeptide"
SCRSSQSLVHSNGNTYLHWYLQKPGQSPKLLIYKVSNRFSGVPDRFSGSGSGTDFTLKISRVEAEDLGVYFCSQSTHVPLTFGAGT

SEQ ID NO: 5280 - protein, 134 aa, Artificial Sequence
  source: /note="Description of Artificial Sequence: Synthetic polypeptide"
MDTRAPTQLLGLLLLWLPGATFAQVLTQTPSPVSAAVGGTVTINCQSSQSLYNKNWLSWYQKKPGQPPKLLIYKASTLESGVSSRFKGSGSGTQFTLTISGVQCDDAATYYCQGEFSCSSADCTAFGGGTEVVV

SEQ ID NO: 5281 - protein, 112 aa, Artificial Sequence
  source: /note="Description of Artificial Sequence: Synthetic polypeptide"
DVVLTQTPLTLSVTIGQPASISCKSSQSLLYSNGKTYLNWLLQRPGQSPKRLIYVVSKLDSGVPDRFTGSGSGTDFTLKISRVEAEDLGVYYCVQGTHYPFTFGGGTKLEIK

SEQ ID NO: 5282 - protein, 107 aa, Artificial Sequence
  source: /note="Description of Artificial Sequence: Synthetic polypeptide"
DILMSQSPSSMSVSLGDRVSITCRASQGISSKMGWLQQKPGKSSKGLIYHGTKLEDGVPSRFSGSGSGAEYSLTISSLESEDFGDYYCVQYAQFPYTFGGGTKLEIK

SEQ ID NO: 5283 - protein, 107 aa, Artificial Sequence
  source: /note="Description of Artificial Sequence: Synthetic polypeptide"
DILMTQSPSSMSVSLGDTVSITCHASQGIRNNIGWLQEKPGKSFKGLIYHGTKLEDGIPSRFSGSGSGADYSLTISSLESEDVADYYCVQYDQFPYTFGGGTKLEIK

SEQ ID NO: 5284 - protein, 112 aa, Artificial Sequence
  source: /note="Description of Artificial Sequence: Synthetic polypeptide"
DVVLTQTPFTLSVTIGQPASISCKSSQSLLHSNGESYLNWLFQRPGQSPKRLIYAVSKLDSGVPDRFTGSGSGTDFTLKISRVEAEDLGVYYCVQGTHFPFTFGGGTKLEIK

SEQ ID NO: 5285 - protein, 113 aa, Artificial Sequence; identical to SEQ ID NO: 4189
  source: /note="Description of Artificial Sequence: Synthetic polypeptide"

SEQ ID NO: 5286 - protein, 113 aa, Artificial Sequence; identical to SEQ ID NO: 4190
  source: /note="Description of Artificial Sequence: Synthetic polypeptide"

SEQ ID NO: 5287 - protein, 113 aa, Artificial Sequence; identical to SEQ ID NO: 4191
  source: /note="Description of Artificial Sequence: Synthetic polypeptide"

SEQ ID NO: 5288 - protein, 115 aa, Artificial Sequence; identical to SEQ ID NO: 4192
  source: /note="Description of Artificial Sequence: Synthetic polypeptide"

SEQ ID NO: 5289 - protein, 115 aa, Artificial Sequence; identical to SEQ ID NO: 4193
  source: /note="Description of Artificial Sequence: Synthetic polypeptide"

SEQ ID NO: 5290 - protein, 115 aa, Artificial Sequence; identical to SEQ ID NO: 4194
  source: /note="Description of Artificial Sequence: Synthetic polypeptide"

SEQ ID NO: 5291 - protein, 113 aa, Artificial Sequence; identical to SEQ ID NO: 4195
  source: /note="Description of Artificial Sequence: Synthetic polypeptide"

SEQ ID NO: 5292 - protein, 113 aa, Artificial Sequence; identical to SEQ ID NO: 4196
  source: /note="Description of Artificial Sequence: Synthetic polypeptide"

SEQ ID NO: 5293 - protein, 109 aa, Artificial Sequence; identical to SEQ ID NO: 4207
  source: /note="Description of Artificial Sequence: Synthetic polypeptide"

SEQ ID NO: 5294 - protein, 110 aa, Artificial Sequence; identical to SEQ ID NO: 4208
  source: /note="Description of Artificial Sequence: Synthetic polypeptide"

SEQ ID NO: 5295 - protein, 108 aa, Artificial Sequence; identical to SEQ ID NO: 4209
  source: /note="Description of Artificial Sequence: Synthetic polypeptide"

SEQ ID NO: 5296 - protein, 108 aa, Artificial Sequence; identical to SEQ ID NO: 4210
  source: /note="Description of Artificial Sequence: Synthetic polypeptide"

SEQ ID NO: 5297 - protein, 109 aa, Artificial Sequence; identical to SEQ ID NO: 4197
  source: /note="Description of Artificial Sequence: Synthetic polypeptide"

SEQ ID NO: 5298 - protein, 108 aa, Artificial Sequence; identical to SEQ ID NO: 4198
  source: /note="Description of Artificial Sequence: Synthetic polypeptide"

SEQ ID NO: 5299 - protein, 108 aa, Artificial Sequence; identical to SEQ ID NO: 4199
  source: /note="Description of Artificial Sequence: Synthetic polypeptide"

SEQ ID NO: 5300 - protein, 108 aa, Artificial Sequence; identical to SEQ ID NO: 4200
  source: /note="Description of Artificial Sequence: Synthetic polypeptide"

SEQ ID NO: 5301 - protein, 106 aa, Artificial Sequence; identical to SEQ ID NO: 4201
  source: /note="Description of Artificial Sequence: Synthetic polypeptide"

SEQ ID NO: 5302 - protein, 108 aa, Artificial Sequence; identical to SEQ ID NO: 4202
  source: /note="Description of Artificial Sequence: Synthetic polypeptide"

SEQ ID NO: 5303 - protein, 111 aa, Artificial Sequence; identical to SEQ ID NO: 4203
  source: /note="Description of Artificial Sequence: Synthetic polypeptide"

SEQ ID NO: 5304 - protein, 111 aa, Artificial Sequence; identical to SEQ ID NO: 4204
  source: /note="Description of Artificial Sequence: Synthetic polypeptide"

SEQ ID NO: 5305 - protein, 107 aa, Artificial Sequence; identical to SEQ ID NO: 4205
  source: /note="Description of Artificial Sequence: Synthetic polypeptide"

SEQ ID NO: 5306 - protein, 108 aa, Artificial Sequence; identical to SEQ ID NO: 4206
  source: /note="Description of Artificial Sequence: Synthetic polypeptide"

SEQ ID NO: 5307 - protein, 107 aa, Artificial Sequence
  source: /note="Description of Artificial Sequence: Synthetic polypeptide"
SYELTQPPSVSVSPGQTARISCFGDTLPKQYTYWYQQKPGQAPVLVIYKDTERPSGIPERFSGSSSGTTVTLTISGVQAEDEADYYCLSADNSATWVFGGGTKVTVL

SEQ ID NO: 5308 - protein, 108 aa, Artificial Sequence
  source: /note="Description of Artificial Sequence: Synthetic polypeptide"
SYELTQPPSVSVSPGQTAGITCSGDALPKQFVYWYQKKPGQAPVLLIYKDTERPSRIPERFSGSTSGTTVALTINGVQAEDEADYYCQSADRSGALWVFGGGTKLTVL

SEQ ID NO: 5309 - protein, 108 aa, Artificial Sequence
  source: /note="Description of Artificial Sequence: Synthetic polypeptide"
SYELTQPPSVSVSPGQTARITCSGDALPKKYAYWYQQKSGQAPVLVIYEDNKRPSGIPERFSGSSSGTVATLTISGAQVDDEADYYCYSTDISGDLRVFGGGTKLTVL

SEQ ID NO: 5310 - protein, 112 aa, Artificial Sequence
  source: /note="Description of Artificial Sequence: Synthetic polypeptide"
DIVMSQSPSSLAVSAGEKVTMSCKSSQSLLNSRTRKNYLAWYQQKPGQSPKLLIYWASTRESGVPDRFTGSGSGTDFTLTISSVQAEDLAVYYCKQSFYLRTFGGGTKLDIK

SEQ ID NO: 5311 - protein, 112 aa, Artificial Sequence
  source: /note="Description of Artificial Sequence: Synthetic polypeptide"
DIVMTQSPDSLAVSLGERATINCKSSQSVLYSSNNKNYLAWYQQKPGQPPKLLIYWASTRESGVPDRFSGSGSGTDFTLTISSLQAEDVAVYYCQQYYSTLTFGGGTKVEIK

SEQ ID NO: 5312 - protein, 112 aa, Artificial Sequence
  source: /note="Description of Artificial Sequence: Synthetic polypeptide"
DIVMTQSPDSLAVSLGERATINCKSSQSLLNSRTRKNYLAWYQQKPGQSPKLLIYWASTRESGVPDRFSGSGSGTDFTLTISSLQAEDVAVYYCKQSFYLRTFGGGTKVEIK

SEQ ID NO: 5313 - protein, 112 aa, Artificial Sequence
  source: /note="Description of Artificial Sequence: Synthetic polypeptide"
DIVMSQSPSSLAVSAGEKVTMSCKSSQSLLNSRTRKNYLAWYQQKPGQSPKLLIYWASTRESGVPDRFTGSGSGTDFTLTISSVQAEDLAVYYCKQSYNLRTFGGGTKLEIK

SEQ ID NO: 5314 - protein, 112 aa, Artificial Sequence
  source: /note="Description of Artificial Sequence: Synthetic polypeptide"
DIVMTQSPDSLAVSLGERATINCKSSQSVLNSRNNKNYLAWYQQKPGQPPKLLIYWASTRESGVPDRFSGSGSGTDFTLTISSLQAEDVAVYYCKQSFYLRTFGGGTKVEIK

SEQ ID NO: 5315 - protein, 112 aa, Artificial Sequence
  source: /note="Description of Artificial Sequence: Synthetic polypeptide"
DIVMTQSPDSLAVSLGERATISCKSSQSVLNSRNNKNYLAWYQQKPGQSPKLLIYWASTRESGVPDRFSGSGSGTDFTLTISSLQAEDVAVYYCKQSFYLRTFGGGTKVEIK

SEQ ID NO: 5316 - protein, 111 aa, Artificial Sequence
  source: /note="Description of Artificial Sequence: Synthetic polypeptide"
QSALTQPPSASGSPGHSVTISCTGTSSDVGQYSFVSWYQQYPGKAPKIIIYDVSKRSSGVPDRFFGSKSANTASLTVSGVQEEDEADYFCSSYGGSKYPWVFGGGTKLTVL

SEQ ID NO: 5317 - protein, 111 aa, Artificial Sequence
  source: /note="Description of Artificial Sequence: Synthetic polypeptide"
QSALTQPPSASGSPGHSVTISCTGTSSDVGQYSFVSWYQQYPGKAPKVIIYDVSKRSSGVPDRFFGSKSANTASLTVSGVQEEDEADYFCSSYGGSKYPWVFGGGTKLTVL

SEQ ID NO: 5318 - protein, 111 aa, Artificial Sequence
  source: /note="Description of Artificial Sequence: Synthetic polypeptide"
QSALTQPPSASGSPGHSVTISCTGTSSDVGNYSFVSWYQQYPGKAPKVIIYDVSKRSSGVPDRFFGSKSANTASLTVSGVQEEDEADYFCSSYGGSKYPWVFGGGTKLTVL

SEQ ID NO: 5319 - protein, 108 aa, Artificial Sequence
  source: /note="Description of Artificial Sequence: Synthetic polypeptide"
SYELTQPPSVSVSPGQTARITCSGDALPKRYVYWYQQKSGQAPVLVIYEDSKRPSGIPETFSGSSSGTMATLTISGAQVEDEADYYCYSTDSNGHHWVFGGGTKLTVL

SEQ ID NO: 5320 - protein, 113 aa, Artificial Sequence
  source: /note="Description of Artificial Sequence: Synthetic polypeptide"
DIVMTQSPDSLAVSLGERATINCKSSRSVLYSSNSKNYLAWYQQKPGQPPKLLIYWASTRESGVPDRFSGSGSGTEFTLTISSLQAEDVAVYYCQQYYGTPRTFGQGTKVEIK

SEQ ID NO: 5321 - protein, 108 aa, Artificial Sequence
  source: /note="Description of Artificial Sequence: Synthetic polypeptide"
SYVLTQPPSVSVAPGQTARFTCGGNNIASKSVHWYQQKPGQAPVLVVYDDSDRPSRIPERFSGSNSGNTATLTISRVEAGDEADYYCQVWDSTSDHVVFGGGTKLTVL

SEQ ID NO: 5322 - protein, 110 aa, Artificial Sequence
  source: /note="Description of Artificial Sequence: Synthetic polypeptide"
QSALTQPRSVSGSPGQSVTISCTGTSSDVGGYNYVSWHQQHPGKAPKLLIYDVTKRPSGVPDRFSGSKSGNTAALTISGLQAEDEADYYCHSYVGSYTLVFGGGTKLTVL

SEQ ID NO: 5323 - protein, 113 aa, Artificial Sequence
  source: /note="Description of Artificial Sequence: Synthetic polypeptide"
DIVMTQSPDSLAVSLGERATINCKSSQSVLYSSNNKDYLAWYQQKPGQPPKLLIYWASTRESGVSDRFSGSGSGTDFTLTISSLQAEDVAVYYCQQYYSTPITFGQGTRLEIK

SEQ ID NO: 5324 - protein, 107 aa, Artificial Sequence
  source: /note="Description of Artificial Sequence: Synthetic polypeptide"
DIQMTQSPSSLSASVGDRVTITCRASQGIVNNLAWFQQKPGKAPKSLIYAASSLQGGVPSKFSGSASGTDFSLTISNLQPEDFATYFCQQYNSYPWTFGQGTKVEIK

SEQ ID NO: 5325 - protein, 113 aa, Artificial Sequence
  source: /note="Description of Artificial Sequence: Synthetic polypeptide"
DIVMTQSPDSLAVSLGERATINCKSSQSVLYGSNNKNYLAWYQQKLGQSPKLLIYWASARESGVPDRFGGSGSGTDFTLTISSLQAEDVAVYYCQQYYSTPWTFGQGTKVEIK

SEQ ID NO: 5326 - protein, 113 aa, Artificial Sequence
  source: /note="Description of Artificial Sequence: Synthetic polypeptide"
EIVMTQSPDSLAVSLGERATINCKSSQNILYSSDNKNYLAWYQQKPGQPPKLLIYWASTRESGVPDRFSGSGSGTDFTLTISSLQAEDVAVYYCQQYYSIPRTFGQGTKVEIK

SEQ ID NO: 5327 - protein, 113 aa, Artificial Sequence
  source: /note="Description of Artificial Sequence: Synthetic polypeptide"
DIVMTQSPDSLAVSLGERATINCKSSQNILYSSDNKNYLAWYQQKPGQPPKLLIYWASTRESGVPDRFSGSGSGTDFTLTISSLQAEDVAVYYCQQYYSIPRTFGQGTKVEIK

SEQ ID NO: 5328 - protein, 113 aa, Artificial Sequence
  source: /note="Description of Artificial Sequence: Synthetic polypeptide"
DIVMTQSPDSLAVSLGERATINCKSSQTILYSSNNKNYLAWYQQKPGQPPKLLIYWASTRESGVPDRFSGSGSGTDFTLTISSLRAEDVAVYYCQQYYSSPQTFGQGTKVEIK

SEQ ID NO: 5329 - protein, 113 aa, Artificial Sequence
  source: /note="Description of Artificial Sequence: Synthetic polypeptide"
DVVMTQSPLSLPVTLGQPASISCTSSQSLLYSDGNTYLNWFQQRPGQSPRRLMYKVSKRDPGVPDRFSGSGSGTDFTLSISRVEAEDVGVYYCMQGSLWPRYTFGQGTKVEIK

SEQ ID NO: 5330 - protein, 113 aa, Artificial Sequence
  source: /note="Description of Artificial Sequence: Synthetic polypeptide"
DIVMTQSPDSLAVSLGERATINCKSSQTLLYTSNNQNYLAWYQHKPGQPPKVLIYWASTREYGVPDRFSGSGSGTDFTLTISSLQPEDVAVYYCQQYYNSPYTFGQGTKLEIK

SEQ ID NO: 5331 - protein, 110 aa, Artificial Sequence
  source: /note="Description of Artificial Sequence: Synthetic polypeptide"
QAGLTQPPSVSKDLRQTATLTCSGNSNNVGNQGAAWLQQFPGHPPKLLFYENINRPSGISERFSASRSGNTASLTITGLQPEDEADYYCSAWDGHLNAWVFGGGTKLTVL

SEQ ID NO: 5332 - protein, 113 aa, Artificial Sequence
  source: /note="Description of Artificial Sequence: Synthetic polypeptide"
DIVMTQSPDSLAVSLGERATINCKSSQTVLYTSNNKNYLAWYQQKPGQPPKLLIYWASTRESGVPDRFSGSGSGTDFTLTISSLQAEDVAVYYCQHYYSTPFTFGPGTKVDIK

SEQ ID NO: 5333 - protein, 108 aa, Artificial Sequence
  source: /note="Description of Artificial Sequence: Synthetic polypeptide"
LPVLTQPPSVSVSPGQTARITCSGDVLAETYARWFQQKPGQAPVLVMYRDRERPAGIPERFSGSSSGNTVTLTISGAQAEDEAVYHCHSVADNNLDWVFGGGTKLTVL

SEQ ID NO: 5334 - protein, 108 aa, Artificial Sequence
  source: /note="Description of Artificial Sequence: Synthetic polypeptide"
SYELTQPPSVSVSPGQTARITCSGDVLAETYARWFQQKPGQAPVLVMYRDRERPAGIPERFSGSSSGNTVTLTISGAQAEDEAVYHCHSVADNNLDWVFGGGTKLTVL

SEQ ID NO: 5335 - protein, 112 aa, Artificial Sequence
  source: /note="Description of Artificial Sequence: Synthetic polypeptide"
DVLMTQSPLSLPVTLGQPASISCKSSQSIVHSNGNTYLEWYLQKPGQSPQLLVYKVSNRFSGVPDRFSGSGSGTDFTLKISRVEAEDVGTYYCFQGSLVPWAFGGGTKVEIK

SEQ ID NO: 5336 - protein, 112 aa, Artificial Sequence
  source: /note="Description of Artificial Sequence: Synthetic polypeptide"
DVVMTQSPLSLPVTLGQPASISCKSSQSIVHSNGNTYLEWYLQKPGQSPQLLVYKVSNRFSGVPDRFSGSGSGTDFTLKISRVEAEDVGTYYCFQGSLVPWAFGGGTKVEIK

SEQ ID NO: 5337 - protein, 112 aa, Artificial Sequence
  source: /note="Description of Artificial Sequence: Synthetic polypeptide"
DVVMTQSPLSLPVTLGQPASISCKSSQSIVHSNGNTYLEWYLQKPGQSPQLLVYKVSNRFSGVPDRFSGSGSGTDFTLKISRVEAEDVGVYYCFQGSLVPWAFGGGTKVEIK

SEQ ID NO: 5338 - protein, 112 aa, Artificial Sequence
  source: /note="Description of Artificial Sequence: Synthetic polypeptide"
DVVMTQSPLSLPVTLGQPASISCKSSQSIVHSNGNTYLEWYLQKPGQSPQLLIYKVSNRFSGVPDRFSGSGSGTDFTLKISRVEAEDVGVYYCFQGSLVPWAFGGGTKVEIK

SEQ ID NO: 5339 - protein, 112 aa, Artificial Sequence
  source: /note="Description of Artificial Sequence: Synthetic polypeptide"
DIVMTQAAPSVPVTPGESVSISCRSSESLLHSNGNTYLYWFLQRPGQSPQLLIYRMSNLASGVPDRFSGSGSGTAFTLRISRVEAEDVGVYYCMQYLEYPLTFGAGTKLELK

SEQ ID NO: 5340 - protein, 107 aa, Artificial Sequence
  source: /note="Description of Artificial Sequence: Synthetic polypeptide"
DIKMTQSPSSMYASLGERVTITCKASQDINRYLNWFQQKPGKSPKTLIYRANRLLDGVPSRFSGSGSGQDYSLTISSLDYEDMGIYYCLQYDEFPLTFGDGTKLELK

SEQ ID NO: 5341 - protein, 113 aa, Artificial Sequence
  source: /note="Description of Artificial Sequence: Synthetic polypeptide"
DIVMTQSPSSLAMSVGQKVTMSCKSSQSVFNSGNQKNSLAWYQQKPGQSPKLLVYFASTRESGVPDRFIGSGSGTDFSLTISSVQAEDLADYFCQEHYTTPPTFGTGTKLELK

SEQ ID NO: 5342 - protein, 112 aa, Artificial Sequence
  source: /note="Description of Artificial Sequence: Synthetic polypeptide"
DVVMTQTPLSLPVSLGDQASISCRSSQRLVHSHGKTYLHWYLQKPGQSPKLLIYKVSNRFSGVPDRFSGSGSGTDFTLKISRVEAEDLGVYFCSQTAHFPYTFGGGTKLEIK

SEQ ID NO: 5343 - protein, 112 aa, Artificial Sequence
  source: /note="Description of Artificial Sequence: Synthetic polypeptide"
DVVMTQTPLSLPVSLGDQASISCRSSQSLVHSHGKTYLHWYLQKPGQSPKLLIYKVSNRFSGVPDRFSGSGSGTDFTLKISRVEAEDLGVYFCSQTAHFPYTFGGGTKLEIK

SEQ ID NO: 5344 - protein, 112 aa, Artificial Sequence
  source: /note="Description of Artificial Sequence: Synthetic polypeptide"
DVVMTQTPLSLPVSLGDQASISCRSSQSLLHSHGNTYLHWYLQKPGQSPKLLIYKVSNRFSGVPDRFSGSGSGTDFTLKISRVEAEDLGVYFCSQTAHFPYTFGGGTKLEIK

SEQ ID NO: 5345 - protein, 107 aa, Artificial Sequence
  source: /note="Description of Artificial Sequence: Synthetic polypeptide"
DIVMTQSHKFMSTSVGDRVSITCKASQDVSTAVAWYQQKPGQSPKLLIYSASYRYTGVPDRFTGSGSGTDFTFTISSVQAEDLAVYYCQQHYTTPLTFGAGTKLELK

SEQ ID NO: 5346 - protein, 112 aa, Artificial Sequence
  source: /note="Description of Artificial Sequence: Synthetic polypeptide"
DIVMSQSPSSLAVSVGEKVTMSCKSSQSLLYSSNQKNYLAWYQQKPGQSPKLLIYWASTRESGVPDRFTGSGSGTDFTLTISSVKAEDLAVYYCQQYYSYPFTFGSGTKLEI

SEQ ID NO: 5347 - protein, 112 aa, Artificial Sequence
  source: /note="Description of Artificial Sequence: Synthetic polypeptide"
DVLMTQTPLSLPVSLGDQASISCRSSQSIVHSNGNTYLEWYLQKPGQSPKLLIYKLSNRFSGVPDRFSGSGSGTDFTLKISRVEAEDLGVYYCFQGSHVPPTFGGGTKLEIK

SEQ ID NO: 5348 - protein, 112 aa, Artificial Sequence
  source: /note="Description of Artificial Sequence: Synthetic polypeptide"
NILMTQSPSSLAVSAGEKVTMSCKSSQSVLYSSNQKNYLAWYQQKPGQSPKLLIYWASTRESGVPDRFTGSGSGTDFTLTISSVQAEDLAVYYCLQYLSSLTFGAGTKLELK

SEQ ID NO: 5349 - protein, 112 aa, Artificial Sequence
  source: /note="Description of Artificial Sequence: Synthetic polypeptide"
  MOD_RES (3)..(3): Any amino acid
DIXMTQAAPSVPVTPGESVSISCRSSKSLLHSNGNTYLYWFLQRPGQSPQLLIYRMSNLASGVPDRFSGSGSGTAFTLRISRVEAEDVGVYYCMQHLKSPYTFGGGTKLEIK

SEQ ID NO: 5350 - protein, 112 aa, Artificial Sequence
  source: /note="Description of Artificial Sequence: Synthetic polypeptide"
DVLMTQTPLSLPVSLGDQASISCRSSQSIVHSNGNTYLEWFLQKPGQSPKLLIYKVSNRFSGVPDRFSGSGSGTDFTLKISRVEAEDLGVYYCFQGSHVPYTFGGGTKLEIK

SEQ ID NO: 5351 - protein, 107 aa, Artificial Sequence
  source: /note="Description of Artificial Sequence: Synthetic polypeptide"
DIVMTQSQKFMSTSVGDRVSVTCKASQNVGTNVAWYQQKPGQSPKALIYSASYRYSGVPDRFTGSGSGTDFTLTISNVQSEDLAEYFCQQYNSYPYTFGGGTKLEIK

SEQ ID NO: 5352 - protein, 112 aa, Artificial Sequence
  source: /note="Description of Artificial Sequence: Synthetic polypeptide"
DIVMTQAAPSVPVTPGESVSISCRSSKSLLHSNGNTYLYWFLQRPGQSPQLLIHRMSNLASGVPDRFSGSGSGTAFTLRISRVEAEDVGVYYCMQHLKSPYTFGGGTKLEIK

SEQ ID NO: 5353 - protein, 112 aa, Artificial Sequence
  source: /note="Description of Artificial Sequence: Synthetic polypeptide"
DIVMTQAAPSVPVTPGESVSISCRSSKSLLHSNGNTYLYWFLQRPGQSPQLLIYRMSNLASGVPDRFSGSGSGTAFTLRISRVEAEDVGVYYCMQHLKSPYTFGGGTKLEIK

SEQ ID NO: 5354 - protein, 112 aa, Artificial Sequence
  source: /note="Description of Artificial Sequence: Synthetic polypeptide"
DIVMTQTPLSLPVTPGEPASISCRSSQRLVHSHGKTYLHWYLQKPGQSPQLLIYKVSNRFSGVPDRFSGSGSGTDFTLKISRVEAEDVGVYFCSQTAHFPYTFGGGTKVEIK

SEQ ID NO: 5355 - protein, 112 aa, Artificial Sequence
  source: /note="Description of Artificial Sequence: Synthetic polypeptide"
DIVMTQTPLSLPVTPGEPASISCRSSQSLVHSHGKTYLHWYLQKPGQSPQLLIYKVSNRFSGVPDRFSGSGSGTDFTLKISRVEAEDVGVYFCSQTAHFPYTFGGGTKVEIK

SEQ ID NO: 5356 - protein, 130 aa, Artificial Sequence
  source: /note="Description of Artificial Sequence: Synthetic polypeptide"
LPVRLLVLMSWIPASSSDVLMTQIPVSLSVSLGDQASISCRSSESIVHSSGKTYLEWYLQKPGQSPKLLIYEVSNRFSGVPDRFSGSGSGTDFTLKISRVEAEDLGVYYCFQGSHVPWTFGGGTKLEIKR

SEQ ID NO: 5357 - protein, 131 aa, Artificial Sequence
  source: /note="Description of Artificial Sequence: Synthetic polypeptide"
KLPVRLLVLMSWIPASSSDVLMTQIPVSLSVSLGDQASISCRSSESIVHSSGKTYLEWYLQKPGQSPKLLIYEVSNRFSGVPDRFSGSGSGTDFTLKISRVEAEDLGVYYCFQGSHVPWTFGGGTKLEIKR

SEQ ID NO: 5358 - protein, 148 aa, Artificial Sequence
  source: /note="Description of Artificial Sequence: Synthetic polypeptide"
KLPVRLLVLMFWIPASSSDVLMTQTPLSLPVSLGDQASISCRSSQNILHSNGNTYLEWYLQKPGQSPKLLIYKVSSRFSGVPDRFSGSGSGTDFTLKITRVEAEDLGVYYCFQGSLVPWTFGGGTKLEIRRADAAPTVSIFPPSSEQL

SEQ ID NO: 5359 - protein, 121 aa, Artificial Sequence
  source: /note="Description of Artificial Sequence: Synthetic polypeptide"
DIVMSQSPSSLAVSVGEKVIMSCKSSQSLLYSTNQKNFLAWYQQKPGQSPKLLIYWASTRESGVPDRFTGSGSGTDFTLTISSLKAEDLAVYYCQQYYSYPYTFGGGTKLEIKRADAAPTV

SEQ ID NO: 5360 - protein, 112 aa, Artificial Sequence
  source: /note="Description of Artificial Sequence: Synthetic polypeptide"
EIVMTQAAPSVPVTPGESASISCRSNKSLLHSNGNTYLCWFLQRPGQSPQLLIYRMSTLAPGVPDRFSGSGSGTAFTLRISRLEAEDVGVYYCMQHIEYPLTFGAGTKLELK

SEQ ID NO: 5361 - protein, 112 aa, Artificial Sequence
  source: /note="Description of Artificial Sequence: Synthetic polypeptide"
QVLTQTASPVSAAVGSTVTINCQASQSVYKNNYLAWFQQKPGQPPKRLIYSASTLASGVSSRFKGSGSGTQFTLTISDVQCDDAATYYCLGSCDSSSNNCVAFGGGTEVVVK

SEQ ID NO: 5362 - protein, 107 aa, Artificial Sequence
  source: /note="Description of Artificial Sequence: Synthetic polypeptide"
QVLTQTASSVSAAVGGTVTINCQSSQSVYNNRLAWYQQKPGQPPKLLIYKASTLASGVPSRFKGSGSGTQFTLTISDLECDDAATYYCAGGYINIFAFGGGTEVVVK

SEQ ID NO: 5363 - protein, 112 aa, Artificial Sequence
  source: /note="Description of Artificial Sequence: Synthetic polypeptide"
QVLTQTASPVSAAVGSTVTINCQASQSVYKNNYLRWYQQKPGQPPKRLIYTASTLASGVSSRFKGSGSGTQFTLTISDVQCDDAATYYCLGGYDCNSADCWAFGGGTEVVVK

SEQ ID NO: 5364 - protein, 111 aa, Artificial Sequence
  source: /note="Description of Artificial Sequence: Synthetic polypeptide"
QVLTQTASPVSAAVGITVTISCQSSQSVRTNKLAWFQQKPGQPPKRLIYSASTLDSGVPSRFSASGSGTQFTLTISDVQCDDAATYYCLGYYDCSIADCVAFGGGTEVVVK

SEQ ID NO: 5365 - protein, 111 aa, Artificial Sequence
  source: /note="Description of Artificial Sequence: Synthetic polypeptide"
QVLTQTTSPVSAAVGSTVTISCQSSQSVRTNKLAWFQQKPGQPPKRLIYSASTLDFGVPSRFSASGSGTQFTLTISDVQCDDAATYYCLGYFDCSIADCVAFGGGTEVVVK

SEQ ID NO: 5366 - protein, 109 aa, Artificial Sequence
  source: /note="Description of Artificial Sequence: Synthetic polypeptide"
QVLTQTASSVSAAVGGTVTINCQSSQNVYNNNKLAWFQQKPGQPPKRLIYGASTLASGVSSRFKGSGSGTQFTLTISDLECDDAATYYCLGGYSGNIYTFGGGTEVVVK

SEQ ID NO: 5367 - protein, 106 aa, Artificial Sequence
  source: /note="Description of Artificial Sequence: Synthetic polypeptide"
DIVLTQSPSSLSASVGDRVTITCSASSSVSYMHWYQQKPGQAPKLLIYTTSNLASGVPSRFSGSGSGTDYTLTISSLQPEDVATYYCHQWSSYPWTFGGGTKVEIK

SEQ ID NO: 5368 - protein, 98 aa, Artificial Sequence; identical to SEQ ID NO: 4699
  source: /note="Description of Artificial Sequence: Synthetic polypeptide"

SEQ ID NO: 5369 - protein, 15 aa, Artificial Sequence
  source: /note="Description of Artificial Sequence: Synthetic peptide"
YFDYWGQGTLVTVSS

SEQ ID NO: 5370 - protein, 95 aa, Artificial Sequence
  source: /note="Description of Artificial Sequence: Synthetic polypeptide"
EIVLTQSPATLSLSPGERATLSCRASQSVSSYLAWYQQKPGQAPRLLIYDASNRATGIPARFSGSGSGTDFTLTISSLEPEDFAVYYCQQRSNWP

SEQ ID NO: 5371 - protein, 12 aa, Artificial Sequence
  source: /note="Description of Artificial Sequence: Synthetic peptide"
WTFGQGTKVEIK

SEQ ID NO: 5372 - protein, 453 aa, Artificial Sequence
  source: /note="Description of Artificial Sequence: Synthetic polypeptide"
EVKLLESGGGLVQPGGSLRLSCAASGFTFSTYTMSWVRQTPGKRLEWVAYISKGGGSTYYPDTVKGRFTISRDNSKNTLYLQMNSLRAEDTAVYYCARGAMYGNDFFYPMDYWGQGTTVTVSSASTKGPSVFPLAPSSKSTSGGTAALGCLVKDYFPEPVTVSWNSGALTSGVHTFPAVLQSSGLYSLSSVVTVPSSSLGTQTYICNVNHKPSNTKVDKKVEPKSCDKTHTCPPCPAPELLGGPSVFLFPPKPKDTLMISRTPEVTCVVVDVSHEDPEVKFNWYVDGVEVHNAKTKPREEQYASTYRVVSVLTVLHQDWLNGKEYKCKVSNKALPAPIEKTISKAKGQPREPQVYTLPPSRDELTKNQVSLTCLVKGFYPSDIAVEWESNGQPENNYKTTPPVLDSDGSFFLYSKLTVDKSRWQQGNVFSCSVMHEGLHNHYTQKSLSLSPGK

SEQ ID NO: 5373 - protein, 112 aa, Artificial Sequence; identical to SEQ ID NO: 4184
  source: /note="Description of Artificial Sequence: Synthetic polypeptide"

SEQ ID NO: 5374 - protein, 112 aa, Artificial Sequence; identical to SEQ ID NO: 4178
  source: /note="Description of Artificial Sequence: Synthetic polypeptide"

SEQ ID NO: 5375 - protein, 112 aa, Artificial Sequence; identical to SEQ ID NO: 4179
  source: /note="Description of Artificial Sequence: Synthetic polypeptide"

SEQ ID NO: 5376 - protein, 112 aa, Artificial Sequence; identical to SEQ ID NO: 4180
  source: /note="Description of Artificial Sequence: Synthetic polypeptide"

SEQ ID NO: 5377 - protein, 112 aa, Artificial Sequence [sequence omitted]

SEQ ID NO: 5378 - protein, 112 aa, Artificial Sequence; identical to SEQ ID NO: 4182
  source: /note="Description of Artificial Sequence: Synthetic polypeptide"

SEQ ID NO: 5379 - protein, 112 aa, Artificial Sequence; identical to SEQ ID NO: 4183
  source: /note="Description of Artificial Sequence: Synthetic polypeptide"

SEQ ID NO: 5380 - protein, 112 aa, Artificial Sequence; identical to SEQ ID NO: 4177
  source: /note="Description of Artificial Sequence: Synthetic polypeptide"

SEQ ID NO: 5381 - protein, 235 aa, Artificial Sequence
  source: /note="Description of Artificial Sequence: Synthetic polypeptide"
MVLQTQVFISLLLWISGAYGDIVLTQSPATLSLSPGERATLSCRASQSVSSSYLAWYQQKPGQAPRLLIYGASSRATGVPARFSGSGSGTDFTLTISSLEPEDFATYYCLQIYNMPITFGQGTKVEIKRTVAAPSVFIFPPSDEQLKSGTASVVCLLNNFYPREAKVQWKVDNALQSGNSQESVTEQDSKDSTYSLSSTLTLSKADYEKHKVYACEVTHQGLSSPVTKSFNRGEC

SEQ ID NO: 5382 - protein, 109 aa, Artificial Sequence
  source: /note="Description of Artificial Sequence: Synthetic polypeptide"
DIQMTQSPSSLSASVGDRVTITCRASQGISSYLAWYQQKPGKAPKLLIYAASSLQSGVPSRFSGSGSGTDFTLTISSLQPEDFATYYCQQHYTTPPTFGQGTKVEIKRT

SEQ ID NO: 5383 - protein, 114 aa, Artificial Sequence; identical to SEQ ID NO: 4227
  source: /note="Description of Artificial Sequence: Synthetic polypeptide"

SEQ ID NO: 5384 - protein, 110 aa, Artificial Sequence; identical to SEQ ID NO: 4228
  source: /note="Description of Artificial Sequence: Synthetic polypeptide"

SEQ ID NO: 5385 - protein, 115 aa, Artificial Sequence; identical to SEQ ID NO: 4229
  source: /note="Description of Artificial Sequence: Synthetic polypeptide"

SEQ ID NO: 5386 - protein, 109 aa, Artificial Sequence; identical to SEQ ID NO: 4230
  source: /note="Description of Artificial Sequence: Synthetic polypeptide"

SEQ ID NO: 5387 - protein, 110 aa, Artificial Sequence; identical to SEQ ID NO: 4231
  source: /note="Description of Artificial Sequence: Synthetic polypeptide"

SEQ ID NO: 5388 - protein, 107 aa, Artificial Sequence
  source: /note="Description of Artificial Sequence: Synthetic polypeptide"
SYELTQPPSVSVAPGQTARISCSGDALGDKYASWYQQKPGQAPVLVIYDDSDRPSGIPERFSGSNSGNTATLTISGTQAEDEADYYCQQHYTTPPVFGGGTKLTVLG

SEQ ID NO: 5389 - protein, 120 aa, Artificial Sequence; identical to SEQ ID NO: 4377
  source: /note="Description of Artificial Sequence: Synthetic polypeptide"

SEQ ID NO: 5390 - protein, 120 aa, Artificial Sequence
  source: /note="Description of Artificial Sequence: Synthetic polypeptide"
QVQLVQSGAEVKKPGASVKVSCKASGYTFTSYYMHWVRQAPGQGLEWMGWINPNSGGTNYAQKFQGRVTMTRDTSISTAYMELSSLRSEDTAVYYCARWGGDGFYAMDYWGQGTLVTVSS

SEQ ID NO: 5391 - protein, 121 aa, Artificial Sequence; identical to SEQ ID NO: 4379
  source: /note="Description of Artificial Sequence: Synthetic polypeptide"

SEQ ID NO: 5392 - protein, 120 aa, Artificial Sequence
  source: /note="Description of Artificial Sequence: Synthetic polypeptide"
EVQLVESGGGLVQPGGSLRLSCAASGFTFSSYAMSWVRQAPGKGLEWVSAISGSGGSTYYADSVKGRFTISRDNSKNTLYLQMNSLRAEDTAVYYCARWGGDGFYAMDYWGQGTLVTVSS

SEQ ID NO: 5393 - protein, 119 aa, Artificial Sequence; identical to SEQ ID NO: 4381
  source: /note="Description of Artificial Sequence: Synthetic polypeptide"

SEQ ID NO: 5394 - protein, 120 aa, Artificial Sequence
  source: /note="Description of Artificial Sequence: Synthetic polypeptide"
EVQLVQSGAEVKKPGESLKISCKGSGYSFTSYWIGWVRQMPGKGLEWMGIIYPGDSDTRYSPSFQGQVTISADKSISTAYLQWSSLKASDTAMYYCARWGGDGFYAMDYWGQGTLVTVSS

SEQ ID NO: 5395 - protein, 123 aa, Artificial Sequence; identical to SEQ ID NO: 4383
  source: /note="Description of Artificial Sequence: Synthetic polypeptide"

SEQ ID NO: 5396 - protein, 311 aa, Artificial Sequence
  source: /note="Description of Artificial Sequence: Synthetic polypeptide"
MKYLLPTAAAGLLLLAAQPAMAMAEVQLQQSGAELARPGTSVNLSCKTSGYSFTGYGVSWVKQRIGQGLEWIGEIYPRSGNTYYNEKFKGKATLTADKSSNTAYMELRSLTSEDSAVYFCARWNWERDAMDYWGQGTSVTVSSAKTTPPSDYPLAGGGGSGGGGSGGGGSDIVMTQTPLSLPVSLGDQASISCRSSQSLESSSGYPHLNWYLQKPGQSPQLLIYRVSNRFSGVLDRFSGSGSGTDFTLQISRVEAEDLGVYFCLQITHVPWTFGGGTKLEIKRADAAPTVSAAEEQKLISEEDLEHHHHHH

SEQ ID NO: 5397 - protein, 250 aa, Artificial Sequence
  source: /note="Description of Artificial Sequence: Synthetic polypeptide"
MAHVQFVQSGGDLVKPGGSLKLSCAASGFTFSSYGMSWVRQTPDKRLEWVATISSGGSYTYYPDSVKGRFTISRDNAKNTLYLQMSSLKSEDTAMYYCARHNYGSSYPYAMDYWGQGTPVTVSAGGGGSGGGASGGGGSEIMITQTPVIMSAFSGEKVTMTCSASSSVNYMHWYQQKSGTSPKKWIYDTSKLASGVPDRFSGSGSGTSYSLTISRMEAEDAATYYCPQWSSNPPMTFGGGTNLEMKRAAA

SEQ ID NO: 5398 - protein, 238 aa, Artificial Sequence
  source: /note="Description of Artificial Sequence: Synthetic polypeptide"
MAQVQLQQSGGGLVQPGGSLKLSCAASGFTFSRYGMSWVRQTPDKRLELVATINSNGGSTYYPDSVKGRFTISRDNAKNTLYLQMSSLKSADTAMYFCARGGYLDYWGQGTTVTVSSGGGGSGGGGSGGGGADIELTQSPSLGESVTITCLASQTIGTWLAWFQQKPGKSPQLLIYAATSLADGVPSRFSGSGSGTKFSFKISSLLAEDFVTYYCQQLYSTPYTFGGGTKLEIKRAAA

SEQ ID NO: 5399 - protein, 235 aa, Artificial Sequence
  source: /note="Description of Artificial Sequence: Synthetic polypeptide"
MDLQVQIISFLLISASVIISRGQIVLTQSPAIMSASPGEKVTMTCSASSSVSYMHWYQQKSGTSPKRWIYDTSKLASGVPARFSGSGSGTSYSLTISSMEAEDAATYFCHQWRSNPYTFGGGTKLEIKRADAAPTVSIFPPSSEQLTSGGASVVCFLNNFYPKDINVKWKIDGSERQNGVLNSWTDQDSKDSTYSMSSTLTLTKDEYERHNSYTCEATHKTSTSPIVKSFNRGEC

SEQ ID NO: 5400 - protein, 268 aa, Artificial Sequence
  source: /note="Description of Artificial Sequence: Synthetic polypeptide"
MADVKLQESGAELVKPGASVKLSCKASGYTFTSYYMYWVKQRPGQGLEWIGEINPSNGGTNFNEKFKSKATLTVDKSSSTAYMQLSSLTSEDSAVYYCTRDYRYAWFAYWGQGTLVTVSAESQSFPNVFPLAGGGGSGGGGSGGGGSDVLMTQTPLSLPVSLGDQASISCRSSQSIVHSNGNTYLEWYLQKPGQSPKLLIYKVSNRFSGVPDRFSGSGSGTDFTLKISRVEAEDLGVYYCFQGSHVPYTFGGGTKLEIKRADAAPTVS

SEQ ID NO: 5401 - protein, 185 aa, Artificial Sequence
  source: /note="Description of Artificial Sequence: Synthetic polypeptide"
ESPLQTPTEDGSEEPGSETSDAKSTPTAEDVTAPLVDEGAPGKQAAAQPHTEIPEGTTAEEAGIGDTPSLEDEAAGHVTQARMVSKSKDGGSDDKKAKGADGKTKIATPRGAAPPGQKGQANATRIPAKTPPAPKTPPSSGEPPKSGDRSGYSSPGSPGTPGSRSRTPSLPTPPTREPKKVAVVR

SEQ ID NO: 5402 - protein, 422 aa, Artificial Sequence; identical to SEQ ID NO: 3787
  source: /note="Description of Artificial Sequence: Synthetic polypeptide"

SEQ ID NO: 5403 - protein, 434 aa, Artificial Sequence; identical to SEQ ID NO: 3788
  source: /note="Description of Artificial Sequence: Synthetic polypeptide"

SEQ ID NO: 5404 - protein, 330 aa, Artificial Sequence; identical to SEQ ID NO: 3789
  source: /note="Description of Artificial Sequence: Synthetic polypeptide"

SEQ ID NO: 5405 - protein, 424 aa, Artificial Sequence; identical to SEQ ID NO: 3790
  source: /note="Description of Artificial Sequence: Synthetic polypeptide"

SEQ ID NO: 5406 - protein, 506 aa, Artificial Sequence; identical to SEQ ID NO: 3791
  source: /note="Description of Artificial Sequence: Synthetic polypeptide"

SEQ ID NO: 5407 - protein, 509 aa, Artificial Sequence; identical to SEQ ID NO: 3792
  source: /note="Description of Artificial Sequence: Synthetic polypeptide"

SEQ ID NO: 5408 - protein, 131 aa, Artificial Sequence; identical to SEQ ID NO: 3793
  source: /note="Description of Artificial Sequence: Synthetic polypeptide"

SEQ ID NO: 5409 - protein, 131 aa, Artificial Sequence; identical to SEQ ID NO: 3793
  source: /note="Description of Artificial Sequence: Synthetic polypeptide"

SEQ ID NO: 5410 - protein, 131 aa, Artificial Sequence; identical to SEQ ID NO: 3793
  source: /note="Description of Artificial Sequence: Synthetic polypeptide"

SEQ ID NO: 5411 - protein, 128 aa, Artificial Sequence; identical to SEQ ID NO: 3796
  source: /note="Description of Artificial Sequence: Synthetic polypeptide"

SEQ ID NO: 5412 - protein, 128 aa, Artificial Sequence; identical to SEQ ID NO: 3797
  source: /note="Description of Artificial Sequence: Synthetic polypeptide"

SEQ ID NO: 5413 - protein, 161 aa, Artificial Sequence; identical to SEQ ID NO: 3798
  source: /note="Description of Artificial Sequence: Synthetic polypeptide"

SEQ ID NO: 5414 - protein, 424 aa, Artificial Sequence; identical to SEQ ID NO: 3799
  source: /note="Description of Artificial Sequence: Synthetic polypeptide"

SEQ ID NO: 5415 - protein, 227 aa, Artificial Sequence; identical to SEQ ID NO: 3800
  source: /note="Description of Artificial Sequence: Synthetic polypeptide"

SEQ ID NO: 5416 - protein, 227 aa, Artificial Sequence; identical to SEQ ID NO: 3800
  source: /note="Description of Artificial Sequence: Synthetic polypeptide"

SEQ ID NO: 5417 - protein, 264 aa, Artificial Sequence; identical to SEQ ID NO: 3802
  source: /note="Description of Artificial Sequence: Synthetic polypeptide"

SEQ ID NO: 5418 - protein, 424 aa, Artificial Sequence; identical to SEQ ID NO: 3803
  source: /note="Description of Artificial Sequence: Synthetic polypeptide"

SEQ ID NO: 5419 - protein, 219 aa, Artificial Sequence; identical to SEQ ID NO: 3804
  source: /note="Description of Artificial Sequence: Synthetic polypeptide"

SEQ ID NO: 5420 - protein, 528 aa, Artificial Sequence; identical to SEQ ID NO: 3805
  source: /note="Description of Artificial Sequence: Synthetic polypeptide"

SEQ ID NO: 5421 - protein, 434 aa, Artificial Sequence; identical to SEQ ID NO: 3788
  source: /note="Description of Artificial Sequence: Synthetic polypeptide"

SEQ ID NO: 5422 - protein, 434 aa, Artificial Sequence; identical to SEQ ID NO: 3807
  source: /note="Description of Artificial Sequence: Synthetic polypeptide"

SEQ ID NO: 5423 - protein, 460 aa, Artificial Sequence; identical to SEQ ID NO: 3808
  source: /note="Description of Artificial Sequence: Synthetic polypeptide"

SEQ ID NO: 5424 - protein, 506 aa, Artificial Sequence; identical to SEQ ID NO: 3809
  source: /note="Description of Artificial Sequence: Synthetic polypeptide"

SEQ ID NO: 5425 - protein, 226 aa, Artificial Sequence; identical to SEQ ID NO: 3857
  source: /note="Description of Artificial Sequence: Synthetic polypeptide"

SEQ ID NO: 5426 - protein, 251 aa, Artificial Sequence; identical to SEQ ID NO: 3858
  source: /note="Description of Artificial Sequence: Synthetic polypeptide"

SEQ ID NO: 5427 - protein, 218 aa, Artificial Sequence; identical to SEQ ID NO: 3859
  source: /note="Description of Artificial Sequence: Synthetic polypeptide"

SEQ ID NO: 5428 - protein, 222 aa, Artificial Sequence; identical to SEQ ID NO: 3860
  source: /note="Description of Artificial Sequence: Synthetic polypeptide"

SEQ ID NO: 5429 - protein, 462 aa, Artificial Sequence; identical to SEQ ID NO: 3870
  source: /note="Description of Artificial Sequence: Synthetic polypeptide"

SEQ ID NO: 5430 - protein, 462 aa, Artificial Sequence; identical to SEQ ID NO: 3871
  source: /note="Description of Artificial Sequence: Synthetic polypeptide"

SEQ ID NO: 5431 - protein, 462 aa, Artificial Sequence; identical to SEQ ID NO: 3872
  source: /note="Description of Artificial Sequence: Synthetic polypeptide"

SEQ ID NO: 5432 - protein, 462 aa, Artificial Sequence; identical to SEQ ID NO: 3873
  source: /note="Description of Artificial Sequence: Synthetic polypeptide"

SEQ ID NO: 5433 - protein, 462 aa, Artificial Sequence; identical to SEQ ID NO: 3874
  source: /note="Description of Artificial Sequence: Synthetic polypeptide"

SEQ ID NO: 5434 - protein, 462 aa, Artificial Sequence; identical to SEQ ID NO: 3875
  source: /note="Description of Artificial Sequence: Synthetic polypeptide"

SEQ ID NO: 5435 - protein, 462 aa, Artificial Sequence; identical to SEQ ID NO: 3876
  source: /note="Description of Artificial Sequence: Synthetic polypeptide"

SEQ ID NO: 5436 - protein, 144 aa, Artificial Sequence; identical to SEQ ID NO: 3877
  source: /note="Description of Artificial Sequence: Synthetic polypeptide"

SEQ ID NO: 5437 - protein, 114 aa, Artificial Sequence; identical to SEQ ID NO: 3878
  source: /note="Description of Artificial Sequence: Synthetic polypeptide"
  MOD_RES (3)..(3): Any amino acid

SEQ ID NO: 5438 - protein, 122 aa, Artificial Sequence; identical to SEQ ID NO: 3879
  source: /note="Description of Artificial Sequence: Synthetic polypeptide"

SEQ ID NO: 5439 - protein, 122 aa, Artificial Sequence; identical to SEQ ID NO: 3880
  source: /note="Description of Artificial Sequence: Synthetic polypeptide"

SEQ ID NO: 5440 - protein, 126 aa, Artificial Sequence; identical to SEQ ID NO: 3881
  source: /note="Description of Artificial Sequence: Synthetic polypeptide"

SEQ ID NO: 5441 - protein, 130 aa, Artificial Sequence; identical to SEQ ID NO: 3882
  source: /note="Description of Artificial Sequence: Synthetic polypeptide"

SEQ ID NO: 5442 - protein, 119 aa, Artificial Sequence; identical to SEQ ID NO: 3883
  source: /note="Description of Artificial Sequence: Synthetic polypeptide"

SEQ ID NO: 5443 - protein, 129 aa, Artificial Sequence; identical to SEQ ID NO: 3884
  source: /note="Description of Artificial Sequence: Synthetic polypeptide"

SEQ ID NO: 5444 - protein, 129 aa, Artificial Sequence; identical to SEQ ID NO: 3885
  source: /note="Description of Artificial Sequence: Synthetic polypeptide"

SEQ ID NO: 5445 - protein, 582 aa, Artificial Sequence [sequence omitted]

SEQ ID NO: 5446 - protein, 582 aa, Artificial Sequence [sequence omitted]

SEQ ID NO: 5447 - protein, 582 aa, Artificial Sequence [sequence omitted]

SEQ ID NO: 5448 - protein, 582 aa, Artificial Sequence; identical to SEQ ID NO: 3898
  source: /note="Description of Artificial Sequence: Synthetic polypeptide"

SEQ ID NO: 5449 - protein, 460 aa, Artificial Sequence; identical to SEQ ID NO: 3899
  source: /note="Description of Artificial Sequence: Synthetic polypeptide"

SEQ ID NO: 5450 - protein, 458 aa, Artificial Sequence; identical to SEQ ID NO: 3900
  source: /note="Description of Artificial Sequence: Synthetic polypeptide"

SEQ ID NO: 5451 - protein, 459 aa, Artificial Sequence; identical to SEQ ID NO: 3901
  source: /note="Description of Artificial Sequence: Synthetic polypeptide"

SEQ ID NO: 5452 - protein, 459 aa, Artificial Sequence; identical to SEQ ID NO: 3902
  source: /note="Description of Artificial Sequence: Synthetic polypeptide"

SEQ ID NO: 5453 - protein, 458 aa, Artificial Sequence; identical to SEQ ID NO: 3903
  source: /note="Description of Artificial Sequence: Synthetic polypeptide"

SEQ ID NO: 5454 - protein, 458 aa, Artificial Sequence; identical to SEQ ID NO: 3904
  source: /note="Description of Artificial Sequence: Synthetic polypeptide"

SEQ ID NO: 5455 - protein, 460 aa, Artificial Sequence; identical to SEQ ID NO: 3905
  source: /note="Description of Artificial Sequence: Synthetic polypeptide"

SEQ ID NO: 5456 - protein, 459 aa, Artificial Sequence; identical to SEQ ID NO: 3906
  source: /note="Description of Artificial Sequence: Synthetic polypeptide"

SEQ ID NO: 5457 - protein, 460 aa, Artificial Sequence; identical to SEQ ID NO: 3907
  source: /note="Description of Artificial Sequence: Synthetic polypeptide"

SEQ ID NO: 5458 - protein, 460 aa, Artificial Sequence; identical to SEQ ID NO: 3908
  source: /note="Description of Artificial Sequence: Synthetic polypeptide"

SEQ ID NO: 5459 - protein, 459 aa, Artificial Sequence; identical to SEQ ID NO: 3909
  source: /note="Description of Artificial Sequence: Synthetic polypeptide"

SEQ ID NO: 5460 - protein, 459 aa, Artificial Sequence; identical to SEQ ID NO: 3910
  source: /note="Description of Artificial Sequence: Synthetic polypeptide"

SEQ ID NO: 5461 - protein, 460 aa, Artificial Sequence; identical to SEQ ID NO: 3911
  source: /note="Description of Artificial Sequence: Synthetic polypeptide"

SEQ ID NO: 5462 - protein, 460 aa, Artificial Sequence; identical to SEQ ID NO: 3912
  source: /note="Description of Artificial Sequence: Synthetic polypeptide"

SEQ ID NO: 5463 - protein, 460 aa, Artificial Sequence; identical to SEQ ID NO: 3913
  source: /note="Description of Artificial Sequence: Synthetic polypeptide"

SEQ ID NO: 5464 - protein, 459 aa, Artificial Sequence; identical to SEQ ID NO: 3914
  source: /note="Description of Artificial Sequence: Synthetic polypeptide"

SEQ ID NO: 5465 - protein, 441 aa, Artificial Sequence; identical to SEQ ID NO: 3915
  source: /note="Description of Artificial Sequence: Synthetic polypeptide"

SEQ ID NO: 5466 - protein, 120 aa, Artificial Sequence; identical to SEQ ID NO: 3949
  source: /note="Description of Artificial Sequence: Synthetic polypeptide"

SEQ ID NO: 5467 - protein, 113 aa, Artificial Sequence; identical to SEQ ID NO: 3955
  source: /note="Description of Artificial Sequence: Synthetic polypeptide"

SEQ ID NO: 5468 - protein, 119 aa, Artificial Sequence; identical to SEQ ID NO: 3951
  source: /note="Description of Artificial Sequence: Synthetic polypeptide"

SEQ ID NO: 5469 - protein, 128 aa, Artificial Sequence; identical to SEQ ID NO: 3952
  source: /note="Description of Artificial Sequence: Synthetic polypeptide"

SEQ ID NO: 5470 - protein, 116 aa, Artificial Sequence; identical to SEQ ID NO: 3953
  source: /note="Description of Artificial Sequence: Synthetic polypeptide"

SEQ ID NO: 5471 - protein, 120 aa, Artificial Sequence; identical to SEQ ID NO: 3954
  source: /note="Description of Artificial Sequence: Synthetic polypeptide"

SEQ ID NO: 5472 - protein, 113 aa, Artificial Sequence; identical to SEQ ID NO: 3956
  source: /note="Description of Artificial Sequence: Synthetic polypeptide"

SEQ ID NO: 5473 - protein, 122 aa, Artificial Sequence; identical to SEQ ID NO: 3957
  source: /note="Description of Artificial Sequence: Synthetic polypeptide"

SEQ ID NO: 5474 - protein, 117 aa, Artificial Sequence; identical to SEQ ID NO: 3958
  source: /note="Description of Artificial Sequence: Synthetic polypeptide"

SEQ ID NO: 5475 - protein, 115 aa, Artificial Sequence; identical to SEQ ID NO: 3959
  source: /note="Description of Artificial Sequence: Synthetic polypeptide"

SEQ ID NO: 5476 - protein, 117 aa, Artificial Sequence; identical to SEQ ID NO: 3960
  source: /note="Description of Artificial Sequence: Synthetic polypeptide"

SEQ ID NO: 5477 - protein, 116 aa, Artificial Sequence; identical to SEQ ID NO: 3961
  source: /note="Description of Artificial Sequence: Synthetic polypeptide"

SEQ ID NO: 5478 - protein, 121 aa, Artificial Sequence; identical to SEQ ID NO: 3962
  source: /note="Description of Artificial Sequence: Synthetic polypeptide"

SEQ ID NO: 5479 - protein, 118 aa, Artificial Sequence; identical to SEQ ID NO: 3950
  source: /note="Description of Artificial Sequence: Synthetic polypeptide"

SEQ ID NO: 5480 - protein, 98 aa, Artificial Sequence; identical to SEQ ID NO: 3963
  source: /note="Description of Artificial Sequence: Synthetic polypeptide"

SEQ ID NO: 5481 - protein, 125 aa, Artificial Sequence; identical to SEQ ID NO: 3964
  source: /note="Description of Artificial Sequence: Synthetic polypeptide"

SEQ ID NO: 5482 - protein, 126 aa, Artificial Sequence; identical to SEQ ID NO: 3965
  source: /note="Description of Artificial Sequence: Synthetic polypeptide"

SEQ ID NO: 5483 - protein, 126 aa, Artificial Sequence; identical to SEQ ID NO: 3966
  source: /note="Description of Artificial Sequence: Synthetic polypeptide"

SEQ ID NO: 5484 - protein, 126 aa, Artificial Sequence; identical to SEQ ID NO: 3967
  source: /note="Description of Artificial Sequence: Synthetic polypeptide"

SEQ ID NO: 5485 - protein, 118 aa, Artificial Sequence; identical to SEQ ID NO: 3968
  source: /note="Description of Artificial Sequence: Synthetic polypeptide"

SEQ ID NO: 5486 - protein, 133 aa, Artificial Sequence; identical to SEQ ID NO: 3969
  source: /note="Description of Artificial Sequence: Synthetic polypeptide"

SEQ ID NO: 5487 - protein, 113 aa, Artificial Sequence; identical to SEQ ID NO: 3971
  source: /note="Description of Artificial Sequence: Synthetic polypeptide"

SEQ ID NO: 5488 - protein, 113 aa, Artificial Sequence; identical to SEQ ID NO: 3972
  source: /note="Description of Artificial Sequence: Synthetic polypeptide"

SEQ ID NO: 5489 - protein, 113 aa, Artificial Sequence; identical to SEQ ID NO: 3973
  source: /note="Description of Artificial Sequence: Synthetic polypeptide"

SEQ ID NO: 5490 - protein, 113 aa, Artificial Sequence; identical to SEQ ID NO: 3974
  source: /note="Description of Artificial Sequence: Synthetic polypeptide"

SEQ ID NO: 5491 - protein, 113 aa, Artificial Sequence; identical to SEQ ID NO: 3975
  source: /note="Description of Artificial Sequence: Synthetic polypeptide"

SEQ ID NO: 5492 - protein, 113 aa, Artificial Sequence; identical to SEQ ID NO: 3976
  source: /note="Description of Artificial Sequence: Synthetic polypeptide"

SEQ ID NO: 5493 - protein, 113 aa, Artificial Sequence; identical to SEQ ID NO: 3977
  source: /note="Description of Artificial Sequence: Synthetic polypeptide"

SEQ ID NO: 5494 - protein, 113 aa, Artificial Sequence; identical to SEQ ID NO: 3978
  source: /note="Description of Artificial Sequence: Synthetic polypeptide"

SEQ ID NO: 5495 - protein, 113 aa, Artificial Sequence; identical to SEQ ID NO: 3979
  source: /note="Description of Artificial Sequence: Synthetic polypeptide"

SEQ ID NO: 5496 - protein, 113 aa, Artificial Sequence; identical to SEQ ID NO: 3980
  source: /note="Description of Artificial Sequence: Synthetic polypeptide"

SEQ ID NO: 5497 - protein, 113 aa, Artificial Sequence; identical to SEQ ID NO: 3981
  source: /note="Description of Artificial Sequence: Synthetic polypeptide"

SEQ ID NO: 5498 - protein, 113 aa, Artificial Sequence; identical to SEQ ID NO: 3982
  source: /note="Description of Artificial Sequence: Synthetic polypeptide"

SEQ ID NO: 5499 - protein, 113 aa, Artificial Sequence; identical to SEQ ID NO: 3983
  source: /note="Description of Artificial Sequence: Synthetic polypeptide"

SEQ ID NO: 5500 - protein, 113 aa, Artificial Sequence; identical to SEQ ID NO: 3984
  source: /note="Description of Artificial Sequence: Synthetic polypeptide"

SEQ ID NO: 5501 - protein, 113 aa, Artificial Sequence; identical to SEQ ID NO: 3985
  source: /note="Description of Artificial Sequence: Synthetic polypeptide"

SEQ ID NO: 5502 - protein, 113 aa, Artificial Sequence; identical to SEQ ID NO: 3986
  source: /note="Description of Artificial Sequence: Synthetic polypeptide"

SEQ ID NO: 5503 - protein, 119 aa, Artificial Sequence; identical to SEQ ID NO: 3987
  source: /note="Description of Artificial Sequence: Synthetic polypeptide"

SEQ ID NO: 5504 - protein, 119 aa, Artificial Sequence; identical to SEQ ID NO: 3988
  source: /note="Description of Artificial Sequence: Synthetic polypeptide"

SEQ ID NO: 5505 - protein, 460 aa, Artificial Sequence; identical to SEQ ID NO: 3989
  source: /note="Description of Artificial Sequence: Synthetic polypeptide"

SEQ ID NO: 5506 - protein, 246 aa, Artificial Sequence; identical to SEQ ID NO: 3990
  source: /note="Description of Artificial Sequence: Synthetic polypeptide"

SEQ ID NO: 5507 - protein, 115 aa, Artificial Sequence; identical to SEQ ID NO: 3991
  source: /note="Description of Artificial Sequence: Synthetic polypeptide"

SEQ ID NO: 5508 - protein, 115 aa, Artificial Sequence; identical to SEQ ID NO: 3992
  source: /note="Description of Artificial Sequence: Synthetic polypeptide"

SEQ ID NO: 5509 - protein, 115 aa, Artificial Sequence; identical to SEQ ID NO: 3993
  source: /note="Description of Artificial Sequence: Synthetic polypeptide"

SEQ ID NO: 5510 - protein, 115 aa, Artificial Sequence; identical to SEQ ID NO: 3994
  source: /note="Description of Artificial Sequence: Synthetic polypeptide"

SEQ ID NO: 5511 - protein, 115 aa, Artificial Sequence; identical to SEQ ID NO: 3995
  source: /note="Description of Artificial Sequence: Synthetic polypeptide"

SEQ ID NO: 5512 - protein, 115 aa, Artificial Sequence; identical to SEQ ID NO: 3996
  source: /note="Description of Artificial Sequence: Synthetic polypeptide"

SEQ ID NO: 5513 - protein, 115 aa, Artificial Sequence; identical to SEQ ID NO: 3997
  source: /note="Description of Artificial Sequence: Synthetic polypeptide"

SEQ ID NO: 5514 - protein, 115 aa, Artificial Sequence; identical to SEQ ID NO: 3998
  source: /note="Description of Artificial Sequence: Synthetic polypeptide"

SEQ ID NO: 5515 - protein, 115 aa, Artificial Sequence; identical to SEQ ID NO: 3999
  source: /note="Description of Artificial Sequence: Synthetic polypeptide"

SEQ ID NO: 5516 - protein, 115 aa, Artificial Sequence; identical to SEQ ID NO: 4000
  source: /note="Description of Artificial Sequence: Synthetic polypeptide"

SEQ ID NO: 5517 - protein, 113 aa, Artificial Sequence; identical to SEQ ID NO: 4001
  source: /note="Description of Artificial Sequence: Synthetic polypeptide"

SEQ ID NO: 5518 - protein, 113 aa, Artificial Sequence; identical to SEQ ID NO: 4001
  source: /note="Description of Artificial Sequence: Synthetic polypeptide"

SEQ ID NO: 5519 - protein, 126 aa, Artificial Sequence; identical to SEQ ID NO: 4005
  source: /note="Description of Artificial Sequence: Synthetic polypeptide"

SEQ ID NO: 5520 - protein, 117 aa, Artificial Sequence; identical to SEQ ID NO: 4006
  source: /note="Description of Artificial Sequence: Synthetic polypeptide"

SEQ ID NO: 5521 - protein, 120 aa, Artificial Sequence; identical to SEQ ID NO: 4007
  source: /note="Description of Artificial Sequence: Synthetic polypeptide"

SEQ ID NO: 5522 - protein, 126 aa, Artificial Sequence; identical to SEQ ID NO: 4008
  source: /note="Description of Artificial Sequence: Synthetic polypeptide"

SEQ ID NO: 5523 - protein, 117 aa, Artificial Sequence; identical to SEQ ID NO: 4009
  source: /note="Description of Artificial Sequence: Synthetic polypeptide"

SEQ ID NO: 5524 - protein, 120 aa, Artificial Sequence; identical to SEQ ID NO: 4010
  source: /note="Description of Artificial Sequence: Synthetic polypeptide"

SEQ ID NO: 5525 - protein, 120 aa, Artificial Sequence; identical to SEQ ID NO: 4011
  source: /note="Description of Artificial Sequence: Synthetic polypeptide"

SEQ ID NO: 5526 - protein, 117 aa, Artificial Sequence; identical to SEQ ID NO: 4012
  source: /note="Description of Artificial Sequence: Synthetic polypeptide"

SEQ ID NO: 5527 - protein, 126 aa, Artificial Sequence; identical to SEQ ID NO: 4013
  source: /note="Description of Artificial Sequence: Synthetic polypeptide"

SEQ ID NO: 5528 - protein, 115 aa, Artificial Sequence; identical to SEQ ID NO: 4014
  source: /note="Description of Artificial Sequence: Synthetic polypeptide"

SEQ ID NO: 5529 - protein, 117 aa, Artificial Sequence; identical to SEQ ID NO: 4015
  source: /note="Description of Artificial Sequence: Synthetic polypeptide"

SEQ ID NO: 5530 - protein, 123 aa, Artificial Sequence; identical to SEQ ID NO: 4016
  source: /note="Description of Artificial Sequence: Synthetic polypeptide"

SEQ ID NO: 5531 - protein, 120 aa, Artificial Sequence; identical to SEQ ID NO: 4003
  source: /note="Description of Artificial Sequence: Synthetic polypeptide"

SEQ ID NO: 5532 - protein, 121 aa, Artificial Sequence; identical to SEQ ID NO: 4004
  source: /note="Description of Artificial Sequence: Synthetic polypeptide"

SEQ ID NO: 5533 - protein, 113 aa, Artificial Sequence; identical to SEQ ID NO: 3979
  source: /note="Description of Artificial Sequence: Synthetic polypeptide"

SEQ ID NO: 5534 - protein, 112 aa, Artificial Sequence; identical to SEQ ID NO: 4021
  source: /note="Description of Artificial Sequence: Synthetic polypeptide"

SEQ ID NO: 5535 - protein, 112 aa, Artificial Sequence; identical to SEQ ID NO: 4022
  source: /note="Description of Artificial Sequence: Synthetic polypeptide"

SEQ ID NO: 5536 - protein, 113 aa, Artificial Sequence; identical to SEQ ID NO: 3976
  source: /note="Description of Artificial Sequence: Synthetic polypeptide"

SEQ ID NO: 5537 - protein, 113 aa, Artificial Sequence; identical to SEQ ID NO: 3977
  source: /note="Description of Artificial Sequence: Synthetic polypeptide"

SEQ ID NO: 5538 - protein, 112 aa, Artificial Sequence; identical to SEQ ID NO: 4025
  source: /note="Description of Artificial Sequence: Synthetic polypeptide"

SEQ ID NO: 5539 - protein, 113 aa, Artificial Sequence; identical to SEQ ID NO: 3980
  source: /note="Description of Artificial Sequence: Synthetic polypeptide"

SEQ ID NO: 5540 - protein, 113 aa, Artificial Sequence; identical to SEQ ID NO: 3981
  source: /note="Description of Artificial Sequence: Synthetic polypeptide"

SEQ ID NO: 5541 - protein, 113 aa, Artificial Sequence; identical to SEQ ID NO: 3982
  source: /note="Description of Artificial Sequence: Synthetic polypeptide"

SEQ ID NO: 5542 - protein, 113 aa, Artificial Sequence; identical to SEQ ID NO: 3983
  source: /note="Description of Artificial Sequence: Synthetic polypeptide"

SEQ ID NO: 5543 - protein, 113 aa, Artificial Sequence; identical to SEQ ID NO: 3984
  source: /note="Description of Artificial Sequence: Synthetic polypeptide"

SEQ ID NO: 5544 - protein, 113 aa, Artificial Sequence; identical to SEQ ID NO: 3985
  source: /note="Description of Artificial Sequence: Synthetic polypeptide"

SEQ ID NO: 5545 - protein, 113 aa, Artificial Sequence; identical to SEQ ID NO: 3986
  source: /note="Description of Artificial Sequence: Synthetic polypeptide"

SEQ ID NO: 5546 - protein, 113 aa, Artificial Sequence; identical to SEQ ID NO: 3971
  source: /note="Description of Artificial Sequence: Synthetic polypeptide"

SEQ ID NO: 5547 - protein, 113 aa, Artificial Sequence; identical to SEQ ID NO: 3972
  source: /note="Description of Artificial Sequence: Synthetic polypeptide"

SEQ ID NO: 5548 - protein, 113 aa, Artificial Sequence; identical to SEQ ID NO: 3973
  source: /note="Description of Artificial Sequence: Synthetic polypeptide"

SEQ ID NO: 5549 - protein, 217 aa, Artificial Sequence; identical to SEQ ID NO: 4081
  source: /note="Description of Artificial Sequence: Synthetic polypeptide"

SEQ ID NO: 5550 - protein, 220 aa, Artificial Sequence; identical to SEQ ID NO: 4082
  source: /note="Description of Artificial Sequence: Synthetic polypeptide"

SEQ ID NO: 5551 - protein, 220 aa, Artificial Sequence; identical to SEQ ID NO: 4082
  source: /note="Description of Artificial Sequence: Synthetic polypeptide"

SEQ ID NO: 5552 - protein, 217 aa, Artificial Sequence; identical to SEQ ID NO: 4084
  source: /note="Description of Artificial Sequence: Synthetic polypeptide"

SEQ ID NO: 5553 - protein, 218 aa, Artificial Sequence; identical to SEQ ID NO: 3859
  source: /note="Description of Artificial Sequence: Synthetic polypeptide"

SEQ ID NO: 5554 - protein, 238 aa, Artificial Sequence; identical to SEQ ID NO: 4096
  source: /note="Description of Artificial Sequence: Synthetic polypeptide"

SEQ ID NO: 5555 - protein, 238 aa, Artificial Sequence; identical to SEQ ID NO: 4097
  source: /note="Description of Artificial Sequence: Synthetic polypeptide"

SEQ ID NO: 5556 - protein, 238 aa, Artificial Sequence; identical to SEQ ID NO: 4098
  source: /note="Description of Artificial Sequence: Synthetic polypeptide"

SEQ ID NO: 5557 - protein, 144 aa, Artificial Sequence; identical to SEQ ID NO: 4099
  source: /note="Description of Artificial Sequence: Synthetic polypeptide"

SEQ ID NO: 5558 - protein, 116 aa, Artificial Sequence; identical to SEQ ID NO: 4100
  source: /note="Description of Artificial Sequence: Synthetic polypeptide"

SEQ ID NO: 5559 - protein, 112 aa, Artificial Sequence; identical to SEQ ID NO: 4101
  source: /note="Description of Artificial Sequence: Synthetic polypeptide"

SEQ ID NO: 5560 - protein, 109 aa, Artificial Sequence; identical to SEQ ID NO: 4102
  source: /note="Description of Artificial Sequence: Synthetic polypeptide"

SEQ ID NO: 5561 - protein, 114 aa, Artificial Sequence; identical to SEQ ID NO: 4103
  source: /note="Description of Artificial Sequence: Synthetic polypeptide"

SEQ ID NO: 5562 - protein, 110 aa, Artificial Sequence; identical to SEQ ID NO: 4104
  source: /note="Description of Artificial Sequence: Synthetic polypeptide"

SEQ ID NO: 5563 - protein, 116 aa, Artificial Sequence; identical to SEQ ID NO: 4105
  source: /note="Description of Artificial Sequence: Synthetic polypeptide"

SEQ ID NO: 5564 - protein, 112 aa, Artificial Sequence; identical to SEQ ID NO: 4106
  source: /note="Description of Artificial Sequence: Synthetic polypeptide"

SEQ ID NO: 5565 - protein, 112 aa, Artificial Sequence; identical to SEQ ID NO: 4107
  source: /note="Description of Artificial Sequence: Synthetic polypeptide"

SEQ ID NO: 5566 - protein, 234 aa, Artificial Sequence; identical to SEQ ID NO: 4114
  source: /note="Description of Artificial Sequence: Synthetic polypeptide"

SEQ ID NO: 5567 - protein, 234 aa, Artificial Sequence; identical to SEQ ID NO: 4114
  source: /note="Description of Artificial Sequence: Synthetic polypeptide"

SEQ ID NO: 5568 - protein, 238 aa, Artificial Sequence; identical to SEQ ID NO: 4116
  source: /note="Description of Artificial Sequence: Synthetic polypeptide"

SEQ ID NO: 5569 - protein, 237 aa, Artificial Sequence; identical to SEQ ID NO: 4117
  source: /note="Description of Artificial Sequence: Synthetic polypeptide"

SEQ ID NO: 5570 - protein, 238 aa, Artificial Sequence; identical to SEQ ID NO: 4118
  source: /note="Description of Artificial Sequence: Synthetic polypeptide"

SEQ ID NO: 5571 - protein, 237 aa, Artificial Sequence; identical to SEQ ID NO: 4119
  source: /note="Description of Artificial Sequence: Synthetic polypeptide"

SEQ ID NO: 5572 - protein, 237 aa, Artificial Sequence; identical to SEQ ID NO: 4120
  source: /note="Description of Artificial Sequence: Synthetic polypeptide"

SEQ ID NO: 5573 - protein, 237 aa, Artificial Sequence; identical to SEQ ID NO: 4121
  source: /note="Description of Artificial Sequence: Synthetic polypeptide"

SEQ ID NO: 5574 - protein, 238 aa, Artificial Sequence; identical to SEQ ID NO: 4098
  source: /note="Description of Artificial Sequence: Synthetic polypeptide"

SEQ ID NO: 5575 - protein, 238 aa, Artificial Sequence; identical to SEQ ID NO: 4123
  source: /note="Description of Artificial Sequence: Synthetic polypeptide"

SEQ ID NO: 5576 - protein, 214 aa, Artificial Sequence; identical to SEQ ID NO: 4124
  source: /note="Description of Artificial Sequence: Synthetic polypeptide"

SEQ ID NO: 5577 - protein, 111 aa, Artificial Sequence
  source: /note="Description of Artificial Sequence: Synthetic polypeptide"
QPVLTQSPSVSAAPRQRVTISCSGSNSNIGSNTVNWFQQLPGRAPELLMYYDDLLAPGVSDRFSGSKSGTSASLAISGLQSEDEADYYCATWDDSLNGWVFGGGTKVTVLS

SEQ ID NO: 5578 - protein, 121 aa, Artificial Sequence
  source: /note="Description of Artificial Sequence: Synthetic polypeptide"
MGSQPVLTQSPSVSAAPRQRVTISVSGSNSNIGSNTVNWIQQLPGRAPELLMYDDDLLAPGVSDRFSGSRSGTSASLTISGLQSEDEADYYAATWDDSLNGWVFGGGTKVTVLSGHHHHHH

SEQ ID NO: 5579 - protein, 112 aa, Artificial Sequence
  source: /note="Description of Artificial Sequence: Synthetic polypeptide"
SRPVLTQSPSVSAAPRQRVTISVSGSNSNIGSNTVNWIQQLPGRAPELLMYDDDLLAPGVSDRFSGSRSGTSASLTISGLQSEDEADYYAATWDDSLNDWVFGGGTKVTVLS

SEQ ID NO: 5580 - protein, 267 aa, Artificial Sequence
  source: /note="Description of Artificial Sequence: Synthetic polypeptide"
SASQVQLVKSEAEVKKPGSSVRVSCKASGGTISSCAISWVRQAPGQGLEWMGGIIPMFDTTNYAQNFQGRVTITADESTSTAYMDLSSLRSEDTAVYYCARTYYHDTSDNDGTYGMDVWGQGTTVTVSSASTKGPSGILGSGGGGSGGGGSGGGGSQPVLTQSPSASGTPGQRVTISCSGSTSNIGNNAVNWFQQFPGKAPKLLVYYDDLLPSGVSDRFSGSKSGTSASLAISGLQSEDEADYYCATWDDSLNGWVFGGGTKVTVLS

SEQ ID NO: 5581 - protein, 267 aa, Artificial Sequence
  source: /note="Description of Artificial Sequence: Synthetic polypeptide"
SASQVQLVESEAEVKKPGSSVRVSCKASGGTISSCAISWVRQAPGQGLEWMGGIIPMFDTTNYAQNFQGRVTITADESTSTAYMDLSSLRSEDTAVYYCARTYYHDTRDNDGTYGMDVWGQGTTVTVSSASTKGPSGILGSGGGGSGGGGSGGGGSQPVLTQSPSASGTPGQRVTISCSGSSSNIGSNTVNWFQQLPGTAPELLMYYDDLLASGVSDRFSGSKSGTSASLAISGLQSEDEGDYYCASWDDNLNGWVFGGGTKLTVLS

SEQ ID NO: 5582 - protein, 111 aa, Artificial Sequence; identical to SEQ ID NO: 4154
  source: /note="Description of Artificial Sequence: Synthetic polypeptide"

SEQ ID NO: 5583 - protein, 107 aa, Artificial Sequence; identical to SEQ ID NO: 4155
  source: /note="Description of Artificial Sequence: Synthetic polypeptide"

SEQ ID NO: 5584 - protein, 107 aa, Artificial Sequence; identical to SEQ ID NO: 4156
  source: /note="Description of Artificial Sequence: Synthetic polypeptide"

SEQ ID NO: 5585 - protein, 107 aa, Artificial Sequence; identical to SEQ ID NO: 4157
  source: /note="Description of Artificial Sequence: Synthetic polypeptide"

SEQ ID NO: 5586 - protein, 107 aa, Artificial Sequence; identical to SEQ ID NO: 4158
  source: /note="Description of Artificial Sequence: Synthetic polypeptide"

SEQ ID NO: 5587 - protein, 106 aa, Artificial Sequence; identical to SEQ ID NO: 4159
  source: /note="Description of Artificial Sequence: Synthetic polypeptide"

SEQ ID NO: 5588 - protein, 110 aa, Artificial Sequence; identical to SEQ ID NO: 4160
  source: /note="Description of Artificial Sequence: Synthetic polypeptide"

SEQ ID NO: 5589 - protein, 110 aa, Artificial Sequence; identical to SEQ ID NO: 4161
  source: /note="Description of Artificial Sequence: Synthetic polypeptide"

SEQ ID NO: 5590 - protein, 106 aa, Artificial Sequence; identical to SEQ ID NO: 4162
  source: /note="Description of Artificial Sequence: Synthetic polypeptide"

SEQ ID NO: 5591 - protein, 113 aa, Artificial Sequence; identical to SEQ ID NO: 4163
  source: /note="Description of Artificial Sequence: Synthetic polypeptide"

SEQ ID NO: 5592 - protein, 107 aa, Artificial Sequence; identical to SEQ ID NO: 4164
  source: /note="Description of Artificial Sequence: Synthetic polypeptide"

SEQ ID NO: 5593 - protein, 107 aa, Artificial Sequence; identical to SEQ ID NO: 4165
  source: /note="Description of Artificial Sequence: Synthetic polypeptide"

SEQ ID NO: 5594 - protein, 107 aa, Artificial Sequence; identical to SEQ ID NO: 4166
  source: /note="Description of Artificial Sequence: Synthetic polypeptide"

SEQ ID NO: 5595 - protein, 113 aa, Artificial Sequence; identical to SEQ ID NO: 4167
  source: /note="Description of Artificial Sequence: Synthetic polypeptide"

SEQ ID NO: 5596 - protein, 116 aa, Artificial Sequence; identical to SEQ ID NO: 4168
  source: /note="Description of Artificial Sequence: Synthetic polypeptide"

SEQ ID NO: 5597 - protein, 111 aa, Artificial Sequence; identical to SEQ ID NO: 4169
  source: /note="Description of Artificial Sequence: Synthetic polypeptide"

SEQ ID NO: 5598 - protein, 115 aa, Artificial Sequence; identical to SEQ ID NO: 4170
  source: /note="Description of Artificial Sequence: Synthetic polypeptide"

SEQ ID NO: 5599 - protein, 115 aa, Artificial Sequence; identical to SEQ ID NO: 4171
  source: /note="Description of Artificial Sequence: Synthetic polypeptide"

SEQ ID NO: 5600 - protein, 115 aa, Artificial Sequence; identical to SEQ ID NO: 4172
  source: /note="Description of Artificial Sequence: Synthetic polypeptide"

SEQ ID NO: 5601 - protein, 115 aa, Artificial Sequence; identical to SEQ ID NO: 4173
  source: /note="Description of Artificial Sequence: Synthetic polypeptide"

SEQ ID NO: 5602 - protein, 105 aa, Artificial Sequence; identical to SEQ ID NO: 4174
  source: /note="Description of Artificial Sequence: Synthetic polypeptide"

SEQ ID NO: 5603 - protein, 105 aa, Artificial Sequence; identical to SEQ ID NO: 4175
  source: /note="Description of Artificial Sequence: Synthetic polypeptide"

SEQ ID NO: 5604 - protein, 112 aa, Artificial Sequence; identical to SEQ ID NO: 4177
  source: /note="Description of Artificial Sequence: Synthetic polypeptide"

SEQ ID NO: 5605 - protein, 112 aa, Artificial Sequence; identical to SEQ ID NO: 4178
  source: /note="Description of Artificial Sequence: Synthetic polypeptide"

SEQ ID NO: 5606 - protein, 112 aa, Artificial Sequence; identical to SEQ ID NO: 4179
  source: /note="Description of Artificial Sequence: Synthetic polypeptide"

SEQ ID NO: 5607 - protein, 112 aa, Artificial Sequence; identical to SEQ ID NO: 4180
  source: /note="Description of Artificial Sequence: Synthetic polypeptide"

SEQ ID NO: 5608 - protein, 112 aa, Artificial Sequence [sequence omitted]

SEQ ID NO: 5609 - protein, 112 aa, Artificial Sequence; identical to SEQ ID NO: 4182
  source: /note="Description of Artificial Sequence: Synthetic polypeptide"

SEQ ID NO: 5610 - protein, 112 aa, Artificial Sequence; identical to SEQ ID NO: 4183
  source: /note="Description of Artificial Sequence: Synthetic polypeptide"

SEQ ID NO: 5611 - protein, 112 aa, Artificial Sequence; identical to SEQ ID NO: 4184
  source: /note="Description of Artificial Sequence: Synthetic polypeptide"

SEQ ID NO: 5612 - protein, 114 aa, Artificial Sequence; identical to SEQ ID NO: 4185
  source: /note="Description of Artificial Sequence: Synthetic polypeptide"

SEQ ID NO: 5613 - protein, 113 aa, Artificial Sequence; identical to SEQ ID NO: 4186
  source: /note="Description of Artificial Sequence: Synthetic polypeptide"

SEQ ID NO: 5614 - protein, 234 aa, Artificial Sequence; identical to SEQ ID NO: 4187
  source: /note="Description of Artificial Sequence: Synthetic polypeptide"

SEQ ID NO: 5615 - protein, 246 aa, Artificial Sequence; identical to SEQ ID NO: 4188
  source: /note="Description of Artificial Sequence: Synthetic polypeptide"

SEQ ID NO: 5616 - protein, 113 aa, Artificial Sequence; identical to SEQ ID NO: 4189
  source: /note="Description of Artificial Sequence: Synthetic polypeptide"

SEQ ID NO: 5617 - protein, 113 aa, Artificial Sequence; identical to SEQ ID NO: 4190
  source: /note="Description of Artificial Sequence: Synthetic polypeptide"

SEQ ID NO: 5618 - protein, 113 aa, Artificial Sequence; identical to SEQ ID NO: 4191
  source: /note="Description of Artificial Sequence: Synthetic polypeptide"

SEQ ID NO: 5619 - protein, 115 aa, Artificial Sequence; identical to SEQ ID NO: 4192
  source: /note="Description of Artificial Sequence: Synthetic polypeptide"

SEQ ID NO: 5620 - protein, 115 aa, Artificial Sequence; identical to SEQ ID NO: 4193
  source: /note="Description of Artificial Sequence: Synthetic polypeptide"

SEQ ID NO: 5621 - protein, 115 aa, Artificial Sequence; identical to SEQ ID NO: 4194
  source: /note="Description of Artificial Sequence: Synthetic polypeptide"

SEQ ID NO: 5622 - protein, 113 aa, Artificial Sequence; identical to SEQ ID NO: 4195
  source: /note="Description of Artificial Sequence: Synthetic polypeptide"

SEQ ID NO: 5623 - protein, 113 aa, Artificial Sequence; identical to SEQ ID NO: 4196
  source: /note="Description of Artificial Sequence: Synthetic polypeptide"

SEQ ID NO: 5624 - protein, 109 aa, Artificial Sequence; identical to SEQ ID NO: 4197
  source: /note="Description of Artificial Sequence: Synthetic polypeptide"

SEQ ID NO: 5625 - protein, 108 aa, Artificial Sequence; identical to SEQ ID NO: 4198
  source: /note="Description of Artificial Sequence: Synthetic polypeptide"

SEQ ID NO: 5626 - protein, 108 aa, Artificial Sequence; identical to SEQ ID NO: 4199
  source: /note="Description of Artificial Sequence: Synthetic polypeptide"

SEQ ID NO: 5627 - protein, 108 aa, Artificial Sequence; identical to SEQ ID NO: 4200
  source: /note="Description of Artificial Sequence: Synthetic polypeptide"

SEQ ID NO: 5628 - protein, 106 aa, Artificial Sequence; identical to SEQ ID NO: 4201
  source: /note="Description of Artificial Sequence: Synthetic polypeptide"

SEQ ID NO: 5629 - protein, 108 aa, Artificial Sequence; identical to SEQ ID NO: 4202
  source: /note="Description of Artificial Sequence: Synthetic polypeptide"

SEQ ID NO: 5630 - protein, 111 aa, Artificial Sequence; identical to SEQ ID NO: 4203
  source: /note="Description of Artificial Sequence: Synthetic polypeptide"

SEQ ID NO: 5631 - protein, 111 aa, Artificial Sequence; identical to SEQ ID NO: 4204
  source: /note="Description of Artificial Sequence: Synthetic polypeptide"

SEQ ID NO: 5632 - protein, 107 aa, Artificial Sequence; identical to SEQ ID NO: 4205
  source: /note="Description of Artificial Sequence: Synthetic polypeptide"

SEQ ID NO: 5633 - protein, 108 aa, Artificial Sequence; identical to SEQ ID NO: 4206
  source: /note="Description of Artificial Sequence: Synthetic polypeptide"

SEQ ID NO: 5634 - protein, 109 aa, Artificial Sequence; identical to SEQ ID NO: 4207
  source: /note="Description of Artificial Sequence: Synthetic polypeptide"

SEQ ID NO: 5635 - protein, 110 aa, Artificial Sequence; identical to SEQ ID NO: 4208
  source: /note="Description of Artificial Sequence: Synthetic polypeptide"

SEQ ID NO: 5636 - protein, 108 aa, Artificial Sequence; identical to SEQ ID NO: 4209
  source: /note="Description of Artificial Sequence: Synthetic polypeptide"

SEQ ID NO: 5637 - protein, 108 aa, Artificial Sequence; identical to SEQ ID NO: 4210
  source: /note="Description of Artificial Sequence: Synthetic polypeptide"

SEQ ID NO: 5638 - protein, 112 aa, Artificial Sequence; identical to SEQ ID NO: 4184
  source: /note="Description of Artificial Sequence: Synthetic polypeptide"

SEQ ID NO: 5639 - protein, 112 aa, Artificial Sequence; identical to SEQ ID NO: 4178
  source: /note="Description of Artificial Sequence: Synthetic polypeptide"

SEQ ID NO: 5640 - protein, 112 aa, Artificial Sequence; identical to SEQ ID NO: 4179
  source: /note="Description of Artificial Sequence: Synthetic polypeptide"

SEQ ID NO: 5641 - protein, 112 aa, Artificial Sequence; identical to SEQ ID NO: 4180
  source: /note="Description of Artificial Sequence: Synthetic polypeptide"

SEQ ID NO: 5642 - protein, 112 aa, Artificial Sequence [sequence omitted]

SEQ ID NO: 5643 - protein, 112 aa, Artificial Sequence; identical to SEQ ID NO: 4182
  source: /note="Description of Artificial Sequence: Synthetic polypeptide"

SEQ ID NO: 5644 - protein, 112 aa, Artificial Sequence; identical to SEQ ID NO: 4183
  source: /note="Description of Artificial Sequence: Synthetic polypeptide"

SEQ ID NO: 5645 - protein, 112 aa, Artificial Sequence; identical to SEQ ID NO: 4177
  source: /note="Description of Artificial Sequence: Synthetic polypeptide"

SEQ ID NO: 5646 - protein, 242 aa, Artificial Sequence
  source: /note="Description of Artificial Sequence: Synthetic polypeptide"
MAQVQLQESGGGLVQPGGSLRLSCAASGFTFSSYSMSWVRQAPGKGLEWVAVISYDGSNKYYADSVKGRFTISRDNSKNTLYLQMNSLRAEDTAVYYCARDRYFDLWGRGTLVTVSSGGGGSGGGGSGGGGSQSALTQPASVSGSPGQSITISCTGTSSDIGAYNYVSWYQQYPGKAPKLLIYDVSNRPSGISNRFSGSKSGDTASLTISGLQAEDEADYYCSSFANSGPLFGGGTKVTVLG

SEQ ID NO: 5647 - protein, 422 aa, Artificial Sequence; identical to SEQ ID NO: 3787
  source: /note="Description of Artificial Sequence: Synthetic polypeptide"

SEQ ID NO: 5648 - protein, 434 aa, Artificial Sequence; identical to SEQ ID NO: 3788
  source: /note="Description of Artificial Sequence: Synthetic polypeptide"

SEQ ID NO: 5649 - protein, 330 aa, Artificial Sequence; identical to SEQ ID NO: 3789
  source: /note="Description of Artificial Sequence: Synthetic polypeptide"

SEQ ID NO: 5650 - protein, 424 aa, Artificial Sequence; identical to SEQ ID NO: 3790
  source: /note="Description of Artificial Sequence: Synthetic polypeptide"

SEQ ID NO: 5651 - protein, 506 aa, Artificial Sequence; identical to SEQ ID NO: 3791
  source: /note="Description of Artificial Sequence: Synthetic polypeptide"

SEQ ID NO: 5652 - protein, 509 aa, Artificial Sequence; identical to SEQ ID NO: 3792
  source: /note="Description of Artificial Sequence: Synthetic polypeptide"

SEQ ID NO: 5653 - protein, 131 aa, Artificial Sequence; identical to SEQ ID NO: 3793
  source: /note="Description of Artificial Sequence: Synthetic polypeptide"

SEQ ID NO: 5654 - protein, 131 aa, Artificial Sequence; identical to SEQ ID NO: 3793
  source: /note="Description of Artificial Sequence: Synthetic polypeptide"

SEQ ID NO: 5655 - protein, 131 aa, Artificial Sequence; identical to SEQ ID NO: 3793
  source: /note="Description of Artificial Sequence: Synthetic polypeptide"

SEQ ID NO: 5656 - protein, 128 aa, Artificial Sequence; identical to SEQ ID NO: 3796
  source: /note="Description of Artificial Sequence: Synthetic polypeptide"

SEQ ID NO: 5657 - protein, 128 aa, Artificial Sequence; identical to SEQ ID NO: 3797
  source: /note="Description of Artificial Sequence: Synthetic polypeptide"

SEQ ID NO: 5658 - protein, 161 aa, Artificial Sequence; identical to SEQ ID NO: 3798
  source: /note="Description of Artificial Sequence: Synthetic polypeptide"

SEQ ID NO: 5659 - protein, 424 aa, Artificial Sequence; identical to SEQ ID NO: 3799
  source: /note="Description of Artificial Sequence: Synthetic polypeptide"

SEQ ID NO: 5660 - protein, 227 aa, Artificial Sequence; identical to SEQ ID NO: 3800
  source: /note="Description of Artificial Sequence: Synthetic polypeptide"

SEQ ID NO: 5661 - protein, 227 aa, Artificial Sequence; identical to SEQ ID NO: 3800
  source: /note="Description of Artificial Sequence: Synthetic polypeptide"

SEQ ID NO: 5662 - protein, 264 aa, Artificial Sequence; identical to SEQ ID NO: 3802
  source: /note="Description of Artificial Sequence: Synthetic polypeptide"

SEQ ID NO: 5663 - protein, 424 aa, Artificial Sequence; identical to SEQ ID NO: 3803
  source: /note="Description of Artificial Sequence: Synthetic polypeptide"

SEQ ID NO: 5664 - protein, 219 aa, Artificial Sequence; identical to SEQ ID NO: 3804
  source: /note="Description of Artificial Sequence: Synthetic polypeptide"

SEQ ID NO: 5665 - protein, 528 aa, Artificial Sequence; identical to SEQ ID NO: 3805
  source: /note="Description of Artificial Sequence: Synthetic polypeptide"

SEQ ID NO: 5666 - protein, 434 aa, Artificial Sequence; identical to SEQ ID NO: 3788
  source: /note="Description of Artificial Sequence: Synthetic polypeptide"

SEQ ID NO: 5667 - protein, 434 aa, Artificial Sequence; identical to SEQ ID NO: 3807
  source: /note="Description of Artificial Sequence: Synthetic polypeptide"

SEQ ID NO: 5668 - protein, 460 aa, Artificial Sequence; identical to SEQ ID NO: 3808
  source: /note="Description of Artificial Sequence: Synthetic polypeptide"

SEQ ID NO: 5669 - protein, 506 aa, Artificial Sequence; identical to SEQ ID NO: 3809
  source: /note="Description of Artificial Sequence: Synthetic polypeptide"

SEQ ID NO: 5670 - protein, 445 aa, Artificial Sequence
  source: /note="Description of Artificial Sequence: Synthetic polypeptide"
QVQLVQSGAEVKKPGASVKVSCKASGYTFTSSYINWVRQAPGQGLEWMGTINPVSGSTSYAQKFQGRVTMTRDTSISTAYMELSRLRSDDTAVYYCARGGWFDYWGQGTLVTVSSASTKGPSVFPLAPSSKSTSGGTAALGCLVKDYFPEPVTVSWNSGALTSGVHTFPAVLQSSGLYSLSSVVTVPSSSLGTQTYICNVNHKPSNTKVDKRVEPKSCDKTHTCPPCPAPEAAGGPSVFLFPPKPKDTLMISRTPEVTCVVVDVSHEDPEVKFNWYVDGVEVHNAKTKPREEQYNSTYRVVSVLTVLHQDWLNGKEYKCKVSNKALPAPIEKTISKAKGQPREPQVYTLPPSREEMTKNQVSLTCLVKGFYPSDIAVEWESNGQPENNYKTTPPVLDSDGSFFLYSKLTVDKSRWQQGNVFSCSVMHEALHNHYTQKSLSLSPGK

SEQ ID NO: 5671 - protein, 445 aa, Artificial Sequence; identical to SEQ ID NO: 5670
  source: /note="Description of Artificial Sequence: Synthetic polypeptide"

SEQ ID NO: 5672 - protein, 226 aa, Artificial Sequence; identical to SEQ ID NO: 3857
  source: /note="Description of Artificial Sequence: Synthetic polypeptide"

SEQ ID NO: 5673 - protein, 251 aa, Artificial Sequence; identical to SEQ ID NO: 3858
  source: /note="Description of Artificial Sequence: Synthetic polypeptide"

SEQ ID NO: 5674 - protein, 218 aa, Artificial Sequence; identical to SEQ ID NO: 3859
  source: /note="Description of Artificial Sequence: Synthetic polypeptide"

SEQ ID NO: 5675 - protein, 222 aa, Artificial Sequence; identical to SEQ ID NO: 3860
  source: /note="Description of Artificial Sequence: Synthetic polypeptide"

SEQ ID NO: 5676 - protein, 470 aa, Artificial Sequence; identical to SEQ ID NO: 3861
  source: /note="Description of Artificial Sequence: Synthetic polypeptide"

SEQ ID NO: 5677 - protein, 467 aa, Artificial Sequence; identical to SEQ ID NO: 3862
  source: /note="Description of Artificial Sequence: Synthetic polypeptide"

SEQ ID NO: 5678 - protein, 470 aa, Artificial Sequence; identical to SEQ ID NO: 3863
  source: /note="Description of Artificial Sequence: Synthetic polypeptide"

SEQ ID NO: 5679 - protein, 671 aa, Artificial Sequence; identical to SEQ ID NO: 3864
  source: /note="Description of Artificial Sequence: Synthetic polypeptide"

SEQ ID NO: 5680 - protein, 470 aa, Artificial Sequence; identical to SEQ ID NO: 3865
  source: /note="Description of Artificial Sequence: Synthetic polypeptide"

SEQ ID NO: 5681 - protein, 454 aa, Artificial Sequence; identical to SEQ ID NO: 3866
  source: /note="Description of Artificial Sequence: Synthetic polypeptide"

SEQ ID NO: 5682 - protein, 467 aa, Artificial Sequence; identical to SEQ ID NO: 3867
  source: /note="Description of Artificial Sequence: Synthetic polypeptide"

SEQ ID NO: 5683 - protein, 431 aa, Artificial Sequence; identical to SEQ ID NO: 3868
  source: /note="Description of Artificial Sequence: Synthetic polypeptide"

SEQ ID NO: 5684 - protein, 476 aa, Artificial Sequence; identical to SEQ ID NO: 3869
  source: /note="Description of Artificial Sequence: Synthetic polypeptide"

SEQ ID NO: 5685 - protein, 121 aa, Artificial Sequence
  source: /note="Description of Artificial Sequence: Synthetic polypeptide"
QVTLKESGGGLVQPGGSLRLSCAASGFTFSRYVINWVRQAPGKGLEWVSAISVTGGSTAYADSVRGRFTISRDNSKNTLYLQMNSLRAEDTAVYYCTKGQWERGSYYFDYWGRGTLVTVSS

SEQ ID NO: 5686 - protein, 117 aa, Artificial Sequence
  source: /note="Description of Artificial Sequence: Synthetic polypeptide"
QVQLVQSGAEVKKPGASVKVSCKASGYTFTSYYMHWVRQAPGQGLEWMGIINPSGGSTSYAQKFQGRVTMTRDTSTSTVYMELSSLRSEDTAVYYCARDENWGFDPWGQGTLVTVSS

SEQ ID NO: 5687 - protein, 124 aa, Artificial Sequence
  source: /note="Description of Artificial Sequence: Synthetic polypeptide"
EVQLLESGGGLVQPGGSLRLSCAASGFTFSSYAMSWVRQAPGKGLEWVSAISGSGGSTYYADSVKGRFTISRDNSKNTLYLQMNSLRAEDTAVYYCERMGPCTGGSCYDTLGNWGRGTLVTVSS

SEQ ID NO: 5688 - protein, 447 aa, Artificial Sequence
  source: /note="Description of Artificial Sequence: Synthetic polypeptide"
EVQVLESGGDLVQPGGSLRLSCAASGFTFSAYAMTWVRQAPGKGLEWVSAISGSGGSAYYADSVKGRFTISRDNSKNTVYLQMNSLRAEDTAVYYCAKDGAWKMSGLDVWGQGTTVIVSSASTKGPSVFPLAPCSRSTSESTAALGCLVKDYFPEPVTVSWNSGALTSGVHTFPAVLQSSGLYSLSSVVTVPSSSLGTKTYTCNVDHKPSNTKVDKRVESKYGPPCPPCPAPEFLGGPSVFLFPPKPKDTLMISRTPEVTCVVVDVSQEDPEVQFNWYVDGVEVHNAKTKPREEQFNSTYRVVSVLTVLHQDWLNGKEYKCKVSNKGLPSSIEKTISKAKGQPREPQVYTLPPSQEEMTKNQVSLTCLVKGFYPSDIAVEWESNGQPENNYKTTPPVLDSDGSFFLYSRLTVDKSRWQEGNVFSCSVMHEALHNHYTQKSLSLSLGK

SEQ ID NO: 5689 - protein, 445 aa, Artificial Sequence
  source: /note="Description of Artificial Sequence: Synthetic polypeptide"
EVQLLESGGGLVQPGGSLRLSCAASGFTFSSYAMSWVRQAPGKGLEWVSTISSGGSYTSYPDSVKGRFTISRDNSKNTLYLQMNSLRAEDTAVYYCAKQDYAMNYWGQGTLVTVSSASTKGPSVFPLAPSSKSTSGGTAALGCLVKDYFPEPVTVSWNSGALTSGVHTFPAVLQSSGLYSLSSVVTVPSSSLGTQTYICNVNHKPSNTKVDKKVEPKSCDKTHTCPPCPAPEAAGAPSVFLFPPKPKDTLMISRTPEVTCVVVDVSHEDPEVKFNWYVDGVEVHNAKTKPREEQYNSTYRVVSVLTVLHQDWLNGKEYKCKVSNKALPAPIEKTISKAKGQPREPQVYTLPPSREEMTKNQVSLTCLVKGFYPSDIAVEWESNGQPENNYKTTPPVLDSDGSFFLYSKLTVDKSRWQQGNVFSCSVMHEALHNHYTQKSLSLSPG

SEQ ID NO: 5690 - protein, 456 aa, Artificial Sequence
  source: /note="Description of Artificial Sequence: Synthetic polypeptide"
QVQLVQSGSELKKPGASVKVSCKASGYTFTNYGMNWVRQAPGQGLEWMGWINTYTGEPTYADDFTGRFVFSLDTSVSTAYLQISSLKAEDTAVYYCARNPINYYGINYEGYVMDYWGQGTLVTVSSASTKGPSVFPLAPSSKSTSGGTAALGCLVKDYFPEPVTVSWNSGALTSGVHTFPAVLQSSGLYSLSSVVTVPSSSLGTQTYICNVNHKPSNTKVDKKVEPKSCDKTHTCPPCPAPELAGAPSVFLFPPKPKDTLMISRTPEVTCVVVDVSHEDPEVKFNWYVDGVEVHNAKTKPREEQYNSTYRVVSVLTVLHQDWLNGKEYKCKVSNKALPAPIEKTISKAKGQPREPQVYTLPPSRDELTKNQVSLTCLVKGFYPSDIAVEWESNGQPENNYKTTPPVLDSDGSFFLYSKLTVDKSRWQQGNVFSCSVMHEALHNHYTQKSLSLSPGK

SEQ ID NO: 5691 - protein, 439 aa, Artificial Sequence
  source: /note="Description of Artificial Sequence: Synthetic polypeptide"
EVQLVESGGGLVQPGGSLRLSCAASGLTFSRYPMSWVRQAPGKGLVWVSAITSSGGSTYYSDTVKGRFTISRDNAKNTLYLQMNSLRAEDTAVYYCARLPDYWGQGTLVTVSSASTKGPSVFPLAPCSRSTSESTAALGCLVKDYFPEPVTVSWNSGALTSGVHTFPAVLQSSGLYSLSSVVTVPSSSLGTKTYTCNVDHKPSNTKVDKRVESKYGPPCPPCPAPEFLGGPSVFLFPPKPKDTLMISRTPEVTCVVVDVSQEDPEVQFNWYVDGVEVHNAKTKPREEQFNSTYRVVSVLTVLHQDWLNGKEYKCKVSNKGLPSSIEKTISKAKGQPREPQVYTLPPSQEEMTKNQVSLTCLVKGFYPSDIAVEWESNGQPENNYKTTPPVLDSDGSFFLYSRLTVDKSRWQEGNVFSCSVMHEALHNHYTQKSLSLSLG

SEQ ID NO: 5692 - protein, 454 aa, Artificial Sequence
  source: /note="Description of Artificial Sequence: Synthetic polypeptide"
EVQLQQSGPELVKPGASVKISCKASGYSFTGYFMHWVKQSHGNILDWIGNIYPYNGVSNYNQRFKAKATLTVDKSSSTAYMELRSLTSEDSAVYYCARRYYYGTGPADWYFDVWGTGTLVTVSSASTKGPSVFPLAPSSKSTSGGTAALGCLVKDYFPEPVTVSWNSGALTSGVHTFPAVLQSSGLYSLSSVVTVPSSSLGTQTYICNVNHKPSNTKVDKKVEPKSCDKTHTCPPCPAPELLGGPSVFLFPPKPKDTLMISRTPEVTCVVVDVSHEDPEVKFNWYVDGVEVHNAKTKPREEQYNSTYRVVSVLTVLHQDWLNGKEYKCKVSNKALPAPIEKTISKAKGQPREPQVYTLPPSRDELTKNQVSLTCLVKGFYPSDIAVEWESNGQPENNYKTTPPVLDSDGSFFLYSKLTVDKSRWQQGNVFSCSVMHEALHNHYTQKSLSLSPGK

SEQ ID NO: 5693 - protein, 454 aa, Artificial Sequence
  source: /note="Description of Artificial Sequence: Synthetic polypeptide"
QVQLVQSGAEVKKPGASVKVSCKASGYTFTGYFMHWVRQAPGQGLEWMGNIYPYNGVSNYNQRFKARVTMTTDTSTSTAYMELRSLRSDDTAVYYCARRYYYGTGPADWYFDVWGQGTLVTVSSASTKGPSVFPLAPSSKSTSGGTAALGCLVKDYFPEPVTVSWNSGALTSGVHTFPAVLQSSGLYSLSSVVTVPSSSLGTQTYICNVNHKPSNTKVDKKVEPKSCDKTHTCPPCPAPELLGGPSVFLFPPKPKDTLMISRTPEVTCVVVDVSHEDPEVKFNWYVDGVEVHNAKTKPREEQYNSTYRVVSVLTVLHQDWLNGKEYKCKVSNKALPAPIEKTISKAKGQPREPQVYTLPPSRDELTKNQVSLTCLVKGFYPSDIAVEWESNGQPENNYKTTPPVLDSDGSFFLYSKLTVDKSRWQQGNVFSCSVMHEALHNHYTQKSLSLSPGK

SEQ ID NO: 5694 - protein, 454 aa, Artificial Sequence
  source: /note="Description of Artificial Sequence: Synthetic polypeptide"
QVQLVQSGAEVKKPGASVKVSCKASGYTFTGYFMHWVRQAPGQGLEWMGNIYPYNGVSNYNQRFKARVTMTTDTSTSTAYMELRSLRSDDTAVYYCARRYYYGTGPADWYFDVWGTGTLVTVSSASTKGPSVFPLAPSSKSTSGGTAALGCLVKDYFPEPVTVSWNSGALTSGVHTFPAVLQSSGLYSLSSVVTVPSSSLGTQTYICNVNHKPSNTKVDKKVEPKSCDKTHTCPPCPAPELLGGPSVFLFPPKPKDTLMISRTPEVTCVVVDVSHEDPEVKFNWYVDGVEVHNAKTKPREEQYNSTYRVVSVLTVLHQDWLNGKEYKCKVSNKALPAPIEKTISKAKGQPREPQVYTLPPSRDELTKNQVSLTCLVKGFYPSDIAVEWESNGQPENNYKTTPPVLDSDGSFFLYSKLTVDKSRWQQGNVFSCSVMHEALHNHYTQKSLSLSPGK

SEQ ID NO: 5695 - protein, 454 aa, Artificial Sequence
  source: /note="Description of Artificial Sequence: Synthetic polypeptide"
QVQLVQSGAEVKKPGASVKVSCKASGYSFTGYFMHWVRQAPGQGLEWMGNIYPYNGVSNYNQRFKARVTMTTDTSTSTAYMELRSLRSDDTAVYYCARRYYYGTGPADWYFDVWGQGTLVTVSSASTKGPSVFPLAPSSKSTSGGTAALGCLVKDYFPEPVTVSWNSGALTSGVHTFPAVLQSSGLYSLSSVVTVPSSSLGTQTYICNVNHKPSNTKVDKKVEPKSCDKTHTCPPCPAPELLGGPSVFLFPPKPKDTLMISRTPEVTCVVVDVSHEDPEVKFNWYVDGVEVHNAKTKPREEQYNSTYRVVSVLTVLHQDWLNGKEYKCKVSNKALPAPIEKTISKAKGQPREPQVYTLPPSRDELTKNQVSLTCLVKGFYPSDIAVEWESNGQPENNYKTTPPVLDSDGSFFLYSKLTVDKSRWQQGNVFSCSVMHEALHNHYTQKSLSLSPGK

SEQ ID NO: 5696 - protein, 448 aa, Artificial Sequence
  source: /note="Description of Artificial Sequence: Synthetic polypeptide"
QVQLVQSGAEVKKPGASVKVSCKASGYSFTGYFMHWVRQAPGQGLEWMGNIYPYNSVSNYNQRFKARVTMTVDKSTSTAYMELRSLRSDDTAVYYCARRYYYGTGPADWYYDVWGQGTLVTVSSASTKGPSVFPLAPSSKSTSGGTAALGCLVKDYFPEPVTVSWNSGALTSGVHTFPAVLQSSGSLSSVVTVPSSSLGTQTYICNVNHKPSNTKVDKKVEPKSCDKTHTCPPCPAPELAGAPSVFLFPPKPKDTLMISRTPEVTCVVVDVSHEDPEVKFNWYVDGVEVHNAKTKPREEQYNSYVVSVLTVLHQDWLNGKEYKCKVSNKALPAPIEKTISKAKGQPREPQVYTLPPSRDELTKNQVSLTCLVKGFYPSDIAVEWESNGQPENNYKTTPPVLDSDGSFFKKLTVDKSRWQQGNVFSCSVMHEALHNHYTQKSLSLSPGK

SEQ ID NO: 5697 - protein, 448 aa, Artificial Sequence
  source: /note="Description of Artificial Sequence: Synthetic polypeptide"
QVQLVQSGAEVKKPGASVKVSCKASGYSFTGYFMHWVRQAPGQGLEWIGNIYPYNSVSNYNQRFKARATLTVDKSTSTAYMELRSLRSDDTAVYYCARRYYYGTGPADWYYDVWGQGTLVTVSSASTKGPSVFPLAPSSKSTSGGTAALGCLVKDYFPEPVTVSWNSGALTSGVHTFPAVLQSSGSLSSVVTVPSSSLGTQTYICNVNHKPSNTKVDKKVEPKSCDKTHTCPPCPAPELAGAPSVFLFPPKPKDTLMISRTPEVTCVVVDVSHEDPEVKFNWYVDGVEVHNAKTKPREEQYNSYVVSVLTVLHQDWLNGKEYKCKVSNKALPAPIEKTISKAKGQPREPQVYTLPPSRDELTKNQVSLTCLVKGFYPSDIAVEWESNGQPENNYKTTPPVLDSDGSFFKKLTVDKSRWQQGNVFSCSVMHEALHNHYTQKSLSLSPGK

SEQ ID NO: 5698 - protein, 447 aa, Artificial Sequence
  source: /note="Description of Artificial Sequence: Synthetic polypeptide"
QVQLVQSGAEVKKPGASVKISCKASGYSFTGYFMHWVRQAPGQGLEWIGNIYPYNSVSNYNQRFKAKATLTVDKSTSTAYMELRSLRSDDTAVYYCARRYYYGTGPADWYYDVWGQGTLVTVSSASTKGPSVFPLAPSSKSTSGGTAALGCLVKDYFPEPVTVSWNSGALTSGVHTFPAVLQSSGSLSSVVTVPSSSLGTQTYICNVNHKPSNTKVDKKVEPKSCDKTHTCPPCPAPELAGAPSVFLFPPKPKDTLMISRTPEVTCVVVDVSHEDPEVKFNWYVDGVEVHNAKTKPREEQYNSYVVSVLTVLHQDWLNGKEYKCKVSNKALPAPIEKTISKAKGQPREPQVYTLPPSRDELTKNQVSLTCLVKGFYPSDIAVEWESNGQPENNYKTTPPVLDSDGSFFKKLTVDKSRWQQGNVFSCSVMHEALHNHYTQKSLSLSPG

SEQ ID NO: 5699 - protein, 448 aa, Artificial Sequence
  source: /note="Description of Artificial Sequence: Synthetic polypeptide"
QVQLVQSGAEVKKPGASVKVSCKASGYSFTGYFMHWVRQAPGQGLEWIGNIYPYNGVSNYNQRFKARATLTTDTSTSTAYMELRSLRSDDTAVYYCARRYYYGTGPADWYYDVWGQGTLVTVSSASTKGPSVFPLAPSSKSTSGGTAALGCLVKDYFPEPVTVSWNSGALTSGVHTFPAVLQSSGSLSSVVTVPSSSLGTQTYICNVNHKPSNTKVDKKVEPKSCDKTHTCPPCPAPELLGGPSVFLFPPKPKDTLMISRTPEVTCVVVDVSHEDPEVKFNWYVDGVEVHNAKTKPREEQYNSYVVSVLTVLHQDWLNGKEYKCKVSNKALPAPIEKTISKAKGQPREPQVYTLPPSRDELTKNQVSLTCLVKGFYPSDIAVEWESNGQPENNYKTTPPVLDSDGSFFKKLTVDKSRWQQGNVFSCSVMHEALHNHYTQKSLSLSPGK

SEQ ID NO: 5700 - protein, 448 aa, Artificial Sequence
  source: /note="Description of Artificial Sequence: Synthetic polypeptide"
QVQLVQSGAEVKKPGASVKVSCKASGYSFTGYFMHWVRQAPGQGLEWMGNIYPYNGVSNYNQRFKARVTMTVDKSTSTAYMELRSLRSDDTAVYYCARRYYYGTGPADWYYDVWGQGTLVTVSSASTKGPSVFPLAPSSKSTSGGTAALGCLVKDYFPEPVTVSWNSGALTSGVHTFPAVLQSSGSLSSVVTVPSSSLGTQTYICNVNHKPSNTKVDKKVEPKSCDKTHTCPPCPAPELLGGPSVFLFPPKPKDTLMISRTPEVTCVVVDVSHEDPEVKFNWYVDGVEVHNAKTKPREEQYNSYVVSVLTVLHQDWLNGKEYKCKVSNKALPAPIEKTISKAKGQPREPQVYTLPPSRDELTKNQVSLTCLVKGFYPSDIAVEWESNGQPENNYKTTPPVLDSDGSFFKKLTVDKSRWQQGNVFSCSVMHEALHNHYTQKSLSLSPGK

SEQ ID NO: 5701 - protein, 448 aa, Artificial Sequence
  source: /note="Description of Artificial Sequence: Synthetic polypeptide"
QVQLVQSGAEVKKPGASVKVSCKASGYSFTGYFMHWVRQAPGQGLEWIGNIYPYNGVSNYNQRFKARATLTVDKSTSTAYMELRSLRSDDTAVYYCARRYYYGTGPADWYYDVWGQGTLVTVSSASTKGPSVFPLAPSSKSTSGGTAALGCLVKDYFPEPVTVSWNSGALTSGVHTFPAVLQSSGSLSSVVTVPSSSLGTQTYICNVNHKPSNTKVDKKVEPKSCDKTHTCPPCPAPELLGGPSVFLFPPKPKDTLMISRTPEVTCVVVDVSHEDPEVKFNWYVDGVEVHNAKTKPREEQYNSYVVSVLTVLHQDWLNGKEYKCKVSNKALPAPIEKTISKAKGQPREPQVYTLPPSRDELTKNQVSLTCLVKGFYPSDIAVEWESNGQPENNYKTTPPVLDSDGSFFKKLTVDKSRWQQGNVFSCSVMHEALHNHYTQKSLSLSPGK

SEQ ID NO: 5702 - protein, 448 aa, Artificial Sequence
  source: /note="Description of Artificial Sequence: Synthetic polypeptide"
QVQLVQSGAEVKKPGASVKISCKASGYSFTGYFMHWVRQAPGQGLEWIGNIYPYNGVSNYNQRFKAKATLTVDKSTSTAYMELRSLRSDDTAVYYCARRYYYGTGPADWYYDVWGQGTLVTVSSASTKGPSVFPLAPSSKSTSGGTAALGCLVKDYFPEPVTVSWNSGALTSGVHTFPAVLQSSGSLSSVVTVPSSSLGTQTYICNVNHKPSNTKVDKKVEPKSCDKTHTCPPCPAPELLGGPSVFLFPPKPKDTLMISRTPEVTCVVVDVSHEDPEVKFNWYVDGVEVHNAKTKPREEQYNSYVVSVLTVLHQDWLNGKEYKCKVSNKALPAPIEKTISKAKGQPREPQVYTLPPSRDELTKNQVSLTCLVKGFYPSDIAVEWESNGQPENNYKTTPPVLDSDGSFFKKLTVDKSRWQQGNVFSCSVMHEALHNHYTQKSLSLSPGK

SEQ ID NO: 5703 - protein, 448 aa, Artificial Sequence
  source: /note="Description of Artificial Sequence: Synthetic polypeptide"
QVQLVQSGAEVKKPGASVKVSCKASGYSFTGYFMHWVRQAPGQGLEWMGNIYPYNSVSNYNQRFKARVTMTVDKSTSTAYMELRSLRSDDTAVYYCARRYYYGTGPADWYYDVWGQGTLVTVSSASTKGPSVFPLAPSSKSTSGGTAALGCLVKDYFPEPVTVSWNSGALTSGVHTFPAVLQSSGSLSSVVTVPSSSLGTQTYICNVNHKPSNTKVDKKVEPKSCDKTHTCPPCPAPELLGGPSVFLFPPKPKDTLMISRTPEVTCVVVDVSHEDPEVKFNWYVDGVEVHNAKTKPREEQYNSYVVSVLTVLHQDWLNGKEYKCKVSNKALPAPIEKTISKAKGQPREPQVYTLPPSRDELTKNQVSLTCLVKGFYPSDIAVEWESNGQPENNYKTTPPVLDSDGSFFKKLTVDKSRWQQGNVFSCSVMHEALHNHYTQKSLSLSPGK

SEQ ID NO: 5704 - protein, 448 aa, Artificial Sequence
  source: /note="Description of Artificial Sequence: Synthetic polypeptide"
QVQLVQSGAEVKKPGASVKVSCKASGYSFTGYFMHWVRQAPGQGLEWIGNIYPYNSVSNYNQRFKARATLTVDKSTSTAYMELRSLRSDDTAVYYCARRYYYGTGPADWYYDVWGQGTLVTVSSASTKGPSVFPLAPSSKSTSGGTAALGCLVKDYFPEPVTVSWNSGALTSGVHTFPAVLQSSGSLSSVVTVPSSSLGTQTYICNVNHKPSNTKVDKKVEPKSCDKTHTCPPCPAPELLGGPSVFLFPPKPKDTLMISRTPEVTCVVVDVSHEDPEVKFNWYVDGVEVHNAKTKPREEQYNSYVVSVLTVLHQDWLNGKEYKCKVSNKALPAPIEKTISKAKGQPREPQVYTLPPSRDELTKNQVSLTCLVKGFYPSDIAVEWESNGQPENNYKTTPPVLDSDGSFFKKLTVDKSRWQQGNVFSCSVMHEALHNHYTQKSLSLSPGK

SEQ ID NO: 5705 - protein, 448 aa, Artificial Sequence
  source: /note="Description of Artificial Sequence: Synthetic polypeptide"
QVQLVQSGAEVKKPGASVKISCKASGYSFTGYFMHWVRQAPGQGLEWIGNIYPYNSVSNYNQRFKAKATLTVDKSTSTAYMELRSLRSDDTAVYYCARRYYYGTGPADWYYDVWGQGTLVTVSSASTKGPSVFPLAPSSKSTSGGTAALGCLVKDYFPEPVTVSWNSGALTSGVHTFPAVLQSSGSLSSVVTVPSSSLGTQTYICNVNHKPSNTKVDKKVEPKSCDKTHTCPPCPAPELLGGPSVFLFPPKPKDTLMISRTPEVTCVVVDVSHEDPEVKFNWYVDGVEVHNAKTKPREEQYNSYVVSVLTVLHQDWLNGKEYKCKVSNKALPAPIEKTISKAKGQPREPQVYTLPPSRDELTKNQVSLTCLVKGFYPSDIAVEWESNGQPENNYKTTPPVLDSDGSFFKKLTVDKSRWQQGNVFSCSVMHEALHNHYTQKSLSLSPGK

SEQ ID NO: 5706 - protein, 448 aa, Artificial Sequence
  source: /note="Description of Artificial Sequence: Synthetic polypeptide"
EVQLQQSGPELVKPGASVKISCKASGYSFTGYFMHWVKQSHGNILDWIGNIYPYNGVSNYNQRFKAKATLTVDKSSSTAYMELRSLTSEDSAVYYCARRYYYGTGPADWYFDVWGTGTLVTVSSASTKGPSVFPLAPSSKSTSGGTAALGCLVKDYFPEPVTVSWNSGALTSGVHTFPAVLQSSGSLSSVVTVPSSSLGTQTYICNVNHKPSNTKVDKKVEPKSCDKTHTCPPCPAPELLGGPSVFLFPPKPKDTLMISRTPEVTCVVVDVSHEDPEVKFNWYVDGVEVHNAKTKPREEQYNSYVVSVLTVLHQDWLNGKEYKCKVSNKALPAPIEKTISKAKGQPREPQVYTLPPSRDELTKNQVSLTCLVKGFYPSDIAVEWESNGQPENNYKTTPPVLDSDGSFFKKLTVDKSRWQQGNVFSCSVMHEALHNHYTQKSLSLSPGK

SEQ ID NO: 5707 - protein, 448 aa, Artificial Sequence
  source: /note="Description of Artificial Sequence: Synthetic polypeptide"
QVQLVQSGAEVKKPGASVKVSCKASGYSFTGYFMHWVRQAPGQGLEWMGNIYPYNGVSNYNQRFKARVTMTTDTSTSTAYMELRSLRSDDTAVYYCARRYYYGTGPADWYFDVWGQGTLVTVSSASTKGPSVFPLAPSSKSTSGGTAALGCLVKDYFPEPVTVSWNSGALTSGVHTFPAVLQSSGSLSSVVTVPSSSLGTQTYICNVNHKPSNTKVDKKVEPKSCDKTHTCPPCPAPELLGGPSVFLFPPKPKDTLMISRTPEVTCVVVDVSHEDPEVKFNWYVDGVEVHNAKTKPREEQYNSYVVSVLTVLHQDWLNGKEYKCKVSNKALPAPIEKTISKAKGQPREPQVYTLPPSRDELTKNQVSLTCLVKGFYPSDIAVEWESNGQPENNYKTTPPVLDSDGSFFKKLTVDKSRWQQGNVFSCSVMHEALHNHYTQKSLSLSPGK

SEQ ID NO: 5708 - protein, 448 aa, Artificial Sequence
  source: /note="Description of Artificial Sequence: Synthetic polypeptide"
EVQLQQSGPELVKPGASVKISCKASGYSFTGYFMHWVKQSHGNILDWIGNIYPYDGVSNYNQRFKAKATLTVDKSSSTAYMELRSLTSEDSAVYYCARRYYYGTGPADWYFDVWGTGTLVTVSSASTKGPSVFPLAPSSKSTSGGTAALGCLVKDYFPEPVTVSWNSGALTSGVHTFPAVLQSSGSLSSVVTVPSSSLGTQTYICNVNHKPSNTKVDKKVEPKSCDKTHTCPPCPAPELLGGPSVFLFPPKPKDTLMISRTPEVTCVVVDVSHEDPEVKFNWYVDGVEVHNAKTKPREEQYNSYVVSVLTVLHQDWLNGKEYKCKVSNKALPAPIEKTISKAKGQPREPQVYTLPPSRDELTKNQVSLTCLVKGFYPSDIAVEWESNGQPENNYKTTPPVLDSDGSFFKKLTVDKSRWQQGNVFSCSVMHEALHNHYTQKSLSLSPGK

SEQ ID NO: 5709 - protein, 448 aa, Artificial Sequence
  source: /note="Description of Artificial Sequence: Synthetic polypeptide"
EVQLQQSGPELVKPGASVKISCKASGYSFTGYFMHWVKQSHGNILDWIGNIYPYQGVSNYNQRFKAKATLTVDKSSSTAYMELRSLTSEDSAVYYCARRYYYGTGPADWYFDVWGTGTLVTVSSASTKGPSVFPLAPSSKSTSGGTAALGCLVKDYFPEPVTVSWNSGALTSGVHTFPAVLQSSGSLSSVVTVPSSSLGTQTYICNVNHKPSNTKVDKKVEPKSCDKTHTCPPCPAPELLGGPSVFLFPPKPKDTLMISRTPEVTCVVVDVSHEDPEVKFNWYVDGVEVHNAKTKPREEQYNSYVVSVLTVLHQDWLNGKEYKCKVSNKALPAPIEKTISKAKGQPREPQVYTLPPSRDELTKNQVSLTCLVKGFYPSDIAVEWESNGQPENNYKTTPPVLDSDGSFFKKLTVDKSRWQQGNVFSCSVMHEALHNHYTQKSLSLSPGK

SEQ ID NO: 5710 - protein, 448 aa, Artificial Sequence
  source: /note="Description of Artificial Sequence: Synthetic polypeptide"
QVQLVQSGAEVKKPGASVKVSCKASGYSFTGYFMHWVRQAPGQGLEWMGNIYPYDGVSNYNQRFKARVTMTTDTSTSTAYMELRSLRSDDTAVYYCARRYYYGTGPADWYFDVWGQGTLVTVSSASTKGPSVFPLAPSSKSTSGGTAALGCLVKDYFPEPVTVSWNSGALTSGVHTFPAVLQSSGSLSSVVTVPSSSLGTQTYICNVNHKPSNTKVDKKVEPKSCDKTHTCPPCPAPELLGGPSVFLFPPKPKDTLMISRTPEVTCVVVDVSHEDPEVKFNWYVDGVEVHNAKTKPREEQYNSYVVSVLTVLHQDWLNGKEYKCKVSNKALPAPIEKTISKAKGQPREPQVYTLPPSRDELTKNQVSLTCLVKGFYPSDIAVEWESNGQPENNYKTTPPVLDSDGSFFKKLTVDKSRWQQGNVFSCSVMHEALHNHYTQKSLSLSPGK

SEQ ID NO: 5711 - protein, 448 aa, Artificial Sequence
  source: /note="Description of Artificial Sequence: Synthetic polypeptide"
QVQLVQSGAEVKKPGASVKVSCKASGYSFTGYFMHWVRQAPGQGLEWMGNIYPYQGVSNYNQRFKARVTMTTDTSTSTAYMELRSLRSDDTAVYYCARRYYYGTGPADWYFDVWGQGTLVTVSSASTKGPSVFPLAPSSKSTSGGTAALGCLVKDYFPEPVTVSWNSGALTSGVHTFPAVLQSSGSLSSVVTVPSSSLGTQTYICNVNHKPSNTKVDKKVEPKSCDKTHTCPPCPAPELLGGPSVFLFPPKPKDTLMISRTPEVTCVVVDVSHEDPEVKFNWYVDGVEVHNAKTKPREEQYNSYVVSVLTVLHQDWLNGKEYKCKVSNKALPAPIEKTISKAKGQPREPQVYTLPPSRDELTKNQVSLTCLVKGFYPSDIAVEWESNGQPENNYKTTPPVLDSDGSFFKKLTVDKSRWQQGNVFSCSVMHEALHNHYTQKSLSLSPGK

SEQ ID NO: 5712 - protein, 448 aa, Artificial Sequence
  source: /note="Description of Artificial Sequence: Synthetic polypeptide"
QVQLVQSGAEVKKPGASVKVSCKASGYSFTGYFMHWVRQAPGQGLEWMGNIYPYNGVSNYNQRFKARVTMTTDTSTSTAYMELRSLRSDDTAVYYCARRYYYGTGPADWYYDVWGQGTLVTVSSASTKGPSVFPLAPSSKSTSGGTAALGCLVKDYFPEPVTVSWNSGALTSGVHTFPAVLQSSGSLSSVVTVPSSSLGTQTYICNVNHKPSNTKVDKKVEPKSCDKTHTCPPCPAPELAGAPSVFLFPPKPKDTLMISRTPEVTCVVVDVSHEDPEVKFNWYVDGVEVHNAKTKPREEQYNSYVVSVLTVLHQDWLNGKEYKCKVSNKALPAPIEKTISKAKGQPREPQVYTLPPSRDELTKNQVSLTCLVKGFYPSDIAVEWESNGQPENNYKTTPPVLDSDGSFFKKLTVDKSRWQQGNVFSCSVMHEALHNHYTQKSLSLSPGK

SEQ ID NO: 5713 - protein, 115 aa, Artificial Sequence
  source: /note="Description of Artificial Sequence: Synthetic polypeptide"
EVQLVESGGGLVQPGGSLRLSCAASGFTFSNYWMNWVRQAPGKGLEWVAQIRLKSDNYATHYAESVKGRFTISRDNAKNSLYLQMNSLRAEDTAVYYCARGLDYWGQGTTVTVSS

SEQ ID NO: 5714 - protein, 115 aa, Artificial Sequence
  source: /note="Description of Artificial Sequence: Synthetic polypeptide"
EVQLVESGGGLVQPGGSLRLSCAASGFTFRNYWCNWVRQAPGKGLEWVAQIRLKSDNYATHYAESVKGRFTISRDNAKNSLYLQMNSLRAEDTAVYYCTEGLDYWGQGTTVTVSS

SEQ ID NO: 5715 - protein, 115 aa, Artificial Sequence
  source: /note="Description of Artificial Sequence: Synthetic polypeptide"
  MOD_RES (50)..(50): Any amino acid
EVQLVESGGGLVQPGGSLRLSCAASGFTFSRYWMNWVRQAPGKGLEWVAXIRLKSDNYATHYAESVKGRFTISRDNAKNSLYLQMNSLRAEDTAVYYCTEGLDYWGQGTTVTVSS

SEQ ID NO: 5716 - protein, 115 aa, Artificial Sequence
  source: /note="Description of Artificial Sequence: Synthetic polypeptide"
EVQLVESGGGLVQPGGSLRLSCAASGFTFSNYWLNWVRQAPGKGLEWVAQIRLKSDNYATHYAESVKGRFTISRDNAKNSLYLQMNSLRAEDTAVYYCTEGLDYWGQGTTVTVSS

SEQ ID NO: 5717 - protein, 115 aa, Artificial Sequence; identical to SEQ ID NO: 5714
  source: /note="Description of Artificial Sequence: Synthetic polypeptide"

SEQ ID NO: 5718 - protein, 115 aa, Artificial Sequence; identical to SEQ ID NO: 5714
  source: /note="Description of Artificial Sequence: Synthetic polypeptide"

SEQ ID NO: 5719 - protein, 115 aa, Artificial Sequence; identical to SEQ ID NO: 5714
  source: /note="Description of Artificial Sequence: Synthetic polypeptide"

SEQ ID NO: 5720 - protein, 115 aa, Artificial Sequence; identical to SEQ ID NO: 5716
  source: /note="Description of Artificial Sequence: Synthetic polypeptide"

SEQ ID NO: 5721 - protein, 115 aa, Artificial Sequence; identical to SEQ ID NO: 5714
  source: /note="Description of Artificial Sequence: Synthetic polypeptide"

SEQ ID NO: 5722 - protein, 462 aa, Artificial Sequence; identical to SEQ ID NO: 3873
  source: /note="Description of Artificial Sequence: Synthetic polypeptide"

SEQ ID NO: 5723 - protein, 462 aa, Artificial Sequence; identical to SEQ ID NO: 3874
  source: /note="Description of Artificial Sequence: Synthetic polypeptide"

SEQ ID NO: 5724 - protein, 462 aa, Artificial Sequence; identical to SEQ ID NO: 3875
  source: /note="Description of Artificial Sequence: Synthetic polypeptide"

SEQ ID NO: 5725 - protein, 462 aa, Artificial Sequence; identical to SEQ ID NO: 3876
  source: /note="Description of Artificial Sequence: Synthetic polypeptide"

SEQ ID NO: 5726 - protein, 462 aa, Artificial Sequence; identical to SEQ ID NO: 3870
  source: /note="Description of Artificial Sequence: Synthetic polypeptide"

SEQ ID NO: 5727 - protein, 462 aa, Artificial Sequence; identical to SEQ ID NO: 3871
  source: /note="Description of Artificial Sequence: Synthetic polypeptide"

SEQ ID NO: 5728 - protein, 462 aa, Artificial Sequence; identical to SEQ ID NO: 3872
  source: /note="Description of Artificial Sequence: Synthetic polypeptide"

SEQ ID NO: 5729 - protein, 144 aa, Artificial Sequence; identical to SEQ ID NO: 3877
  source: /note="Description of Artificial Sequence: Synthetic polypeptide"

SEQ ID NO: 5730 - protein, 114 aa, Artificial Sequence; identical to SEQ ID NO: 3878
  source: /note="Description of Artificial Sequence: Synthetic polypeptide"
  MOD_RES (3)..(3): Any amino acid

SEQ ID NO: 5731 - protein, 443 aa, Artificial Sequence
  source: /note="Description of Artificial Sequence: Synthetic polypeptide"
QVQLVQSGAEVKKPGASVKVSCKASGYTFTSYWMHWVRQAPGQGLEWIGNINPSNGGTNYNEKFKSKATMTRDTSTSTAYMELSSLRSEDTAVYYCELMQGYWGQGTLVTVSSASTKGPSVFPLAPSSKSTSGGTAALGCLVKDYFPEPVTVSWNSGALTSGVHTFPAVLQSSGLYSLSSVVTVPSSSLGTQTYICNVNHKPSNTKVDKKVEPKSCDKTHTCPPCPAPELAGAPSVFLFPPKPKDTLMISRTPEVTCVVVDVSHEDPEVKFNWYVDGVEVHNAKTKPREEQYNSTYRVVSVLTVLHQDWLNGKEYKCKVSNKALPAPIEKTISKAKGQPREPQVYTLPPSRDELTKNQVSLTCLVKGFYPSDIAVEWESNGQPENNYKTTPPVLDSDGSFFLYSKLTVDKSRWQQGNVFSCSVMHEALHNHYTQKSLSLSPGK

SEQ ID NO: 5732 - protein, 444 aa, Artificial Sequence
  source: /note="Description of Artificial Sequence: Synthetic polypeptide"
QVNLRESGGGLVRPGGSLRLSCAASGFTVSGYAMSWVRQAPGKGLEWVSAISRFSDTTYSADSVKGRFTISRDNSKNTVYLQMNSLRAEDSAVYYCARDPSGHGMDVWGQGTLVTVSAASTKGPSVFPLAPCSRSTSESTAALGCLVKDYFPEPVTVSWNSGALTSGVHTFPAVLQSSGLYSLSSVVTVPSSNFGTQTYTCNVDHKPSNTKVDKTVERKCCVECPPCPAPPVAGPSVFLFPPKPKDTLMISRTPEVTCVVVDVSHEDPEVQFNWYVDGVEVHNAKTKPREEQFNSTFRVVSVLTVVHQDWLNGKEYKCKVSNKGLPAPIEKTISKTKGQPREPQVYTLPPSREEMTKNQVSLTCLVKGFYPSDIAVEWESNGQPENNYKTTPPMLDSDGSFFLYSKLTVDKSRWQQGNVFSCSVMHEALHNHYTQKSLSLSPGK

SEQ ID NO: 5733 - protein, 122 aa, Artificial Sequence; identical to SEQ ID NO: 3879
  source: /note="Description of Artificial Sequence: Synthetic polypeptide"

SEQ ID NO: 5734 - protein, 122 aa, Artificial Sequence; identical to SEQ ID NO: 3880
  source: /note="Description of Artificial Sequence: Synthetic polypeptide"

SEQ ID NO: 5735 - protein, 126 aa, Artificial Sequence; identical to SEQ ID NO: 3881
  source: /note="Description of Artificial Sequence: Synthetic polypeptide"

SEQ ID NO: 5736 - protein, 130 aa, Artificial Sequence; identical to SEQ ID NO: 3882
  source: /note="Description of Artificial Sequence: Synthetic polypeptide"

SEQ ID NO: 5737 - protein, 119 aa, Artificial Sequence; identical to SEQ ID NO: 3883
  source: /note="Description of Artificial Sequence: Synthetic polypeptide"

SEQ ID NO: 5738 - protein, 129 aa, Artificial Sequence; identical to SEQ ID NO: 3884
  source: /note="Description of Artificial Sequence: Synthetic polypeptide"

SEQ ID NO: 5739 - protein, 129 aa, Artificial Sequence; identical to SEQ ID NO: 3885
  source: /note="Description of Artificial Sequence: Synthetic polypeptide"

SEQ ID NO: 5740 - protein, 115 aa, Artificial Sequence
  source: /note="Description of Artificial Sequence: Synthetic polypeptide"
  MOD_RES (30)..(31): Any amino acid
  MOD_RES (34)..(34): Any amino acid
  MOD_RES (99)..(100): Any amino acid
EVQLVESGGGLVQPGGSLRLSCAASGFTFXXYWXNWVRQAPGKGLEWVAQIRLKSDNYATHYAESVKGRFTISRDNAKNSLYLQMNSLRAEDTAVYYCXXGLDYWGQGTTVTVSS

SEQ ID NO: 5741 - protein, 330 aa, Artificial Sequence
  source: /note="Description of Artificial Sequence: Synthetic polypeptide"
ASTKGPSVFPLAPSSKSTSGGTAALGCLVKDYFPEPVTVSWNSGALTSGVHTFPAVLQSSGLYSLSSVVTVPSSSLGTQTYICNVNHKPSNTKVDKKVEPKSCDKTHTCPPCPAPEALGAPSVFLFPPKPKDTLMISRTPEVTCVVVDVSHEDPEVKFNWYVDGVEVHNAKTKPREEQYNSTYRVVSVLTVLHQDWLNGKEYKCKVSNKALPAPIEKTISKAKGQPREPQVYTLPPSREEMTKNQVSLTCLVKGFYPSDIAVEWESNGQPENNYKTTPPVLDSDGSFFLYSKLTVDKSRWQQGNVFSCSVMHEALHNHYTQKSLSLSPGK

SEQ ID NO: 5742 - protein, 582 aa, Artificial Sequence [sequence omitted]

SEQ ID NO: 5743 - protein, 582 aa, Artificial Sequence [sequence omitted]

SEQ ID NO: 5744 - protein, 582 aa, Artificial Sequence [sequence omitted]

SEQ ID NO: 5745 - protein, 582 aa, Artificial Sequence; identical to SEQ ID NO: 3898
  source: /note="Description of Artificial Sequence: Synthetic polypeptide"

SEQ ID NO: 5746 - protein, 460 aa, Artificial Sequence; identical to SEQ ID NO: 3899
  source: /note="Description of Artificial Sequence: Synthetic polypeptide"

SEQ ID NO: 5747 - protein, 458 aa, Artificial Sequence; identical to SEQ ID NO: 3900
  source: /note="Description of Artificial Sequence: Synthetic polypeptide"

SEQ ID NO: 5748 - protein, 459 aa, Artificial Sequence; identical to SEQ ID NO: 3901
  source: /note="Description of Artificial Sequence: Synthetic polypeptide"

SEQ ID NO: 5749 - protein, 459 aa, Artificial Sequence; identical to SEQ ID NO: 3902
  source: /note="Description of Artificial Sequence: Synthetic polypeptide"

SEQ ID NO: 5750 - protein, 458 aa, Artificial Sequence; identical to SEQ ID NO: 3903
  source: /note="Description of Artificial Sequence: Synthetic polypeptide"

SEQ ID NO: 5751 - protein, 458 aa, Artificial Sequence; identical to SEQ ID NO: 3904
  source: /note="Description of Artificial Sequence: Synthetic polypeptide"

SEQ ID NO: 5752 - protein, 460 aa, Artificial Sequence; identical to SEQ ID NO: 3905
  source: /note="Description of Artificial Sequence: Synthetic polypeptide"

SEQ ID NO: 5753 - protein, 459 aa, Artificial Sequence; identical to SEQ ID NO: 3906
  source: /note="Description of Artificial Sequence: Synthetic polypeptide"

SEQ ID NO: 5754 - protein, 460 aa, Artificial Sequence; identical to SEQ ID NO: 3907
  source: /note="Description of Artificial Sequence: Synthetic polypeptide"

SEQ ID NO: 5755 - protein, 460 aa, Artificial Sequence; identical to SEQ ID NO: 3908
  source: /note="Description of Artificial Sequence: Synthetic polypeptide"

SEQ ID NO: 5756 - protein, 459 aa, Artificial Sequence; identical to SEQ ID NO: 3909
  source: /note="Description of Artificial Sequence: Synthetic polypeptide"

SEQ ID NO: 5757 - protein, 459 aa, Artificial Sequence; identical to SEQ ID NO: 3910
  source: /note="Description of Artificial Sequence: Synthetic polypeptide"

SEQ ID NO: 5758 - protein, 460 aa, Artificial Sequence; identical to SEQ ID NO: 3911
  source: /note="Description of Artificial Sequence: Synthetic polypeptide"

SEQ ID NO: 5759 - protein, 460 aa, Artificial Sequence; identical to SEQ ID NO: 3912
  source: /note="Description of Artificial Sequence: Synthetic polypeptide"

SEQ ID NO: 5760 - protein, 460 aa, Artificial Sequence; identical to SEQ ID NO: 3913
  source: /note="Description of Artificial Sequence: Synthetic polypeptide"

SEQ ID NO: 5761 - protein, 459 aa, Artificial Sequence; identical to SEQ ID NO: 3914
  source: /note="Description of Artificial Sequence: Synthetic polypeptide"

SEQ ID NO: 5762 - protein, 441 aa, Artificial Sequence; identical to SEQ ID NO: 3915
  source: /note="Description of Artificial Sequence: Synthetic polypeptide"

SEQ ID NO: 5763 - protein, 120 aa, Artificial Sequence; identical to SEQ ID NO: 3949
  source: /note="Description of Artificial Sequence: Synthetic polypeptide"

SEQ ID NO: 5764 - protein, 120 aa, Artificial Sequence
  source: /note="Description of Artificial Sequence: Synthetic polypeptide"
QVQLVQSGAEVKKPGASVKVSCKASGYTFTSYWMQWVRQAPGQGLEWMGAIYPGDGDTRYTQKFKGRVTMTRDTSTSTVYMELSSLRSEDTAVYYCARMGGYDRYYFDYWGQGTLVTVSS

SEQ ID NO: 5765 - protein, 116 aa, Artificial Sequence; identical to SEQ ID NO: 3961
  source: /note="Description of Artificial Sequence: Synthetic polypeptide"

SEQ ID NO: 5766 - protein, 121 aa, Artificial Sequence; identical to SEQ ID NO: 3962
  source: /note="Description of Artificial Sequence: Synthetic polypeptide"

SEQ ID NO: 5767 - protein, 118 aa, Artificial Sequence; identical to SEQ ID NO: 3950
  source: /note="Description of Artificial Sequence: Synthetic polypeptide"

SEQ ID NO: 5768 - protein, 119 aa, Artificial Sequence; identical to SEQ ID NO: 3951
  source: /note="Description of Artificial Sequence: Synthetic polypeptide"

SEQ ID NO: 5769 - protein, 128 aa, Artificial Sequence; identical to SEQ ID NO: 3952
  source: /note="Description of Artificial Sequence: Synthetic polypeptide"

SEQ ID NO: 5770 - protein, 116 aa, Artificial Sequence; identical to SEQ ID NO: 3953
  source: /note="Description of Artificial Sequence: Synthetic polypeptide"

SEQ ID NO: 5771 - protein, 120 aa, Artificial Sequence; identical to SEQ ID NO: 3954
  source: /note="Description of Artificial Sequence: Synthetic polypeptide"

SEQ ID NO: 5772 - protein, 113 aa, Artificial Sequence; identical to SEQ ID NO: 3955
  source: /note="Description of Artificial Sequence: Synthetic polypeptide"

SEQ ID NO: 5773 - protein, 113 aa, Artificial Sequence; identical to SEQ ID NO: 3956
  source: /note="Description of Artificial Sequence: Synthetic polypeptide"

SEQ ID NO: 5774 - protein, 122 aa, Artificial Sequence; identical to SEQ ID NO: 3957
  source: /note="Description of Artificial Sequence: Synthetic polypeptide"

SEQ ID NO: 5775 - protein, 117 aa, Artificial Sequence; identical to SEQ ID NO: 3958
  source: /note="Description of Artificial Sequence: Synthetic polypeptide"

SEQ ID NO: 5776 - protein, 115 aa, Artificial Sequence; identical to SEQ ID NO: 3959
  source: /note="Description of Artificial Sequence: Synthetic polypeptide"

SEQ ID NO: 5777 - protein, 117 aa, Artificial Sequence; identical to SEQ ID NO: 3960
  source: /note="Description of Artificial Sequence: Synthetic polypeptide"

SEQ ID NO: 5778 - protein, 116 aa, Artificial Sequence
  source: /note="Description of Artificial Sequence: Synthetic polypeptide"
EVQLVESGGGLVQPGGSLRLSCAASGFTFSSYAMSWVRQAPEKRLEWVATISSGGSYTSYPDSVKGRFTISRDNSKNTLYLQMNSLRAEDTAMYYCAKQDYAMNYWGQGTMVTVSS

SEQ ID NO: 5779 - protein, 116 aa, Artificial Sequence
  source: /note="Description of Artificial Sequence: Synthetic polypeptide"
EVQLLESGGGLVQPGGSLRLSCAASGFTFSSYAMSWVRQAPGKGLEWVSTISSGGSYTSYPDSVKGRFTISRDNSKNTLYLQMNSLRAEDTAVYYCAKQDYAMNYWGQGTMVTVSS

SEQ ID NO: 5780 - protein, 120 aa, Artificial Sequence
  source: /note="Description of Artificial Sequence: Synthetic polypeptide"
EVQVLESGGDLVQPGGSLRLSCAASGFTFSAYAMTWVRQAPGKGLEWVSAISGSGGSAYYADSVKGRFTISRDNSKNTVYLQMNSLRAEDTAVYYCAKDGAWKMSGLDVWGQGTTVIVSS

SEQ ID NO: 5781 - protein, 98 aa, Artificial Sequence; identical to SEQ ID NO: 3963
  source: /note="Description of Artificial Sequence: Synthetic polypeptide"

SEQ ID NO: 5782 - protein, 125 aa, Artificial Sequence; identical to SEQ ID NO: 3964
  source: /note="Description of Artificial Sequence: Synthetic polypeptide"

SEQ ID NO: 5783 - protein, 126 aa, Artificial Sequence; identical to SEQ ID NO: 3965
  source: /note="Description of Artificial Sequence: Synthetic polypeptide"

SEQ ID NO: 5784 - protein, 126 aa, Artificial Sequence; identical to SEQ ID NO: 3966
  source: /note="Description of Artificial Sequence: Synthetic polypeptide"

SEQ ID NO: 5785 - protein, 126 aa, Artificial Sequence; identical to SEQ ID NO: 3967
  source: /note="Description of Artificial Sequence: Synthetic polypeptide"

SEQ ID NO: 5786 - protein, 118 aa, Artificial Sequence; identical to SEQ ID NO: 3968
  source: /note="Description of Artificial Sequence: Synthetic polypeptide"

SEQ ID NO: 5787 - protein, 133 aa, Artificial Sequence; identical to SEQ ID NO: 3969
  source: /note="Description of Artificial Sequence: Synthetic polypeptide"

SEQ ID NO: 5788 - protein, 117 aa, Artificial Sequence; identical to SEQ ID NO: 5686
  source: /note="Description of Artificial Sequence: Synthetic polypeptide"

SEQ ID NO: 5789 - protein, 124 aa, Artificial Sequence
  source: /note="Description of Artificial Sequence: Synthetic polypeptide"
QVQLVQSGAEVKKPGASVKVSCKASGYSFTGYFMHWVRQAPGQGLEWMGNIYPYNGVSNYNQRFKARVTMTTDTSTSTAYMELRSLRSDDTAVYYCARRYYYGTGPADWYFDVWGQGTLVTVSS

SEQ ID NO: 5790 - protein, 124 aa, Artificial Sequence
  source: /note="Description of Artificial Sequence: Synthetic polypeptide"
EVQLQQSGPELVKPGASVKISCKASGYSFTGYFMHWVKQSHGNILDWIGNIYPYDGVSNYNQRFKAKATLTVDKSSSTAYMELRSLTSEDSAVYYCARRYYYGTGPADWYFDVWGTGTLVTVSS

SEQ ID NO: 5791 - protein, 124 aa, Artificial Sequence
  source: /note="Description of Artificial Sequence: Synthetic polypeptide"
EVQLQQSGPELVKPGASVKISCKASGYSFTGYFMHWVKQSHGNILDWIGNIYPYQGVSNYNQRFKAKATLTVDKSSSTAYMELRSLTSEDSAVYYCARRYYYGTGPADWYFDVWGTGTLVTVSS

SEQ ID NO: 5792 - protein, 124 aa, Artificial Sequence
  source: /note="Description of Artificial Sequence: Synthetic polypeptide"
QVQLVQSGAEVKKPGASVKVSCKASGYSFTGYFMHWVRQAPGQGLEWMGNIYPYDGVSNYNQRFKARVTMTTDTSTSTAYMELRSLRSDDTAVYYCARRYYYGTGPADWYFDVWGQGTLVTVSS

SEQ ID NO: 5793 - protein, 124 aa, Artificial Sequence
  source: /note="Description of Artificial Sequence: Synthetic polypeptide"
QVQLVQSGAEVKKPGASVKVSCKASGYSFTGYFMHWVRQAPGQGLEWMGNIYPYQGVSNYNQRFKARVTMTTDTSTSTAYMELRSLRSDDTAVYYCARRYYYGTGPADWYFDVWGQGTLVTVSS

SEQ ID NO: 5794 - protein, 124 aa, Artificial Sequence
  source: /note="Description of Artificial Sequence: Synthetic polypeptide"
EVQLQQSGPELVKPGASVKISCKASGYSFTGYFMHWVKQSHGNILDWIGNIYPYNGVSNYNQRFKAKATLTVDKSSSTAYMELRSLTSEDSAVYYCARRYYYGTGPADWYFDVWGTGTLVTVSS

SEQ ID NO: 5795 - protein, 107 aa, Artificial Sequence
  source: /note="Description of Artificial Sequence: Synthetic polypeptide"
DIKMTQSPSSMYASLRERVTITCKASQDINSYLSWFQQKPGKSPKTLIYRANRLVDGVPSRFSGSGSGQDYSLTISSLEYEDMGIYYCLQCDEFPLTFGAGTKLELK

SEQ ID NO: 5796 - protein, 113 aa, Artificial Sequence; identical to SEQ ID NO: 3981
  source: /note="Description of Artificial Sequence: Synthetic polypeptide"

SEQ ID NO: 5797 - protein, 113 aa, Artificial Sequence; identical to SEQ ID NO: 3982
  source: /note="Description of Artificial Sequence: Synthetic polypeptide"

SEQ ID NO: 5798 - protein, 113 aa, Artificial Sequence; identical to SEQ ID NO: 3983
  source: /note="Description of Artificial Sequence: Synthetic polypeptide"

SEQ ID NO: 5799 - protein, 113 aa, Artificial Sequence; identical to SEQ ID NO: 3984
  source: /note="Description of Artificial Sequence: Synthetic polypeptide"

SEQ ID NO: 5800 - protein, 113 aa, Artificial Sequence; identical to SEQ ID NO: 3985
  source: /note="Description of Artificial Sequence: Synthetic polypeptide"

SEQ ID NO: 5801 - protein, 113 aa, Artificial Sequence; identical to SEQ ID NO: 3986
  source: /note="Description of Artificial Sequence: Synthetic polypeptide"

SEQ ID NO: 5802 - protein, 113 aa, Artificial Sequence; identical to SEQ ID NO: 3971
  source: /note="Description of Artificial Sequence: Synthetic polypeptide"

SEQ ID NO: 5803 - protein, 113 aa, Artificial Sequence; identical to SEQ ID NO: 3972
  source: /note="Description of Artificial Sequence: Synthetic polypeptide"

SEQ ID NO: 5804 - protein, 113 aa, Artificial Sequence; identical to SEQ ID NO: 3973
  source: /note="Description of Artificial Sequence: Synthetic polypeptide"

SEQ ID NO: 5805 - protein, 113 aa, Artificial Sequence; identical to SEQ ID NO: 3974
  source: /note="Description of Artificial Sequence: Synthetic polypeptide"

SEQ ID NO: 5806 - protein, 113 aa, Artificial Sequence; identical to SEQ ID NO: 3975
  source: /note="Description of Artificial Sequence: Synthetic polypeptide"

SEQ ID NO: 5807 - protein, 113 aa, Artificial Sequence; identical to SEQ ID NO: 3976
  source: /note="Description of Artificial Sequence: Synthetic polypeptide"

SEQ ID NO: 5808 - protein, 113 aa, Artificial Sequence; identical to SEQ ID NO: 3977
  source: /note="Description of Artificial Sequence: Synthetic polypeptide"

SEQ ID NO: 5809 - protein, 113 aa, Artificial Sequence; identical to SEQ ID NO: 3978
  source: /note="Description of Artificial Sequence: Synthetic polypeptide"

SEQ ID NO: 5810 - protein, 113 aa, Artificial Sequence; identical to SEQ ID NO: 3979
  source: /note="Description of Artificial Sequence: Synthetic polypeptide"

SEQ ID NO: 5811 - protein, 113 aa, Artificial Sequence; identical to SEQ ID NO: 3980
  source: /note="Description of Artificial Sequence: Synthetic polypeptide"

SEQ ID NO: 5812 - protein, 119 aa, Artificial Sequence; identical to SEQ ID NO: 3987
  source: /note="Description of Artificial Sequence: Synthetic polypeptide"

SEQ ID NO: 5813 - protein, 119 aa, Artificial Sequence; identical to SEQ ID NO: 3988
  source: /note="Description of Artificial Sequence: Synthetic polypeptide"

SEQ ID NO: 5814 - protein, 460 aa, Artificial Sequence; identical to SEQ ID NO: 3989
  source: /note="Description of Artificial Sequence: Synthetic polypeptide"

SEQ ID NO: 5815 - protein, 246 aa, Artificial Sequence; identical to SEQ ID NO: 3990
  source: /note="Description of Artificial Sequence: Synthetic polypeptide"

SEQ ID NO: 5816 - protein, 115 aa, Artificial Sequence; identical to SEQ ID NO: 3991
  source: /note="Description of Artificial Sequence: Synthetic polypeptide"

SEQ ID NO: 5817 - protein, 115 aa, Artificial Sequence; identical to SEQ ID NO: 3992
  source: /note="Description of Artificial Sequence: Synthetic polypeptide"

SEQ ID NO: 5818 - protein, 115 aa, Artificial Sequence; identical to SEQ ID NO: 3993
  source: /note="Description of Artificial Sequence: Synthetic polypeptide"

SEQ ID NO: 5819 - protein, 115 aa, Artificial Sequence; identical to SEQ ID NO: 3994
  source: /note="Description of Artificial Sequence: Synthetic polypeptide"

SEQ ID NO: 5820 - protein, 115 aa, Artificial Sequence; identical to SEQ ID NO: 3995
  source: /note="Description of Artificial Sequence: Synthetic polypeptide"

SEQ ID NO: 5821 - protein, 115 aa, Artificial Sequence; identical to SEQ ID NO: 3996
  source: /note="Description of Artificial Sequence: Synthetic polypeptide"

SEQ ID NO: 5822 - protein, 115 aa, Artificial Sequence; identical to SEQ ID NO: 3997
  source: /note="Description of Artificial Sequence: Synthetic polypeptide"

SEQ ID NO: 5823 - protein, 115 aa, Artificial Sequence; identical to SEQ ID NO: 3998
  source: /note="Description of Artificial Sequence: Synthetic polypeptide"

SEQ ID NO: 5824 - protein, 115 aa, Artificial Sequence; identical to SEQ ID NO: 3999
  source: /note="Description of Artificial Sequence: Synthetic polypeptide"

SEQ ID NO: 5825 - protein, 115 aa, Artificial Sequence; identical to SEQ ID NO: 4000
  source: /note="Description of Artificial Sequence: Synthetic polypeptide"

SEQ ID NO: 5826 - protein, 113 aa, Artificial Sequence; identical to SEQ ID NO: 4001
  source: /note="Description of Artificial Sequence: Synthetic polypeptide"

SEQ ID NO: 5827 - protein, 113 aa, Artificial Sequence; identical to SEQ ID NO: 4001
  source: /note="Description of Artificial Sequence: Synthetic polypeptide"

SEQ ID NO: 5828 - protein, 120 aa, Artificial Sequence; identical to SEQ ID NO: 4003
  source: /note="Description of Artificial Sequence: Synthetic polypeptide"

SEQ ID NO: 5829 - protein, 121 aa, Artificial Sequence; identical to SEQ ID NO: 4004
  source: /note="Description of Artificial Sequence: Synthetic polypeptide"

SEQ ID NO: 5830 - protein, 126 aa, Artificial Sequence; identical to SEQ ID NO: 4005
  source: /note="Description of Artificial Sequence: Synthetic polypeptide"

SEQ ID NO: 5831 - protein, 117 aa, Artificial Sequence; identical to SEQ ID NO: 4006
  source: /note="Description of Artificial Sequence: Synthetic polypeptide"

SEQ ID NO: 5832 - protein, 120 aa, Artificial Sequence; identical to SEQ ID NO: 4007
  source: /note="Description of Artificial Sequence: Synthetic polypeptide"

SEQ ID NO: 5833 - protein, 126 aa, Artificial Sequence; identical to SEQ ID NO: 4008
  source: /note="Description of Artificial Sequence: Synthetic polypeptide"

SEQ ID NO: 5834 - protein, 117 aa, Artificial Sequence; identical to SEQ ID NO: 4009
  source: /note="Description of Artificial Sequence: Synthetic polypeptide"

SEQ ID NO: 5835 - protein, 120 aa, Artificial Sequence; identical to SEQ ID NO: 4010
  source: /note="Description of Artificial Sequence: Synthetic polypeptide"

SEQ ID NO: 5836 - protein, 120 aa, Artificial Sequence; identical to SEQ ID NO: 4011
  source: /note="Description of Artificial Sequence: Synthetic polypeptide"

SEQ ID NO: 5837 - protein, 117 aa, Artificial Sequence; identical to SEQ ID NO: 4012
  source: /note="Description of Artificial Sequence: Synthetic polypeptide"

SEQ ID NO: 5838 - protein, 126 aa, Artificial Sequence; identical to SEQ ID NO: 4013
  source: /note="Description of Artificial Sequence: Synthetic polypeptide"

SEQ ID NO: 5839 - protein, 115 aa, Artificial Sequence; identical to SEQ ID NO: 4014
  source: /note="Description of Artificial Sequence: Synthetic polypeptide"

SEQ ID NO: 5840 - protein, 117 aa, Artificial Sequence; identical to SEQ ID NO: 4015
  source: /note="Description of Artificial Sequence: Synthetic polypeptide"

SEQ ID NO: 5841 - protein, 123 aa, Artificial Sequence; identical to SEQ ID NO: 4016
  source: /note="Description of Artificial Sequence: Synthetic polypeptide"

SEQ ID NO: 5842 - protein, 118 aa, Artificial Sequence
  source: /note="Description of Artificial Sequence: Synthetic polypeptide"
QVNLRESGGGLVRPGGSLRLSCAASGFTVSGYAMSWVRQAPGKGLEWVSAISRFSDTTYSADSVKGRFTISRDNSKNTVYLQMNSLRAEDSAVYYCARDPSGHGMDVWGQGTLVTVSA

SEQ ID NO: 5843 - protein, 121 aa, Artificial Sequence
  source: /note="Description of Artificial Sequence: Synthetic polypeptide"
EVQLVESGAEVKEPGSSVRVSCKTSGGSFNRHVITWVRQAPGQGLEWMGEIIPFFGTPKYAPKFQGRVTIIADASTSTFFLDVKSLTSEDTALYFCWIVVVSVVQRREDFWGQGILVTVSS

SEQ ID NO: 5844 - protein, 125 aa, Artificial Sequence
  source: /note="Description of Artificial Sequence: Synthetic polypeptide"
EVQLVESGGGLVQPGGSLRLSCAVSGFTFDTFAMSWVRQAPGKGLEWVSAITASSSKTYYADSVKGRFTISRDNSRNTVYLRLSSLRADDTAVYFCARPKGAHSGLYIESAFDLWGPGTMVTVSS

SEQ ID NO: 5845 - protein, 127 aa, Artificial Sequence
  source: /note="Description of Artificial Sequence: Synthetic polypeptide"
EVQLVESGGGLVKPGGSLRLSCAASGLPFSKAWMSWVRQAPGKGLEWVGRIKSQADGGAIDYATSVNGRFTITRDDSKNTLYLQMTSLKTEDTAVYYCTPGIILRFLEGTLRGMDVWGQGTTVTVSS

SEQ ID NO: 5846 - protein, 124 aa, Artificial Sequence
  source: /note="Description of Artificial Sequence: Synthetic polypeptide"
EVQLLESGGGLIRPGGSLRLSCAASGFTFSNYAMGWVRQAPGKGLEWVSAISGNGGSTYYGGSVKGRFTISRDKSKNTLYLQMNNLRADDTAVYFCAKLEAVAPTLTLRYFKHWGKGTLVTVSS

SEQ ID NO: 5847 - protein, 122 aa, Artificial Sequence
  source: /note="Description of Artificial Sequence: Synthetic polypeptide"
QVQLQQWGAGRLRPSETLSLTCAVYGGSFNGYARTWIRQPPGKGLEWIGEIDHRENTNYNPSLKSRVTMSVDTSKNQFSLRLNSVTAADTAVYFCARGQKNAKDQHEGFRYWGRGTLVTVSS

SEQ ID NO: 5848 - protein, 121 aa, Artificial Sequence
  source: /note="Description of Artificial Sequence: Synthetic polypeptide"
QVQLVESGGGVVQPGRSLRLSCAASGYIFSSFGMHWVRQTPGKGLEWVALIWYDGSRQSYADSVRGRFTISRDNSKNTVFLQMNSLRGEDTAVYHCARTGYDDKRGGFDTWGQGTMVTVSS

SEQ ID NO: 5849 - protein, 130 aa, Artificial Sequence
  source: /note="Description of Artificial Sequence: Synthetic polypeptide"
EVQLVESGGGVVQAGGSLRLSCVASGLTFSSYGMHWVRQAPGKGLEWVAVISYDGRSKFYADSVKGRFTISRDNSKNTLYLQMNSLRAEDAAVYYCANARVRDACSGTRCDKFGFYMDVWGKGTTVTVSS

SEQ ID NO: 5850 - protein, 126 aa, Artificial Sequence
  source: /note="Description of Artificial Sequence: Synthetic polypeptide"
EVQLVESGGDLVRPGGSLRLSCVASGFTFSNYWMHWVRQAPGQRPVWVSRTNTDGRNTAYADYAKGRFTISRDNAKSTLYLQLNSLRAEDTAVYFCARLRRNVADQITHNYYMDVWGKGTLVTVSS

SEQ ID NO: 5851 - protein, 114 aa, Artificial Sequence
  source: /note="Description of Artificial Sequence: Synthetic polypeptide"
EVQLVQSGGDIVQSGGSLRLSCAASGFVFSSNWMHWVRQRPGKGLEWISLINVDGRTTKYADSVKGRFTISRDNAKKTVYLQMDSLRAEDTAVYYCVKVEGLNWGPGTLVTVSS

SEQ ID NO: 5852 - protein, 122 aa, Artificial Sequence
  source: /note="Description of Artificial Sequence: Synthetic polypeptide"
EVQLVESGGGLVKPGGSLRVSCDVSGQRLSKAWMNWVRQTPTRGLEWVGLIKRDADGGTTEFAAPVEGRFTISRDDIQNTMTLHMTRLRVDDTGVYYCVAGDIGCIKENCRWGEGTTVTVSS

SEQ ID NO: 5853 - protein, 119 aa, Artificial Sequence
  source: /note="Description of Artificial Sequence: Synthetic polypeptide"
QVQLQESGPGLVKPSETLSLTCTVSGGSISSSYWSWIRQPPGQGLEWIGYIYYSGNTYYNPSLKSRVTISIDTSKTQFSLNLTSVSAADTAVYYCARDGIPGAIGMDVWGQGTTVTVSS

SEQ ID NO: 5854 - protein, 123 aa, Artificial Sequence
  source: /note="Description of Artificial Sequence: Synthetic polypeptide"
EVQLVESGAEVKKPGASVTLSCKASGYTFTAYYIHWVRQAREQGLEWMGVINPSTGTTFYAQNFPDRVSVTRDTSTSTVFMELHNLKSEDTAVYYCARAISEHGSGSYSPYYWGQGTLVTVSS

SEQ ID NO: 5855 - protein, 119 aa, Artificial Sequence
  source: /note="Description of Artificial Sequence: Synthetic polypeptide"
EVQLVQSGGGLGHPGGSLRLSCAGSGFTFSSYSMHWLRQAPGKGLKWVSAIGTAGGTYYADSVKGRFTISRDNAKNSFYLQMNSLRAEDMAVYYCAREYFFGSGNYGYWGQGTLVTASS

SEQ ID NO: 5856 - protein, 112 aa, Artificial Sequence
  source: /note="Description of Artificial Sequence: Synthetic polypeptide"
QVQLQQWGAGLLKPSETLSLTCAVYGGSFSGYYWNWIRQPPGKGLEWIGEIHQSGGPHYNPSLKSRVTISVDTSKNQFSLKLSSVTAADTAVYYCTELDDYWGQGTLVTVSS

SEQ ID NO: 5857 - protein, 119 aa, Artificial Sequence
  source: /note="Description of Artificial Sequence: Synthetic polypeptide"
QVQLVQSGAEVKKPGSSVKVSCKASGGTFNNFVIGWVRQAPGQGLEWMGRIIPILDIANYAQKFQGRVTITADKSTSTVYMELNSLRSEDTAVYYCARTGNYYKPYDYWGQGTLVTVSS

SEQ ID NO: 5858 - protein, 119 aa, Artificial Sequence
  source: /note="Description of Artificial Sequence: Synthetic polypeptide"
QVQLVQSGAEVKKPGSSVKVSCKASGGTFNNFVIGWVRQAPGQGLEWMGRIIPILDIANYAQKFQGRVTITADKSTSTAYMELSSLRSEDTAVYYCARTGNYYKPYDYWGQGTLVTVSS

SEQ ID NO: 5859 - protein, 112 aa, Artificial Sequence
  source: /note="Description of Artificial Sequence: Synthetic polypeptide"
EVQLVESGGGLVQPGGSLRLSCAASGFTFSRYWMSWVRQAPGKGLEWMANIKQDGSETHYVDSVKGRFTISRDNAKNSLYLQMNSLRAEDTAVYYCAIGDYWGQGTLVTVSS

SEQ ID NO: 5860 - protein, 112 aa, Artificial Sequence
  source: /note="Description of Artificial Sequence: Synthetic polypeptide"
EVQLVESGGGLVQPGGSLRLSCAASGFTFSRYWMSWVRQAPGKGLEWVANIKQDGSETHYVDSVKGRFTISRDNAKNSLYLQMNSLRAEDTAVYYCAIGDYWGQGTLVTVSS

SEQ ID NO: 5861 - protein, 117 aa, Artificial Sequence
  source: /note="Description of Artificial Sequence: Synthetic polypeptide"
QVQLVQSGAEVKTPGASVKVSCKASGYTFTSFGISWVRQAPGQGLEWMGWISVYNDYTNYAQKFQGRVTMTTDTSTSTAYMELRSLRSDDTAMYYCARKRGGDMDYWGQGTLVTVSS

SEQ ID NO: 5862 - protein, 117 aa, Artificial Sequence
  source: /note="Description of Artificial Sequence: Synthetic polypeptide"
QVQLVQSGAEVKKPGASVKVSCKASGYTFTSFGISWVRQAPGQGLEWMGWISVYNDYTNYAQKFQGRVTMTTDTSTSTAYMELRSLRSDDTAVYYCARKRGGDMDYWGQGTLVTVSS

SEQ ID NO: 5863 - protein, 121 aa, Artificial Sequence
  source: /note="Description of Artificial Sequence: Synthetic polypeptide"
EVQLVQSGAEVKKPGESLKISCKGSGYSFTSYWIGWVRQMPGKGLEWMGIIYPGDSDTRYSPSFQGQVTISADKSISTAYLQWSSLKASDTAMYYCARQGSGWYGNYFDYWGQGTLVTVSS

SEQ ID NO: 5864 - protein, 119 aa, Artificial Sequence
  source: /note="Description of Artificial Sequence: Synthetic polypeptide"
EVQLVQSGGGLVKPGGSLRLSCAGSGFTFSSYSMHWLRQAPGKGLEWVSAIGTAGGTYYADSVKGRFTISRDNAKNSLYLQMNSLRAEDTAVYYCAREYFFGSGNYGYWGQGTLVTVSS

SEQ ID NO: 5865 - protein, 116 aa, Artificial Sequence
  source: /note="Description of Artificial Sequence: Synthetic polypeptide"
EVQLVESGGGLVQPGGSLRLSCAASGFTFSSFWMSWVRQAPGKGLEWVANIKHDGSEQDYVDSVKGRFTISRDNAKNSLYLQMNSLRAEDTAVYYCARGGIWFGPWGQGTLVTVSS

SEQ ID NO: 5866 - protein, 120 aa, Artificial Sequence
  source: /note="Description of Artificial Sequence: Synthetic polypeptide"
EVQLVQSGGGLVHPGGSLRLSCAGSGFTFSRYALHWVRQAPGKGLEWVSAIGIGGGTFYADSVKGRFTISRDNAKNSLYLQMNSLRAEDMAVYYCARDTYYDFFDAFDIWGQGTMVTVSS

SEQ ID NO: 5867 - protein, 121 aa, Artificial Sequence
  source: /note="Description of Artificial Sequence: Synthetic polypeptide"
QVQLVQSGAEVKKPGSSVKVSCKASGGSFSIYVISWVRQAPGQGLEWMGRIIPILGTTNYAQKFQGRVTITADKSTSTAYMELSSLRSEDTAVYYCARPDSPNHSNTFDYWGQGTLVTVSS

SEQ ID NO: 5868 - protein, 118 aa, Artificial Sequence
  source: /note="Description of Artificial Sequence: Synthetic polypeptide"
QVQVVQSGAEVKKPGSSVKVSCKASGGTFSSYAISWVRQAPGQGLEWMGRIIPILGTAKYAQKFQGRVTIIADKSTSTAYMELSSLRSEDTAVYYCARDQDYYGMDVWGQGTTVTVSS

SEQ ID NO: 5869 - protein, 120 aa, Artificial Sequence
  source: /note="Description of Artificial Sequence: Synthetic polypeptide"
EVQLVQSGGGLVKPGGSLRLSCAGSGFTFSRYALHWVRQAPGKGLEWVSAIGIGGGTFYADSVKGRFTISRDNAKNSLYLQMNSLRAEDTAVYYCARDTYYDFFDAFDIWGQGTMVTVSS

SEQ ID NO: 5870 - protein, 117 aa, Artificial Sequence
  source: /note="Description of Artificial Sequence: Synthetic polypeptide"
QVQLVESGGGVVQPGRSLRLSCAASGFTFSNYGIHWVRQAPGKGLEWVAIIWHDGSNSYYVDSVKGRFTMSRDNSKNTVYLQMNSLRAEDTAVYFCARIIGGAFDIWGQGTMVTVSS

SEQ ID NO: 5871 - protein, 117 aa, Artificial Sequence
  source: /note="Description of Artificial Sequence: Synthetic polypeptide"
QVQLVESGGGVVQPGRSLRLSCAASGFTFSNYGIHWVRQAPGKGLEWVAIIWHDGSNSYYVDSVKGRFTISRDNSKNTLYLQMNSLRAEDTAVYFCARIIGGAFDIWGQGTMVTVSS

SEQ ID NO: 5872 - protein, 119 aa, Artificial Sequence
  source: /note="Description of Artificial Sequence: Synthetic polypeptide"
QVQLVESGGGVVQPGRSLRLSCAASGFTFRSYGMHWVRQAPGKGLEWVTLIWYDGSNKYYADSVKGRFTISRDNSKNTLYLQMNSLRVEDTAVYYCAREGFNWDAFDIWGQGTMVTVSS

SEQ ID NO: 5873 - protein, 119 aa, Artificial Sequence
  source: /note="Description of Artificial Sequence: Synthetic polypeptide"
QVQLVESGGGVVQPGRSLRLSCAASGFTFRSYGMHWVRQAPGKGLEWVTLIWYDGSNKYYADSVKGRFTISRDNSKNTLYLQMNSLRAEDTAVYYCAREGFNWDAFDIWGQGTMVTVSS

SEQ ID NO: 5874 - protein, 115 aa, Artificial Sequence
  source: /note="Description of Artificial Sequence: Synthetic polypeptide"
EVHLVESGGGLVQSGGSLRLSCAASGFSISGYWMSWVRQAPGKGLEWVANIKQDGGEKYYGDSVKGRFTISRDNAENSLYLQMSSLRAEDTAVYYCVMAGGLDYWGQGALVTVSS

SEQ ID NO: 5875 - protein, 115 aa, Artificial Sequence
  source: /note="Description of Artificial Sequence: Synthetic polypeptide"
EVQLVESGGGLVQPGGSLRLSCAASGFSISGYWMSWVRQAPGKGLEWVANIKQDGGEKYYGDSVKGRFTISRDNAKNSLYLQMNSLRAEDTAVYYCVMAGGLDYWGQGTLVTVSS

SEQ ID NO: 5876 - protein, 112 aa, Artificial Sequence
  source: /note="Description of Artificial Sequence: Synthetic polypeptide"
QVQLQQWGAGLLKPSETLSLTCAVYGGSFSGYYWNWIRQPPGMGLEWIGEIHQSGGPHYNPSLKSRVSISVDTSKNQVNLKLSSVTAADTAIYYCTELDDYWGQGTLVTVSS

SEQ ID NO: 5877 - protein, 124 aa, Artificial Sequence
  source: /note="Description of Artificial Sequence: Synthetic polypeptide"
EVQLLESGGDLVQPGGSLRLSCAASGFTFSSQAMSWVRQAPGKGLEWVSALSRTGDYTWYADSVRGRFTVSRDDSKNIFYLEMNSLRAEDTAVYYCAKNYYSSFGYNWAAFHIWGQGTMVTVSS

SEQ ID NO: 5878 - protein, 114 aa, Artificial Sequence
  source: /note="Description of Artificial Sequence: Synthetic polypeptide"
EVQLVESGGGLVQPGGSLRISCTTSGFIFSDYWMHWVRQAPGKGLTWVSRINLDGSDTIYADSVKGRFTISRDNDKNTLYLQMNSLRVEDTAIYYCARSRKSVWGQGTMVTVSS

SEQ ID NO: 5879 - protein, 108 aa, Artificial Sequence
  source: /note="Description of Artificial Sequence: Synthetic polypeptide"
EIVLTQSPGTLSLSPGERATLSCRASQSVSSSYLAWYQQKPGQAPRLLIYGASSRATGIPDRFSGSGSGTDFTLTIIRLEPEDFAVYYCQQYGSSPFTFGQGTKVEIK

SEQ ID NO: 5880 - protein, 112 aa, Artificial Sequence
  source: /note="Description of Artificial Sequence: Synthetic polypeptide"
DIVMTQTPLSLSVTPGQPASISCKSSQSLLHSDGKTYLYWYLQKPGQPPQLLIYEVSNRFSGVPDRFSGSGSGTDFTLKISRVEAEDVGVYYCMQSIQLPVTFGGGTKVEIK

SEQ ID NO: 5881 - protein, 112 aa, Artificial Sequence
  source: /note="Description of Artificial Sequence: Synthetic polypeptide"
DVVMTQSPLSLPVTLGQSASISCRSSQGLVHSDGNTYLNWFHQRPGQSPRRLIYKVFNRDSGVSDRFSGSGSGSDFTLMISRVEAEDVGIYYCMQGTLWPLTFGQGTKVEIK

SEQ ID NO: 5882 - protein, 113 aa, Artificial Sequence
  source: /note="Description of Artificial Sequence: Synthetic polypeptide"
DIVMTQSPDSLAVSLGERATINCKSGQSVLYRSNNRNYIAWYQQKPGQPPKLLIYWASTRESGVPDRFSGSGSGTDFTLTISSLQAEDVAVYYCQQYYSNRWTFGQGTKVEIK

SEQ ID NO: 5883 - protein, 110 aa, Artificial Sequence
  source: /note="Description of Artificial Sequence: Synthetic polypeptide"
QSVLTQPPSASGTPGQRVTISCSGSSSNIGGNTVNWYHQLPGTAPKLLVYSTNQRPSGVPDRFSGSKSGTSASLAISGLQAEDEADYYCATWDDSLNGWVFGGGTKLTVL

SEQ ID NO: 5884 - protein, 113 aa, Artificial Sequence
  source: /note="Description of Artificial Sequence: Synthetic polypeptide"
DIVMTQSPDSLAVSLGERATINCKSSQSVLYNSDNKNYLAWLQQKPGQPPKVLIYWASTREFGVPDRFSGSGSGTDFTLTISSLQAEDVAVYYCHQYYSVPFTFGGGTKVEIK

SEQ ID NO: 5885 - protein, 108 aa, Artificial Sequence
  source: /note="Description of Artificial Sequence: Synthetic polypeptide"
QSALTQPASVSGSPGQSITISCTGTSSDIGTHNLVSWYQQHPGKAPKLIIYEIFERPSGISSRFTGSKSGNTASLTISGLQAEDEADYFCCAYSVTVIFGGGTKLTVL

SEQ ID NO: 5886 - protein, 119 aa, Artificial Sequence
  source: /note="Description of Artificial Sequence: Synthetic polypeptide"
QVQLVQSGAEVKKPGASVKVSCKTSGYSFTSYTLHWVRQAPGHRPEWMGWINAAFINTKYSQKFQGRITLTRDTSANIAYLELRSLTTEDTAVYYCARRASGSNGLDVWGQGTTVTVSS

SEQ ID NO: 5887 - protein, 108 aa, Artificial Sequence
  source: /note="Description of Artificial Sequence: Synthetic polypeptide"
SYELTQPPSVSVSPGQTATISCSGDALPKRYAYWYKQKSGQVPVLIIYEDNKRPSGIPARFSGSSSGTMATLTITGAQVDDEADYYCYSSDNSDTYSVFGGGTKLTVL

SEQ ID NO: 5888 - protein, 108 aa, Artificial Sequence
  source: /note="Description of Artificial Sequence: Synthetic polypeptide"
EIVLTQSPGTLSLSPGERATLSCRASQTISNNYLAWYQQKPGQAPRLLVYAASSRATGIPDRFYGSGSGADFTLTISRLEPEDFVVYYCQQYGSSPITFGQGTRLEIK

SEQ ID NO: 5889 - protein, 111 aa, Artificial Sequence
  source: /note="Description of Artificial Sequence: Synthetic polypeptide"
QSALTQPPSASGSPGQSVTISCTGTSSDVGGYNYVSWYQHQPGKAPKLMIYEVSKRPSGVPDRFSGSKSGNTASLTVSGLQAEDEADYYCSSYAGSNNLGVFGTGTEVTVL

SEQ ID NO: 5890 - protein, 104 aa, Artificial Sequence
  source: /note="Description of Artificial Sequence: Synthetic polypeptide"
EIVLTQSPGTLSLSPGETVTLSCRASQSVSSSNLAWYQQKPGQAPRLLIYGASSRATGIPDRFSGRGSGTDFTLTISRLEPEDFAVYYCQHYGTFGQGTKVDIK

SEQ ID NO: 5891 - protein, 107 aa, Artificial Sequence
  source: /note="Description of Artificial Sequence: Synthetic polypeptide"
DIQMTQSPSSLSASVGDRVTITCQASQDISNYLNWYQQKPGKAPKLLIYDASNLETGVPSRFSGSGSGTDFTFTISSLQPEDTATYYCQQYDNLPLTFGGGTKVEIK

SEQ ID NO: 5892 - protein, 110 aa, Artificial Sequence
  source: /note="Description of Artificial Sequence: Synthetic polypeptide"
QSVLTQPPSASGTPGQRVTISCSGSSSNIGSNNVYWYQQLPGTAPKLLVYRNNQRPSGVPDRVSGSKSGSSASLAISGLRSEDEADYYCAAWDDSLRGYVFGTGTKVTVL

SEQ ID NO: 5893 - protein, 113 aa, Artificial Sequence
  source: /note="Description of Artificial Sequence: Synthetic polypeptide"
DVVMTQSPLSLPVTLGQPASISCRSSQSLVHSDGNTYLNWFQQRPGQSPRRLIYKVSHRDSGVPDRFSGSGSGTDFTLKISRVEAEDVGVYYCLQGTHWPPFTFGQGTKLEIK

SEQ ID NO: 5894 - protein, 112 aa, Artificial Sequence
  source: /note="Description of Artificial Sequence: Synthetic polypeptide"
DIVMTQTPLSSPVTLGQPASISCRSSQSLVHSDGNTYLSWLQQRPGQPPRLLIYKISERFSGVPDRFSGSGAGTDFTLKISRVEAEDVGVYYCMQVTQFPITFGQGTRLEIK

SEQ ID NO: 5895 - protein, 112 aa, Artificial Sequence
  source: /note="Description of Artificial Sequence: Synthetic polypeptide"
DIVMTQTPLSSPVTLGQPASISCRSSQSLVHTDGKTYLSWLHQRPGQPPRPLIYKMSKRFSGVPDRFSGSGAETEFTLKISRVEAEDVGIYYCLQLTQFPITFGQGTRLEIK

SEQ ID NO: 5896 - protein, 111 aa, Artificial Sequence
  source: /note="Description of Artificial Sequence: Synthetic polypeptide"
QSVLTQPPSVSGAPGQRVTISCTGSSSNIGAGYDVHWYQQLPGTAPKLLIYGNSNRPSGVPDRFSGSKSGTSASLAITGLQAEDEADYYCQSFDSSLSSSVFGGGTKLTVL

SEQ ID NO: 5897 - protein, 121 aa, Artificial Sequence
  source: /note="Description of Artificial Sequence: Synthetic polypeptide"
QVQLVESGGGVVQPGKSLRLSCAASGFTFRDHGMHWVRQAPGKGLEWVAVIWLDGSSRFYADSVEGRFTISRDNSKNTLYLQLTSLRAEDTAIYYCARDRVASEGTAFDVWGQGTMVTVSS

SEQ ID NO: 5898 - protein, 122 aa, Artificial Sequence
  source: /note="Description of Artificial Sequence: Synthetic polypeptide"
DVVMTQSPDSLAVSLGERATINCKSSQSVLSSSKNKNHLAWYQQKPGQPPKLLIYWASTRESGYWASTRESGVPDRFSGSGSGTDFTLTISSLQAEDVAVYYCQQYYSPSVTFGGGTKVEIK

SEQ ID NO: 5899 - protein, 119 aa, Artificial Sequence
  source: /note="Description of Artificial Sequence: Synthetic polypeptide"
QVQLVQSGTAVKKPGASVKVSCKASGFSFNGYYMHWVRQAPGQGLEWMGVINPNGGSTNYAQKFKGRITMSADTPARSVSMELGSLRSDDTAMYYCARLPVNIEVLDLWGQGTLVTVSS

SEQ ID NO: 5900 - protein, 134 aa, Artificial Sequence
  source: /note="Description of Artificial Sequence: Synthetic polypeptide"
QVQLVQSGAEVKKPGASVKVSCKASGYTFTNYYMHWVRQAPGQGLEWMGIINPSGGRTSYAQKFQGRASMTRDTSTSTVYMEVISLRSEDTAVYYCARQRPSGYSGYGPSESYGNPTDDAFDVWGQGTTVTVSS

SEQ ID NO: 5901 - protein, 130 aa, Artificial Sequence
  source: /note="Description of Artificial Sequence: Synthetic polypeptide"
QVQLVESGGGVVQPGRSLRLSCAASGFTFSNYVMYWVRQAPGKGLEWVAFISYDGSNKYYPDSVKGRFTISRDNSMNTLYLQMDSLRAEDTAVYYCARDTYQYDSSTYYPYFYYYGMDVWGQGTTVTVSS

SEQ ID NO: 5902 - protein, 111 aa, Artificial Sequence
  source: /note="Description of Artificial Sequence: Synthetic polypeptide"
QSALTQPASVSGSPGQSITISCIGTSSDVGGYNYVSWYQQHPGKAPKLMIYEVSNRPSGVSSRFSGSKSGNTASLTISGLQSEDEADYYCSSFASSSTSVTFGGGTKLTVL

SEQ ID NO: 5903 - protein, 110 aa, Artificial Sequence
  source: /note="Description of Artificial Sequence: Synthetic polypeptide"
QSALTQPRSVSGSPGQSITISCTGTSSNVGTYKFVSWYQQHPGKAPKLMIYDVTKRPSGVPDRFSGSKSGNTASLTISGLQAEDEADYYCCSYAGSYTYVFGSGTKVTVL

SEQ ID NO: 5904 - protein, 113 aa, Artificial Sequence
  source: /note="Description of Artificial Sequence: Synthetic polypeptide"
DVVMTQSPLSLPVTLGQPASISCRSSQSLVHSDGVTYLNWFQQRPGQSPRRLIYKVSNRDSGVPDRFSGSGSGTDFTLEISRVEAEDVGIYYCMQGTHWPPWTFGQGTKVEIK

SEQ ID NO: 5905 - protein, 108 aa, Artificial Sequence
  source: /note="Description of Artificial Sequence: Synthetic polypeptide"
EIVLTQSPGTLSLSPGERATLSCRASQAVTNNYLAWYQQKPGQAPRLLVYAASSRATGIPDRFYGSGSGADFTLTISRLEPEDFAVYYCQQYGTSPITFGQGTRLEIK

SEQ ID NO: 5906 - protein, 123 aa, Artificial Sequence
  source: /note="Description of Artificial Sequence: Synthetic polypeptide"
QVQLVQSGAEVKKPGASVKVSCKASGYTFTSYRIHWVRQAPGQGLEWMGEIYPSNARTNYNEKFKSRVTMTRDTSTSTVYMELSSLRSEDTAVYYCARKYYYGNTRRSWYFDVWGQGTTVTVS

SEQ ID NO: 5907 - protein, 113 aa, Artificial Sequence; identical to SEQ ID NO: 3979
  source: /note="Description of Artificial Sequence: Synthetic polypeptide"

SEQ ID NO: 5908 - protein, 112 aa, Artificial Sequence; identical to SEQ ID NO: 4021
  source: /note="Description of Artificial Sequence: Synthetic polypeptide"

SEQ ID NO: 5909 - protein, 112 aa, Artificial Sequence; identical to SEQ ID NO: 4022
  source: /note="Description of Artificial Sequence: Synthetic polypeptide"

SEQ ID NO: 5910 - protein, 113 aa, Artificial Sequence; identical to SEQ ID NO: 3976
  source: /note="Description of Artificial Sequence: Synthetic polypeptide"

SEQ ID NO: 5911 - protein, 113 aa, Artificial Sequence; identical to SEQ ID NO: 3977
  source: /note="Description of Artificial Sequence: Synthetic polypeptide"

SEQ ID NO: 5912 - protein, 112 aa, Artificial Sequence; identical to SEQ ID NO: 4025
  source: /note="Description of Artificial Sequence: Synthetic polypeptide"

SEQ ID NO: 5913 - protein, 113 aa, Artificial Sequence; identical to SEQ ID NO: 3980
  source: /note="Description of Artificial Sequence: Synthetic polypeptide"

SEQ ID NO: 5914 - protein, 113 aa, Artificial Sequence; identical to SEQ ID NO: 3981
  source: /note="Description of Artificial Sequence: Synthetic polypeptide"

SEQ ID NO: 5915 - protein, 113 aa, Artificial Sequence; identical to SEQ ID NO: 3982
  source: /note="Description of Artificial Sequence: Synthetic polypeptide"

SEQ ID NO: 5916 - protein, 113 aa, Artificial Sequence; identical to SEQ ID NO: 3983
  source: /note="Description of Artificial Sequence: Synthetic polypeptide"

SEQ ID NO: 5917 - protein, 113 aa, Artificial Sequence; identical to SEQ ID NO: 3984
  source: /note="Description of Artificial Sequence: Synthetic polypeptide"

SEQ ID NO: 5918 - protein, 113 aa, Artificial Sequence; identical to SEQ ID NO: 3985
  source: /note="Description of Artificial Sequence: Synthetic polypeptide"

SEQ ID NO: 5919 - protein, 113 aa, Artificial Sequence; identical to SEQ ID NO: 3986
  source: /note="Description of Artificial Sequence: Synthetic polypeptide"

SEQ ID NO: 5920 - protein, 113 aa, Artificial Sequence; identical to SEQ ID NO: 3971
  source: /note="Description of Artificial Sequence: Synthetic polypeptide"

SEQ ID NO: 5921 - protein, 113 aa, Artificial Sequence; identical to SEQ ID NO: 3972
  source: /note="Description of Artificial Sequence: Synthetic polypeptide"

SEQ ID NO: 5922 - protein, 113 aa, Artificial Sequence; identical to SEQ ID NO: 3973
  source: /note="Description of Artificial Sequence: Synthetic polypeptide"

SEQ ID NO: 5923 - protein, 217 aa, Artificial Sequence
  source: /note="Description of Artificial Sequence: Synthetic polypeptide"
QSALTQPASVSGSPGQSITISCTGTSSDVGSYNYVNWYQQHPGKAPKLMIYGVSKRPSGVSNRFSGSKSGNTASLTISGLQAEDEADYYCGTFAGGSYYGVFGGGTKLTVLGQPKAAPSVTLFPPSSEELQANKATLVCLISDFYPGAVTVAWKADSSPVKAGVETTTPSKQSNNKYAASSYLSLTPEQWKSHRSYSCQVTHEGSTVEKTVAPTECS

SEQ ID NO: 5924 - protein, 217 aa, Artificial Sequence; identical to SEQ ID NO: 5923
  source: /note="Description of Artificial Sequence: Synthetic polypeptide"

SEQ ID NO: 5925 - protein, 217 aa, Artificial Sequence; identical to SEQ ID NO: 4081
  source: /note="Description of Artificial Sequence: Synthetic polypeptide"

SEQ ID NO: 5926 - protein, 220 aa, Artificial Sequence; identical to SEQ ID NO: 4082
  source: /note="Description of Artificial Sequence: Synthetic polypeptide"

SEQ ID NO: 5927 - protein, 220 aa, Artificial Sequence; identical to SEQ ID NO: 4082
  source: /note="Description of Artificial Sequence: Synthetic polypeptide"

SEQ ID NO: 5928 - protein, 217 aa, Artificial Sequence; identical to SEQ ID NO: 4084
  source: /note="Description of Artificial Sequence: Synthetic polypeptide"

SEQ ID NO: 5929 - protein, 218 aa, Artificial Sequence; identical to SEQ ID NO: 3859
  source: /note="Description of Artificial Sequence: Synthetic polypeptide"

SEQ ID NO: 5930 - protein, 239 aa, Artificial Sequence; identical to SEQ ID NO: 4086
  source: /note="Description of Artificial Sequence: Synthetic polypeptide"

SEQ ID NO: 5931 - protein, 228 aa, Artificial Sequence; identical to SEQ ID NO: 4087
  source: /note="Description of Artificial Sequence: Synthetic polypeptide"

SEQ ID NO: 5932 - protein, 239 aa, Artificial Sequence; identical to SEQ ID NO: 4088
  source: /note="Description of Artificial Sequence: Synthetic polypeptide"

SEQ ID NO: 5933 - protein, 208 aa, Artificial Sequence; identical to SEQ ID NO: 4089
  source: /note="Description of Artificial Sequence: Synthetic polypeptide"

SEQ ID NO: 5934 - protein, 238 aa, Artificial Sequence; identical to SEQ ID NO: 4090
  source: /note="Description of Artificial Sequence: Synthetic polypeptide"

SEQ ID NO: 5935 - protein, 239 aa, Artificial Sequence; identical to SEQ ID NO: 4091
  source: /note="Description of Artificial Sequence: Synthetic polypeptide"

SEQ ID NO: 5936 - protein, 239 aa, Artificial Sequence; identical to SEQ ID NO: 4092
  source: /note="Description of Artificial Sequence: Synthetic polypeptide"

SEQ ID NO: 5937 - protein, 238 aa, Artificial Sequence; identical to SEQ ID NO: 4093
  source: /note="Description of Artificial Sequence: Synthetic polypeptide"

SEQ ID NO: 5938 - protein, 238 aa, Artificial Sequence; identical to SEQ ID NO: 4094
  source: /note="Description of Artificial Sequence: Synthetic polypeptide"

SEQ ID NO: 5939 - protein, 239 aa, Artificial Sequence; identical to SEQ ID NO: 4095
  source: /note="Description of Artificial Sequence: Synthetic polypeptide"

SEQ ID NO: 5940 - protein, 111 aa, Artificial Sequence
  source: /note="Description of Artificial Sequence: Synthetic polypeptide"
QSVLTQPPSVSGAPGQRVTISCTGSSSNIGDGYDVHWYQQLPGTAPKLLIYGNSHRPSGVPDRFSGSKSDTSASLAITGLQVEDEADYFCHSYDGSVSGWIFGGGTKLTVL

SEQ ID NO: 5941 - protein, 105 aa, Artificial Sequence
  source: /note="Description of Artificial Sequence: Synthetic polypeptide"
SYELTQPPSVSVSPGQTATITCSGHALGDKFVSWYQQGSGQSPVLVIYDDTQRPSGIPGRFSGSNSGNTATLTISGTQAMDEADYFCQAWDSSFVFGGGTKVTVL

SEQ ID NO: 5942 - protein, 112 aa, Artificial Sequence
  source: /note="Description of Artificial Sequence: Synthetic polypeptide"
QSVLTQPPSVSGAPGQRVTISCTGSSSNIGAGYDVHWYQQLPGAAPKLLIRGNGNRPSGVPDRFSVSKSGYSASLAITGLQPADEGVYYCQSYDSSLSGSKVFGQGTKLTVL

SEQ ID NO: 5943 - protein, 214 aa, Artificial Sequence
  source: /note="Description of Artificial Sequence: Synthetic polypeptide"
DIQMTQSPASLSASVGDRVTITCRASQDISDYLAWYQQKPGKIPRLLIYTTSTLQSGVPSRFRGSGSGTDFTLTISSLQPEDVATYYCQKYDSAPLTFGGGTKVEIKRTVAAPSVFIFPPSDEQLKSGTASVVCLLNNFYPREAKVQWKVDNALQSGNSQESVTEQDSKDSTYSLSSTLTLSKADYEKHKVYACEVTHQGLSSPVTKSFNRGEC

SEQ ID NO: 5944 - protein, 214 aa, Artificial Sequence
  source: /note="Description of Artificial Sequence: Synthetic polypeptide"
DIQMTQSPSSLSASVGDRVTITCKASQDVSTAVAWYQQKPGKAPKLLIYSASYRYTGVPSRFSGSGSGTDFTLTISSLQPEDFATYYCQQHYSTPWTFGGGTKVEIKRTVAAPSVFIFPPSDEQLKSGTASVVCLLNNFYPREAKVQWKVDNALQSGNSQESVTEQDSKDSTYSLSSTLTLSKADYEKHKVYACEVTHQGLSSPVTKSFNRGEC

SEQ ID NO: 5945 - protein, 219 aa, Artificial Sequence
  source: /note="Description of Artificial Sequence: Synthetic polypeptide"
DIVMTQSPDSLAVSLGERATINCKSSHSVLYSSNQKNYLAWYQQKPGQPPKLLIYWASTRESGVPDRFSGSGSGTDFTLTISSLQAEDVAVYYCHQYLSSLTFGQGTKLEIKRTVAAPSVFIFPPSDEQLKSGTASVVCLLNNFYPREAKVQWKVDNALQSGNSQESVTEQDSKDSTYSLSSTLTLSKADYEKHKVYACEVTHQGLSSPVTKSFNRGEC

SEQ ID NO: 5946 - protein, 215 aa, Artificial Sequence
  source: /note="Description of Artificial Sequence: Synthetic polypeptide"
EIVLTQSPGTLSLSPGERATLSCRASSSVSSSYLHWYQQKPGQAPRLLIYSTSNLVAGIPDRFSGSGSGTDFTLTISRLEPEDFAVYYCQHHSGYHFTFGGGTKVEIKRTVAAPSVFIFPPSDEQLKSGTASVVCLLNNFYPREAKVQWKVDNALQSGNSQESVTEQDSKDSTYSLSSTLTLSKADYEKHKVYACEVTHQGLSSPVTKSFNRGEC

SEQ ID NO: 5947 - protein, 214 aa, Artificial Sequence
  source: /note="Description of Artificial Sequence: Synthetic polypeptide"
DIQMTQSPSSLSASVGDRVTITCKASQDINSYLSWFQQKPGKAPKSLIYRANRLVDGVPSKFSGSGSGQDYTLTISSLQPEDFATYYCLQSDEFPLTFGQGTKLEIKRTVAAPSVFIFPPSDEQLKSGTASVVCLLNNFYPREAKVQWKVDNALQSGNSQESVTEQDSKDSTYSLSSTLTLSKADYEKHKVYACEVTHQGLSSPVTKSFNRGEC

SEQ ID NO: 5948 - protein, 214 aa, Artificial Sequence
  source: /note="Description of Artificial Sequence: Synthetic polypeptide"
DIQMTQSPSSLSASVGDRVTITCKASQDINSYLSWFQQKPGKAPKTLIYRANRLVDGVPSKFSGSGSGTDYTLTISSLQPEDFATYYCLQSDEFPLTFGQGTKLEIKRTVAAPSVFIFPPSDEQLKSGTASVVCLLNNFYPREAKVQWKVDNALQSGNSQESVTEQDSKDSTYSLSSTLTLSKADYEKHKVYACEVTHQGLSSPVTKSFNRGEC

SEQ ID NO: 5949 - protein, 214 aa, Artificial Sequence
  source: /note="Description of Artificial Sequence: Synthetic polypeptide"
DIQMTQSPSSLSASVGDRVTITCKASQDINSYLSWFQQKPGKAPKTLIYRANRLVDGVPSKFSGSGSGQDYTLTISSLQPEDFATYYCLQSDEFPLTFGQGTKLEIKRTVAAPSVFIFPPSDEQLKSGTASVVCLLNNFYPREAKVQWKVDNALQSGNSQESVTEQDSKDSTYSLSSTLTLSKADYEKHKVYACEVTHQGLSSPVTKSFNRGEC

SEQ ID NO: 5950 - protein, 214 aa, Artificial Sequence
  source: /note="Description of Artificial Sequence: Synthetic polypeptide"
DIKMTQSPSSMYASLRERVTITCKASQDINSYLSWFQQKPGKSPKTLIYRANRLVDGVPSRFSGSGSGQDYSLTISSLEYEDMGIYYCLQCDEFPLTFGAGTKLELKRTVAAPSVFIFPPSDEQLKSGTASVVCLLNNFYPREAKVQWKVDNALQSGNSQESVTEQDSKDSTYSLSSTLTLSKADYEKHKVYACEVTHQGLSSPVTKSFNRGEC

SEQ ID NO: 5951 - protein, 214 aa, Artificial Sequence
  source: /note="Description of Artificial Sequence: Synthetic polypeptide"
DIQMTQSPSSLSASVGDRVTITCKASQDINSYLSWFQQKPGKAPKSLIYRANRLVDGVPSKFSGSGSGTDFTLTISSLQPEDFATYYCLQCDEFPLTFGQGTKLEIKRTVAAPSVFIFPPSDEQLKSGTASVVCLLNNFYPREAKVQWKVDNALQSGNSQESVTEQDSKDSTYSLSSTLTLSKADYEKHKVYACEVTHQGLSSPVTKSFNRGEC

SEQ ID NO: 5952 - protein, 214 aa, Artificial Sequence
  source: /note="Description of Artificial Sequence: Synthetic polypeptide"
DIQMTQSPSSLSASVRDRVTITCKASQDINSYLSWFQQKPGKAPKSLIYRANRLVDGVPSKFSGSGSGTDFTLTISSLQPEDFATYYCLQCDEFPLTFGQGTKLEIKRTVAAPSVFIFPPSDEQLKSGTASVVCLLNNFYPREAKVQWKVDNALQSGNSQESVTEQDSKDSTYSLSSTLTLSKADYEKHKVYACEVTHQGLSSPVTKSFNRGEC

SEQ ID NO: 5953 - protein, 214 aa, Artificial Sequence
  source: /note="Description of Artificial Sequence: Synthetic polypeptide"
DIQMTQSPSSLSASVGDRVTITCKASQDINSYLSWFQQKPGKAPKSLIYRANRLVDGVPSKFSGSGSGTDYTLTISSLQPEDFATYYCLQCDEFPLTFGQGTKLEIKRTVAAPSVFIFPPSDEQLKSGTASVVCLLNNFYPREAKVQWKVDNALQSGNSQESVTEQDSKDSTYSLSSTLTLSKADYEKHKVYACEVTHQGLSSPVTKSFNRGEC

SEQ ID NO: 5954 - protein, 214 aa, Artificial Sequence
  source: /note="Description of Artificial Sequence: Synthetic polypeptide"
DIQMTQSPSSLSASVGDRVTITCKASQDINSYLSWFQQKPGKAPKSLIYRANRLVDGVPSKFSGSGSGTDFTLTISSLQPEDFATYYCLQCDEFPLTFGAGTKLEIKRTVAAPSVFIFPPSDEQLKSGTASVVCLLNNFYPREAKVQWKVDNALQSGNSQESVTEQDSKDSTYSLSSTLTLSKADYEKHKVYACEVTHQGLSSPVTKSFNRGEC

SEQ ID NO: 5955 - protein, 214 aa, Artificial Sequence; identical to SEQ ID NO: 5950
  source: /note="Description of Artificial Sequence: Synthetic polypeptide"

SEQ ID NO: 5956 - protein, 214 aa, Artificial Sequence; identical to SEQ ID NO: 5953
  source: /note="Description of Artificial Sequence: Synthetic polypeptide"

SEQ ID NO: 5957 - protein, 208 aa, Artificial Sequence
  source: /note="Description of Artificial Sequence: Synthetic polypeptide"
DIKMTQSPSSMYASLRERVTITCKASQDINSYLSWFQQKPGKSPKTLIYRANRLVDGVPSRFSGSGSGQDYSLTISSLEYEDMGIYYCLQSDEFPLTFGAGTKLELKRTVAAPSVFIFPPSDEQLKSGTASVVCLLNNFYPREAKVQWKVDNALQSGNSQESVTEQDSKDSTYSLSSTLTLSKADYEKHKVYACEVTHQGLSSPVTKS

SEQ ID NO: 5958 - protein, 214 aa, Artificial Sequence
  source: /note="Description of Artificial Sequence: Synthetic polypeptide"
DIQMTQSPSSLSASVGDRVTITCKASQDINSYLSWFQQKPGKAPKSLIYRANRLVDGVPSKFSGSGSGTDYTLTISSLQPEDFATYYCLQSDEFPLTFGQGTKLEIKRTVAAPSVFIFPPSDEQLKSGTASVVCLLNNFYPREAKVQWKVDNALQSGNSQESVTEQDSKDSTYSLSSTLTLSKADYEKHKVYACEVTHQGLSSPVTKSFNRGEC

SEQ ID NO: 5959 - protein, 107 aa, Artificial Sequence
  source: /note="Description of Artificial Sequence: Synthetic polypeptide"
DIQMTQSPSSLSASVGDRVTITCKASQDINKYVAWYQQKPGKAPKLLIYYTSTLQPGVPSRFSGSGSGTDFTFTISSLQPEDIATYYCLQYDNLLYTFGQGTKLEIK

SEQ ID NO: 5960 - protein, 107 aa, Artificial Sequence
  source: /note="Description of Artificial Sequence: Synthetic polypeptide"
  MOD_RES (52)..(53): Any amino acid
  MOD_RES (93)..(94): Any amino acid
DIQMTQSPSSLSASVGDRVTITCKASQDINKYVAWYQQKPGKAPKLLIYYTXXLQPGVPSRFSGSGSGTDFTFTISSLQPEDIATYYCLQYDXXLYTFGQGTKLEIK

SEQ ID NO: 5961 - protein, 107 aa, Artificial Sequence
  source: /note="Description of Artificial Sequence: Synthetic polypeptide"
DIQMTQSPSSLSASVGDRVTITCKASQDINKYVAWYQQKPGKAPKLLIYYTSFLQPGVPSRFSGSGSGTDFTFTISSLQPEDIATYYCLQYDNLLYTFGQGTKLEIK

SEQ ID NO: 5962 - protein, 107 aa, Artificial Sequence
  source: /note="Description of Artificial Sequence: Synthetic polypeptide"
DIQMTQSPSSLSASVGDRVTITCKASQDINKYVAWYQQKPGKAPKLLIYYTSWLQPGVPSRFSGSGSGTDFTFTISSLQPEDIATYYCLQYDNLLYTFGQGTKLEIK

SEQ ID NO: 5963 - protein, 107 aa, Artificial Sequence
  source: /note="Description of Artificial Sequence: Synthetic polypeptide"
DIQMTQSPSSLSASVGDRVTITCKASQDINKYVAWYQQKPGKAPKLLIYYTSFLQPGVPSRFSGSGSGTDFTFTISSLQPEDIATYYCLQYDALLYTFGQGTKLEIK

SEQ ID NO: 5964 - protein, 107 aa, Artificial Sequence
  source: /note="Description of Artificial Sequence: Synthetic polypeptide"
DIQMTQSPSSLSASVGDRVTITCKASQDINKYVAWYQQKPGKAPKLLIYYTKTLQPGVPSRFSGSGSGTDFTFTISSLQPEDIATYYCLQYDNLLYTFGQGTKLEIK

SEQ ID NO: 5965 - protein, 107 aa, Artificial Sequence
  source: /note="Description of Artificial Sequence: Synthetic polypeptide"
DIQMTQSPSSLSASVGDRVTITCKASQDINKYVAWYQQKPGKAPKLLIYYTRTLQPGVPSRFSGSGSGTDFTFTISSLQPEDIATYYCLQYDNLLYTFGQGTKLEIK

SEQ ID NO: 5966 - protein, 107 aa, Artificial Sequence
  source: /note="Description of Artificial Sequence: Synthetic polypeptide"
DIQMTQSPSSLSASVGDRVTITCKASQDINKYVAWYQQKPGKAPKLLIYYTSTLQPGVPSRFSGSGSGTDFTFTISSLQPEDIATYYCLQYDNKLYTFGQGTKLEIK

SEQ ID NO: 5967 - protein, 107 aa, Artificial Sequence; identical to SEQ ID NO: 5962
  source: /note="Description of Artificial Sequence: Synthetic polypeptide"

SEQ ID NO: 5968 - protein, 107 aa, Artificial Sequence
  source: /note="Description of Artificial Sequence: Synthetic polypeptide"
DIQMTQSPSSLSASVGDRVTITCKASQDINKYVAWYQQKPGKAPKLLIYYTSHLQPGVPSRFSGSGSGTDFTFTISSLQPEDIATYYCLQYDNLLYTFGQGTKLEIK

SEQ ID NO: 5969 - protein, 238 aa, Artificial Sequence; identical to SEQ ID NO: 4096
  source: /note="Description of Artificial Sequence: Synthetic polypeptide"

SEQ ID NO: 5970 - protein, 238 aa, Artificial Sequence; identical to SEQ ID NO: 4097
  source: /note="Description of Artificial Sequence: Synthetic polypeptide"

SEQ ID NO: 5971 - protein, 238 aa, Artificial Sequence; identical to SEQ ID NO: 4098
  source: /note="Description of Artificial Sequence: Synthetic polypeptide"

SEQ ID NO: 5972 - protein, 144 aa, Artificial Sequence; identical to SEQ ID NO: 4099
  source: /note="Description of Artificial Sequence: Synthetic polypeptide"

SEQ ID NO: 5973 - protein, 116 aa, Artificial Sequence; identical to SEQ ID NO: 4100
  source: /note="Description of Artificial Sequence: Synthetic polypeptide"

SEQ ID NO: 5974 - protein, 219 aa, Artificial Sequence
  source: /note="Description of Artificial Sequence: Synthetic polypeptide"
DIVMTQSPLSNPVTLGQPVSISCRSSKSLLYKDGKTYLNWFLQRPGQSPQLLIYLMSTRASGVPDRFSGGGSGTDFTLKISRVEAEDVGVYYCQQLVEYPLTFGQGTKLEIKRTVAAPSVFIFPPSDEQLKSGTASVVCLLNNFYPREAKVQWKVDNALQSGNSQESVTEQDSKDSTYSLSSTLTLSKADYEKHKVYACEVTHQGLSSPVTKSFNRGEC

SEQ ID NO: 5975 - protein, 214 aa, Artificial Sequence
  source: /note="Description of Artificial Sequence: Synthetic polypeptide"
SSELTQDPAVSVALGQTVRITCQGDSLRKYYGSWYQQKPGQAPVLVIYEDSRRPSGVPDRFSGSIDSSSNSASLTISGLKTDDEADYYCQSYDSSNVVFGGGTQLTVLGQPKAAPSVTLFPPSSEELQANKATLVCLISDFYPGAVTVAWKADSSPVKAGVETTTPSKQSNNKYAASSYLSLTPEQWKSHRSYSCQVTHEGSTVEKTVAPTECS

SEQ ID NO: 5976 - protein, 112 aa, Artificial Sequence; identical to SEQ ID NO: 4101
  source: /note="Description of Artificial Sequence: Synthetic polypeptide"

SEQ ID NO: 5977 - protein, 109 aa, Artificial Sequence; identical to SEQ ID NO: 4102
  source: /note="Description of Artificial Sequence: Synthetic polypeptide"

SEQ ID NO: 5978 - protein, 114 aa, Artificial Sequence; identical to SEQ ID NO: 4103
  source: /note="Description of Artificial Sequence: Synthetic polypeptide"

SEQ ID NO: 5979 - protein, 110 aa, Artificial Sequence; identical to SEQ ID NO: 4104
  source: /note="Description of Artificial Sequence: Synthetic polypeptide"

SEQ ID NO: 5980 - protein, 116 aa, Artificial Sequence; identical to SEQ ID NO: 4105
  source: /note="Description of Artificial Sequence: Synthetic polypeptide"

SEQ ID NO: 5981 - protein, 112 aa, Artificial Sequence; identical to SEQ ID NO: 4106
  source: /note="Description of Artificial Sequence: Synthetic polypeptide"

SEQ ID NO: 5982 - protein, 112 aa, Artificial Sequence; identical to SEQ ID NO: 4107
  source: /note="Description of Artificial Sequence: Synthetic polypeptide"

SEQ ID NO: 5983 - protein, 107 aa, Artificial Sequence [sequence omitted]

SEQ ID NO: 5984 - protein, 234 aa, Artificial Sequence; identical to SEQ ID NO: 4114
  source: /note="Description of Artificial Sequence: Synthetic polypeptide"

SEQ ID NO: 5985 - protein, 234 aa, Artificial Sequence; identical to SEQ ID NO: 4114
  source: /note="Description of Artificial Sequence: Synthetic polypeptide"

SEQ ID NO: 5986 - protein, 238 aa, Artificial Sequence; identical to SEQ ID NO: 4116
  source: /note="Description of Artificial Sequence: Synthetic polypeptide"

SEQ ID NO: 5987 - protein, 237 aa, Artificial Sequence; identical to SEQ ID NO: 4117
  source: /note="Description of Artificial Sequence: Synthetic polypeptide"

SEQ ID NO: 5988 - protein, 238 aa, Artificial Sequence; identical to SEQ ID NO: 4118
  source: /note="Description of Artificial Sequence: Synthetic polypeptide"

SEQ ID NO: 5989 - protein, 237 aa, Artificial Sequence; identical to SEQ ID NO: 4119
  source: /note="Description of Artificial Sequence: Synthetic polypeptide"

SEQ ID NO: 5990 - protein, 237 aa, Artificial Sequence; identical to SEQ ID NO: 4120
  source: /note="Description of Artificial Sequence: Synthetic polypeptide"

SEQ ID NO: 5991 - protein, 237 aa, Artificial Sequence; identical to SEQ ID NO: 4121
  source: /note="Description of Artificial Sequence: Synthetic polypeptide"

SEQ ID NO: 5992 - protein, 238 aa, Artificial Sequence; identical to SEQ ID NO: 4098
  source: /note="Description of Artificial Sequence: Synthetic polypeptide"

SEQ ID NO: 5993 - protein, 238 aa, Artificial Sequence; identical to SEQ ID NO: 4123
  source: /note="Description of Artificial Sequence: Synthetic polypeptide"

SEQ ID NO: 5994 - protein, 214 aa, Artificial Sequence; identical to SEQ ID NO: 4124
  source: /note="Description of Artificial Sequence: Synthetic polypeptide"

SEQ ID NO: 5995 - protein, 111 aa, Artificial Sequence; identical to SEQ ID NO: 4154
  source: /note="Description of Artificial Sequence: Synthetic polypeptide"

SEQ ID NO: 5996 - protein, 113 aa, Artificial Sequence
  source: /note="Description of Artificial Sequence: Synthetic polypeptide"
DIVMTQSPDSLAVSLGERATINCKSSQSLLNSANQKNYLAWYQQKPGQPPKLLIYFASTRESGVPDRFSGSGSGTDFTLTISSLQAEDVAVYYCQQHYNTPLTFGGGTKVEIK

SEQ ID NO: 5997 - protein, 107 aa, Artificial Sequence; identical to SEQ ID NO: 4155
  source: /note="Description of Artificial Sequence: Synthetic polypeptide"

SEQ ID NO: 5998 - protein, 107 aa, Artificial Sequence; identical to SEQ ID NO: 4156
  source: /note="Description of Artificial Sequence: Synthetic polypeptide"

SEQ ID NO: 5999 - protein, 107 aa, Artificial Sequence; identical to SEQ ID NO: 4157
  source: /note="Description of Artificial Sequence: Synthetic polypeptide"

SEQ ID NO: 6000 - protein, 107 aa, Artificial Sequence; identical to SEQ ID NO: 4158
  source: /note="Description of Artificial Sequence: Synthetic polypeptide"

SEQ ID NO: 6001 - protein, 106 aa, Artificial Sequence; identical to SEQ ID NO: 4159
  source: /note="Description of Artificial Sequence: Synthetic polypeptide"

SEQ ID NO: 6002 - protein, 110 aa, Artificial Sequence; identical to SEQ ID NO: 4160
  source: /note="Description of Artificial Sequence: Synthetic polypeptide"

SEQ ID NO: 6003 - protein, 110 aa, Artificial Sequence; identical to SEQ ID NO: 4161
  source: /note="Description of Artificial Sequence: Synthetic polypeptide"

SEQ ID NO: 6004 - protein, 106 aa, Artificial Sequence; identical to SEQ ID NO: 4162
  source: /note="Description of Artificial Sequence: Synthetic polypeptide"

SEQ ID NO: 6005 - protein, 113 aa, Artificial Sequence; identical to SEQ ID NO: 4163
  source: /note="Description of Artificial Sequence: Synthetic polypeptide"

SEQ ID NO: 6006 - protein, 107 aa, Artificial Sequence; identical to SEQ ID NO: 4164
  source: /note="Description of Artificial Sequence: Synthetic polypeptide"

SEQ ID NO: 6007 - protein, 107 aa, Artificial Sequence; identical to SEQ ID NO: 4165
  source: /note="Description of Artificial Sequence: Synthetic polypeptide"

SEQ ID NO: 6008 - protein, 107 aa, Artificial Sequence; identical to SEQ ID NO: 4166
  source: /note="Description of Artificial Sequence: Synthetic polypeptide"

SEQ ID NO: 6009 - protein, 113 aa, Artificial Sequence; identical to SEQ ID NO: 4167
  source: /note="Description of Artificial Sequence: Synthetic polypeptide"

SEQ ID NO: 6010 - protein, 107 aa, Artificial Sequence
  source: /note="Description of Artificial Sequence: Synthetic polypeptide"
DIEMTQSPSSLSASVGDRVTITCKASQDVSTAVAWYQQKPGKAPKLLIYSASYRYTGVPDRFSGSGSGTDFTLTISSLQAEDFATYYCQQHYSTPWTFGQGTKVEIK

SEQ ID NO: 6011 - protein, 107 aa, Artificial Sequence
  source: /note="Description of Artificial Sequence: Synthetic polypeptide"
DIQMTQSPSSLSASVGDRVTITCKASQDVSTAVAWYQQKPGKAPKLLIYSASYRYTGVPSRFSGSGSGTDFTLTISSLQPEDFATYYCQQHYSTPWTFGQGTKVEIK

SEQ ID NO: 6012 - protein, 107 aa, Artificial Sequence
  source: /note="Description of Artificial Sequence: Synthetic polypeptide"
DIQMTQSPASLSASVGDRVTITCRASQDISDYLAWYQQKPGKIPRLLIYTTSTLQSGVPSRFRGSGSGTDFTLTISSLQPEDVATYYCQKYDSAPLTFGGGTKVEIK

SEQ ID NO: 6013 - protein, 116 aa, Artificial Sequence; identical to SEQ ID NO: 4168
  source: /note="Description of Artificial Sequence: Synthetic polypeptide"

SEQ ID NO: 6014 - protein, 111 aa, Artificial Sequence; identical to SEQ ID NO: 4169
  source: /note="Description of Artificial Sequence: Synthetic polypeptide"

SEQ ID NO: 6015 - protein, 115 aa, Artificial Sequence; identical to SEQ ID NO: 4170
  source: /note="Description of Artificial Sequence: Synthetic polypeptide"

SEQ ID NO: 6016 - protein, 115 aa, Artificial Sequence; identical to SEQ ID NO: 4171
  source: /note="Description of Artificial Sequence: Synthetic polypeptide"

SEQ ID NO: 6017 - protein, 115 aa, Artificial Sequence; identical to SEQ ID NO: 4172
  source: /note="Description of Artificial Sequence: Synthetic polypeptide"

SEQ ID NO: 6018 - protein, 115 aa, Artificial Sequence; identical to SEQ ID NO: 4173
  source: /note="Description of Artificial Sequence: Synthetic polypeptide"

SEQ ID NO: 6019 - protein, 105 aa, Artificial Sequence; identical to SEQ ID NO: 4174
  source: /note="Description of Artificial Sequence: Synthetic polypeptide"

SEQ ID NO: 6020 - protein, 105 aa, Artificial Sequence; identical to SEQ ID NO: 4175
  source: /note="Description of Artificial Sequence: Synthetic polypeptide"

SEQ ID NO: 6021 - protein, 105 aa, Artificial Sequence; identical to SEQ ID NO: 5941
  source: /note="Description of Artificial Sequence: Synthetic polypeptide"

SEQ ID NO: 6022 - protein, 107 aa, Artificial Sequence
  source: /note="Description of Artificial Sequence: Synthetic polypeptide"
DIQMTQSPSSLSASVGDRVTITCKASQDINSYLSWFQQKPGKAPKSLIYRANRLVDGVPSKFSGSGSGTDYTLTISSLQPEDFATYYCLQCDEFPLTFGQGTKLEIK

SEQ ID NO: 6023 - protein, 107 aa, Artificial Sequence
  source: /note="Description of Artificial Sequence: Synthetic polypeptide"
DIKMTQSPSSMYASLRERVTITCKASQDINSYLSWFQQKPGKSPKTLIYRANRLVDGVPSRFSGSGSGQDYSLTISSLEYEDMGIYYCLQSDEFPLTFGAGTKLELK

SEQ ID NO: 6024 - protein, 107 aa, Artificial Sequence
  source: /note="Description of Artificial Sequence: Synthetic polypeptide"
DIQMTQSPSSLSASVGDRVTITCKASQDINSYLSWFQQKPGKAPKSLIYRANRLVDGVPSKFSGSGSGTDYTLTISSLQPEDFATYYCLQSDEFPLTFGQGTKLEIK

SEQ ID NO: 6025 - protein, 124 aa, Artificial Sequence
  source: /note="Description of Artificial Sequence: Synthetic polypeptide"
EVQLQQSGPELVKPGASVKISCKASGYSFTGYFMHWVKQSHGNILDWIGNIYPYNGVSNYNQRFKAKATLTVDKSSSTAYMELRSLTSEDSAVYYCARRYYYGTGPADWYFDVWGTGTTVTVSS

SEQ ID NO: 6026 - protein, 112 aa, Artificial Sequence; identical to SEQ ID NO: 4177
  source: /note="Description of Artificial Sequence: Synthetic polypeptide"

SEQ ID NO: 6027 - protein, 112 aa, Artificial Sequence; identical to SEQ ID NO: 4178
  source: /note="Description of Artificial Sequence: Synthetic polypeptide"

SEQ ID NO: 6028 - protein, 112 aa, Artificial Sequence; identical to SEQ ID NO: 4179
  source: /note="Description of Artificial Sequence: Synthetic polypeptide"

SEQ ID NO: 6029 - protein, 112 aa, Artificial Sequence; identical to SEQ ID NO: 4180
  source: /note="Description of Artificial Sequence: Synthetic polypeptide"

SEQ ID NO: 6030 - protein, 112 aa, Artificial Sequence [sequence omitted]

SEQ ID NO: 6031 - protein, 112 aa, Artificial Sequence; identical to SEQ ID NO: 4182
  source: /note="Description of Artificial Sequence: Synthetic polypeptide"

SEQ ID NO: 6032 - protein, 112 aa, Artificial Sequence; identical to SEQ ID NO: 4183
  source: /note="Description of Artificial Sequence: Synthetic polypeptide"

SEQ ID NO: 6033 - protein, 112 aa, Artificial Sequence; identical to SEQ ID NO: 4184
  source: /note="Description of Artificial Sequence: Synthetic polypeptide"

SEQ ID NO: 6034 - protein, 114 aa, Artificial Sequence; identical to SEQ ID NO: 4185
  source: /note="Description of Artificial Sequence: Synthetic polypeptide"

SEQ ID NO: 6035 - protein, 113 aa, Artificial Sequence; identical to SEQ ID NO: 4186
  source: /note="Description of Artificial Sequence: Synthetic polypeptide"

SEQ ID NO: 6036 - protein, 234 aa, Artificial Sequence; identical to SEQ ID NO: 4187
  source: /note="Description of Artificial Sequence: Synthetic polypeptide"

SEQ ID NO: 6037 - protein, 246 aa, Artificial Sequence; identical to SEQ ID NO: 4188
  source: /note="Description of Artificial Sequence: Synthetic polypeptide"

SEQ ID NO: 6038 - protein, 113 aa, Artificial Sequence; identical to SEQ ID NO: 4189
  source: /note="Description of Artificial Sequence: Synthetic polypeptide"

SEQ ID NO: 6039 - protein, 113 aa, Artificial Sequence; identical to SEQ ID NO: 4190
  source: /note="Description of Artificial Sequence: Synthetic polypeptide"

SEQ ID NO: 6040 - protein, 113 aa, Artificial Sequence; identical to SEQ ID NO: 4191
  source: /note="Description of Artificial Sequence: Synthetic polypeptide"

SEQ ID NO: 6041 - protein, 115 aa, Artificial Sequence; identical to SEQ ID NO: 4192
  source: /note="Description of Artificial Sequence: Synthetic polypeptide"

SEQ ID NO: 6042 - protein, 115 aa, Artificial Sequence; identical to SEQ ID NO: 4193
  source: /note="Description of Artificial Sequence: Synthetic polypeptide"

SEQ ID NO: 6043 - protein, 115 aa, Artificial Sequence; identical to SEQ ID NO: 4194
  source: /note="Description of Artificial Sequence: Synthetic polypeptide"

SEQ ID NO: 6044 - protein, 113 aa, Artificial Sequence; identical to SEQ ID NO: 4195
  source: /note="Description of Artificial Sequence: Synthetic polypeptide"

SEQ ID NO: 6045 - protein, 113 aa, Artificial Sequence; identical to SEQ ID NO: 4196
  source: /note="Description of Artificial Sequence: Synthetic polypeptide"

SEQ ID NO: 6046 - protein, 109 aa, Artificial Sequence; identical to SEQ ID NO: 4197
  source: /note="Description of Artificial Sequence: Synthetic polypeptide"

SEQ ID NO: 6047 - protein, 108 aa, Artificial Sequence; identical to SEQ ID NO: 4198
  source: /note="Description of Artificial Sequence: Synthetic polypeptide"

SEQ ID NO: 6048 - protein, 108 aa, Artificial Sequence; identical to SEQ ID NO: 4199
  source: /note="Description of Artificial Sequence: Synthetic polypeptide"

SEQ ID NO: 6049 - protein, 108 aa, Artificial Sequence; identical to SEQ ID NO: 4200
  source: /note="Description of Artificial Sequence: Synthetic polypeptide"

SEQ ID NO: 6050 - protein, 106 aa, Artificial Sequence; identical to SEQ ID NO: 4201
  source: /note="Description of Artificial Sequence: Synthetic polypeptide"

SEQ ID NO: 6051 - protein, 108 aa, Artificial Sequence; identical to SEQ ID NO: 4202
  source: /note="Description of Artificial Sequence: Synthetic polypeptide"

SEQ ID NO: 6052 - protein, 111 aa, Artificial Sequence; identical to SEQ ID NO: 4203
  source: /note="Description of Artificial Sequence: Synthetic polypeptide"

SEQ ID NO: 6053 - protein, 111 aa, Artificial Sequence; identical to SEQ ID NO: 4204
  source: /note="Description of Artificial Sequence: Synthetic polypeptide"

SEQ ID NO: 6054 - protein, 107 aa, Artificial Sequence; identical to SEQ ID NO: 4205
  source: /note="Description of Artificial Sequence: Synthetic polypeptide"

SEQ ID NO: 6055 - protein, 108 aa, Artificial Sequence; identical to SEQ ID NO: 4206
  source: /note="Description of Artificial Sequence: Synthetic polypeptide"

SEQ ID NO: 6056 - protein, 109 aa, Artificial Sequence; identical to SEQ ID NO: 4207
  source: /note="Description of Artificial Sequence: Synthetic polypeptide"

SEQ ID NO: 6057 - protein, 110 aa, Artificial Sequence; identical to SEQ ID NO: 4208
  source: /note="Description of Artificial Sequence: Synthetic polypeptide"

SEQ ID NO: 6058 - protein, 108 aa, Artificial Sequence; identical to SEQ ID NO: 4209
  source: /note="Description of Artificial Sequence: Synthetic polypeptide"

SEQ ID NO: 6059 - protein, 108 aa, Artificial Sequence; identical to SEQ ID NO: 4210
  source: /note="Description of Artificial Sequence: Synthetic polypeptide"

SEQ ID NO: 6060 - protein, 108 aa, Artificial Sequence
  source: /note="Description of Artificial Sequence: Synthetic polypeptide"
SSELTQDPAVSVALGQTVRITCQGDSLRKYYGSWYQQKPGQAPVLVIYEDSRRPSGVPDRFSGSIDSSSNSASLTISGLKTDDEADYYCQSYDSSNVVFGGGTQLTVL

SEQ ID NO: 6061 - protein, 107 aa, Artificial Sequence
  source: /note="Description of Artificial Sequence: Synthetic polypeptide"
SYVLTQPPSVSVSLGQMAAITCSGEALPKKYGYWYQQKPGQVPVLLIYRDVERPSGVPDRFSGSSSGTMVTLTISGVQAEDEADYYCLSADSSGTWVFGGGTKLTVL

SEQ ID NO: 6062 - protein, 107 aa, Artificial Sequence
  source: /note="Description of Artificial Sequence: Synthetic polypeptide"
EIVLTQSPSSLSASVGDTVTITCRSSQNISNYLSWFQHKPGKAPRILVYAASTLQTGVPSRFSGRGSGTIFTLSITSLQSEDYATYYCQQNDKIPRTFGQGTKVEIK

SEQ ID NO: 6063 - protein, 108 aa, Artificial Sequence
  source: /note="Description of Artificial Sequence: Synthetic polypeptide"
SYVLTQPPSVSVSAGQTASITCSADMLGDTYVSWYQKRPGQSPVLLIYQDSKRPSEIPERFSGSSSEDTATLTITGTQALDEAAYYCQVWDRRTTTYVFGPGTEVTVL

SEQ ID NO: 6064 - protein, 107 aa, Artificial Sequence
  source: /note="Description of Artificial Sequence: Synthetic polypeptide"
EIVLTQSPPTLSLSPGERATLSCRASQTVSKYLAWYQQKPGQAPRLLVYDTSNRAIGIPPRFSGSGSGTDFTLTISTLEPEDFALYYCQQRSNWPPTFGQGTRLEIK

SEQ ID NO: 6065 - protein, 107 aa, Artificial Sequence
  source: /note="Description of Artificial Sequence: Synthetic polypeptide"
DIQMTQSPSTLSASVGDRVTITCRASQSISRWLAWYQQRPGRAPDLLIYDASNLESGVPSRFSGSGSGTEFTLTISSLQPGDFATYYCQQYYSYVYTFGQGTKLEIK

SEQ ID NO: 6066 - protein, 108 aa, Artificial Sequence
  source: /note="Description of Artificial Sequence: Synthetic polypeptide"
SYELTQPPSVSVSPGQTARITCSGDALPKQFAYWYQQKSGQAPKLVIFKDTERPSGIPERFSASSSGTKATLTISGVQAEDEADYYCQSADRTATSWVFGGGTKLTVL

SEQ ID NO: 6067 - protein, 107 aa, Artificial Sequence
  source: /note="Description of Artificial Sequence: Synthetic polypeptide"
SYELTQPPSVSVSPGQTARITCSGDALAKQYSYWYQHKPGQAPVMVMYKDRERPSGIPERFSGSSSGTTVTLTISAVQAEDEADYYCQSTGTDSPYIFGTGTKVTVL

SEQ ID NO: 6068 - protein, 108 aa, Artificial Sequence
  source: /note="Description of Artificial Sequence: Synthetic polypeptide"
SYVLTQPPSVSVSPGQTARITCSGDALPKKYAYWYQQKSGQAPVLVIYEDIKRPSGIPERFSGSSSGTMATLTISGAQVEDEGDYYCYSADRSGNRWAFGGGTKLTVL

SEQ ID NO: 6069 - protein, 107 aa, Artificial Sequence
  source: /note="Description of Artificial Sequence: Synthetic polypeptide"
LPVLTQPPSVSVSPGQTARITCSGDELSKQYAYWYQKKSGQAPVMVVNEDTKRPPGIPERFSGSSSGTTSTLTISGVQAEDEADYYCQSADITGSWVFGGGTKLTVL

SEQ ID NO: 6070 - protein, 108 aa, Artificial Sequence
  source: /note="Description of Artificial Sequence: Synthetic polypeptide"
SYELTQPPSVSVSPGQTARITCSGDALPTKFAFWYQQKSGQAPVLVIYEDDKRPSGIPQRFSGSSSGTTATLTISGAQEEDDADYYCYSKDSTNVERVFGTGTKLSVL

SEQ ID NO: 6071 - protein, 110 aa, Artificial Sequence
  source: /note="Description of Artificial Sequence: Synthetic polypeptide"
QSVLTQPPSVSAAPGQKVNISCSGSSSNIGNNYVSWYQRLPGTAPKLLIYDNNKRPSGIPDRFSGSKSGTSATLGITGLQTGDGADYYCATWDKSLIAVVFGGGTKLTVL

SEQ ID NO: 6072 - protein, 111 aa, Artificial Sequence
  source: /note="Description of Artificial Sequence: Synthetic polypeptide"
EIVLTQSPGSLAVSLGERATINCKSSQTVLYNNKNYLAWYQQKPGQPPKLLISWASSRESGVPDRFSGSGSGTDFTLTISSLQAEDVAVYYCQHYYGTPVTFGGGTKVEIK

SEQ ID NO: 6073 - protein, 107 aa, Artificial Sequence
  source: /note="Description of Artificial Sequence: Synthetic polypeptide"
EIVLTQSPATLSLSPGERATLSCRASQSVSSYLAWYQQKPGQAPRLLIYDASNRATGIPARFSGSGSGTDFTLTISSLEPEDFAVYYCQQRSNWPRTFGQGTKVEIK

SEQ ID NO: 6074 - protein, 107 aa, Artificial Sequence
  source: /note="Description of Artificial Sequence: Synthetic polypeptide"
EIVLTQSPDFQSVTPKEKVTITCRASQSIGSSLHWYQQKPDQSPKLLIKYASQSFSGVPSRFSGSGSGTDFTLTINSLEAEDAAAYYCHQSSSLPITFGQGTRLEIK

SEQ ID NO: 6075 - protein, 107 aa, Artificial Sequence
  source: /note="Description of Artificial Sequence: Synthetic polypeptide"
DIQMTQSPSSLSASVGDRVTITCRASQDISSWLAWYQQKPEKAPKSLIYAASSLQSGVPSRFSGSGSGTDFTLTISSLQPEDFATYYCQQYKSYPLTFGGGTKVEIK

SEQ ID NO: 6076 - protein, 107 aa, Artificial Sequence
  source: /note="Description of Artificial Sequence: Synthetic polypeptide"
DIQMTQSPSSVSASVGDRVTITCRASQDISSWLAWYQHKPGKAPKLLIYLASSLQSGVPSRFSGSGSGTDFTLTISSLQPEDFATYYCQQANSFPWTFGQGTKVEIK

SEQ ID NO: 6077 - protein, 108 aa, Artificial Sequence
  source: /note="Description of Artificial Sequence: Synthetic polypeptide"
EIVLTQSPGTLSLSPGERATLSCRASQSFSRGYLAWYQQKPGQAPRLLIYGASSRVTGIPDRFSGSGSGTDFTLTISRLEPEDFAVYYCQQYDSSPYTFGQGTKLEIK

SEQ ID NO: 6078 - protein, 107 aa, Artificial Sequence
  source: /note="Description of Artificial Sequence: Synthetic polypeptide"
VIWMTQSPSLLSASTGDRVTISCRMSQGISSYLAWYQQKPGKAPEVLIYAVSTLQSGVPSRFSGSGSGTDFTLTISCLQSEDFATYYCQQYYSFPYTFGQGTKLEIK

SEQ ID NO: 6079 - protein, 107 aa, Artificial Sequence
  source: /note="Description of Artificial Sequence: Synthetic polypeptide"
VIWMTQSPSLLSASTGDRVTISCRMSQGISSYLAWYQQKPGKAPELLIYAVSTLQSGVPSRFSGSGSGTDFTLTISSLQSEDFATYYCQQYYSFPYTFGQGTKLEIK

SEQ ID NO: 6080 - protein, 107 aa, Artificial Sequence
  source: /note="Description of Artificial Sequence: Synthetic polypeptide"
DIQMTQSPSSLSASVGDRVTITCRASQGISSWLAWYQQKPEKAPKSLIYGASSLQSGVPSRFSGSGSGTDFTLTISSLQPEDFATYYCQQYNSYPYTFGQGTKLEIK

SEQ ID NO: 6081 - protein, 107 aa, Artificial Sequence
  source: /note="Description of Artificial Sequence: Synthetic polypeptide"
DIQMTQSPSSVSASVGDRVTITCRASQGISSWLAWYQHKPGKAPKLLIYAASSLQSGVPSRFSGSGSGTDFTLTISSLQPEDFATYYCQQTNNFPWTFGQGTKVEIK

SEQ ID NO: 6082 - protein, 107 aa, Artificial Sequence
  source: /note="Description of Artificial Sequence: Synthetic polypeptide"
DIQMTQSPSSLSASVGDRVTITCRASQGISSWLAWYQQKPEKAPKSLIYAASSLQSGVPSRFSGSGSGTDFTLTISSLQPEDFATYYCQQYDSYPLTFGGGTKVEIK

SEQ ID NO: 6083 - protein, 107 aa, Artificial Sequence
  source: /note="Description of Artificial Sequence: Synthetic polypeptide"
DIQMTQSPSSLSASVGDRVTITCRASQGISSWLAWYQQKPEKAPKSLIYAASSLQSGVPSRFSGSGSGTDFTLTISSLQPEDFATYYCQQYNSYPITFGQGTRLEIK

SEQ ID NO: 6084 - protein, 108 aa, Artificial Sequence
  source: /note="Description of Artificial Sequence: Synthetic polypeptide"
EIVLTQSPGTLSLSPGERATLSCRASQSVRISYLAWYQQKPGQAPRLLIYGTFSRATGIPDRFSGSGSGTDFTLTISRLEPEDFAVYYCQQYGSSMYTFGQGTKLEIK

SEQ ID NO: 6085 - protein, 106 aa, Artificial Sequence
  source: /note="Description of Artificial Sequence: Synthetic polypeptide"
EIVLTQSPATLSLSPGERATLSCRASQSVSSYLAWYQQKPGQAPRLLIYDASNRATGIPARFSGSGSGTDFTLTISSLEPEDFAVYYCQQRSNWYTFGQGTKLEIK

SEQ ID NO: 6086 - protein, 107 aa, Artificial Sequence [sequence omitted]

SEQ ID NO: 6087 - protein, 107 aa, Artificial Sequence
  source: /note="Description of Artificial Sequence: Synthetic polypeptide"
EIVLTQSPATLSLSPGERATLSCRASQSVSSYLAWYQQKPGQAPRLLIYNASNRATGIPARFSGSGSGTDFTLTIGSLEPEDFAVYYCQQRSNWPRTFGQGTKVEIK

SEQ ID NO: 6088 - protein, 113 aa, Artificial Sequence
  source: /note="Description of Artificial Sequence: Synthetic polypeptide"
EVQLVESGGGLVQPGGSLRLSCAASGFTFSSYRMNWVRQAPGKGLEWVSYISTSSSTIYYADSVKGRFTISRDNAKNSLYLQMNSLRAEDTAVYYCARAFDYWGQGTLVTVSS

SEQ ID NO: 6089 - protein, 113 aa, Artificial Sequence
  source: /note="Description of Artificial Sequence: Synthetic polypeptide"
EVQLVESGGGLVQPGGSLRLSCAASGFTFSTYYMSWVRQAPGKGLEWVANIKQDGSEKYYVDSVKGRFTISRDNARNSLYLQMHSLRAEDTAVYYCASPPGWWGQGTLVTVSS

SEQ ID NO: 6090 - protein, 110 aa, Artificial Sequence
  source: /note="Description of Artificial Sequence: Synthetic polypeptide"
QSALTQPASVSGSPGQSITISCTGSNTDVGAYDYVSWSQQLPGKAPKFVIFDVDVRPSGISDRFSGSKSGNTASLTISGLQAEDEADYYCSSYTKSGTLVFGGGTKVTVV

SEQ ID NO: 6091 - protein, 119 aa, Artificial Sequence
  source: /note="Description of Artificial Sequence: Synthetic polypeptide"
QVQLVQSGAEVKKPGASVKVSCKASGYIFTDYFIHWIRQAPGQGLEWMGWIKPKSGGTDYAEKFQGRVTLTRDTSITTVYMELSRLNSDDTAVYYCARLKYSVPDSDYWGQGTLVTVSS

SEQ ID NO: 6092 - protein, 126 aa, Artificial Sequence
  source: /note="Description of Artificial Sequence: Synthetic polypeptide"
EVQLVESGGGLVKPGGSLRLSCATSGFNFSNVWISWVRQAPGKGLEWVGRIKSKNDGGTTEYAAPVKGRFTISRDDSKNTVYLQMNSLKTEDAGVYYCTTDPYHYFDMGGPGFGPWGQGTLVTVSS

SEQ ID NO: 6093 - protein, 123 aa, Artificial Sequence
  source: /note="Description of Artificial Sequence: Synthetic polypeptide"
EVQLLESGGALVQPGGSLRLSCAASGLTFSRHAFSWVRQAPGKGLEWVAISSGSGGNTYYAASVKGRFTISRDESKNTLYLQMNSLRVEDTALYYCAKEVLEWSLLSRYMDVWGKGTTVTVSS

SEQ ID NO: 6094 - protein, 112 aa, Artificial Sequence
  source: /note="Description of Artificial Sequence: Synthetic polypeptide"
QVQLQESGPGLVKPSETLSLTCTVSGGSITDYYWSWIRQPPGKGLEWIGYIHDSGTTRYNPSLTSRLSMSLDTSTNQVSLRLTSVTAADTAVYYCAKVPDYWGQGTLVTVSS

SEQ ID NO: 6095 - protein, 116 aa, Artificial Sequence
  source: /note="Description of Artificial Sequence: Synthetic polypeptide"
QVQLQESGPGVVKPSQTLSLTCTVSGVSVGSGDYYWSWIRHHPGKGLEWIGYISFFGSSNYNPSLKGRVSMSVDTSNNQFSLNLKSVTAADTAVYFCATGNAYSFWGQGTMVTVSS

SEQ ID NO: 6096 - protein, 112 aa, Artificial Sequence
  source: /note="Description of Artificial Sequence: Synthetic polypeptide"
EVQLVESGGDLVQPGGSLRLSCTASGFNLGDYWMHWVRQVPGKGLVWVSRISSDGASVSYADFVEGRFTISRGNARNTLFLELNSLRLDDTAVYYCAMGVVWGQGTLVTVSS

SEQ ID NO: 6097 - protein, 126 aa, Artificial Sequence
  source: /note="Description of Artificial Sequence: Synthetic polypeptide"
QVQLVESGGGVVQPGRSLRLSCAASRFTFSSYGMHWVRQAPGKGLEWVALIYYDATQKYYADSVKGRFTISRDNSKNALYLQMTSLRADDTAVYYCARDLPYHYHRSASFAPADTWGQGTLVTVSS

SEQ ID NO: 6098 - protein, 120 aa, Artificial Sequence
  source: /note="Description of Artificial Sequence: Synthetic polypeptide"
EVQLLESGGGLVQPGGSLRLSCAASGFTFSSYSMSWVRQAPGKGLEWVATVGYGGTIYYADSVKGRFTISRDNSKNTLYLEMNSLRAEATAVYYCAKANYGGNRFGLDVWGQGTTVTVSS

SEQ ID NO: 6099 - protein, 120 aa, Artificial Sequence
  source: /note="Description of Artificial Sequence: Synthetic polypeptide"
EVQLLESGGGLVQPGGSLRLSCAASGFTFRNYAMAWVRQAPGKGLEWVSAIPARGDKTYYADSVRGRFTISRDISKSALYLQMNSLRVEDTAVYYCAKAHHLYNKNFDYWGQGTLVTVSS

SEQ ID NO: 6100 - protein, 123 aa, Artificial Sequence
  source: /note="Description of Artificial Sequence: Synthetic polypeptide"
EVQLLESGGGSVQPGGSLRLSCAASGFTFSTYVMSWVRQAPGKGLEWVSAISRRGGSTYYADSVKGRFTISRDNSKNTLYLQMNSLRAEDTAVYYCAKDRWLTGRTGGVFDIWGQGTMVTVSS

SEQ ID NO: 6101 - protein, 120 aa, Artificial Sequence
  source: /note="Description of Artificial Sequence: Synthetic polypeptide"
EVQLLESGGGLVQPGGSLRLSCAASGYTFSYYAMSWVRQAPGKGLEWVSTIGDSGSTTHYADSVKGRFTISRDNSKSTLYLQMNSLRAEDTAVYYCAKGLGPVAAIGDYWGQGTLVTVSS

SEQ ID NO: 6102 - protein, 107 aa, Artificial Sequence
  source: /note="Description of Artificial Sequence: Synthetic polypeptide"
DIQMTQSPSSLSASVGDRITITCQASRDITNYLNWYQQKPGKAPKLLIYDASYLETGVPSTFSGSGSGTHFTLTISSLQPDDFATYYCQQYDSVPLTFGGGTKVEIK

SEQ ID NO: 6103 - protein, 115 aa, Artificial Sequence
  source: /note="Description of Artificial Sequence: Synthetic polypeptide"
QVQLVESGGGVVQPGRSLRLSCVASGFTFDNYGMHWVRQAPGKGLEWLAVISYGGDHQFYGDSVKDRFTISRDNSKNTAYLQMHSLRPDDTAVYYCATGVTPDFWGQGTLVTVSS

SEQ ID NO: 6104 - protein, 121 aa, Artificial Sequence
  source: /note="Description of Artificial Sequence: Synthetic polypeptide"
EVQLVESGGGLVNPGGSLRLSCTASGFSFSTYSMNWVRQAPGKGLEWVSLITSSGSYIYYADSVKGRFTISRDDAKNSLYLQMNSLRAEDTAVYYCANMLAAAGSHYFHYWGQGTLVTVSS

SEQ ID NO: 6105 - protein, 114 aa, Artificial Sequence
  source: /note="Description of Artificial Sequence: Synthetic polypeptide"
QVQLVESGGGVVQPGRSLRLSCAASGFTFSNYAMHWVRQAPGKGLEWVAVIWYDGSKKYYGDSVKGRFTISRDNPKNTLYLQMNSLRVEDTAIYYCVPDAFDMWGQGTMVTVSS

SEQ ID NO: 6106 - protein, 123 aa, Artificial Sequence
  source: /note="Description of Artificial Sequence: Synthetic polypeptide"
QVQLVQSGSELKKPGASVKVSCKASGYTFTSYAMNWVRQAPGQGLEWMGWINTNTGNPTYAQGFTGRFVFSLDTSVSTAYLQISSLKAEDTAVYYCARDRIDGSSWSSWFDPWGQGTLVTVSS

SEQ ID NO: 6107 - protein, 60 aa, Artificial Sequence
  source: /note="Description of Artificial Sequence: Synthetic polypeptide"
AQGFTGRFVFSLDTSVNTAYLQISGLKADDTAVYYCARVGIVGVIVFDYWGQGTLVTVSS

SEQ ID NO: 6108 - protein, 126 aa, Artificial Sequence
  source: /note="Description of Artificial Sequence: Synthetic polypeptide"
QVQLVESGGGVVQPGRSLRLSCAASGFTFSSYGMHWVRQAPGKGLEWVAIIYYDSSQRYYADSVKGRFTISRDNSKNALYLQMNSLRAEDTALYYCARDLPFHYHRSASFAPSDTWGQGTLVTVSS

SEQ ID NO: 6109 - protein, 105 aa, Artificial Sequence
  source: /note="Description of Artificial Sequence: Synthetic polypeptide"
EIVLTQSPATLSLSPGERATLSCWASQNVNHYLVWYQQRPGQAPRLLLYDTSVRAAGIPARFIGSGSGTHFTLTISSLEPEDSAVYYCQHRSDWTFGQGTKVEIK

SEQ ID NO: 6110 - protein, 113 aa, Artificial Sequence
  source: /note="Description of Artificial Sequence: Synthetic polypeptide"
DIVMTQSPDSLAVSLGERATINCRSSQTVLFSSNDKNYLAWYQQKPGQPPKLLIYWASVRASGVPDRFSGSGSGTDFSLTINGLQAEDVAVYYCQQSSTAPLTFGGGTKVEIK

SEQ ID NO: 6111 - protein, 109 aa, Artificial Sequence
  source: /note="Description of Artificial Sequence: Synthetic polypeptide"
SYVLTQPPSVSVAPGQTARITCGGNNIGSRGVHWYQQRPGQAPVLVVYDDSDRPSGIPERFSGSNSGDTATLTISRVEVGDEADYYCQVWDNSSDHLVVFGGGTKLTVL

SEQ ID NO: 6112 - protein, 130 aa, Artificial Sequence; identical to SEQ ID NO: 5901
  source: /note="Description of Artificial Sequence: Synthetic polypeptide"

SEQ ID NO: 6113 - protein, 109 aa, Artificial Sequence
  source: /note="Description of Artificial Sequence: Synthetic polypeptide"
EIVLTQSPGTLSLSPGERATLSCRASQDVNNNYLAWYQQKPGQAPRLLIYGASRRATGVPDRFSGRGSGTDFTLTINRLEPEDFAMYFCQQYGGSPPYTFGQGTKLEIK

SEQ ID NO: 6114 - protein, 129 aa, Artificial Sequence
  source: /note="Description of Artificial Sequence: Synthetic polypeptide"
EVQLLESGGGLVQPGGSLRLSCAASGFTFSSYAMSWVRQAPGKGLEWVSAISGGGDRTYSADSVKGRFTISRDNSKNTLYLQINSLRVEDTAVYYCAQGGGGEMTAVTMDGTYYGMDVWGQGTTVTVSS

SEQ ID NO: 6115 - protein, 119 aa, Artificial Sequence
  source: /note="Description of Artificial Sequence: Synthetic polypeptide"
QVQLVESGGGVVQPGMSLRLSCAASGFSFSSHGMHWVRQTPGKGLEWLAVISYDASNKSYADSVKGRFTISRDNSKKTLYLQMDSLRVEDTALYYCANAFSSSASGGYWGQGTLVTVSS

SEQ ID NO: 6116 - protein, 126 aa, Artificial Sequence; identical to SEQ ID NO: 6108
  source: /note="Description of Artificial Sequence: Synthetic polypeptide"

SEQ ID NO: 6117 - protein, 113 aa, Artificial Sequence
  source: /note="Description of Artificial Sequence: Synthetic polypeptide"
DIQMTQSPSSLSASVGDRVTITCRASESIDNYGISFLAWYQQKPGKAPKLLIYAASNRGSGVPSRFSGSGSGTDFTFTISSLQPEDIATYYCQQSKTVPRTFGQGTKLEIKRT

SEQ ID NO: 6118 - protein, 112 aa, Artificial Sequence; identical to SEQ ID NO: 4184
  source: /note="Description of Artificial Sequence: Synthetic polypeptide"

SEQ ID NO: 6119 - protein, 112 aa, Artificial Sequence; identical to SEQ ID NO: 4178
  source: /note="Description of Artificial Sequence: Synthetic polypeptide"

SEQ ID NO: 6120 - protein, 112 aa, Artificial Sequence; identical to SEQ ID NO: 4179
  source: /note="Description of Artificial Sequence: Synthetic polypeptide"

SEQ ID NO: 6121 - protein, 112 aa, Artificial Sequence; identical to SEQ ID NO: 4180
  source: /note="Description of Artificial Sequence: Synthetic polypeptide"

SEQ ID NO: 6122 - protein, 112 aa, Artificial Sequence [sequence omitted]

SEQ ID NO: 6123 - protein, 112 aa, Artificial Sequence; identical to SEQ ID NO: 4182
  source: /note="Description of Artificial Sequence: Synthetic polypeptide"

SEQ ID NO: 6124 - protein, 112 aa, Artificial Sequence; identical to SEQ ID NO: 4183
  source: /note="Description of Artificial Sequence: Synthetic polypeptide"

SEQ ID NO: 6125 - protein, 112 aa, Artificial Sequence; identical to SEQ ID NO: 4177
  source: /note="Description of Artificial Sequence: Synthetic polypeptide"

SEQ ID NO: 6126 - protein, 249 aa, Artificial Sequence
  source: /note="Description of Artificial Sequence: Synthetic polypeptide"
QVQLVQSGAEVKKPGASVKVSCKASGYTFTSYYMHWVRQAPGQGLEWMGIINPSGGSTSYAQKFQGRVTMTRDTSTSTVYMELSSLRSEDTAVYYCARDENWGFDPWGQGTLVTVSSGGGGSGGGGSGGGGSALSYELTQPPSVSVSPGQTATITCSGHALGDKFVSWYQQGSGQSPVLVIYDDTQRPSGIPGRFSGSNSGNTATLTISGTQAMDEADYFCQAWDSSFVFGGGTKVTVLGAAAHHHHHH

SEQ ID NO: 6127 - protein, 262 aa, Artificial Sequence
  source: /note="Description of Artificial Sequence: Synthetic polypeptide"
EVQLLESGGGLVQPGGSLRLSCAASGFTFSSYAMSWVRQAPGKGLEWVSAISGSGGSTYYADSVKGRFTISRDNSKNTLYLQMNSLRAEDTAVYYCERMGPCTGGSCYDTLGNWGRGTLVTVSSGGGGSGGGGSGGGGSAQSVLTQPPSVSGAPGQRVTISCTGSSSNIGAGYDVHWYQQLPGAAPKLLIRGNGNRPSGVPDRFSVSKSGYSASLAITGLQPADEGVYYCQSYDSSLSGSKVFGQGTKLTVLGAAAHHHHHH

SEQ ID NO: 6128 - protein, 258 aa, Artificial Sequence
  source: /note="Description of Artificial Sequence: Synthetic polypeptide"
QVTLKESGGGLVQPGGSLRLSCAASGFTFSRYVINWVRQAPGKGLEWVSAISVTGGSTAYADSVRGRFTISRDNSKNTLYLQMNSLRAEDTAVYYCTKGQWERGSYYFDYWGRGTLVTVSSGGGGSGGGGSGGGGSAQSVLTQPPSVSGAPGQRVTISCTGSSSNIGDGYDVHWYQQLPGTAPKLLIYGNSHRPSGVPDRFSGSKSDTSASLAITGLQVEDEADYFCHSYDGSVSGWIFGGGTKLTVLGAAAHHHHHH

SEQ ID NO: 6129 - protein, 249 aa, Artificial Sequence; identical to SEQ ID NO: 6126
  source: /note="Description of Artificial Sequence: Synthetic polypeptide"

SEQ ID NO: 6130 - protein, 262 aa, Artificial Sequence
  source: /note="Description of Artificial Sequence: Synthetic polypeptide"
MDYKDDDDKLLPVLTQPPSASGTPGQRVTISCSGSSSNIGSNYVYWYQQLPGTAPKLLIYRNNQRPSGVPDRFSGSKSGTSASLAISGLRSEDEADYYCAAWDDSLNGRVFGGGTKLTVLGEGKSSGSGSESKASEVQLLESGGGLVQPGGSLRLSCAASGFTFSSYAMSWVRQAPGKGLEWVSAISGSGGSTYYADSVKGRFTISRDNSKSTLYLQMNSLRAEDTAIYYCAKGIVGYCSGTSCHAYDFDSWGQGTLVTVSS

SEQ ID NO: 6131 - protein, 254 aa, Artificial Sequence
  source: /note="Description of Artificial Sequence: Synthetic polypeptide"
MDYKDDDDKLLPVLTQPPSASGTPGQRVTISCSGSSSNIGSNYVYWYQQLPGTAPKLLIFRNNQRPSGVPDRFSGSKSGTSASLAISGLRSDDEADYYCVAWDDSLSAWVFGGGTKLTVLGEGKSSGSGSESKASEVQLVQSGGGLVQPGRSLRLSCAASGFPFDDYAMHWVRQAPGKGLEWVSGISWNSGSIGYADSVKGRFTISRDNVKNTLYLQMNNLRVEDTAVYYCAKLAGDIVVIPLWGPGTLVTVSS

SEQ ID NO: 6132 - protein, 122 aa, Artificial Sequence; identical to SEQ ID NO: 3879
  source: /note="Description of Artificial Sequence: Synthetic polypeptide"

SEQ ID NO: 6133 - protein, 122 aa, Artificial Sequence; identical to SEQ ID NO: 3880
  source: /note="Description of Artificial Sequence: Synthetic polypeptide"

SEQ ID NO: 6134 - protein, 126 aa, Artificial Sequence; identical to SEQ ID NO: 3881
  source: /note="Description of Artificial Sequence: Synthetic polypeptide"

SEQ ID NO: 6135 - protein, 130 aa, Artificial Sequence; identical to SEQ ID NO: 3882
  source: /note="Description of Artificial Sequence: Synthetic polypeptide"

SEQ ID NO: 6136 - protein, 119 aa, Artificial Sequence; identical to SEQ ID NO: 3883
  source: /note="Description of Artificial Sequence: Synthetic polypeptide"

SEQ ID NO: 6137 - protein, 129 aa, Artificial Sequence; identical to SEQ ID NO: 3884
  source: /note="Description of Artificial Sequence: Synthetic polypeptide"

SEQ ID NO: 6138 - protein, 129 aa, Artificial Sequence; identical to SEQ ID NO: 3885
  source: /note="Description of Artificial Sequence: Synthetic polypeptide"

SEQ ID NO: 6139 - protein, 441 aa, Artificial Sequence; identical to SEQ ID NO: 3915
  source: /note="Description of Artificial Sequence: Synthetic polypeptide"

SEQ ID NO: 6140 - protein, 98 aa, Artificial Sequence; identical to SEQ ID NO: 3963
  source: /note="Description of Artificial Sequence: Synthetic polypeptide"

SEQ ID NO: 6141 - protein, 125 aa, Artificial Sequence; identical to SEQ ID NO: 3964
  source: /note="Description of Artificial Sequence: Synthetic polypeptide"

SEQ ID NO: 6142 - protein, 126 aa, Artificial Sequence; identical to SEQ ID NO: 3965
  source: /note="Description of Artificial Sequence: Synthetic polypeptide"

SEQ ID NO: 6143 - protein, 126 aa, Artificial Sequence; identical to SEQ ID NO: 3966
  source: /note="Description of Artificial Sequence: Synthetic polypeptide"

SEQ ID NO: 6144 - protein, 126 aa, Artificial Sequence; identical to SEQ ID NO: 3967
  source: /note="Description of Artificial Sequence: Synthetic polypeptide"

SEQ ID NO: 6145 - protein, 118 aa, Artificial Sequence; identical to SEQ ID NO: 3968
  source: /note="Description of Artificial Sequence: Synthetic polypeptide"

SEQ ID NO: 6146 - protein, 133 aa, Artificial Sequence; identical to SEQ ID NO: 3969
  source: /note="Description of Artificial Sequence: Synthetic polypeptide"

SEQ ID NO: 6147 - protein, 119 aa, Artificial Sequence
  source: /note="Description of Artificial Sequence: Synthetic polypeptide"
EEKLEESGGGLVQLGGSMKISCVASGFTLSNYWMDWVRQSPEKGLEWIAEIRLKSNYYSTHYAESVKGRFSISRDDSKGSVSLQMDNLTAEDTGIYFCARNAYWYFDVWGTGTTVTVSS

SEQ ID NO: 6148 - protein, 120 aa, Artificial Sequence
  source: /note="Description of Artificial Sequence: Synthetic polypeptide"
QVQLQQSGAELVRPGTSVKVSCKASGYAFNNYLIEWIKQRPGQGLEWIGVINPGSGGTNHNEKFKVKATLTADKSSSTAYIQLSSLTSDDSAVYFCARSAGTARARFAYWGQGTLVTVSA

SEQ ID NO: 6149 - protein, 120 aa, Artificial Sequence
  source: /note="Description of Artificial Sequence: Synthetic polypeptide"
QIQLVQSGPELKKPGETVKISCKASGYTFTNFGMNWVKQAPGKGLKWMGYINTNTGESIYSEEFKGRFAFSLETSASTAYLQINNLKNEDTATYFCARSRMVTAYGMDYWGQGTSVTVSS

SEQ ID NO: 6150 - protein, 120 aa, Artificial Sequence; identical to SEQ ID NO: 4003
  source: /note="Description of Artificial Sequence: Synthetic polypeptide"

SEQ ID NO: 6151 - protein, 121 aa, Artificial Sequence; identical to SEQ ID NO: 4004
  source: /note="Description of Artificial Sequence: Synthetic polypeptide"

SEQ ID NO: 6152 - protein, 126 aa, Artificial Sequence; identical to SEQ ID NO: 4005
  source: /note="Description of Artificial Sequence: Synthetic polypeptide"

SEQ ID NO: 6153 - protein, 117 aa, Artificial Sequence; identical to SEQ ID NO: 4006
  source: /note="Description of Artificial Sequence: Synthetic polypeptide"

SEQ ID NO: 6154 - protein, 120 aa, Artificial Sequence; identical to SEQ ID NO: 4007
  source: /note="Description of Artificial Sequence: Synthetic polypeptide"

SEQ ID NO: 6155 - protein, 126 aa, Artificial Sequence; identical to SEQ ID NO: 4008
  source: /note="Description of Artificial Sequence: Synthetic polypeptide"

SEQ ID NO: 6156 - protein, 117 aa, Artificial Sequence; identical to SEQ ID NO: 4009
  source: /note="Description of Artificial Sequence: Synthetic polypeptide"

SEQ ID NO: 6157 - protein, 120 aa, Artificial Sequence; identical to SEQ ID NO: 4010
  source: /note="Description of Artificial Sequence: Synthetic polypeptide"

SEQ ID NO: 6158 - protein, 120 aa, Artificial Sequence; identical to SEQ ID NO: 4011
  source: /note="Description of Artificial Sequence: Synthetic polypeptide"

SEQ ID NO: 6159 - protein, 117 aa, Artificial Sequence; identical to SEQ ID NO: 4012
  source: /note="Description of Artificial Sequence: Synthetic polypeptide"

SEQ ID NO: 6160 - protein, 126 aa, Artificial Sequence; identical to SEQ ID NO: 4013
  source: /note="Description of Artificial Sequence: Synthetic polypeptide"

SEQ ID NO: 6161 - protein, 115 aa, Artificial Sequence; identical to SEQ ID NO: 4014
  source: /note="Description of Artificial Sequence: Synthetic polypeptide"

SEQ ID NO: 6162 - protein, 117 aa, Artificial Sequence; identical to SEQ ID NO: 4015
  source: /note="Description of Artificial Sequence: Synthetic polypeptide"

SEQ ID NO: 6163 - protein, 123 aa, Artificial Sequence; identical to SEQ ID NO: 4016
  source: /note="Description of Artificial Sequence: Synthetic polypeptide"

SEQ ID NO: 6164 - protein, 112 aa, Artificial Sequence; identical to SEQ ID NO: 4101
  source: /note="Description of Artificial Sequence: Synthetic polypeptide"

SEQ ID NO: 6165 - protein, 109 aa, Artificial Sequence; identical to SEQ ID NO: 4102
  source: /note="Description of Artificial Sequence: Synthetic polypeptide"

SEQ ID NO: 6166 - protein, 114 aa, Artificial Sequence; identical to SEQ ID NO: 4103
  source: /note="Description of Artificial Sequence: Synthetic polypeptide"

SEQ ID NO: 6167 - protein, 110 aa, Artificial Sequence; identical to SEQ ID NO: 4104
  source: /note="Description of Artificial Sequence: Synthetic polypeptide"

SEQ ID NO: 6168 - protein, 116 aa, Artificial Sequence; identical to SEQ ID NO: 4105
  source: /note="Description of Artificial Sequence: Synthetic polypeptide"

SEQ ID NO: 6169 - protein, 112 aa, Artificial Sequence; identical to SEQ ID NO: 4106
  source: /note="Description of Artificial Sequence: Synthetic polypeptide"

SEQ ID NO: 6170 - protein, 112 aa, Artificial Sequence; identical to SEQ ID NO: 4107
  source: /note="Description of Artificial Sequence: Synthetic polypeptide"

SEQ ID NO: 6171 - protein, 214 aa, Artificial Sequence; identical to SEQ ID NO: 4124
  source: /note="Description of Artificial Sequence: Synthetic polypeptide"

SEQ ID NO: 6172 - protein, 116 aa, Artificial Sequence; identical to SEQ ID NO: 4168
  source: /note="Description of Artificial Sequence: Synthetic polypeptide"

SEQ ID NO: 6173 - protein, 111 aa, Artificial Sequence; identical to SEQ ID NO: 4169
  source: /note="Description of Artificial Sequence: Synthetic polypeptide"

SEQ ID NO: 6174 - protein, 115 aa, Artificial Sequence; identical to SEQ ID NO: 4170
  source: /note="Description of Artificial Sequence: Synthetic polypeptide"

SEQ ID NO: 6175 - protein, 115 aa, Artificial Sequence; identical to SEQ ID NO: 4171
  source: /note="Description of Artificial Sequence: Synthetic polypeptide"

SEQ ID NO: 6176 - protein, 115 aa, Artificial Sequence; identical to SEQ ID NO: 4172
  source: /note="Description of Artificial Sequence: Synthetic polypeptide"

SEQ ID NO: 6177 - protein, 115 aa, Artificial Sequence; identical to SEQ ID NO: 4173
  source: /note="Description of Artificial Sequence: Synthetic polypeptide"

SEQ ID NO: 6178 - protein, 105 aa, Artificial Sequence; identical to SEQ ID NO: 4174
  source: /note="Description of Artificial Sequence: Synthetic polypeptide"

SEQ ID NO: 6179 - protein, 105 aa, Artificial Sequence; identical to SEQ ID NO: 4175
  source: /note="Description of Artificial Sequence: Synthetic polypeptide"

SEQ ID NO: 6180 - protein, 108 aa, Artificial Sequence
  source: /note="Description of Artificial Sequence: Synthetic polypeptide"
DIVMTQSQKFMSTSVGDRVSITCKASQNVGTAVAWYQQRPGQSPKLLIFSASNRYTGVPDRFTGSGSGTDFTLTLSNMQPEDLADYFCQQYSSYPLTFGVGTKLELKR

SEQ ID NO: 6181 - protein, 108 aa, Artificial Sequence
  source: /note="Description of Artificial Sequence: Synthetic polypeptide"
DIQMTQSPSSLSASLGERVSLTCRASQDIGSSLNWLQQEPDGTIKRLIYATSSLDSGVPKRFSGSRSGSDYSLTISSLESEDFVDYYCLQYASFPFTFGSGTKLEIKR

SEQ ID NO: 6182 - protein, 108 aa, Artificial Sequence
  source: /note="Description of Artificial Sequence: Synthetic polypeptide"
DIVMTQSHKFMSTSVGDRVSATCKASQDVGTSVAWYQQKLGQSPKLLIYWTSTRHTGVPDRFTGSGSGTDFTLTISNVQSEDLADYFCQQYNNYPLTFGDGTKLELKR

SEQ ID NO: 6183 - protein, 109 aa, Artificial Sequence; identical to SEQ ID NO: 4197
  source: /note="Description of Artificial Sequence: Synthetic polypeptide"

SEQ ID NO: 6184 - protein, 108 aa, Artificial Sequence; identical to SEQ ID NO: 4198
  source: /note="Description of Artificial Sequence: Synthetic polypeptide"

SEQ ID NO: 6185 - protein, 108 aa, Artificial Sequence; identical to SEQ ID NO: 4199
  source: /note="Description of Artificial Sequence: Synthetic polypeptide"

SEQ ID NO: 6186 - protein, 108 aa, Artificial Sequence; identical to SEQ ID NO: 4200
  source: /note="Description of Artificial Sequence: Synthetic polypeptide"

SEQ ID NO: 6187 - protein, 106 aa, Artificial Sequence; identical to SEQ ID NO: 4201
  source: /note="Description of Artificial Sequence: Synthetic polypeptide"

SEQ ID NO: 6188 - protein, 108 aa, Artificial Sequence; identical to SEQ ID NO: 4202
  source: /note="Description of Artificial Sequence: Synthetic polypeptide"

SEQ ID NO: 6189 - protein, 111 aa, Artificial Sequence; identical to SEQ ID NO: 4203
  source: /note="Description of Artificial Sequence: Synthetic polypeptide"

SEQ ID NO: 6190 - protein, 111 aa, Artificial Sequence; identical to SEQ ID NO: 4204
  source: /note="Description of Artificial Sequence: Synthetic polypeptide"

SEQ ID NO: 6191 - protein, 107 aa, Artificial Sequence; identical to SEQ ID NO: 4205
  source: /note="Description of Artificial Sequence: Synthetic polypeptide"

SEQ ID NO: 6192 - protein, 108 aa, Artificial Sequence; identical to SEQ ID NO: 4206
  source: /note="Description of Artificial Sequence: Synthetic polypeptide"

SEQ ID NO: 6193 - protein, 109 aa, Artificial Sequence; identical to SEQ ID NO: 4207
  source: /note="Description of Artificial Sequence: Synthetic polypeptide"

SEQ ID NO: 6194 - protein, 110 aa, Artificial Sequence; identical to SEQ ID NO: 4208
  source: /note="Description of Artificial Sequence: Synthetic polypeptide"

SEQ ID NO: 6195 - protein, 108 aa, Artificial Sequence; identical to SEQ ID NO: 4209
  source: /note="Description of Artificial Sequence: Synthetic polypeptide"

SEQ ID NO: 6196 - protein, 108 aa, Artificial Sequence; identical to SEQ ID NO: 4210
  source: /note="Description of Artificial Sequence: Synthetic polypeptide"

SEQ ID NO: 6197 - protein, 440 aa, Artificial Sequence; identical to SEQ ID NO: 3834
  source: /note="Description of Artificial Sequence: Synthetic polypeptide"

SEQ ID NO: 6198 - protein, 443 aa, Artificial Sequence; identical to SEQ ID NO: 3822
  source: /note="Description of Artificial Sequence: Synthetic polypeptide"

SEQ ID NO: 6199 - protein, 443 aa, Artificial Sequence; identical to SEQ ID NO: 3823
  source: /note="Description of Artificial Sequence: Synthetic polypeptide"

SEQ ID NO: 6200 - protein, 443 aa, Artificial Sequence; identical to SEQ ID NO: 3824
  source: /note="Description of Artificial Sequence: Synthetic polypeptide"

SEQ ID NO: 6201 - protein, 443 aa, Artificial Sequence; identical to SEQ ID NO: 3825
  source: /note="Description of Artificial Sequence: Synthetic polypeptide"

SEQ ID NO: 6202 - protein, 454 aa, Artificial Sequence; identical to SEQ ID NO: 3826
  source: /note="Description of Artificial Sequence: Synthetic polypeptide"

SEQ ID NO: 6203 - protein, 454 aa, Artificial Sequence; identical to SEQ ID NO: 3827
  source: /note="Description of Artificial Sequence: Synthetic polypeptide"

SEQ ID NO: 6204 - protein, 454 aa, Artificial Sequence; identical to SEQ ID NO: 3827
  source: /note="Description of Artificial Sequence: Synthetic polypeptide"

SEQ ID NO: 6205 - protein, 443 aa, Artificial Sequence; identical to SEQ ID NO: 3829
  source: /note="Description of Artificial Sequence: Synthetic polypeptide"

SEQ ID NO: 6206 - protein, 443 aa, Artificial Sequence; identical to SEQ ID NO: 3830
  source: /note="Description of Artificial Sequence: Synthetic polypeptide"

SEQ ID NO: 6207 - protein, 443 aa, Artificial Sequence; identical to SEQ ID NO: 3831
  source: /note="Description of Artificial Sequence: Synthetic polypeptide"

SEQ ID NO: 6208 - protein, 451 aa, Artificial Sequence; identical to SEQ ID NO: 3835
  source: /note="Description of Artificial Sequence: Synthetic polypeptide"

SEQ ID NO: 6209 - protein, 441 aa, Artificial Sequence; identical to SEQ ID NO: 3832
  source: /note="Description of Artificial Sequence: Synthetic polypeptide"

SEQ ID NO: 6210 - protein, 443 aa, Artificial Sequence; identical to SEQ ID NO: 3833
  source: /note="Description of Artificial Sequence: Synthetic polypeptide"

SEQ ID NO: 6211 - protein, 451 aa, Artificial Sequence; identical to SEQ ID NO: 3836
  source: /note="Description of Artificial Sequence: Synthetic polypeptide"

SEQ ID NO: 6212 - protein, 451 aa, Artificial Sequence; identical to SEQ ID NO: 3816
  source: /note="Description of Artificial Sequence: Synthetic polypeptide"

SEQ ID NO: 6213 - protein, 451 aa, Artificial Sequence; identical to SEQ ID NO: 3817
  source: /note="Description of Artificial Sequence: Synthetic polypeptide"

SEQ ID NO: 6214 - protein, 440 aa, Artificial Sequence; identical to SEQ ID NO: 3818
  source: /note="Description of Artificial Sequence: Synthetic polypeptide"

SEQ ID NO: 6215 - protein, 440 aa, Artificial Sequence; identical to SEQ ID NO: 3819
  source: /note="Description of Artificial Sequence: Synthetic polypeptide"

SEQ ID NO: 6216 - protein, 440 aa, Artificial Sequence; identical to SEQ ID NO: 3820
  source: /note="Description of Artificial Sequence: Synthetic polypeptide"

SEQ ID NO: 6217 - protein, 440 aa, Artificial Sequence; identical to SEQ ID NO: 3821
  source: /note="Description of Artificial Sequence: Synthetic polypeptide"

SEQ ID NO: 6218 - protein, 440 aa, Artificial Sequence; identical to SEQ ID NO: 3837
  source: /note="Description of Artificial Sequence: Synthetic polypeptide"

SEQ ID NO: 6219 - protein, 446 aa, Artificial Sequence
  source: /note="Description of Artificial Sequence: Synthetic polypeptide"
EVQLVESGGGLVQPGGSLRLSCAASGFTFSGTWIHWVRQAPGKGLEWVAAITPADGSTNYADSVKGRFTISADTSKNTAYLQMNSLRAEDTAVYYCATYMFAMDYWGQGTLVTVSSASTKGPSVFPLAPSSKSTSGGTAALGCLVKDYFPEPVTVSWNSGALTSGVHTFPAVLQSSGLYSLSSVVTVPSSSLGTQTYICNVNHKPSNTKVDKKVEPKSCDKTHTCPPCPAPELLGGPSVFLFPPKPKDTLMISRTPEVTCVVVDVSHEDPEVKFNWYVDGVEVHNAKTKPREEQYNSTYRVVSVLTVLHQDWLNGKEYKCKVSNKALPAPIEKTISKAKGQPREPQVYTLPPSREEMTKNQVSLTCLVKGFYPSDIAVEWESNGQPENNYKTTPPVLDSDGSFFLYSKLTVDKSRWQQGNVFSCSVMHEALHNHYTQKSLSLSPGK

SEQ ID NO: 6220 - protein, 454 aa, Artificial Sequence
  source: /note="Description of Artificial Sequence: Synthetic polypeptide"
EVQLVESGGGLVQPGGSLRLSCAASGFTFSDIAMSWVRQAPGKGLEWVSWIYPSGGNTYYADSVKGRFTISADTSKNTAYLQMNSLRAEDTAVYYCARSYILSQKSATWAFDYWGQGTLVTVSSASTKGPSVFPLAPSSKSTSGGTAALGCLVKDYFPEPVTVSWNSGALTSGVHTFPAVLQSSGLYSLSSVVTVPSSSLGTQTYICNVNHKPSNTKVDKKVEPKSCDKTHTCPPCPAPELLGGPSVFLFPPKPKDTLMISRTPEVTCVVVDVSHEDPEVKFNWYVDGVEVHNAKTKPREEQYNSTYRVVSVLTVLHQDWLNGKEYKCKVSNKALPAPIEKTISKAKGQPREPQVYTLPPSREEMTKNQVSLTCLVKGFYPSDIAVEWESNGQPENNYKTTPPVLDSDGSFFLYSKLTVDKSRWQQGNVFSCSVMHEALHNHYTQKSLSLSPGK

SEQ ID NO: 6221 - protein, 115 aa, Artificial Sequence
  source: /note="Description of Artificial Sequence: Synthetic polypeptide"
NIVMTQSPKSMSMSVGERVTLTCKASENVVTYVSWYQQKPEQSPKLLIYGASNRYTGVPDRFTGSGSATDFTLTISSVQAEDLADYHCGQGYSYPYTFGGGTKLEIKRADAAPTV

SEQ ID NO: 6222 - protein, 123 aa, Artificial Sequence
  source: /note="Description of Artificial Sequence: Synthetic polypeptide"
QVQLQQSGPELVRPGTSVKMSCKASGYTFTNYWIGWAKQRPGHGLEWIGDIYPGGDYTNYNEKFKGKATLTADKSSSTAYMQFSSLTSEDSAIYYCARWGLGYYFDYWGQGITLTVSSAKTTP

SEQ ID NO: 6223 - protein, 115 aa, Artificial Sequence; identical to SEQ ID NO: 3991
  source: /note="Description of Artificial Sequence: Synthetic polypeptide"

SEQ ID NO: 6224 - protein, 115 aa, Artificial Sequence; identical to SEQ ID NO: 3992
  source: /note="Description of Artificial Sequence: Synthetic polypeptide"

SEQ ID NO: 6225 - protein, 115 aa, Artificial Sequence; identical to SEQ ID NO: 3993
  source: /note="Description of Artificial Sequence: Synthetic polypeptide"

SEQ ID NO: 6226 - protein, 115 aa, Artificial Sequence; identical to SEQ ID NO: 3994
  source: /note="Description of Artificial Sequence: Synthetic polypeptide"

SEQ ID NO: 6227 - protein, 115 aa, Artificial Sequence; identical to SEQ ID NO: 3995
  source: /note="Description of Artificial Sequence: Synthetic polypeptide"

SEQ ID NO: 6228 - protein, 115 aa, Artificial Sequence; identical to SEQ ID NO: 3996
  source: /note="Description of Artificial Sequence: Synthetic polypeptide"

SEQ ID NO: 6229 - protein, 115 aa, Artificial Sequence; identical to SEQ ID NO: 3997
  source: /note="Description of Artificial Sequence: Synthetic polypeptide"

SEQ ID NO: 6230 - protein, 115 aa, Artificial Sequence; identical to SEQ ID NO: 3998
  source: /note="Description of Artificial Sequence: Synthetic polypeptide"

SEQ ID NO: 6231 - protein, 115 aa, Artificial Sequence; identical to SEQ ID NO: 3999
  source: /note="Description of Artificial Sequence: Synthetic polypeptide"

SEQ ID NO: 6232 - protein, 115 aa, Artificial Sequence; identical to SEQ ID NO: 4000
  source: /note="Description of Artificial Sequence: Synthetic polypeptide"

SEQ ID NO: 6233 - protein, 113 aa, Artificial Sequence; identical to SEQ ID NO: 4001
  source: /note="Description of Artificial Sequence: Synthetic polypeptide"

SEQ ID NO: 6234 - protein, 113 aa, Artificial Sequence; identical to SEQ ID NO: 4001
  source: /note="Description of Artificial Sequence: Synthetic polypeptide"

SEQ ID NO: 6235 - protein, 120 aa, Artificial Sequence; identical to SEQ ID NO: 4003
  source: /note="Description of Artificial Sequence: Synthetic polypeptide"

SEQ ID NO: 6236 - protein, 121 aa, Artificial Sequence; identical to SEQ ID NO: 4004
  source: /note="Description of Artificial Sequence: Synthetic polypeptide"

SEQ ID NO: 6237 - protein, 126 aa, Artificial Sequence; identical to SEQ ID NO: 4005
  source: /note="Description of Artificial Sequence: Synthetic polypeptide"

SEQ ID NO: 6238 - protein, 117 aa, Artificial Sequence; identical to SEQ ID NO: 4006
  source: /note="Description of Artificial Sequence: Synthetic polypeptide"

SEQ ID NO: 6239 - protein, 120 aa, Artificial Sequence; identical to SEQ ID NO: 4007
  source: /note="Description of Artificial Sequence: Synthetic polypeptide"

SEQ ID NO: 6240 - protein, 126 aa, Artificial Sequence; identical to SEQ ID NO: 4008
  source: /note="Description of Artificial Sequence: Synthetic polypeptide"

SEQ ID NO: 6241 - protein, 117 aa, Artificial Sequence; identical to SEQ ID NO: 4009
  source: /note="Description of Artificial Sequence: Synthetic polypeptide"

SEQ ID NO: 6242 - protein, 120 aa, Artificial Sequence; identical to SEQ ID NO: 4010
  source: /note="Description of Artificial Sequence: Synthetic polypeptide"

SEQ ID NO: 6243 - protein, 120 aa, Artificial Sequence; identical to SEQ ID NO: 4011
  source: /note="Description of Artificial Sequence: Synthetic polypeptide"

SEQ ID NO: 6244 - protein, 117 aa, Artificial Sequence; identical to SEQ ID NO: 4012
  source: /note="Description of Artificial Sequence: Synthetic polypeptide"

SEQ ID NO: 6245 - protein, 126 aa, Artificial Sequence; identical to SEQ ID NO: 4013
  source: /note="Description of Artificial Sequence: Synthetic polypeptide"

SEQ ID NO: 6246 - protein, 115 aa, Artificial Sequence; identical to SEQ ID NO: 4014
  source: /note="Description of Artificial Sequence: Synthetic polypeptide"

SEQ ID NO: 6247 - protein, 117 aa, Artificial Sequence; identical to SEQ ID NO: 4015
  source: /note="Description of Artificial Sequence: Synthetic polypeptide"

SEQ ID NO: 6248 - protein, 123 aa, Artificial Sequence; identical to SEQ ID NO: 4016
  source: /note="Description of Artificial Sequence: Synthetic polypeptide"

SEQ ID NO: 6249 - protein, 121 aa, Artificial Sequence
  source: /note="Description of Artificial Sequence: Synthetic polypeptide"
EVQLQESGAELVKPGASVKLSCTASGFNIKDTYMHWVKQRPEQGLEWIGRIDPANGNTKYDPNFQGKATITSDTSSNTAYLQLSSLTSEDTAVYYCARWGYYGTSGYFDVWGQGTTVTVSS

SEQ ID NO: 6250 - protein, 121 aa, Artificial Sequence
  source: /note="Description of Artificial Sequence: Synthetic polypeptide"
QVQLVESGGGLVQPGRSLRLSCAASGFTFDDYAMHWVRQAPGKGLDWVSAITWNSGHIDYADSVEGRFAVSRDNAKNALYLQMNSLRPEDTAVYYCTKASYLSTSSSLDNWGQGTLVTVSS

SEQ ID NO: 6251 - protein, 121 aa, Artificial Sequence [sequence omitted]

SEQ ID NO: 6252 - protein, 119 aa, Artificial Sequence
  source: /note="Description of Artificial Sequence: Synthetic polypeptide"
QVQLQQSGAELVRSGASVKLSCTASGFNIKDYFMQWVKQRPEQGLEWIGWIDPENGETGYAPKFQGKATMTADTASNTAYLQLSSLTSEDTALYYCNAPSVVAKYFDVWGAGTTVTVSS

SEQ ID NO: 6253 - protein, 118 aa, Artificial Sequence
  source: /note="Description of Artificial Sequence: Synthetic polypeptide"
QVQLQQSGAELVRSGASVKLSCTASGFNIKDYFVQWVKQRPEQGLEWGWIDPENGETGYAPKFQGKATMTADTASNTAYLQLSSLTSEDTALYFCNAPSVVAKYFDVWGAGTTVTVSS

SEQ ID NO: 6254 - protein, 114 aa, Artificial Sequence
  source: /note="Description of Artificial Sequence: Synthetic polypeptide"
QVQLQQSRPELVRPGASVKMSCRASAYTFTTYWMHWVRQRPGQGLEWIGMIDPSNSDTWLNQKFKDKATLNVDRSSNTAYMQLTSLTSEDSAVYYCARTGFDYWGQGTTLTVSS

SEQ ID NO: 6255 - protein, 114 aa, Artificial Sequence
  source: /note="Description of Artificial Sequence: Synthetic polypeptide"
QVHVKQSGPELVRPGASVKMSCKASAYTFTTYWMHWVKQRPGQGLEWIGMIDPYNSETWLNQKFKDKATLNVDRSSNTAYMKLSSLTSEDSAVYYCARTGFDYWGQGTTLTVSS

SEQ ID NO: 6256 - protein, 116 aa, Artificial Sequence
  source: /note="Description of Artificial Sequence: Synthetic polypeptide"
EVQLVESGGGLVQPGGSLRLSCAASGFTFSGTWIHWVRQAPGKGLEWVAAITPADGSTNYADSVKGRFTISADTSKNTAYLQMNSLRAEDTAVYYCATYMFAMDYWGQGTLVTVSS

SEQ ID NO: 6257 - protein, 124 aa, Artificial Sequence
  source: /note="Description of Artificial Sequence: Synthetic polypeptide"
EVQLVESGGGLVQPGGSLRLSCAASGFTFSGNAMSWVRQAPGKGLEWVSWIYPSGGNTYYADSVKGRFTISADTSKNTAYLQMNSLRAEDTAVYYCARSYILSYPSITWAFDYWGQGTLVTVSS

SEQ ID NO: 6258 - protein, 124 aa, Artificial Sequence
  source: /note="Description of Artificial Sequence: Synthetic polypeptide"
EVQLVESGGGLVQPGGSLRLSCAASGFSFSGIAMSWVRQAPGKGLEWVSWIYPSGGNTYYADSVKGRFTISADTSKNTAYLQMNSLRAEDTAVYYCARSYILSYPSITWAFDYWGQGTLVTVSS

SEQ ID NO: 6259 - protein, 124 aa, Artificial Sequence; identical to SEQ ID NO: 6258
  source: /note="Description of Artificial Sequence: Synthetic polypeptide"

SEQ ID NO: 6260 - protein, 124 aa, Artificial Sequence
  source: /note="Description of Artificial Sequence: Synthetic polypeptide"
EVQLVESGGGLVQPGGSLRLSCAASGFSFTGIAMSWVRQAPGKGLEWVSWIYPSGGNTYYADSVKGRFTISADTSKNTAYLQMNSLRAEDTAVYYCARSYILSYPSITWAFDYWGQGTLVTVSS

SEQ ID NO: 6261 - protein, 124 aa, Artificial Sequence
  source: /note="Description of Artificial Sequence: Synthetic polypeptide"
EVQLVESGGGLVQPGGSLRLSCAASGFTFTGKAMSWVRQAPGKGLEWVSWIYPSGGNTYYADSVKGRFTISADTSKNTAYLQMNSLRAEDTAVYYCARSYILSYPSITWAFDYWGQGTLVTVSS

SEQ ID NO: 6262 - protein, 124 aa, Artificial Sequence
  source: /note="Description of Artificial Sequence: Synthetic polypeptide"
EVQLVESGGGLVQPGGSLRLSCAASGFTFSGIAIAWVRQAPGKGLEWVSAIYPSGGNTYYADSVKGRFTISADTSKNTAYLQMNSLRAEDTAVYYCARAYILDNTSITWAFDYWGQGTLVTVSS

SEQ ID NO: 6263 - protein, 124 aa, Artificial Sequence
  source: /note="Description of Artificial Sequence: Synthetic polypeptide"
EVQLVESGGGLVQPGGSLRLSCAASGFTFSDIAMSWVRQAPGKGLEWVSWIYPSGGNTYYADSVKGRFTISADTSKNTAYLQMNSLRAEDTAVYYCARSYILSQKSATWAFDYWGQGTLVTVSS

SEQ ID NO: 6264 - protein, 124 aa, Artificial Sequence
  source: /note="Description of Artificial Sequence: Synthetic polypeptide"
EVQLVESGGGLVQPGGSLRLSCAASGFTFSGNAMSWVRQAPGKGLEWVSWIYPSGGNTYYADSVKGRFTISADTSKNTAYLQMNSLRAEDTAVYYCARSYILDYRFFTWAFDYWGQGTLVTVSS

SEQ ID NO: 6265 - protein, 124 aa, Artificial Sequence; identical to SEQ ID NO: 6257
  source: /note="Description of Artificial Sequence: Synthetic polypeptide"

SEQ ID NO: 6266 - protein, 124 aa, Artificial Sequence
  source: /note="Description of Artificial Sequence: Synthetic polypeptide"
EVQLVESGGGLVQPGGSLRLSCAASGFTFSGNAMSWVRQAPGKGLEWVSWIYPSGGNTYYADSVKGRFTISADTSKNTAYLQMNSLRAEDTAVYYCARSYILSYETSTWAFDYWGQGTLVTVSS

SEQ ID NO: 6267 - protein, 124 aa, Artificial Sequence
  source: /note="Description of Artificial Sequence: Synthetic polypeptide"
EVQLVESGGGLVQPGGSLRLSCAASGFTFSGNAMSWVRQAPGKGLEWVSWIYPSGGNTYYADSVKGRFTISADTSKNTAYLQMNSLRAEDTAVYYCARSYILLHLSATWAFDYWGQGTLVTVSS

SEQ ID NO: 6268 - protein, 219 aa, Artificial Sequence; identical to SEQ ID NO: 4044
  source: /note="Description of Artificial Sequence: Synthetic polypeptide"

SEQ ID NO: 6269 - protein, 219 aa, Artificial Sequence; identical to SEQ ID NO: 4045
  source: /note="Description of Artificial Sequence: Synthetic polypeptide"

SEQ ID NO: 6270 - protein, 220 aa, Artificial Sequence; identical to SEQ ID NO: 4046
  source: /note="Description of Artificial Sequence: Synthetic polypeptide"

SEQ ID NO: 6271 - protein, 219 aa, Artificial Sequence; identical to SEQ ID NO: 4047
  source: /note="Description of Artificial Sequence: Synthetic polypeptide"

SEQ ID NO: 6272 - protein, 220 aa, Artificial Sequence; identical to SEQ ID NO: 4048
  source: /note="Description of Artificial Sequence: Synthetic polypeptide"

SEQ ID NO: 6273 - protein, 220 aa, Artificial Sequence; identical to SEQ ID NO: 4049
  source: /note="Description of Artificial Sequence: Synthetic polypeptide"

SEQ ID NO: 6274 - protein, 220 aa, Artificial Sequence; identical to SEQ ID NO: 4050
  source: /note="Description of Artificial Sequence: Synthetic polypeptide"

SEQ ID NO: 6275 - protein, 219 aa, Artificial Sequence; identical to SEQ ID NO: 4051
  source: /note="Description of Artificial Sequence: Synthetic polypeptide"

SEQ ID NO: 6276 - protein, 219 aa, Artificial Sequence; identical to SEQ ID NO: 4052
  source: /note="Description of Artificial Sequence: Synthetic polypeptide"

SEQ ID NO: 6277 - protein, 219 aa, Artificial Sequence; identical to SEQ ID NO: 4053
  source: /note="Description of Artificial Sequence: Synthetic polypeptide"

SEQ ID NO: 6278 - protein, 219 aa, Artificial Sequence; identical to SEQ ID NO: 4054
  source: /note="Description of Artificial Sequence: Synthetic polypeptide"

SEQ ID NO: 6279 - protein, 219 aa, Artificial Sequence; identical to SEQ ID NO: 4055
  source: /note="Description of Artificial Sequence: Synthetic polypeptide"

SEQ ID NO: 6280 - protein, 219 aa, Artificial Sequence; identical to SEQ ID NO: 4056
  source: /note="Description of Artificial Sequence: Synthetic polypeptide"

SEQ ID NO: 6281 - protein, 219 aa, Artificial Sequence; identical to SEQ ID NO: 4057
  source: /note="Description of Artificial Sequence: Synthetic polypeptide"

SEQ ID NO: 6282 - protein, 219 aa, Artificial Sequence; identical to SEQ ID NO: 4058
  source: /note="Description of Artificial Sequence: Synthetic polypeptide"

SEQ ID NO: 6283 - protein, 219 aa, Artificial Sequence; identical to SEQ ID NO: 4059
  source: /note="Description of Artificial Sequence: Synthetic polypeptide"

SEQ ID NO: 6284 - protein, 219 aa, Artificial Sequence; identical to SEQ ID NO: 4060
  source: /note="Description of Artificial Sequence: Synthetic polypeptide"

SEQ ID NO: 6285 - protein, 220 aa, Artificial Sequence; identical to SEQ ID NO: 4061
  source: /note="Description of Artificial Sequence: Synthetic polypeptide"

SEQ ID NO: 6286 - protein, 219 aa, Artificial Sequence; identical to SEQ ID NO: 4062
  source: /note="Description of Artificial Sequence: Synthetic polypeptide"

SEQ ID NO: 6287 - protein, 219 aa, Artificial Sequence; identical to SEQ ID NO: 4063
  source: /note="Description of Artificial Sequence: Synthetic polypeptide"

SEQ ID NO: 6288 - protein, 219 aa, Artificial Sequence; identical to SEQ ID NO: 4064
  source: /note="Description of Artificial Sequence: Synthetic polypeptide"

SEQ ID NO: 6289 - protein, 219 aa, Artificial Sequence; identical to SEQ ID NO: 4065
  source: /note="Description of Artificial Sequence: Synthetic polypeptide"

SEQ ID NO: 6290 - protein, 214 aa, Artificial Sequence
  source: /note="Description of Artificial Sequence: Synthetic polypeptide"
DIQMTQSPSSLSASVGDRVTITCRASQDVSISLAWYQQKPGKAPKLLIYGASNLESGVPSRFSGSGSGTDFTLTISSLQPEDFATYYCQQHYTLPFTFGQGTKVEIKRTVAAPSVFIFPPSDEQLKSGTASVVCLLNNFYPREAKVQWKVDNALQSGNSQESVTEQDSKDSTYSLSSTLTLSKADYEKHKVYACEVTHQGLSSPVTKSFNRGEC

SEQ ID NO: 6291 - protein, 214 aa, Artificial Sequence
  source: /note="Description of Artificial Sequence: Synthetic polypeptide"
DIQMTQSPSSLSASVGDRVTITCRASQSISSYLAWYQQKPGKAPKLLIYGASSRASGVPSRFSGSGSGTDFTLTISSLQPEDFATYYCQQSYSTPITFGQGTKVEIKRTVAAPSVFIFPPSDEQLKSGTASVVCLLNNFYPREAKVQWKVDNALQSGNSQESVTEQDSKDSTYSLSSTLTLSKADYEKHKVYACEVTHQGLSSPVTKSFNRGEC

SEQ ID NO: 6292 - protein, 107 aa, Artificial Sequence
  source: /note="Description of Artificial Sequence: Synthetic polypeptide"
NIVMTQSPKSMSMSVGERVTLTCKASENVVTYVSWYQQKPEQSPKLLIYGASNRYTGVPDRFTGSGSATDFTLTISSVQAEDLADYHCGQGYSYPYTFGGGTKLEIK

SEQ ID NO: 6293 - protein, 118 aa, Artificial Sequence
  source: /note="Description of Artificial Sequence: Synthetic polypeptide"
QVQLQQSGPELVRPGTSVKMSCKASGYTFTNYWIGWAKQRPGHGLEWIGDIYPGGDYTNYNEKFKGKATLTADKSSSTAYMQFSSLTSEDSAIYYCARWGLGYYFDYWGQGITLTVSS

SEQ ID NO: 6294 - protein, 113 aa, Artificial Sequence; identical to SEQ ID NO: 4189
  source: /note="Description of Artificial Sequence: Synthetic polypeptide"

SEQ ID NO: 6295 - protein, 113 aa, Artificial Sequence; identical to SEQ ID NO: 4190
  source: /note="Description of Artificial Sequence: Synthetic polypeptide"

SEQ ID NO: 6296 - protein, 113 aa, Artificial Sequence; identical to SEQ ID NO: 4191
  source: /note="Description of Artificial Sequence: Synthetic polypeptide"

SEQ ID NO: 6297 - protein, 115 aa, Artificial Sequence; identical to SEQ ID NO: 4192
  source: /note="Description of Artificial Sequence: Synthetic polypeptide"

SEQ ID NO: 6298 - protein, 115 aa, Artificial Sequence; identical to SEQ ID NO: 4193
  source: /note="Description of Artificial Sequence: Synthetic polypeptide"

SEQ ID NO: 6299 - protein, 115 aa, Artificial Sequence; identical to SEQ ID NO: 4194
  source: /note="Description of Artificial Sequence: Synthetic polypeptide"

SEQ ID NO: 6300 - protein, 113 aa, Artificial Sequence; identical to SEQ ID NO: 4195
  source: /note="Description of Artificial Sequence: Synthetic polypeptide"

SEQ ID NO: 6301 - protein, 113 aa, Artificial Sequence; identical to SEQ ID NO: 4196
  source: /note="Description of Artificial Sequence: Synthetic polypeptide"

SEQ ID NO: 6302 - protein, 109 aa, Artificial Sequence; identical to SEQ ID NO: 4197
  source: /note="Description of Artificial Sequence: Synthetic polypeptide"

SEQ ID NO: 6303 - protein, 108 aa, Artificial Sequence; identical to SEQ ID NO: 4198
  source: /note="Description of Artificial Sequence: Synthetic polypeptide"

SEQ ID NO: 6304 - protein, 108 aa, Artificial Sequence; identical to SEQ ID NO: 4199
  source: /note="Description of Artificial Sequence: Synthetic polypeptide"

SEQ ID NO: 6305 - protein, 108 aa, Artificial Sequence; identical to SEQ ID NO: 4200
  source: /note="Description of Artificial Sequence: Synthetic polypeptide"

SEQ ID NO: 6306 - protein, 106 aa, Artificial Sequence; identical to SEQ ID NO: 4201
  source: /note="Description of Artificial Sequence: Synthetic polypeptide"

SEQ ID NO: 6307 - protein, 108 aa, Artificial Sequence; identical to SEQ ID NO: 4202
  source: /note="Description of Artificial Sequence: Synthetic polypeptide"

SEQ ID NO: 6308 - protein, 111 aa, Artificial Sequence; identical to SEQ ID NO: 4203
  source: /note="Description of Artificial Sequence: Synthetic polypeptide"

SEQ ID NO: 6309 - protein, 111 aa, Artificial Sequence; identical to SEQ ID NO: 4204
  source: /note="Description of Artificial Sequence: Synthetic polypeptide"

SEQ ID NO: 6310 - protein, 107 aa, Artificial Sequence; identical to SEQ ID NO: 4205
  source: /note="Description of Artificial Sequence: Synthetic polypeptide"

SEQ ID NO: 6311 - protein, 108 aa, Artificial Sequence; identical to SEQ ID NO: 4206
  source: /note="Description of Artificial Sequence: Synthetic polypeptide"

SEQ ID NO: 6312 - protein, 109 aa, Artificial Sequence; identical to SEQ ID NO: 4207
  source: /note="Description of Artificial Sequence: Synthetic polypeptide"

SEQ ID NO: 6313 - protein, 110 aa, Artificial Sequence; identical to SEQ ID NO: 4208
  source: /note="Description of Artificial Sequence: Synthetic polypeptide"

SEQ ID NO: 6314 - protein, 108 aa, Artificial Sequence; identical to SEQ ID NO: 4209
  source: /note="Description of Artificial Sequence: Synthetic polypeptide"

SEQ ID NO: 6315 - protein, 108 aa, Artificial Sequence; identical to SEQ ID NO: 4210
  source: /note="Description of Artificial Sequence: Synthetic polypeptide"

SEQ ID NO: 6316 - protein, 113 aa, Artificial Sequence
  source: /note="Description of Artificial Sequence: Synthetic polypeptide"
DIELTQSPASLAVSAGEKVTMSCKSSQSLLSSRTRKNYLAWYQQKPGQSPKLLIYWASTRESGVPDRFTGSGSGTDFTLTISSVQAEDLAVYYCKQSYNLWTFGAGTKLELKR

SEQ ID NO: 6317 - protein, 107 aa, Artificial Sequence [sequence omitted]

SEQ ID NO: 6318 - protein, 107 aa, Artificial Sequence
  source: /note="Description of Artificial Sequence: Synthetic polypeptide"
DIQMTQSPSSLSASIGDRVTITCRASQGIRNYLAWYQQKPGKAPKLLIYAASTLQSGVPSRFSGSGSGTDFTLTISSLQPEDVATYYCQKYNSAPYAFGQGTKVEIK

SEQ ID NO: 6319 - protein, 113 aa, Artificial Sequence
  source: /note="Description of Artificial Sequence: Synthetic polypeptide"
DVVMTQTPLSLPVSLGDQASISCRSSQSLVHSNGNTYLHWYLQKPGQSPKLLIYKVSNRFSGVPDRFSGSGSGTDFTLKISRVEAEDLGVYFCSQSTHVPYTFGGGTKLEIKR

SEQ ID NO: 6320 - protein, 113 aa, Artificial Sequence
  source: /note="Description of Artificial Sequence: Synthetic polypeptide"
DVVMTQTPLSLPVSLGDQASISCRSSQSLVHSDGNTYLHWYLQKPGQSPKLLIYKVSNRFSGVPDRFSGSGSGTDFTLKISRVEAEDLGVYFCSQSTYVSYTFGGGTKLEIKR

SEQ ID NO: 6321 - protein, 113 aa, Artificial Sequence
  source: /note="Description of Artificial Sequence: Synthetic polypeptide"
DVVLTQTPLSLPVSLGDQASISCRSSQSLVHSNGNTYLHWYLQKPGQSPKLLIYKVSNRFSGVPDRFSGSGSGTDFTLKISRVEAEDLGVYFCSQSTHVPYTFGGGTKLEIKR

SEQ ID NO: 6322 - protein, 113 aa, Artificial Sequence
  source: /note="Description of Artificial Sequence: Synthetic polypeptide"
DVVLTQTPLSLPVSLGDQASISCRSSQSLVHSNGSTYLHWYLQKPGQSPKLLIYKVSNRFSGVPDRFSGSGSGTDFTLKISRVEAEDLGVYFCSQSTHVPYTFGGGTKLEIKR

SEQ ID NO: 6323 - protein, 108 aa, Artificial Sequence
  source: /note="Description of Artificial Sequence: Synthetic polypeptide"
DIQMTQSPSSLSASVGDRVTITCRASQDVSTAVAWYQQKPGKAPKLLIYSASFLYSGVPSRFSGSGSGTDFTLTISSLQPEDFATYYCQQSYTTPPTFGQGTKVEIKR

SEQ ID NO: 6324 - protein, 108 aa, Artificial Sequence
  source: /note="Description of Artificial Sequence: Synthetic polypeptide"
DIQMTQSPSSLSASVGDRVTITCRASQDVSTAVAWYQQKPGKAPKLLIYSASFLYSGVPSRFSGSGSGTDFTLTISSLQPEDFATYYCQQSYWMPPTFGQGTKVEIKR

SEQ ID NO: 6325 - protein, 108 aa, Artificial Sequence
  source: /note="Description of Artificial Sequence: Synthetic polypeptide"
DIQMTQSPSSLSASVGDRVTITCRASQNVDRSLAWYQQKPGKAPKLLIYAASSLESGVPSRFSGSGSGTDFTLTISSLQPEDFATYYCQQHYTLPFTFGQGTKVEIKR

SEQ ID NO: 6326 - protein, 108 aa, Artificial Sequence
  source: /note="Description of Artificial Sequence: Synthetic polypeptide"
DIQMTQSPSSLSASVGDRVTITCRASQDVSTAVAWYQQKPGKAPKLLIYSASFLYSGVPSRFSGSGSGTDFTLTISSLQPEDFATYYCQQSYTIPMTFGQGTKVEIKR

SEQ ID NO: 6327 - protein, 108 aa, Artificial Sequence
  source: /note="Description of Artificial Sequence: Synthetic polypeptide"
DIQMTQSPSSLSASVGDRVTITCRASQDVSISLAWYQQKPGKAPKLLIYGASNLESGVPSRFSGSGSGTDFTLTISSLQPEDFATYYCQQHYTLPFTFGQGTKVEIKR

SEQ ID NO: 6328 - protein, 108 aa, Artificial Sequence
  source: /note="Description of Artificial Sequence: Synthetic polypeptide"
DIQMTQSPSSLSASVGDRVTITCRASQDVKKSLAWYQQKPGKAPKLLIYGASNLESGVPSRFSGSGSGTDFTLTISSLQPEDFATYYCQQHYTLPLTFGQGTKVEIKR

SEQ ID NO: 6329 - protein, 108 aa, Artificial Sequence
  source: /note="Description of Artificial Sequence: Synthetic polypeptide"
DIQMTQSPSSLSASVGDRVTITCRASQSISSYLAWYQQKPGKAPKLLIYGASSRASGVPSRFSGSGSGTDFTLTISSLQPEDFATYYCQQSYSTPITFGQGTKVEIKR

SEQ ID NO: 6330 - protein, 108 aa, Artificial Sequence
  source: /note="Description of Artificial Sequence: Synthetic polypeptide"
DIQMTQSPSSLSASVGDRVTITCRASQSISSYLAWYQQKPGKAPKLLIYGASSRASGVPSRFSGSGSGTDFTLTISSLQPEDFATYYCQQAFSTPITFGQGTKVEIKR

SEQ ID NO: 6331 - protein, 108 aa, Artificial Sequence
  source: /note="Description of Artificial Sequence: Synthetic polypeptide"
DIQMTQSPSSLSASVGDRVTITCRASQSISSYLAWYQQKPGKAPKLLIYGASSRASGVPSRFSGSGSGTDFTLTISSLQPEDFATYYCQQSFLSPITFGQGTKVEIKR

SEQ ID NO: 6332 - protein, 108 aa, Artificial Sequence
  source: /note="Description of Artificial Sequence: Synthetic polypeptide"
DIQMTQSPSSLSASVGDRVTITCRASQSISSYLAWYQQKPGKAPKLLIYGASSRASGVPSRFSGSGSGTDFTLTISSLQPEDFATYYCQQAYLTPVTFGQGTKVEIKR

SEQ ID NO: 6333 - protein, 108 aa, Artificial Sequence
  source: /note="Description of Artificial Sequence: Synthetic polypeptide"
DIQMTQSPSSLSASVGDRVTITCRASQSISSYLAWYQQKPGKAPKLLIYGASSRASGVPSRFSGSGSGTDFTLTISSLQPEDFATYYCQQAFISPITFGQGTKVEIKR

SEQ ID NO: 6334 - protein, 108 aa, Artificial Sequence
  source: /note="Description of Artificial Sequence: Synthetic polypeptide"
DIQMTQSPSSLSASVGDRVTITCRASQSISSYLAWYQQKPGKAPKLLIYGASSRASGVPSRFSGSGSGTDFTLTISSLQPEDFATYYCQQGFSTPITFGQGTKVEIKR

SEQ ID NO: 6335 - protein, 108 aa, Artificial Sequence
  source: /note="Description of Artificial Sequence: Synthetic polypeptide"
DIQMTQSPSSLSASVGDRVTITCRASQSISSYLAWYQQKPGKAPKLLIYGASSLASGVPSRFSGSGSGTDFTLTISSLQPEDFATYYCQQAFLSPITFGQGTKVEIKR

SEQ ID NO: 6336 - protein, 108 aa, Artificial Sequence
  source: /note="Description of Artificial Sequence: Synthetic polypeptide"
DIQMTQSPSSLSASVGDRVTITCRASQSISSYLAWYQQKPGKAPKLLIYGASSLDSGVPSRFSGSGSGTDFTLTISSLQPEDFATYYCQQSYSTPITFGQGTKVEIKR

SEQ ID NO: 6337 - protein, 108 aa, Artificial Sequence
  source: /note="Description of Artificial Sequence: Synthetic polypeptide"
DIQMTQSPSSLSASVGDRVTITCRASQSISSYLAWYQQKPGKAPKLLIYGASSRASGVPSRFSGSGSGTDFTLTISSLQPEDFATYYCQQAYLSPITFGQGTKVEIKR

SEQ ID NO: 6338 - protein, 250 aa, Artificial Sequence
  source: /note="Description of Artificial Sequence: Synthetic polypeptide"
QVQLQQSGAEVKNPGSSVKVSCKPSRDTLSGDNFSSSVFSWVRQAPGQGLEWMGGIIPIFGVANYAQKFQPRVTISADMSTNTAYMELSSLRSEDTAVYYCASTWELRNAFDIWGKGTLVTVSSGGGGSGGGGSGGGGSQSVLTQPPSVSAAPGQKVTISCSGSTSNIGNNYVSWYQQHPGKAPKLMIYDVSKRPSGVPDRFSGSKSGNSASLDISGLQSEDEADYYCAAWDDSLSEFLFGTGTKLTVLG

SEQ ID NO: 6339 - protein, 251 aa, Artificial Sequence
  source: /note="Description of Artificial Sequence: Synthetic polypeptide"
EVQLVQSGAEVKKPGASVRVSCKASGYSFTNFYMHWLRQAPGRGPEWMGIIDPSNNYTYYAQKRVTVTRDTSTSTVYMELSSLRSEDTAIYYCARPVYYYDSSGYYYGLNAFDISWGRGTMVTVSGGGGSGGGGSGGGGSQSVLTQPPSVSAAPGQKVTISCSGSTSNIGNNYVSWYQQHPGKAPKLMIYDVSKRPSGVPDRFSGSKSGNSASLDISGLQSEDEADYYCAAWDDSLSEFLFGTGTKLTVLG

SEQ ID NO: 6340 - protein, 242 aa, Artificial Sequence
  source: /note="Description of Artificial Sequence: Synthetic polypeptide"
QMQLQESGAEVKKPGSSVKVSCKASGDTFRSYIISWVRQAPGQGLEWMGGIIPMFGTTNYAQQFQGKVTITADDSTSTSYMELRSLRSDDTAVYYCARGTNYMDVWGQGTTVTVSSGGGGSGGGGSGGGGSQSVLTQPPSVSAAPGQKVTISCSGSTSNIGNNYVSWYQQHPGKAPKLMIYDVSKRPSGVPDRFSGSKSGNSASLDISGLQSEDEADYYCAAWDDSLSEFLFGTGTKLTVLG

SEQ ID NO: 6341 - protein, 248 aa, Artificial Sequence
  source: /note="Description of Artificial Sequence: Synthetic polypeptide"
QVQLQQSGAEVKKPGSSVKVSCKASGGTFSSYAISWVRQAPGQGLEWMGGSIPKFRTANYAKKFQGRVTITADESTSTAYMELSSLRSDDTAVYYCARGSAYNLRNAFDIWGQGTTVTVSSGGGGSGGGGSGGGGSAQSVVTQPPSVSAAPGQRVTISCSGSSSNIANNYVSWYQQLPGTAPKLLIYDNNKRPSGIPDRFSGSKSGTSATLGITGLQTGDEADYYCGTWDSSLSAYVFGTGTKVTVLG

SEQ ID NO: 6342 - protein, 244 aa, Artificial Sequence
  source: /note="Description of Artificial Sequence: Synthetic polypeptide"
QVQLQQSGGGVVQPGRSLRLSCAASGFTFDDYAMHWVRQAPGKGLEWVSGISWNSGSIGYADSVKGRFTISRDNAKNSLYLQMNSLRAEDTALYYCAKTGGGNSLDYWGRGTLVTVSSGGGGSGGGGSGGGGSQSVLTQPPSVSAAPGQKVTISCSGSTSNIGNNYVSWYQQHPGKAPKLMIYDVSKRPSGVPDRFSGSKSGNSASLDISGLQSEDEADYYCAAWDDSLSEFLFGTGTKLTVLG

SEQ ID NO: 6343 - protein, 247 aa, Artificial Sequence
  source: /note="Description of Artificial Sequence: Synthetic polypeptide"
QVQLLQSAPEVKKPGSSVRVSCKTSGGTFSSQLINWVRQPPGQGPEWMGGIIPIFGTANYAQKFQGRVTITADESTSTAYMELSSLRSEDTAVYYCARDLTAGRFDAFHIWGRGTLVTVSSGGGGSGGGGSGGGGSQSVLTQPPSVSAAPGQKVTISCSGSTSNIGNNYVSWYQQHPGKAPKLMIYDVSKRPSGVPDRFSGSKSGNSASLDISGLQSEDEADYYCAAWDDSLSEFLFGTGTKLTVLG

SEQ ID NO: 6344 - protein, 248 aa, Artificial Sequence
  source: /note="Description of Artificial Sequence: Synthetic polypeptide"
QVQLQQSGAEVKKPGSSVKVSCKASGGTFSSYAISWVRQAPGQGLEWMGGSIPKFRTANYAKKFQGRVTITADESTSTAYMELSSLRSDDTAVYYCARGSTYNLRNAFDIWGKGTLVTVSSGGGGSGGGGSGGGGSAQSVVTQPPSASGTPGQRVTISCSGGSSNIGRNTVNWYQQVPGTAPKLLIYTNNQRPSGVPDRFSGSKSGTSASLAISGLQSEDEADYYCAAWDDSLNDVEFGGGTKLTVLG

SEQ ID NO: 6345 - protein, 243 aa, Artificial Sequence
  source: /note="Description of Artificial Sequence: Synthetic polypeptide"
QVQLQESGGGLEQPGRSLRLSCTASGFTFDDYPMHWVRQAPGKGLEWVSGISGNSDRIAYADSVKGRFTISRDNSKNTLWLQMNSLRAEDTAIYYCARAARNWFDPWGQGTLVTVSSGGGGSGGGGSGGGGSQSVLTQPPSVSAAPGQKVTISCSGSTSNIGNNYVSWYQQHPGKAPKLMIYDVSKRPSGVPDRFSGSKSGNSASLDISGLQSEDEADYYCAAWDDSLSEFLFGTGTKLTVLG

SEQ ID NO: 6346 - protein, 255 aa, Artificial Sequence
  source: /note="Description of Artificial Sequence: Synthetic polypeptide"
QVQLVQSGAEVKKPGFSVKVSCKASGGSFSNYVISWLRQAPGQGLEWMGGIMPIFGNANYAQKFQDRVTITADKSTSTAYMELSSLRSDDTAVYYCARDQIVVDPVTKGAYYSGLDVWGRGTMVTVSSGGGGSGGGGSGGGGSAQSVLTQPPSASGTPGQRVTISCSGGSSNIGANAITWFQQLPGTAPKLLIYHNNQRPSGVPDRFSGSKSGTSGSLAISGLQSEDEADYYCAVWDNSLNAMLFGGGTKLTVLG

SEQ ID NO: 6347 - protein, 245 aa, Artificial Sequence
  source: /note="Description of Artificial Sequence: Synthetic polypeptide"
EVQLVQSGAEVKRPGASVKISCRTSGYTFTSYYIHWVRQAPGQGLEWLAIINPTAGNTYYTQDFQDRVTVTRDTSTSTVYMELRGLNSEDTAVYYCASPYGVRNAFDVWGQGTMVTVSSGGGGSGGGGSGGGGSQSVLTQPPSVSAAPGQKVTISCSGSTSNIGNNYVSWYQQHPGKAPKLMIYDVSKRPSGVPDRFSGSKSGNSASLDISGLQSEDEADYYCAAWDDSLSEFLFGTGTKLTVLG

SEQ ID NO: 6348 - protein, 248 aa, Artificial Sequence
  source: /note="Description of Artificial Sequence: Synthetic polypeptide"
EVQLLESGGGLVQPGGSLRLSCAASGFTFSSYAMSWVRQAPGKGLEWVSAISGSGGSTYYADSVKGRFTISRDNSKNTLYLQMNSLRAEDTAVYYCARQGSGSYPPPAFDSWGRGTMVTVSSGGGGSGGGGSGGGGSAQAVVIQEPSLTVSPGGTVTLTCAFNSGQVTSGFYPNWFQQKPGQPPRSLIYNTDNKHSWTPARFSGSLLGGKAALTLSGVQPDDEADYYCLLYYDRSLVFGGGTKLTVLG

SEQ ID NO: 6349 - protein, 243 aa, Artificial Sequence
  source: /note="Description of Artificial Sequence: Synthetic polypeptide"
QVQLVQSGGGLVQPGRSLRLSCAASGFTFDDYAMHWVRQAPGKGLEWVSGISWNSASIGYADSVKGRFTISRDNAKNSLYLQMNSLRGEDTALYYCAKGARDALDIWGKGTLLTVSSGGGGSGGGGSGGGGSQSVLTQPPSVSAAPGQKVTISCSGSTSNIGNNYVSWYQQHPGKAPKLMIYDVSKRPSGVPDRFSGSKSGNSASLDISGLQSEDEADYYCAAWDDSLSEFLFGTGTKLTVLG

SEQ ID NO: 6350 - protein, 251 aa, Artificial Sequence
  source: /note="Description of Artificial Sequence: Synthetic polypeptide"
QVQLQQSGPGLVKPSQTLSLTCAISGDSVSSNTAAWSWIRQSPSRGLEWLGRTYYSRSKWYKDYAVSVKSRITINPDTSKNQFSLQLDSVTPEDTAVYYCTREGYYDYSGVVDYWGQGTTVIVSSGGGGSGGGGSGGGGSQSVLTQPPSASGSPGQSVTISCTGTSSDVGGYNYVSWYQQHPGKAPKFMIYDVSKRPSGVSNRFSGSKSGNTASLTISGVQAEDEADYYCSSYTSASTVIFGGGTKLTVLG

SEQ ID NO: 6351 - protein, 245 aa, Artificial Sequence
  source: /note="Description of Artificial Sequence: Synthetic polypeptide"
QVQLQQSGAEVKKPGSSVKVSCKASGDTFSSNTISWVRQAPGQGLEWMGGIIPIIGTPHYAQKFQGRVTITADRSTSTAYMELTNLRSEDTAVYFCARNRVGTSSFDFWGQGTMVTVSSGGGGSGGGGSGGGGSALPVLTQPPSASGTPGQRVTISCSGSSSNIGSNTVNWYQQLPGTAPKLFIYSNNQRPSGVPDRFSGSKSGTSASLAISGLQSEDEADYYCSSWDDSLNLIFGGGTKVTVLG

SEQ ID NO: 6352 - protein, 245 aa, Artificial Sequence
  source: /note="Description of Artificial Sequence: Synthetic polypeptide"
QVQLVQSGAEVKKPGTSVKVSCKAAGDTFRSYIISWVRQAPGQGLEWVGGIIPMFGTSNYAQKFQGRVTITADDSTSTAYMELSSLRSEDTAVYYCARTAQGGSYYNYWGQGTPVTVSSGGGGSGGGGSGGGGSQSVLTQPPSVSAAPGQKVTISCSGSTSNIGNNYVSWYQQHPGKAPKLMIYDVSKRPSGVPDRFSGSKSGNSASLDISGLQSEDEADYYCAAWDDGLSEFLFGTGTKLTVLG

SEQ ID NO: 6353 - protein, 247 aa, Artificial Sequence
  source: /note="Description of Artificial Sequence: Synthetic polypeptide"
QVQLQQSGAEVKKPGASVKVSCKASGYTFTGYYMHWVRQAPGQRLEWMGGILPFFGTTSYAQNFHGRLTITADESTRTAYMELSSLKSEDTAVYYCARDESADPKNAFDIWGRGTMVTVSSGGGGSGGGGSGGGGSQSVLTQPPPVSAAPGQKVTISCSGSTSNIGNNYVSWYQQRPGKAPKLMIYDVSKRPSGVPDRFSGSKSGNSASLDISGLQSEDEADYYCAAWDDSLSEFLFGTGTKLTVLG

SEQ ID NO: 6354 - protein, 246 aa, Artificial Sequence
  source: /note="Description of Artificial Sequence: Synthetic polypeptide"
QVQLQQSGNEVKKPGSSVKISCKASGAPFNSYVISWVRQAPGQGLEWVGGVVPIFGTAHYAHQFQGRVTIIADKSTSTVYMELRGLTSDDTAEYFCARQGPYGKLDDWGQGTMVTVSSGGGGSGGGGSGGGGSALSYELTQPPSASGTPGQRVTISCSGSSSNIGSNYVYWYQQFPGTAPKLLMYRNNQRPSGVPDRFSGSKFGTSASLAISGLRSEDEADYYCAAWDDSLTGRVFGGGTKVTVLG

SEQ ID NO: 6355 - protein, 248 aa, Artificial Sequence
  source: /note="Description of Artificial Sequence: Synthetic polypeptide"
QVQLQQSGAEVKKPGSSVNVSCKASGGTFDTFGISWVRQAPGKGLEWMGVIAHDGSISYYADSVKGRFTFSRDNSKNTVSLQMNSPRPEDTAVYYCAKGEYDSSGYNAFDIWGKGTLVTVSSGGGGSGGGGSGGGGSQSVLTQPPSVSAAPGQKVTVSCSGSTSNIGNNYVSWYQQHPGKAPKLMIYDVSKRPSGVPDRFSGSKSGNSASLDISGLQSEDEADYYCAAWDDSLSEFLFGTGTKLTVLG

SEQ ID NO: 6356 - protein, 242 aa, Artificial Sequence
  source: /note="Description of Artificial Sequence: Synthetic polypeptide"
QVQLVQSGAEVKKPGSSVRISCKASGGSFRTYVVSWVRQAPGQGLEWMGGIIPVYGTPNYAQKFQGRVTITADEPTRTTYMELSSLRSEDTGVYYCARNGGGLDYWGQGTMVTVSSGGGGSGGGGSGGGGSQSVLTQPPSVSAAPGQKVTISCSGSTSNIGNNYVSWYQQHPGKAPKLMIYDVSKRPSGVPDRFSGSKSGNSASLDISGLQSEDEADYYCAAWDDSLSEFLFGTGTKLTVLG

SEQ ID NO: 6357 - protein, 263 aa, Artificial Sequence
  source: /note="Description of Artificial Sequence: Synthetic polypeptide"
SLALQLLSTQDLTMGWSCIILFLVATATGVHSQTSSPSADGGGGSGGGGSDIQMTQSPSSLSASVGDRVTITCKASQNIDKYLNWYQQKPGKAPKLLIYNTNNLQTGVPSRFSGSGSGTDFTFTISSLQPEDIATYYCLQHISRPRTFGQGTKVEIKTVAAPSVFIFPPSDEQLKSGTASVVCLLNNFYPREAKVQWKVDNALQSGNSQESVTEQDSKDSTYSLSSTLTLSKADYEKHKVYACEVTHQGLSSPVTKSFNRGEC

SEQ ID NO: 6358 - protein, 259 aa, Artificial Sequence
  source: /note="Description of Artificial Sequence: Synthetic polypeptide"
STQDLTMGWSCIILFLVATATGVHSQSLLPAIVELGGGGSGGGGSDIQMTQSPSSLSASVGDRVTITCKASQNIDKYLNWYQQKPGKAPKLLIYNTNNLQTGVPSRFSGSGSGTDFTFTISSLQPEDIATYYCLQHISRPRTFGQGTKVEIKRTVAAPSVFIFPPSDEQLKSGTASVVCLLNNFYPREAKVQWKVDNALQSGNSQESVTEQDSKDSTYSLSSTLTLSKADYEKHKVYACEVTHQGLSSPVTKSFNRGEC

SEQ ID NO: 6359 - protein, 107 aa, Artificial Sequence
  source: /note="Description of Artificial Sequence: Synthetic polypeptide"
DIVMTQTPSSLSASVGDRVTITCRASQDISKFLNWYQQKPGKAPKLLIYHTSRLHSGVPSRFSGSGSGTDFTLTISSLQPEDFATYYCQQGNTLPYTFGPGTKVDIK

SEQ ID NO: 6360 - protein, 107 aa, Artificial Sequence
  source: /note="Description of Artificial Sequence: Synthetic polypeptide"
DIVMTQTPSSLSASVGDRVTITCRASQDISKYLNWYQQKPGKAIKLLIYHTSRLHSGVPSRFSGSGSGTDFTLTISSLQPEDFATYYCQQGNTLPYTFGPGTKVDIK

SEQ ID NO: 6361 - protein, 107 aa, Artificial Sequence
  source: /note="Description of Artificial Sequence: Synthetic polypeptide"
DIVMTQTPSSLSASVGDRVTITCRASQDISKYLNWYQQKPGKALKLLIYHTSRLHSGVPSRFSGSGSGTDFTLTISSLQPEDFATYYCQQGNTLPYTFGPGTKVDIK

SEQ ID NO: 6362 - protein, 107 aa, Artificial Sequence
  source: /note="Description of Artificial Sequence: Synthetic polypeptide"
DIVMTQTPSSLSASVGDRVTITCRASQDISKYLNWYQQKPGKAPKLLIYHTSRLHSGVPSRFSGSGSGTDFTLTISSLQPEDFATYYCQQGATLPYTFGPGTKVDIK

SEQ ID NO: 6363 - protein, 449 aa, Artificial Sequence
  source: /note="Description of Artificial Sequence: Synthetic polypeptide"
QVQLVQSGAEVKKPGSSVKVSCKASGGTFSSYGISWVRQAPGQGLEWMGGIIPIFGTANYAQKFQGRVTITADESTSTAYMELSSLRSEDTAVYYCARYDGIYGELDFWGQGTLVTVSSASTKGPSVFPLAPSSKSTSGGTAALGCLVKDYFPEPVTVSWNSGALTSGVHTFPAVLQSSGLYSLSSVVTVPSSSLGTQTYICNVNHKPSNTKVDKKVEPKSCDKTHTCPPCPAPELLGGPSVFLFPPKPKDTLMISRTPEVTCVVVDVSHEDPEVKFNWYVDGVEVHNAKTKPREEQYNSTYRVVSVLTVLHQDWLNGKEYKCKVSNKALPAPIEKTISKAKGQPREPQVYTLPPSRDELTKNQVSLTCLVKGFYPSDIAVEWESNGQPENNYKTTPPVLDSDGSFFLYSKLTVDKSRWQQGNVFSCSVMHEALHNHYTQKSLSLSPGK

SEQ ID NO: 6364 - protein, 216 aa, Artificial Sequence
  source: /note="Description of Artificial Sequence: Synthetic polypeptide"
EIVLTQSPATLSLSPGERATLSCRASQSVSDAYLAWYQQKPGQAPRLLIYDASSRATGVPARFSGSGSGTDFTLTISSLEPEDFAVYYCHQYIQLHSFTFGQGTKVEIKRTVAAPSVFIFPPSDEQLKSGTASVVCLLNNFYPREAKVQWKVDNALQSGNSQESVTEQDSKDSTYSLSSTLTLSKADYEKHKVYACEVTHQGLSSPVTKSFNRGEC

SEQ ID NO: 6365 - protein, 750 aa, Artificial Sequence
  source: /note="Description of Artificial Sequence: Synthetic polypeptide"
EVQLVQSGAEVKKPGESLKISCKGSGYSFTGYNMNWVRQMPGKGLEWMGNIDPYYGGTTYNRKFKGQVTISADKSISTAYLQWSSLKASDTAMYYCARSVGPFDSWGQGTLVTVSSGGGGSGGGGSGGGGSGGGGSGGGGSEIVLTQSPATLSLSPGERATLSCRASENVYSYLAWYQQKPGQAPRLLIYFAKTLAEGIPARFSGSGSGTDFTLTISSLEPEDFAVYYCQHHSDNPWTFGQGTKVEIKSSSEPKSSDKTHTCPPCPAPEAAGAPSVFLFPPKPKDTLMISRTPEVTCVVVDVSHEDPEVKFNWYVDGVEVHNAKTKPREEQYNSTYRVVSVLTVLHQDWLNGKAYACAVSNKALPAPIEKTISKAKGQPREPQVYTLPPSRDELTKNQVSLTCLVKGFYPSDIAVEWESNGQPENNYKTTPPVLDSDGSFFLYSKLTVDKSRWQQGNVFSCSVMHEALHNHYTQKSLSLSPGQRHNNSSLNTGTQMAGHSPNSQVQLVESGGGVVQPGRSLRLSCKASGYTFTRSTMHWVRQAPGQGLEWIGYINPSSAYTNYNQKFKDRFTISADKSKSTAFLQMDSLRPEDTGVYFCARPQVHYDYNGFPYWGQGTPVTVSSGGGGSGGGGSGGGGSAQDIQMTQSPSSLSASVGDRVTMTCSASSSVSYMNWYQQKPGKAPKRWIYDSSKLASGVPARFSGSGSGTDYTLTISSLQPEDFATYYCQQWSRNPPTFGGGTKLQITSSS

SEQ ID NO: 6366 - protein, 750 aa, Artificial Sequence
  source: /note="Description of Artificial Sequence: Synthetic polypeptide"
EVQLVQSGAEVKKPGESLKISCKGSGYSFTGYNMNWVRQMPGKGLEWMGNIDPYYGGTTYNRKFKGQVTISADKSISTAYLQWSSLKASDTAMYYCARSVGPFDSWGQGTLVTVSSGGGGSGGGGSGGGGSGGGGSGGGGSEIVLTQSPATLSLSPGERATLSCRASENVYSYLAWYQQKPGQAPRLLIYFAKTLAEGIPARFSGSGSGTDFTLTISSLEPEDFAVYYCQHHSDNPWTFGQGTKVEIKSSSEPKSSDKTHTCPPCPAPEAAGAPSVFLFPPKPKDTLMISRTPEVTCVVVDVSQEDPEVQFNWYVDGVEVHNAKTKPREEQFASTYRVVSVLTVLHQDWLNGKEYKCKVSNKGLPSSIEKTISKAKGQPREPQVYTLPPSQEEMTKNQVSLTCLVKGFYPSDIAVEWESNGQPENNYKTTPPVLDSDGSFFLYSRLTVDKSRWQEGNVFSCSVMHEALHNHYTQKSLSLSPGQRHNNSSLNTGTQMAGHSPNSQVQLVESGGGVVQPGRSLRLSCKASGYTFTRSTMHWVRQAPGQGLEWIGYINPSSAYTNYNQKFKDRFTISADKSKSTAFLQMDSLRPEDTGVYFCARPQVHYDYNGFPYWGQGTPVTVSSGGGGSGGGGSGGGGSAQDIQMTQSPSSLSASVGDRVTMTCSASSSVSYMNWYQQKPGKAPKRWIYDSSKLASGVPARFSGSGSGTDYTLTISSLQPEDFATYYCQQWSRNPPTFGGGTKLQITSSS

SEQ ID NO: 6367 - protein, 747 aa, Artificial Sequence
  source: /note="Description of Artificial Sequence: Synthetic polypeptide"
EVQLVQSGAEVKKPGESLKISCKGSGYSFTGYNMNWVRQMPGKGLEWMGNIDPYYGGTTYNRKFKGQVTISADKSISTAYLQWSSLKASDTAMYYCARSVGPFDSWGQGTLVTVSSGGGGSGGGGSGGGGSGGGGSGGGGSEIVLTQSPATLSLSPGERATLSCRASENVYSYLAWYQQKPGQAPRLLIYFAKTLAEGIPARFSGSGSGTDFTLTISSLEPEDFAVYYCQHHSDNPWTFGQGTKVEIKSSSEPKSSDKTHTCPPCPAPEAAGAPSVFLFPPKPKDTLMISRTPEVTCVVVDVSHEDPEVKFNWYVDGVEVHNAKTKPREEQYNSTYRVVSVLTVLHQDWLNGKAYACAVSNKALPAPIEKTISKAKGQPREPQVYTLPPSRDELTKNQVSLTCLVKGFYPSDIAVEWESNGQPENNYKTTPPVLDSDGSFFLYSKLTVDKSRWQQGNVFSCSVMHEALHNHYTQKSLSLSPGGGGGSGGGGSGGGGSPNSQVQLVESGGGVVQPGRSLRLSCKASGYTFTRSTMHWVRQAPGQGLEWIGYINPSSAYTNYNQKFKDRFTISADKSKSTAFLQMDSLRPEDTGVYFCARPQVHYDYNGFPYWGQGTPVTVSSGGGGSGGGGSGGGGSAQDIQMTQSPSSLSASVGDRVTMTCSASSSVSYMNWYQQKPGKAPKRWIYDSSKLASGVPARFSGSGSGTDYTLTISSLQPEDFATYYCQQWSRNPPTFGGGTKLQITSSS

SEQ ID NO: 6368 - protein, 740 aa, Artificial Sequence
  source: /note="Description of Artificial Sequence: Synthetic polypeptide"
EVQLVQSGAEVKKPGESLKISCKGSGYSFTGYNMNWVRQMPGKGLEWMGNIDPYYGGTTYNRKFKGQVTISADKSISTAYLQWSSLKASDTAMYYCARSVGPFDSWGQGTLVTVSSGGGGSGGGGSGGGGSGGGGSGGGGSEIVLTQSPATLSLSPGERATLSCRASENVYSYLAWYQQKPGQAPRLLIYFAKTLAEGIPARFSGSGSGTDFTLTISSLEPEDFAVYYCQHHSDNPWTFGQGTKVEIKSSSEPKSSDKTHTCPPCPAPEAAGAPSVFLFPPKPKDTLMISRTPEVTCVVVDVSHEDPEVKFNWYVDGVEVHNAKTKPREEQYNSTYRVVSVLTVLHQDWLNGKAYACAVSNKALPAPIEKTISKAKGQPREPQVYTLPPSRDELTKNQVSLTCLVKGFYPSDIAVEWESNGQPENNYKTTPPVLDSDGSFFLYSKLTVDKSRWQQGNVFSCSVMHEALHNHYTQKSLSLSPGSSLNTGTQPNSQVQLVESGGGVVQPGRSLRLSCKASGYTFTRSTMHWVRQAPGQGLEWIGYINPSSAYTNYNQKFKDRFTISADKSKSTAFLQMDSLRPEDTGVYFCARPQVHYDYNGFPYWGQGTPVTVSSGGGGSGGGGSGGGGSAQDIQMTQSPSSLSASVGDRVTMTCSASSSVSYMNWYQQKPGKAPKRWIYDSSKLASGVPARFSGSGSGTDYTLTISSLQPEDFATYYCQQWSRNPPTFGGGTKLQITSSS

SEQ ID NO: 6369 - protein, 747 aa, Artificial Sequence
  source: /note="Description of Artificial Sequence: Synthetic polypeptide"
EVQLVQSGAEVKKPGESLKISCKGSGYSFTGYNMNWVRQMPGKGLEWMGNIDPYYGGTTYNRKFKGQVTISADKSISTAYLQWSSLKASDTAMYYCARSVGPFDSWGQGTLVTVSSGGGGSGGGGSGGGGSGGGGSGGGGSEIVLTQSPATLSLSPGERATLSCRASENVYSYLAWYQQKPGQAPRLLIYFAKTLAEGIPARFSGSGSGTDFTLTISSLEPEDFAVYYCQHHSDNPWTFGQGTKVEIKSSSEPKSSDKTHTCPPCPAPEAAGAPSVFLFPPKPKDTLMISRTPEVTCVVVDVSQEDPEVQFNWYVDGVEVHNAKTKPREEQFASTYRVVSVLTVLHQDWLNGKEYKCKVSNKGLPSSIEKTISKAKGQPREPQVYTLPPSQEEMTKNQVSLTCLVKGFYPSDIAVEWESNGQPENNYKTTPPVLDSDGSFFLYSRLTVDKSRWQEGNVFSCSVMHEALHNHYTQKSLSLSPGGGGGSGGGGSGGGGSPNSQVQLVESGGGVVQPGRSLRLSCKASGYTFTRSTMHWVRQAPGQGLEWIGYINPSSAYTNYNQKFKDRFTISADKSKSTAFLQMDSLRPEDTGVYFCARPQVHYDYNGFPYWGQGTPVTVSSGGGGSGGGGSGGGGSAQDIQMTQSPSSLSASVGDRVTMTCSASSSVSYMNWYQQKPGKAPKRWIYDSSKLASGVPARFSGSGSGTDYTLTISSLQPEDFATYYCQQWSRNPPTFGGGTKLQITSSS

SEQ ID NO: 6370 - protein, 740 aa, Artificial Sequence
  source: /note="Description of Artificial Sequence: Synthetic polypeptide"
EVQLVQSGAEVKKPGESLKISCKGSGYSFTGYNMNWVRQMPGKGLEWMGNIDPYYGGTTYNRKFKGQVTISADKSISTAYLQWSSLKASDTAMYYCARSVGPFDSWGQGTLVTVSSGGGGSGGGGSGGGGSGGGGSGGGGSEIVLTQSPATLSLSPGERATLSCRASENVYSYLAWYQQKPGQAPRLLIYFAKTLAEGIPARFSGSGSGTDFTLTISSLEPEDFAVYYCQHHSDNPWTFGQGTKVEIKSSSEPKSSDKTHTCPPCPAPEAAGAPSVFLFPPKPKDTLMISRTPEVTCVVVDVSQEDPEVQFNWYVDGVEVHNAKTKPREEQFASTYRVVSVLTVLHQDWLNGKEYKCKVSNKGLPSSIEKTISKAKGQPREPQVYTLPPSQEEMTKNQVSLTCLVKGFYPSDIAVEWESNGQPENNYKTTPPVLDSDGSFFLYSRLTVDKSRWQEGNVFSCSVMHEALHNHYTQKSLSLSPGSSLNTGTQPNSQVQLVESGGGVVQPGRSLRLSCKASGYTFTRSTMHWVRQAPGQGLEWIGYINPSSAYTNYNQKFKDRFTISADKSKSTAFLQMDSLRPEDTGVYFCARPQVHYDYNGFPYWGQGTPVTVSSGGGGSGGGGSGGGGSAQDIQMTQSPSSLSASVGDRVTMTCSASSSVSYMNWYQQKPGKAPKRWIYDSSKLASGVPARFSGSGSGTDYTLTISSLQPEDFATYYCQQWSRNPPTFGGGTKLQITSSS

SEQ ID NO: 6371 - protein, 743 aa, Artificial Sequence
  source: /note="Description of Artificial Sequence: Synthetic polypeptide"
EVQLVQSGAEVKKPGESLKISCKGSGYSFTGYNMNWVRQMPGKGLEWMGNIDPYYGGTTYNRKFKGQVTISADKSISTAYLQWSSLKASDTAMYYCARSVGPFDSWGQGTLVTVSSGGGGSGGGGSGGGGSGGGGSGGGGSEIVLTQSPATLSLSPGERATLSCRASENVYSYLAWYQQKPGQAPRLLIYFAKTLAEGIPARFSGSGSGTDFTLTISSLEPEDFAVYYCQHHSDNPWTFGQGTKVEIKSSSEPKSSDKTHTCPPCPAPEAAGAPSVFLFPPKPKDTLMISRTPEVTCVVVDVSHEDPEVKFNWYVDGVEVHNAKTKPREEQYNSTYRVVSVLTVLHQDWLNGKAYACAVSNKALPAPIEKTISKAKGQPREPQVYTLPPSRDELTKNQVSLTCLVKGFYPSDIAVEWESNGQPENNYKTTPPVLDSDGSFFLYSKLTVDKSRWQQGNVFSCSVMHEALHNHYTQKSLSLSPGEVQIPLTESYSPNSQVQLVESGGGVVQPGRSLRLSCKASGYTFTRSTMHWVRQAPGQGLEWIGYINPSSAYTNYNQKFKDRFTISADKSKSTAFLQMDSLRPEDTGVYFCARPQVHYDYNGFPYWGQGTPVTVSSGGGGSGGGGSGGGGSAQDIQMTQSPSSLSASVGDRVTMTCSASSSVSYMNWYQQKPGKAPKRWIYDSSKLASGVPARFSGSGSGTDYTLTISSLQPEDFATYYCQQWSRNPPTFGGGTKLQITSSS

SEQ ID NO: 6372 - protein, 743 aa, Artificial Sequence
  source: /note="Description of Artificial Sequence: Synthetic polypeptide"
EVQLVQSGAEVKKPGESLKISCKGSGYSFTGYNMNWVRQMPGKGLEWMGNIDPYYGGTTYNRKFKGQVTISADKSISTAYLQWSSLKASDTAMYYCARSVGPFDSWGQGTLVTVSSGGGGSGGGGSGGGGSGGGGSGGGGSEIVLTQSPATLSLSPGERATLSCRASENVYSYLAWYQQKPGQAPRLLIYFAKTLAEGIPARFSGSGSGTDFTLTISSLEPEDFAVYYCQHHSDNPWTFGQGTKVEIKSSSEPKSSDKTHTCPPCPAPEAAGAPSVFLFPPKPKDTLMISRTPEVTCVVVDVSQEDPEVQFNWYVDGVEVHNAKTKPREEQFASTYRVVSVLTVLHQDWLNGKEYKCKVSNKGLPSSIEKTISKAKGQPREPQVYTLPPSQEEMTKNQVSLTCLVKGFYPSDIAVEWESNGQPENNYKTTPPVLDSDGSFFLYSRLTVDKSRWQEGNVFSCSVMHEALHNHYTQKSLSLSPGEVQIPLTESYSPNSQVQLVESGGGVVQPGRSLRLSCKASGYTFTRSTMHWVRQAPGQGLEWIGYINPSSAYTNYNQKFKDRFTISADKSKSTAFLQMDSLRPEDTGVYFCARPQVHYDYNGFPYWGQGTPVTVSSGGGGSGGGGSGGGGSAQDIQMTQSPSSLSASVGDRVTMTCSASSSVSYMNWYQQKPGKAPKRWIYDSSKLASGVPARFSGSGSGTDYTLTISSLQPEDFATYYCQQWSRNPPTFGGGTKLQITSSS

SEQ ID NO: 6373 - protein, 795 aa, Artificial Sequence
  source: /note="Description of Artificial Sequence: Synthetic polypeptide"
QVQVQESGPGLVAPSQTLSITCTVSGFSLTTSGVSWVRQPPGKGLEWLGVIWGDGSTNYHPSLKSRLSIKKDHSKSQVFLKLNSLTAADTATYYCAKGGYSLAHWGQGTLVTVSSGGGGSGGGGSGGGGSGGGGSGGGGSQVQVQESGPGLVAPSQTLSITCTVSGFSLTTSGVSWVRQPPGKGLEWLGVIWGDGSTNYHPSLKSRLSIKKDHSKSQVFLKLNSLTAADTATYYCAKGGYSLAHWGQGTLVTVSSDFTLTISSLEPEDFAVYYCQHHSDNPWTFGQGTKVEIKSSSEPKSSDKTHTCPPCPAPEAAGAPSVFLFPPKPKDTLMISRTPEVTCVVVDVSHEDPEVKFNWYVDGVEVHNAKTKPREEQYNSTYRVVSVLTVLHQDWLNGKAYACAVSNKALPAPIEKTISKAKGQPREPQVYTLPPSRDELTKNQVSLTCLVKGFYPSDIAVEWESNGQPENNYKTTPPVLDSDGSFFLYSKLTVDKSRWQQGNVFSCSVMHEALHNHYTQKSLSLSPGQRHNNSSLNTGTQMAGHSPNSQVQLVESGGGVVQPGRSLRLSCKASGYTFTRSTMHWVRQAPGQGLEWIGYINPSSAYTNYNQKFKDRFTISADKSKSTAFLQMDSLRPEDTGVYFCARPQVHYDYNGFPYWGQGTPVTVSSGGGGSGGGGSGGGGSAQDIQMTQSPSSLSASVGDRVTMTCSASSSVSYMNWYQQKPGKAPKRWIYDSSKLASGVPARFSGSGSGTDYTLTISSLQPEDFATYYCQQWSRNPPTFGGGTKLQITSSS

SEQ ID NO: 6374 - protein, 210 aa, Artificial Sequence
  source: /note="Description of Artificial Sequence: Synthetic polypeptide"
GGPSVFLFPPKPKDTLMISRTPEVTCVVVDVSHEDPEVKFNWYVDGVEVHNAKTKPREEQYNSTYRVVSVLTVLHQDWLNGKEYKCKVSNKALPAPIEKTISKAKGQPREPQVYTLPPSRDELTKNQVSLTCLEVKGFYPSDIAVEWESNGQPENNYKTTPPVLDSDGSFFLYSKRLTVDKSRWQQGNVFSCSVMHEALHNHYTQKSLSL

SEQ ID NO: 6375 - protein, 211 aa, Artificial Sequence [sequence omitted]

SEQ ID NO: 6376 - protein, 230 aa, Artificial Sequence
  source: /note="Description of Artificial Sequence: Synthetic polypeptide"
ESKYGPPCPPCPAPEFLGGPSVFLFPPKPKDTLMISRTPEVTCVVVDVSQEDPEVQFNWYVDGVEVHNAKTKPREEQFNSTYRVVSVLTVLHQDWLNGKEYKCKVSNKGLPSSIEKTISKAKGQPREPQVYTLPPSQEEMTKNQVSLTCLVKGFYPSDIAVEWESNGQPENNYKTTPPVLDSDGSFFLYSRLTVDKSRWQEGNVFSCSVMHEALHNHYTQKSLSLSLGKM

SEQ ID NO: 6377 - protein, 486 aa, Artificial Sequence
  source: /note="Description of Artificial Sequence: Synthetic polypeptide"
MALPVTALLLPLALLLHAARPEIVMTQSPATLSLSPGERATLSCRASQDISKYLNWYQQKPGQAPRLLIYHTSRLHSGIPARFSGSGSGTDYTLTISSLQPEDFAVYFCQQGNTLPYTFGQGTKLEIKGGGGSGGGGSGGGGSQVQLQESGPGLVKPSETLSLTCTVSGVSLPDYGVSWIRQPPGKGLEWIGVIWGSETTYYSSSLKSRVTISKDNSKNQVSLKLSSVTAADTAVYYCAKHYYYGGSYAMDYWGQGTLVTVSSTTTPAPRPPTPAPTIASQPLSLRPEACRPAAGGAVHTRGLDFACDIYIWAPLAGTCGVLLLSLVITLYCKRGRKKLLYIFKQPFMRPVQTTQEEDGCSCRFPEEEEGGCELRVKFSRSADAPAYKQGQNQLYNELNLGRREEYDVLDKRRGRDPEMGGKPRRKNPQEGLYNELQKDKMAEAYSEIGMKGERRRGKGHDGLYQGLSTATKDTYDALHMQALPPR

SEQ ID NO: 6378 - protein, 486 aa, Artificial Sequence
  source: /note="Description of Artificial Sequence: Synthetic polypeptide"
MALPVTALLLPLALLLHAARPEIVMTQSPATLSLSPGERATLSCRASQDISKYLNWYQQKPGQAPRLLIYHTSRLHSGIPARFSGSGSGTDYTLTISSLQPEDFAVYFCQQGNTLPYTFGQGTKLEIKGGGGSGGGGSGGGGSQVQLQESGPGLVKPSETLSLTCTVSGVSLPDYGVSWIRQPPGKGLEWIGVIWGSETTYYQSSLKSRVTISKDNSKNQVSLKLSSVTAADTAVYYCAKHYYYGGSYAMDYWGQGTLVTVSSTTTPAPRPPTPAPTIASQPLSLRPEACRPAAGGAVHTRGLDFACDIYIWAPLAGTCGVLLLSLVITLYCKRGRKKLLYIFKQPFMRPVQTTQEEDGCSCRFPEEEEGGCELRVKFSRSADAPAYKQGQNQLYNELNLGRREEYDVLDKRRGRDPEMGGKPRRKNPQEGLYNELQKDKMAEAYSEIGMKGERRRGKGHDGLYQGLSTATKDTYDALHMQALPPR

SEQ ID NO: 6379 - protein, 486 aa, Artificial Sequence
  source: /note="Description of Artificial Sequence: Synthetic polypeptide"
MALPVTALLLPLALLLHAARPQVQLQESGPGLVKPSETLSLTCTVSGVSLPDYGVSWIRQPPGKGLEWIGVIWGSETTYYSSSLKSRVTISKDNSKNQVSLKLSSVTAADTAVYYCAKHYYYGGSYAMDYWGQGTLVTVSSGGGGSGGGGSGGGGSEIVMTQSPATLSLSPGERATLSCRASQDISKYLNWYQQKPGQAPRLLIYHTSRLHSGIPARFSGSGSGTDYTLTISSLQPEDFAVYFCQQGNTLPYTFGQGTKLEIKTTTPAPRPPTPAPTIASQPLSLRPEACRPAAGGAVHTRGLDFACDIYIWAPLAGTCGVLLLSLVITLYCKRGRKKLLYIFKQPFMRPVQTTQEEDGCSCRFPEEEEGGCELRVKFSRSADAPAYKQGQNQLYNELNLGRREEYDVLDKRRGRDPEMGGKPRRKNPQEGLYNELQKDKMAEAYSEIGMKGERRRGKGHDGLYQGLSTATKDTYDALHMQALPPR

SEQ ID NO: 6380 - protein, 486 aa, Artificial Sequence
  source: /note="Description of Artificial Sequence: Synthetic polypeptide"
MALPVTALLLPLALLLHAARPQVQLQESGPGLVKPSETLSLTCTVSGVSLPDYGVSWIRQPPGKGLEWIGVIWGSETTYYQSSLKSRVTISKDNSKNQVSLKLSSVTAADTAVYYCAKHYYYGGSYAMDYWGQGTLVTVSSGGGGSGGGGSGGGGSEIVMTQSPATLSLSPGERATLSCRASQDISKYLNWYQQKPGQAPRLLIYHTSRLHSGIPARFSGSGSGTDYTLTISSLQPEDFAVYFCQQGNTLPYTFGQGTKLEIKTTTPAPRPPTPAPTIASQPLSLRPEACRPAAGGAVHTRGLDFACDIYIWAPLAGTCGVLLLSLVITLYCKRGRKKLLYIFKQPFMRPVQTTQEEDGCSCRFPEEEEGGCELRVKFSRSADAPAYKQGQNQLYNELNLGRREEYDVLDKRRGRDPEMGGKPRRKNPQEGLYNELQKDKMAEAYSEIGMKGERRRGKGHDGLYQGLSTATKDTYDALHMQALPPR

SEQ ID NO: 6381 - protein, 491 aa, Artificial Sequence
  source: /note="Description of Artificial Sequence: Synthetic polypeptide"
MALPVTALLLPLALLLHAARPEIVMTQSPATLSLSPGERATLSCRASQDISKYLNWYQQKPGQAPRLLIYHTSRLHSGIPARFSGSGSGTDYTLTISSLQPEDFAVYFCQQGNTLPYTFGQGTKLEIKGGGGSGGGGSGGGGSGGGGSQVQLQESGPGLVKPSETLSLTCTVSGVSLPDYGVSWIRQPPGKGLEWIGVIWGSETTYYSSSLKSRVTISKDNSKNQVSLKLSSVTAADTAVYYCAKHYYYGGSYAMDYWGQGTLVTVSSTTTPAPRPPTPAPTIASQPLSLRPEACRPAAGGAVHTRGLDFACDIYIWAPLAGTCGVLLLSLVITLYCKRGRKKLLYIFKQPFMRPVQTTQEEDGCSCRFPEEEEGGCELRVKFSRSADAPAYKQGQNQLYNELNLGRREEYDVLDKRRGRDPEMGGKPRRKNPQEGLYNELQKDKMAEAYSEIGMKGERRRGKGHDGLYQGLSTATKDTYDALHMQALPPR

SEQ ID NO: 6382 - protein, 491 aa, Artificial Sequence
  source: /note="Description of Artificial Sequence: Synthetic polypeptide"
MALPVTALLLPLALLLHAARPEIVMTQSPATLSLSPGERATLSCRASQDISKYLNWYQQKPGQAPRLLIYHTSRLHSGIPARFSGSGSGTDYTLTISSLQPEDFAVYFCQQGNTLPYTFGQGTKLEIKGGGGSGGGGSGGGGSGGGGSQVQLQESGPGLVKPSETLSLTCTVSGVSLPDYGVSWIRQPPGKGLEWIGVIWGSETTYYQSSLKSRVTISKDNSKNQVSLKLSSVTAADTAVYYCAKHYYYGGSYAMDYWGQGTLVTVSSTTTPAPRPPTPAPTIASQPLSLRPEACRPAAGGAVHTRGLDFACDIYIWAPLAGTCGVLLLSLVITLYCKRGRKKLLYIFKQPFMRPVQTTQEEDGCSCRFPEEEEGGCELRVKFSRSADAPAYKQGQNQLYNELNLGRREEYDVLDKRRGRDPEMGGKPRRKNPQEGLYNELQKDKMAEAYSEIGMKGERRRGKGHDGLYQGLSTATKDTYDALHMQALPPR

SEQ ID NO: 6383 - protein, 491 aa, Artificial Sequence
  source: /note="Description of Artificial Sequence: Synthetic polypeptide"
MALPVTALLLPLALLLHAARPQVQLQESGPGLVKPSETLSLTCTVSGVSLPDYGVSWIRQPPGKGLEWIGVIWGSETTYYSSSLKSRVTISKDNSKNQVSLKLSSVTAADTAVYYCAKHYYYGGSYAMDYWGQGTLVTVSSGGGGSGGGGSGGGGSGGGGSEIVMTQSPATLSLSPGERATLSCRASQDISKYLNWYQQKPGQAPRLLIYHTSRLHSGIPARFSGSGSGTDYTLTISSLQPEDFAVYFCQQGNTLPYTFGQGTKLEIKTTTPAPRPPTPAPTIASQPLSLRPEACRPAAGGAVHTRGLDFACDIYIWAPLAGTCGVLLLSLVITLYCKRGRKKLLYIFKQPFMRPVQTTQEEDGCSCRFPEEEEGGCELRVKFSRSADAPAYKQGQNQLYNELNLGRREEYDVLDKRRGRDPEMGGKPRRKNPQEGLYNELQKDKMAEAYSEIGMKGERRRGKGHDGLYQGLSTATKDTYDALHMQALPPR

SEQ ID NO: 6384 - protein, 491 aa, Artificial Sequence
  source: /note="Description of Artificial Sequence: Synthetic polypeptide"
MALPVTALLLPLALLLHAARPQVQLQESGPGLVKPSETLSLTCTVSGVSLPDYGVSWIRQPPGKGLEWIGVIWGSETTYYQSSLKSRVTISKDNSKNQVSLKLSSVTAADTAVYYCAKHYYYGGSYAMDYWGQGTLVTVSSGGGGSGGGGSGGGGSGGGGSEIVMTQSPATLSLSPGERATLSCRASQDISKYLNWYQQKPGQAPRLLIYHTSRLHSGIPARFSGSGSGTDYTLTISSLQPEDFAVYFCQQGNTLPYTFGQGTKLEIKTTTPAPRPPTPAPTIASQPLSLRPEACRPAAGGAVHTRGLDFACDIYIWAPLAGTCGVLLLSLVITLYCKRGRKKLLYIFKQPFMRPVQTTQEEDGCSCRFPEEEEGGCELRVKFSRSADAPAYKQGQNQLYNELNLGRREEYDVLDKRRGRDPEMGGKPRRKNPQEGLYNELQKDKMAEAYSEIGMKGERRRGKGHDGLYQGLSTATKDTYDALHMQALPPR

SEQ ID NO: 6385 - protein, 491 aa, Artificial Sequence
  source: /note="Description of Artificial Sequence: Synthetic polypeptide"
MALPVTALLLPLALLLHAARPEIVMTQSPATLSLSPGERATLSCRASQDISKYLNWYQQKPGQAPRLLIYHTSRLHSGIPARFSGSGSGTDYTLTISSLQPEDFAVYFCQQGNTLPYTFGQGTKLEIKGGGGSGGGGSGGGGSGGGGSQVQLQESGPGLVKPSETLSLTCTVSGVSLPDYGVSWIRQPPGKGLEWIGVIWGSETTYYNSSLKSRVTISKDNSKNQVSLKLSSVTAADTAVYYCAKHYYYGGSYAMDYWGQGTLVTVSSTTTPAPRPPTPAPTIASQPLSLRPEACRPAAGGAVHTRGLDFACDIYIWAPLAGTCGVLLLSLVITLYCKRGRKKLLYIFKQPFMRPVQTTQEEDGCSCRFPEEEEGGCELRVKFSRSADAPAYKQGQNQLYNELNLGRREEYDVLDKRRGRDPEMGGKPRRKNPQEGLYNELQKDKMAEAYSEIGMKGERRRGKGHDGLYQGLSTATKDTYDALHMQALPPR

SEQ ID NO: 6386 - protein, 491 aa, Artificial Sequence; identical to SEQ ID NO: 6385
  source: /note="Description of Artificial Sequence: Synthetic polypeptide"

SEQ ID NO: 6387 - protein, 491 aa, Artificial Sequence
  source: /note="Description of Artificial Sequence: Synthetic polypeptide"
MALPVTALLLPLALLLHAARPQVQLQESGPGLVKPSETLSLTCTVSGVSLPDYGVSWIRQPPGKGLEWIGVIWGSETTYYNSSLKSRVTISKDNSKNQVSLKLSSVTAADTAVYYCAKHYYYGGSYAMDYWGQGTLVTVSSGGGGSGGGGSGGGGSGGGGSEIVMTQSPATLSLSPGERATLSCRASQDISKYLNWYQQKPGQAPRLLIYHTSRLHSGIPARFSGSGSGTDYTLTISSLQPEDFAVYFCQQGNTLPYTFGQGTKLEIKTTTPAPRPPTPAPTIASQPLSLRPEACRPAAGGAVHTRGLDFACDIYIWAPLAGTCGVLLLSLVITLYCKRGRKKLLYIFKQPFMRPVQTTQEEDGCSCRFPEEEEGGCELRVKFSRSADAPAYKQGQNQLYNELNLGRREEYDVLDKRRGRDPEMGGKPRRKNPQEGLYNELQKDKMAEAYSEIGMKGERRRGKGHDGLYQGLSTATKDTYDALHMQALPPR

SEQ ID NO: 6388 - protein, 486 aa, Artificial Sequence
  source: /note="Description of Artificial Sequence: Synthetic polypeptide"
MALPVTALLLPLALLLHAARPEIVMTQSPATLSLSPGERATLSCRASQDISKYLNWYQQKPGQAPRLLIYHTSRLHSGIPARFSGSGSGTDYTLTISSLQPEDFAVYFCQQGNTLPYTFGQGTKLEIKGGGGSGGGGSGGGGSQVQLQESGPGLVKPSETLSLTCTVSGVSLPDYGVSWIRQPPGKGLEWIGVIWGSETTYYNSSLKSRVTISKDNSKNQVSLKLSSVTAADTAVYYCAKHYYYGGSYAMDYWGQGTLVTVSSTTTPAPRPPTPAPTIASQPLSLRPEACRPAAGGAVHTRGLDFACDIYIWAPLAGTCGVLLLSLVITLYCKRGRKKLLYIFKQPFMRPVQTTQEEDGCSCRFPEEEEGGCELRVKFSRSADAPAYKQGQNQLYNELNLGRREEYDVLDKRRGRDPEMGGKPRRKNPQEGLYNELQKDKMAEAYSEIGMKGERRRGKGHDGLYQGLSTATKDTYDALHMQALPPR

SEQ ID NO: 6389 - protein, 114 aa, Artificial Sequence
  source: /note="Description of Artificial Sequence: Synthetic polypeptide"
DIVMTQTPASLAVSLGQRATISCKASQSVDYNGDSYLNWYQQRPGQPPKLLIYDASNLVSGVPDRFSGSGSGTDFTLNIHPVEKEDAATYYCQQSTEDPYTFGGGTKLEIKRAD

SEQ ID NO: 6390 - protein, 124 aa, Artificial Sequence
  source: /note="Description of Artificial Sequence: Synthetic polypeptide"
EVQLQESGPELVKPGASVKMSCKASGYTFTSYVMHWVKQKPGQGLEWIGYINPYNDGTDYNEKFKGKATLTSDKSSSTAYMALSSLTSEDSAVYYCARGTYYYGSSYYYPFDYWGQGTTLTVSS

SEQ ID NO: 6391 - protein, 110 aa, Artificial Sequence
  source: /note="Description of Artificial Sequence: Synthetic polypeptide"
RNDAQPAVYLFQPSPDQLHTGSASVVCLLNSFYPKDINVKWKVDGVIQDTGIQESVTEQDKDSTYSLSSTLTMSSTEYLSHELYSCEITHKSLPSTLIKSFQRSECQRVD

SEQ ID NO: 6392 - protein, 335 aa, Artificial Sequence
  source: /note="Description of Artificial Sequence: Synthetic polypeptide"
ASTTAPSVFPLAPSCGSTSGSTVALACLVSGYFPEPVTVSWNSGSLTSGVHTFPSVLQSSGLYSLSSMVTVPSSRWPSETFTCNVAHPASKTKVDKPVPKRENGRVPRPPDCPKCPAPEMLGGPSVFIFPPKPKDTLLIARTPEVTCVVVDLDPEDPEVQISWFVDGKQMQTAKTQPREEQFNGTYRVVSVLPIGHQDWLKGKQFTCKVNNKALPSPIERTISKARGQAHQPSVYVLPPSREELSKNTVSLTCLIKDFFPPDIDVEWQSNGQQEPESKYRTTPPQLDEDGSYFLYSKLSVDKSRWQRGDTFICAVMHEALHNHYTQKSLSHSPGK

SEQ ID NO: 6393 - protein, 109 aa, Artificial Sequence
  source: /note="Description of Artificial Sequence: Synthetic polypeptide"
RTDAQPAVYLFQPSPDQLHTGASVVCLLNSFYPKDINVKWKVDGVIQDTGIQESVTEQDKDSTYSLSSTLTMSSTEYLSHELYSCEITHKSLPSTLIKSFQRSECQRVD

SEQ ID NO: 6394 - protein, 110 aa, Artificial Sequence
  source: /note="Description of Artificial Sequence: Synthetic polypeptide"
RNDAQPAVYLFQPSPDQLHTGSASVVCLLSSFYPKDINVKWKVDGVIQDTGIQESVTEQDKDSTYSLSSTLTMSSTEYLSHELYSCEITHKSLPSTLIKSFQRSECQRVD

SEQ ID NO: 6395 - protein, 110 aa, Artificial Sequence
  source: /note="Description of Artificial Sequence: Synthetic polypeptide"
RTDAQPAVYLFQPSPDQLHTGSASVVCLLSSFYPKDINVKWKVDGVIQDTGIQESVTEQDKDSTYSLSSTLTMSSTEYLSHELYSCEITHKSLPSTLIKSFQRSECQRVD

SEQ ID NO: 6396 - protein, 335 aa, Artificial Sequence
  source: /note="Description of Artificial Sequence: Synthetic polypeptide"
ASTTAPSVFPLAPSCGSTSGSTVALACLVSGYFPEPVTVSWNSGSLTSGVHTFPSVLQSSGLYSLSSMVTVPSSRWPSETFTCNVAHPASKTKVDKPVPKRENGRVPRPPDCPKCPAPEPAGGPSVFIFPPKPKDTLLIARTPEVTCVVVDLDPEDPEVQISWFVDGKQMQTAKTQPREEQFNGTYRVVSVLPIGHQDWLKGKQFTCKVNNKALPSPIERTISKARGQAHQPSVYVLPPSREELSKNTVSLTCLIKDFFPPDIDVEWQSNGQQEPESKYRTTPPQLDEDGSYFLYSKLSVDKSRWQRGDTFICAVMHEALHNHYTQKSLSHSPGK

SEQ ID NO: 6397 - protein, 335 aa, Artificial Sequence
  source: /note="Description of Artificial Sequence: Synthetic polypeptide"
ASTTAPSVFPLAPSCGSTSGSTVALACLVSGYFPEPVTVSWNSGSLTSGVHTFPSVLQSSGLYSLSSMVTVPSSRWPSETFTCNVAHPASKTKVDKPVPKRENGRVPRPPDCPKCPAPEMLGGPSVFIFPPKPKDTLLIARTPEVTCVVVDLDPEDPEVQISWFVDGKQMQTAKTQPREEQFAGTYRVVSVLPIGHQDWLKGKQFTCKVNNKALPSPIERTISKARGQAHQPSVYVLPPSREELSKNTVSLTCLIKDFFPPDIDVEWQSNGQQEPESKYRTTPPQLDEDGSYFLYSKLSVDKSRWQRGDTFICAVMHEALHNHYTQKSLSHSPGK

SEQ ID NO: 6398 - protein, 335 aa, Artificial Sequence
  source: /note="Description of Artificial Sequence: Synthetic polypeptide"
ASTTAPSVFPLAPSCGSTSGSTVALACLVSGYFPEPVTVSWNSGSLTSGVHTFPSVLQSSGLYSLSSMVTVPSSRWPSETFTCNVAHPASKTKVDKPVPKRENGRVPRPPDCPKCPAPEAAGGPSVFIFPPKPKDTLLIARTPEVTCVVVDLDPEDPEVQISWFVDGKQMQTAKTQPREEQFNGTYRVVSVLPIGHQDWLKGKQFTCKVNNKALPSPIERTISKARGQAHQPSVYVLPPSREELSKNTVSLTCLIKDFFPPDIDVEWQSNGQQEPESKYRTTPPQLDEDGSYFLYSKLSVDKSRWQRGDTFICAVMHEALHNHYTQKSLSHSPGK

SEQ ID NO: 6399 - protein, 180 aa, Artificial Sequence
  source: /note="Description of Artificial Sequence: Synthetic polypeptide"
QAVVTQEPSLTVSPGGTVTLTCRSSTGAVTTSNYANWVQQKPGQAPRGLIGGTNKRAPWTPARFSGSLLGGKAALTITGAQAEDEADYYCALWYSNLWVFGGGTKLTVLGGGGSGGGGQVQLQQSGPELVKPGASLKLSCTASGFNIKDTYIHWVKQRPEQGLEWIGRIYPTNGYTRYDP

SEQ ID NO: 6400 - protein, 92 aa, Artificial Sequence
  source: /note="Description of Artificial Sequence: Synthetic polypeptide"
KFQDKATITADTSSNTAYLQVSRLTSEDTAVYYCSRWGGDGFYAMDYWGQGASVTVSSGGCGGGKVAALKEKVAALKEKVAALKEKVAALKE

SEQ ID NO: 6401 - protein, 276 aa, Artificial Sequence
  source: /note="Description of Artificial Sequence: Synthetic polypeptide"
DIVMTQSHKFMSTSVGDRVSITCKASQDVNTAVAWYQQKPGHSPKLLIYSASFRYTGVPDRFTGNRSGTDFTFTISSVQAADLAVYYCQQHYTTPPTFGGGTKLEIKRAGGGSGGGGEVQLVESGGGLVQPGGSLRLSCAASGFTFNTYAMNWVRQAPGKGLEWVARIRSKYNNYATYYADSVKDRFTISRDDSKNSLYLQMNSLKTEDTAVYYCVRHGNFGNSYVSWFAYWGQGTLVTVSSGGCGGGEVAALEKEVAALEKEVAALEKEVAALEK

SEQ ID NO: 6402 - protein, 278 aa, Artificial Sequence
  source: /note="Description of Artificial Sequence: Synthetic polypeptide"
DIQLTQSPASLAVSLGQRATISCKASQSVDYDGDSYLNWYQQIPGQPPKLLIYDASNLVSGIPPRFSGSGSGTDFTLNIHPVEKVDAATYHCQQSTEDPWTFGGGTKLEIKGGGSGGGGEVQLVESGGGLVQPGGSLRLSCAASGFTFNTYAMNWVRQAPGKGLEWVARIRSKYNNYATYYADSVKDRFTISRDDSKNSLYLQMNSLKTEDTAVYYCVRHGNFGNSYVSWFAYWGQGTLVTVSSGGCGGGEVAALEKEVAALEKEVAALEKEVAALEK

SEQ ID NO: 6403 - protein, 276 aa, Artificial Sequence
  source: /note="Description of Artificial Sequence: Synthetic polypeptide"
QAVVTQEPSLTVSPGGTVTLTCRSSTGAVTTSNYANWVQQKPGQAPRGLIGGTNKRAPWTPARFSGSLLGGKAALTITGAQAEDEADYYCALWYSNLWVFGGGTKLTVLGGGGSGGGGQVQLQQSGAELVRPGSSVKISCKASGYAFSSYWMNWVKQRPGQGLEWIGQIWPGDGDTNYNGKFKGKATLTADESSSTAYMQLSSLASEDSAVYFCARRETTTVGRYYYAMDYWGQGTTVTVSSGGCGGGKVAALKEKVAALKEKVAALKEKVAALKE

SEQ ID NO: 6404 - protein, 271 aa, Artificial Sequence
  source: /note="Description of Artificial Sequence: Synthetic polypeptide"
QAVVTQEPSLTVSPGGTVTLTCRSSTGAVTTSNYANWVQQKPGQAPRGLIGGTNKRAPWTPARFSGSLLGGKAALTITGAQAEDEADYYCALWYSNLWVFGGGTKLTVLGGGGSGGGGQVQLKQSGPGLVQPSQSLSITCTVSGFSLTNYGVHWVRQSPGKGLEWLGVIWSGGNTDYNTPFTSRLSINKDNSKSQVFFKMNSLQSNDTAIYYCARALTYYDYEFAYWGQGTLVTVSSGGCGGGEVAALEKEVAALEKEVAALEKEVAALEK

SEQ ID NO: 6405 - protein, 274 aa, Artificial Sequence
  source: /note="Description of Artificial Sequence: Synthetic polypeptide"
DILLTQSPVILSVSPGERVSFSCRASQSIGTNIHWYQQRTNGSPRLLIKYASESISGIPSRFSGSGSGTDFTLSINSVESEDIADYYCQQNNNWPTTFGAGTKLELKGGGSGGGGEVQLVESGGGLVQPGGSLRLSCAASGFTFNTYAMNWVRQAPGKGLEWVARIRSKYNNYATYYADSVKDRFTISRDDSKNSLYLQMNSLKTEDTAVYYCVRHGNFGNSYVSWFAYWGQGTLVTVSSGGCGGGKVAALKEKVAALKEKVAALKEKVAALKE

SEQ ID NO: 6406 - protein, 275 aa, Artificial Sequence
  source: /note="Description of Artificial Sequence: Synthetic polypeptide"
DIQMTQSPSSLSASVGDRVTITCRASQDISNYLNWYQQKPGKAPKLLIYYTSRLHSGVPSRFSGSGSGTDFTLTISSLQPEDIATYYCQQGNTLPPTFGGGTKLEIKGGGGSGGGGEVQLVESGGGLVQPGGSLRLSCAASGFTFNTYAMNWVRQAPGKGLEWVARIRSKYNNYATYYADSVKDRFTISRDDSKNSLYLQMNSLKTEDTAVYYCVRHGNFGNSYVSWFAYWGQGTLVTVSSGGCGGGEVAALEKEVAALEKEVAALEKEVAALEK

SEQ ID NO: 6407 - protein, 272 aa, Artificial Sequence
  source: /note="Description of Artificial Sequence: Synthetic polypeptide"
QAVVTQEPSLTVSPGGTVTLTCRSSTGAVTTSNYANWVQQKPGQAPRGLIGGTNKRAPWTPARFSGSLLGGKAALTITGAQAEDEADYYCALWYSNLWVFGGGTKLTVLGGGGSGGGGQVQLVQSGAEVKKPGASVKVSCKASGYTFTSYWMQWVRQAPGQGLEWMGTIYPGDGDTRYTQKFKGRVTITADKSTSTAYMELSSLRSEDTAVYYCARRGIPRLWYFDVWGQGTTVTVSSGGCGGGKVAALKEKVAALKEKVAALKEKVAALKE

SEQ ID NO: 6408 - protein, 275 aa, Artificial Sequence
  source: /note="Description of Artificial Sequence: Synthetic polypeptide"
DIQLTQSPSFLSASVGDRVTITCKASQNVDTNVAWYQQKPGKAPKALIYSASYRYSGVPSRFSGSGSGTDFTLTISSLQPEDFATYYCQQYNNYPFTFGQGTKLEIKGGGGSGGGGEVQLVESGGGLVQPGGSLRLSCAASGFTFNTYAMNWVRQAPGKGLEWVARIRSKYNNYATYYADSVKDRFTISRDDSKNSLYLQMNSLKTEDTAVYYCVRHGNFGNSYVSWFAYWGQGTLVTVSSGGCGGGEVAALEKEVAALEKEVAALEKEVAALEK

SEQ ID NO: 6409 - protein, 274 aa, Artificial Sequence
  source: /note="Description of Artificial Sequence: Synthetic polypeptide"
QAVVTQEPSLTVSPGGTVTLTCRSSTGAVTTSNYANWVQQKPGQAPRGLIGGTNKRAPWTPARFSGSLLGGKAALTITGAQAEDEADYYCALWYSNLWVFGGGTKLTVLGGGGSGGGGEVQLVESGGGLVQPGGSLRLSCAASGFTFSSFGMHWVRQAPGKGLEWVAYISSDSSAIYYADTVKGRFTISRDNAKNSLYLQMNSLRDEDTAVYYCGRGRENIYYGSRLDYWGQGTTVTVSSGGCGGGKVAALKEKVAALKEKVAALKEKVAALKE

SEQ ID NO: 6410 - protein, 279 aa, Artificial Sequence
  source: /note="Description of Artificial Sequence: Synthetic polypeptide"
DVVMTQTPFSLPVSLGDQASISCRSSQSLVHSNGNTYLRWYLQKPGQSPKVLIYKVSNRFSGVPDRFSGSGSGTDFTLKISRVEAEDLGVYFCSQSTHVPWTFGGGTKLEIKGGGSGGGGEVQLVESGGGLVQPGGSLRLSCAASGFTFNTYAMNWVRQAPGKGLEWVARIRSKYNNYATYYADSVKDRFTISRDDSKNSLYLQMNSLKTEDTAVYYCVRHGNFGNSYVSWFAYWGQGTLVTVSSGGCGGGEVAALEKEVAALEKEVAALEKEVAALEK

SEQ ID NO: 6411 - protein, 270 aa, Artificial Sequence
  source: /note="Description of Artificial Sequence: Synthetic polypeptide"
QAVVTQEPSLTVSPGGTVTLTCRSSTGAVTTSNYANWVQQKPGQAPRGLIGGTNKRAPWTPARFSGSLLGGKAALTITGAQAEDEADYYCALWYSNLWVFGGGTKLTVLGGGGSGGGGEVKLDETGGGLVQPGRPMKLSCVASGFTFSDYWMNWVRQSPEKGLEWVAQIRNKPYNYETYYSDSVKGRFTISRDDSKSSVYLQMNNLRVEDMGIYYCTGSYYGMDYWGQGTSVTVSSGGCGGGKVAALKEKVAALKEKVAALKEKVAALKE

SEQ ID NO: 6412 - protein, 274 aa, Artificial Sequence
  source: /note="Description of Artificial Sequence: Synthetic polypeptide"
QIVLTQSPAIMSASPGERVTMTCSARSSISFMYWYQQKPGSSPRLLIYDTSNLASGVPVRFSGSGSGTSYSLTISRMEAEDAATYYCQQWSSYPLTFGSGTKLELKRGGGSGGGGEVQLVESGGGLVQPGGSLRLSCAASGFTFNTYAMNWVRQAPGKGLEWVARIRSKYNNYATYYADSVKDRFTISRDDSKNSLYLQMNSLKTEDTAVYYCVRHGNFGNSYVSWFAYWGQGTLVTVSSGGCGGGKVAALKEKVAALKEKVAALKEKVAALKE

SEQ ID NO: 6413 - protein, 108 aa, Artificial Sequence
  source: /note="Description of Artificial Sequence: Synthetic polypeptide"
DIQMTQSPSSLSASVGDRVTITCRASRPIWPFLEWYQQKPGKAPKLLIYFTSRLRHGVPSRFSGSGSGTCFTLTISSLQPEDFATYYCLQNVANPATFSQGTKVEIKR

SEQ ID NO: 6414 - protein, 224 aa, Artificial Sequence
  source: /note="Description of Artificial Sequence: Synthetic polypeptide"
  MOD_RES (178)..(178): Any amino acid
QVQLQQPGAELVKPGASVKMSCKASGYTFTSYNMHWVKQTPGRGLEWIGAIYPGNGDTSYNQKFKGKATLTADKSSSTAYMQLSSLTSEDSAVYYCARSTYYGGDWYFNVWGAGTTVTVSAASTKGPSVFPLAPSSKSTSGGTAALGCLVKDYFPEPVTVSWNSGALTSGVHTFPAVXQSSGLYSLSSVVTVPSSSLGTQTYICNVNHKPSNTKVDKKVEPKSC

SEQ ID NO: 6415 - protein, 221 aa, Artificial Sequence
  source: /note="Description of Artificial Sequence: Synthetic polypeptide"
QVQLKQSGPGLVQPSQSLSITCTVSGFSLTNYGVHWVRQSPGKGLEWLGVIWSGGNTDYNTPFTSRLSINKDNSKSQVFFKMNSLQSNDTAIYYCARALTYYDYEFAYWGQGTLVTVSAASTKGPSVFPLAPSSKSTSGGTAALGCLVKDYFPEPVTVSWNSGALTSGVHTFPAVLQSSGLYSLSSVVTVPSSSLGTQTYICNVNHKPSNTKVDKRVEPKS

SEQ ID NO: 6416 - protein, 221 aa, Artificial Sequence
  source: /note="Description of Artificial Sequence: Synthetic polypeptide"
QVQLKQSGPGLVQPSQSLSITCTVSGFSLTNYGVHWVRQSPGKGLEWLGVIWSGGNTDYNTPFTSRLSINKDNSKSQVFFKMNSLQSNDTAIYYCARALTYYDYEFAYWGQGTLVTVSAASTKGPSVFPLAPSSKSTSGGTAALGCLVKDYFPEPVTVSWNSGALTSGVHTFPAVSQSSGLYSLSSVVTVPSSSLGTQTYICNVNHKPSNTKVDKRVEPKS

SEQ ID NO: 6417 - protein, 221 aa, Artificial Sequence
  source: /note="Description of Artificial Sequence: Synthetic polypeptide"
  MOD_RES (176)..(176): Any amino acid
QVQLKQSGPGLVQPSQSLSITCTVSGFSLTNYGVHWVRQSPGKGLEWLGVIWSGGNTDYNTPFTSRLSINKDNSKSQVFFKMNSLQSNDTAIYYCARALTYYDYEFAYWGQGTLVTVSAASTKGPSVFPLAPSSKSTSGGTAALGCLVKDYFPEPVTVSWNSGALTSGVHTFPAVXQSSGLYSLSSVVTVPSSSLGTQTYICNVNHKPSNTKVDKRVEPKS

SEQ ID NO: 6418 - protein, 224 aa, Artificial Sequence
  source: /note="Description of Artificial Sequence: Synthetic polypeptide"
QVQLQQPGAELVKPGASVKMSCKASGYTFTSYNMHWVKQTPGRGLEWIGAIYPGNGDTSYNQKFKGKATLTADKSSSTAYMQLSSLTSEDSAVYYCARSTYYGGDWYFNVWGAGTTVTVSAASTKGPSVFPLAPSSKSTSGGTAALGCLVKDYFPEPVTVSWNSGALTSGVHTFPAVSQSSGLYSLSSVVTVPSSSLGTQTYICNVNHKPSNTKVDKKVEPKSC

SEQ ID NO: 6419 - protein, 227 aa, Artificial Sequence
  source: /note="Description of Artificial Sequence: Synthetic polypeptide"
DKTHTCPPCPAPELKGGPSVFLFPPKPKDTLMISRTPEVTCVVVDVSHEDPEVKFNWYVDGVEVHNAKTKPREEQYNSTYRVVSVLTVLHQDWLNGKEYKCKVSNKALPAPIEKTISKAKGQPREPQVYTLPPSRDELTKNQVSLTCLVKGFYPSDIAVEWESNGQPENNYKTTPPVLDSDGSFFLYSKLTVDKSRWQQGNVFSCSVMHEALHNHYTQKSLSLSPGK

SEQ ID NO: 6420 - protein, 227 aa, Artificial Sequence
  source: /note="Description of Artificial Sequence: Synthetic polypeptide"
DKTHTCPPCPAPELLGGPSVFLFPPKPKDTLMKSRTPEVTCVVVDVSHEDPEVKFNWYVDGVEVHNAKTKPREEQYNSTYRVVSVLTVLHQDWLNGKEYKCKVSNKALPAPIEKTISKAKGQPREPQVYTLPPSRDELTKNQVSLTCLVKGFYPSDIAVEWESNGQPENNYKTTPPVLDSDGSFFLYSKLTVDKSRWQQGNVFSCSVMHEALHNHYTQKSLSLSPGK

SEQ ID NO: 6421 - protein, 227 aa, Artificial Sequence
  source: /note="Description of Artificial Sequence: Synthetic polypeptide"
DKTHTCPPCPAPELLGGPSVFLFPPKPKDTLMISRTPEVTCVVVDVSHEDPEVKFNWYVDGKEVHNAKTKPREEQYNSTYRVVSVLTVLHQDWLNGKEYKCKVSNKALPAPIEKTISKAKGQPREPQVYTLPPSRDELTKNQVSLTCLVKGFYPSDIAVEWESNGQPENNYKTTPPVLDSDGSFFLYSKLTVDKSRWQQGNVFSCSVMHEALHNHYTQKSLSLSPGK

SEQ ID NO: 6422 - protein, 227 aa, Artificial Sequence
  source: /note="Description of Artificial Sequence: Synthetic polypeptide"
DKTHTCPPCPAPELLGGPSVFLFPPKPKDTLMISRTPEVTCVVVDVSHEDPEVKFNWYVDGVEVHNAKTKPREEQYNSTYRVVSVLTVKHQDWLNGKEYKCKVSNKALPAPIEKTISKAKGQPREPQVYTLPPSRDELTKNQVSLTCLVKGFYPSDIAVEWESNGQPENNYKTTPPVLDSDGSFFLYSKLTVDKSRWQQGNVFSCSVMHEALHNHYTQKSLSLSPGK

SEQ ID NO: 6423 - protein, 227 aa, Artificial Sequence
  source: /note="Description of Artificial Sequence: Synthetic polypeptide"
  MOD_RES (15)..(15): Any amino acid
DKTHTCPPCPAPELXGGPSVFLFPPKPKDTLMISRTPEVTCVVVDVSHEDPEVKFNWYVDGVEVHNAKTKPREEQYNSTYRVVSVLTVLHQDWLNGKEYKCKVSNKALPAPIEKTISKAKGQPREPQVYTLPPSRDELTKNQVSLTCLVKGFYPSDIAVEWESNGQPENNYKTTPPVLDSDGSFFLYSKLTVDKSRWQQGNVFSCSVMHEALHNHYTQKSLSLSPGK

SEQ ID NO: 6424 - protein, 227 aa, Artificial Sequence
  source: /note="Description of Artificial Sequence: Synthetic polypeptide"
  MOD_RES (33)..(33): Any amino acid
DKTHTCPPCPAPELLGGPSVFLFPPKPKDTLMXSRTPEVTCVVVDVSHEDPEVKFNWYVDGVEVHNAKTKPREEQYNSTYRVVSVLTVLHQDWLNGKEYKCKVSNKALPAPIEKTISKAKGQPREPQVYTLPPSRDELTKNQVSLTCLVKGFYPSDIAVEWESNGQPENNYKTTPPVLDSDGSFFLYSKLTVDKSRWQQGNVFSCSVMHEALHNHYTQKSLSLSPGK

SEQ ID NO: 6425 - protein, 227 aa, Artificial Sequence
  source: /note="Description of Artificial Sequence: Synthetic polypeptide"
  MOD_RES (62)..(62): Any amino acid
DKTHTCPPCPAPELLGGPSVFLFPPKPKDTLMISRTPEVTCVVVDVSHEDPEVKFNWYVDGXEVHNAKTKPREEQYNSTYRVVSVLTVLHQDWLNGKEYKCKVSNKALPAPIEKTISKAKGQPREPQVYTLPPSRDELTKNQVSLTCLVKGFYPSDIAVEWESNGQPENNYKTTPPVLDSDGSFFLYSKLTVDKSRWQQGNVFSCSVMHEALHNHYTQKSLSLSPGK

SEQ ID NO: 6426 - protein, 227 aa, Artificial Sequence
  source: /note="Description of Artificial Sequence: Synthetic polypeptide"
  MOD_RES (89)..(89): Any amino acid
DKTHTCPPCPAPELLGGPSVFLFPPKPKDTLMISRTPEVTCVVVDVSHEDPEVKFNWYVDGVEVHNAKTKPREEQYNSTYRVVSVLTVXHQDWLNGKEYKCKVSNKALPAPIEKTISKAKGQPREPQVYTLPPSRDELTKNQVSLTCLVKGFYPSDIAVEWESNGQPENNYKTTPPVLDSDGSFFLYSKLTVDKSRWQQGNVFSCSVMHEALHNHYTQKSLSLSPGK

SEQ ID NO: 6427 - protein, 231 aa, Artificial Sequence
  source: /note="Description of Artificial Sequence: Synthetic polypeptide"
PKSCDKTHTCPPCPAPELLGGPSVFLFPPKPKDTLMISRTPEVTCVVVDVSHEDPEVKFNWYVDGVEVHNAKTKPREEQYNSTYRVVSVLTVLHQDWLNGKEYKCKVSNKALPAPIEKTISKAKGQPREPQVYTLPPSRDELTKNQVSLTCLVKGFYPSDIAVEWESNGQPENNYKTTPPVLDSDGSFFLYSKLTVDKSRWQQGNVFSCSVMHEALHNHYTQKSLSLSPGK

SEQ ID NO: 6428 - protein, 231 aa, Artificial Sequence
  source: /note="Description of Artificial Sequence: Synthetic polypeptide"
PKSCDKTHTCPPCPAPELKGGPSVFLFPPKPKDTLMISRTPEVTCVVVDVSHEDPEVKFNWYVDGVEVHNAKTKPREEQYNSTYRVVSVLTVLHQDWLNGKEYKCKVSNKALPAPIEKTISKAKGQPREPQVYTLPPSRDELTKNQVSLTCLVKGFYPSDIAVEWESNGQPENNYKTTPPVLDSDGSFFLYSKLTVDKSRWQQGNVFSCSVMHEALHNHYTQKSLSLSPGK

SEQ ID NO: 6429 - protein, 231 aa, Artificial Sequence
  source: /note="Description of Artificial Sequence: Synthetic polypeptide"
PKSCDKTHTCPPCPAPELLGGPSVFLFPPKPKDTLMKSRTPEVTCVVVDVSHEDPEVKFNWYVDGVEVHNAKTKPREEQYNSTYRVVSVLTVLHQDWLNGKEYKCKVSNKALPAPIEKTISKAKGQPREPQVYTLPPSRDELTKNQVSLTCLVKGFYPSDIAVEWESNGQPENNYKTTPPVLDSDGSFFLYSKLTVDKSRWQQGNVFSCSVMHEALHNHYTQKSLSLSPGK

SEQ ID NO: 6430 - protein, 231 aa, Artificial Sequence
  source: /note="Description of Artificial Sequence: Synthetic polypeptide"
PKSCDKTHTCPPCPAPELLGGPSVFLFPPKPKDTLMISRTPEVTCVVVDVSHEDPEVKFNWYVDGKEVHNAKTKPREEQYNSTYRVVSVLTVLHQDWLNGKEYKCKVSNKALPAPIEKTISKAKGQPREPQVYTLPPSRDELTKNQVSLTCLVKGFYPSDIAVEWESNGQPENNYKTTPPVLDSDGSFFLYSKLTVDKSRWQQGNVFSCSVMHEALHNHYTQKSLSLSPGK

SEQ ID NO: 6431 - protein, 231 aa, Artificial Sequence
  source: /note="Description of Artificial Sequence: Synthetic polypeptide"
PKSCDKTHTCPPCPAPELLGGPSVFLFPPKPKDTLMISRTPEVTCVVVDVSHEDPEVKFNWYVDGVEVHNAKTKPREEQYNSTYRVVSVLTVKHQDWLNGKEYKCKVSNKALPAPIEKTISKAKGQPREPQVYTLPPSRDELTKNQVSLTCLVKGFYPSDIAVEWESNGQPENNYKTTPPVLDSDGSFFLYSKLTVDKSRWQQGNVFSCSVMHEALHNHYTQKSLSLSPGK

SEQ ID NO: 6432 - protein, 231 aa, Artificial Sequence
  source: /note="Description of Artificial Sequence: Synthetic polypeptide"
  MOD_RES (19)..(19): Any amino acid
PKSCDKTHTCPPCPAPELXGGPSVFLFPPKPKDTLMISRTPEVTCVVVDVSHEDPEVKFNWYVDGVEVHNAKTKPREEQYNSTYRVVSVLTVLHQDWLNGKEYKCKVSNKALPAPIEKTISKAKGQPREPQVYTLPPSRDELTKNQVSLTCLVKGFYPSDIAVEWESNGQPENNYKTTPPVLDSDGSFFLYSKLTVDKSRWQQGNVFSCSVMHEALHNHYTQKSLSLSPGK

SEQ ID NO: 6433 - protein, 231 aa, Artificial Sequence
  source: /note="Description of Artificial Sequence: Synthetic polypeptide"
  MOD_RES (37)..(37): Any amino acid
PKSCDKTHTCPPCPAPELLGGPSVFLFPPKPKDTLMXSRTPEVTCVVVDVSHEDPEVKFNWYVDGVEVHNAKTKPREEQYNSTYRVVSVLTVLHQDWLNGKEYKCKVSNKALPAPIEKTISKAKGQPREPQVYTLPPSRDELTKNQVSLTCLVKGFYPSDIAVEWESNGQPENNYKTTPPVLDSDGSFFLYSKLTVDKSRWQQGNVFSCSVMHEALHNHYTQKSLSLSPGK

SEQ ID NO: 6434 - protein, 231 aa, Artificial Sequence
  source: /note="Description of Artificial Sequence: Synthetic polypeptide"
  MOD_RES (66)..(66): Any amino acid
PKSCDKTHTCPPCPAPELLGGPSVFLFPPKPKDTLMISRTPEVTCVVVDVSHEDPEVKFNWYVDGXEVHNAKTKPREEQYNSTYRVVSVLTVLHQDWLNGKEYKCKVSNKALPAPIEKTISKAKGQPREPQVYTLPPSRDELTKNQVSLTCLVKGFYPSDIAVEWESNGQPENNYKTTPPVLDSDGSFFLYSKLTVDKSRWQQGNVFSCSVMHEALHNHYTQKSLSLSPGK

SEQ ID NO: 6435 - protein, 231 aa, Artificial Sequence
  source: /note="Description of Artificial Sequence: Synthetic polypeptide"
  MOD_RES (93)..(93): Any amino acid
PKSCDKTHTCPPCPAPELLGGPSVFLFPPKPKDTLMISRTPEVTCVVVDVSHEDPEVKFNWYVDGVEVHNAKTKPREEQYNSTYRVVSVLTVXHQDWLNGKEYKCKVSNKALPAPIEKTISKAKGQPREPQVYTLPPSRDELTKNQVSLTCLVKGFYPSDIAVEWESNGQPENNYKTTPPVLDSDGSFFLYSKLTVDKSRWQQGNVFSCSVMHEALHNHYTQKSLSLSPGK

SEQ ID NO: 6436 - protein, 327 aa, Artificial Sequence
  source: /note="Description of Artificial Sequence: Synthetic polypeptide"
ASTKGPSVFPLAPCSRSTSESTAALGCLVKDYFPEPVTVSWNSGALTSGVHTFPAVLQSSGLYSLSSVVTVPSSSLGTKTYTCNVDHKPSNTKVDKRVESKYGPPCPPCPAPEAAGGPSVFLFPPKPKDTLMISRTPEVTCVVVDVSQEDPEVQFNWYVDGVEVHNAKTKPREEQFNSTYRVVSVLTVLHQDWLNGKEYKCKVSNKGLPSSIEKTISKAKGQPREPQVYTLPPSQEEMTKNQVSLTCLVKGFYPSDIAVEWESNGQPENNYKTTPPVLDSDGSFFLYSRLTVDKSRWQEGNVFSCSVMHEALHNHYTQKSLSLSLGK

SEQ ID NO: 6437 - protein, 218 aa, Artificial Sequence
  source: /note="Description of Artificial Sequence: Synthetic polypeptide"
PAPELLGGPSVFLFPPKPKDTLMISRTPEVTCVVVDVSHEDPEVKFNWYVDGVEVHNAKTKPREEQYNSTYRVVSVLTVLHQDWLNGKEYKCKVSNKALPAPIEKTISKAKGQPREPQVYTLPPSREEMTKNQVSLTCLVKGFYPSDIAVEWESNGQPENNYKTTPPVLDSDGSFFLYSKLTVDKSRWQQGNVFSCSVMHEALHNHYTQKSLSLSPGK

SEQ ID NO: 6438 - protein, 503 aa, Artificial Sequence
  source: /note="Description of Artificial Sequence: Synthetic polypeptide"
MEAPAQLLFLLLLWLPDTTGEVQLVQSGAEVKKPGESLKISCKGSGYSFTGYNMNWVRQMPGKGLEWMGNIDPYYGGTTYNRKFKGQVTISADKSISTAYLQWSSLKASDTAMYYCARSVGPFDSWGQGTLVTVSSGGGGSGGGGSGGGGSGGGGSGGGGSEIVLTQSPATLSLSPGERATLSCRASENVYSYLAWYQQKPGQAPRLLIYFAKTLAEGIPARFSGSGSGTDFTLTISSLEPEDFAVYYCQHHSDNPWTFGQGTKVEIKGDQEPKSSDKTHTSPPCPAPELLGGPSVFLFPPKPKDTLMISRTPEVTCVVVDVSHEDPEVKFNWYVDGVEVHNAKTKPREEQYNSTYRVVSVLTVLHQDWLNGKEYKCKVSNKALPAPIEKTISKAKGQPREPQVYTLPPSRDELTKNQVSLTCLVKGFYPSDIAVEWESNGQPENNYKTTPPVLDSDGSFFLYSKLTVDKSRWQQGNVFSCSVMHEALHNHYTQKSLSLSPGK

SEQ ID NO: 6439 - protein, 542 aa, Artificial Sequence
  source: /note="Description of Artificial Sequence: Synthetic polypeptide"
MSPILGYWKIKGLVQPTRLLLEYLEEKYEEHLYERDEGDKWRKFELGLEFPNLPYYIDGDVKLTQSMAIIRYIADKHNMLGGCPKERAEISMLEGAVLDIRYGVSRIAYSKDFETLKVDFLSKLPEMLKMFEDRLCHKTYLNGDHVTHPDFMLYDALDVVLYMDPMCLDAFPKLVCFKKRIEAIPQIDKYLKSSKYIAWPLQGWQATFGGGDHPPKSDLVPRGSLSQEGINILTHLPKGSAEAELMSWPVFYVFHYLETGNHWNIFHSDPLIEKQKLKKKLKEGMLSIMSYRNADYSYSVWKGGSASTWLTAFALRVLGQVNKYVEQNQNSICNSLLWLVENYQLDNGSFKENSQYQPIKLQGTLPVEARENSLYLTAFTVIGIRKAFDICPLVKIDTALIKADNFLLENTLPAQSTFTLAISAYALSLGDKTHPQFRSIVSALKREALVKGNPPIYRFWKDNLQHKDSSVPNTGTARMVETTAYALLTSLNLKDINYVNPVIKWLSEEQRYGGGFYSTQDTINAIEGLTEYSLLVKQLRLS

SEQ ID NO: 6440 - protein, 351 aa, Artificial Sequence
  source: /note="Description of Artificial Sequence: Synthetic polypeptide"
MGSHHHHHHGMASMTGGQQMGRTLYDDDDKDRWGSQEGINLILTHLPKGSAEAELMSVVPVFYVFHYLETGNHWNIFHSDPLIEKQKLKKKLKEGMLSIMSYRNADYSYSVWKGGSASTWLTAFALRVLGQVNKYVEQNQNSICNSLWLVENYQLDNGSFKENSQYQPIKLQGTLPVEARENSLYLTAFTVIGIRKAFDICPLVKIDTALIKADNFLLENTLPAQSTFLAISAYALSLGDKTHPQFRSIVSALKREALVKGNPPIYRFWKDNLQHKDSSVPNTGTARMVETTAYALLTSLNLKDINYVNPVIKWLSEEQRYGGGFYSTQDTINAIEGLTEYSLLVKQLRLS

SEQ ID NO: 6441 - protein, 499 aa, Artificial Sequence
  source: /note="Description of Artificial Sequence: Synthetic polypeptide"
MDFQVQIFSFLLISASVIIARGQIVLSQSPAILSASPGEKVTMTCRASSSVSYMHWYQQKPGSSPKPWIYAPSNLASGVPARFSGSGSGTSYSLTISRVEAEDAATYYCQQWSFNPPTFGAGTKLELKDGGGSGGGGSGGGGSSQAYLQQSGAELVRPGASVKMSCKASGYTFTSYNMHWVKQTPRQGLEWIGAIYPGNGDTSYNQKFKGKATLTVDKSSSTAYMQLSSLTSEDSAVYFCARVVYYSNSYWYFDVWGTGTTVTVSDQEPKSCDKTHTCPPCPAPELLGGPSVFLFPPKPKDTLMISRTPEVTCVVVDVSHEDPEVKFNWYVDGVEVHNAKTKPREEQYNSTYRVVSVLTVLHQDWLNGKEYKCKVSNKALPAPIEKTISKAKGQPREPQVYTLPPSRDELTKNQVSLTCLVKGFYPSDIAVEWESNGQPENNYKTTPPVLDSDGSFFLYSKLTVDKSRWQQGNVFSCSVMHEALHNHYTQKSLSLSPGK

SEQ ID NO: 6442 - protein, 499 aa, Artificial Sequence
  source: /note="Description of Artificial Sequence: Synthetic polypeptide"
MDFQVQIFSFLLISASVIIARGQIVLSQSPAILSASPGEKVTMTCRASSSVSYMHWYQQKPGSSPKPWIYAPSNLASGVPARFSGSGSGTSYSLTISRVEAEDAATYYCQQWSFNPPTFGAGTKLELKDGGGSGGGGSGGGGSSQAYLQQSGAELVRPGASVKMSCKASGYTFTSYNMHWVKQTPRQGLEWIGAIYPGNGDTSYNQKFKGKATLTVDKSSSTAYMQLSSLTSEDSAVYFCARVVYYSNSYWYFDVWGTGTTVTVSDQEPKSSDKTHTSPPSPAPELLGGSSVFLFPPKPKDTLMISRTPEVTCVVVDVSHEDPEVKFNWYVDGVEVHNAKTKPREEQYNSTYRVVSVLTVLHQDWLNGKEYKCKVSNKALPAPIEKTISKAKGQPREPQVYTLPPSRDELTKNQVSLTCLVKGFYPSDIAVEWESNGQPENNYKTTPPVLDSDGSFFLYSKLTVDKSRWQQGNVFSCSVMHEALHNHYTQKSLSLSPGK

SEQ ID NO: 6443 - protein, 499 aa, Artificial Sequence
  source: /note="Description of Artificial Sequence: Synthetic polypeptide"
MDFQVQIFSFLLISASVIIARGQIVLSQSPAILSASPGEKVTMTCRASSSVSYMHWYQQKPGSSPKPWIYAPSNLASGVPARFSGSGSGTSYSLTISRVEAEDAATYYCQQWSFNPPTFGAGTKLELKDGGGSGGGGSGGGGSSQAYLQQSGAELVRPGASVKMSCKASGYTFTSYNMHWVKQTPRQGLEWIGAIYPGNGDTSYNQKFKGKATLTVDKSSSTAYMQLSSLTSEDSAVYFCARVVYYSNSYWYFDVWGTGTTVTVSDQEPKSSDKTHTSPPSPAPELLGGPSVFLFPPKPKDTLMISRTPEVTCVVVDVSHEDPEVKFNWYVDGVEVHNAKTKPREEQYNSTYRVVSVLTVLHQDWLNGKEYKCKVSNKALPAPIEKTISKAKGQPREPQVYTLPPSRDELTKNQVSLTCLVKGFYPSDIAVEWESNGQPENNYKTTPPVLDSDGSFFLYSKLTVDKSRWQQGNVFSCSVMHEALHNHYTQKSLSLSPGK

SEQ ID NO: 6444 - protein, 505 aa, Artificial Sequence
  source: /note="Description of Artificial Sequence: Synthetic polypeptide"
MDFQVQIFSFLLISASVIIARGQIVLSQSPAILSASPGEKVTMTCRASSSVSYMHWYQQKPGSSPKPWIYAPSNLASGVPARFSGSGSGTSYSLTISRVEAEDAATYYCQQWSFNPPTFGAGTKLELKDGGGSGGGGSGGGGSSQAYLQQSGAELVRPGASVKMSCKASGYTFTSYNMHWVKQTPRQGLEWIGAIYPGNGDTSYNQKFKGKATLTVDKSSSTAYMQLSSLTSEDSAVYFCARVVYYSNSYWYFDVWGTGTTVTVSDQPVPSTPPTPSPSTPPTPSPSCAPELLGGPSVFLFPPKPKDTLMISRTPEVTCVVVDVSHEDPEVKFNWYVDGVEVHNAKTKPREEQYNSTYRVVSVLTVLHQDWLNGKEYKCKVSNKALPAPIEKTISKAKGQPREPQVYTLPPSRDELTKNQVSLTCLVKGFYPSDIAVEWESNGQPENNYKTTPPVLDSDGSFFLYSKLTVDKSRWQQGNVFSCSVMHEALHNHYTQKSLSLSPGK

SEQ ID NO: 6445 - protein, 234 aa, Artificial Sequence
  source: /note="Description of Artificial Sequence: Synthetic polypeptide"
DQEPKSSDKTHTSPPSPAPELLGGPSVFLFPPKPKDTLMISRTPEVTCVVVDVSHEDPEVKFNWYVDGVEVHNAKTKPREEQYNSTYRVVSVLTVLHQDWLNGKEYKCKVSNKALPAPIEKTISKAKGQPREPQVYTLPPSRDELTKNQVSLTCLVKGFYPSDIAVEWESNGQPENNYKTTPPVLDSDGSFFLYSKLTVDKSRWQQGNVFSCSVMHEALHNHYTQKSLSLSPGK

SEQ ID NO: 6446 - protein, 240 aa, Artificial Sequence
  source: /note="Description of Artificial Sequence: Synthetic polypeptide"
DQPVPSTPPTPSPSTPPTPSPSCAPELLGGPSVFLFPPKPKDTLMISRTPEVTCVVVDVSHEDPEVKFNWYVDGVEVHNAKTKPREEQYNSTYRVVSVLTVLHQDWLNGKEYKCKVSNKALPAPIEKTISKAKGQPREPQVYTLPPSRDELTKNQVSLTCLVKGFYPSDIAVEWESNGQPENNYKTTPPVLDSDGSFFLYSKLTVDKSRWQQGNVFSCSVMHEALHNHYTQKSLSLSPGK

SEQ ID NO: 6447 - protein, 482 aa, Artificial Sequence
  source: /note="Description of Artificial Sequence: Synthetic polypeptide"
MDFQVQIFSFLLISASVIIARGQIVLSQSPAILSASPGEKVTMTCRASSSVSYMHWYQQKPGSSPKPWIYAPSNLASGVPARFSGSGSGTSYSLTISRVEAEDAATYYCQQWSFNPPTFGAGTKLELKDGGGSGGGGSGGGGSSQAYLQQSGAELVRPGASVKMSCKASGYTFTSYNMHWVKQTPRQGLEWIGAIYPGNGDTSYNQKFKGKATLTVDKSSSTAYMQLSSLTSEDSAVYFCARVVYYSNSYWYFDVWGTGTTVTVSDPRRLDKIEDERNLHEDFVFMKTIQRCNTGERSLSLLNCEEIKSQFEGFVKDIMLNKEETKKENSFEMQKGDQNPQIAAHVISEASSKTTSVLQWAEKGYYTMSNNLVTLENGKQLTVKRQGLYYIYAQVTFCSNREASSQAPFIASLCLKSPGRFERILLRAANTHSSAKPCGQQSIHLGGVFELQPGASVFVNVTDPSQVSHGTGFTSFGLLKLE

SEQ ID NO: 6448 - protein, 422 aa, Artificial Sequence
  source: /note="Description of Artificial Sequence: Synthetic polypeptide"
MDFQVQIFSFLLISASVIIARGQIVLSQSPAILSASPGEKVTMTCRASSSVSYMHWYQQKPGSSPKPWIYAPSNLASGVPARFSGSGSGTSYSLTISRVEAEDAATYYCQQWSFNPPTFGAGTKLELKDGGGSGGGGSGGGGSSQAYLQQSGAELVRPGASVKMSCKASGYTFTSYNMHWVKQTPRQGLEWIGAIYPGNGDTSYNQKFKGKATLTVDKSSSTAYMQLSSLTSEDSAVYFCARVVYYSNSYWYFDVWGTGTTVTVSDPENSFEMQKGDQNPQIAAHVISEASSKTTSVLQWAEKGYYTMSNNLVTLENGKQLTVKRQGLYYIYAQVTFCSNREASSQAPFIASLCLKSPGRFERILLRAANTHSSAKPCGQQSIHLGGVFELQPGASVFVNVTDPSQVSHGTGFTSFGLLKLE

SEQ ID NO: 6449 - protein, 383 aa, Artificial Sequence
  source: /note="Description of Artificial Sequence: Synthetic polypeptide"
MGVLLTQRTLLSLVLALLFPSMASMAMHVAQPAVVLASSRGIASFVCEYASPGKATEVRVTVLRQADSQVTEVCAATYMMGNELTFLDDSICTGTSSGNQVNLTIQGLRAMDTGLYICKVELMYPPPYYLGIGNGTQIYVIDPEPCPDSDQEPKSSDKTHTSPPSPAPELLGGSSVFLFPPKPKDTLMISRTPEVTCVVVDVSHEDPEVKFNWYVDGVEVHNAKTKPREEQYNSTYRVVSVLTVLHQDWLNGKEYKCKVSNKALPAPIEKTISKAKGQPREPQVYTLPPSRDELTKNQVSLTCLVKGFYPSDIAVEWESNGQPENNYKTTPPVLDSDGSFFLYSKLTVDKSRWQQGNVFSCSVMHEALHNHYTQKSLSLSPGK

SEQ ID NO: 6450 - protein, 133 aa, Artificial Sequence
  source: /note="Description of Artificial Sequence: Synthetic polypeptide"
AMRSCPEEQYDHLLRDCISCEGAPSVFLFPHNAKTKPREETISKAKGQPRGQPENNYKTTHYTQKSLSLSWDPLLGTCMSASICGQHPKQPKPKDTLMISQYNSTYRVVSEPQVYTLPPSPPVLDSDGSFPGK

SEQ ID NO: 6451 - protein, 421 aa, Artificial Sequence
  source: /note="Description of Artificial Sequence: Synthetic polypeptide"
AVPPYASENQTCRDQEKEYYEPQHRICCSRCPPGTYVSAKCSRIRDTVCATCAENSYNEHWNYLTICQLCRPCDPVMGLEEIAPCTSKRKTQCRCQPGMFCAAWALECTHCELLSDCPPGTEAELKDEVGKGNNHCVPCKAGHFQNTSSPSARCQPHTRCENQGLVEAAPGTAQSDTTCKNPLEPLPPEMSGTMVDKTHTCPPCPAPELLGGPSVFLFPPKPKDTLMISRTPEVTCVVVDVSHEDPEVKFNWYVDGVEVHNAKTKPREEQYNSTYRVVSVLTVLHQDWLNGKEYKCKVSNKALPAPIEKTISKAKGQPREPQVYTLPPSRDELTKNQVSLTCLVKGFYPSDIAVEWESNGQPENNYKTTPPVLDSDGSFFLYSKLTVDKSRWQQGNVFSCSVMHEALHNHYTQKSLSLSPG

SEQ ID NO: 6452 - protein, 357 aa, Artificial Sequence
  source: /note="Description of Artificial Sequence: Synthetic polypeptide"
MHVAQPAVVLASSRGIASFVCEYASPGKYTEVRVTVLRQADSQVTEVCAATYMMGNELTFLDDSICTGTSSGNQVNLTIQGLRAMDTGLYICKVELMYPPPYYEGIGNGTQIYVIDPEPCPDSDQEPKSSDKTHTSPPSPAPELLGGSSVFLFPPKPKDTLMISRTPEVTCVVVDVSHEDPEVKFNWYVDGVEVHNAKTKPREEQYNSTYRVVSVLTVLHQDWLNGKEYKCKVSNKALPAPIEKTISKAKGQPREPQVYTLPPSRDELTKNQVSLTCLVKGFYPSDIAVEWESNGQPENNYKTTPPVLDSDGSFFLYSKLTVDKSRWQQGNVFSCSVMHEALHNHYTQKSLSLSPGK

SEQ ID NO: 6453 - protein, 290 aa, Artificial Sequence
  source: /note="Description of Artificial Sequence: Synthetic polypeptide"
GCKWDLLIKQWVCDPLGSGSATGGSGSTASSGSGSATHMLPGCKWDLLIKQWVCDPLGGGGGVDKTHTCPPCPAPELLGGPSVFLFPPKPKDTLMISRTPEVTCVVVDVSHEDPEVKFNWYVDGVEVHNAKTKPREEQYNSTYRVVSVLTVLHQDWLNGKEYKCKVSNKALPAPIEKTISKAKGQPREPQVYTLPPSRDELTKNQVSLTCLVKGFYPSDIAVEWESNGQPENNYKTTPPVLDSDGSFFLYSKLTVDKSRWQQGNVFSCSVMHEALHNHYTQKSLSLSPGK

SEQ ID NO: 6454 - protein, 328 aa, Artificial Sequence
  source: /note="Description of Artificial Sequence: Synthetic polypeptide"
DPVKPSRGPLVTCTCESPHCKGPTCRGAWCTVVLVREEGRHPQEHRGCGNLHRELCRGRPTEFVNHYCCDSHLCNHNVSLVLEATQPPSEQPGTDGQLATGGGTHTCPPCPAPEALGAPSVFLFPPKPKDTLMISRTPEVTCVVVDVSHEDPEVKFNWYVDGVEVHNAKTKPREEQYNSTYRVVSVLTVLHQDWLNGKEYKCKVSNKALPVPIEKTISKAKGQPREPQVYTLPPSREEMTKNQVSLTCLVKGFYPSDIAVEWESNGQPENNYKTTPPVLDSDGPFFLYSKLTVDKSRWQQGNVFSCSVMHEALHNHYTQKSLSLSPGK

SEQ ID NO: 6455 - protein, 408 aa, Artificial Sequence
  source: /note="Description of Artificial Sequence: Synthetic polypeptide"
SVFDSKFNGIHVYSEIGELETVLVHEPGREIDYITPARLDELLFSAILESHDARKEHQSFVKIMKDRGINVVELTDLVAETYDLASKAAKEEFIETFLEETVPVLTEANKEAVRAFLLSKPTHEMVEFMMSGITKYELGVESENELIVDPMPNLYFTRDPFASVGNGVTIHFMRYIVRRRETLFARFVFRNHPKLVKTPWYYDPAMKMSIEGGDVFIYNNETLVVGVSERTDLDTITLLAKNIKANKEVEFKRIVAINVPKWTNLMHLDTWLTMLDKNKFLYSPIANDVFKFWDYDLVNGGAEPQPQLNGLPLDKLLASIINKEPVLIPIGGAGATEMEIARETNFDGTNYLAIKPGLVIGYDRNEKTNAALKAAGITVLPFHGNQLSLGMGNARCMSMPLSRKDVKW

SEQ ID NO: 6456 - protein, 106 aa, Artificial Sequence
  source: /note="Description of Artificial Sequence: Synthetic polypeptide"
MDSVCPQGKYIHPQNNSICCTKCHKGTYLYNDCPGPGQDTDCRECESGSFTASENHLRHCLSCSKCRKEMGQVEISSCTVDRDTVCGCRKNQYRHYWSENLFQCFN

SEQ ID NO: 6457 - protein, 880 aa, Artificial Sequence
  source: /note="Description of Artificial Sequence: Synthetic polypeptide"
SERCDDWGLDTMRQIQVFEDEPARIKCPLFEHFLKFNYSTAHSAGLTLIWYWTRQDRDLEEPINFRLPENRISKEKDVLWFRPTLLNDTGNYTCMLRNTTYCSKVAFPLEVVQKDSCFNSPMKLPVHKLYIEYGIQRITCPNVDGYFPSSVKPTITWYMGCYKIQNFNNVIPEGMNLSFLIALISNNGNYTCVVTYPENGRTFHLTRTLTVKVVGSPKNAVPPVIHSPNDHVVYEKEPGEELLIPCTVYFSFLMDSRNEVWWTIDGKKPDDITIDVTINESISHSRTEDETRTQILSIKKVTSEDLKRSYVCHARSAKGEVAKAAKVKQKVPAPRYTVEKCKEREEKIILVSSANEIDVRPCPLNPNEHKGTITWYKDDSKTPVSTEQASRIHQHKEKLWFVPAKVEDSGHYYCVVRNSSYCLRIKISAKFVENEPNLCYNAQAIFKQKLPVAGDGGLVCPYMEFFKNENNELPKLQWYKDCKPLLLDNIHFSGVKDRLIVMNVAEKHRGNYTCHASYTYLGKQYPITRVIEFITLEENKPTRPVIVSPANETMEVDLGSQIQLICNVTGQLSDIAYWKWNGSVIDEDDPVLGEDYYSVENPANKRRSTLITVLNISEIESRFYKHPFTCFAKNTHGIDAAYIQLIYPVTNSGDKTHTCPPCPAPELLGGPSVFLFPPKPKDTLMISRTPEVTCVVVDVSHEDPEVKFNWYVDGVEVHNAKTKPREEQYNSTYRVVSVLTVLHQDWLNGKEYKCKVSNKALPAPIEKTISKAKGQPREPQVYTLPPSRDELTKNQVSLTCLVKGFYPSDIAVEWESNGQPENNYKTTPPVLDSDGSFFLYSKLTVDKSRWQQGNVFSCSVMHEALHNHYTQKSLSLSPGK

SEQ ID NO: 6458 - protein, 279 aa, Artificial Sequence
  source: /note="Description of Artificial Sequence: Synthetic polypeptide"
MVFQTRYPSWIILCYIWLLRFAHTGEAQAAKEVLLLDSKAQQTELEWISSPPNGWEEISGLDENYTPIRTYQVCQVMEPNQNNWLRTNWISKGNAQRIFVELKFTLRDCNSLPGVLGTCKETFNLYYYETDYDTGRNIRENLYVKIDTIAADESFTQGDLGERKMKLNTEVREIGPLSKKGFYLAFQDVGACIALVSVKVYYKKCWSIIENLAIFPDTVTGSEFSSLVEVRGTCVSSAEEEAENAPRMHCSAEGEWLVPIGKCICKAGYQQKGDTCERK

SEQ ID NO: 6459 - protein, 120 aa, Artificial Sequence
  source: /note="Description of Artificial Sequence: Synthetic polypeptide"
QVQLVQSGGGVVQPGRSLRLSCAASGVSLPDYGVSWVRQAPGKGLEWVAVIWGSETTYYNSALKSRFTISRDNSKNTLYLQMNSLRAEDTAVYYCAKHFYYGGSYAMDYWGQGTLVTVSS

SEQ ID NO: 6460 - protein, 120 aa, Artificial Sequence
  source: /note="Description of Artificial Sequence: Synthetic polypeptide"
QVQLVQSGGGVVQPGRSLRLSCAASGVSLPDYGVSWVRQAPGKGLEWVAVIWGSETTYYNSALKSRFTISRDNSKNTLYLQMNSLRAEDTAVYYCAKHYFYGGSYAMDYWGQGTLVTVSS

SEQ ID NO: 6461 - protein, 120 aa, Artificial Sequence
  source: /note="Description of Artificial Sequence: Synthetic polypeptide"
QVQLVQSGGGVVQPGRSLRLSCAASGVSLPDYGVSWVRQAPGKGLEWVAVIWGSETTYYNSALKSRFTISRDNSKNTLYLQMNSLRAEDTAVYYCAKHYYFGGSYAMDYWGQGTLVTVSS

SEQ ID NO: 6462 - protein, 120 aa, Artificial Sequence
  source: /note="Description of Artificial Sequence: Synthetic polypeptide"
QVQLVQSGGGVVQPGRSLRLSCAASGVSLPDYGVSWVRQAPGKGLEWVAVIWGSETTYYNSALKSRFTISRDNSKNTLYLQMNSLRAEDTAVYYCAKHYYYGGSFAMDYWGQGTLVTVSS

SEQ ID NO: 6463 - protein, 330 aa, Artificial Sequence [sequence omitted]

SEQ ID NO: 6464 - protein, 440 aa, Artificial Sequence; identical to SEQ ID NO: 3834
  source: /note="Description of Artificial Sequence: Synthetic polypeptide"

SEQ ID NO: 6465 - protein, 443 aa, Artificial Sequence; identical to SEQ ID NO: 3822
  source: /note="Description of Artificial Sequence: Synthetic polypeptide"

SEQ ID NO: 6466 - protein, 443 aa, Artificial Sequence; identical to SEQ ID NO: 3823
  source: /note="Description of Artificial Sequence: Synthetic polypeptide"

SEQ ID NO: 6467 - protein, 443 aa, Artificial Sequence; identical to SEQ ID NO: 3824
  source: /note="Description of Artificial Sequence: Synthetic polypeptide"

SEQ ID NO: 6468 - protein, 443 aa, Artificial Sequence; identical to SEQ ID NO: 3825
  source: /note="Description of Artificial Sequence: Synthetic polypeptide"

SEQ ID NO: 6469 - protein, 454 aa, Artificial Sequence; identical to SEQ ID NO: 3826
  source: /note="Description of Artificial Sequence: Synthetic polypeptide"

SEQ ID NO: 6470 - protein, 454 aa, Artificial Sequence; identical to SEQ ID NO: 3827
  source: /note="Description of Artificial Sequence: Synthetic polypeptide"

SEQ ID NO: 6471 - protein, 454 aa, Artificial Sequence; identical to SEQ ID NO: 3827
  source: /note="Description of Artificial Sequence: Synthetic polypeptide"

SEQ ID NO: 6472 - protein, 443 aa, Artificial Sequence; identical to SEQ ID NO: 3829
  source: /note="Description of Artificial Sequence: Synthetic polypeptide"

SEQ ID NO: 6473 - protein, 443 aa, Artificial Sequence; identical to SEQ ID NO: 3830
  source: /note="Description of Artificial Sequence: Synthetic polypeptide"

SEQ ID NO: 6474 - protein, 443 aa, Artificial Sequence; identical to SEQ ID NO: 3831
  source: /note="Description of Artificial Sequence: Synthetic polypeptide"

SEQ ID NO: 6475 - protein, 451 aa, Artificial Sequence; identical to SEQ ID NO: 3835
  source: /note="Description of Artificial Sequence: Synthetic polypeptide"

SEQ ID NO: 6476 - protein, 441 aa, Artificial Sequence; identical to SEQ ID NO: 3832
  source: /note="Description of Artificial Sequence: Synthetic polypeptide"

SEQ ID NO: 6477 - protein, 443 aa, Artificial Sequence; identical to SEQ ID NO: 3833
  source: /note="Description of Artificial Sequence: Synthetic polypeptide"

SEQ ID NO: 6478 - protein, 451 aa, Artificial Sequence; identical to SEQ ID NO: 3836
  source: /note="Description of Artificial Sequence: Synthetic polypeptide"

SEQ ID NO: 6479 - protein, 451 aa, Artificial Sequence; identical to SEQ ID NO: 3816
  source: /note="Description of Artificial Sequence: Synthetic polypeptide"

SEQ ID NO: 6480 - protein, 451 aa, Artificial Sequence; identical to SEQ ID NO: 3817
  source: /note="Description of Artificial Sequence: Synthetic polypeptide"

SEQ ID NO: 6481 - protein, 440 aa, Artificial Sequence; identical to SEQ ID NO: 3818
  source: /note="Description of Artificial Sequence: Synthetic polypeptide"

SEQ ID NO: 6482 - protein, 440 aa, Artificial Sequence; identical to SEQ ID NO: 3819
  source: /note="Description of Artificial Sequence: Synthetic polypeptide"

SEQ ID NO: 6483 - protein, 440 aa, Artificial Sequence; identical to SEQ ID NO: 3820
  source: /note="Description of Artificial Sequence: Synthetic polypeptide"

SEQ ID NO: 6484 - protein, 440 aa, Artificial Sequence; identical to SEQ ID NO: 3821
  source: /note="Description of Artificial Sequence: Synthetic polypeptide"

SEQ ID NO: 6485 - protein, 440 aa, Artificial Sequence; identical to SEQ ID NO: 3837
  source: /note="Description of Artificial Sequence: Synthetic polypeptide"

SEQ ID NO: 6486 - protein, 443 aa, Artificial Sequence
  source: /note="Description of Artificial Sequence: Synthetic polypeptide"
QVQLQESGPGLVKPSQTLSLTCTVSGGSISSGEYYWNWIRQHPGKGLEWIGYIYYSGSTYYNPSLKSRVTISVDTSKNQFSLKLSSVTAADTAVYYCARESVAGFDYWGQGTLVTVSSASTKGPSVFPLAPCSRSTSESTAALGCLVKDYFPEPVTVSWNSGALTSGVHTFPAVLQSSGLYSLSSVVTVPSSNFGTQTYTCNVDHKPSNTKVDKTVERKCCVECPPCPAPPVAGPSVFLFPPKPKDTLMISRTPEVTCVVVDVSHEDPEVQFNWYVDGVEVHNAKTKPREEQFNSTFRVVSVLTVVHQDWLNGKEYKCKVSNKGLPAPIEKTISKTKGQPREPQVYTLPPSREEMTKNQVSLTCLVKGFYPSDIAVEWESNGQPENNYKTTPPMLDSDGSFFLYSKLTVDKSRWQQGNVFSCSVMHEALHNHYTQKSLSLSPG

SEQ ID NO: 6487 - protein, 466 aa, Artificial Sequence
  source: /note="Description of Artificial Sequence: Synthetic polypeptide"
MACPGFLWALVISTCLEFSMAEVQLVESGGGLVQPGGSLRLSCAASGFTFSSYAMSWVRQAPGKGLEWVSAISGSGGSTYYADSVKGRFTISRDNSKDTLYLQMSSLKTEDTAVYYCARGSLLQFWGQGTLVTVSSASTKGPSVFPLAPSSKSTSGGTAALGCLVKDYFPEPVTVSWNSGALTSGVHTFPAVLQSSGLYSLSSVVTVPSSSLGTQTYICNVNHKPSNTKVDKRVEPKSCDKTHTCPPCPAPELLGGPSVFLFPPKPKDTLMISRTPEVTCVVVDVSHEDPEVKFNWYVDGVEVHNAKTKPREEQYNSTYRVVSVLTVLHQDWLNGKEYKCKVSNKALPAPIEKTISKAKGQPREPQVYTLPPSREEMTKNQVSLTCLVKGFYPSDIAVEWESNGQPENNYKTTPPVLDSDGSFFLYSKLTVDKSRWQQGNVFSCSVMHEALHNHYTQKSLSLSPGK

SEQ ID NO: 6488 - protein, 450 aa, Artificial Sequence
  source: /note="Description of Artificial Sequence: Synthetic polypeptide"
QVQLVQSGAEVKKPGASVKVSCKASGFNIKDTYIHWVRQAPGQRLEWMGRIDPANGYTKYDPKFQGRVTITADTSASTAYMELSSLRSEDTAVYYCAREGYYGNYGVYAMDYWGQGTLVTVSSASTKGPSVFPLAPCSRSTSESTAALGCLVKDYFPEPVTVSWNSGALTSGVHTFPAVLQSSGLYSLSSVVTVPSSSLGTKTYTCNVDHKPSNTKVDKRVESKYGPPCPSCPAPEFLGGPSVFLFPPKPKDTLMISRTPEVTCVVVDVSQEDPEVQFNWYVDGVEVHNAKTKPREEQFNSTYRVVSVLTVLHQDWLNGKEYKCKVSNKGLPSSIEKTISKAKGQPREPQVYTLPPSQEEMTKNQVSLTCLVKGFYPSDIAVEWESNGQPENNYKTTPPVLDSDGSFFLYSRLTVDKSRWQEGNVFSCSVMHEALHNHYTQKSLSLSLGK

SEQ ID NO: 6489 - protein, 452 aa, Artificial Sequence
  source: /note="Description of Artificial Sequence: Synthetic polypeptide"
EVQLVESGGGLVQPGGSLRLSCAASGFTFSSYDIHWVRQATGKGLEWVSAIGPAGDTYYPGSVKGRFTISRENAKNSLYLQMNSLRAGDTAVYYCARGLITFGGLIAPFDYWGQGTLVTVSSASTKGPSVFPLAPSSKSTSGGTAALGCLVKDYFPEPVTVSWNSGALTSGVHTFPAVLQSSGLYSLSSVVTVPSSSLGTQTYICNVNHKPSNTKVDKKVEPKSCDKTHTCPPCPAPELLGGPSVFLFPPKPKDTLMISRTPEVTCVVVDVSHEDPEVKFNWYVDGVEVHNAKTKPREEQYNSTYRVVSVLTVLHQDWLNGKEYKCKVSNKALPAPIEKTISKAKGQPREPQVYTLPPSRDELTKNQVSLTCLVKGFYPSDIAVEWESNGQPENNYKTTPPVLDSDGSFFLYSKLTVDKSRWQQGNVFSCSVMHEALHNHYTQKSLSLSPGK

SEQ ID NO: 6490 - protein, 117 aa, Artificial Sequence
  source: /note="Description of Artificial Sequence: Synthetic polypeptide"
VKLQESGAELVKPGASVKLSCKASGYTFTSYWMHWVKQRPGRGLEWIGRIGPNSGGTKYNEKFKSKATLTVDKPSSTAYMQLSSLTSEDSAVYYCARRMVKGCYGLLGPRDHGHRLL

SEQ ID NO: 6491 - protein, 117 aa, Artificial Sequence
  source: /note="Description of Artificial Sequence: Synthetic polypeptide"
VKLQESGPELVKPGASVKISCKASGYTFTDYYMNWVKQSHGKSLEWIGDINPNNGGTSYNQKFKGKATLTVDKSSSTAYMELRSLTSEDSAVYYCARYDYAWYFDVWGQGTTVTVSS

SEQ ID NO: 6492 - protein, 117 aa, Artificial Sequence
  source: /note="Description of Artificial Sequence: Synthetic polypeptide"
VKLQESGTELVKPGASVKLSCKASGYTFTSYWMHWVKQRPGQGLEWIGNINPSNGGTNYNEKFKSKATLTVDKSSSTAYMQLSSLTSEDSAVYYCARRGIRLRHFDYWGQGTTVTVS

SEQ ID NO: 6493 - protein, 118 aa, Artificial Sequence
  source: /note="Description of Artificial Sequence: Synthetic polypeptide"
QVQLQQSGAELARPGASVKLSCKASGYTFTNYGLSWVKQRTGQGLEWIGENHPGSGIIYHNEKFRGKATLTADKSSSTAYVQLSSLTSEDSAVYFCARSSGTRGFAYWGQGTLVTVSA

SEQ ID NO: 6494 - protein, 452 aa, Artificial Sequence
  source: /note="Description of Artificial Sequence: Synthetic polypeptide"
EVQLVESGGGLVQPGGSLRLSCAASGFTFSSFGMHWVRQAPGKGLEWVAYISSDSSAIYYADTVKGRFTISRDNAKNSLYLQMNSLRDEDTAVYYCGRGRENIYYGSRLDYWGQGTTVTVSSASTKGPSVFPLAPSSKSTSGGTAALGCLVKDYFPEPVTVSWNSGALTSGVHTFPAVLQSSGLYSLSSVVTVPSSSLGTQTYICNVNHKPSNTKVDKRVEPKSCDKTHTCPPCPAPELVGGPSVFLLPPKPKDTLMISRTPEVTCVVVDVSHEDPEVKFNWYVDGVEVHNAKTKPPEEQYNSTLRVVSVLTVLHQDWLNGKEYKCKVSNKALPAPIEKTISKAKGQPREPQVYTLPPSREEMTKNQVSLTCLVKGFYPSDIAVEWESNGQPENNYKTTPLVLDSDGSFFLYSKLTVDKSRWQQGNVFSCSVMHEALHNHYTQKSLSLSPGK

SEQ ID NO: 6495 - protein, 449 aa, Artificial Sequence
  source: /note="Description of Artificial Sequence: Synthetic polypeptide"
EVQLVESGGGLVQPGGSLRLSCAASGFNIKDTYIHWVRQAPGKGLEWVARIYPTNGYTRYADSVKGRFTISADTSKNTAYLQMNSLRAEDTAVYYCSRWGGDGFYAMDYWGQGTLVTVSSASTKGPSVFPLAPSSKSTSGGTAALGCLVKDYFPEPVTVSWNSGALTSGVHTFPAVLQSSGLYSLSSVVTVPSSSLGTQTYICNVNHDPSNTKVDKKVEPKSCDKTHTCPPCPAPELLGGPSVFLFPPKPKDTLMISRTPEVTCVVVDVSHEDPEVKFNWYVDGVEVHNAKTKPREEQYNSTYRVVSVLTVLHQDWLNGKEYKCKVSNKALPAPIEKTISKAKGQPREPQVYTLPPSREEMTKNQVSLTCLVKGFYPSDIAVEWESNGQPENNYKTTPPVLDSDGSFFLYSKLTVDKSRWQQGNVFSCSVMHEALHNHYTQKSLSLSPG

SEQ ID NO: 6496 - protein, 111 aa, Artificial Sequence
  source: /note="Description of Artificial Sequence: Synthetic polypeptide"
EVQLVQSGAEVKKPGESLRISCKGSGYIFTNYPIHWIRQPPGKGLEWIGFIDPGGGYDEPDERFRDRFVFSLDTSVSTAYLQICSLKAEDTAVYYCARRGGGYYLDYWGQG

SEQ ID NO: 6497 - protein, 111 aa, Artificial Sequence; identical to SEQ ID NO: 6496
  source: /note="Description of Artificial Sequence: Synthetic polypeptide"

SEQ ID NO: 6498 - protein, 111 aa, Artificial Sequence
  source: /note="Description of Artificial Sequence: Synthetic polypeptide"
EVQLVQSGAEVKKPGESLRISCKGSGYIFTNYPIHWIRQSPSRGLEWLGFIDPGGGYDEPDERFRDRVTISADKSISTAYLQWSSLKASDTAMYYCARRGGGYYLDYWGQG

SEQ ID NO: 6499 - protein, 111 aa, Artificial Sequence
  source: /note="Description of Artificial Sequence: Synthetic polypeptide"
EVQLVQSGAEVKKPGESLRISCKGSGYIFTNYPIHWVRQAPGKGLEWVSFIDPGGGYDEPDERFRDRLTISKDTSKNQVVLTMTNMDPVDTATYYCARRGGGYYLDYWGQG

SEQ ID NO: 6500 - protein, 111 aa, Artificial Sequence
  source: /note="Description of Artificial Sequence: Synthetic polypeptide"
EVQLVQSGAEVKKPGESLRISCKGSGYIFTNYPIHWVRQAPGKGLEWVSFIDPGGGYDEPDERFRDRVTISVDTSKNQFSLKLSSVTAADTAVYYCARRGGGYYLDYWGQG

SEQ ID NO: 6501 - protein, 111 aa, Artificial Sequence
  source: /note="Description of Artificial Sequence: Synthetic polypeptide"
EVQLVQSGAEVKKPGESLRISCKGSGYIFTNYPIHWVRQAPGQGLEWMGFIDPGGGYDEPDERFRDRFVFSLDTSVSTAYLQICSLKAEDTAVYYCARRGGGYYLDYWGQG

SEQ ID NO: 6502 - protein, 111 aa, Artificial Sequence
  source: /note="Description of Artificial Sequence: Synthetic polypeptide"
EVQLVQSGAEVKKPGESLRISCKGSGYIFTNYPIHWVRQATGQGLEWMGFIDPGGGYDEPDERFRDRFTISRDDSKNTAYLQMNSLKTEDTAVYYCTRRGGGYYLDYWGQG

SEQ ID NO: 6503 - protein, 118 aa, Artificial Sequence
  source: /note="Description of Artificial Sequence: Synthetic polypeptide"
QVLLQQSAPELARPGASVKMSCTASGYIFTNYPIHWVKQRPGQGLEWIGFIDPGGGYDEPDERFRDRATLTADKSSSTAYMQLSSLTSEDSAIYYCARRGGGYYLDYWGQGTTLTVSS

SEQ ID NO: 6504 - protein, 111 aa, Artificial Sequence
  source: /note="Description of Artificial Sequence: Synthetic polypeptide"
QVQLQESGPGLVKPSQTLSLTCTVSGYIFTNYPIHWVRQAPGKGLEWVSFIDPGGGYDEPDERFRDRVTISVDTSKNQFSLKLSSVTAADTAVYYCARRGGGYYLDYWGQG

SEQ ID NO: 6505 - protein, 111 aa, Artificial Sequence; identical to SEQ ID NO: 6504
  source: /note="Description of Artificial Sequence: Synthetic polypeptide"

SEQ ID NO: 6506 - protein, 111 aa, Artificial Sequence; identical to SEQ ID NO: 6504
  source: /note="Description of Artificial Sequence: Synthetic polypeptide"

SEQ ID NO: 6507 - protein, 111 aa, Artificial Sequence
  source: /note="Description of Artificial Sequence: Synthetic polypeptide"
QVQLQESGPGLVKPSQTLSLTCTVSGYIFTNYPIHWVRQATGQGLEWMGFIDPGGGYDEPDERFRDRVTITADKSTSTAYMELSSLRSEDTAVYYCARRGGGYYLDYWGQG

SEQ ID NO: 6508 - protein, 118 aa, Artificial Sequence
  source: /note="Description of Artificial Sequence: Synthetic polypeptide"
QVQLVQSAPEVAKPGTSVKMSCKASGYIFTNYPIHWVKQAPGQGLEWIGFIDPGGGYDEPDERFRDRATLTADKSTSTAYMELSSLRSEDTAIYYCARRGGGYYLDYWGQGTLVTVSS

SEQ ID NO: 6509 - protein, 118 aa, Artificial Sequence
  source: /note="Description of Artificial Sequence: Synthetic polypeptide"
QVQLVQSGPEVAKPGSSVKVSCKASGYIFTNYPIHWVRQAPGQGLEWIGFIDPGGGYDEPDERFRDRATITADKSTSTAYMELSSLRSEDTAVYYCARRGGGYYLDYWGQGTLVTVSS

SEQ ID NO: 6510 - protein, 232 aa, Artificial Sequence
  source: /note="Description of Artificial Sequence: Synthetic polypeptide"
LNMERHWIFLFLLSVTAGVHSQVLLQQSAPELARPGASVKMSCTASGYIFTNYPIHWVKQRPGQGLEWIGFIDPGGGYDEPDERFRDRATLTADKSSSTAYMQLSSLTSEDSAIYYCARRGGGYYLDYWGQDTTLTVSAASTTPPSVKGEFFIDPGGGYDEPDERFRDRATLTADKSSSTAYMQLSSLTSEDSAIYYCARRGGGYYLDYWGQDTTLTVSAASTTPPSVKGEF

SEQ ID NO: 6511 - protein, 98 aa, Artificial Sequence
  source: /note="Description of Artificial Sequence: Synthetic polypeptide"
EVQLQQSVPELARPGASVKMSCTASGYIFTTYPIHWVKQRPGQGLEWIGFIDPGGGYDEPDDKFRDRATLTADKSSTTAYMQLSSLTSEDSAVYYCAR

SEQ ID NO: 6512 - protein, 121 aa, Artificial Sequence
  source: /note="Description of Artificial Sequence: Synthetic polypeptide"
QVQLQQSGAELAKPGASVRMSCKASGYTFTNYWIHWVKQRPGQGLEWIGYINPNTGYNDYNQKFKDKATLTADKSSSTVYMQLSSLTSEDSAVYYCARGGQLGLRRAMDYWGQGTSVTVSS

SEQ ID NO: 6513 - protein, 121 aa, Artificial Sequence
  source: /note="Description of Artificial Sequence: Synthetic polypeptide"
QVQLVQSGAEVKKPGASVKMSCKASGYTFTNYWIHWVRQAPGQGLEWIGYINPNTGYNDYNQKFKDRATLTADKSSSTVYMQLSSLRSEDTAVYYCARGGQLGLRRAMDYWGQGTLVTVSS

SEQ ID NO: 6514 - protein, 121 aa, Artificial Sequence
  source: /note="Description of Artificial Sequence: Synthetic polypeptide"
QVQLVQSGAEVAKPGASVKMSCKASGYTFTNYWIHWVKQRPGQGLEWIGYINPNTGYNDYNQKFKDKATLTADKSSSTVYMQLSSLTSEDTAVYYCARGGQLGLRRAMDYWGQGTLVTVSS

SEQ ID NO: 6515 - protein, 120 aa, Artificial Sequence
  source: /note="Description of Artificial Sequence: Synthetic polypeptide"
QVQLQQSGAEIVKPGASVKMSCKASGYTFTSYWINWVKQRPGQGLEWIGDIYPVRGITNYSEKFKNKAKMIPDTSSSTVYMQLSSLTSEDSAVYYCSRGNFGNFDAMDYWGQGTSVTVSS

SEQ ID NO: 6516 - protein, 120 aa, Artificial Sequence
  source: /note="Description of Artificial Sequence: Synthetic polypeptide"
QVQLVQSGAEIVKPGASVKMSCKASGYTFTSYWINWVKQAPGQGLEWIGDIYPVRGITNYSEKFKNKATMIPDTSTSTVYMELSSLRSEDTAVYYCSRGNFGNFDAMDYWGQGTMVTVSS

SEQ ID NO: 6517 - protein, 120 aa, Artificial Sequence
  source: /note="Description of Artificial Sequence: Synthetic polypeptide"
QVQLVQSGAEIVKPGASVKMSCKASGYTFTSYWINWVKQRPGQGLEWIGDIYPVRGITNYSEKFKNKAKMIPDTSTSTVYMQLSSLTSEDTAVYYCSRGNFGNFDAMDYWGQGTMVTVSS

SEQ ID NO: 6518 - protein, 120 aa, Artificial Sequence
  source: /note="Description of Artificial Sequence: Synthetic polypeptide"
QVQLVQSGAEVKKPGASVKMSCKASGYTFTSYWINWVRQAPGQGLEWIGDIYPVRGITNYSEKFKNKATMIPDTSTSTVYMELSSLRSEDTAVYYCSRGNFGNFDAMDYWGQGTMVTVSS

SEQ ID NO: 6519 - protein, 128 aa, Artificial Sequence
  source: /note="Description of Artificial Sequence: Synthetic polypeptide"
QVQLVQSGAEVKKPGASVKVSVKVSGYTLTELSMHWVRQAPGKGLEWMGGFDPEDGETIYAQMFQGRVTMTEDTSTDTAYMDLSSLRSEDTAVYYCATGTYYDILTGPSYYYYGLGVWGQGTTVTVSS

SEQ ID NO: 6520 - protein, 117 aa, Artificial Sequence
  source: /note="Description of Artificial Sequence: Synthetic polypeptide"
QVQLEQSGPGLVKPSQTLSLTCTVSGDSISSGGHYWSWIRQHPGKGLEWIGYIYYSGSSYYNPSLKSRFTISVDTSKNQFSLKLTSVTAADTAVYYCARTGDYFDYWGLGTLVTVSS

SEQ ID NO: 6521 - protein, 118 aa, Artificial Sequence
  source: /note="Description of Artificial Sequence: Synthetic polypeptide"
QSLEESGGRLVTPGTPLTLTCTVSGFDLSTYAMSWVRQAPGKGLEWIGAVSATTGNTYYATWAKGRFTMSKASTTVDLKITSPTTEDTATYFCVRYASSGVGTYFDLWGQGTLVTVSS

SEQ ID NO: 6522 - protein, 123 aa, Artificial Sequence
  source: /note="Description of Artificial Sequence: Synthetic polypeptide"
QSLEESGGGLVKPGASLTLTCTASGFSFSSGYWIFWVRQAPGKGLELVGGIYSGSSGTTYYANWAKGRFTISKTSSTTVTLQMTSLTAADTATYFCARSVDGIDSYDAAFNLWGPGTLVTVSS

SEQ ID NO: 6523 - protein, 123 aa, Artificial Sequence; identical to SEQ ID NO: 6522
  source: /note="Description of Artificial Sequence: Synthetic polypeptide"

SEQ ID NO: 6524 - protein, 122 aa, Artificial Sequence
  source: /note="Description of Artificial Sequence: Synthetic polypeptide"
QSLEESGGDLAKPGASLTITCTASGFSFSSSYWIFWVRQAPGKGLELIGGIYSSSGRMYYASWAKGRFTISKTSSTTMTLQMTSLTAADTATYFCARSADGSDSYDAYFTLWGPGTLVTVSS

SEQ ID NO: 6525 - protein, 115 aa, Artificial Sequence
  source: /note="Description of Artificial Sequence: Synthetic polypeptide"
QSLEESGGRLVTPGGSLTLTCTVSGFSLSNYHLGWVRRAPGKGLEWIGVITYGGSTYYASWVKGRFTISKTSTTVDLKMTSLTTEDTATYFCARRDSGGYHLDLWGQGTLVTISS

SEQ ID NO: 6526 - protein, 109 aa, Artificial Sequence
  source: /note="Description of Artificial Sequence: Synthetic polypeptide"
QSVEESGGRLVTPGGSLTLTCTVSGFSLSSNAINWVRQAPGEGLDWIGTIHTNTKTYYATWARGRFTISRTSSTTVDLKVTSLTAADTATYFCGRADLWGQGTLVTVSS

SEQ ID NO: 6527 - protein, 120 aa, Artificial Sequence
  source: /note="Description of Artificial Sequence: Synthetic polypeptide"
QVTLKESGPGILQPSQTLSLTCSFSGFSLSTSGMGVGWIRQPSGKGLEWLAHIWWDDVKSYNPALKSRLTISKDTSSSQVFLRIASVDTADTATYYCARIGDGYYSFDYWGQGTTLTVSS

SEQ ID NO: 6528 - protein, 120 aa, Artificial Sequence
  source: /note="Description of Artificial Sequence: Synthetic polypeptide"
QVTLKESGPTILQPTQTLTLTCTFSGFSLSTSGMGVGWIRQPSGKALEWIAHIWWDDVKSYNPALKSRLTITKDTSKSQVVLRIASVDPVDTATYYCARIGDGYYSFDYWGQGTTLTVSS

SEQ ID NO: 6529 - protein, 120 aa, Artificial Sequence
  source: /note="Description of Artificial Sequence: Synthetic polypeptide"
QVTLKESGPTILQPTQTLTLTCTFSGFSLSTSGMGVGWIRQPSGKGLEWIAHIWWDDVKSYNPALKSRLTITKDTSKSQVVLRIASVDTADTATYYCARIGDGYYSFDYWGQGTTLTVSS

SEQ ID NO: 6530 - protein, 120 aa, Artificial Sequence
  source: /note="Description of Artificial Sequence: Synthetic polypeptide"
QVTLKESGPTLVKPTQTLTLTCTFSGFSLSTSGMGVGWIRQPPGKALEWIAHIWWDDVKSYNPALKSRLTITKDTSKNQVVLRIASVDPVDTATYYCARIGDGYYSFDYWGQGTTLTVSS

SEQ ID NO: 6531 - protein, 116 aa, Artificial Sequence
  source: /note="Description of Artificial Sequence: Synthetic polypeptide"
QVQLVESGGGVVQPGRSLRLSCAASGFTFSCYGMHWVRQAPGKGLEWVAVIWYDGSNKYYADSVKGRFTISRDNSKNTLYLQMNSLRAEDTAVYYCAGGATAMDVWGQGTTVTVSS

SEQ ID NO: 6532 - protein, 126 aa, Artificial Sequence
  source: /note="Description of Artificial Sequence: Synthetic polypeptide"
QEQSGGGVVQPGRSLRLSCAASGFTFSNYGIHWVRQAPGKGLEWVAVIWYDGNNKYYADSVKGRFTISRDNSKNTLYLQMNSLRAEDTAVYYCARGGYYDSRGYYTPYYYYGMDVWGQGTTVTVSS

SEQ ID NO: 6533 - protein, 117 aa, Artificial Sequence
  source: /note="Description of Artificial Sequence: Synthetic polypeptide"
QVQLQESGPGLVKPSETLSLTCTVSGGSISIYYWSWIRQPPGKGLEWIGYIYYSGSTNYNPSLKSRVTISVDTSKNQFSLKLSSVTAADTAVYYCAVWNYGDAFDIWGQGTMVTVSS

SEQ ID NO: 6534 - protein, 111 aa, Artificial Sequence
  source: /note="Description of Artificial Sequence: Synthetic polypeptide"
EVQLVQSGAEVKKPGATVKISCKVSGYIFTNYPIHWVRQAPGKGLEWVSFIDPGGGYDEPDERFRDRFTISRDNAKNSLYLQMNSLRAEDTAVYYCARRGGGYYLDYWGQG

SEQ ID NO: 6535 - protein, 111 aa, Artificial Sequence; identical to SEQ ID NO: 6534
  source: /note="Description of Artificial Sequence: Synthetic polypeptide"

SEQ ID NO: 6536 - protein, 111 aa, Artificial Sequence; identical to SEQ ID NO: 6534
  source: /note="Description of Artificial Sequence: Synthetic polypeptide"

SEQ ID NO: 6537 - protein, 111 aa, Artificial Sequence; identical to SEQ ID NO: 6496
  source: /note="Description of Artificial Sequence: Synthetic polypeptide"

SEQ ID NO: 6538 - protein, 111 aa, Artificial Sequence; identical to SEQ ID NO: 6496
  source: /note="Description of Artificial Sequence: Synthetic polypeptide"

SEQ ID NO: 6539 - protein, 448 aa, Artificial Sequence
  source: /note="Description of Artificial Sequence: Synthetic polypeptide"
EVQLVESGGGLVQPGGSLRLSCAASGFSFSGRYWIQWVRQAPGKGLEWVASGWPGATGDTNYANWAKGRFTISRDDSKNTLYLQMNSLRAEDTAVYYCAREPVAWGGGLDLWGQGTLVTVSSASTKGPSVFPLAPCSRSTSESTAALGCLVKDYFPEPVTVSWNSGALTSGVHTFPAVLQSSGLYSLSSVVTVPSSNFGTQTYTCNVDHKPSNTKVDKTVERKCCVECPPCPAPPVAGPSVFLFPPKPKDTLMISRTPEVTCVVVDVSQEDPEVQFNWYVDGVEVHNAKTKPREEQFNSTYRVVSVLTVLHQDWLNGKEYKCKVSNKGLPSSIEKTISKAKGQPREPQVYTLPPSQEEMTKNQVSLTCLVKGFYPSDIAVEWESNGQPENNYKTTPPVLDSDGSFFLYSRLTVDKSRWQEGNVFSCSVMHEALHNHYTQKSLSLSLGK

SEQ ID NO: 6540 - protein, 448 aa, Artificial Sequence
  source: /note="Description of Artificial Sequence: Synthetic polypeptide"
EVQLVESGGGLVQPGGSLRLSCAASGFSFSGRYWIQWVRQAPGKGLEWVASSSLRGTGDTNYANWAKGRFTISRDDSKNTLYLQMNSLRAEDTAVYYCAREPVAWGGGLDLWGQGTLVTVSSASTKGPSVFPLAPCSRSTSESTAALGCLVKDYFPEPVTVSWNSGALTSGVHTFPAVLQSSGLYSLSSVVTVPSSNFGTQTYTCNVDHKPSNTKVDKTVERKCCVECPPCPAPPVAGPSVFLFPPKPKDTLMISRTPEVTCVVVDVSQEDPEVQFNWYVDGVEVHNAKTKPREEQFNSTYRVVSVLTVLHQDWLNGKEYKCKVSNKGLPSSIEKTISKAKGQPREPQVYTLPPSQEEMTKNQVSLTCLVKGFYPSDIAVEWESNGQPENNYKTTPPVLDSDGSFFLYSRLTVDKSRWQEGNVFSCSVMHEALHNHYTQKSLSLSLGK

SEQ ID NO: 6541 - protein, 448 aa, Artificial Sequence
  source: /note="Description of Artificial Sequence: Synthetic polypeptide"
EVQLVESGGGLVQPGGSLRLSCAASGFSFSGRYWIQWVRQAPGKGLEWVASVWPGFTGDTNYANWAKGRFTISRDDSKNTLYLQMNSLRAEDTAVYYCAREPVAWGGGLDLWGQGTLVTVSSASTKGPSVFPLAPCSRSTSESTAALGCLVKDYFPEPVTVSWNSGALTSGVHTFPAVLQSSGLYSLSSVVTVPSSNFGTQTYTCNVDHKPSNTKVDKTVERKCCVECPPCPAPPVAGPSVFLFPPKPKDTLMISRTPEVTCVVVDVSQEDPEVQFNWYVDGVEVHNAKTKPREEQFNSTYRVVSVLTVLHQDWLNGKEYKCKVSNKGLPSSIEKTISKAKGQPREPQVYTLPPSQEEMTKNQVSLTCLVKGFYPSDIAVEWESNGQPENNYKTTPPVLDSDGSFFLYSRLTVDKSRWQEGNVFSCSVMHEALHNHYTQKSLSLSLGK

SEQ ID NO: 6542 - protein, 448 aa, Artificial Sequence
  source: /note="Description of Artificial Sequence: Synthetic polypeptide"
EVQLVESGGGLVQPGGSLRLSCAASGFSLSGRYWIQWVRQAPGKGLEWVASGWPGATGDTNYANWAKGRFTISRDDSKNTLYLQMNSLRAEDTAVYYCAREPVAWGGGLDLWGQGTLVTVSSASTKGPSVFPLAPCSRSTSESTAALGCLVKDYFPEPVTVSWNSGALTSGVHTFPAVLQSSGLYSLSSVVTVPSSNFGTQTYTCNVDHKPSNTKVDKTVERKCCVECPPCPAPPVAGPSVFLFPPKPKDTLMISRTPEVTCVVVDVSQEDPEVQFNWYVDGVEVHNAKTKPREEQFNSTYRVVSVLTVLHQDWLNGKEYKCKVSNKGLPSSIEKTISKAKGQPREPQVYTLPPSQEEMTKNQVSLTCLVKGFYPSDIAVEWESNGQPENNYKTTPPVLDSDGSFFLYSRLTVDKSRWQEGNVFSCSVMHEALHNHYTQKSLSLSLGK

SEQ ID NO: 6543 - protein, 448 aa, Artificial Sequence
  source: /note="Description of Artificial Sequence: Synthetic polypeptide"
EVQLVESGGGLVQPGGSLRLSCAASGFSLSGRYWIQWVRQAPGKGLEWVASVWPGFTGDTNYANWAKGRFTISRDDSKNTLYLQMNSLRAEDTAVYYCAREPVAWGGGLDLWGQGTLVTVSSASTKGPSVFPLAPCSRSTSESTAALGCLVKDYFPEPVTVSWNSGALTSGVHTFPAVLQSSGLYSLSSVVTVPSSNFGTQTYTCNVDHKPSNTKVDKTVERKCCVECPPCPAPPVAGPSVFLFPPKPKDTLMISRTPEVTCVVVDVSQEDPEVQFNWYVDGVEVHNAKTKPREEQFNSTYRVVSVLTVLHQDWLNGKEYKCKVSNKGLPSSIEKTISKAKGQPREPQVYTLPPSQEEMTKNQVSLTCLVKGFYPSDIAVEWESNGQPENNYKTTPPVLDSDGSFFLYSRLTVDKSRWQEGNVFSCSVMHEALHNHYTQKSLSLSLGK

SEQ ID NO: 6544 - protein, 449 aa, Artificial Sequence
  source: /note="Description of Artificial Sequence: Synthetic polypeptide"
EVQLVESGGGLVQPGGSLRLSCAASGFSFSGRYWIQKYVRQAPGKGLEWVASVWPGITGDTNYANWAKGRFTISRDDSKNTLYLQMNSLRAEDTAVYYCAREPVAWGGGLDLWGQGTLVTVSSASTKGPSVFPLAPCSRSTSESTAALGCLVKDYFPEPVTVSWNSGALTSGVHTFPAVLQSSGLYSLSSVVTVPSSNFGTQTYTCNVDHKPSNTKVDKTVERKCCVECPPCPAPPVAGPSVFLFPPKPKDTLMISRTPEVTCVVVDVSQEDPEVQFNWYVDGVEVHNAKTKPREEQFNSTYRVVSVLTVLHQDWLNGKEYKCKVSNKGLPSSIEKTISKAKGQPREPQVYTLPPSQEEMTKNQVSLTCLVKGFYPSDIAVEWESNGQPENNYKTTPPVLDSDGSFFLYSRLTVDKSRWQEGNVFSCSVMHEALHNHYTQKSLSLSLGK

SEQ ID NO: 6545 - protein, 220 aa, Artificial Sequence
  source: /note="Description of Artificial Sequence: Synthetic polypeptide"
EVQLVQSGAEVKKPGSSVKVSCKASGGTFSSYAISWVRQAPGQGLEWMGRIIPIFGTANYAQKFQGRVTITADESTSTAYMELSSLRSEDTAVYYCARHGGYIFDSWGQGTLVTVSSASTKGPSVFPLAPSSKSTSGGTAALGCLVKDYFPEPVTVSWNSGALTSGVHTFPAVLQSSGLYSLSSVVTVPSSSLGTQTYICNVNHKPSNTKVDKRVEPKSC

SEQ ID NO: 6546 - protein, 220 aa, Artificial Sequence
  source: /note="Description of Artificial Sequence: Synthetic polypeptide"
EVQLVQSGAEVKKPGSSVKVSCKASGGTFSSYAISWVRQAPGQGLEWMGRIIPIFGTANYAQKFQGRVTITADESTSTAYMELSSLRSEDTAVYYCARHGGYVFDSWGQGTLVTVSSASTKGPSVFPLAPSSKSTSGGTAALGCLVKDYFPEPVTVSWNSGALTSGVHTFPAVLQSSGLYSLSSVVTVPSSSLGTQTYICNVNHKPSNTKVDKRVEPKSC

SEQ ID NO: 6547 - protein, 220 aa, Artificial Sequence; identical to SEQ ID NO: 6545
  source: /note="Description of Artificial Sequence: Synthetic polypeptide"

SEQ ID NO: 6548 - protein, 220 aa, Artificial Sequence
  source: /note="Description of Artificial Sequence: Synthetic polypeptide"
EVQLVQSGAEVKKPGSSVKVSCKASGGTFSSYAISWVRQAPGQGLEWMGRIIPIFGTANYAQKFQGRVTITADESTSTAYMELSSLRSEDTAVYYCARHGGYYFDSWGQGTLVTVSSASTKGPSVFPLAPSSKSTSGGTAALGCLVKDYFPEPVTVSWNSGALTSGVHTFPAVLQSSGLYSLSSVVTVPSSSLGTQTYICNVNHKPSNTKVDKRVEPKSC

SEQ ID NO: 6549 - protein, 220 aa, Artificial Sequence; identical to SEQ ID NO: 6546
  source: /note="Description of Artificial Sequence: Synthetic polypeptide"

SEQ ID NO: 6550 - protein, 220 aa, Artificial Sequence
  source: /note="Description of Artificial Sequence: Synthetic polypeptide"
EVQLVQSGAEVKKPGSSVKVSCKASGGTFSSYAISWVRQAPGQGLEWMGRIIPIFGTANYAQKFQGRVTITADESTSTAYMELSSLRSEDTAVYYCARHGGYSFDSWGQGTLVTVSSASTKGPSVFPLAPSSKSTSGGTAALGCLVKDYFPEPVTVSWNSGALTSGVHTFPAVLQSSGLYSLSSVVTVPSSSLGTQTYICNVNHKPSNTKVDKRVEPKSC

SEQ ID NO: 6551 - protein, 220 aa, Artificial Sequence
  source: /note="Description of Artificial Sequence: Synthetic polypeptide"
EVQLVQSGAEVKKPGSSVKVSCKASGGTFQSYAISWVRQAPGQGLEWMGRIIPIFGTANYAQKFQGRVTITADESTSTAYMELSSLRSEDTAVYYCARHGGYSFDSWGQGTLVTVSSASTKGPSVFPLAPSSKSTSGGTAALGCLVKDYFPEPVTVSWNSGALTSGVHTFPAVLQSSGLYSLSSVVTVPSSSLGTQTYICNVNHKPSNTKVDKRVEPKSC

SEQ ID NO: 6552 - protein, 220 aa, Artificial Sequence
  source: /note="Description of Artificial Sequence: Synthetic polypeptide"
EVQLVQSGAEVKKPGSSVKVSCKASGGTFNAYAISWVRQAPGQGLEWMGRIIPIFGTANYAQKFQGRVTITADESTSTAYMELSSLRSEDTAVYYCARHGGYSFDSWGQGTLVTVSSASTKGPSVFPLAPSSKSTSGGTAALGCLVKDYFPEPVTVSWNSGALTSGVHTFPAVLQSSGLYSLSSVVTVPSSSLGTQTYICNVNHKPSNTKVDKRVEPKSC

SEQ ID NO: 6553 - protein, 220 aa, Artificial Sequence
  source: /note="Description of Artificial Sequence: Synthetic polypeptide"
EVQLVQSGAEVKKPGSSVKVSCKASGGTFGSYAISWVRQAPGQGLEWMGRIIPIFGTANYAQKFQGRVTITADESTSTAYMELSSLRSEDTAVYYCARHGGYSFDSWGQGTLVTVSSASTKGPSVFPLAPSSKSTSGGTAALGCLVKDYFPEPVTVSWNSGALTSGVHTFPAVLQSSGLYSLSSVVTVPSSSLGTQTYICNVNHKPSNTKVDKRVEPKSC

SEQ ID NO: 6554 - protein, 220 aa, Artificial Sequence
  source: /note="Description of Artificial Sequence: Synthetic polypeptide"
EVQLVQSGAEVKKPGSSVKVSCKASGGTFSSYAISWVRQAPGQGLEWMGPINPYYGDAIYAQKFQGRVTITADESTSTAYMELSSLRSEDTAVYYCARYYSDYMDYWGQGTLVTVSSASTKGPSVFPLAPSSKSTSGGTAALGCLVKDYFPEPVTVSWNSGALTSGVHTFPAVLQSSGLYSLSSVVTVPSSSLGTQTYICNVNHKPSNTKVDKRVEPKSC

SEQ ID NO: 6555 - protein, 220 aa, Artificial Sequence
  source: /note="Description of Artificial Sequence: Synthetic polypeptide"
EVQLVQSGAEVKKPGSSVKVSCKASGGTFTSYAISWVRQAPGQGLEWMGRIIPIFGTANYAQKFQGRVTITADESTSTAYMELSSLRSEDTAVYYCARHGGYSFDSWGQGTLVTVSSASTKGPSVFPLAPSSKSTSGGTAALGCLVKDYFPEPVTVSWNSGALTSGVHTFPAVLQSSGLYSLSSVVTVPSSSLGTQTYICNVNHKPSNTKVDKRVEPKSC

SEQ ID NO: 6556 - protein, 220 aa, Artificial Sequence; identical to SEQ ID NO: 6555
  source: /note="Description of Artificial Sequence: Synthetic polypeptide"

SEQ ID NO: 6557 - protein, 220 aa, Artificial Sequence; identical to SEQ ID NO: 6551
  source: /note="Description of Artificial Sequence: Synthetic polypeptide"

SEQ ID NO: 6558 - protein, 220 aa, Artificial Sequence; identical to SEQ ID NO: 6550
  source: /note="Description of Artificial Sequence: Synthetic polypeptide"

SEQ ID NO: 6559 - protein, 229 aa, Artificial Sequence
  source: /note="Description of Artificial Sequence: Synthetic polypeptide"
EVQLVQSGAEVKKPGASVKVSCKASGYTFTSHYMHWVRQAPGQGLEWMGKINADLGDTNYAQKFQGRVTMTRDTSISTAYMELSSLRSEDTAVYYCARDGIEHGGHYYWGYLFDIWGQGTLVTVSSASTKGPSVFPLAPSSKSTSGGTAALGCLVKDYFPEPVTVSWNSGALTSGVHTFPAVLQSSGLYSLSSVVTVPSSSLGTQTYICNVNHKPSNTKVDKRVEPKSC

SEQ ID NO: 6560 - protein, 446 aa, Artificial Sequence
  source: /note="Description of Artificial Sequence: Synthetic polypeptide"
EVQLVQSGAEVKKPGSSVKVSCKASGGTFSSYAISWVRQAPGQGLEWMGGIGPFFGTANYAQKFQGRVTITADESTSTAYMELSSLRSEDTAVYYCARDTPYFDYWGQGTLVTVSSASTKGPSVFPLAPSSKSTSGGTAALGCLVKDYFPEPVTVSWNSGALTSGVHTFPAVLQSSGLYSLSSVVTVPSSSLGTQTYICNVNHKPSNTKVDKRVEPKSCDKTHTCPPCPAPEAAGGPSVFLFPPKPKDTLMISRTPEVTCVVVDVSHEDPEVKFNWYVDGVEVHNAKTKPREEQYNSTYRVVSVLTVLHQDWLNGKEYKCKVSNKALPAPIEKTISKAKGQPREPQVYTLPPSREEMTKNQVSLTCLVKGFYPSDIAVEWESNGQPENNYKTTPPVLDSDGSFFLYSKLTVDKSRWQQGNVFSCSVMHEALHNHYTQKSLSLSPGK

SEQ ID NO: 6561 - protein, 446 aa, Artificial Sequence
  source: /note="Description of Artificial Sequence: Synthetic polypeptide"
EVQLVQSGAEVKKPGESLKISCKGSGYSFTNYISWVRQMPGKGLEWMGIIDPDDSYTEYSPSFQGQVTISADKSISTAYLQWSSLKASDTAMYYCARYEYGGFDIWGQGTLVTVSSASTKGPSVFPLAPSSKSTSGGTAALGCLVKDYFPEPVTVSWNSGALTSGVHTFPAVLQSSGLYSLSSVVTVPSSSLGTQTYICNVNHKPSNTKVDKRVEPKSCDKTHTCPPCPAPEAAGGPSVFLFPPKPKDTLMISRTPEVTCVVVDVSHEDPEVKFNWYVDGVEVHNAKTKPREEQYNSTYRVVSVLTVLHQDWLNGKEYKCKVSNKALPAPIEKTISKAKGQPREPQVYTLPPSREEMTKNQVSLTCLVKGFYPSDIAVEWESNGQPENNYKTTPPVLDSDGSFFLYSKLTVDKSRWQQGNVFSCSVMHEALHNHYTQKSLSLSPGK

SEQ ID NO: 6562 - protein, 109 aa, Artificial Sequence
  source: /note="Description of Artificial Sequence: Synthetic polypeptide"
ESALTQPASVSGSPGQSITISCTGTSSDIGTYNYVSWYQQHPGKAPKLMIYDDSNRPSGVSNRFSGSKSGNTASLTISGLQAEDEADYYCQSYDSQSIVFGGGTKLTVL

SEQ ID NO: 6563 - protein, 446 aa, Artificial Sequence
  source: /note="Description of Artificial Sequence: Synthetic polypeptide"
EVQLVQSGAEVKKPGESLKISCKGSGYSFTNYISWVRQMPGKGLEWMGIIDPDDSYTRYSPSFQGQVTISADKSISTAYLQWSSLKASDTAMYYCARYEYGGFDIWGQGTLVTVSSASTKGPSVFPLAPSSKSTSGGTAALGCLVKDYFPEPVTVSWNSGALTSGVHTFPAVLQSSGLYSLSSVVTVPSSSLGTQTYICNVNHKPSNTKVDKRVEPKSCDKTHTCPPCPAPEAAGGPSVFLFPPKPKDTLMISRTPEVTCVVVDVSHEDPEVKFNWYVDGVEVHNAKTKPREEQYNSTYRVVSVLTVLHQDWLNGKEYKCKVSNKALPAPIEKTISKAKGQPREPQVYTLPPSREEMTKNQVSLTCLVKGFYPSDIAVEWESNGQPENNYKTTPPVLDSDGSFFLYSKLTVDKSRWQQGNVFSCSVMHEALHNHYTQKSLSLSPGK

SEQ ID NO: 6564 - protein, 447 aa, Artificial Sequence
  source: /note="Description of Artificial Sequence: Synthetic polypeptide"
EVQLVQSGAEVKKPGESLKISCKGSGYSFTSYYIGWVRQMPGKGLEWMGIIDPTDSQTAYSPSFQGQVTISADKSISTAYLQWSSLKASDTAMYYCARYMMRGFDHWGQGTLVTVSSASTKGPSVFPLAPSSKSTSGGTAALGCLVKDYFPEPVTVSWNSGALTSGVHTFPAVLQSSGLYSLSSVVTVPSSSLGTQTYICNVNHKPSNTKVDKRVEPKSCDKTHTCPPCPAPEAAGGPSVFLFPPKPKDTLMISRTPEVTCVVVDVSHEDPEVKFNWYVDGVEVHNAKTKPREEQYNSTYRVVSVLTVLHQDWLNGKEYKCKVSNKALPAPIEKTISKAKGQPREPQVYTLPPSREEMTKNQVSLTCLVKGFYPSDIAVEWESNGQPENNYKTTPPVLDSDGSFFLYSKLTVDKSRWQQGNVFSCSVMHEALHNHYTQKSLSLSPGK

SEQ ID NO: 6565 - protein, 224 aa, Artificial Sequence
  source: /note="Description of Artificial Sequence: Synthetic polypeptide"
EVQLVQSGAEVKKPGESLKISCKGSGYSFTNYWIGWVRQMPGKGLEWMGRIDPGESLTNYAPSFQGQVTISADKSISTAYLQWSSLKASDTAMYYCARTGVADVDMPFAHWGQGTLVTVSSASTKGPSVFPLAPSSKSTSGGTAALGCLVKDYFPEPVTVSWNSGALTSGVHTFPAVLQSSGLYSLSSVVTVPSSSLGTQTYICNVNHKPSNTKVDKRVEPKSC

SEQ ID NO: 6566 - protein, 220 aa, Artificial Sequence
  source: /note="Description of Artificial Sequence: Synthetic polypeptide"
EVQLVQSGAEVKKPGSSVKVSCKASGGTFNSYAISWVRQAPGQGLEWMGRIIPIFGTANYAQKFQGRVTITADESTSTAYMELSSLRSEDTAVYYCARHGGYSFDSWGQGTLVTVSSASTKGPSVFPLAPSSKSTSGGTAALGCLVKDYFPEPVTVSWNSGALTSGVHTFPAVLQSSGLYSLSSVVTVPSSSLGTQTYICNVNHKPSNTKVDKRVEPKSC

SEQ ID NO: 6567 - protein, 229 aa, Artificial Sequence
  source: /note="Description of Artificial Sequence: Synthetic polypeptide"
EVQLVQSGAEVKKPGASVKVSCKASGYTFTSHYMHWVRQAPGQGLEWMGNINPVDGGTEYAQKFQGRVTMTRDTSISTAYMELSSLRSEDTAVYYCARDGIEHGGHYYWGYLFDIWGQGTLVTVSSASTKGPSVFPLAPSSKSTSGGTAALGCLVKDYFPEPVTVSWNSGALTSGVHTFPAVLQSSGLYSLSSVVTVPSSSLGTQTYICNVNHKPSNTKVDKRVEPKSC

SEQ ID NO: 6568 - protein, 220 aa, Artificial Sequence; identical to SEQ ID NO: 6566
  source: /note="Description of Artificial Sequence: Synthetic polypeptide"

SEQ ID NO: 6569 - protein, 220 aa, Artificial Sequence; identical to SEQ ID NO: 6548
  source: /note="Description of Artificial Sequence: Synthetic polypeptide"

SEQ ID NO: 6570 - protein, 119 aa, Artificial Sequence
  source: /note="Description of Artificial Sequence: Synthetic polypeptide"
EVQLVESGGGLVKPGGSLRLSCAASGYTFTDEYMNWVHQAPGKSLEWVGYINPNNGGADYNPSLKSRVTISVDQSKSIAYLQMNSLKTEDTAVYFCARLGYSNPYFDFWGQGTLVTVSS

SEQ ID NO: 6571 - protein, 119 aa, Artificial Sequence
  source: /note="Description of Artificial Sequence: Synthetic polypeptide"
QVQLVQSGSELKKPGASVKVSCKASGYTFTDEYMNWVRQAPGKSLEWMGYINPNNGGADYNQKFQGRVTMTVNQSISTAYMELSRLRSDDTAVYFCARLGYSNPYFDFWGQGTLVTVSS

SEQ ID NO: 6572 - protein, 107 aa, Artificial Sequence
  source: /note="Description of Artificial Sequence: Synthetic polypeptide"
DIVLTQSPATLSLSPGERATLSCRASQDVNTAVAWYQQKPDQSPKLLIYWASTRHTGVPARFTGSGSGTDYTLTISSLQPEDFAVYFCQQHHVSPWTFGGGTKVEIK

SEQ ID NO: 6573 - protein, 107 aa, Artificial Sequence
  source: /note="Description of Artificial Sequence: Synthetic polypeptide"
DIVLTQSPATLSLSPGERATLSCRASQDVNTAVAWYQQKPGKSPKLLIYWASTRHTGVPARFTGSGSGTDYTLTISSLQPEDFAVYFCQQHHVSPWTFGGGTKVEIK

SEQ ID NO: 6574 - protein, 107 aa, Artificial Sequence
  source: /note="Description of Artificial Sequence: Synthetic polypeptide"
DIVLTQSPSFLSASVGDRVTITCQASQDVNTAVAWYQQKPGKSPKLLIYWASTRHTGVPARFTGSGSGTDYTLTISSLQPEDFAVYFCQQHHVSPWTFGGGTKVEIK

SEQ ID NO: 6575 - protein, 119 aa, Artificial Sequence
  source: /note="Description of Artificial Sequence: Synthetic polypeptide"
EVQLVQSGAEVKKPGASVKVSCKASGYTFTDEYMNWVRQAPGKSLEWVGYINPNNGGADYNQKFQGRVTITVDQSASTAYMELSSLRSEDTAVYFCARLGYSNPYFDFWGQGTLVTVSS

SEQ ID NO: 6576 - protein, 446 aa, Artificial Sequence; identical to SEQ ID NO: 6560
  source: /note="Description of Artificial Sequence: Synthetic polypeptide"

SEQ ID NO: 6577 - protein, 119 aa, Artificial Sequence
  source: /note="Description of Artificial Sequence: Synthetic polypeptide"
EVQLLESGGGLVQPGGSLRLSCAASGFTFSSYAMSWVRQAPGKGLEWVSAISGSGGSTYYADSVKGRFTISRDNSKNTLYLQMNSLRAEDTAVYYCARRGLRYNYFDYWGQGTTLTVSS

SEQ ID NO: 6578 - protein, 119 aa, Artificial Sequence
  source: /note="Description of Artificial Sequence: Synthetic polypeptide"
EVQLLESGGGLVQPGGSPRLSCAASGFTFSSYAMSWVRQAPGKGLEWVSAISGSGGSTYYADSVKGRFTISRDNSKNTLYLQMNSLRAEDTAVYYCARRGLRYNYFDYWGQGTTLTVSS

SEQ ID NO: 6579 - protein, 118 aa, Artificial Sequence
  source: /note="Description of Artificial Sequence: Synthetic polypeptide"
EVQLLESGGGLVQPGGSLRLSCAASGFTFSSYAMTWVRQAPGKGLEWVSVISGSGSTYYADSVKGRFTISRDNSKNTLYLQMNSLRAEDTAVYYCARRGLRYNYFDYWGQGTTLTVSS

SEQ ID NO: 6580 - protein, 118 aa, Artificial Sequence
  source: /note="Description of Artificial Sequence: Synthetic polypeptide"
EVQLLESGGGLVQPGGSLRLSCAASGFTFSSYAMTWVRQAPGKGLEWVSAISGSGSTYYADSVKGRFTISRDNSKNTLYLQMNSLRAEDTAVYYCARRGLRYNYFDYWGQGTTLTVSS

SEQ ID NO: 6581 - protein, 119 aa, Artificial Sequence
  source: /note="Description of Artificial Sequence: Synthetic polypeptide"
EVQLLESGGGLVQPGGSLRLSCAASGFTFSSYAMSWVRQAPGKGLEWVSVISGSGGSTYYADSVKGRFTISRDNSKNTLYLQMNSLRAEDTAVYYCARRGLRYNYFDYWGQGTTLTVSS

SEQ ID NO: 6582 - protein, 119 aa, Artificial Sequence
  source: /note="Description of Artificial Sequence: Synthetic polypeptide"
EVQLLESGGGLVQPGGSLRLSCAASGFTFSSYAMSWVRQAPGKGLEWVSAISGSGGSTYYADSVKGRFTISRDNSKNTLYLQMNSLRAEDTAVYYCARRGLRYKYFDYWGQGTTLTVSS

SEQ ID NO: 6583 - protein, 468 aa, Artificial Sequence
  source: /note="Description of Artificial Sequence: Synthetic polypeptide"
MGWSCIILFLVATATGVHSLEQVQLVQSGAEVKKPGASVKVSCKASGHIFSNYWIQWVRQAPGQGLEWMGEILPGSGHTEYTENFKDRVTMTRDTSTSTVYMELSSLRSEDTAVYYCARYFFGSSPNWYFDVWGQGTLVTVSSASTKGPSVFPLAPCSRSTSESTAALGCLVKDYFPEPVTVSWNSGALTSGVHTFPAVLQSSGLYSLSSVVTVPSSNFGTQTYTCNVDHKPSNTKVDKTVERKCCVECPPCPAPPVAGPSVFLFPPKPKDTLMISRTPEVTCVVVDVSQEDPEVQFNWYVDGVEVHNAKTKPREEQFNSTYRVVSVLTVLHQDWLNGKEYKCKVSNKGLPSSIEKTISKAKGQPREPQVYTLPPSQEEMTKNQVSLTCLVKGFYPSDIAVEWESNGQPENYKTTPPVLDSDGSFFLYSRLTVDKSRWQEGNVFSCSVMHEALHNHYTQKSLSLSLGK

SEQ ID NO: 6584 - protein, 468 aa, Artificial Sequence; identical to SEQ ID NO: 6583
  source: /note="Description of Artificial Sequence: Synthetic polypeptide"

SEQ ID NO: 6585 - protein, 468 aa, Artificial Sequence
  source: /note="Description of Artificial Sequence: Synthetic polypeptide"
MGWSCIILFLVATATGVHSLEQVQLVQSGAEVKKPGASVKVSCKASGYIFSNYWIQWVRQAPGQGLEWMGEILPGSGSTEYTENFKDRVTMTRDTSTSTVYMELSSLRSEDTAVYYCARYFFGSSPNWYFDVWGQGTLVTVSSASTKGPSVFPLAPCSRSTSESTAALGCLVKDYFPEPVTVSWNSGALTSGVHTFPAVLQSSGLYSLSSVVTVPSSNFGTQTYTCNVDHKPSNTKVDKTVERKCCVECPPCPAPPVAGPSVFLFPPKPKDTLMISRTPEVTCVVVDVSQEDPEVQFNWYVDGVEVHNAKTKPREEQFNSTYRVVSVLTVLHQDWLNGKEYKCKVSNKGLPSSIEKTISKAKGQPREPQVYTLPPSQEEMTKNQVSLTCLVKGFYPSDIAVEWESNGQPENYKTTPPVLDSDGSFFLYSRLTVDKSRWQEGNVFSCSVMHEALHNHYTQKSLSLSLGK

SEQ ID NO: 6586 - protein, 446 aa, Artificial Sequence
  source: /note="Description of Artificial Sequence: Synthetic polypeptide"
QVQLQQPGAELVRPGTSVKLSCKASGYTFTSSWMHWVKQRPGQGLEWIGVIDPHDSYTNYNQKFKGKATLTVDTSSSTAYMQLSSLTSEDSAVYYCARGGGSSYNRYFDVWGTGTTVTVSSASTKGPSVFPLAPCSRSTSESTAALGCLVKDYFPEPVTVSWNSGALTSGVHTFPAVLQSSGLYSLSSVVTVPSSNFGTQTYTCNVDHKPSNTKVDKTVERKCCVECPPCPAPPVAGPSVFLFPPKPKDTLMISRTPEVTCVVVDVSQEDPEVQFNWYVDGVEVHNAKTKPREEQFNSTYRVVSVLTVLHQDWLNGKEYKCKVSNKGLPSSIEKTISKAKGQPREPQVYTLPPSQEEMTKNQVSLTCLVKGFYPSDIAVEWESNGQPENYKTTPPVLDSDGSFFLYSRLTVDKSRWQEGNVFSCSVMHEALHNHYTQKSLSLSLGK

SEQ ID NO: 6587 - protein, 446 aa, Artificial Sequence
  source: /note="Description of Artificial Sequence: Synthetic polypeptide"
QVQLQQPGAELVRPGTSVKLSCKASGYTFTSSWMHWVKQRPGQGLEWIGVIDPHDSYTNYNQKFKGKATLTVDTSSSTAYMQLSSLTSEDSAVYYCARGGGSSYNRYFDVWGTGTTVTVSSASTKGPSVFPLAPCSRSTSESTAALGCLVKDYFPEPVTVSWNSGALTSGVHTFPAVLQSSGLYSLSSVVTVPSSNFGTQTYTCNVDHKPSNTKVDKTVERKCCVECPPCPAPPVAGPSVFLFPPKPKDTLMISRTPEVTCVVVDVSQEDPEVQFNWYVDGVEVHNAKTKPREEQFNSTYRVVSVLTVLHQDWLNGKEYKCKVSNKGLPSSIEKTISKAKGQPREPQVYTLPPSQEEMTKNQVSLTCLVKGFYPSDIAVEWESNGQPENYKTTPPVLDSDGSFFLYSRLTVDKSRWQEGNVFSCSVLHEALHSHYTQKSLSLSLGK

SEQ ID NO: 6588 - protein, 446 aa, Artificial Sequence
  source: /note="Description of Artificial Sequence: Synthetic polypeptide"
QVQLQQPGAELVRPGTSVKLSCKASGYTFTSSWMHWVKQRPGQGLEWIGVIDPSDSYTNYNQKFKGKATLTVDTSSSTAYMQLSSLTSEDSAVYYCARGGGSSYNRYFDVWGTGTTVTVSSASTKGPSVFPLAPCSRSTSESTAALGCLVKDYFPEPVTVSWNSGALTSGVHTFPAVLQSSGLYSLSSVVTVPSSNFGTQTYTCNVDHKPSNTKVDKTVERKCCVECPPCPAPPVAGPSVFLFPPKPKDTLMISRTPEVTCVVVDVSQEDPEVQFNWYVDGVEVHNAKTKPREEQFNSTYRVVSVLTVLHQDWLNGKEYKCKVSNKGLPSSIEKTISKAKGQPREPQVYTLPPSQEEMTKNQVSLTCLVKGFYPSDIAVEWESNGQPENYKTTPPVLDSDGSFFLYSRLTVDKSRWQEGNVFSCSVMHEALHNHYTQKSLSLSLGK

SEQ ID NO: 6589 - protein, 447 aa, Artificial Sequence
  source: /note="Description of Artificial Sequence: Synthetic polypeptide"
QVQLVQSGAEVKKPGASVKVSCKASGYTFTDYSMDWVRQAPGQGLEWMGAINPNSGGTNYNQKFKDRVTMTRDTSTSTVYMELSSLRSEDTAVYYCARSGSYDGYYAMDYWGQGTTVTVSSASTKGPSVFPLAPCSRSTSESTAALGCLVKDYFPEPVTVSWNSGALTSGVHTFPAVLQSSGLYSLSSVVTVPSSNFGTQTYTCNVDHKPSNTKVDKTVERKCCVECPPCPAPPVAGPSVFLFPPKPKDTLMISRTPEVTCVVVDVSHEDPEVQFNWYVDGVEVHNAKTKPREEQFNSTFRVVSVLTVVHQDWLNGKEYKCKVSNKGLPAPIEKTISKTKGQPREPQVYTLPPSREEMTKNQVSLTCLVKGFYPSDISVEWESNGQPENNYKTTPPMLDSDGSFFLYSKLTVDKSRWQQGNVFSCSVMHEALHNHYTQKSLSLSPGK

SEQ ID NO: 6590 - protein, 447 aa, Artificial Sequence
  source: /note="Description of Artificial Sequence: Synthetic polypeptide"
QVQLVQSGAEVKKPGASVKVSCKASGYTFTDYSMDWVRQAPGQGLEWMGAINPNSGGTNYNQKFKDRVTMTRDTSTSTVYMELSSLRSEDTAVYYCARSGSYDGYYAMDYWGQGTTVTVSSASTKGPSVFPLAPCSRSTSESTAALGCLVKDYFPEPVTVSWNSGALTSGVHTFPAVLQSSGLYSLSSVVTVPSSNFGTQTYTCNVDHKPSNTKVDKTVERKCCVECPPCPAPPVAGPSVFLFPPKPKDTLMISRTPEVTCVVVDVSQEDPEVQFNWYVDGVEVHNAKTKPREEQFNSTYRVVSVLTVLHQDWLNGKEYKCKVSNKGLPSSIEKTISKAKGQPREPQVYTLPPSQEEMTKNQVSLTCLVKGFYPSDIAVEWESNGQPENNYKTTPPVLDSDGSFFLYSRLTVDKSRWQEGNVFSCSVMHEALHNHYTQKSLSLSLGK

SEQ ID NO: 6591 - protein, 446 aa, Artificial Sequence
  source: /note="Description of Artificial Sequence: Synthetic polypeptide"
QVQLVQSGAEVKKPGASVKVSCKASGYTFTDYSMDWVRQAPGQGLEWMGAIHLNTGYTNYNQKFKGRVTMTRDTSTSTVYMELSSLRSEDTAVYYCARGFYDGYSPMDYWGQGTTVTVSSASTKGPSVFPLAPCSRSTSESTAALGCLVKDYFPEPVTVSWNSGALTSGVHTFPAVLQSSGLYSLSSVVTVPSSNFGTQTYTCNVDHKPSNTKVDKTVERKCCVECPPCPAPPVAGPSVFLFPPKPKDTLMISRTPEVTCVVVDVSHEDPEVQFNWYVDGVEVHNAKTKPREEQFNSTFRVVSVLTVVHQDWLNGKEYKCKVSNKGLPAPIEKTISKTKGQPREPQVYTLPPSREEMTKNQVSLTCLVKGFYPSDISVEWESNGQPENNYKTTPPMLDSDGSFFLYSKLTVDKSRWQQGNVFSCSVMHEALHNHYTQKSLSLSPGK

SEQ ID NO: 6592 - protein, 446 aa, Artificial Sequence
  source: /note="Description of Artificial Sequence: Synthetic polypeptide"
QVQLVQSGAEVKKPGASVKVSCKASGYTFTDYSMDWVRQAPGQGLEWMGAIHLNTGYTNYNQKFKGRVTMTRDTSTSTVYMELSSLRSEDTAVYYCARGFYDGYSPMDYWGQGTTVTVSSASTKGPSVFPLAPCSRSTSESTAALGCLVKDYFPEPVTVSWNSGALTSGVHTFPAVLQSSGLYSLSSVVTVPSSNFGTQTYTCNVDHKPSNTKVDKTVERKCCVECPPCPAPPVAGPSVFLFPPKPKDTLMISRTPEVTCVVVDVSQEDPEVQFNWYVDGVEVHNAKTKPREEQFNSTYRVVSVLTVLHQDWLNGKEYKCKVSNKGLPSSIEKTISKAKGQPREPQVYTLPPSQEEMTKNQVSLTCLVKGFYPSDIAVEWESNGQPENNYKTTPPVLDSDGSFFLYSRLTVDKSRWQEGNVFSCSVMHEALHNHYTQKSLSLSLGK

SEQ ID NO: 6593 - protein, 446 aa, Artificial Sequence
  source: /note="Description of Artificial Sequence: Synthetic polypeptide"
EVQLVESGGGLVQPGGSLRLSCAASGYSITNDYAWNWVRQAPGKGLEWVGYISYSGYTTYNPSLKSRFTISRDTSKNTLYLQMNSLRAEDTAVYYCARWTSGLDYWGQGTLVTVSSASTKGPSVFPLAPSSKSTSGGTAALGCLVKDYFPEPVTVSWNSGALTSGVHTFPAVLQSSGLYSLSSVVTVPSSSLGTQTYICNVNHKPSNTKVDKKVEPKSCDKTHTCPPCPAPELLGGPSVFLFPPKPKDTLMISRTPEVTCVVVDVSHEDPEVKFNWYVDGVEVHNAKTKPREEQYNSTYRVVSVLTVLHQDWLNGKEYKCKVSNKALPAPIEKTISKAKGQPREPQVYTLPPSREEMTKNQVSLTCLVKGFYPSDIAVEWESNGQPENNYKTTPPVLDSDGSFFLYSKLTVDKSRWQQGNVFSCSVMHEALHNHYTQKSLSLSPGK

SEQ ID NO: 6594 - protein, 449 aa, Artificial Sequence
  source: /note="Description of Artificial Sequence: Synthetic polypeptide"
DVKLVESGGGLVKLGGSLKLSCAASGFTFSNYYMSWVRQTPEKRLELVAAINSDGGITYYLDTVKGRFTISRDNAKNTLYLQMSSLKSEDTALFYCARHRSGYFSMDYWGQGTSVTVSSASTKGPSVFPLAPSSKSTSGGTAALGCLVKDYFPEPVTVSWNSGALTSGVHTFPAVLQSSGLYSLSSVVTVPSSSLGTQTYICNVNHKPSNTKVDKKVEPKSCDKTHTCPPCPAPELLGGPSVFLFPPKPKDTLMISRTPEVTCVVVDVSHEDPEVKFNWYVDGVEVHNAKTKPREEQYNSTYRVVSVLTVLHQDWLNGKEYKCKVSNKALPAPIEKTISKAKGQPREPQVYTLPPSRDELTKNQVSLTCLVKGFYPSDIAVEWESNGQPENNYKTTPPVLDSDGSFFLYSKLTVDKSRWQQGNVFSCSVMHEALHNHYTQKSLSLSPGK

SEQ ID NO: 6595 - protein, 447 aa, Artificial Sequence
  source: /note="Description of Artificial Sequence: Synthetic polypeptide"
EVQLVESGGGLVKPGGSLRLSCAASGFTFSAYAMNWVRQAPGKGLEWVGRIRTKNNNYATYYADSVKDRFTISRDDSKNTLYLQMNSLKTEDTAVYYCTTFYGNGVWGQGTLVTVSSASTKGPSVFPLAPSSKSTSGGTAALGCLVKDYFPEPVTVSWNSGALTSGVHTFPAVLQSSGLYSLSSVVTVPSSSLGTQTYICNVNHKPSNTKVDKKVEPKSCDKTHTCPPCPAPELAGAPSVFLFPPKPKDTLMISRTPEVTCVVVDVSHEDPEVKFNWYVDGVEVHNAKTKPREEQYNSTYRVVSVLTVLHQDWLNGKEYKCKVSNKALPAPIEKTISKAKGQPREPQVYTLPPSRDELTKNQVSLTCLVKGFYPSDIAVEWESNGQPENNYKTTPPVLDSDGSFFLYSKLTVDKSRWQQGNVFSCSVMHEALHNHYTQKSLSLSPGK

SEQ ID NO: 6596 - protein, 449 aa, Artificial Sequence
  source: /note="Description of Artificial Sequence: Synthetic polypeptide"
EVQLVESGGDLVQPGRSLRLSCAASGFIFSNYGMSWVRQAPGKGLEWVATISSASTYSYYPDSVKGRFTISRDNAKNSLYLQMNSLRVEDTALYYCGRHSDGNFAFGYWGQGTLVTVSSASTKGPSVFPLAPSSKSTSGGTAALGCLVKDYFPEPVTVSWNSGALTSGVHTFPAVLQSSGLYSLSSVVTVPSSSLGTQTYICNVNHKPSNTKVDKKVEPKSCDKTHTCPPCPAPELLGGPSVFLFPPKPKDTLMISRTPEVTCVVVDVSHEDPEVKFNWYVDGVEVHNAKTKPREEQYNSTYRVVSVLTVLHQDWLNGKEYKCKVSNKALPAPIEKTISKAKGQPREPQVYTLPPSRDELTKNQVSLTCLVKGFYPSDIAVEWESNGQPENNYKTTPPVLDSDGSFFLYSKLTVDKSRWQQGNVFSCSVMHEALHNHYTQKSLSLSPGK

SEQ ID NO: 6597 - protein, 122 aa, Artificial Sequence
  source: /note="Description of Artificial Sequence: Synthetic polypeptide"
QVQLVQSGAEVKKPGSSVKVSCKASGYTFTDYYMDWVRQAPGQGLEWIGRVNPYHGGATYNQKFKGKATITVDKSTSTAYMELSSLRSEDTAVYYCAREENSYDGYYGMDYWGQGTLVTVSS

SEQ ID NO: 6598 - protein, 122 aa, Artificial Sequence
  source: /note="Description of Artificial Sequence: Synthetic polypeptide"
QVQLVQSGAEVKKPGSSVKVSCKASGYTFTDYYMDWVRQAPGQGLEWMGRVNPYHGGATYNQKFKGRVTITADKSTSTAYMELSSLRSEDTAVYYCAREENSYDGYYGMDYWGQGTLVTVSS

SEQ ID NO: 6599 - protein, 122 aa, Artificial Sequence
  source: /note="Description of Artificial Sequence: Synthetic polypeptide"
QVQLVASGAEVKKPGSSVKVSCKASGYTFTDYYMDWVRQAPGQGLEWMGRVNPYHGGATYNQKFKGRVTITADKSTSTAYMELSSLRSEDTAVYYCAREENSYDGYYGMDYWGQGTLVTVSS

SEQ ID NO: 6600 - protein, 122 aa, Artificial Sequence
  source: /note="Description of Artificial Sequence: Synthetic polypeptide"
QVQLVQSGAEVKKPGSSVKVSCTASGYTFTDYYMDWVRQAPGQGLEWMGRVNPYHGGATYNQKFKGRVTITADKSTSTAYMELSSLRSEDTAVYYCAREENSYDGYYGMDYWGQGTLVTVSS

SEQ ID NO: 6601 - protein, 122 aa, Artificial Sequence
  source: /note="Description of Artificial Sequence: Synthetic polypeptide"
QVQLVQSGAEVKKPGSSVKVSCKASGYTFTKYYMDWVRQAPGQGLEWMGRVNPYHGGATYNQKFKGRVTITADKSTSTAYMELSSLRSEDTAVYYCAREENSYDGYYGMDYWGQGTLVTVSS

SEQ ID NO: 6602 - protein, 122 aa, Artificial Sequence
  source: /note="Description of Artificial Sequence: Synthetic polypeptide"
EVQLQQSGPELVKPGASVKMSCKASGYTFTDYYMDWVKQSHGESFEWIGRVNPYHGGATYNQKFKGKATLTVDKSSRTAYMELNSLTYEDSAVYYCAREENSYDGYYGMDYWGQGTTVTVSS

SEQ ID NO: 6603 - protein, 122 aa, Artificial Sequence
  source: /note="Description of Artificial Sequence: Synthetic polypeptide"
QVQLVQSGAEVKKPGSSVKVSCKASGYTFTDYYMDWVRQAPGQGLEWMGRVNPYHGFATYNQKFKGRVTITADKSTSTAYMELSSLRSEDTAVYYCAREENSYDGYYGMDYWGQGTLVTVSS

SEQ ID NO: 6604 - protein, 122 aa, Artificial Sequence
  source: /note="Description of Artificial Sequence: Synthetic polypeptide"
QVQLVQSGAEVKKPGSSVKVSCKASGYTFTDYYMDWVRQAPGQGLEWMGRVNPYHGWATYNQKFKGRVTITADKSTSTAYMELSSLRSEDTAVYYCAREENSYDGYYGMDYWGQGTLVTVSS

SEQ ID NO: 6605 - protein, 122 aa, Artificial Sequence
  source: /note="Description of Artificial Sequence: Synthetic polypeptide"
QVQLVQSGAEVKKPGSSVKVSCKASGYTFTDYYMDWVRQAPGQGLEWMGRVNPYHGYATYNQKFKGRVTITADKSTSTAYMELSSLRSEDTAVYYCAREENSYDGYYGMDYWGQGTLVTVSS

SEQ ID NO: 6606 - protein, 122 aa, Artificial Sequence
  source: /note="Description of Artificial Sequence: Synthetic polypeptide"
QVQLVQSGAEVKKPGSSVKVSCKASGYTFTDYYMDWVRQAPGQGLEWMGRVNPYHGGGTYNQKFKGRVTITADKSTSTAYMELSSLRSEDTAVYYCAREENSYDGYYGMDYWGQGTLVTVSS

SEQ ID NO: 6607 - protein, 122 aa, Artificial Sequence
  source: /note="Description of Artificial Sequence: Synthetic polypeptide"
QVQLVQSGAEVKKPGSSVKVSCKASGYTFTDYYMDWVRQAPGQGLEWMGRVNPYHGGAFYNQKFKGRVTITADKSTSTAYMELSSLRSEDTAVYYCAREENSYDGYYGMDYWGQGTLVTVSS

SEQ ID NO: 6608 - protein, 122 aa, Artificial Sequence
  source: /note="Description of Artificial Sequence: Synthetic polypeptide"
QVQLVQSGAEVKKPGSSVKVSCKASGYTFTDYYMDWVRQAPGQGLEWMGRVNPYHGGAVYNQKFKGRVTITADKSTSTAYMELSSLRSEDTAVYYCAREENSYDGYYGMDYWGQGTLVTVSS

SEQ ID NO: 6609 - protein, 122 aa, Artificial Sequence
  source: /note="Description of Artificial Sequence: Synthetic polypeptide"
QVQLVQSGAEVKKPGSSVKVSCKASGYTFTDYYMDWVRQAPGQGLEWMGRVNPYHGGAWYNQKFKGRVTITADKSTSTAYMELSSLRSEDTAVYYCAREENSYDGYYGMDYWGQGTLVTVSS

SEQ ID NO: 6610 - protein, 122 aa, Artificial Sequence
  source: /note="Description of Artificial Sequence: Synthetic polypeptide"
QVQLVQSGAEVKKPGSSVKVSCKASGYTFTDYYMDWVRQAPGQGLEWMGRVNPYHGGATFNQKFKGRVTITADKSTSTAYMELSSLRSEDTAVYYCAREENSYDGYYGMDYWGQGTLVTVSS

SEQ ID NO: 6611 - protein, 122 aa, Artificial Sequence
  source: /note="Description of Artificial Sequence: Synthetic polypeptide"
QVQLVQSGAEVKKPGSSVKVSCKASGYTFTDYYMDWVRQAPGQGLEWMGRVNPYHGGATPNQKFKGRVTITADKSTSTAYMELSSLRSEDTAVYYCAREENSYDGYYGMDYWGQGTLVTVSS

SEQ ID NO: 6612 - protein, 122 aa, Artificial Sequence
  source: /note="Description of Artificial Sequence: Synthetic polypeptide"
QVQLVQSGAEVKKPGSSVKVSCKASGYTFTDYYMDWVRQAPGQGLEWMGRVNPYHGGATVNQKFKGRVTITADKSTSTAYMELSSLRSEDTAVYYCAREENSYDGYYGMDYWGQGTLVTVSS

SEQ ID NO: 6613 - protein, 122 aa, Artificial Sequence
  source: /note="Description of Artificial Sequence: Synthetic polypeptide"
QVQLVQSGAEVKKPGSSVKVSCKASGYTFTDYYMDWVRQAPGQGLEWMGRVNPYHGGATYNQKFKGRVTITADKSTSTAYMELSSLRSEDTAVYYCAREDNSYDGYYGMDYWGQGTLVTVSS

SEQ ID NO: 6614 - protein, 122 aa, Artificial Sequence
  source: /note="Description of Artificial Sequence: Synthetic polypeptide"
QVQLVQSGAEVKKPGSSVKVSCKASGYTFTDYYMDWVRQAPGQGLEWMGRVNPYHGGATYNQKFKGRVTITADKSTSTAYMELSSLRSEDTAVYYCAREENSYTGYYGMDYWGQGTLVTVSS

SEQ ID NO: 6615 - protein, 122 aa, Artificial Sequence
  source: /note="Description of Artificial Sequence: Synthetic polypeptide"
QVQLVASGAEVKKPGSSVKVSCKASGYTFTKYYMDWVRQAPGQGLEWMGRVNPYHGGATYNQKFKGRVTITADKSTSTAYMELSSLRSEDTAVYYCAREENSYDGYYGMDYWGQGTLVTVSS

SEQ ID NO: 6616 - protein, 122 aa, Artificial Sequence
  source: /note="Description of Artificial Sequence: Synthetic polypeptide"
QVQLVQSGAEVKKPGSSVKVSCTASGYTFTKYYMDWVRQAPGQGLEWMGRVNPYHGGATYNQKFKGRVTITADKSTSTAYMELSSLRSEDTAVYYCAREENSYDGYYGMDYWGQGTLVTVSS

SEQ ID NO: 6617 - protein, 122 aa, Artificial Sequence
  source: /note="Description of Artificial Sequence: Synthetic polypeptide"
QVQLVASGAEVKKPGSSVKVSCKASGYTFTDYYMDWVRQAPGQGLEWMGRVNPYHGFATYNQKFKGRVTITADKSTSTAYMELSSLRSEDTAVYYCAREENSYDGYYGMDYWGQGTLVTVSS

SEQ ID NO: 6618 - protein, 122 aa, Artificial Sequence
  source: /note="Description of Artificial Sequence: Synthetic polypeptide"
QVQLVASGAEVKKPGSSVKVSCKASGYTFTDYYMDWVRQAPGQGLEWMGRVNPYHGYATYNQKFKGRVTITADKSTSTAYMELSSLRSEDTAVYYCAREENSYDGYYGMDYWGQGTLVTVSS

SEQ ID NO: 6619 - protein, 122 aa, Artificial Sequence
  source: /note="Description of Artificial Sequence: Synthetic polypeptide"
QVQLVASGAEVKKPGSSVKVSCKASGYTFTDYYMDWVRQAPGQGLEWMGRVNPYHGGAFYNQKFKGRVTITADKSTSTAYMELSSLRSEDTAVYYCAREENSYDGYYGMDYWGQGTLVTVSS

SEQ ID NO: 6620 - protein, 122 aa, Artificial Sequence
  source: /note="Description of Artificial Sequence: Synthetic polypeptide"
QVQLVASGAEVKKPGSSVKVSCKASGYTFTDYYMDWVRQAPGQGLEWMGRVNPYHGGATFNQKFKGRVTITADKSTSTAYMELSSLRSEDTAVYYCAREENSYDGYYGMDYWGQGTLVTVSS

SEQ ID NO: 6621 - protein, 122 aa, Artificial Sequence
  source: /note="Description of Artificial Sequence: Synthetic polypeptide"
QVQLVASGAEVKKPGSSVKVSCKASGYTFTDYYMDWVRQAPGQGLEWMGRVNPYHGGATVNQKFKGRVTITADKSTSTAYMELSSLRSEDTAVYYCAREENSYDGYYGMDYWGQGTLVTVSS

SEQ ID NO: 6622 - protein, 122 aa, Artificial Sequence
  source: /note="Description of Artificial Sequence: Synthetic polypeptide"
QVQLVQSGAEVKKPGSSVKVSCTASGYTFTDYYMDWVRQAPGQGLEWMGRVNPYHGFATYNQKFKGRVTITADKSTSTAYMELSSLRSEDTAVYYCAREENSYDGYYGMDYWGQGTLVTVSS

SEQ ID NO: 6623 - protein, 122 aa, Artificial Sequence
  source: /note="Description of Artificial Sequence: Synthetic polypeptide"
QVQLVQSGAEVKKPGSSVKVSCTASGYTFTDYYMDWVRQAPGQGLEWMGRVNPYHGYATYNQKFKGRVTITADKSTSTAYMELSSLRSEDTAVYYCAREENSYDGYYGMDYWGQGTLVTVSS

SEQ ID NO: 6624 - protein, 122 aa, Artificial Sequence
  source: /note="Description of Artificial Sequence: Synthetic polypeptide"
QVQLVQSGAEVKKPGSSVKVSCTASGYTFTDYYMDWVRQAPGQGLEWMGRVNPYHGGAFYNQKFKGRVTITADKSTSTAYMELSSLRSEDTAVYYCAREENSYDGYYGMDYWGQGTLVTVSS

SEQ ID NO: 6625 - protein, 122 aa, Artificial Sequence
  source: /note="Description of Artificial Sequence: Synthetic polypeptide"
QVQLVQSGAEVKKPGSSVKVSCTASGYTFTDYYMDWVRQAPGQGLEWMGRVNPYHGGATFNQKFKGRVTITADKSTSTAYMELSSLRSEDTAVYYCAREENSYDGYYGMDYWGQGTLVTVSS

SEQ ID NO: 6626 - protein, 122 aa, Artificial Sequence
  source: /note="Description of Artificial Sequence: Synthetic polypeptide"
QVQLVQSGAEVKKPGSSVKVSCTASGYTFTDYYMDWVRQAPGQGLEWMGRVNPYHGGATVNQKFKGRVTITADKSTSTAYMELSSLRSEDTAVYYCAREENSYDGYYGMDYWGQGTLVTVSS

SEQ ID NO: 6627 - protein, 122 aa, Artificial Sequence
  source: /note="Description of Artificial Sequence: Synthetic polypeptide"
QVQLVQSGAEVKKPGSSVKVSCTASGYTFTDYYMDWVRQAPGQGLEWMGRVNPYHGGATYNQKFKGRVTITADKSTSTAYMELSSLRSEDTAVYYCAREENSYTGYYGMDYWGQGTLVTVSS

SEQ ID NO: 6628 - protein, 118 aa, Artificial Sequence
  source: /note="Description of Artificial Sequence: Synthetic polypeptide"
EVKLQESGGGLVQPGGSLNLSCTASGFDFSRYWMSWARQAPGKGQEWIGEINPGSSTINYTPSLKDKFIISRDNAKNTLYLQMSKVRSEDTALYYCARQGTYYTMDYWGQGTTVTVSS

SEQ ID NO: 6629 - protein, 120 aa, Artificial Sequence
  source: /note="Description of Artificial Sequence: Synthetic polypeptide"
QVQLVQSGGGVVQPGRSLRLSCAASGVSLPDYGVSWVRQAPRKGLEWVAVIWGSETTYYNSALKSRFTISRDNSKNTLYLQMNSLRAEDTAVYYCARHYYYGGSYAMDYWGQGTLVTVSS

SEQ ID NO: 6630 - protein, 450 aa, Artificial Sequence
  source: /note="Description of Artificial Sequence: Synthetic polypeptide"
QVQLVQSGGGVVQPGRSLRLSCAASGVSLPDYGVSWVRQAPGKGLEWVAVIWGSETTYYNSALKSRFTISRDNSKNTLYLQMNSLRAEDTAVYYCAKHYYYGGSYAMDYWGQGTLVTVSSASTKGPSVFPLAPSSKSTSGGTAALGCLVKDYFPEPVTVSWNSGALTSGVHTFPAVLQSSGLYSLSSVVTVPSSSLGTQTYICNVNHKPSNTKVDKKVEPKSCDKTHTCPPCPAPELLGGPSVFLFPPKPKDTLMISRTPEVTCVVVDVSHEDPEVKFNWYVDGVEVHNAKTKPREEQYNATYRVVSVLTVLHQDWLNGKEYKCKVSNKALPAPIEKTISKAKGQPREPQVYTLPPSRDELTKNQVSLTCLVKGFYPSDIAVEWESNGQPENNYKTTPPVLDSDGSFFLYSKLTVDKSRWQQGNVFSCSVMHEALHNHYTQKSLSLSPGK

SEQ ID NO: 6631 - protein, 450 aa, Artificial Sequence
  source: /note="Description of Artificial Sequence: Synthetic polypeptide"
QVQLVQSGGGVVQPGRSLRLSCAASGVSLPDYGVSWVRQAPGKGLEWVAVIWGSETTYYNSALKSRFTISRDNSKNTLYLQMNSLRAEDTAVYYCAKHYYYGGSYAMDYWGQGTLVTVSSASTKGPSVFPLAPSSKSTSGGTAALGCLVKDYFPEPVTVSWNSGALTSGVHTFPAVLQSSGLYSLSSVVTVPSSSLGTQTYICNVNHKPSNTKVDKKVEPKSCDKTHTCPPCPAPELLGGPSVFLFPPKPKDTLMISRTPEVTCVVVDVSHDDPEVKFNWYVDGVEVHNAKTKPREEQYNATYRVVSVLTVLHQDWLNGKEYKCKVSNKALPAPIEKTISKAKGQPREPQVYTLPPSRDELTKNQVSLTCLVKGFYPSDIAVEWESNGQPENNYKTTPPVLDSDGSFFLYSKLTVDKSRWQQGNVFSCSVMHEALHNHYTQKSLSLSPGK

SEQ ID NO: 6632 - protein, 450 aa, Artificial Sequence
  source: /note="Description of Artificial Sequence: Synthetic polypeptide"
QVQLVQSGGGVVQPGRSLRLSCAASGVSLPDYGVSWVRQAPGKGLEWVAVIWGSETTYYNSALKSRFTISRDNSKNTLYLQMNSLRAEDTAVYYCAKHYYYGGSYAMDYWGQGTLVTVSSASTKGPSVFPLAPSSKSTSGGTAALGCLVKDYFPEPVTVSWNSGALTSGVHTFPAVLQSSGLYSLSSVVTVPSSSLGTQTYICNVNHKPSNTKVDKKVEPKSCDKTHTCPPCPAPELLGGPSVFLFPPKPKDTLMISRTPEVTCVVVDVSHEDPEVKFNWYVDGVEVHNAKTKPREEQYNATYRVVSVLTVLHQDWLNGKEYKCKVNNKALPAPIEKTISKAKGQPREPQVYTLPPSRDELTKNQVSLTCLVKGFYPSDIAVEWESNGQPENNYKTTPPVLDSDGSFFLYSKLTVDKSRWQQGNVFSCSVMHEALHNHYTQKSLSLSPGK

SEQ ID NO: 6633 - protein, 450 aa, Artificial Sequence
  source: /note="Description of Artificial Sequence: Synthetic polypeptide"
QVQLVQSGGGVVQPGRSLRLSCAASGVSLPDYGVSWVRQAPGKGLEWVAVIWGSETTYYNSALKSRFTISRDNSKNTLYLQMNSLRAEDTAVYYCAKHYYYGGSYAMDYWGQGTLVTVSSASTKGPSVFPLAPSSKSTSGGTAALGCLVKDYFPEPVTVSWNSGALTSGVHTFPAVLQSSGLYSLSSVVTVPSSSLGTQTYICNVNHKPSNTKVDKKVEPKSCDKTHTCPPCPAPELLGGPSVFLFPPKPKDTLMISRTPEVTCVVVDVSHDDPEVKFNWYVDGVEVHNAKTKPREEQYNATYRVVSVLTVLHQDWLNGKEYKCKVNNKALPAPIEKTISKAKGQPREPQVYTLPPSRDELTKNQVSLTCLVKGFYPSDIAVEWESNGQPENNYKTTPPVLDSDGSFFLYSKLTVDKSRWQQGNVFSCSVMHEALHNHYTQKSLSLSPGK

SEQ ID NO: 6634 - protein, 450 aa, Artificial Sequence
  source: /note="Description of Artificial Sequence: Synthetic polypeptide"
QVQLVQSGGGVVQPGRSLRLSCAASGVSLPDYGVSWVRQAPGKGLEWVAVIWGSETTYYNSALKSRFTISRDNSKNTLYLQMNSLRAEDTAVYYCAKHYYYGGSYAMDYWGQGTLVTVSSASTKGPSVFPLAPSSKSTSGGTAALGCLVKDYFPEPVTVSWNSGALTSGVHTFPAVLQSSGLYSLSSVVTVPSSSLGTQTYICNVNHKPSNTKVDKKVEPKSCDKTHTCPPCPAPELLGGPSVFLFPPKPKDTLMISRTPEVTCVVVDVSHEDPEVKFNWYVDGVEVHNAKTKPREEQYNSTYRVVSVLTVLHQDWLNGKEYKCKVNNKALPAPIEKTISKAKGQPREPQVYTLPPSRDELTKNQVSLTCLVKGFYPSDIAVEWESNGQPENNYKTTPPVLDSDGSFFLYSKLTVDKSRWQQGNVFSCSVMHEALHNHYTQKSLSLSPGK

SEQ ID NO: 6635 - protein, 450 aa, Artificial Sequence
  source: /note="Description of Artificial Sequence: Synthetic polypeptide"
QVQLVQSGGGVVQPGRSLRLSCAASGVSLPDYGVSWVRQAPGKGLEWVAVIWGSETTYYNSALKSRFTISRDNSKNTLYLQMNSLRAEDTAVYYCAKHYYYGGSYAMDYWGQGTLVTVSSASTKGPSVFPLAPSSKSTSGGTAALGCLVKDYFPEPVTVSWNSGALTSGVHTFPAVLQSSGLYSLSSVVTVPSSSLGTQTYICNVNHKPSNTKVDKKVEPKSCDKTHTCPPCPAPELLGGPSVFLFPPKPKDTLMISRTPEVTCVVVDVSHEDPEVQFNWYVDGVEVHNAKTKPREEQYNSTYRVVSVLTVLHQDWLNGKEYKCKVSNKALPAPIEKTISKAKGQPREPQVYTLPPSRDELTKNQVSLTCLVKGFYPSDIAVEWESNGQPENNYKTTPPVLDSDGSFFLYSKLTVDKSRWQQGNVFSCSVMHEALHNHYTQKSLSLSPGK

SEQ ID NO: 6636 - protein, 450 aa, Artificial Sequence
  source: /note="Description of Artificial Sequence: Synthetic polypeptide"
QVQLVQSGGGVVQPGRSLRLSCAASGVSLPDYGVSWVRQAPGKGLEWVAVIWGSETTYYNSALKSRFTISRDNSKNTLYLQMNSLRAEDTAVYYCAKHYYYGGSYAMDYWGQGTLVTVSSASTKGPSVFPLAPSSKSTSGGTAALGCLVKDYFPEPVTVSWNSGALTSGVHTFPAVLQSSGLYSLSSVVTVPSSSLGTQTYICNVNHKPSNTKVDKKVEPKSCDKTHTCPPCPAPELLGGPSVFLFPPKPKDTLMISRTPEVTCVVVDVSHEDPEVKFKWYVDGVEVHNAKTKPREEQYNSTYRVVSVLTVLHQDWLNGKEYKCKVSNKALPAPIEKTISKAKGQPREPQVYTLPPSRDELTKNQVSLTCLVKGFYPSDIAVEWESNGQPENNYKTTPPVLDSDGSFFLYSKLTVDKSRWQQGNVFSCSVMHEALHNHYTQKSLSLSPGK

SEQ ID NO: 6637 - protein, 450 aa, Artificial Sequence
  source: /note="Description of Artificial Sequence: Synthetic polypeptide"
QVQLVQSGGGVVQPGRSLRLSCAASGVSLPDYGVSWVRQAPGKGLEWVAVIWGSETTYYNSALKSRFTISRDNSKNTLYLQMNSLRAEDTAVYYCAKHYYYGGSYAMDYWGQGTLVTVSSASTKGPSVFPLAPSSKSTSGGTAALGCLVKDYFPEPVTVSWNSGALTSGVHTFPAVLQSSGLYSLSSVVTVPSSSLGTQTYICNVNHKPSNTKVDKKVEPKSCDKTHTCPPCPAPELLGGPSVFLFPPKPKDTLMISRTPEVTCVVVDVSHEDPEVKFNWYVDGVEVHNAKTKPREEQYNSTYRVVSVLTVLHQDWLNGKEYKCKVSNKALPAPIERTISKAKGQPREPQVYTLPPSRDELTKNQVSLTCLVKGFYPSDIAVEWESNGQPENNYKTTPPVLDSDGSFFLYSKLTVDKSRWQQGNVFSCSVMHEALHNHYTQKSLSLSPGK

SEQ ID NO: 6638 - protein, 450 aa, Artificial Sequence
  source: /note="Description of Artificial Sequence: Synthetic polypeptide"
QVQLVQSGGGVVQPGRSLRLSCAASGVSLPDYGVSWVRQAPGKGLEWVAVIWGSETTYYNSALKSRFTISRDNSKNTLYLQMNSLRAEDTAVYYCAKHYYYGGSYAMDYWGQGTLVTVSSASTKGPSVFPLAPSSKSTSGGTAALGCLVKDYFPEPVTVSWNSGALTSGVHTFPAVLQSSGLYSLSSVVTVPSSSLGTQTYICNVNHKPSNTKVDKKVEPKSCDKTHTCPPCPAPELLGGPSVFLFPPKPKDTLMISRTPEVTCVVVDVSHEDPEVQFKWYVDGVEVHNAKTKPREEQYNSTYRVVSVLTVLHQDWLNGKEYKCKVSNKALPAPIEKTISKAKGQPREPQVYTLPPSRDELTKNQVSLTCLVKGFYPSDIAVEWESNGQPENNYKTTPPVLDSDGSFFLYSKLTVDKSRWQQGNVFSCSVMHEALHNHYTQKSLSLSPGK

SEQ ID NO: 6639 - protein, 450 aa, Artificial Sequence
  source: /note="Description of Artificial Sequence: Synthetic polypeptide"
QVQLVQSGGGVVQPGRSLRLSCAASGVSLPDYGVSWVRQAPGKGLEWVAVIWGSETTYYNSALKSRFTISRDNSKNTLYLQMNSLRAEDTAVYYCAKHYYYGGSYAMDYWGQGTLVTVSSASTKGPSVFPLAPSSKSTSGGTAALGCLVKDYFPEPVTVSWNSGALTSGVHTFPAVLQSSGLYSLSSVVTVPSSSLGTQTYICNVNHKPSNTKVDKKVEPKSCDKTHTCPPCPAPELLGGPSVFLFPPKPKDTLMISRTPEVTCVVVDVSHEDPEVQFKWYVDGVEVHNAKTKPREEQYNSTYRVVSVLTVLHQDWLNGKEYKCKVSNKALPAPIERTISKAKGQPREPQVYTLPPSRDELTKNQVSLTCLVKGFYPSDIAVEWESNGQPENNYKTTPPVLDSDGSFFLYSKLTVDKSRWQQGNVFSCSVMHEALHNHYTQKSLSLSPGK

SEQ ID NO: 6640 - protein, 450 aa, Artificial Sequence
  source: /note="Description of Artificial Sequence: Synthetic polypeptide"
QVQLVQSGGGVVQPGRSLRLSCAASGVSLPDYGVSWVRQAPGKGLEWVAVIWGSETTYYNSALKSRFTISRDNSKNTLYLQMNSLRAEDTAVYYCAKHYYYGGSYAMDYWGQGTLVTVSSASTKGPSVFPLAPSSKSTSGGTAALGCLVKDYFPEPVTVSWNSGALTSGVHTFPAVLQSSGLYSLSSVVTVPSSSLGTQTYICNVNHKPSNTKVDKKVEPKSCDKTHTCPPCPAPELLGGPSVFLFPPKPKDTLMISRTPEVTCVVVDVSHEDPEVQFKWYVDGVEVHNAKTKPREEQYNSTFRVVSVLTVLHQDWLNGKEYKCKVSNKALPAPIEKTISKTKGQPREPQVYTLPPSREEMTKNQVSLTCLVKGFYPSDIAVEWESSGQPENNYNTTPPMLDSDGSFFLYSKLTVDKSRWQQGNIFSCSVMHEALHNRFTQKSLSLSPGK

SEQ ID NO: 6641 - protein, 107 aa, Artificial Sequence
  source: /note="Description of Artificial Sequence: Synthetic polypeptide"
DIVMTQTPSSLSASVGDRVTITCRASQDISKYLNWYQQKPGKAPKLLIYHTSRLHSGVPSRFSGSGSGTDFTLTISSLQPEDFATYYCQQGNVLPYTFGPGTKVDIK

SEQ ID NO: 6642 - protein, 107 aa, Artificial Sequence
  source: /note="Description of Artificial Sequence: Synthetic polypeptide"
DIVMTQTPSSLSASVGDRVTITCRASQDISKYLNWYQQKPGKAPKLLIYHTSRLHSGVPSRFSGSGSGTDFTLTISSLQPEDFATYYCQQGNALPYTFGPGTKVDIK

SEQ ID NO: 6643 - protein, 120 aa, Artificial Sequence
  source: /note="Description of Artificial Sequence: Synthetic polypeptide"
QVQLVQSGGGVVQPGRSLRLSCAASGVSLPDYGVSWVRQAPGKGLEWVAVIWGSETTYYNSALKSRFTISRDNSKNTLYLQMNSLRAEDTAVYYCAKHYWYGGSYAMDYWGQGTLVTVSS

SEQ ID NO: 6644 - protein, 120 aa, Artificial Sequence
  source: /note="Description of Artificial Sequence: Synthetic polypeptide"
QVQLVQSGGGVVQPGRSLRLSCAASGVSLPDFGVSWVRQAPGKGLEWVAVIWGSETTYYNSALKSRFTISRDNSKNTLYLQMNSLRAEDTAVYYCAKHYFYGGSYAMDYWGQGTLVTVSS

SEQ ID NO: 6645 - protein, 450 aa, Artificial Sequence
  source: /note="Description of Artificial Sequence: Synthetic polypeptide"
QVQLVQSGGGVVQPGRSLRLSCAASGVSLPDYGVSWVRQAPGKGLEWVAVIWGSETTYYNSALKSRFTISRDNSKNTLYLQMNSLRAEDTAVYYCAKHYYYGGSYAFDYWGQGTLVTVSSASTKGPSVFPLAPSSKSTSGGTAALGCLVKDYFPEPVTVSWNSGALTSGVHTFPAVLQSSGLYSLSSVVTVPSSSLGTQTYICNVNHKPSNTKVDKKVEPKSCDKTHTCPPCPAPELLGGPSVFLFPPKPKDTLMISRTPEVTCVVVDVSHEDPEVKFNWYVDGVEVHNAKTKPREEQYNSTYRVVSVLTVLHQDWLNGKEYKCKVSNKALPAPIEKTISKAKGQPREPQVYTLPPSRDELTKNQVSLTCLVKGFYPSDIAVEWESNGQPENNYKTTPPVLDSDGSFFLYSKLTVDKSRWQQGNVFSCSVMHEALHNHYTQKSLSLSPGK

SEQ ID NO: 6646 - protein, 450 aa, Artificial Sequence
  source: /note="Description of Artificial Sequence: Synthetic polypeptide"
EVKLQESGPGLVAPSQSLSVTCTVSGVSLPDYGVSWIRQPPRKGLEWLGVIWGSETTYYNSALKSRLTIIKDNSKSQVFLKMNSLQTDDTAIYYCAKHYYYGGSYAMDYWGQGTSVTVSSASTKGPSVFPLAPSSKSTSGGTAALGCLVKDYFPEPVTVSWNSGALTSGVHTFPAVLQSSGLYSLSSVVTVPSSSLGTQTYICNVNHKPSNTKVDKKVEPKSCDKTHTCPPCPAPELLGGPSVFLFPPKPKDTLMISRTPEVTCVVVDVSHEDPEVKFNWYVDGVEVHNAKTKPREEQYNSTYRVVSVLTVLHQDWLNGKEYKCKVSNKALPAPIEKTISKAKGQPREPQVYTLPPSRDELTKNQVSLTCLVKGFYPSDIAVEWESNGQPENNYKTTPPVLDSDGSFFLYSKLTVDKSRWQQGNVFSCSVMHEALHNHYTQKSLSLSPGK

SEQ ID NO: 6647 - protein, 450 aa, Artificial Sequence
  source: /note="Description of Artificial Sequence: Synthetic polypeptide"
QVQLQESGPGLVKPSQTLSLTCTVSGGSISTSGMGVGWIRQHPGKGLEWIGHIWWDDDKRYNPALKSRVTISVDTSKNQFSLKLSSVTAADTAVYYCARMELWSYYFDYWGQGTLVTVSSASTKGPSVFPLAPSSKSTSGGTAALGCLVKDYFPEPVTVSWNSGALTSGVHTFPAVLQSSGLYSLSSVVTVPSSSLGTQTYICNVNHKPSNTKVDKKVEPKSCDKTHTCPPCPAPELLGGPSVFLFPPKPKDTLMISRTPEVTCVVVDVSHEDPEVKFNWYVDGVEVHNAKTKPREEQYNSTYRVVSVLTVLHQDWLNGKEYKCKVSNKALPAPIEKTISKAKGQPREPQVYTLPPSRDELTKNQVSLTCLVKGFYPSDIAVEWESNGQPENNYKTTPPVLDSDGSFFLYSKLTVDKSRWQQGNVFSCSVMHEALHNHYTQKSLSLSPGK

SEQ ID NO: 6648 - protein, 115 aa, Artificial Sequence
  source: /note="Description of Artificial Sequence: Synthetic polypeptide"
LESGAELVRPGSSVKISCKASGYAFSSYWMNWVKQRPGQGLEWIGQIYPGDGDTNYNGKFKGQATLTADKSSSTAYMQLSGLTSEDSAVYSCARKTISSVVDFYFDNWGQGTTVT

SEQ ID NO: 6649 - protein, 114 aa, Artificial Sequence
  source: /note="Description of Artificial Sequence: Synthetic polypeptide"
LESGAELVRPGASVKISCKASGYAFSSSWMNWVKQRPGQGLEWIGRIYPGDGDTNYNGKFKEAATLTADKSSSTAYMQLSSLTSVDSAVYSCARSEYWGNYWAMDYWGQGTTVT

SEQ ID NO: 6650 - protein, 450 aa, Artificial Sequence
  source: /note="Description of Artificial Sequence: Synthetic polypeptide"
QVQLVQPGAEVVKPGASVKLSCKTSGYTFTSNWMHWVKQAPGQGLEWIGEIDPSDSYTNYNQNFQGKAKLTVDKSTSTAYMEVSSLRSDDTAVYYCARGSNPYYYAMDYWGQGTSVTVSSASTKGPSVFPLAPSSKSTSGGTAALGCLVKDYFPEPVTVSWNSGALTSGVHTFPAVLQSSGLYSLSSVVTVPSSSLGTQTYICNVNHKPSNTKVDKKVEPKSCDKTHTCPPCPAPELLGGPSVFLFPPKPKDTLMISRTPEVTCVVVDVSHEDPEVKFNWYVDGVEVHNAKTKPREEQYNSTYRVVSVLTVLHQDWLNGKEYKCKVSNKALPAPIEKTISKAKGQPREPQVYTLPPSRDELTKNQVSLTCLVKGFYPSDIAVEWESNGQPENNYKTTPPVLDSDGSFFLYSKLTVDKSRWQQGNVFSCSVMHEALHNHYTQKSLSLSPGK

SEQ ID NO: 6651 - protein, 451 aa, Artificial Sequence
  source: /note="Description of Artificial Sequence: Synthetic polypeptide"
EVQLVESGGGLVQPGGSLRLSCAASGFTFSSSWMNWVRQAPGKGLEWVGRIYPGDGDTNYNVKFKGRFTISRDDSKNSLYLQMNSLKTEDTAVYYCARSGFITTVRDFDYWGQGTLVTVSSASTKGPSVFPLAPSSKSTSGGTAALGCLVKDYFPEPVTVSWNSGALTSGVHTFPAVLQSSGLYSLSSVVTVPSSSLGTQTYICNVNHKPSNTKVDKRVEPKSCDKTHTCPPCPAPELLGGPSVFLFPPKPKDTLMISRTPEVTCVVVDVSHEDPEVKFNWYVDGVEVHNAKTKPREEQYNSTYRVVSVLTVLHQDWLNGKEYKCKVSNKALPAPIEKTISKAKGQPREPQVYTLPPSREEMTKNQVSLTCLVKGFYPSDIAVEWESNGQPENNYKTTPPVLDSDGSFFLYSKLTVDKSRWQQGNVFSCSVMHEALHNHYTQKSLSLSPGK

SEQ ID NO: 6652 - protein, 451 aa, Artificial Sequence
  source: /note="Description of Artificial Sequence: Synthetic polypeptide"
QVQLQQPGAELVRPGTSVKLSCKASGYTFTSYWMHWIKQRPGQGLEWIGVIDPSDNYTKYNQKFKGKATLTVDTSSSTAYMQLSSLTSEDSAVYFCAREGYYGSSPWFAYWGQGTLVTVSSAKTTAPSVYPLAPVCGDTTGSSVTLGCLVKGYFPEPVTLTWNSGSLSSGVHTFPAVLQSDLYTLSSSVTVTSSTWPSQSITCNVAHPASSTKVDKKIEPRGPTIKPCPPCKCPAPNLLGGPSVFIFPPKIKDVLMISLSPIVTCVVVDVSEDDPDVQISWFVNNVEVHTAQTQTHREDYNSTLRVVSALPIQHQDWMSGKEFKCKVNNKDLPAPIERTISKPKGSVPAPQVYVLPPPEEEMTKKQVTLTCMVTDFMPEDIYVEWTNNGKTELNYKNTEPVLDSDGSYFMYSKLRVEKKNWVERNSYSCSVVHEGLHNHHTTKSFSRTPGK

SEQ ID NO: 6653 - protein, 121 aa, Artificial Sequence
  source: /note="Description of Artificial Sequence: Synthetic polypeptide"
QVQLVQSGAEVKKPGSSVKVSCKASGYTFTSYNMHWVRQAPGQGLEWIGAIYPGNGDTSYNQKFKGKATITADKSTSTAYMELSSLRSDDTAVYYCARSTYYAGDWNFNDWGQGTLVTVSS

SEQ ID NO: 6654 - protein, 471 aa, Artificial Sequence
  source: /note="Description of Artificial Sequence: Synthetic polypeptide"
MGWSCIILFLVATATGVHSEVQLVESGGGLVQPGGSLRLSCAASGYTFTSYNMHWVRQAPGKGLEWVGAIYPGNGDTSYNQKFKGRFTISVDKSKNTLYLQMNSLRAEDTAVYYCARVVYYSNSYWYFDVWGQGTLVTVSSASTKGPSVFPLAPSSKSTSGGTAALGCLVKDYFPEPVTVSWNSGALTSGVHTFPAVLQSSGLYSLSSVVTVPSSSLGTQTYICNVNHKPSNTKVDKKVEPKSCDKTHTCPPCPAPELLGGPSVFLFPPKPKDTLMISRTPEVTCVVVDVSHEDPEVKFNWYVDGVEVHNAKTKPREEQYNATYRVVSVLTVLHQDWLNGKEYKCKVSNKALPAPIAATISKAKGQPREPQVYTLPPSREEMTKNQVSLTCLVKGFYPSDIAVEWESNGQPENNYKTTPPVLDSDGSFFLYSKLTVDKSRWQQGNVFSCSVMHEALHNHYTQKSLSLSPGK

SEQ ID NO: 6655 - protein, 471 aa, Artificial Sequence
  source: /note="Description of Artificial Sequence: Synthetic polypeptide"
MGWSCIILFLVATATGVMSEVQLVESGCGLVQPGGSLRLSCAASGYTFTSYNMHWVRQAPGKGLEWVGAIYPGNGDTSYNQKFKGRFTISVDKSKNTLYLQMNSLRAEDTAVYYCARVVYYSNSYWYFDVWGQGTLVTVSSASTKGPSVFPLAPSSKSTSGGTAALGCLVKDYFPEPVTVSWNSGALTSGVHTFPAVLQSSGLYSLSSVVTVPSSSLGTQTYICNVNHKPSNTKVDKKVEPKSCDKTHTCPPCPAPELLGGPSVFLFPPKPKDTLMISRTPEVTCVVVDVSHEDFEVKFNWYVDGVEVHNAKTKPREEQYNSTYRVVSVLTVLHQDWLNGKEYKCKVSNKALPAPIEKTISKAKGQPREPQVYTLPPSREEMTKNQVSLTCLVKGFYPSDIAVEWESNGQPENNYKTTPPVLDSDCSFFLYSKLTVDKSRWQQGNVFSCSVMHEALHNHYTQKSLSLSPGK

SEQ ID NO: 6656 - protein, 448 aa, Artificial Sequence
  source: /note="Description of Artificial Sequence: Synthetic polypeptide"
QVQLVQSGAEVKKPGSSVKVSCKASGYAFSYSWINWVRQAPGQGLEWMGRIFPGDGDTDYNGKFKGRVTITADKSTSTAYMELSSLRSEDTAVYYCARNVFDGYWLVYWGQGTLVTVSSASTKGPSVFPLAPSSKSTSGGTAALGCLVKDYFPEPVTVSWNSGALTSGVHTFPAVLQSSGLYSLSSVVTVPSSSLGTQTYICNVNHKPSNTKVDKKVEPKSCDKTHTCPPCPAPELLGGPSVFLFPPKPKDTLMISRTPEVTCVVVDVSHEDPEVKFNWYVDGVEVHNAKTKPREEQYNSTYRVVSVLTVLHQDWLNGKEYKCKVSNKALPAPIEKTISKAKGQPREPQVYTLPPSRDELTKNQVSLTCLVKGFYPSDIAVEWESNGQPENNYKTTPPVLDSDGSFFLYSKLTVDKSRWQQGNVFSCSVMHEALHNHYTQKSLSLSPG

SEQ ID NO: 6657 - protein, 253 aa, Artificial Sequence
  source: /note="Description of Artificial Sequence: Synthetic polypeptide"
MKKNIAFLLASMFVFSIATNAYAQAYLQQSGAELVRPGASVKMSCKASGYTFTSYNMHWVKQTPRQGLEWIGAIYPGNGDTSYNQKFKGKATLTVDKSSSTAYMQLSSLTSEDSAVYFCARVVYYSNSYWYFDVWGTGTTVTVSSASTKGPSVFPLAPSSKSTSGGTAALGCLVKDYFPEPVTVSWNSGALTSGVHTFPAVLQSSGLYSLSSVVTVPSSSLGTQTYICNVNHKPSNTKVDKKVEPKSCDKTHT

SEQ ID NO: 6658 - protein, 471 aa, Artificial Sequence
  source: /note="Description of Artificial Sequence: Synthetic polypeptide"
MGWSCIILFLVATATGVHSEVQLVESGGGLVQPGGSLRLSCAASGYTFTSYNMHWVRQAPGKGLEWVGAIYPGNGDTSYNQKFKGRFTISVDKSKNTLYLQMNSLRAEDTAVYYCARVVYYSNSYWYFDVWGQGTLVTVSSASTKGPSVFPLAPSSKSTSGGTAALGCLVKDYFPEPVTVSWNSGALTSGVHTFPAVLQSSGLYSLSSVVTVPSSSLGTQTYICNVNHKPSNTKVDKKVEPKSCDKTHTCPPCPAPELLGGPSVFLFPPKPKDTLMISRTPEVTCVVVDVSHEDPEVKFNWYVDGVEVHNAKTKPREEQYNSTYRVVSVLTVLHQDWLNGKEYKCKVSNKALPAPIEKTISKAKGQPREPQVYTLPPSREEMTKNQVSLTCLVKGFYPSDIAVEWESNGQPENNYKTTPPVLDSDGSFFLYSKLTVDKSRWQQGNVFSCSVMHEALHNHYTQKSLSLSPGK

SEQ ID NO: 6659 - protein, 471 aa, Artificial Sequence; identical to SEQ ID NO: 6654
  source: /note="Description of Artificial Sequence: Synthetic polypeptide"

SEQ ID NO: 6660 - protein, 452 aa, Artificial Sequence
  source: /note="Description of Artificial Sequence: Synthetic polypeptide"
EVQLVESGGGLVQPGGSLRLSCAASGYTFTSYNMHWVRQAPGKGLEWVGAIYPGNGDTSYNQKFKGRFTISVDKSKNTLYLQMNSLRAEDTAVYYCARVVYYSNSYWYFDVWGQGTLVTVSSASTKGPSVFPLAPSSKSTSGGTAALGCLVKDYFPEPVTVSWNSGALTSGVHTFPAVLQSSGLYSLSSVVTVPSSSLGTQTYICNVNHKPSNTKVDKKVEPKSCDKTHTCPPCPAPELLGGPSVFLFPPKPKDTLMISRTPEVTCVVVDVSHEDPEVKFNWYVDGVEVHNAKTKPREEQYNSTYRVVSVLTVLHQDWLNGKEYKCKVSNKALPAPIEKTISKAKGQPREPQVYTLPPSREEMTKNQVSLTCLVKGFYPSDIAVEWESNGQPENNYKTTPPVLDSDGSFFLYSKLTVDKSRWQQGNVFSCSVMHEALHNHYTQKSLSLSPGK

SEQ ID NO: 6661 - protein, 452 aa, Artificial Sequence
  source: /note="Description of Artificial Sequence: Synthetic polypeptide"
EVQLVESGGGLVQPGGSLRLSCAASGYTFTSYNMHWVRQAPGKGLEWVGAIYPGNGDTSYNQKFKGRFTISVDKSKNTLYLQMNSLRAEDTAVYYCARVVYYSASYWYFDVWGQGTLVTVSSASTKGPSVFPLAPSSKSTSGGTAALGCLVKDYFPEPVTVSWNSGALTSGVHTFPAVLQSSGLYSLSSVVTVPSSSLGTQTYICNVNHKPSNTKVDKKVEPKSCDKTHTCPPCPAPELLGGPSVFLFPPKPKDTLMISRTPEVTCVVVDVSHEDPEVKFNWYVDGVEVHNAKTKPREEQYNATYRVVSVLTVLHQDWLNGKEYKCKVSNKALPAPIAATISKAKGQPREPQVYTLPPSREEMTKNQVSLTCLVKGFYPSDIAVEWESNGQPENNYKTTPPVLDSDGSFFLYSKLTVDKSRWQQGNVFSCSVMHEALHNHYTQKSLSLSPGK

SEQ ID NO: 6662 - protein, 452 aa, Artificial Sequence
  source: /note="Description of Artificial Sequence: Synthetic polypeptide"
EVQLVESGGGLVQPGGSLRLSCAASGYTFTSYNMHWVRQAPGKGLEWVGAIYPGNGATSYNQKFKGRFTISVDKSKNTLYLQMNSLRAEDTAVYYCARVVYYSASYWYFDVWGQGTLVTVSSASTKGPSVFPLAPSSKSTSGGTAALGCLVKDYFPEPVTVSWNSGALTSGVHTFPAVLQSSGLYSLSSVVTVPSSSLGTQTYICNVNHKPSNTKVDKKVEPKSCDKTHTCPPCPAPELLGGPSVFLFPPKPKDTLMISRTPEVTCVVVDVSHEDPEVKFNWYVDGVEVHNAKTKPREEQYNATYRVVSVLTVLHQDWLNGKEYKCKVSNKALPAPIAATISKAKGQPREPQVYTLPPSREEMTKNQVSLTCLVKGFYPSDIAVEWESNGQPENNYKTTPPVLDSDGSFFLYSKLTVDKSRWQQGNVFSCSVMHEALHNHYTQKSLSLSPGK

SEQ ID NO: 6663 - protein, 452 aa, Artificial Sequence
  source: /note="Description of Artificial Sequence: Synthetic polypeptide"
EVQLVESGGGLVQPGGSLRLSCAASGYTFTSYNMHWVRQAPGKGLEWVGAIYPGNGATSYNQKFKGRFTISVDKSKNTLYLQMNSLRAEDTAVYYCARVVYYSASYWYFDVWGQGTLVTVSSASTKGPSVFPLAPSSKSTSGGTAALGCLVKDYFPEPVTVSWNSGALTSGVHTFPAVLQSSGLYSLSSVVTVPSSSLGTQTYICNVNHKPSNTKVDKKVEPKSCDKTHTCPPCPAPELLGGPSVFLFPPKPKDTLMISRTPEVTCVVVDVSHEDPEVKFNWYVDGVEVHNAKTKPREEQYNATYRVVSVLTVLHQDWLNGKEYKCKVSNKALPAPIAATISKAKGQPREPQVYTLPPSRDELTKNQVSLTCLVKGFYPSDIAVEWESNGQPENNYKTTPPVLDSDGSFFLYSKLTVDKSRWQQGNVFSCSVMHEALHNHYTQKSLSLSPGK

SEQ ID NO: 6664 - protein, 452 aa, Artificial Sequence
  source: /note="Description of Artificial Sequence: Synthetic polypeptide"
EVQLVESGGGLVQPGGSLRLSCAASGYTFTSYNMHWVRQAPGKGLEWVGAIYPGNGATSYNQKFKGRFTISVDKSKNTLYLQMNSLRAEDTAVYYCARVVYYSASYWYFDVWGQGTLVTVSSASTKGPSVFPLAPSSKSTSGGTAALGCLVKDYFPEPVTVSWNSGALTSGVHTFPAVLQSSGLYSLSSVVTVPSSSLGTQTYICNVNHKPSNTKVDKKVEPKSCDKTHTCPPCPAPELLGGPSVFLFPPKPKDTLMISRTPEVTCVVVDVSHEDPEVKFNWYVDGVEVHNAKTKPREEQYNATYRVVSVLTVLHQDWLNGKEYKCAVSNKALPAPIEATISKAKGQPREPQVYTLPPSREEMTKNQVSLTCLVKGFYPSDIAVEWESNGQPENNYKTTPPVLDSDGSFFLYSKLTVDKSRWQQGNVFSCSVMHEALHNHYTQKSLSLSPGK

SEQ ID NO: 6665 - protein, 452 aa, Artificial Sequence
  source: /note="Description of Artificial Sequence: Synthetic polypeptide"
EVQLVESGGGLVQPGGSLRLSCAASGYTFTSYNMHWVRQAPGKGLEWVGAIYPGNGATSYNQKFKGRFTISVDKSKNTLYLQMNSLRAEDTAVYYCARVVYYSASYWYFDVWGQGTLVTVSSASTKGPSVFPLAPSSKSTSGGTAALGCLVKDYFPEPVTVSWNSGALTSGVHTFPAVLQSSGLYSLSSVVTVPSSSLGTQTYICNVNHKPSNTKVDKKVEPKSCDKTHTCPPCPAPELLGGPSVFLFPPKPKDTLMISRTPEVTCVVVDVSHEDPEVKFNWYVDGVEVHNAKTKPREEQYNATYRVVSVLTVLHQDWLNGKEYKCKVSNAALPAPIAATISKAKGQPREPQVYTLPPSREEMTKNQVSLTCLVKGFYPSDIAVEWESNGQPENNYKTTPPVLDSDGSFFLYSKLTVDKSRWQQGNVFSCSVMHEALHNHYTQKSLSLSPGK

SEQ ID NO: 6666 - protein, 443 aa, Artificial Sequence
  source: /note="Description of Artificial Sequence: Synthetic polypeptide"
QAYLQQSGAELVRPGASVKMSCKASGYTFTSYNMHWVKQTPRQGLEWIGAIYPGNGDTSYNQKFKGKATLTVDKSSSTAYMQLSSLTSEDSAVYFCARVVYYSNSYWYFDVWGTGTTVTVSAPSVYPLAPVCGDTTGSSVTLGCLVKGYFPEPVTLTWNSGSLSSGVHTFPAVLQSDLYTLSSSVTVTSSTWPSQSITCNVAHPASSTKVDKKIEPRGPTIKPCPPCKCPAPNLLGGPSVFIFPPKIKDVLMISLSPIVTCVVVDVSEDDPDVQISWFVNNVEVHTAQTQTHREDYNSTLRVVSALPIQHQDWMSGKEFKCKVNNKDLPAPIERTISKPKGSVRAPQVYVLPPPEEEMTKKQVTLTCMVTDFMPEDIYVEWTNNGKTELNYKNTEPVLDSDGSYFMYSKLRVEKKNWVERNSYSCSVVHEGLHNHHTTKSFSR

SEQ ID NO: 6667 - protein, 471 aa, Artificial Sequence; identical to SEQ ID NO: 6654
  source: /note="Description of Artificial Sequence: Synthetic polypeptide"

SEQ ID NO: 6668 - protein, 452 aa, Artificial Sequence; identical to SEQ ID NO: 6660
  source: /note="Description of Artificial Sequence: Synthetic polypeptide"

SEQ ID NO: 6669 - protein, 447 aa, Artificial Sequence
  source: /note="Description of Artificial Sequence: Synthetic polypeptide"
EVQLVESGGGLVQPGGSLRLSCAASGYTFTSYNMHWVRQAPGKGLEWVGAIYPGNGDTSYNQKFKGRFTISVDKSKNTLYLQMNSLRAEDTAVYYCARWYYSNSYWYFDWGQGTLVTVSSASTKGPSVFPLAPSSKSTSGGTAALGCLVKDYFPEPVTVSWNSGALTSGVHTFPAVLQSSGLYSLSSWWPSSSLGTQTYICNVNHKPSNTKVDKKVEPKSCDKTHTCPPCPAPELLGGPSVFLFPPKPKDTLMISRTPEVTCVWDVSHEDPEVKFNWYVDGVEVHNAKTKPREEQYNATYRVVSVLTVLHQDWLNGKEYKCKVSNKALPAPIAATISKAKGQPREPQVYTLPPSREEMTKNQVSLTCLVKGFYPSDIAVEWESNGQPENNYKTTPPVLDSDGSFFLYSKLTVDKSRWQQGNVFSCSVMHEALHNHYTQKSLSLSPGK

SEQ ID NO: 6670 - protein, 468 aa, Artificial Sequence
  source: /note="Description of Artificial Sequence: Synthetic polypeptide"
MEFGLSWVFLVAILRGVQCQVQLVESGGGVVQPGRSLRLSCAASGFTFSSYGMHWVRQAPGKGLEWVAVISYEESNRYHADSVKGRFTISRDNSKITLYLQMNSLRTEDTAVYYCARDGGIAAPGPDYWGQGTLVTVSSASTKGPSVFPLAPASKSTSGGTAALGCLVKDYFPEPVTVSWNSGALTSGVHTFPAVLQSSGLYSLSSVVTVPSSSLGTQTYICNVNHKPSNTKVDKRVEPKSCDKTHTCPPCPAPELLGGPSVFLFPPKPKDTLMISRTPEVTCVVVDVSHEDPEVKFNWYVDGVEVHNAKTKPREEQYNSTYRVVSVLTVLHQDWLNGKEYKCKVSNKALPAPIEKTISKAKGQPREPQVYTLPPSREEMTKNQVSLTCLVKGFYPSDIAVEWESNGQPENNYKTTPPVLDSDGSFFLYSKLTVDKSRWQQGNVFSCSVMHEALHNHYTQKSLSLSPG

SEQ ID NO: 6671 - protein, 469 aa, Artificial Sequence
  source: /note="Description of Artificial Sequence: Synthetic polypeptide"
MEFGLSWVFLVAILRGVQCQVQLVESGGGVVQPGRSLRLSCAASGFTFSSYGMHWVRQAPGKGLEWVAVISYEESNRYHADSVKGRFTISRDNSKITLYLQMNSLRTEDTAVYYCARDGGIAAPGPDYWGQGTLVTVSSASTKGPSVFPLAPSSKSTSGGTAALGCLVKDYFPEPVTVSWNSGALTSGVHTFPAVLQSSGLYSLSSVVTVPSSSLGTQTYICNVNHKPSNTKVDKRVEPKSCDKTHTCPPCPAPELLGGPSVFLFPPKPKDTLMISRTPEVTCVVVDVSHEDPEVKFNWYVDGVEVHNAKTKPREEQYNSTYRVVSVLTVLHQDWLNGKEYKCKVSNKALPAPIEKTISKAKGQPREPQVYTLPPSREEMTKNQVSLTCLVKGFYPSDIAVEWESNGQPENNYKTTPPVLDSDGSFFLYSKLTVDKSRWQQGNVFSCSVMHEALHNHYTQKSLSLSPGK

SEQ ID NO: 6672 - protein, 235 aa, Artificial Sequence
  source: /note="Description of Artificial Sequence: Synthetic polypeptide"
MDFQVQIISFLLISASVIMSRGQIVLSQSPAILSASPGEKVTMTCRASSSVSYIHWFQQKPGSSPKPWIYATSNLASGVPVRFSGSGSGTSYSLTISRVEAEDAATYYCQQWTSNPPTFGGGTKLEIKRTVAAPSVFIFPPSDEQLKSGTASVVCLLNNFYPREAKVQWKVDNALQSGNSQESVTEQDSKDSTYSLSSTLTLSKADYEKHKVYACEVTHQGLSSPVTKSFNRGEC

SEQ ID NO: 6673 - protein, 114 aa, Artificial Sequence
  source: /note="Description of Artificial Sequence: Synthetic polypeptide"
QVQLVQSGAEVKKPGASVKVSCKASGYTFTSYGISWVRQAPGQGLEWMGWISAYNGNTNYAQKLQGRVTMTTDTSTSTAYMELRSLRSDDTAVYYCARTAMDYWGQGTLVTVSS

SEQ ID NO: 6674 - protein, 115 aa, Artificial Sequence
  source: /note="Description of Artificial Sequence: Synthetic polypeptide"
QVQLVQSGAEVKKPGASVKVSCKASGYTFTSYGISWVRQAPGQGLEWMGWISAYNGNTNYAQKLQGRVTMTTDTSTSTAYMELRSLRSDDTAVYYCARSSWFDYWGQGTLVTVSS

SEQ ID NO: 6675 - protein, 117 aa, Artificial Sequence
  source: /note="Description of Artificial Sequence: Synthetic polypeptide"
QVQLVESGGGLVKPGGSLRLSCAASGFTFSDYYMSWIRQAPGKGLEWVSYISSSGSTIYYADSVKGRFTISRDNAKNSLYLQMNSLRAEDTAVYYCARYGGNYFDYWGQGTLVTVSS

SEQ ID NO: 6676 - protein, 111 aa, Artificial Sequence
  source: /note="Description of Artificial Sequence: Synthetic polypeptide"
QVQLVESGGGVVQPGRSLRLSCAASGFTFSSYGMHWVRQAPGKGLEWVAVIWYDGSNKYYADSVKGRFTISRDNSKNTLYLQMNSLRAEDTAVYYCAFDYWGQGTLVTVSS

SEQ ID NO: 6677 - protein, 118 aa, Artificial Sequence
  source: /note="Description of Artificial Sequence: Synthetic polypeptide"
EVQLVQSGAEVKKPGESLKISCKGSGYSFTSYWIGWVRQMPGKGLEWMGIIYPGDSDTRYSPSFQGQVTISADKSISTAYLQWSSLKASDTAMYYCARYYYYYGMDVWGQGTTVTVSS

SEQ ID NO: 6678 - protein, 119 aa, Artificial Sequence
  source: /note="Description of Artificial Sequence: Synthetic polypeptide"
EVQLVQSGAEVKKPGESLKISCKGSGYSFTSYWIGWVRQMPGKGLEWMGIIYPGDSDTRYSPSFQGQVTISADKSISTAYLQWSSLKASDTAMYYCARYSGSYYAFDIWGQGTMVTVSS

SEQ ID NO: 6679 - protein, 121 aa, Artificial Sequence
  source: /note="Description of Artificial Sequence: Synthetic polypeptide"
EVQLVQSGAEVKKPGESLKISCKGSGYSFTSYWIGWVRQMPGKGLEWMGIIYPGDSDTRYSPSFQGQVTISADKSISTAYLQWSSLKASDTAMYYCARVGATNYYYGMDVWGQGTTVTVSS

SEQ ID NO: 6680 - protein, 119 aa, Artificial Sequence
  source: /note="Description of Artificial Sequence: Synthetic polypeptide"
EVQLVQSGAEVKKPGESLKISCKGSGYSFTSYWIGWVRQMPGKGLEWMGIIYPGDSDTRYSPSFQGQVTISADKSISTAYLQWSSLKASDTAMYYCARTGTYYYGMDVWGQGTTVTVSS

SEQ ID NO: 6681 - protein, 119 aa, Artificial Sequence
  source: /note="Description of Artificial Sequence: Synthetic polypeptide"
EVQLVQSGAEVKKPGESLKISCKGSGYSFTSYWIGWVRQMPGKGLEWMGIIYPGDSDTRYSPSFQGQVTISADKSISTAYLQWSSLKASDTAMYYCARYYGSGSAFDIWGQGTMVTVSS

SEQ ID NO: 6682 - protein, 117 aa, Artificial Sequence
  source: /note="Description of Artificial Sequence: Synthetic polypeptide"
EVQLVQSGAEVKKPGESLKISCKGSGYSFTSYWIGWVRQMPGKGLEWMGIIYPGDSDTRYSPSFQGQVTISADKSISTAYLQWSSLKASDTAMYYCARYGSGSFDYWGQGTLVTVSS

SEQ ID NO: 6683 - protein, 116 aa, Artificial Sequence
  source: /note="Description of Artificial Sequence: Synthetic polypeptide"
EVQLVQSGAEVKKPGESLKISCKGSGYSFTSYWIGWVRQMPGKGLEWMGIIYPGDSDTRYSPSFQGQVTISADKSISTAYLQWSSLKASDTAMYYCARYYDSSDYWGQGTLVTVSS

SEQ ID NO: 6684 - protein, 119 aa, Artificial Sequence
  source: /note="Description of Artificial Sequence: Synthetic polypeptide"
EVQLVQSGAEVKKPGESLKISCKGSGYSFTSYWIGWVRQMPGKGLEWMGIIYPGDSDTRYSPSFQGQVTISADKSISTAYLQWSSLKASDTAMYYCARDFWSGYYFDYWGQGTLVTVSS

SEQ ID NO: 6685 - protein, 121 aa, Artificial Sequence
  source: /note="Description of Artificial Sequence: Synthetic polypeptide"
EVQLVQSGAEVKKPGESLKISCKGSGYSFTSYWIGWVRQMPGKGLEWMGIIYPGDSDTRYSPSFQGQVTISADKSISTAYLQWSSLKASDTAMYYCARDFWSGYYTGMDVWGQGTTVTVSS

SEQ ID NO: 6686 - protein, 117 aa, Artificial Sequence
  source: /note="Description of Artificial Sequence: Synthetic polypeptide"
EVQLVQSGAEVKKPGESLKISCKGSGYSFTSYWIGWVRQMPGKGLEWMGIIYPGDSDTRYSPSFQGQVTISADKSISTAYLQWSSLKASDTAMYYCARDYSNAFDIWGQGTMVTVSS

SEQ ID NO: 6687 - protein, 117 aa, Artificial Sequence
  source: /note="Description of Artificial Sequence: Synthetic polypeptide"
EVQLVQSGAEVKKPGESLKISCKGSGYSFTSYWIGWVRQMPGKGLEWMGIIYPGDSDTRYSPSFQGQVTISADKSISTAYLQWSSLKASDTAMYYCARYSSGAFDVWGQGTMVTVSS

SEQ ID NO: 6688 - protein, 117 aa, Artificial Sequence
  source: /note="Description of Artificial Sequence: Synthetic polypeptide"
QVQLQQSGPGLVKPSQTLSLTCAISGDSVSSNSAAWNWIRQSPSRGLEWLGRTYYRSKWYNDYAVSVKSRITINPDTSKNQFSLQLNSVTPEDTAVYYCARWNFDYWGQGTLVTVSS

SEQ ID NO: 6689 - protein, 445 aa, Artificial Sequence
  source: /note="Description of Artificial Sequence: Synthetic polypeptide"
QLQLVQSGPELKKPGETVKISCKASGYSFTNYGMNWVKQAPGKGLKWMGWINTYTGEPSYADDFKGRFAFSLETSASTAYLQISNLKNEDTATYFCARGAYYRYDLGMDYWGQGTSVTVSSAKTTPPSVYPLAPGSAAQTNSMVTLGCLVKGYFPEPVTVTWNSGSLSSGVHTFPAVLESDLYTLSSSVTVPSSMRPSETVTCNVAHPASSTKVDKKIVPRDCGCKPCICTVPEVSSVFIFPPKPKDVLTITLTPKVTCVVVDISKDDPEVQFSWFVDDVEVHTAQTQPREEQFNSTFRSVSELPIMHQDWLNGKEFKCRVNSAAFPAPIEKTISKTKGRPKAPQVYTIPPPKEQMAKDKVSLTCMITDFFPEDITVEWQWNGQPAENYKNTQPIMNTNGSYFVYSKLNVQKSNWEAGNTFTCSVLHEGLHNHHTEKSLSHSPGK

SEQ ID NO: 6690 - protein, 121 aa, Artificial Sequence
  source: /note="Description of Artificial Sequence: Synthetic polypeptide"
QLQLVQSGPELKKPGETVKISCKASGYSFTNYGMNWVKQAPGKGLKWMGWINTYTGEPSYADDFKGRFAFSLETSASTAYLQISNLKNEDTATYFCARGAYYRYDLGMDYWGQGTSVTVSS

SEQ ID NO: 6691 - protein, 121 aa, Artificial Sequence
  source: /note="Description of Artificial Sequence: Synthetic polypeptide"
ELQLVQSGGELKKPGETVRISCAASGYTFTNYGMNWVKQAPGKGLKWMGWINTYTGEPSYAAPFKGRFAFSLETSASTAYLQISSLKTEDTATYFCARGAYYRYDLGMDYWGQGTSVTVSS

SEQ ID NO: 6692 - protein, 121 aa, Artificial Sequence
  source: /note="Description of Artificial Sequence: Synthetic polypeptide"
ELQLVQSGGELKKPGETVRISCAASGYSFTNYGMNWVKQAPGKGLKWMGWINTYTGEPSYAAPFKGRFAFSLETSASTAYLQISSLKTEDTATYFCARGAYYRYDLGMDYWGQGTSVTVSS

SEQ ID NO: 6693 - protein, 445 aa, Artificial Sequence
  source: /note="Description of Artificial Sequence: Synthetic polypeptide"
QIQLVQSGPELKKPGETVKISCKASGYKFTNVGMNWVKQVPGKGLKWMGWINTYTGEPAYADDFKGRFVFSLETSASAAFLQINNLKNEDTATYFCARGAYYRYDLGMDYWGQGTSVTVSSAKTTPPSVYPLAPGSAAQTNSMVTLGCLVKGYFPEPVTVTWNSGSLSSGVHTFPAVLESDLYTLSSSVTVPSSMRPSETVTCNVAHPASSTKVDKKIVPRDCGCKPCICTVPEVSSVFIFPPKPKDVLTITLTPKVTCVVVDISKDDPEVQFSWFVDDVEVHTAQTQPREEQFNSTFRSVSELPIMHQDWLNGKEFKCRVNSAAFPAPIEKTISKTKGRPKAPQVYTIPPPKEQMAKDKVSLTCMITDFFPEDITVEWQWNGQPAENYKNTQPIMNTNGSYFVYSKLNVQKSNWEAGNTFTCSVLHEGLHNHHTEKSLSHSPGK

SEQ ID NO: 6694 - protein, 121 aa, Artificial Sequence
  source: /note="Description of Artificial Sequence: Synthetic polypeptide"
QIQLVQSGPELKKPGETVKISCKASGYKFTNVGMNWVKQVPGKGLKWMGWINTYTGEPAYADDFKGRFVFSLETSASAAFLQINNLKNEDTATYFCARGAYYRYDLGMDYWGQGTSVTVSS

SEQ ID NO: 6695 - protein, 451 aa, Artificial Sequence
  source: /note="Description of Artificial Sequence: Synthetic polypeptide"
ELQLVQSGGELKKPGETVRISCAASGYSFTNYGMNWVKQAPGKGLKWMGWINTYTGEPSYAAPFKGRFAFSLETSASTAYLQISSLKTEDTATYFCARGAYYRYDLGMDYWGQGTSVTVSSASTKGPSVFPLAPSSKSTSGGTAALGCLVKDYFPEPVTVSWNSGALTSGVHTFPAVLQSSGLYSLSSVVTVPSSSLGTQTYICNVNHKPSNTKVDKKVEPKSCDKTHTCPPCPAPELLGGPSVFLFPPKPKDTLMISRTPEVTCVVVDVSHEDPEVKFNWYVDGVEVHNAKTKPREEQYNSTYRVVSVLTVLHQDWLNGKEYKCKVSNKALPAPIEKTISKAKGQPREPQVYTLPPSRDELTKNQVSLTCLVKGFYPSDIAVEWESNGQPENNYKTTPPVLDSDGSFFLYSKLTVDKSRWQQGNVFSCSVMHEALHNHYTQKSLSLSPGK

SEQ ID NO: 6696 - protein, 449 aa, Artificial Sequence
  source: /note="Description of Artificial Sequence: Synthetic polypeptide"
EVQVEESGGGLVQPGGSMRLSCVASGFSFNNYWMNWVRQSPGKGLEWVAEIRLKSNNYATHYVDSVKGRFTISRDDSKSSVYLQMNNLRAEDTGIYYCTGWDDYAMDHWGQGISVTVSSASTKGPSVFPLAPSSKSTSGGTAALGCLVKDYFPEPVTVSWNSGALTSGVHTFPAVLQSSGLYSLSSVVTVPSSSLGTQTYICNVNHKPSNTKVDKKVEPKSCDKTHTCPPCPAPELLGGPSVFLFPPKPKDTLMISRTPEVTCVVVDVSHEDPEVKFNWYVDGVEVHNAKTKPREEQYNSTYRVVSVLTVLHQDWLNGKEYKCKVSNKALPAPIEKTISKAKGQPREPQVYTLPPSRDELTKNQVSLTCLVKGFYPSDIAVEWESNGQPENNYKTTPPVLDSDGSFFLYSKLTVDKSRWQQGNVFSCSVMHEALHNHYTQKSLSLSPGK

SEQ ID NO: 6697 - protein, 119 aa, Artificial Sequence
  source: /note="Description of Artificial Sequence: Synthetic polypeptide"
EVQVEESGGGLVQPGGSMRLSCVASGFSFNNYWMNWVRQSPGKGLEWVAEIRLKSNNYATHYVDSVKGRFTISRDDSKSSVYLQMNNLRAEDTGIYYCTGWDDYAMDHWGQGISVTVSS

SEQ ID NO: 6698 - protein, 449 aa, Artificial Sequence
  source: /note="Description of Artificial Sequence: Synthetic polypeptide"
EVKVEESGGGLVKTGGSMKLSCVASGFSFNNYWMNWVRQSPEKGLEWVAEIRLKSNNYATHYVESVKGRFTISRDDSKSSVYLQMNNLRAEDTGIYYCTGWDDYAMDHWGQGISVTVSSAKTTAPSVYPLAPVCGDTTGSSVTLGCLVKGYFPEPVTLTWNSGSLSSGVHTFPAVLQSDLYTLSSSVTVTSSTWPSQSITCNVAHPASSTKVDKKIEPRGPTIKPCPPCKCPAPNLLGGPSVFIFPPKIKDVLMISLSPIVTCVVVDVSEDDPDVQISWFVNNVEVHTAQTQTHREDYNSTLRVVSALPIQHQDWMSGKEFKCKVNNKDLPAPIERTISKPKGSVRAPQVYVLPPPEEEMTKKQVTLTCMVTDFMPEDIYVEWTNNGKTELNYKNTEPVLDSDGSYFMYSKLRVEKKNWVERNSYSCSVVHEGLHNHHTTKSFSRTPGK

SEQ ID NO: 6699 - protein, 446 aa, Artificial Sequence
  source: /note="Description of Artificial Sequence: Synthetic polypeptide"
QVQLQQSGAELARPGASVKLSCKASGYTFTSYWMHWVKQRPGQGLEWIGAIYPGDGDTRYTQKFKGKATLTADKSSYTAYMQLSSLASEDSAVYYCARSPDFYGSGYDFDYWGQGTTLTVSSAKTTPPSVYPLAPGSAAQTNSMVTLGCLVKGYFPEPVTVTWNSGSLSSGVHTFPAVLESDLYTLSSSVTVPSSMRPSETVTCNVAHPASSTKVDKKIVPRDCGCKPCICTVPEVSSVFIFPPKPKDVLTITLTPKVTCVVVDISKDDPEVQFSWFVDDVEVHTAQTQPREEQFNSTFRSVSELPIMHQDWLNGKEFKCRVNSAAFPAPIEKTISKTKGRPKAPQVYTIPPPKEQMAKDKVSLTCMITDFFPEDITVEWQWNGQPAENYKNTQPIMNTNGSYFVYSKLNVQKSNWEAGNTFTCSVLHEGLHNHHTEKSLSHSPGK

SEQ ID NO: 6700 - protein, 119 aa, Artificial Sequence
  source: /note="Description of Artificial Sequence: Synthetic polypeptide"
EVKVEESGGGLVKTGGSMKLSCVASGFSFNNYWMNWVRQSPEKGLEWVAEIRLKSNNYATHYVESVKGRFTISRDDSKSSVYLQMNNLRAEDTGIYYCTGWDDYAMDHWGQGISVTVSS

SEQ ID NO: 6701 - protein, 122 aa, Artificial Sequence
  source: /note="Description of Artificial Sequence: Synthetic polypeptide"
QVQLQQSGAELARPGASVKLSCKASGYTFTSYWMHWVKQRPGQGLEWIGAIYPGDGDTRYTQKFKGKATLTADKSSYTAYMQLSSLASEDSAVYYCARSPDFYGSGYDFDYWGQGTTLTVSS

SEQ ID NO: 6702 - protein, 448 aa, Artificial Sequence
  source: /note="Description of Artificial Sequence: Synthetic polypeptide"
QAYLQQSGAELVRPGASVKMSCKASGYTFTSYNMHWVKQTPRQGLEWIGGIYPGNGDTSYNQKFKGKATLTVGKSSSTAYMQLSSLTSEDSAVYFCARYDYNYAMDYWGQGTSVTVSSASTKGPSVFPLAPSSKSTSGGTAALGCLVKDYFPEPVTVSWNSGALTSGVHTFPAVLQSSGLYSLSSVVTVPSSSLGTQTYICNVNHKPSNTKVDKKVEPKSCDKTHTCPPCPAPELLGGPSVFLFPPKPKDTLMISRTPEVTCVVVDVSHEDPEVKFNWYVDGVEVHNAKTKPREEQYNSTYRVVSVLTVLHQDWLNGKEYKCKVSNKALPAPIEKTISKAKGQPREPQVYTLPPSRDELTKNQVSLTCLVKGFYPSDIAVEWESNGQPENNYKTTPPVLDSDGSFFLYSKLTVDKSRWQQGNVFSCSVMHEALHNHYTQKSLSLSPGK

SEQ ID NO: 6703 - protein, 469 aa, Artificial Sequence
  source: /note="Description of Artificial Sequence: Synthetic polypeptide"
MEFGLSWVFLVAILRGVQCQVQLVESGGGVVQPGRSLRLSCAASGFTFSSYGMHWVRQAPGKGLEWVAVISYEESNRYHADSVKGRFTISRDNSKITLYLQMNSLRTEDTAVYYCARDGGIAAPGPDYWGQGTLVTVSSASTKGPSVFPLAPASKSTSGGTAALGCLVKDYFPEPVTVSWNSGALTSGVHTFPAVLQSSGLYSLSSVVTVPSSSLGTQTYICNVNHKPSNTKVDKRVEPKSCDKTHTCPPCPAPELLGGPSVFLFPPKPKDTLMISRTPEVTCVVVDVSHEDPEVKFNWYVDGVEVHNAKTKPREEQYNSTYRVVSVLTVLHQDWLNGKEYKCKVSNKALPAPIEKTISKAKGQPREPQVYTLPPSREEMTKNQVSLTCLVKGFYPSDIAVEWESNGQPENNYKTTPPVLDSDGSFFLYSKLTVDKSRWQQGNVFSCSVMHEALHNHYTQKSLSLSPGK

SEQ ID NO: 6704 - protein, 469 aa, Artificial Sequence; identical to SEQ ID NO: 6671
  source: /note="Description of Artificial Sequence: Synthetic polypeptide"

SEQ ID NO: 6705 - protein, 474 aa, Artificial Sequence
  source: /note="Description of Artificial Sequence: Synthetic polypeptide"
MGSTAILALLLAVLQGVCAEVQLVQSGAEVKKPGESLKISCKGSGYSFTSYWIGWVRQMPGKGLEWMGIIYPGDSDTRYSPSFQGQVTISADKSISTAYLQWSSLKASDTAMYYCARGTAAGRDYYYYYGMDVWGQGTTVTVSSASTKGPSVFPLAPASKSTSGGTAALGCLVKDYFPEPVTVSWNSGALTSGVHTFPAVLQSSGLYSLSSVVTVPSSSLGTQTYICNVNHKPSNTKVDKRVEPKSCDKTHTCPPCPAPELLGGPSVFLFPPKPKDTLMISRTPEVTCVVVDVSHEDPEVKFNWYVDGVEVHNAKTKPREEQYNSTYRVVSVLTVLHQDWLNGKEYKCKVSNKALPAPIEKTISKAKGQPREPQVYTLPPSREEMTKNQVSLTCLVKGFYPSDIAVEWESNGQPENNYKTTPPVLDSDGSFFLYSKLTVDKSRWQQGNVFSCSVMHEALHNHYTQKSLSLSPGK

SEQ ID NO: 6706 - protein, 474 aa, Artificial Sequence
  source: /note="Description of Artificial Sequence: Synthetic polypeptide"
MGSTAILALLLAVLQGVCAEVQLVQSGAEVKKPGESLKISCKGSGYSFTSYWIGWVRQMPGKGLEWMGIIYPGDSDTRYSPSFQGQVTISADKSISTAYLQWSSLKASDTAMYYCARGTAAGRDYYYYYGMDVWGQGTTVTVSSASTKGPSVFPLAPSSKSTSGGTAALGCLVKDYFPEPVTVSWNSGALTSGVHTFPAVLQSSGLYSLSSVVTVPSSSLGTQTYICNVNHKPSNTKVDKRVEPKSCDKTHTCPPCPAPELLGGPSVFLFPPKPKDTLMISRTPEVTCVVVDVSHEDPEVKFNWYVDGVEVHNAKTKPREEQYNSTYRVVSVLTVLHQDWLNGKEYKCKVSNKALPAPIEKTISKAKGQPREPQVYTLPPSREEMTKNQVSLTCLVKGFYPSDIAVEWESNGQPENNYKTTPPVLDSDGSFFLYSKLTVDKSRWQQGNVFSCSVMHEALHNHYTQKSLSLSPGK

SEQ ID NO: 6707 - protein, 442 aa, Artificial Sequence
  source: /note="Description of Artificial Sequence: Synthetic polypeptide"
QVQLQQSGSELKKPGASVKISCKASGYSFTDYIILWVRQNPGKGLEWIGHIDPYYGSSNYNLKFKGRVTITADQSTTTAYMELSSLRSEDTAVYYCGRSKRDYFDYWGQGTTLTVSSASTKGPSVFPLAPCSRSTSESTAALGCLVKDYFPEPVTVSWNSGALTSGVHTFPAVLQSSGLYSLSSVVTVPSSNFGTQTYTCNVDHKPSNTKVDKTVERKCCVECPPCPAPPVAGPSVFLFPPKPKDTLMISRTPEVTCVVVDVSQEDPEVQFNWYVDGVEVHNAKTKPREEQFNSTYRVVSVLTVLHQDWLNGKEYKCKVSNKGLPSSIEKTISKAKGQPREPQVYTLPPSQEEMTKNQVSLTCLVKGFYPSDIAVEWESNGQPENNYKTTPPVLDSDGSFFLYSRLTVDKSRWQEGNVFSCSVMHEALHNHYTQKSLSLSLG

SEQ ID NO: 6708 - protein, 467 aa, Artificial Sequence
  source: /note="Description of Artificial Sequence: Synthetic polypeptide"
MDFGFSLVFLALILKGVQCEVQLVQSGAEVKKPGASVKVSCKASGYRFTNYWIHWVRQAPGQGLEWIGGINPGNNYATYRRKFQGRVTMTADTSTSTVYMELSSLRSEDTAVYYCTREGYGNYGAWFAYWGQGTLVTVSSASTKGPSVFPLAPCSRSTSESTAALGCLVKDYFPEPVTVSWNSGALTSGVHTFPAVLQSSGLYSLSSVVTVPSSSLGTKTYTCNVDHKPSNTKVDKRVESKYGPPCPPCPAPEFLGGPSVFLFPPKPKDTLMISRTPEVTCVVVDVSQEDPEVQFNWYVDGVEVHNAKTKPREEQFNSTYRVVSVLTVLHQDWLNGKEYKCKVSNKGLPSSIEKTISKAKGQPREPQVYTLPPSQEEMTKNQVSLTCLVKGFYPSDIAVEWESNGQPENNYKTTPPVLDSDGSFFLYSRLTVDKSRWQEGNVFSCSVMHEALHNHYTQKSLSLSLGK

SEQ ID NO: 6709 - protein, 450 aa, Artificial Sequence
  source: /note="Description of Artificial Sequence: Synthetic polypeptide"
EVQLVESGGGLVQPGGSLRLSCAASGYEFSRSWMNWVRQAPGKGLEWVGRIYPGDGDTNYSGKFKGRFTISADTSKNTAYLQMNSLRAEDTAVYYCARDGSSWDWYFDVWGQGTLVTVSSASTKGPSVFPLAPSSKSTSGGTAALGCLVKDYFPEPVTVSWNSGALTSGVHTFPAVLQSSGLYSLSSVVTVPSSSLGTQTYICNVNHKPSNTKVDKKVEPKSCDKTHTCPPCPAPELLGGPSVFLFPPKPKDTLMISRTPEVTCVVVDVSHEDPEVKFNWYVDGVEVHNAKTKPREEQYNSTYRVVSVLTVLHQDWLNGKEYKCKVSNKALPAPIEKTISKAKGQPREPQVYTLPPSREEMTKNQVSLTCLVKGFYPSDIAVEWESNGQPENNYKTTPPVLDSDGSFFLYSKLTVDKSRWQQGNVFSCSVMHEALHNHYTQKSLSLSPGK

SEQ ID NO: 6710 - protein, 80 aa, Artificial Sequence
  source: /note="Description of Artificial Sequence: Synthetic polypeptide"
QVQLVQSGAEVKKPGASVKVSCKASGYTFTWVRQAPGQGLEWMGKFQGRVTMTRDTSTSTVYMELSSLRSEDTAVYYCAR

SEQ ID NO: 6711 - protein, 121 aa, Artificial Sequence
  source: /note="Description of Artificial Sequence: Synthetic polypeptide"
EVQLVQSGAEVKKPGASVKVSCKASGYRFTNYWIHWVRQAPGQGLEWIGGINPGNNYATYRRNLKGRATLTADTSTSTVYMELSSLRSEDTAVYYCTREGYGNYGAWFAYWGQGTLVTVSS

SEQ ID NO: 6712 - protein, 121 aa, Artificial Sequence
  source: /note="Description of Artificial Sequence: Synthetic polypeptide"
EVQLVQSGAEVKKPGASVKVSCKASGYRFTNYWIHWVRQAPGQGLEWIGGINPGNNYATYRRNLKGRVTMTADTSTSTVYMELSSLRSEDTAVYYCTREGYGNYGAWFAYWGQGTLVTVSS

SEQ ID NO: 6713 - protein, 121 aa, Artificial Sequence
  source: /note="Description of Artificial Sequence: Synthetic polypeptide"
EVQLVQSGAEVKKPGASVKVSCKASGYRFTNYWIHWVRQAPGQGLEWIGGINPGNNYATYRRKFQGRATLTADTSTSTVYMELSSLRSEDTAVYYCTREGYGNYGAWFAYWGQGTLVTVSS

SEQ ID NO: 6714 - protein, 121 aa, Artificial Sequence
  source: /note="Description of Artificial Sequence: Synthetic polypeptide"
EVQLVQSGAEVKKPGASVKVSCKASGYRFTNYWIHWVRQAPGQGLEWIGGINPGNNYATYRRKFQGRVTMTADTSTSTVYMELSSLRSEDTAVYYCTREGYGNYGAWFAYWGQGTLVTVSS

SEQ ID NO: 6715 - protein, 467 aa, Artificial Sequence; identical to SEQ ID NO: 6708
  source: /note="Description of Artificial Sequence: Synthetic polypeptide"

SEQ ID NO: 6716 - protein, 476 aa, Artificial Sequence
  source: /note="Description of Artificial Sequence: Synthetic polypeptide"
MEVQLVESGGGLVKPGGSLKLSCAASGFAFSIYDMSWVRQTPEKCLEWVAYISSGGGTTYYPDTVKGRFTISRDNAKNTLYLQMSSLKSEDTAMYYCARHSGYGTHWGVLFAYWGQGTLVTVSAKASGGPEGGSLAALTAHQACHLPLETFTRHRQPRGWEQLEQCGYPVQRLVALYLAARLSWNQVDQVIRNALASPGSGGDLGEAIREQPEQARLALTLAAAESERFVRQGTGNDEAGAANGPADSGDALLERNYPTGAEFLGDGGDVSFSTRGTQNWTVERLLQAHRQLEERGYVFVGYHGTFLEAAQSIVFGGVRARSQDLDAIWRGFYIAGDPALAYGYAQDQEPDARGRIRNGALLRVYVPRSSLPGFYRTSLTLAAPEAAGEVERLIGHPLPLRLDAITGPEEEGGRLETILGWPLAERTVVIPSAIPTDPRNVGGDLDPSSIPDKEQAISALPDYASQPGKPPREDLK

SEQ ID NO: 6717 - protein, 448 aa, Artificial Sequence
  source: /note="Description of Artificial Sequence: Synthetic polypeptide"
QVELVESGGGVVQPGRSQRLSCAASGFTFSSYGMHWVRQAPGKGLEWVAIIWFDGSSTYYADSVRGRFTISRDNSKNTLYLQMNSLRAEDTAVYFCARELGRRYFDLWGRGTLVSVSSASTKGPSVFPLAPSSKSTSGGTAALGCLVKDYFPEPVTVSWNSGALTSGVHTFPAVLQSSGLYSLSSVVTVPSSSLGTQTYICNVNHKPSNTKVDKKVEPKSCDKTHTCPPCPAPELLGGPSVFLFPPKPKDTLMISRTPEVTCVVVDVSHEDPEVKFNWYVDGVEVHNAKTKPREEQYNSTYRVVSVLTVLHQDWLNGKEYKCKVSNKALPAPIEKTISKAKGQPREPQVYTLPPSRDELTKNQVSLTCLVKGFYPSDIAVEWESNGQPENNYKTTPPVLDSDGSFFLYSKLTVDKSRWQQGNVFSCSVMHEALHNHYTQKSLSLSPGK

SEQ ID NO: 6718 - protein, 454 aa, Artificial Sequence
  source: /note="Description of Artificial Sequence: Synthetic polypeptide"
QVQLQESGPGLVRPSQTLSLTCTASGYTFTDYVIHWVKQPPGRGLEWIGYINPYDDDTTYNQKFKGRVTMLVDTSSNTAYLRLSSVTAEDTAVYYCARRGNSYDGYFDYSMDYWGSGTPVTVSSASTKGPSVFPLAPSSKSTSGGTAALGCLVKDYFPEPVTVSWNSGALTSGVHTFPAVLQSSGLYSLSSVVTVPSSSLGTQTYICNVNHKPSNTKVDKKVEPKSCDKTHTCPPCPAPELLGGPSVFLFPPKPKDTLMISRTPEVTCVVVDVSHEDPEVKFNWYVDGVEVHNAKTKPREEQYNSTYRVVSVLTVLHQDWLNGKEYKCKVSNKALPAPIEKTISKAKGQPREPQVYTLPPSRDELTKNQVSLTCLVKGFYPSDIAVEWESNGQPENNYKTTPPVLDSDGFFFLYSKLTVDKSRWQQGNVFSCSVMHEALHNHYTQKSLSLSPGK

SEQ ID NO: 6719 - protein, 452 aa, Artificial Sequence
  source: /note="Description of Artificial Sequence: Synthetic polypeptide"
QVQLVESGGGVVQPGRSLRLSCAASGFTFSSYDMHWVRQAPGKGLEWVAVIWYDGSNKYYADSVKGRFTISRDNSKNTLYLQMNSLRAEDTAVYYCARGSGNWGFFDYWGQGTLVTVSSASTKGPSVFPLAPSSKSTSGGTAALGCLVKDYFPEPVTVSWNSGALTSGVHTFPAVLQSSGLYSLSSVVTVPSSSLGTQTYICNVNHKPSNTKVDKKVEPKSCDKTHTCPPCPAPELLGGPSVFLFPPKPKDTLMISRTPEVTCVVVDVSHEDPEVKFNWYVDGVEVHNAKTKPREEQYNSTYRVVSVLTVLHQDWLNGKEYKCKVSNKALPAPIEKTISKAKGQPREPQVYTLPPSRDELTKNQVSLTCLVKGFYPSDIAVEWESNGQPENNYKTTPPVLDSDGSFFLYSKLTVDKSRWQQGNVFSCSVMHEALHNHYTQKSLSLSPGKGSS

SEQ ID NO: 6720 - protein, 450 aa, Artificial Sequence
  source: /note="Description of Artificial Sequence: Synthetic polypeptide"
EVQLLESGGGLVQPGGSLRLSCAASGFTFSSYIMMWVRQAPGKGLEWVSSIYPSGGITFYADTVKGRFTISRDNSKNTLYLQMNSLRAEDTAVYYCARIKLGTVTTVDYWGQGTLVTVSSASTKGPSVFPLAPSSKSTSGGTAALGCLVKDYFPEPVTVSWNSGALTSGVHTFPAVLQSSGLYSLSSVVTVPSSSLGTQTYICNVNHKPSNTKVDKKVEPKSCDKTHTCPPCPAPELLGGPSVFLFPPKPKDTLMISRTPEVTCVVVDVSHEDPEVKFNWYVDGVEVHNAKTKPREEQYNSTYRVVSVLTVLHQDWLNGKEYKCKVSNKALPAPIEKTISKAKGQPREPQVYTLPPSRDELTKNQVSLTCLVKGFYPSDIAVEWESNGQPENNYKTTPPVLDSDGSFFLYSKLTVDKSRWQQGNVFSCSVMHEALHNHYTQKSLSLSPGK

SEQ ID NO: 6721 - protein, 446 aa, Artificial Sequence
  source: /note="Description of Artificial Sequence: Synthetic polypeptide"
QVQLVQSGAEVKKPGASVKVSCKASGYTFTSYYIHWVRQAPGQGLEWIGCIYPGNVNTNYNEKFKDRATLTVDTSISTAYMELSRLRSDDTAVYFCTRSHYGLDWNFDVWGQGTTVTVSSASTKGPSVFPLAPCSRSTSESTAALGCLVKDYFPEPVTVSWNSGALTSGVHTFPAVLQSSGLYSLSSVVTVPSSSLGTKTYTCNVDHKPSNTKVDKRVESKYGPPCPSCPAPEFLGGPSVFLFPPKPKDTLMISRTPEVTCVVVDVSQEDPEVQFNWYVDGVEVHNAKTKPREEQFNSTYRVVSVLTVLHQDWLNGKEYKCKVSNKGLPSSIEKTISKAKGQPREPQVYTLPPSQEEMTKNQVSLTCLVKGFYPSDIAVEWESNGQPENNYKTTPPVLDSDGSFFLYSRLTVDKSRWQEGNVFSCSVMHEALHNHYTQKSLSLSLG

SEQ ID NO: 6722 - protein, 446 aa, Artificial Sequence
  source: /note="Description of Artificial Sequence: Synthetic polypeptide"
AVQLVQSGAEVKKPGSSVKVSCKASGYSFTGYNMNWVRQAPGQGLEWMGNIDPYYGGTTYNRKFKGRVTLTVDKSSSTAYMELSSLRSEDTAVYYCARSVGPMDYWGQGTLVTVSSASTKGPSVFPLAPSSKSTSGGTAALGCLVKDYFPEPVTVSWNSGALTSGVHTFPAVLQSSGLYSLSSVVTVPSSSLGTQTYICNVNHKPSNTKVDKRVEPKSCDKTHTCPPCPAPELLGGPDVFLFPPKPKDTLMISRTPEVTCVVVDVSHEDPEVKFNWYVDGVEVHNAKTKPREEQYNSTYRVVSVLTVLHQDWLNGKEYKCKVSNKALPAPEEKTISKAKGQPREPQVYTLPPSREEMTKNQVSLTCLVKGFYPSDIAVEWESNGQPENNYKTTPPVLDSDGSFFLYSKLTVDKSRWQQGNVFSCSVMHEALHNHYTQKSLSLSPGK

SEQ ID NO: 6723 - protein, 446 aa, Artificial Sequence
  source: /note="Description of Artificial Sequence: Synthetic polypeptide"
AVQLVQSGAEVKKPGSSVKVSCKASGYSFTGYNMNWVRQAPGQGLEWMGNIDPYYGGTTYNRKFKGRVTLTVDKSSSTAYMELSSLRSEDTAVYYCARSVGPMDYWGQGTLVTVSSASTKGPSVFPLAPSSKSTSGGTAALGCLVKDYFPEPVTVSWNSGALTSGVHTFPAVLQSSGLYSLSSVVTVPSSSLGTQTYICNVNHKPSNTKVDKRVEPKSCDKTHTCPPCPAPELLAGPDVFLFPPKPKDTLMISRTPEVTCVVVDVSHEDPEVKFNWYVDGVEVHNAKTKPREEQYNSTYRVVSVLTVLHQDWLNGKEYKCKVSNKALPAPEEKTISKAKGQPREPQVYTLPPSREEMTKNQVSLTCLVKGFYPSDIAVEWESNGQPENNYKTTPPVLDSDGSFFLYSKLTVDKSRWQQGNVFSCSVMHEALHNHYTQKSLSLSPGK

SEQ ID NO: 6724 - protein, 446 aa, Artificial Sequence
  source: /note="Description of Artificial Sequence: Synthetic polypeptide"
AVQLQQSGPELEKPGASVKISCKASGYSFTGYNMNWVKQNNGKSLEWIGNIDPYYGGTTYNRKFKGKATLTVDKSSSTAYMQLKSLTSEDSAVYYCARSVGPMDYWGQGTSVTVSSASTKGPSVFPLAPSSKSTSGGTAALGCLVKDYFPEPVTVSWNSGALTSGVHTFPAVLQSSGLYSLSSVVTVPSSSLGTQTYICNVNHKPSNTKVDKRVEPKSCDKTHTCPPCPAPELLGGPDVFLFPPKPKDTLMISRTPEVTCVVVDVSHEDPEVKFNWYVDGVEVHNAKTKPREEQYNSTYRVVSVLTVLHQDWLNGKEYKCKVSNKALPAPEEKTISKAKGQPREPQVYTLPPSREEMTKNQVSLTCLVKGFYPSDIAVEWESNGQPENNYKTTPPVLDSDGSFFLYSKLTVDKSRWQQGNVFSCSVMHEALHNHYTQKSLSLSPGK

SEQ ID NO: 6725 - protein, 446 aa, Artificial Sequence
  source: /note="Description of Artificial Sequence: Synthetic polypeptide"
AVQLQQSGPELEKPGASVKISCKASGYSFTGYNMNWVKQNNGKSLEWIGNIDPYYGGTTYNRKFKGKATLTVDKSSSTAYMQLKSLTSEDSAVYYCARSVGPMDYWGQGTSVTVSSASTKGPSVFPLAPSSKSTSGGTAALGCLVKDYFPEPVTVSWNSGALTSGVHTFPAVLQSSGLYSLSSVVTVPSSSLGTQTYICNVNHKPSNTKVDKRVEPKSCDKTHTCPPCPAPELLAGPDVFLFPPKPKDTLMISRTPEVTCVVVDVSHEDPEVKFNWYVDGVEVHNAKTKPREEQYNSTYRVVSVLTVLHQDWLNGKEYKCKVSNKALPAPEEKTISKAKGQPREPQVYTLPPSREEMTKNQVSLTCLVKGFYPSDIAVEWESNGQPENNYKTTPPVLDSDGSFFLYSKLTVDKSRWQQGNVFSCSVMHEALHNHYTQKSLSLSPGK

SEQ ID NO: 6726 - protein, 483 aa, Artificial Sequence
  source: /note="Description of Artificial Sequence: Synthetic polypeptide"
EVQLVQSGAEVKKPGESLKISCKGSGYSFTGYNMNWVRQMPGKGLEWMGNIDPYYGGTTYNRKFKGQVTISADKSISTAYLQWSSLKASDTAMYYCARSVGPFDSWGQGTLVTVSSGGGGSGGGGSGGGGSGGGGSGGGGSEIVLTQSPATLSLSPGERATLSCRASENVYSYLAWYQQKPGQAPRLLIYFAKTLAEGIPARFSGSGSGTDFTLTISSLEPEDFAVYYCQHHSDNPWTFGQGTKVEIKGDQEPKSSDKTHTSPPCPAPELLGGPSVFLFPPKPKDTLMISRTPEVTCVVVDVSHEDPEVKFNWYVDGVEVHNAKTKPREEQYNSTYRVVSVLTVLHQDWLNGKEYKCKVSNKALPAPIEKTISKAKGQPREPQVYTLPPSRDELTKNQVSLTCLVKGFYPSDIAVEWESNGQPENNYKTTPPVLDSDGSFFLYSKLTVDKSRWQQGNVFSCSVMHEALHNHYTQKSLSLSPGK

SEQ ID NO: 6727 - protein, 443 aa, Artificial Sequence
  source: /note="Description of Artificial Sequence: Synthetic polypeptide"
EIQLQQSGPELVKPGASVKVSCKASGYSFTDYNMYWVKQSHGKSLEWIGYIDPYNGDTTYNQKFKGKATLTVDKSSSTAFIHLNSLTSEDSAVYYCARSPYGHYAMDYWGQGTSVTVSSAKTTPPSVYPLAPGSAAQTNSMVTLGCLVKGYFPEPVTVTWNSGSLSSGVHTFPAVLQSDLYTLSSSVTVPSSTWPSETVTCNVAHPASSTKVDKKIVPRDCGCKPCICTVPEVSSVFIFPPKPKDVLTITLTPKVTCVVVDISKDDPEVQFSWFVDDVEVHTAQTQPREEQFNSTFRSVSELPIMHQDWLNGKEFKCRVNSAAFPAPIEKTISKTKGRPKAPQVYTIPPPKEQMAKDKVSLTCMITDFFPEDITVEWQWNGQPAENYKNTQPIMDTDGSYFVYSKLNVQKSNWEAGNTFTCSVLHEGLHNHHTEKSLSHSPGK

SEQ ID NO: 6728 - protein, 444 aa, Artificial Sequence
  source: /note="Description of Artificial Sequence: Synthetic polypeptide"
QVQVQESGPGLVAPSQTLSITCTVSGFSLTTSGVSWVRQPPGKGLEWLGVIWGDGSTNYHPSLKSRLSIKKDHSKSQVFLKLNSLTAADTATYYCAKGGYSLAHWGQGTLVTVSSASTKGPSVFPLAPSSKSTSGGTAALGCLVKDYFPEPVTVSWNSGALTSGVHTFPAVLQSSGLYSLSSVVTVPSSSLGTQTYICNVNHKPSNTKVDKKVEPKSCDKTHTCPPCPAPELLGGPSVFLFPPKPKDTLMISRTPEVTCVVVDVSHEDPEVKFNWYVDGVEVHNAKTKPREEQYNSTYRVVSVLTVLHQDWLNGKEYKCKVSNKALPAPIEKTISKAKGQPREPQVYTLPPSRDELTKNQVSLTCLVKGFYPSDIAVEWESNGQPENNYKTTPPVLDSDGSFFLYSKLTVDKSRWQQGNVFSCSVMHEALHNHYTQKSLSLSPG

SEQ ID NO: 6729 - protein, 444 aa, Artificial Sequence
  source: /note="Description of Artificial Sequence: Synthetic polypeptide"
QVQVQESGPGLVAPSQTLSITCTVSGFSLTTSGVSWVRQPPGKGLEWLGVIWGDGSTNYHSSLKSRLSIKKDHSKSQVFLKLNSLTAADTATYYCAKGGYSLAHWGQGTLVTVSSASTKGPSVFPLAPSSKSTSGGTAALGCLVKDYFPEPVTVSWNSGALTSGVHTFPAVLQSSGLYSLSSVVTVPSSSLGTQTYICNVNHKPSNTKVDKKVEPKSCDKTHTCPPCPAPELLGGPSVFLFPPKPKDTLMISRTPEVTCVVVDVSHEDPEVKFNWYVDGVEVHNAKTKPREEQYNSTYRVVSVLTVLHQDWLNGKEYKCKVSNKALPAPIEKTISKAKGQPREPQVYTLPPSRDELTKNQVSLTCLVKGFYPSDIAVEWESNGQPENNYKTTPPVLDSDGSFFLYSKLTVDKSRWQQGNVFSCSVMHEALHNHYTQKSLSLSPG

SEQ ID NO: 6730 - protein, 452 aa, Artificial Sequence
  source: /note="Description of Artificial Sequence: Synthetic polypeptide"
EVQLLESGGGLVQPGGSLRLSCAVSGFTFNSFAMSWVRQAPGKGLEWVSAISGSGGGTYYADSVKGRFTISRDNSKNTLYLQMNSLRAEDTAVYFCAKDKILWFGEPVFDYWGQGTLVTVSSASTKGPSVFPLAPSSKSTSGGTAALGCLVKDYFPEPVTVSWNSGALTSGVHTFPAVLQSSGLYSLSSVVTVPSSSLGTQTYICNVNHKPSNTKVDKRVEPKSCDKTHTCPPCPAPELLGGPSVFLFPPKPKDTLMISRTPEVTCVVVDVSHEDPEVKFNWYVDGVEVHNAKTKPREEQYNSTYRVVSVLTVLHQDWLNGKEYKCKVSNKALPAPIEKTISKAKGQPREPQVYTLPPSREEMTKNQVSLTCLVKGFYPSDIAVEWESNGQPENNYKTTPPVLDSDGSFFLYSKLTVDKSRWQQGNVFSCSVMHEALHNHYTQKSLSLSPGK

SEQ ID NO: 6731 - protein, 450 aa, Artificial Sequence
  source: /note="Description of Artificial Sequence: Synthetic polypeptide"
QVQLVQSGAEVAKPGTSVKLSCKASGYTFTDYWMQWVKQRPGQGLEWIGTIYPGDGDTGYAQKFQGKATLTADKSSKTVYMHLSSLASEDSAVYYCARGDYYGSNSLDYWGQGTSVTVSSASTKGPSVFPLAPSSKSTSGGTAALGCLVKDYFPEPVTVSWNSGALTSGVHTFPAVLQSSGLYSLSSVVTVPSSSLGTQTYICNVNHKPSNTKVDKKVEPKSCDKTHTCPPCPAPELLGGPSVFLFPPKPKDTLMISRTPEVTCVVVDVSHEDPEVKFNWYVDGVEVHNAKTKPREEQYNSTYRVVSVLTVLHQDWLNGKEYKCKVSNKALPAPIEKTISKAKGQPREPQVYTLPPSRDELTKNQVSLTCLVKGFYPSDIAVEWESNGQPENNYKTTPPVLDSDGSFFLYSKLTVDKSRWQQGNVFSCSVMHEALHNHYTQKSLSLSPGK

SEQ ID NO: 6732 - protein, 452 aa, Artificial Sequence; identical to SEQ ID NO: 6730
  source: /note="Description of Artificial Sequence: Synthetic polypeptide"

SEQ ID NO: 6733 - protein, 450 aa, Artificial Sequence
  source: /note="Description of Artificial Sequence: Synthetic polypeptide"
QVQLVESGGGVVQPGRSLRLSCAASGFTFSSYGMHWVRQAPGKGLEWVAVISYEESNRYHADSVKGRFTISRDNSKITLYLQMNSLRTEDTAVYYCARDGGIAAPGPDYWGQGTLVTVSSASTKGPSVFPLAPASKSTSGGTAALGCLVKDYFPEPVTVSWNSGALTSGVHTFPAVLQSSGLYSLSSVVTVPSSSLGTQTYICNVNHKPSNTKVDKRVEPKSCDKTHTCPPCPAPELLGGPSVFLFPPKPKDTLMISRTPEVTCVVVDVSHEDPEVKFNWYVDGVEVHNAKTKPREEQYNSTYRVVSVLTVLHQDWLNGKEYKCKVSNKALPAPIEKTISKAKGQPREPQVYTLPPSREEMTKNQVSLTCLVKGFYPSDIAVEWESNGQPENNYKTTPPVLDSDGSFFLYSKLTVDKSRWQQGNVFSCSVMHEALHNHYTQKSLSLSPGK

SEQ ID NO: 6734 - protein, 444 aa, Artificial Sequence
  source: /note="Description of Artificial Sequence: Synthetic polypeptide"
EVQLVESGGGLVQPGGSLRLSCAASGYSFTGYYIHWVRQAPGKGLEWVARVIPNAGGTSYNQKFKGRFTLSVDNSKNTAYLQMNSLRAEDTAVYYCAREGIYWWGQGTLVTVSSASTKGPSVFPLAPSSKSTSGGTAALGCLVKDYFPEPVTVSWNSGALTSGVHTFPAVLQSSGLYSLSSVVTVPSSSLGTQTYICNVNHKPSNTKVDKKVEPKSCDKTHTCPPCPAPELLGGPSVFLFPPKPKDTLMISRTPEVTCVVVDVSHEDPEVKFNWYVDGVEVHNAKTKPREEQYNSTYRVVSVLTVLHQDWLNGKEYKCKVSNKALPAPIEKTISKAKGQPREPQVYTLPPSREEMTKNQVSLTCLVKGFYPSDIAVEWESNGQPENNYKTTPPVLDSDGSFFLYSKLTVDKSRWQQGNVFSCSVMHEALHNHYTQKSLSLSPGK

SEQ ID NO: 6735 - protein, 463 aa, Artificial Sequence
  source: /note="Description of Artificial Sequence: Synthetic polypeptide"
MGWSCIILFLVATATGVHSEVQLVESGGGLVQPGGSLRLSCAASGYSFTGYYIHWVRQAPGKGLEWVARVIPNAGGTSYNQKFKGRFTLSVDNSKNTAYLQMNSLRAEDTAVYYCAREGIYWWGQGTLVTVSSASTKGPSVFPLAPSSKSTSGGTAALGCLVKDYFPEPVTVSWNSGALTSGVHTFPAVLQSSGLYSLSSVVTVPSSSLGTQTYICNVNHKPSNTKVDKKVEPKSCDKTHTCPPCPAPELLGGPSVFLFPPKPKDTLMISRTPEVTCVVVDVSHEDPEVKFNWYVDGVEVHNAKTKPREEQYNSTYRVVSVLTVLHQDWLNGKEYKCKVSNKALPAPIEKTISKAKGQPREPQVYTLPPSREEMTKNQVSLTCLVKGFYPSDIAVEWESNGQPENNYKTTPPVLDSDGSFFLYSKLTVDKSRWQQGNVFSCSVMHEALHNHYTQKSLSLSPGK

SEQ ID NO: 6736 - protein, 469 aa, Artificial Sequence; identical to SEQ ID NO: 6703
  source: /note="Description of Artificial Sequence: Synthetic polypeptide"

SEQ ID NO: 6737 - protein, 469 aa, Artificial Sequence; identical to SEQ ID NO: 6671
  source: /note="Description of Artificial Sequence: Synthetic polypeptide"

SEQ ID NO: 6738 - protein, 469 aa, Artificial Sequence; identical to SEQ ID NO: 6703
  source: /note="Description of Artificial Sequence: Synthetic polypeptide"

SEQ ID NO: 6739 - protein, 469 aa, Artificial Sequence; identical to SEQ ID NO: 6671
  source: /note="Description of Artificial Sequence: Synthetic polypeptide"

SEQ ID NO: 6740 - protein, 213 aa, Artificial Sequence
  source: /note="Description of Artificial Sequence: Synthetic polypeptide"
EIVLTQSPATLSLSPGERATLSCSASSSINYIYWYQQKPGQAPRLLIYLTSNLASGVPARFSGSGSGTDFTLTISSLEPEDFAVYYCLQWSSNPLTFGGGTKVEIKRTVAAPSVFIFPPSDEQLKSGTASVVCLLNNFYPREAKVQWKVDNALQSGNSQESVTEQDSKDSTYSLSSTLTLSKADYEKHKVYACEVTHQGLSSPVTKSFNRGEC

SEQ ID NO: 6741 - protein, 447 aa, Artificial Sequence
  source: /note="Description of Artificial Sequence: Synthetic polypeptide"
QVQLQQSGGELAKPGASVKVSCKASGYTFSSFWMHWVRQAPGQGLEWIGYINPRSGYTEYNEIFRDKATMTTDTSTSTAYMELSSLRSEDTAVYYCASFLGRGAMDYWGQGTTVTVSSASTKGPSVFPLAPCSRSTSESTAALGCLVKDYFPEPVTVSWNSGALTSGVHTFPAVLQSSGLYSLSSVVTVPSSNFGTQTYTCNVDHKPSNTKVDKTVEPKSSDKTHTCPPCPAPPVAGPSVFLFPPKPKDTLMISRTPEVTCVVVDVSHEDPEVQFNWYVDGVEVHNAKTKPREEQAQSTFRVVSVLTVVHQDWLNGKEYKCKVSNKGLPAPIEKTISKTKGQPREPQVYTLPPSREEMTKNQVSLTCLVKGFYPSDIAVEWESNGQPENNYKTTPPMLDSDGSFFLYSKLTVDKSRWQQGNVFSCSVMHEALHNHYTQKSLSLSPGK

SEQ ID NO: 6742 - protein, 233 aa, Artificial Sequence
  source: /note="Description of Artificial Sequence: Synthetic polypeptide"
MGWSCIILFLVATATGVHSDIQMTQSPSSLSASVGDRVTITCKASQNIDKYLNWYQQKPGKAPKLLIYNTNNLQTGVPSRFSGSGSGTDFTFTISSLQPEDIATYYCLQHISRPRTFGQGTKVEIKRTVAAPSVFIFPPSDEQLKSGTASVVCLLNNFYPREAKVQWKVDNALQSGNSQESVTEQDSKDSTYSLSSTLTLSKADYEKHKVYACEVTHQGLSSPVTKSFNRGEC

SEQ ID NO: 6743 - protein, 464 aa, Artificial Sequence
  source: /note="Description of Artificial Sequence: Synthetic polypeptide"
MEAPAQLLFLLLLWLPDTTGEVQLVESGGGLVQPGGSLRLSCAASGFTFNTYWMNWVRQAPGKGLEWVGQIRLKSNNYATHYAESVKGRFTISRDDSKNSLYLQMNSLKTEDTAVYYCTPVDFWGQGTTVTVSSASTKGPSVFPLAPSSKSTSGGTAALGCLVKDYFPEPVTVSWNSGALTSGVHTFPAVLQSSGLYSLSSVVTVPSSSLGTQTYICNVNHKPSNTKVDKKVEPKSCDKTHTCPPCPAPELLGGPSVFLFPPKPKDTLMISRTPEVTCVVVDVSHEDPEVKFNWYVDGVEVHNAKTKPREEQYNSTYRVVSVLTVLHQDWLNGKEYKCKVSNKALPAPIEKTISKAKGQPREPQVYTLPPSRDELTKNQVSLTCLVKGFYPSDIAVEWESNGQPENNYKTTPPVLDSDGSFFLYSKLTVDKSRWQQGNVFSCSVMHEALHNHYTQKSLSLSPGK

SEQ ID NO: 6744 - protein, 467 aa, Artificial Sequence
  source: /note="Description of Artificial Sequence: Synthetic polypeptide"
MEAPAQLLFLLLLWLPDTTGEVQLVESGGGLVQPGGSLRLSCAASGFTFTDYYMSWVRQAPGKGLEWVGFIRNKANGYTTEYNASVKGRFTISRDDSKNSLYLQMNSLKTEDTAVYYCTRYIFFDYWGQGTTVTVSSASTKGPSVFPLAPSSKSTSGGTAALGCLVKDYFPEPVTVSWNSGALTSGVHTFPAVLQSSGLYSLSSVVTVPSSSLGTQTYICNVNHKPSNTKVDKKVEPKSCDKTHTCPPCPAPELLGGPSVFLFPPKPKDTLMISRTPEVTCVVVDVSHEDPEVKFNWYVDGVEVHNAKTKPREEQYNSTYRVVSVLTVLHQDWLNGKEYKCKVSNKALPAPIEKTISKAKGQPREPQVYTLPPSRDELTKNQVSLTCLVKGFYPSDIAVEWESNGQPENNYKTTPPVLDSDGSFFLYSKLTVDKSRWQQGNVFSCSVMHEALHNHYTQKSLSLSPGK

SEQ ID NO: 6745 - protein, 464 aa, Artificial Sequence
  source: /note="Description of Artificial Sequence: Synthetic polypeptide"
MEAPAQLLFLLLLWLPDTTGEVQLLESGGGLVQPGGSLRLSCAASGFTFSDAWMDWVRQAPGKGLELVSEIRNKAKNHATYYAESVKGRFTISRDNSKNTLYLQMNSLRAEDTAVYYCTTLDSWGQGTTVTVSSASTKGPSVFPLAPSSKSTSGGTAALGCLVKDYFPEPVTVSWNSGALTSGVHTFPAVLQSSGLYSLSSVVTVPSSSLGTQTYICNVNHKPSNTKVDKKVEPKSCDKTHTCPPCPAPELLGGPSVFLFPPKPKDTLMISRTPEVTCVVVDVSHEDPEVKFNWYVDGVEVHNAKTKPREEQYNSTYRVVSVLTVLHQDWLNGKEYKCKVSNKALPAPIEKTISKAKGQPREPQVYTLPPSRDELTKNQVSLTCLVKGFYPSDIAVEWESNGQPENNYKTTPPVLDSDGSFFLYSKLTVDKSRWQQGNVFSCSVMHEALHNHYTQKSLSLSPGK

SEQ ID NO: 6746 - protein, 464 aa, Artificial Sequence
  source: /note="Description of Artificial Sequence: Synthetic polypeptide"
MEAPAQLLFLLLLWLPDTTGEVQLLESGGGLVQPGGSLRLSCAASGFTFSDAWMDWVRQAPGKGLELVAEIRNKAKNHATYYAESVKGRFTISRDNSKNTLYLQMNSLRAEDTAVYYCTTLDSWGQGTTVTVSSASTKGPSVFPLAPSSKSTSGGTAALGCLVKDYFPEPVTVSWNSGALTSGVHTFPAVLQSSGLYSLSSVVTVPSSSLGTQTYICNVNHKPSNTKVDKKVEPKSCDKTHTCPPCPAPELLGGPSVFLFPPKPKDTLMISRTPEVTCVVVDVSHEDPEVKFNWYVDGVEVHNAKTKPREEQYNSTYRVVSVLTVLHQDWLNGKEYKCKVSNKALPAPIEKTISKAKGQPREPQVYTLPPSRDELTKNQVSLTCLVKGFYPSDIAVEWESNGQPENNYKTTPPVLDSDGSFFLYSKLTVDKSRWQQGNVFSCSVMHEALHNHYTQKSLSLSPGK

SEQ ID NO: 6747 - protein, 464 aa, Artificial Sequence
  source: /note="Description of Artificial Sequence: Synthetic polypeptide"
MEAPAQLLFLLLLWLPDTTGEVQLVESGGGLVQPGGSLRLSCAASGFPFSNYWMNWVRQAPGKGLEWVGQIRLKSNNYATHYAESVKGRFTISRDDSKNSLYLQMNSLKTEDTAVYYCTPIDYWGQGTTVTVSSASTKGPSVFPLAPSSKSTSGGTAALGCLVKDYFPEPVTVSWNSGALTSGVHTFPAVLQSSGLYSLSSVVTVPSSSLGTQTYICNVNHKPSNTKVDKKVEPKSCDKTHTCPPCPAPELLGGPSVFLFPPKPKDTLMISRTPEVTCVVVDVSHEDPEVKFNWYVDGVEVHNAKTKPREEQYNSTYRVVSVLTVLHQDWLNGKEYKCKVSNKALPAPIEKTISKAKGQPREPQVYTLPPSRDELTKNQVSLTCLVKGFYPSDIAVEWESNGQPENNYKTTPPVLDSDGSFFLYSKLTVDKSRWQQGNVFSCSVMHEALHNHYTQKSLSLSPGK

SEQ ID NO: 6748 - protein, 467 aa, Artificial Sequence
  source: /note="Description of Artificial Sequence: Synthetic polypeptide"
MEAPAQLLFLLLLWLPDTTGEVQLVESGGGLVQPGGSLRLSCAASGFTFSDYYMSWVRQAPGKGLEWVGFIRNKANGYTTEYSASVKGRFTISRDDSKNSLYLQMNSLKTEDTAVYYCARYIWFDYWGQGTTVTVSSASTKGPSVFPLAPSSKSTSGGTAALGCLVKDYFPEPVTVSWNSGALTSGVHTFPAVLQSSGLYSLSSVVTVPSSSLGTQTYICNVNHKPSNTKVDKKVEPKSCDKTHTCPPCPAPELLGGPSVFLFPPKPKDTLMISRTPEVTCVVVDVSHEDPEVKFNWYVDGVEVHNAKTKPREEQYNSTYRVVSVLTVLHQDWLNGKEYKCKVSNKALPAPIEKTISKAKGQPREPQVYTLPPSRDELTKNQVSLTCLVKGFYPSDIAVEWESNGQPENNYKTTPPVLDSDGSFFLYSKLTVDKSRWQQGNVFSCSVMHEALHNHYTQKSLSLSPGK

SEQ ID NO: 6749 - protein, 448 aa, Artificial Sequence
  source: /note="Description of Artificial Sequence: Synthetic polypeptide"
QVQLVQSGAEVKKPGASVKVSCKASGYTFTNYGMNWVRQAPGQGLKWMGWINTYTGEPTYADAFKGRVTMTRDTSISTAYMELSRLRSDDTAVYYCARDYGDYGMDYWGQGTTVTVSSASTKGPSVFPLAPSSKSTSGGTAALGCLVKDYFPEPVTVSWNSGALTSGVHTFPAVLQSSGLYSLSSVVTVPSSSLGTQTYICNVNHKPSNTKVDKKVEPKSCDKTHTCPPCPAPELLGGPSVFLFPPKPKDTLMISRTPEVTCVVVDVSHEDPEVKFNWYVDGVEVHNAKTKPREEQYNSTYRVVSVLTVLHQDWLNGKEYKCKVSNKALPAPIEKTISKAKGQPREPQVYTLPPSRDELTKNQVSLTCLVKGFYPSDIAVEWESNGQPENNYKTTPPVLDSDGSFFLYSKLTVDKSRWQQGNVFSCSVMHEALHNHYTQKSLSLSPGK

SEQ ID NO: 6750 - protein, 450 aa, Artificial Sequence
  source: /note="Description of Artificial Sequence: Synthetic polypeptide"
QVQLQQSGSELKKPGASVKVSCKASGYTFTNYGVNWIKQAPGQGLQWMGWINPNTGEPTFDDDFKGRFAFSLDTSVSTAYLQISSLKADDTAVYFCSRSRGKNEAWFAYWGQGTLVTVSSASTKGPSVFPLAPSSKSTSGGTAALGCLVKDYFPEPVTVSWNSGALTSGVHTFPAVLQSSGLYSLSSVVTVPSSSLGTQTYICNVNHKPSNTKVDKRVEPKSCDKTHTCPPCPAPELLGGPSVFLFPPKPKDTLMISRTPEVTCVVVDVSHEDPEVKFNWYVDGVEVHNAKTKPREEQYNSTYRVVSVLTVLHQDWLNGKEYKCKVSNKALPAPIEKTISKAKGQPREPQVYTLPPSREEMTKNQVSLTCLVKGFYPSDIAVEWESNGQPENNYKTTPPVLDSDGSFFLYSKLTVDKSRWQQGNVFSCSVMHEALHNHYTQKSLSLSPGK

SEQ ID NO: 6751 - protein, 447 aa, Artificial Sequence
  source: /note="Description of Artificial Sequence: Synthetic polypeptide"
EVQLVESGGGLVQPGGSLRLSCAASGYTFSSYWIEWVRQAPGKGLEWIGEILPGGGDTNYNEIFKGRATFSADTSKNTAYLQMNSLRAEDTAVYYCTRRVPIRLDYWGQGTLVTVSSASTKGPSVFPLAPSSKSTSGGTAALGCLVKDYFPEPVTVSWNSGALTSGVHTFPAVLQSSGLYSLSSVVTVPSSSLGTQTYICNVNHKPSNTKVDKKVEPKSCDKTHTCPPCPAPELLGGPSVFLFPPKPKDTLMISRTPEVTCVVVDVSHEDPEVKFNWYVDGVEVHNAKTKPREEQYNSTYRVVSVLTVLHQDWLNGKEYKCKVSNKALPAPIEKTISKAKGQPREPQVYTLPPSREEMTKNQVSLTCLVKGFYPSDIAVEWESNGQPENNYKTTPPVLDSDGSFFLYSKLTVDKSRWQQGNVFSCSVMHEALHNHYTQKSLSLSPGK

SEQ ID NO: 6752 - protein, 119 aa, Artificial Sequence
  source: /note="Description of Artificial Sequence: Synthetic polypeptide"
QVQLVESGGGVVQPGRSLRLSCAASGFTFSSYVLHWVRQAPGKGLDWVAVISDDGRNKYFADSVKGRFTISRDNSKNTLYLQMNSLRAEDTAVYYCVREGYSGSWFDYWGQGTLVTVSS

SEQ ID NO: 6753 - protein, 119 aa, Artificial Sequence
  source: /note="Description of Artificial Sequence: Synthetic polypeptide"
QVQLVESGGGVVQPGRSLRLSCAASGFTFSSYAMHWVRQAPGKGLEWVAVISYDGRNKDYADSVKGRFTISRDNSKNTLYLQMNSLRAEDTAVHYCARLDWGYDAFDIWGQGTMVTVSS

SEQ ID NO: 6754 - protein, 449 aa, Artificial Sequence
  source: /note="Description of Artificial Sequence: Synthetic polypeptide"
EVQLVESGGGVVQPGRSLRLSCSASGFDFTTYWMSWVRQAPGKGLEWIGEIHPDSSTINYAPSLKDRFTISRDNAKNTLFLQMDSLRPEDTGVYFCASLYFGFPWFAYWGQGTPVTVSSASTKGPSVFPLAPSSKSTSGGTAALGCLVKDYFPEPVTVSWNSGALTSGVHTFPAVLQSSGLYSLSSVVTVPSSSLGTQTYICNVNHKPSNTKVDKRVEPKSCDKTHTCPPCPAPELLGGPSVFLFPPKPKDTLMISRTPEVTCVVVDVSHEDPEVKFNWYVDGVEVHNAKTKPREEQYNSTYRVVSVLTVLHQDWLNGKEYKCKVSNKALPAPIEKTISKAKGQPREPQVYTLPPSREEMTKNQVSLTCLVKGFYPSDIAVEWESNGQPENNYKTTPPVLDSDGSFFLYSKLTVDKSRWQQGNVFSCSVMHEALHNHYTQKSLSLSPGK

SEQ ID NO: 6755 - protein, 446 aa, Artificial Sequence
  source: /note="Description of Artificial Sequence: Synthetic polypeptide"
QVQLVQSGAEVKKPGASVKVSCKASGYTFTSYDISWVRQAPGQGLEWMGVIWTDGGTNYAQKLQGRVTMTTDTSTSTAYMELRSLRSDDTAVYYCARDQRLYFDVWGQGTTVTVSSASTKGPSVFPLAPSSKSTSGGTAALGCLVKDYFPEPVTVSWNSGALTSGVHTFPAVLQSSGLYSLSSVVTVPSSSLGTQTYICNVNHKPSNTKVDKKVEPKSCDKTHTCPPCPAPELLGGPSVFLFPPKPKDTLMISRTPEVTCVVVDVSHEDPEVKFNWYVDGVEVHNAKTKPREEQYNSTYRVVSVLTVLHQDWLNGKEYKCKVSNKALPAPIEKTISKAKGQPREPQVYTLPPSRDELTKNQVSLTCLVKGFYPSDIAVEWESNGQPENNYKTTPPVLDSDGSFFLYSKLTVDKSRWQQGNVFSCSVMHEALHNHYTQKSLSLSPGK

SEQ ID NO: 6756 - protein, 451 aa, Artificial Sequence
  source: /note="Description of Artificial Sequence: Synthetic polypeptide"
QVQLVESGGGVVQPGRSLRLSCAASGFTFSSYGMHWVRQAPGKGLEWVAVIWYDGSNKYYADSVKGRFTISRDNSKNTLYLQMNSLRAEDTAVYYCARDPRGATLYYYYYGMDVWGQGTTVTVSSASTKGPSVFPLAPCSRSTSESTAALGCLVKDYFPEPVTVSWNSGALTSGVHTFPAVLQSSGLYSLSSVVTVPSSNFGTQTYTCNVDHKPSNTKVDKTVERKCCVECPPCPAPPVAGPSVFLFPPKPKDTLMISRTPEVTCVVVDVSHEDPEVQFNWYVDGVEVHNAKTKPREEQFNSTFRVVSVLTVVHQDWLNGKEYKCKVSNKGLPAPIEKTISKTKGQPREPQVYTLPPSREEMTKNQVSLTCLVKGFYPSDIAVEWESNGQPENNYKTTPPMLDSDGSFFLYSKLTVDKSRWQQGNVFSCSVMHEALHNHYTQKSLSLSPGK

SEQ ID NO: 6757 - protein, 451 aa, Artificial Sequence
  source: /note="Description of Artificial Sequence: Synthetic polypeptide"
EVQLVESGGGLVQPGGSLRLSCAAAGFTFSSYSMNWVRQAPGKGLEWVSYISSRSRTIYYADSVKGRFTISRDNAKNSLYLQMNSLRDEDTAVYYCARDYGGQPPYYYYYGMDVWGQGTTVTVSSASTKGPSVFPLAPCSRSTSESTAALGCLVKDYFPEPVTVSWNSGALTSGVHTFPAVLQSSGLYSLSSVVTVPSSSLGTKTYTCNVDHKPSNTKVDKRVESKYGPPCPPCPAPEFLGGPSVFLFPPKPKDTLMISRTPEVTCVVVDVSQEDPEVQFNWYVDGVEVHNAKTKPREEQFNSTYRVVSVLTVLHQDWLNGKEYKCKVSNKGLPSSIEKTISKAKGQPREPQVYTLPPSQEEMTKNQVSLTCLVKGFYPSDIAVEWESNGQPENNYKTTPPVLDSDGSFFLYSRLTVDKSRWQEGNVFSCSVMHEALHNHYTQKSLSLSLG

SEQ ID NO: 6758 - protein, 447 aa, Artificial Sequence
  source: /note="Description of Artificial Sequence: Synthetic polypeptide"
QVQLVQSGAEVKKPGASVKVSCKASGYTFTNYGMNWVRQAPGQGLEWMGWINTYTGEPTYADDFKGRVTMTTDTSTSTAYMELRSLRSDDTAVYYCARIGDSSPSDYWGQGTLVTVSSASTKGPSVFPLAPSSKSTSGGTAALGCLVKDYFPEPVTVSWNSGALTSGVHTFPAVLQSSGLYSLSSVVTVPSSSLGTQTYICNVNHKPSNTKVDKKVEPKSCDKTHTCPPCPAPELLGGPSVFLFPPKPKDTLMISRTPEVTCVVVDVSHEDPEVKFNWYVDGVEVHNAKTKPREEQYNSTYRVVSVLTVLHQDWLNGKEYKCKVSNKALPAPIEKTISKAKGQPREPQVYTLPPSRDELTKNQVSLTCLVKGFYPSDIAVEWESNGQPENNYKTTPPVLDSDGSFFLYSKLTVDKSRWQQGNVFSCSVMHEALHNHYTQKSLSLSPG

SEQ ID NO: 6759 - protein, 444 aa, Artificial Sequence
  source: /note="Description of Artificial Sequence: Synthetic polypeptide"
QVQLVQSGAEVKKPGASVKISCKASGYSFTAYYIHWVKQAPGQGLEWIGYISSYNGATNYNQKFKGRVTFTTDTSTSTAYMELRSLRSDDTAVYYCARDYDYDVGMDYWGQGTLVTVSSASTKGPSVFPLAPCSRSTSESTAALGCLVKDYFPEPVTVSWNSGALTSGVHTFPAVLQSSGLYSLSSVVTVPSSNFGTQTYTCNVDHKPSNTKVDKTVERKCCVECPPCPAPPVAGPSVFLFPPKPKDTLMISRTPEVTCVVVDVSHEDPEVQFNWYVDGVEVHNAKTKPREEQFNSTFRVVSVLTVVHQDWLNGKEYKCKVSNKGLPAPIEKTISKTKGQPREPQVYTLPPSREEMTKNQVSLTCLVKGFYPSDIAVEWESNGQPENNYKTTPPMLDSDGSFFLYSKLTVDKSRWQQGNVFSCSVMHEALHNHYTQKSLSLSPG

SEQ ID NO: 6760 - protein, 452 aa, Artificial Sequence
  source: /note="Description of Artificial Sequence: Synthetic polypeptide"
QVQLVESGGGVVQPGRSLRLSCAASGFTFSSYGMHWVRQAPGKGLEWVSFLWYDGTNKNYVESVKGRFTISRDNSKNMLYLEMNSLRAEDTAVYYCARDHDFRSGYEGWFDPWGQGTLVTVSSASTKGPSVFPLAPSSKSTSGGTAALGCLVKDYFPEPVTVSWNSGALTSGVHTFPAVLQSSGLYSLSSVVTVPSSSLGTQTYICNVNHKPSNTKVDKKVEPKSCDKTHTCPPCPAPELLGGPSVFLFPPKPKDTLMISRTPEVTCVVVDVSHEDPEVKFNWYVDGVEVHNAKTKPREEQYNSTYRVVSVLTVLHQDWLNGKEYKCKVSNKALPAPIEKTISKAKGQPREPQVYTLPPSRDELTKNQVSLTCLVKGFYPSDIAVEWESNGQPENNYKTTPPVLDSDGSFFLYSKLTVDKSRWQQGNVFSCSVMHEALHNHYTQKSLSLSPG

SEQ ID NO: 6761 - protein, 450 aa, Artificial Sequence
  source: /note="Description of Artificial Sequence: Synthetic polypeptide"
QVQLKESGPGLVAPSQSLSITCTVSGFSLTDYGVRWIRQPPGKGLEWLGVIWGGGSTYYNSALKSRLSISKDNSKSQVFLKMNSLQTDDTAMYYCAKEKRRGYYYAMDYWGQGTSVTVSSASTKGPSVFPLAPSSKSTSGGTAALGCLVKDYFPEPVTVSWNSGALTSGVHTFPAVLQSSGLYSLSSVVTVPSSSLGTQTYICNVNHKPSNTKVDKKAEPKSCDKTHTCPPCPAPELLGGPSVFLFPPKPKDTLMISRTPEVTCVVVDVSHEDPEVKFNWYVDGVEVHNAKTKPREEQYNSTYRVVSVLTVLHQDWLNGKEYKCKVSNKALPAPIEKTISKAKGQPREPQVYTLPPSRDELTKNQVSLTCLVKGFYPSDIAVEWESNGQPENNYKTTPPVLDSDGSFFLYSKLTVDKSRWQQGNVFSCSVMHEALHNHYTQKSLSLSPGK

SEQ ID NO: 6762 - protein, 453 aa, Artificial Sequence
  source: /note="Description of Artificial Sequence: Synthetic polypeptide"
EVQLVESGGGLVQPGGSLRLSCAASGYTFIDYYMNWVRQAPGKGLEWVGDINLDNSGTHYNQKFKGRFTISRDKSKNTAYLQMNSLRAEDTAVYYCAREGVYHDYDDYAMDYWGQGTLVTVSSASTKGPSVFPLAPSSKSTSGGTAALGCLVKDYFPEPVTVSWNSGALTSGVHTFPAVLQSSGLYSLSSVVTVPSSSLGTQTYICNVNHKPSNTKVDKKVEPKSCDKTHTCPPCPAPELLGGPSVFLFPPKPKDTLMISRTPEVTCVVVDVSHEDPEVKFNWYVDGVEVHNAKTKPREEQYNSTYRVVSVLTVLHQDWLNGKEYKCKVSNKALPAPIEKTISKAKGQPREPQVYTLPPSREEMTKNQVSLTCLVKGFYPSDIAVEWESNGQPENNYKTTPPVLDSDGSFFLYSKLTVDKSRWQQGNVFSCSVMHEALHNHYTQKSLSLSPGK

SEQ ID NO: 6763 - protein, 449 aa, Artificial Sequence
  source: /note="Description of Artificial Sequence: Synthetic polypeptide"
QVQLVQSGAEVKKPGSSVKVSCKASGFTFTDYKIHWVRQAPGQGLEWMGYFNPNSGYSTYAQKFQGRVTITADKSTSTAYMELSSLRSEDTAVYYCARLSPGGYYVMDAWGQGTTVTVSSASTKGPSVFPLAPSSKSTSGGTAALGCLVKDYFPEPVTVSWNSGALTSGVHTFPAVLQSSGLYSLSSVVTVPSSSLGTQTYICNVNHKPSNTKVDKKVEPKSCDKTHTCPPCPAPELLGGPSVFLFPPKPKDTLMISRTPEVTCVVVDVSHEDPEVKFNWYVDGVEVHNAKTKPREEQYNSTYRVVSVLTVLHQDWLNGKEYKCKVSNKALPAPIEKTISKAKGQPREPQVYTLPPSRDELTKNQVSLTCLVKGFYPSDIAVEWESNGQPENNYKTTPPVLDSDGSFFLYSKLTVDKSRWQQGNVFSCSVMHEALHNHYTQKSLSLSPG

SEQ ID NO: 6764 - protein, 451 aa, Artificial Sequence
  source: /note="Description of Artificial Sequence: Synthetic polypeptide"
QVQLQESGPGLVKPSQTLSLTCTVSGGSISSGDYYWSWIRQPPGKGLEWIGYIYYSGSTDYNPSLKSRVTMSVDTSKNQFSLKVNSVTAADTAVYYCARVSIFGVGTFDYWGQGTLVTVSSASTKGPSVLPLAPSSKSTSGGTAALGCLVKDYFPEPVTVSWNSGALTSGVHTFPAVLQSSGLYSLSSVVTVPSSSLGTQTYICNVNHKPSNTKVDKRVEPKSCDKTHTCPPCPAPELLGGPSVFLFPPKPKDTLMISRTPEVTCVVVDVSHEDPEVKFNWYVDGVEVHNAKTKPREEQYNSTYRVVSVLTVLHQDWLNGKEYKCKVSNKALPAPIEKTISKAKGQPREPQVYTLPPSREEMTKNQVSLTCLVKGFYPSDIAVEWESNGQPENNYKTTPPVLDSDGSFFLYSKLTVDKSRWQQGNVFSCSVMHEALHNHYTQKSLSLSPGK

SEQ ID NO: 6765 - protein, 124 aa, Artificial Sequence
  source: /note="Description of Artificial Sequence: Synthetic polypeptide"
RAEVQLQQPGSELVRPGASVKLSCKASGYTFTSYWMHWVKQRPGQGLEWIGNIYPGSRSTNYDEKFKSKATLTVDTSSSTAYMQLSSLTSEDSAVYYCTRNGDYYVSSGDAMDYWGQGTSVTVS

SEQ ID NO: 6766 - protein, 448 aa, Artificial Sequence
  source: /note="Description of Artificial Sequence: Synthetic polypeptide"
QVQLQQPGAELVEPGGSVKLSCKASGYTFTSHWMHWVKQRPGQGLEWIGEINPSSGRNNYNEKFKSKATLTVDKSSSTAYMQFSSLTSEDSAVYYCVRYYGYDEAMDYWGQGTSVTVSSASTKGPSVFPLAPSSKSTSGGTAALGCLVKDYFPEPVTVSWNSGALTSGVHTFPAVLQSSGLYSLSSVVTVPSSSLGTQTYICNVNHKPSNTKVDKRVEPKSCDKTHTCPPCPAPELLGGPSVFLFPPKPKDTLMISRTPEVTCVVVDVSHEDPEVKFNWYVDGVEVHNAKTKPREEQYNSTYRVVSVLTVLHQDWLNGKEYKCKVSNKALPAPIEKTISKAKGQPREPQVYTLPPSREEMTKNQVSLTCLVKGFYPSDIAVEWESNGQPENNYKTTPPVLDSDGSFFLYSKLTVDKSRWQQGNVFSCSVMHEALHNHYTQKSLSLSPG

SEQ ID NO: 6767 - protein, 225 aa, Artificial Sequence
  source: /note="Description of Artificial Sequence: Synthetic polypeptide"
HHHHHHEVQLVQSGPGLVQPGGSVRISCAASGYTFTNYGMNWVKQAPGKGLEWMGWINTYTGESTYADSFKGRFTFSLDTSASAAYLQINSLRAEDTAVYYCARFAIKGDYWGQGTLLTVSSASTKGPSVFPLAPSSKSTSGGTAALGCLVKDYFPEPVTVSWNSGALTSGVHTFPAVLQSSGLYSLSSVVTVPSSSLGTQTYICNVNHKPSNTKVDKKVEPKSC

SEQ ID NO: 6768 - protein, 457 aa, Artificial Sequence
  source: /note="Description of Artificial Sequence: Synthetic polypeptide"
EVQLLESGGGVVQPGRSLRLSCAASGFTFSSYGMHWVRQAPGKGLEWVAVISYDGSNKYYADSVKGRFTISRDNSKNTLYLQMNSLRAEDTAVYYCAKDMGWGSGWRPYYYYGMDVWGQGTTVTVSSASTKGPSVFPLAPSSKSTSGGTAALGCLVKDYFPEPVTVSWNSGALTSGVHTFPAVLQSSGLYSLSSVVTVPSSSLGTQTYICNVNHKPSNTKVDKKVEPKSCDKTHTCPPCPAPELLGGPSVFLFPPKPKDTLMISRTPEVTCVVVDVSHEDPEVKFNWYVDGVEVHNAKTKPREEQYNSTYRVVSVLTVLHQDWLNGKEYKCKVSNKALPAPIEKTISKAKGQPREPQVYTLPPSRDELTKNQVSLTCLVKGFYPSDIAVEWESNGQPENNYKTTPPVLDSDGSFFLYSKLTVDKSRWQQGNVFSCSVMHEALHNHYTQKSLSLSPGK

SEQ ID NO: 6769 - protein, 448 aa, Artificial Sequence
  source: /note="Description of Artificial Sequence: Synthetic polypeptide"
QVQLVQSGAEVKKPGASVKVSCKASGYTFTGYWMNWVRQAPGQGLEWMGDIYPGSGNTNYDEKFQGRVTMTRDTSISTAYMELSRLRSDDTAVYYCARGGYYEDFDSWGQGTTVTVSSASTKGPSVFPLAPSSKSTSGGTAALGCLVKDYFPEPVTVSWNSGALTSGVHTFPAVLQSSGLYSLSSVVTVPSSSLGTQTYICNVNHKPSNTKVDKRVEPKSCDKTHTCPPCPAPELLGGPSVFLFPPKPKDTLMISRTPEVTCVVVDVSHEDPEVKFNWYVDGVEVHNAKTKPREEQYNSTYRVVSVLTVLHQDWLNGKEYKCKVSNKALPAPIEKTISKAKGQPREPQVYTLPPSREEMTKNQVSLTCLVKGFYPSDIAVEWESNGQPENNYKTTPPVLDSDGSFFLYSKLTVDKSRWQQGNVFSCSVMHEALHNHYTQKSLSLSPGK

SEQ ID NO: 6770 - protein, 450 aa, Artificial Sequence
  source: /note="Description of Artificial Sequence: Synthetic polypeptide"
QVQLQQSGPELVKPGASLKLSCTASGFNIKDTYIHWVKQRPEQGLEWIGRIYPTNGYTRYDPKFQDKATITADTSSNTAYLQVSRLTSEDTAVYYCSRWGGDGFYAMDYWGQGASVTVSSASTKGPSVFPLAPSSKSTSGGTAALGCLVKDYFPEPVTVSWNSGALTSGVHTFPAVLQSSGLYSLSSVVTVPSSSLGTQTYICNVNHKPSNTKVDKRVEPKSCDKTHTCPPCPAPELVGGPSVFLLPPKPKDTLMISRTPEVTCVVVDVSHEDPEVKFNWYVDGVEVHNAKTKPPEEQYNSTLRVVSVLTVLHQDWLNGKEYKCKVSNKALPAPIEKTISKAKGQPREPQVYTLPPSRDELTKNQVSLTCLVKGFYPSDIAVEWESNGQPENNYKTTPLVLDSDGSFFLYSKLTVDKSRWQQGNVFSCSVMHEALHNHYTQKSLSLSPGK

SEQ ID NO: 6771 - protein, 448 aa, Artificial Sequence
  source: /note="Description of Artificial Sequence: Synthetic polypeptide"
EVQLVESGGGLVQPGGSLRLSCAASGFTFTDYTMDWVRQAPGKGLEWVADVNPNSGGSIYNQRFKGRFTLSVDRSKNTLYLQMNSLRAEDTAVYYCARNLGPSFYFDYWGQGTLVTVSSASTKGPSVFPLAPSSKSTSGGTAALGCLVKDYFPEPVTVSWNSGALTSGVHTFPAVLQSSGLYSLSSVVTVPSSSLGTQTYICNVNHKPSNTKVDKKVEPKSCDKTHTCPPCPAPELLGGPSVFLFPPKPKDTLMISRTPEVTCVVVDVSHEDPEVKFNWYVDGVEVHNAKTKPREEQYNSTYRVVSVLTVLHQDWLNGKEYKCKVSNKALPAPIEKTISKAKGQPREPQVYTLPPSREEMTKNQVSLTCLVKGFYPSDIAVEWESNGQPENNYKTTPPVLDSDGSFFLYSKLTVDKSRWQQGNVFSCSVMHEALHNHYTQKSLSLSPG

SEQ ID NO: 6772 - protein, 447 aa, Artificial Sequence
  source: /note="Description of Artificial Sequence: Synthetic polypeptide"
EVQLLESGGGLVQPGGSLRLSCAASGFTFSSYAMSWVRQAPGKGLEWVSAINSQGKSTYYADSVKGRFTISRDNSKNTLYLQMNSLRAEDTAVYYCARWGDEGFDIWGQGTLVTVSSASTKGPSVFPLAPSSKSTSGGTAALGCLVKDYFPEPVTVSWNSGALTSGVHTFPAVLQSSGLYSLSSVVTVPSSSLGTQTYICNVNHKPSNTKVDKRVEPKSCDKTHTCPPCPAPELLGGPSVFLFPPKPKDTLMISRTPEVTCVVVDVSHEDPEVKFNWYVDGVEVHNAKTKPREEQYNSTYRVVSVLTVLHQDWLNGKEYKCKVSNKALPAPIEKTISKAKGQPREPQVYTLPPSREEMTKNQVSLTCLVKGFYPSDIAVEWESNGQPENNYKTTPPVLDSDGSFFLYSKLTVDKSRWQQGNVFSCSVMHEALHNHYTQKSLSLSPGK

SEQ ID NO: 6773 - protein, 445 aa, Artificial Sequence
  source: /note="Description of Artificial Sequence: Synthetic polypeptide"
EVQLLESGGGLVQPGGSLRLSCAASGFTFSHYVMAWVRQAPGKGLEWVSSISSSGGWTLYADSVKGRFTISRDNSKNTLYLQMNSLRAEDTAVYYCTRGLKMATIFDYWGQGTLVTVSSASTKGPSVFPLAPCSRSTSESTAALGCLVKDYFPEPVTVSWNSGALTSGVHTFPAVLQSSGLYSLSSVVTVPSSNFGTQTYTCNVDHKPSNTKVDKTVERKCCVECPPCPAPPVAGPSVFLFPPKPKDTLMISRTPEVTCVVVDVSHEDPEVQFNWYVDGVEVHNAKTKPREEQFNSTFRVVSVLTVVHQDWLNGKEYKCKVSNKGLPAPIEKTISKTKGQPREPQVYTLPPSREEMTKNQVSLTCLVKGFYPSDIAVEWESNGQPENNYKTTPPMLDSDGSFFLYSKLTVDKSRWQQGNVFSCSVMHEALHNHYTQKSLSLSPGK

SEQ ID NO: 6774 - protein, 451 aa, Artificial Sequence
  source: /note="Description of Artificial Sequence: Synthetic polypeptide"
EVQLVESGGGLVQPGGSLRLSCAASGFTLSGDWIHWVRQAPGKGLEWVGEISAAGGYTDYADSVKGRFTISADTSKNTAYLQMNSLRAEDTAVYYCARESRVSFEAAMDYWGQGTLVTVSSASTKGPSVFPLAPSSKSTSGGTAALGCLVKDYFPEPVTVSWNSGALTSGVHTFPAVLQSSGLYSLSSVVTVPSSSLGTQTYICNVNHKPSNTKVDKKVEPKSCDKTHTCPPCPAPELLGGPSVFLFPPKPKDTLMISRTPEVTCVVVDVSHEDPEVKFNWYVDGVEVHNAKTKPREEQYNSTYRVVSVLTVLHQDWLNGKEYKCKVSNKALPAPIEKTISKAKGQPREPQVYTLPPSREEMTKNQVSLTCLVKGFYPSDIAVEWESNGQPENNYKTTPPVLDSDGSFFLYSKLTVDKSRWQQGNVFSCSVMHEALHNHYTQKSLSLSPGK

SEQ ID NO: 6775 - protein, 449 aa, Artificial Sequence
  source: /note="Description of Artificial Sequence: Synthetic polypeptide"
QVQLVQSGAEVKKPGASVKVSCKASGYTFRSSYISWVRQAPGQGLEWMGWIYAGTGSPSYNQKLQGRVTMTTDTSTSTAYMELRSLRSDDTAVYYCARHRDYYSNSLTYWGQGTLVTVSSASTKGPSVFPLAPSSKSTSGGTAALGCLVKDYFPEPVTVSWNSGALTSGVHTFPAVLQSSGLYSLSSVVTVPSSSLGTQTYICNVNHKPSNTKVDKKVEPKSCDKTHTCPPCPAPELLGGPSVFLFPPKPKDTLMISRTPEVTCVVVDVSHEDPEVKFNWYVDGVEVHNAKTKPREEQYNSTYRVVSVLTVLHQDWLNGKEYKCKVSNKALPAPIEKTISKAKGQPREPQVYTLPPSRDELTKNQVSLTCLVKGFYPSDIAVEWESNGQPENNYKTTPPVLDSDGSFFLYSKLTVDKSRWQQGNVFSCSVMHEALHNHYTQKSLSLSPG

SEQ ID NO: 6776 - protein, 445 aa, Artificial Sequence
  source: /note="Description of Artificial Sequence: Synthetic polypeptide"
QVQLQQSGAELVKPGASVKLSCKASGYTFTSYDINWVRQRPEQGLEWIGWIFPGDGSTKYNEKFKGKATLTTDKSSSTAYMQLSRLTSEDSAVYFCAREDYYDNSYYFDYWGQGTTLTVSSAKTTPPSVYPLAPGSAAQTNSMVTLGCLVKGYFPEPVTVTWNSGSLSSGVHTFPAVLQSDLYTLSSSVTVPSSPRPSETVTCNVAHPASSTKVDKKIVPRDCGCKPCICTVPEVSSVFIFPPKPKDVLTITLTPKVTCVVVDISKDDPEVQFSWFVDDVEVHTAQTQPREEQFNSTFRSVSELPIMHQDWLNGKEFKCRVNSAAFPAPIEKTISKTKGRPKAPQVYTIPPPKEQMAKDKVSLTCMITDFFPEDITVEWQWNGQPAENYKNTQPIMNTNGSYFVYSKLNVQKSNWEAGNTFTCSVLHEGLHNHHTEKSLSHSPGK

SEQ ID NO: 6777 - protein, 448 aa, Artificial Sequence
  source: /note="Description of Artificial Sequence: Synthetic polypeptide"
EVQLLESGGGLVQPGGSLRLSCAASGFTFSNYAMSWVRQAPGKGLEWVSSISGSGDYTYYTDSVKGRFTISRDNSKNTLYLQMNSLRAEDTAVYYCARSPWGYYLDSWGQGTLVTVSSASTKGPSVFPLAPSSKSTSGGTAALGCLVKDYFPEPVTVSWNSGALTSGVHTFPAVLQSSGLYSLSSVVTVPSSSLGTQTYICNVNHKPSNTKVDKRVEPKSCDKTHTCPPCPAPELLGGPSVFLFPPKPKDTLMISRTPEVTCVVVDVSHEDPEVKFNWYVDGVEVHNAKTKPREEQYNSTYRVVSVLTVLHQDWLNGKEYKCKVSNKALPAPIEKTISKAKGQPREPQVYTLPPSREEMTKNQVSLTCLVKGFYPSDIAVEWESNGQPENNYKTTPPVLDSDGSFFLYSKLTVDKSRWQQGNVFSCSVMHEALHNHYTQKSLSLSPGK

SEQ ID NO: 6778 - protein, 456 aa, Artificial Sequence
  source: /note="Description of Artificial Sequence: Synthetic polypeptide"
METGLRWLLLVAVLKGVQCQSVEESGGRLVTPGTPLTLTCKASGFSLSDSRVSWVRQAPGKGLEWIGIVGIGWNIYHANWAKGRFTISKTSSTTVDLKITSPTVEDTATYFCARGLGGGTVIWGPGTLVTVSLGQPKAPSVFPLAPCCGDTPSSTVTLGCLVKGYLPEPVTVTWNSGTLTNGVRTFPSVRQSSGLYSLSSVVSVTSSSQPVTCNVAHPATNTKVDKTVAPSTCSKPTCPPPELLGGPSVFIFPPKPKDTLMISRTPEVTCVVVDVSQDDPEVQFTWYINNEQVRTARPPLREQQFNSTIRVVSTLPIAHQDWLRGKEFKCKVHNKALPAPIEKTISKARGQPLEPKVYTMGPPREELSSRSVSLTCMINGFYPSDISVEWEKNGKAEDNYKTTPAVLDSDGSYFLYSKLSVPTSEWQRGDVFTCSVMHEALHNHYTQKSISRSPGK

SEQ ID NO: 6779 - protein, 458 aa, Artificial Sequence
  source: /note="Description of Artificial Sequence: Synthetic polypeptide"
METGLRWLLLVAVLKGVQCQSLEESGGRLVTPGTPLTLTCTVSGFSLSRNAINWVRQAPGKGLEYIGIIGSSGVTYYASWAKGRFTISRTSTTVDLKITSPTTEDTATYFCARNLYTGGSNDNLWGPGTLVTVSSGQPKAPSVFPLAPCCGDTPSSTVTLGCLVKGYLPEPVTVTWNSGTLTNGVRTFPSVRQSSGLYSLSSVVSVTSSSQPVTCNVAHPATNTKVDKTVAPSTCSKPTCPPPELLGGPSVFIFPPKPKDTLMISRTPEVTCVVVDVSQDDPEVQFTWYINNEQVRTARPPLREQQFNSTIRVVSTLPIAHQDWLRGKEFKCKVHNKALPAPIEKTISKARGQPLEPKVYTMGPPREELSSRSVSLTCMINGFYPSDISVEWEKNGKAEDNYKTTPAVLDSDGSYFLYSKLSVPTSEWQRGDVFTCSVMHEALHNHYTQKSISRSPGK

SEQ ID NO: 6780 - protein, 214 aa, Artificial Sequence
  source: /note="Description of Artificial Sequence: Synthetic polypeptide"
VKLQESGPELVKPGASVKISCKASGYAFSRSWMNWVKQRPGQGLEWIGRIHPGDGDTNYNGKFKGKATLTVAKSSSTAYMQLSSLTSVDSAVYFCANEGSPYFDYWGQGTTLTVSSAKTTPPSVYPLAPGSAAQTNSMVTLGCLVKGYFPEPVTVTWNSGSLSSGVHTFPAVLQSDLYTLSSSVTVPSSTWPSETVTCNVAHPASSTKVDKKLE

SEQ ID NO: 6781 - protein, 218 aa, Artificial Sequence
  source: /note="Description of Artificial Sequence: Synthetic polypeptide"
  MOD_RES (2)..(2): Any amino acid
VXLQQSGAELVRPGVSVKISCKGSGYTFTDYAMHWVKQSHAKSLEWIGVITNYYGDASYNQKFKGKATMTVDKSSSTAYMELARLTSEDSAIYYCARGGYDGYYVDFDYWGQGTTLTVSSAKTTPPSVYPLAPGSAAQTNSMVTLGCLVKGYFPEPVTVTWNSGSLSSGVHTFPAVLQSDLYTLSSSVTVPSSTWPSETVTCNVAHPASSTKVDKKLE

SEQ ID NO: 6782 - protein, 451 aa, Artificial Sequence
  source: /note="Description of Artificial Sequence: Synthetic polypeptide"
QVQLVQSGAEVKKPGASVKVSCKASGYTFTNYWIHWVRQAPGQGLEWIGVIDPSDTYPNYNKKFKGRVTMTVDTSTSTAYMELRSLRSDDTAVYYCARNGDSDYYSGMDYWGQGTTVTVSSASTKGPSVFPLAPSSKSTSGGTAALGCLVKDYFPEPVTVSWNSGALTSGVHTFPAVLQSSGLYSLSSVVTVPSSSLGTQTYICNVNHKPSNTKVDKRVEPKSCDKTHTCPPCPAPELLGGPSVFLLPPKPKDTLMISRTPEVTCVVVDVSHEDPEVKFNWYVDGVEVHNAKTKPPEEQYNSTLRVVSILTVLHQDWLNGKEYKCKVSNKALPAPIEKTISKAKGQPREPQVYTLPPSRDELTKNQVSLTCLVKGFYPSDIAVEWESNGQPENNYKTTPLVLDSDGSFFLYSKLTVDKSRWQQGNVFSCSVMHEALHNHYTQKSLSLSPGK

SEQ ID NO: 6783 - protein, 120 aa, Artificial Sequence
  source: /note="Description of Artificial Sequence: Synthetic polypeptide"
QVQLQQSGPELVKPGASLKLSCTASGFNIKDTYIHWVKQRPEQGLEWIGRIYPTNGYTRYDPKFQDKATITADTSSNTAYLQVSRLTSEDTAVYYCSRWGGDGFYAMDYWGQGASVTVSS

SEQ ID NO: 6784 - protein, 120 aa, Artificial Sequence [sequence omitted]

SEQ ID NO: 6785 - protein, 451 aa, Artificial Sequence
  source: /note="Description of Artificial Sequence: Synthetic polypeptide"
QVQLVQSGAEVKKPGASVKVSCKASGYTFTNYWIHWVRQAPGQGLEWIGVIDPSDTYPNYNKKFKGRVTMTVVVSTSTAYMELRSLRSDDTAVYYCARNGDSDYYSGMDYWGQGTTVTVSSASTKGPSVFPLAPSSKSTSGGTAALGCLVKDYFPEPVTVSWNSGALTSGVHTFPAVLQSSGLYSLSSVVTVPSSSLGTQTYICNVNHKPSNTKVDKRVEPKSCDKTHTCPPCPAPELLGGPSVFLLPPKPKDTLMISRTPEVTCVVVDVSHEDPEVKFNWYVDGVEVHNAKTKPPEEQYNSTLRVVSILTVLHQDWLNGKEYKCKVSNKALPAPIEKTISKAKGQPREPQVYTLPPSRDELTKNQVSLTCLVKGFYPSDIAVEWESNGQPENNYKTTPLVLDSDGSFFLYSKLTVDKSRWQQGNVFSCSVMHEALHNHYTQKSLSLSPGK

SEQ ID NO: 6786 - protein, 451 aa, Artificial Sequence; identical to SEQ ID NO: 6782
  source: /note="Description of Artificial Sequence: Synthetic polypeptide"

SEQ ID NO: 6787 - protein, 456 aa, Artificial Sequence
  source: /note="Description of Artificial Sequence: Synthetic polypeptide"
QAQVVESGGGVVQSGRSLRLSCAASGFAFSSYGMHWVRQAPGKGLEWVAVIWYDGSNKYYADSVRGRFTISRDNSENTLYLQMNSLRAEDTAVYYCARDHYGSGVHHYFYYGLDVWGQGTTVTVSSASTKGPSVFPLAPSSKSTSGGTAALGCLVKDYFPEPVTVSWNSGALTSGVHTFPAVLQSSGLYSLSSVVTVPSSSLGTQTYICNVNHKPSNTKVDKRVEPKSCDKTHTCPPCPAPELLGGPSVFLFPPKPKDTLMISRTPEVTCVVVDVSHEDPEVKFNWYVDGVEVHNAKTKPREEQYNSTYRVVSVLTVLHQDWLNGKEYKCKVSNKALPAPIEKTISKAKGQPREPQVYTLPPSREEMTKNQVSLTCLVKGFYPSDIAVEWESNGQPENNYKTTPPVLDSDGSFFLYSKLTVDKSRWQQGNVFSCSVMHEALHNHYTQKSLSLSPGK

SEQ ID NO: 6788 - protein, 447 aa, Artificial Sequence
  source: /note="Description of Artificial Sequence: Synthetic polypeptide"
QVQLVQSGAEVVKPGASVKISCKASGYTFTGYFMNWVKQSPGQSLEWIGRIHPYDGDTFYNQKFQGKATLTVDKSSNTAHMELLSLTSEDFAVYYCTRYDGSRAMDYWGQGTTVTVSSASTKGPSVFPLAPSSKSTSGGTAALGCLVKDYFPEPVTVSWNSGALTSGVHTFPAVLQSSGLYSLSSVVTVPSSSLGTQTYICNVNHKPSNTKVDKKVEPKSCDKTHTCPPCPAPELLGGPSVFLFPPKPKDTLMISRTPEVTCVVVDVSHEDPEVKFNWYVDGVEVHNAKTKPREEQYNSTYRVVSVLTVLHQDWLNGKEYKCKVSNKALPAPIEKTISKAKGQPREPQVYTLPPSRDELTKNQVSLTCLVKGFYPSDIAVEWESNGQPENNYKTTPPVLDSDGSFFLYSKLTVDKSRWQQGNVFSCSVMHEALHNHYTQKSLSLSPG

SEQ ID NO: 6789 - protein, 449 aa, Artificial Sequence
  source: /note="Description of Artificial Sequence: Synthetic polypeptide"
EVQLVESGGGVVQPGRSLRLSCSASGFTFSGYGLSWVRQAPGKGLEWVAMISSGGSYTYYADSVKGRFAISRDNAKNTLFLQMDSLRPEDTGVYFCARHGDDPAWFAYWGQGTPVTVSSASTKGPSVFPLAPSSKSTSGGTAALGCLVKDYFPEPVTVSWNSGALTSGVHTFPAVLQSSGLYSLSSVVTVPSSSLGTQTYICNVNHKPSNTKVDKKVEPKSCDKTHTCPPCPAPELLGGPSVFLFPPKPKDTLMISRTPEVTCVVVDVSHEDPEVKFNWYVDGVEVHNAKTKPREEQYNSTYRVVSVLTVLHQDWLNGKEYKCKVSNKALPAPIEKTISKAKGQPREPQVYTLPPSRDELTKNQVSLTCLVKGFYPSDIAVEWESNGQPENNYKTTPPVLDSDGSFFLYSKLTVDKSRWQQGNVFSCSVMHEALHNHYTQKSLSLSPGK

SEQ ID NO: 6790 - protein, 443 aa, Artificial Sequence
  source: /note="Description of Artificial Sequence: Synthetic polypeptide"
EVQLVESGGGLVQPGGSLRLSCAASGFTFSHYTLSWVRQAPGKGLEWVSVISGDGSYTYYADSVKGRFTISSDNSKNTLYLQMNSLRAEDTAVYYCARNFIKYVFANWGQGTLVTVSSASTKGPSVFPLAPCSRSTSESTAALGCLVKDYFPEPVTVSWNSGALTSGVHTFPAVLQSSGLYSLSSVVTVPSSNFGTQTYTCNVDHKPSNTKVDKTVERKCCVECPPCPAPPVAGPSVFLFPPKPKDTLMISRTPEVTCVVVDVSHEDPEVQFNWYVDGVEVHNAKTKPREEQFNSTFRVVSVLTVVHQDWLNGKEYKCKVSNKGLPAPIEKTISKTKGQPREPQVYTLPPSREEMTKNQVSLTCLVKGFYPSDIAVEWESNGQPENNYKTTPPMLDSDGSFFLYSKLTVDKSRWQQGNVFSCSVMHEALHNHYTQKSLSLSPG

SEQ ID NO: 6791 - protein, 113 aa, Artificial Sequence
  source: /note="Description of Artificial Sequence: Synthetic polypeptide"
EVQLVQSGAEVEKPGASVKISCKASGSSFTGYNMNWVRQNIGKSLEWIGAIDPYYGGTSYNQKFKGRATLTVDKSTSTAYMHLKSLRSEDTAVYYCVSGMEYWGQGTSVTVSS

SEQ ID NO: 6792 - protein, 445 aa, Artificial Sequence
  source: /note="Description of Artificial Sequence: Synthetic polypeptide"
QVQLVQSGAEVKKPGASVKVSCKASGYTFTDYEMHWVRQAPGQGLEWMGALDPKTGDTAYSQKFKGRVTLTADKSTSTAYMELSSLTSEDTAVYYCTRFYSYTYWGQGTLVTVSSASTKGPSVFPLAPSSKSTSGGTAALGCLVKDYFPEPVTVSWNSGALTSGVHTFPAVLQSSGLYSLSSVVTVPSSSLGTQTYICNVNHKPSNTKVDKKVEPKSCDKTHTCPPCPAPELLGGPSVFLFPPKPKDTLMISRTPEVTCVVVDVSHEDPEVKFNWYVDGVEVHNAKTKPREEQYNSTYRVVSVLTVLHQDWLNGKEYKCKVSNKALPAPIEKTISKAKGQPREPQVYTLPPSRDELTKNQVSLTCLVKGFYPSDIAVEWESNGQPENNYKTTPPVLDSDGSFFLYSKLTVDKSRWQQGNVFSCSVMHEALHNHYTQKSLSLSPGK

SEQ ID NO: 6793 - protein, 445 aa, Artificial Sequence
  source: /note="Description of Artificial Sequence: Synthetic polypeptide"
QVQLQESGPGLVKPSQTLSLTCTVSGGSISSFNYYWSWIRHHPGKGLEWIGYIYYSGSTYSNPSLKSRVTISVDTSKNQFSLTLSSVTAADTAVYYCARGYNWNYFDYWGQGTLVTVSSASTKGPSVFPLAPCSRSTSESTAALGCLVKDYFPEPVTVSWNSGALTSGVHTFPAVLQSSGLYSLSSVVTVPSSNFGTQTYTCNVDHKPSNTKVDKTVERKCCVECPPCPAPPVAGPSVFLFPPKPKDTLMISRTPEVTCVVVDVSHEDPEVQFNWYVDGVEVHNAKTKPREEQFNSTFRVVSVLTVVHQDWLNGKEYKCKVSNKGLPAPIEKTISKTKGQPREPQVYTLPPSREEMTKNQVSLTCLVKGFYPSDIAVEWESNGQPENNYKTTPPMLDSDGSFFLYSKLTVDKSRWQQGNVFSCSVMHEALHNHYTQKSLSLSPGK

SEQ ID NO: 6794 - protein, 449 aa, Artificial Sequence
  source: /note="Description of Artificial Sequence: Synthetic polypeptide"
QVQLQQWGAGLLKPSETLSLTCAVFGGSFSGYYWSWIRQPPGKGLEWIGEINHRGNTNDNPSLKSRVTISVDTSKNQFALKLSSVTAADTAVYYCARERGYTYGNFDHWGQGTLVTVSSASTKGPSVFPLAPSSKSTSGGTAALGCLVKDYFPEPVTVSWNSGALTSGVHTFPAVLQSSGLYSLSSVVTVPSSSLGTQTYICNVNHKPSNTKVDKKVEPKSCDKTHTCPPCPAPELLGGPSVFLFPPKPKDTLMISRTPEVTCVVVDVSHEDPEVKFNWYVDGVEVHNAKTKPREEQYNSTYRVVSVLTVLHQDWLNGKEYKCKVSNKALPAPIEKTISKAKGQPREPQVYTLPPSRDELTKNQVSLTCLVKGFYPSDIAVEWESNGQPENNYKTTPPVLDSDGSFFLYSKLTVDKSRWQQGNVFSCSVMHEALHNHYTQKSLSLSPGK

SEQ ID NO: 6795 - protein, 447 aa, Artificial Sequence
  source: /note="Description of Artificial Sequence: Synthetic polypeptide"
QVQLQQWGAGLLKPSETLSLTCAVYGGSFSGYYWSWIRQPPGKGLEWIGEINHSGSTNYNPSLKSRVTISVETSKNQFSLKLSSVTAADTAVYYCARDKWTWYFDLWGRGTLVTVSSASTKGPSVFPLAPSSKSTSGGTAALGCLVKDYFPEPVTVSWNSGALTSGVHTFPAVLQSSGLYSLSSVVTVPSSSLGTQTYICNVNHKPSNTKVDKRVEPKSCDKTHTCPPCPAPELLGGPSVFLFPPKPKDTLMISRTPEVTCVVVDVSHEDPEVKFNWYVDGVEVHNAKTKPREEQYNSTYRVVSVLTVLHQDWLNGKEYKCKVSNKALPAPIEKTISKAKGQPREPQVYTLPPSREEMTKNQVSLTCLVKGFYPSDIAVEWESNGQPENNYKTTPPVLDSDGSFFLYSKLTVDKSRWQQGNVFSCSVMHEALHNHYTQKSLSLSPGK

SEQ ID NO: 6796 - protein, 446 aa, Artificial Sequence
  source: /note="Description of Artificial Sequence: Synthetic polypeptide"
QSVEESGGRLVTPGTPLTLTCTVSGFSLSAYAMSWVRQAPEKGLEWIAVIYVIGATDYASWAKGRFTISRTSTTVDLRIPSPTTEDTATYFCARVYDSVWNHFNLWGPGTLVTVSSASTKGPSVFPLAPSSKSTSGGTAALGCLVKDYFPEPVTVSWNSGALTSGVHTFPAVLQSSGLYSLSSVVTVPSSSLGTQTYICNVNHKPSNTKVDKRVEPKSCDKTHTCPPCPAPELLGGPSVFLFPPKPKDTLMISRTPEVTCVVVDVSHEDPEVKFNWYVDGVEVHNAKTKPREEQYASTYRVVSVLTVLHQDWLNGKEYKCKVSNKALPAPIEKTISKAKGQPREPQVYTLPPSREEMTKNQVSLTCLVKGFYPSDIAVEWESNGQPENNYKTTPPVLDSDGSFFLYSKLTVDKSRWQQGNVFSCSVMHEALHNHYTQKSLSLSPGK

SEQ ID NO: 6797 - protein, 453 aa, Artificial Sequence
  source: /note="Description of Artificial Sequence: Synthetic polypeptide"
QSLEESGGDLVKPGGTLTLTCTASGFSFSDDHYMCWVRQAPGKGLQWIACMYVGSSGATYYASWAKGRFTISKTSSTTVTLQMTSLTAADTATYFCARDDWTSYYAWGYWALWGPGTLVTVSSASTKGPSVFPLAPSSKSTSGGTAALGCLVKDYFPEPVTVSWNSGALTSGVHTFPAVLQSSGLYSLSSVVTVPSSSLGTQTYICNVNHKPSNTKVDKRVEPKSCDKTHTCPPCPAPELLGGPSVFLFPPKPKDTLMISRTPEVTCVVVDVSHEDPEVKFNWYVDGVEVHNAKTKPREEQYASTYRVVSVLTVLHQDWLNGKEYKCKVSNKALPAPIEKTISKAKGQPREPQVYTLPPSREEMTKNQVSLTCLVKGFYPSDIAVEWESNGQPENNYKTTPPVLDSDGSFFLYSKLTVDKSRWQQGNVFSCSVMHEALHNHYTQKSLSLSPGK

SEQ ID NO: 6798 - protein, 449 aa, Artificial Sequence
  source: /note="Description of Artificial Sequence: Synthetic polypeptide"
EVQLVESGGGLVQPGGSLRLSCAASGFTVSSNAISWVRQAPGKGLEWVGVIYVIGVTDYASSAQGRFTISRDNSKNTLYLQMNSLRAEDTAVYYCARVYDSGWNHFNLWGQGTLVTVSSASTKGPSVFPLAPSSKSTSGGTAALGCLVKDYFPEPVTVSWNSGALTSGVHTFPAVLQSSGLYSLSSVVTVPSSSLGTQTYICNVNHKPSNTKVDARVEPKSCDKTHTCPPCPAPELLGGPSVFLFPPKPKDTLMISRTPEVTCVVVDVSHEDPEVKFNWYVDGVEVHNAKTKPREEQYASTYRVVSVLTVLHQDWLNGKEYKCKVSNKALPAPIEKTISKAKGQPREPQVYTLPPSREEMTKNQVSLTCLVKGFYPSDIAVEWESNGQPENNYKTTPPVLDSDGSFFLYSKLTVDKSRWQQGNVFSCSVMHEALHNHYTQKSLSLSPGK

SEQ ID NO: 6799 - protein, 447 aa, Artificial Sequence
  source: /note="Description of Artificial Sequence: Synthetic polypeptide"
QSLEESGGRLVQPGTPLTLSCTASGLTISSYYMSWVRQAPGKGLEWVGTINPGANTYFASSAKGRFTISRSSTTLDLKMTSPTAEDTATYYCAREGDSNDWGVFDLWGQGTLVTVSSASTKGPSVFPLAPSSKSTSGGTAALGCLVKDYFPEPVTVSWNSGALTSGVHTFPAVLQSSGLYSLSSVVTVPSSSLGTQTYICNVNHKPSNTKVDKRVEPKSCDKTHTCPPCPAPELLGGPSVFLFPPKPKDTLMISRTPEVTCVVVDVSHEDPEVKFNWYVDGVEVHNAKTKPREEQYASTYRVVSVLTVLHQDWLNGKEYKCKVSNKALPAPIEKTISKAKGQPREPQVYTLPPSREEMTKNQVSLTCLVKGFYPSDIAVEWESNGQPENNYKTTPPVLDSDGSFFLYSKLTVDKSRWQQGNVFSCSVMHEALHNHYTQKSLSLSPGK

SEQ ID NO: 6800 - protein, 443 aa, Artificial Sequence
  source: /note="Description of Artificial Sequence: Synthetic polypeptide"
QSLEESGGRLVTPGTPLTLTCTVSGFSLNNYAVGWVRQAPGKGLEWIGIIYLSGNTDYANWAKGRFTISKTSTTVDLKITSPTTEDTATYFCARKFDTGYDIWGPGTLVTVSSASTKGPSVFPLAPSSKSTSGGTAALGCLVKDYFPEPVTVSWNSGALTSGVHTFPAVLQSSGLYSLSSVVTVPSSSLGTQTYICNVNHKPSNTKVDKRVEPKSCDKTHTCPPCPAPELLGGPSVFLFPPKPKDTLMISRTPEVTCVVVDVSHEDPEVKFNWYVDGVEVHNAKTKPREEQYASTYRVVSVLTVLHQDWLNGKEYKCKVSNKALPAPIEKTISKAKGQPREPQVYTLPPSREEMTKNQVSLTCLVKGFYPSDIAVEWESNGQPENNYKTTPPVLDSDGSFFLYSKLTVDKSRWQQGNVFSCSVMHEALHNHYTQKSLSLSPGK

SEQ ID NO: 6801 - protein, 446 aa, Artificial Sequence
  source: /note="Description of Artificial Sequence: Synthetic polypeptide"
QSVEESGGRLVMPGTPLTLTCTVSGFSLSSNAISWVRQAPEKGLEWIGVIYVIGVTDYASWAQGRFTISKTSTTVDLKIPSPTTEDTATYFCARVYDSGWNHFNLWGPGTLVTVSSASTKGPSVFPLAPSSKSTSGGTAALGCLVKDYFPEPVTVSWNSGALTSGVHTFPAVLQSSGLYSLSSVVTVPSSSLGTQTYICNVNHKPSNTKVDKRVEPKSCDKTHTCPPCPAPELLGGPSVFLFPPKPKDTLMISRTPEVTCVVVDVSHEDPEVKFNWYVDGVEVHNAKTKPREEQYASTYRVVSVLTVLHQDWLNGKEYKCKVSNKALPAPIEKTISKAKGQPREPQVYTLPPSREEMTKNQVSLTCLVKGFYPSDIAVEWESNGQPENNYKTTPPVLDSDGSFFLYSKLTVDKSRWQQGNVFSCSVMHEALHNHYTQKSLSLSPGK

SEQ ID NO: 6802 - protein, 446 aa, Artificial Sequence; identical to SEQ ID NO: 6801
  source: /note="Description of Artificial Sequence: Synthetic polypeptide"

SEQ ID NO: 6803 - protein, 449 aa, Artificial Sequence
  source: /note="Description of Artificial Sequence: Synthetic polypeptide"
EVQLVESGGGLVQPGGSLRLSCAASGFTVSSNAISWVRQAPGKGLEWVGVIYVIGVTDYASSAQGRFTISRDNSKNTLYLQMNSLRAEDTAVYYCARVYDSGWNHFNLWGQGTLVTVSSASTKGPSVFPLAPSSKSTSGGTAALGCLVKDYFPEPVTVSWNSGALTSGVHTFPAVLQSSGLYSLSSVVTVPSSSLGTQTYICNVNHKPSNTKVDKRVEPKSCDKTHTCPPCPAPELLGGPSVFLFPPKPKDTLMISRTPEVTCVVVDVSHEDPEVKFNWYVDGVEVHNAKTKPREEQYASTYRVVSVLTVLHQDWLNGKEYKCKVSNKALPAPIEKTISKAKGQPREPQVYTLPPSREEMTKNQVSLTCLVKGFYPSDIAVEWESNGQPENNYKTTPPVLDSDGSFFLYSKLTVDKSRWQQGNVFSCSVMHEALHNHYTQKSLSLSPGK

SEQ ID NO: 6804 - protein, 450 aa, Artificial Sequence
  source: /note="Description of Artificial Sequence: Synthetic polypeptide"
QSVEESGGRLVTPGTPLTLTCTVSGIDLNSNGMSWVRQAPGEGLEWIGASSIDGTTYYTNWAKGRFTISKTSSTTVDLKITSPTTEDTATYFCTRGEYAGVVGSNYFDLWGQGTLVTVSSASTKGPSVFPLAPSSKSTSGGTAALGCLVKDYFPEPVTVSWNSGALTSGVHTFPAVLQSSGLYSLSSVVTVPSSSLGTQTYICNVNHKPSNTKVDKRVEPKSCDKTHTCPPCPAPELLGGPSVFLFPPKPKDTLMISRTPEVTCVVVDVSHEDPEVKFNWYVDGVEVHNAKTKPREEQYASTYRVVSVLTVLHQDWLNGKEYKCKVSNKALPAPIEKTISKAKGQPREPQVYTLPPSREEMTKNQVSLTCLVKGFYPSDIAVEWESNGQPENNYKTTPPVLDSDGSFFLYSKLTVDKSRWQQGNVFSCSVMHEALHNHYTQKSLSLSPGK

SEQ ID NO: 6805 - protein, 452 aa, Artificial Sequence
  source: /note="Description of Artificial Sequence: Synthetic polypeptide"
EVQLVESGGGLVQPGGSLRLSCAASGFTVSSNGMSWVRQAPGKGLEWVGASSIDGTTYYTNSAKGRFTISRDNSKNTLYLQMNSLRAEDTAVYYCARGEYAGVVGSNYFDLWGQGTLVTVSSASTKGPSVFPLAPSSKSTSGGTAALGCLVKDYFPEPVTVSWNSGALTSGVHTFPAVLQSSGLYSLSSVVTVPSSSLGTQTYICNVNHKPSNTKVDKRVEPKSCDKTHTCPPCPAPELLGGPSVFLFPPKPKDTLMISRTPEVTCVVVDVSHEDPEVKFNWYVDGVEVHNAKTKPREEQYASTYRVVSVLTVLHQDWLNGKEYKCKVSNKALPAPIEKTISKAKGQPREPQVYTLPPSREEMTKNQVSLTCLVKGFYPSDIAVEWESNGQPENNYKTTPPVLDSDGSFFLYSKLTVDKSRWQQGNVFSCSVMHEALHNHYTQKSLSLSPGK

SEQ ID NO: 6806 - protein, 458 aa, Artificial Sequence
  source: /note="Description of Artificial Sequence: Synthetic polypeptide"
QSMEESGGRLVTPGTPLTLTCTVSGFSLSDYALSWVRQAPGKGLEWIGMISSGDNTYYASWAKGRFTISKASTTVDLKITSPTTEDTATYFCARDKDASSGGYLVLDLLDVPDGMDLWGPGTLVTVSSASTKGPSVFPLAPSSKSTSGGTAALGCLVKDYFPEPVTVSWNSGALTSGVHTFPAVLQSSGLYSLSSVVTVPSSSLGTQTYICNVNHKPSNTKVDKRVEPKSCDKTHTCPPCPAPELLGGPSVFLFPPKPKDTLMISRTPEVTCVVVDVSHEDPEVKFNWYVDGVEVHNAKTKPREEQYASTYRVVSVLTVLHQDWLNGKEYKCKVSNKALPAPIEKTISKAKGQPREPQVYTLPPSREEMTKNQVSLTCLVKGFYPSDIAVEWESNGQPENNYKTTPPVLDSDGSFFLYSKLTVDKSRWQQGNVFSCSVMHEALHNHYTQKSLSLSPGK

SEQ ID NO: 6807 - protein, 449 aa, Artificial Sequence
  source: /note="Description of Artificial Sequence: Synthetic polypeptide"
EVQLVESGGGLVQPGGSLRLSCAASGFTVSAYAMSWVRQAPGKGLEWVAVIYVIGATDYASSAKGRFTISRDNSKNTLYLQMNSLRAEDTAVYYCARVYDSVWNHFNLWGQGTLVTVSSASTKGPSVFPLAPSSKSTSGGTAALGCLVKDYFPEPVTVSWNSGALTSGVHTFPAVLQSSGLYSLSSVVTVPSSSLGTQTYICNVNHKPSNTKVDKRVEPKSCDKTHTCPPCPAPELLGGPSVFLFPPKPKDTLMISRTPEVTCVVVDVSHEDPEVKFNWYVDGVEVHNAKTKPREEQYASTYRVVSVLTVLHQDWLNGKEYKCKVSNKALPAPIEKTISKAKGQPREPQVYTLPPSREEMTKNQVSLTCLVKGFYPSDIAVEWESNGQPENNYKTTPPVLDSDGSFFLYSKLTVDKSRWQQGNVFSCSVMHEALHNHYTQKSLSLSPGK

SEQ ID NO: 6808 - protein, 446 aa, Artificial Sequence
  source: /note="Description of Artificial Sequence: Synthetic polypeptide"
QSLEESGGRLVTPGGSLTLTCTVSGIDLSSNAISWVRQAPEKGLEWIAVIYVVGATDYASWAKGRFTISRTSTTVDLKMTSLTTEDTATYFCARVYDSGWNHFNLWGPGTLVTVSSASTKGPSVFPLAPSSKSTSGGTAALGCLVKDYFPEPVTVSWNSGALTSGVHTFPAVLQSSGLYSLSSVVTVPSSSLGTQTYICNVNHKPSNTKVDKRVEPKSCDKTHTCPPCPAPELLGGPSVFLFPPKPKDTLMISRTPEVTCVVVDVSHEDPEVKFNWYVDGVEVHNAKTKPREEQYASTYRVVSVLTVLHQDWLNGKEYKCKVSNKALPAPIEKTISKAKGQPREPQVYTLPPSREEMTKNQVSLTCLVKGFYPSDIAVEWESNGQPENNYKTTPPVLDSDGSFFLYSKLTVDKSRWQQGNVFSCSVMHEALHNHYTQKSLSLSPGK

SEQ ID NO: 6809 - protein, 449 aa, Artificial Sequence
  source: /note="Description of Artificial Sequence: Synthetic polypeptide"
EVQLVESGGGLVQPGGSLRLSCAASGFTVSSNAISWVRQAPGKGLEWVAVIYVVGATDYASSAKGRFTISRDNSKNTLYLQMNSLRAEDTAVYYCARVYDSGWNHFNLWGQGTLVTVSSASTKGPSVFPLAPSSKSTSGGTAALGCLVKDYFPEPVTVSWNSGALTSGVHTFPAVLQSSGLYSLSSVVTVPSSSLGTQTYICNVNHKPSNTKVDKRVEPKSCDKTHTCPPCPAPELLGGPSVFLFPPKPKDTLMISRTPEVTCVVVDVSHEDPEVKFNWYVDGVEVHNAKTKPREEQYASTYRVVSVLTVLHQDWLNGKEYKCKVSNKALPAPIEKTISKAKGQPREPQVYTLPPSREEMTKNQVSLTCLVKGFYPSDIAVEWESNGQPENNYKTTPPVLDSDGSFFLYSKLTVDKSRWQQGNVFSCSVMHEALHNHYTQKSLSLSPGK

SEQ ID NO: 6810 - protein, 446 aa, Artificial Sequence
  source: /note="Description of Artificial Sequence: Synthetic polypeptide"
QSVEESGGRLVTPGTPLTLTCTVSGFSLSNYAMTWVRQAPGKGLEWIGVISFGGNTYYANWAKGRFTISKTSTTVDLKITSPTTEDTATYFCARWDAENNEILNLWGQGTLVTVSSASTKGPSVFPLAPSSKSTSGGTAALGCLVKDYFPEPVTVSWNSGALTSGVHTFPAVLQSSGLYSLSSVVTVPSSSLGTQTYICNVNHKPSNTKVDKRVEPKSCDKTHTCPPCPAPELLGGPSVFLFPPKPKDTLMISRTPEVTCVVVDVSHEDPEVKFNWYVDGVEVHNAKTKPREEQYASTYRVVSVLTVLHQDWLNGKEYKCKVSNKALPAPIEKTISKAKGQPREPQVYTLPPSREEMTKNQVSLTCLVKGFYPSDIAVEWESNGQPENNYKTTPPVLDSDGSFFLYSKLTVDKSRWQQGNVFSCSVMHEALHNHYTQKSLSLSPGK

SEQ ID NO: 6811 - protein, 446 aa, Artificial Sequence
  source: /note="Description of Artificial Sequence: Synthetic polypeptide"
QSVEESGGRLVTPGTPLTLTCTVSGFSLSNYAMTWVRQAPGKGLEWIGVISFGGNTYYANWAKGRFTISKTSTTVDLKITSPTTEDTATYFCARWDAENNEILNLWGPGTLVTVSSASTKGPSVFPLAPSSKSTSGGTAALGCLVKDYFPEPVTVSWNSGALTSGVHTFPAVLQSSGLYSLSSVVTVPSSSLGTQTYICNVNHKPSNTKVDKRVEPKSCDKTHTCPPCPAPELLGGPSVFLFPPKPKDTLMISRTPEVTCVVVDVSHEDPEVKFNWYVDGVEVHNAKTKPREEQYASTYRVVSVLTVLHQDWLNGKEYKCKVSNKALPAPIEKTISKAKGQPREPQVYTLPPSREEMTKNQVSLTCLVKGFYPSDIAVEWESNGQPENNYKTTPPVLDSDGSFFLYSKLTVDKSRWQQGNVFSCSVMHEALHNHYTQKSLSLSPGK

SEQ ID NO: 6812 - protein, 449 aa, Artificial Sequence
  source: /note="Description of Artificial Sequence: Synthetic polypeptide"
QSVEESGGRLVTPGTPLTLTCTVSGIDLSNYAMGWVRQAPGKGLEYIGMIGVNGRAWYATWAKGRFTISKTSPTVDLKITSPTTEDTATYFCARLIDERSTYSYVFDLWGQGTLVTVSSASTKGPSVFPLAPSSKSTSGGTAALGCLVKDYFPEPVTVSWNSGALTSGVHTFPAVLQSSGLYSLSSVVTVPSSSLGTQTYICNVNHKPSNTKVDKRVEPKSCDKTHTCPPCPAPELLGGPSVFLFPPKPKDTLMISRTPEVTCVVVDVSHEDPEVKFNWYVDGVEVHNAKTKPREEQYASTYRVVSVLTVLHQDWLNGKEYKCKVSNKALPAPIEKTISKAKGQPREPQVYTLPPSREEMTKNQVSLTCLVKGFYPSDIAVEWESNGQPENNYKTTPPVLDSDGSFFLYSKLTVDKSRWQQGNVFSCSVMHEALHNHYTQKSLSLSPGK

SEQ ID NO: 6813 - protein, 449 aa, Artificial Sequence
  source: /note="Description of Artificial Sequence: Synthetic polypeptide"
QSVEESGGRLVPPGTPLTLTCTVSGIDLSSYAMGWVRQAPGKGLEYIGMIDVSGSTYYADWAKGRLTISKTPTTVDLEITSPTTEDTATYFCARLIDERSTYSYAFDLWGQGTLVTVSSASTKGPSVFPLAPSSKSTSGGTAALGCLVKDYFPEPVTVSWNSGALTSGVHTFPAVLQSSGLYSLSSVVTVPSSSLGTQTYICNVNHKPSNTKVDKRVEPKSCDKTHTCPPCPAPELLGGPSVFLFPPKPKDTLMISRTPEVTCVVVDVSHEDPEVKFNWYVDGVEVHNAKTKPREEQYASTYRVVSVLTVLHQDWLNGKEYKCKVSNKALPAPIEKTISKAKGQPREPQVYTLPPSREEMTKNQVSLTCLVKGFYPSDIAVEWESNGQPENNYKTTPPVLDSDGSFFLYSKLTVDKSRWQQGNVFSCSVMHEALHNHYTQKSLSLSPGK

SEQ ID NO: 6814 - protein, 450 aa, Artificial Sequence
  source: /note="Description of Artificial Sequence: Synthetic polypeptide"
QSLEESGGRLVTPGTPLTLTCTASGFSLSSYDMSWVRQAPGKGLEWIGIIYAGSASTWFASWVKGRFTISKTSTTVDLKMTSLTTEDTATYFCARVGYSGYGYDDNLDMWGQGTLVTVSSASTKGPSVFPLAPSSKSTSGGTAALGCLVKDYFPEPVTVSWNSGALTSGVHTFPAVLQSSGLYSLSSVVTVPSSSLGTQTYICNVNHKPSNTKVDKRVEPKSCDKTHTCPPCPAPELLGGPSVFLFPPKPKDTLMISRTPEVTCVVVDVSHEDPEVKFNWYVDGVEVHNAKTKPREEQYASTYRVVSVLTVLHQDWLNGKEYKCKVSNKALPAPIEKTISKAKGQPREPQVYTLPPSREEMTKNQVSLTCLVKGFYPSDIAVEWESNGQPENNYKTTPPVLDSDGSFFLYSKLTVDKSRWQQGNVFSCSVMHEALHNHYTQKSLSLSPGK

SEQ ID NO: 6815 - protein, 448 aa, Artificial Sequence
  source: /note="Description of Artificial Sequence: Synthetic polypeptide"
QSVEESGGRLVTPGTPLTLTCTASGFSLSNYWMGWVRQAPGEGLEWIGTISYDGNTYYASWAKGRFTISRTSTTVDLKMTSLTTEDTAIYFCATVNYPDYSTGAFNIWGPGTLVTVSSASTKGPSVFPLAPSSKSTSGGTAALGCLVKDYFPEPVTVSWNSGALTSGVHTFPAVLQSSGLYSLSSVVTVPSSSLGTQTYICNVNHKPSNTKVDKRVEPKSCDKTHTCPPCPAPELLGGPSVFLFPPKPKDTLMISRTPEVTCVVVDVSHEDPEVKFNWYVDGVEVHNAKTKPREEQYASTYRVVSVLTVLHQDWLNGKEYKCKVSNKALPAPIEKTISKAKGQPREPQVYTLPPSREEMTKNQVSLTCLVKGFYPSDIAVEWESNGQPENNYKTTPPVLDSDGSFFLYSKLTVDKSRWQQGNVFSCSVMHEALHNHYTQKSLSLSPGK

SEQ ID NO: 6816 - protein, 451 aa, Artificial Sequence
  source: /note="Description of Artificial Sequence: Synthetic polypeptide"
EVQLVESGGGLVQPGGSLRLSCAASGFTVSNYWMGWVRQAPGKGLEWIGTISYDGNTYYASSAKGRFTISRDNSKNTLYLQMNSLRAEDTAVYYCATVNYPDYSTGAFNIWGQGTLVTVSSASTKGPSVFPLAPSSKSTSGGTAALGCLVKDYFPEPVTVSWNSGALTSGVHTFPAVLQSSGLYSLSSVVTVPSSSLGTQTYICNVNHKPSNTKVDKRVEPKSCDKTHTCPPCPAPELLGGPSVFLFPPKPKDTLMISRTPEVTCVVVDVSHEDPEVKFNWYVDGVEVHNAKTKPREEQYASTYRVVSVLTVLHQDWLNGKEYKCKVSNKALPAPIEKTISKAKGQPREPQVYTLPPSREEMTKNQVSLTCLVKGFYPSDIAVEWESNGQPENNYKTTPPVLDSDGSFFLYSKLTVDKSRWQQGNVFSCSVMHEALHNHYTQKSLSLSPGK

SEQ ID NO: 6817 - protein, 447 aa, Artificial Sequence
  source: /note="Description of Artificial Sequence: Synthetic polypeptide"
QSVEESGGRLVTPGTPLTLTCTVSGFSLSTYYMSWVRQAPGKGLEWIGIIYVSGITDYARWAKGRFTISKTSTTVDLKMTSLTTEDTATYFCARHIDSSGWDGLGIWGQGTLVTVSSASTKGPSVFPLAPSSKSTSGGTAALGCLVKDYFPEPVTVSWNSGALTSGVHTFPAVLQSSGLYSLSSVVTVPSSSLGTQTYICNVNHKPSNTKVDKRVEPKSCDKTHTCPPCPAPELLGGPSVFLFPPKPKDTLMISRTPEVTCVVVDVSHEDPEVKFNWYVDGVEVHNAKTKPREEQYASTYRVVSVLTVLHQDWLNGKEYKCKVSNKALPAPIEKTISKAKGQPREPQVYTLPPSREEMTKNQVSLTCLVKGFYPSDIAVEWESNGQPENNYKTTPPVLDSDGSFFLYSKLTVDKSRWQQGNVFSCSVMHEALHNHYTQKSLSLSPGK

SEQ ID NO: 6818 - protein, 447 aa, Artificial Sequence
  source: /note="Description of Artificial Sequence: Synthetic polypeptide"
QSVEESGGRLVTPGTPLTLTCTVSGLTISSYYMSWVRQAPGKGLEWIGTINPGANTYFASWAKGRFTISRTSTTVDLKITSPTTEDTATYFCAREGDSNDWGVFDLWGQGTLVTVSSASTKGPSVFPLAPSSKSTSGGTAALGCLVKDYFPEPVTVSWNSGALTSGVHTFPAVLQSSGLYSLSSVVTVPSSSLGTQTYICNVNHKPSNTKVDKRVEPKSCDKTHTCPPCPAPELLGGPSVFLFPPKPKDTLMISRTPEVTCVVVDVSHEDPEVKFNWYVDGVEVHNAKTKPREEQYASTYRVVSVLTVLHQDWLNGKEYKCKVSNKALPAPIEKTISKAKGQPREPQVYTLPPSREEMTKNQVSLTCLVKGFYPSDIAVEWESNGQPENNYKTTPPVLDSDGSFFLYSKLTVDKSRWQQGNVFSCSVMHEALHNHYTQKSLSLSPGK

SEQ ID NO: 6819 - protein, 446 aa, Artificial Sequence
  source: /note="Description of Artificial Sequence: Synthetic polypeptide"
QSLEESGGRLVTPGTPLTLTCTASGFTIGRYYMSWVRQAPGKGLEWIGIIYTHGVNPDYASWAKGRFTISRPSTTVDLKITSPTTEDTATYFCARVGGFNDYSDIWGPGTLVTVSSASTKGPSVFPLAPSSKSTSGGTAALGCLVKDYFPEPVTVSWNSGALTSGVHTFPAVLQSSGLYSLSSVVTVPSSSLGTQTYICNVNHKPSNTKVDKRVEPKSCDKTHTCPPCPAPELLGGPSVFLFPPKPKDTLMISRTPEVTCVVVDVSHEDPEVKFNWYVDGVEVHNAKTKPREEQYASTYRVVSVLTVLHQDWLNGKEYKCKVSNKALPAPIEKTISKAKGQPREPQVYTLPPSREEMTKNQVSLTCLVKGFYPSDIAVEWESNGQPENNYKTTPPVLDSDGSFFLYSKLTVDKSRWQQGNVFSCSVMHEALHNHYTQKSLSLSPGK

SEQ ID NO: 6820 - protein, 449 aa, Artificial Sequence
  source: /note="Description of Artificial Sequence: Synthetic polypeptide"
EVQLVESGGGLVQPGGSLRLSCAASGFTVGRYYMSWVRQAPGKGLEWIGIIYTHGVNPDYASSAKGRFTISRDNSKNTLYLQMNSLRAEDTAVYYCARVGGFNDYSDIWGQGTLVTVSSASTKGPSVFPLAPSSKSTSGGTAALGCLVKDYFPEPVTVSWNSGALTSGVHTFPAVLQSSGLYSLSSVVTVPSSSLGTQTYICNVNHKPSNTKVDKRVEPKSCDKTHTCPPCPAPELLGGPSVFLFPPKPKDTLMISRTPEVTCVVVDVSHEDPEVKFNWYVDGVEVHNAKTKPREEQYASTYRVVSVLTVLHQDWLNGKEYKCKVSNKALPAPIEKTISKAKGQPREPQVYTLPPSREEMTKNQVSLTCLVKGFYPSDIAVEWESNGQPENNYKTTPPVLDSDGSFFLYSKLTVDKSRWQQGNVFSCSVMHEALHNHYTQKSLSLSPGK

SEQ ID NO: 6821 - protein, 448 aa, Artificial Sequence
  source: /note="Description of Artificial Sequence: Synthetic polypeptide"
QSLEESGGRLVTPGTPLTLTCTASGFSLSSYAMGWFRQAPGKGLEWIAYIFASGSTYYASWAKGRFTISKTSTTVELKITSLTTEDTATYFCARGSGARFFPNYFAIWGPGTLVTVSSASTKGPSVFPLAPSSKSTSGGTAALGCLVKDYFPEPVTVSWNSGALTSGVHTFPAVLQSSGLYSLSSVVTVPSSSLGTQTYICNVNHKPSNTKVDKRVEPKSCDKTHTCPPCPAPELLGGPSVFLFPPKPKDTLMISRTPEVTCVVVDVSHEDPEVKFNWYVDGVEVHNAKTKPREEQYASTYRVVSVLTVLHQDWLNGKEYKCKVSNKALPAPIEKTISKAKGQPREPQVYTLPPSREEMTKNQVSLTCLVKGFYPSDIAVEWESNGQPENNYKTTPPVLDSDGSFFLYSKLTVDKSRWQQGNVFSCSVMHEALHNHYTQKSLSLSPGK

SEQ ID NO: 6822 - protein, 449 aa, Artificial Sequence
  source: /note="Description of Artificial Sequence: Synthetic polypeptide"
QSVEESGGRLVTPGTPLTLTCTVSGFSLSTYTMNWVRQAPGKGLEYIGFISSSSSIDYVSWAKGRFTISKTSTTVDLKITSPTTEDTATYFCARDFYADYIGGGYPYIWGPGTLVTVSSASTKGPSVFPLAPSSKSTSGGTAALGCLVKDYFPEPVTVSWNSGALTSGVHTFPAVLQSSGLYSLSSVVTVPSSSLGTQTYICNVNHKPSNTKVDKRVEPKSCDKTHTCPPCPAPELLGGPSVFLFPPKPKDTLMISRTPEVTCVVVDVSHEDPEVKFNWYVDGVEVHNAKTKPREEQYASTYRVVSVLTVLHQDWLNGKEYKCKVSNKALPAPIEKTISKAKGQPREPQVYTLPPSREEMTKNQVSLTCLVKGFYPSDIAVEWESNGQPENNYKTTPPVLDSDGSFFLYSKLTVDKSRWQQGNVFSCSVMHEALHNHYTQKSLSLSPGK

SEQ ID NO: 6823 - protein, 448 aa, Artificial Sequence
  source: /note="Description of Artificial Sequence: Synthetic polypeptide"
QVQLVQPGAEVKKPGTSVKLSCKASGYTFTTYWMHWVRQAPGQGLEWIGEINPTNGHTNYNQKFQGRATLTVDKSTSTAYMELSSLRSEDTAVYYCARNYVGSIFDYWGQGTLLTVSSASTKGPSVFPLAPSSKSTSGGTAALGCLVKDYFPEPVTVSWNSGALTSGVHTFPAVLQSSGLYSLSSVVTVPSSSLGTQTYICNVNHKPSNTKVDKRVEPKSCDKTHTCPPCPAPELLGGPSVFLFPPKPKDTLMISRTPEVTCVVVDVSHEDPEVKFNWYVDGVEVHNAKTKPREEQYNSTYRVVSVLTVLHQDWLNGKEYKCKVSNKALPAPIEKTISKAKGQPREPQVYTLPPSREEMTKNQVSLTCLVKGFYPSDIAVEWESNGQPENNYKTTPPVLDSDGSFFLYSKLTVDKSRWQQGNVFSCSVMHEALHNHYTQKSLSLSPGK

SEQ ID NO: 6824 - protein, 446 aa, Artificial Sequence
  source: /note="Description of Artificial Sequence: Synthetic polypeptide"
QVQLQESGPGLVKPSETLSLTCTVSGGSISIYYWSWIRQPPGKGLEWIGYVYYSGSTNYNPSLKSRVTISVDTSKNQFSLKLNSVTAADTAVYYCARGGYDFWSGYFDYWGQGTLVTVSSASTKGPSVFPLAPCSRSTSESTAALGCLVKDYFPEPVTVSWNSGALTSGVHTFPAVLQSSGLYSLSSVVTVPSSNFGTQTYTCNVDHKPSNTKVDKTVERKCCVECPPCPAPPVAGPSVFLFPPKPKDTLMISRTPEVTCVVVDVSHEDPEVQFNWYVDGVEVHNAKTKPREEQFNSTFRVVSVLTVVHQDWLNGKEYKCKVSNKGLPAPIEKTISKTKGQPREPQVYTLPPSREEMTKNQVSLTCLVKGFYPSDIAVEWESNGQPENNYKTTPPMLDSDGSFFLYSKLTVDKSRWQQGNVFSCSVMHEALHNHYTQKSLSLSPGK

SEQ ID NO: 6825 - protein, 444 aa, Artificial Sequence
  source: /note="Description of Artificial Sequence: Synthetic polypeptide"
QVQLVQSGAEVKKPGSSVKVSCKASGYTFTDFYINWVRQAPGQGLEWIGEIYPYSGHAYYNEKFKARVTITADKSTSTAYMELSSLRSEDTAVYYCARWDFLDYWGQGTTVTVSSASTKGPSVFPLAPSSKSTSGGTAALGCLVKDYFPEPVTVSWNSGALTSGVHTFPAVLQSSGLYSLSSVVTVPSSSLGTQTYICNVNHKPSNTKVDKKVEPKSCDKTHTCPPCPAPPVAGPSVFLFPPKPKDTLMISRTPEVTCVVVDVSHEDPEVKFNWYVDGVEVHNAKTKPREEQYNSTYRVVSVLTVLHQDWLNGKEYKCKVSNKGLPSSIEKTISKAKGQPREPQVYTLPPSRDELTKNQVSLTCLVKGFYPSDIAVEWESNGQPENNYKTTPPVLDSDGSFFLYSKLTVDKSRWQQGNVFSCSVMHEALHNHYTQKSLSLSPGK

SEQ ID NO: 6826 - protein, 445 aa, Artificial Sequence
  source: /note="Description of Artificial Sequence: Synthetic polypeptide"
QVQLVQSGAEVKKPGASVKVSCKASGYTFTSYSISWVRQAPGQGLEWMGWISVYNGNTNYAQKFQGRVTMTTDTSTSTAYLELRSLRSDDTAVYYCARDPIAAGYWGQGTLVTVSSASTKGPSVFPLAPSSKSTSGGTAALGCLVKDYFPEPVTVSWNSGALTSGVHTFPAVLQSSGLYSLSSVVTVPSSSLGTQTYICNVNHKPSNTKVDKKVEPKSCDKTHTCPPCPAPELLGGPSVFLFPPKPKDTLMISRTPEVTCVVVDVSHEDPEVKFNWYVDGVEVHNAKTKPREEQYNSTYRVVSVLTVLHQDWLNGKEYKCKVSNKALPAPIEKTISKAKGPREPQVYTLPPSREEMTKNQVSLTCLVKGFYPSDIAVEWESNGQPENNYKTTPPVLDSDGSFFLYSKLTVDKSRWQQGNVFSCSVMHEALHNHYTQKSLSLSPGK

SEQ ID NO: 6827 - protein, 450 aa, Artificial Sequence
  source: /note="Description of Artificial Sequence: Synthetic polypeptide"
EVQLLESGGGLVQPGGSLRLSCTASGFTFSSYAMNWVRQAPGKGLEWVSAISGSGGTTFYADSVKGRFTISRDNSRTTLYLQMNSLRAEDTAVYYCAKDLGWSDSYYYYYGMDVWGQGTTVTVSSASTKGPSVFPLAPCSRSTSESTAALGCLVKDYFPEPVTVSWNSGALTSGVHTFPAVLQSSGLYSLSSVVTVPSSNFGTQTYTCNVDHKPSNTKVDKTVERKCCVECPPCPAPPVAGPSVFLFPPKPKDTLMISRTPEVTCVVVDVSHEDPEVQFNWYVDGVEVHNAKTKPREEQFNSTFRVVSVLTVVHQDWLNGKEYKCKVSNKGLPAPIEKTISKTKGQPREPQVYTLPPSREEMTKNQVSLTCLVKGFYPSDIAVEWESNGQPENNYKTTPPMLDSDGSFFLYSKLTVDKSRWQQGNVFSCSVMHEALHNHYTQKSLSLSPG

SEQ ID NO: 6828 - protein, 448 aa, Artificial Sequence
  source: /note="Description of Artificial Sequence: Synthetic polypeptide"
EVQLVQSGGGLVKPGGSLRLSCAASGFTFSSFAMHWVRQAPGKGLEWISVIDTRGATYYADSVKGRFTISRDNAKNSLYLQMNSLRAEDTAVYYCARLGNFYYGMDVWGQGTTVTVSSASTKGPSVFPLAPSSKSTSGGTAALGCLVKDYFPEPVTVSWNSGALTSGVHTFPAVLQSSGLYSLSSVVTVPSSSLGTQTYICNVNHKPSNTKVDKKVEPKSCDKTHTCPPCPAPELLGGPSVFLFPPKPKDTLMISRTPEVTCVVVDVSHEDPEVKFNWYVDGVEVHNAKTKPREEQYNSTYRVVSVLTVLHQDWLNGKEYKCKVSNKALPAPIEKTISKAKGQPREPQVYTLPPSRDELTKNQVSLTCLVKGFYPSDIAVEWESNGQPENNYKTTPPVLDSDGSFFLYSKLTVDKSRWQQGNVFSCSVMHEALHNHYTQKSLSLSPGK

SEQ ID NO: 6829 - protein, 447 aa, Artificial Sequence
  source: /note="Description of Artificial Sequence: Synthetic polypeptide"
QVQLQQSGPGLVKPSQTLSLTCTVSGWSISGGWLWNWIRQPPGKGLQWIGWISWDGTNNWKPSLKDRVTISVDTSKNQFSLKLSSVTAADTAVWWCARWGRVFFDWWGQGTLVTVSSASTKGPSVFPLAPSSKSTSGGTAALGCLVKDYFPEPVTVSWNSGALTSGVHTFPAVLQSSGLYSLSSVVTVPSSSLGTQTYICNVNHKPSNTKVDKRVEPKSCDKTHTCPPCPAPELLGGPSVFLFPPKPKDTLMISRTPEVTCVVVDVSHEDPEVKFNWYVDGVEVHNAKTKPREEQYNSTYRVVSVLTVLHQDWLNGKEYKCKVSNKALPAPIEKTISKAKGQPREPQVYTLPPSREEMTKNQVSLTCLVKGFYPSDIAVEWESNGQPENNYKTTPPVLDSDGSFFLYSKLTVDKSRWQQGNVFSCSVMHEALHNHYTQKSLSLSPGK

SEQ ID NO: 6830 - protein, 449 aa, Artificial Sequence
  source: /note="Description of Artificial Sequence: Synthetic polypeptide"
QVQLQESGPGLVKPSGTLSLTCAVSGGSISSSNWWSWVRQPPGKGLEWIGEIYHSGSTNYNPSLKSRVTISVDKSKNQFSLKLSSVTAADTAVYYCARWTGRTDAFDIWGQGTMVTVSSASTKGPSVFPLAPSSKSTSGGTAALGCLVKDYFPEPVTVSWNSGALTSGVHTFPAVLQSSGLYSLSSVVTVPSSSLGTQTYICNVNHKPSNTKVDKKVEPKSCDKTHTCPPCPAPELLGGPSVFLFPPKPKDTLMISRTPEVTCVVVDVSHEDPEVKFNWYVDGVEVHNAKTKPREEQYNSTYRVVSVLTVLHQDWLNGKEYKCKVSNKALPAPIEKTISKAKGQPREPQVYTLPPSRDELTKNQVSLTCLVKGFYPSDIAVEWESNGQPENNYKTTPPVLDSDGSFFLYSKLTVDKSRWQQGNVFSCSVMHEALHNHYTQKSLSLSPGK

SEQ ID NO: 6831 - protein, 149 aa, Artificial Sequence
  source: /note="Description of Artificial Sequence: Synthetic polypeptide"
MDWTWRILFLVAAATGAHSQVQLVQSGSELKKPGASVKVPCKASGYTFTSYAMNWVRQAPGQGLEWMGWINTNTGNPTYAQGFTGRFVFSLDTSVSTAYLQISSLKAEDTAVYYCAREVVPVAMRVTHYYYGMDVWGQGTTVTVSSAST

SEQ ID NO: 6832 - protein, 149 aa, Artificial Sequence
  source: /note="Description of Artificial Sequence: Synthetic polypeptide"
MDLMCKKMKHLWFFLLLVAAPRWVLSQLQLQESGPGLLKPSETLSLTCTVSGGSISSPGYYGGWIRQPPGKGLEWIGSIYKSGSTYHNPSLKSRVTISVDTSKNQFSLKLSSVTAADTAVYYCTRPVVRYFGWFDPWGQGTLVTVSSAS

SEQ ID NO: 6833 - protein, 474 aa, Artificial Sequence
  source: /note="Description of Artificial Sequence: Synthetic polypeptide"
MDLMCKKMKHLWFFLLLVAAPRWVLSQLQLQESGPGLLKPSETLSLTCTVSGGSISSPGYYGGWIRQPPGKGLEWIGSIYKSGSTYHNPSLKSRVTISVDTSKNQFSLKLSSVTAADTAVYYCTRPVVRYFGWFDPWGQGTLVTVSSASTKGPSVFPLAPCSRSTSESTAALGCLVKDYFPEPVTVSWNSGALTSGVHTFPAVLQSSGLYSLSSVVTVPSSSLGTKTYTCNVDHKPSNTKVDKRVESKYGPPCPSCPAPEFLGGPSVFLFPPKPKDTLMISRTPEVTCVVVDVSQEDPEVQFNWYVDGVEVHNAKTKPREEQFNSTYRVVSVLTVLHQDWLNGKEYKCKVSNKGLPSSIEKTISKAKGQPREPQVYTLPPSQEEMTKNQVSLTCLVKGFYPSDIAVEWESNGQPENNYKTTPPVLDSDGSFFLYSRLTVDKSRWQEGNVFSCSVMHEALHNHYTQKSLSLSLGK

SEQ ID NO: 6834 - protein, 412 aa, Artificial Sequence
  source: /note="Description of Artificial Sequence: Synthetic polypeptide"
GWIRQPPGKGLEWIGSIYKSGSTYHNPSLKSRVTISVDTSKNQFSLKLSSVTAADTAVYYCTRPVVRYFGWFDPWGQGTLVTVSSASTKGPSVFPLAPCSRSTSESTAALGCLVKDYFPEPVTVSWNSGALTSGVHTFPAVLQSSGLYSLSSVVTVPSSSLGTKTYTCNVDHKPSNTKVDKRVESKYGPPCPPCPAPEFEGGPSVFLFPPKPKDTLMISRTPEVTCVVVDVSQEDPEVQFNWYVDGVEVHNAKTKPREEQFNSTYRVVSVLTVLHQDWLNGKEYKCKVSNKGLPSSIEKTISKAKGQPREPQVYTLPPSQEEMTKNQVSLTCLVKGFYPSDIAVEWESNGQPENNYKTTPPVLDSDGSFFLYSKLTVDKSRWQEGNVFSCSVMHEALHNHYTQKSLSLSLGK

SEQ ID NO: 6835 - protein, 143 aa, Artificial Sequence
  source: /note="Description of Artificial Sequence: Synthetic polypeptide"
MKHLWFFLLLVAAPRWVLSQVQLQESGPGLVKPSETLSLTCTVSGGSISGYYWSWIRQPPGKGLEWIGYIYYSGSTNYNPSLKSRVTISVDTSKNQFSLKLNSVTAADTAVYYCARAPLHGDYKWFHPWGQGTLVTVSSASTK

SEQ ID NO: 6836 - protein, 447 aa, Artificial Sequence
  source: /note="Description of Artificial Sequence: Synthetic polypeptide"
EVQLVESGGGLVQPGGSLRLSCAASGFTFSDYGIAWVRQAPGKGLEWVAFISDLAYTIYYADTVTGRFTISRDNSKNTLYLQMNSLRAEDTAVYYCARDNWDAMDYWGQGTLVTVSSASTKGPSVFPLAPSSKSTSGGTAALGCLVKDYFPEPVTVSWNSGALTSGVHTFPAVLQSSGLYSLSSVVTVPSSSLGTQTYICNVNHKPSNTKVDKKVEPKSCDKTHTCPPCPAPELLGGPSVFLFPPKPKDTLMISRTPEVTCVVVDVSHEDPEVKFNWYVDGVEVHNAKTKPREEQYNSTYRVVSVLTVLHQDWLNGKEYKCKVSNKALPAPIEKTISKAKGQPREPQVYTLPPSREEMTKNQVSLTCLVKGFYPSDIAVEWESNGQPENNYKTTPPVLDSDGSFFLYSKLTVDKSRWQQGNVFSCSVMHEALHNHYTQKSLSLSPGK

SEQ ID NO: 6837 - protein, 445 aa, Artificial Sequence
  source: /note="Description of Artificial Sequence: Synthetic polypeptide"
QVQLVESGGGVVQPGRSLRLSCAASGFTFSSYGMHWVRQAPGKGLEWVAFIRYDGSNKYYADSVKGRFTISRDNSKNTLYLQMNSLRAEDTAVYYCKTHGSHDNWGQGTMVTVSSASTKGPSVFPLAPSSKSTSGGTAALGCLVKDYFPEPVTVSWNSGALTSGVHTFPAVLQSSGLYSLSSVVTVPSSSLGTQTYICNVNHKPSNTKVDKKVEPKSCDKTHTCPPCPAPELLGGPSVFLFPPKPKDTLMISRTPEVTCVVVDVSHEDPEVKFNWYVDGVEVHNAKTKPREEQYNSTYRVVSVLTVLHQDWLNGKEYKCKVSNKALPAPIEKTISKAKGQPREPQVYTLPPSREEMTKNQVSLTCLVKGFYPSDIAVEWESNGQPENNYKTTPPVLDSDGSFFLYSKLTVDKSRWQQGNVFSCSVMHEALHNHYTQKSLSLSPGK

SEQ ID NO: 6838 - protein, 119 aa, Artificial Sequence
  source: /note="Description of Artificial Sequence: Synthetic polypeptide"
EVQLVESGGGVVQPGGSLRLSCAVSGFSLTTYGVHWVRQAPGKGLEWVAVIWSDGYTTYNSALKSRFTISRDNSKNTVYLQMNSLRAEDTAVYYCARNDGDYFYSMDYWGQGTLVTVSS

SEQ ID NO: 6839 - protein, 218 aa, Artificial Sequence
  source: /note="Description of Artificial Sequence: Synthetic polypeptide"
DVQMTQSPSSLSASVGDRVTITCRSSQSLVHSNGNTYLHWYQQKPGKAPKLLIYKVSNRFSGVPSRFSGSGSGTDFTLTISSLQPEDFATYYCSQSTHVPTFGQGTKVEIKRTVAAPSVFIFPPSDEQLKSGTASVVCLLNNFYPREAKVQWKVDNALQSGNSQESVTEQDSKDSTYSLSSTLTLSKADYEKHKVYACEVTHQGLSSPVTKSFNRGEC

SEQ ID NO: 6840 - protein, 447 aa, Artificial Sequence
  source: /note="Description of Artificial Sequence: Synthetic polypeptide"
EVQLVESGGGLVQPGGSLRLSCAASGFNFNDYFMNWVRQAPGKGLEWVAQMRNKNYQYGTYYAESLEGRFTISRDDSKNSLYLQMNSLKTEDTAVYYCARESYYGFTSYWGQGTLVTVSSASTKGPSVFPLAPCSRSTSESTAALGCLVKDYFPEPVTVSWNSGALTSGVHTFPAVLQSSGLYSLSSVVTVPSSSLGTKTYTCNVDHKPSNTKVDKRVESKYGPPCPPCPAPEFLGGPSVFLFPPKPKDTLMISRTPEVTCVVVDVSQEDPEVQFNWYVDGVEVHNAKTKPREEQFNSTYRVVSVLTVLHQDWLNGKEYKCKVSNKGLPSSIEKTISKAKGQPREPQVYTLPPSQEEMTKNQVSLTCLVKGFYPSDIAVEWESNGQPENNYKTTPPVLDSDGSFFLYSRLTVDKSRWQEGNVFSCSVMHEALHNHYTQKSLSLSLGK

SEQ ID NO: 6841 - protein, 443 aa, Artificial Sequence
  source: /note="Description of Artificial Sequence: Synthetic polypeptide"
VTLRESGPALVKPTQTLTLTCTVSGFSLSAYSVNWIRQPPGKALEWLAMIWGDGKIVYNSALKSRLTISKDTSKNQVVLTMTNMDPVDTATYYCAGDGYYPYAMDNWGQGSLVTVSSASTKGPSVFPLAPCSRSTSESTAALGCLVKDYFPEPVTVSWNSGALTSGVHTFPAVLQSSGLYSLSSVVTVPSSSLGTKTYTCNVDHKPSNTKVDKRVESKYGPPCPPCPAPEFLGGPSVFLFPPKPKDTLMISRTPEVTCVVVDVSQEDPEVQFNWYVDGVEVHNAKTKPREEQFNSTYRVVSVLTVLHQDWLNGKEYKCKVSNKGLPSSIEKTISKAKGQPREPQVYTLPPSQEEMTKNQVSLTCLVKGFYPSDIAVEWESNGQPENNYKTTPPVLDSDGSFFLYSRLTVDKSRWQEGNVFSCSVMHEALHNHYTQKSLSLSLG

SEQ ID NO: 6842 - protein, 444 aa, Artificial Sequence
  source: /note="Description of Artificial Sequence: Synthetic polypeptide"
QVTLRESGPALVKPTQTLTLTCTVSGFSLSAYSVNWIRQPPGKALEWLAMIWGDGKIVYNSALKSRLTISKDTSKNQVVLTMTNMDPVDTATYYCAGDGYYPYAMDNWGQGSLVTVSSASTKGPSVFPLAPCSRSTSESTAALGCLVKDYFPEPVTVSWNSGALTSGVHTFPAVLQSSGLYSLSSVVTVPSSSLGTKTYTCNVDHKPSNTKVDKRVESKYGPPCPPCPAPEFLGGPSVFLFPPKPKDTLMISRTPEVTCVVVDVSQEDPEVQFNWYVDGVEVHNAKTKPREEQFNSTYRVVSVLTVLHQDWLNGKEYKCKVSNKGLPSSIEKTISKAKGQPREPQVYTLPPSQEEMTKNQVSLTCLVKGFYPSDIAVEWESNGQPENNYKTTPPVLDSDGSFFLYSRLTVDKSRWQEGNVFSCSVMHEALHNHYTQKSLSLSLG

SEQ ID NO: 6843 - protein, 444 aa, Artificial Sequence
  source: /note="Description of Artificial Sequence: Synthetic polypeptide"
VTLRESGPALVKPTQTLTLTCTVSGFSLSAYSVNWIRQPPGKALEWLAMIWGDGKIVYNSALKSRLTISKDTSKNQVVLTMTNMDPVDTATYYCAGDGYYPYAMDNWGQGSLVTVSSASTKGPSVFPLAPCSRSTSESTAALGCLVKDYFPEPVTVSWNSGALTSGVHTFPAVLQSSGLYSLSSVVTVPSSSLGTKTYTCNVDHKPSNTKVDKRVESKYGPPCPPCPAPEFLGGPSVFLFPPKPKDTLMISRTPEVTCVVVDVSQEDPEVQFNWYVDGVEVHNAKTKPREEQFNSTYRVVSVLTVLHQDWLNGKEYKCKVSNKGLPSSIEKTISKAKGQPREPQVYTLPPSQEEMTKNQVSLTCLVKGFYPSDIAVEWESNGQPENNYKTTPPVLDSDGSFFLYSRLTVDKSRWQEGNVFSCSVMHEALHNHYTQKSLSLSLGK

SEQ ID NO: 6844 - protein, 445 aa, Artificial Sequence
  source: /note="Description of Artificial Sequence: Synthetic polypeptide"
QVTLRESGPALVKPTQTLTLTCTVSGFSLSAYSVNWIRQPPGKALEWLAMIWGDGKIVYNSALKSRLTISKDTSKNQVVLTMTNMDPVDTATYYCAGDGYYPYAMDNWGQGSLVTVSSASTKGPSVFPLAPCSRSTSESTAALGCLVKDYFPEPVTVSWNSGALTSGVHTFPAVLQSSGLYSLSSVVTVPSSSLGTKTYTCNVDHKPSNTKVDKRVESKYGPPCPPCPAPEFLGGPSVFLFPPKPKDTLMISRTPEVTCVVVDVSQEDPEVQFNWYVDGVEVHNAKTKPREEQFNSTYRVVSVLTVLHQDWLNGKEYKCKVSNKGLPSSIEKTISKAKGQPREPQVYTLPPSQEEMTKNQVSLTCLVKGFYPSDIAVEWESNGQPENNYKTTPPVLDSDGSFFLYSRLTVDKSRWQEGNVFSCSVMHEALHNHYTQKSLSLSLGK

SEQ ID NO: 6845 - protein, 448 aa, Artificial Sequence
  source: /note="Description of Artificial Sequence: Synthetic polypeptide"
EVQLVESGGGLVQPGGSLRLSCAASGFTFISYAMSWVRQAPGKGLEWVASISSGGNTYYPDSVKGRFTISRDNAKNSLYLQMNSLRAEDTAVYYCARLDGYYFGFAYWGQGTLVTVSSASTKGPSVFPLAPSSKSTSGGTAALGCLVKDYFPEPVTVSWNSGALTSGVHTFPAVLQSSGLYSLSSVVTVPSSSLGTQTYICNVNHKPSNTKVDKKVEPKSCDKTHTCPPCPAPEALGAPSVFLFPPKPKDTLMISRTPEVTCVVVDVSHEDPEVKFNWYVDGVEVHNAKTKPREEQYNSTYRVVSVLTVLHQDWLNGKEYKCKVSNKALPAPIEKTISKAKGQPREPQVYTLPPSREEMTKNQVSLTCLVKGFYPSDIAVEWESNGQPENNYKTTPPVLDSDGSFFLYSKLTVDKSRWQQGNVFSCSVMHEALHNHYTQKSLSLSPGK

SEQ ID NO: 6846 - protein, 450 aa, Artificial Sequence
  source: /note="Description of Artificial Sequence: Synthetic polypeptide"
EVQLVESGGGVVQPGRSLRLSCAASGFTFSSYGMHWVRQAPGKGLEWVAIIWYDGSNKYYADSVKGRFTISRDNSKNTLYLQMNSLRAEDTAVYYCARLWFGDLDAFDIWGQGTMVTVSSASTKGPSVFPLAPSSKSTSGGTAALGCLVKDYFPEPVTVSWNSGALTSGVHTFPAVLQSSGLYSLSSVVTVPSSSLGTQTYICNVNHKPSNTKVDKRVEPKSCDKTHTCPPCPAPELLGGPSVFLFPPKPKDTLMISRTPEVTCVVVDVSHEDPEVKFNWYVDGVEVHNAKTKPREEQYNSTYRVVSVLTVLHQDWLNGKEYKCKVSNKALPAPIEKTISKAKGQPREPQVYTLPPSREEMTKNQVSLTCLVKGFYPSDIAVEWESNGQPENNYKTTPPVLDSDGSFFLYSKLTVDKSRWQQGNVFSCSVMHEALHNHYTQKSLSLSPGK

SEQ ID NO: 6847 - protein, 449 aa, Artificial Sequence
  source: /note="Description of Artificial Sequence: Synthetic polypeptide"
QVQLVQSGAEVKKPGASVKVSCKASGYTFTNYGLSWVRQAPGQGLEWMGWISANNGDTNYGQEFQGRVTMTTDTSTSTAYMELRSLRSDDTAVYYCARDSSSSWARWFFDLWGRGTLVTVSSASTKGPSVFPLAPCSRSTSESTAALGCLVKDYFPEPVTVSWNSGALTSGVHTFPAVLQSSGLYSLSSVVTVPSSSLGTKTYTCNVDHKPSNTKVDKRVESKYGPPCPSCPAPEFLGGPSVFLFPPKPKDTLMISRTPEVTCVVVDVSQEDPEVQFNWYVDGVEVHNAKTKPREEQFNSTYRVVSVLTVLHQDWLNGKEYKCKVSNKGLPSSIEKTISKAKGQPREPQVYTLPPSQEEMTKNQVSLTCLVKGFYPSDIAVEWESNGQPENNYKTTPPVLDSDGSFFLYSRLTVDKSRWQEGNVFSCSVMHEALHNHYTQKSLSLSLGK

SEQ ID NO: 6848 - protein, 453 aa, Artificial Sequence
  source: /note="Description of Artificial Sequence: Synthetic polypeptide"
EVQLVESGGGLVQPGRSLRLSCAASGFTFDDYAMHWVRQAPGKGLEWVSGINWSSGGIGYADSVKGRFTISRDNAKNSLYLQMNSLRAEDTALYYCARDIGGFGEFYWNFGLWGRGTLVTVSSASTKGPSVFPLAPSSKSTSGGTAALGCLVKDYFPEPVTVSWNSGALTSGVHTFPAVLQSSGLYSLSSVVTVPSSSLGTQTYICNVNHKPSNTKVDKRVEPKSCDKTHTCPPCPAPELLGGPSVFLFPPKPKDTLMISRTPEVTCVVVDVSHEDPEVKFNWYVDGVEVHNAKTKPREEQYNSTYRVVSVLTVLHQDWLNGKEYKCKVSNKALPAPIEKTISKAKGQPREPQVYTLPPSREEMTKNQVSLTCLVKGFYPSDIAVEWESNGQPENNYKTTPPVLDSDGSFFLYSKLTVDKSRWQQGNVFSCSVMHEALHNHYTQKSLSLSPGK

SEQ ID NO: 6849 - protein, 445 aa, Artificial Sequence
  source: /note="Description of Artificial Sequence: Synthetic polypeptide"
QVQLVQSGAEVKKPGSSVKVSCKASGYSFTDYHIHWVRQAPGQGLEWMGVINPMYGTTDYNQRFKGRVTITADESTSTAYMELSSLRSEDTAVYYCARYDYFTGTGVYWGQGTLVTVSSASTKGPSVFPLAPCSRSTSESTAALGCLVKDYFPEPVTVSWNSGALTSGVHTFPAVLQSSGLYSLSSVVTVPSSSLGTKTYTCNVDHKPSNTKVDKRVESKYGPPCPPCPAPEFLGGPSVFLFPPKPKDTLMISRTPEVTCVVVDVSQEDPEVQFNWYVDGVEVHNAKTKPREEQFNSTYRVVSVLTVLHQDWLNGKEYKCKVSNKGLPSSIEKTISKAKGQPREPQVYTLPPSQEEMTKNQVSLTCLVKGFYPSDIAVEWESNGQPENNYKTTPPVLDSDGSFFLYSRLTVDKSRWQEGNVFSCSVMHEALHNHYTQKSLSLSLG

SEQ ID NO: 6850 - protein, 452 aa, Artificial Sequence
  source: /note="Description of Artificial Sequence: Synthetic polypeptide"
EVQLVESGGGLVQPGGSLRLSCAASGFTFSDYTMLWVRQAPGKGLEWVAIIKSGGSYSYYPDSVKGRFTISRDNAKNSLYLQMNSLRAEDTAVYYCARDGDYGSSYGAMDYWGQGTLVTVSSASTKGPSVFPLAPSSKSTSGGTAALGCLVKDYFPEPVTVSWNSGALTSGVHTFPAVLQSSGLYSLSSVVTVPSSSLGTQTYICNVNHKPSNTKVDKKVEPKSCDKTHTCPPCPAPEAAGGPSVFLFPPKPKDTLMISRTPEVTCVVVDVSHEDPEVKFNWYVDGVEVHNAKTKPREEQYNSTYRVVSVLTVLHQDWLNGKEYKCKVSNKALPAPIEKTISKAKGQPREPQVYTLPPSRDELTKNQVSLTCLVKGFYPSDIAVEWESNGQPENNYKTTPPVLDSDGSFFLYSKLTVDKSRWQQGNVFSCSVMHEALHNHYTQKSLSLSPGK

SEQ ID NO: 6851 - protein, 457 aa, Artificial Sequence
  source: /note="Description of Artificial Sequence: Synthetic polypeptide"
EVQLVESGGGLVQPGGSLRLSCAASGFTFSNYWMNWVRQAPGKGLEWVAAINQDGSEKYYVGSVKGRFTISRDNAKNSLYLQMNSLRVEDTAVYYCVRDYYDILTDYYIHYWYFDLWGRGTLVTVSSASTKGPSVFPLAPSSKSTSGGTAALGCLVKDYFPEPVTVSWNSGALTSGVHTFPAVLQSSGLYSLSSVVTVPSSSLGTQTYICNVNHKPSNTKVDKRVEPKSCDKTHTCPPCPAPELLGGPSVFLFPPKPKDTLMISRTPEVTCVVVDVSHEDPEVKFNWYVDGVEVHNAKTKPREEQYNSTYRVVSVLTVLHQDWLNGKEYKCKVSNKALPAPIEKTISKAKGQPREPQVYTLPPSREEMTKNQVSLTCLVKGFYPSDIAVEWESNGQPENNYKTTPPVLDSDGSFFLYSKLTVDKSRWQQGNVFSCSVMHEALHNHYTQKSLSLSPGK

SEQ ID NO: 6852 - protein, 461 aa, Artificial Sequence
  source: /note="Description of Artificial Sequence: Synthetic polypeptide"
MEWTWRVLFLVAAATGAHSQVQLVQSGAEVKKPGASVKVSCKASGYTFTRYGISWVRQAPGQGLEWMGWISTYSGNTNYAQKLQGRVTMTTDTSTSTAYMELRSLRSDDTAVYYCARRQLYFDYWGQGTLVTVSSASTKGPSVFPLAPCSRSTSESTAALGCLVKDYFPEPVTVSWNSGALTSGVHTFPAVLQSSGLYSLSSVVTVPSSNFGTQTYTCNVDHKPSNTKVDKTVERKCCVECPPCPAPPVAGPSVFLFPPKPKDTLMISRTPEVTCVVVDVSHEDPEVQFNWYVDGVEVHNAKTKPREEQFNSTFRVVSVLTVVHQDWLNGKEYKCKVSNKGLPAPIEKTISKTKGQPREPQVYTLPPSREEMTKNQVSLTCLVKGFYPSDIAVEWESNGQPENNYKTTPPMLDSDGSFFLYSKLTVDKSRWQQGNVFSCSVMHEALHNHYTQKSLSLSPGK

SEQ ID NO: 6853 - protein, 118 aa, Artificial Sequence
  source: /note="Description of Artificial Sequence: Synthetic polypeptide"
EVQLVQSGAEVKKPGESLKISCKGSGYSFTSYWIGWVRQMPGKGLEWMGIIYPSDSDTRYSPSFQGQVTISADKSISTAYLQWSSLKASDTAMYYCARYTNWDAFDIWGQGTMVTVSS

SEQ ID NO: 6854 - protein, 450 aa, Artificial Sequence
  source: /note="Description of Artificial Sequence: Synthetic polypeptide"
QVQLVQSGAEVKKPGASVKVSCKASGYTFTNYYMHWVRQAPGQGLEWVGWINPYTGSAFYAQKFRGRVTMTRDTSISTAYMELSRLRSDDTAVYYCAREPEKFDSDDSDVWGRGTLVTVSSASTKGPSVFPLAPSSKSTSGGTAALGCLVKDYFPEPVTVSWNSGALTSGVHTFPAVLQSSGLYSLSSVVTVPSSSLGTQTYICNVNHKPSNTKVDKKVEPKSCDKTHTCPPCPAPELLGGPSVFLFPPKPKDTLMISRTPEVTCVVVDVSHEDPEVKFNWYVDGVEVHNAKTKPREEQYNSTYRVVSVLTVLHQDWLNGKEYKCKVSNKALPAPIEKTISKAKGQPREPQVYTLPPSREEMTKNQVSLTCLVKGFYPSDIAVEWESNGQPENNYKTTPPVLDSDGSFFLYSKLTVDKSRWQQGNVFSCSVMHEALHNHYTQKSLSLSPG

SEQ ID NO: 6855 - protein, 446 aa, Artificial Sequence
  source: /note="Description of Artificial Sequence: Synthetic polypeptide"
QVQLVQSGAEVKKPGASVKVSCKASGYIFITYWMTWVRQAPGQGLEWMGQIFPASGSADYNEKFEGRVTMTTDTSTSTAYMELRSLRSDDTAVYYCARGGGGFAYWGQGTLVTVSSASTKGPSVFPLAPSSKSTSGGTAALGCLVKDYFPEPVTVSWNSGALTSGVHTFPAVLQSSGLYSLSSVVTVPSSSLGTQTYICNVNHKPSNTKVDKKVEPKSCDKTHTCPPCPAPELLGGPSVFLFPPKPKDTLMISRTPEVTCVVVDVSHEDPEVKFNWYVDGVEVHNAKTKPREEQYNSTYRVVSVLTVLHQDWLNGKEYKCKVSNKALPAPIEKTISKAKGQPREPQVYTLPPSRDELTKNQVSLTCLVKGFYPSDIAVEWESNGQPENNYKTTPPVLDSDGSFFLYSKLTVDKSRWQQGNVFSCSVMHEALHNHYTQKSLSLSPGK

SEQ ID NO: 6856 - protein, 445 aa, Artificial Sequence
  source: /note="Description of Artificial Sequence: Synthetic polypeptide"
QVQLVQSGAEVKKPGASVKVSCKASGYTFTGYIMNWVRQAPGQGLEWMGLINPYNGGTDYNPQFQDRVTITADKSTSTAYMELSSLRSEDTAVYYCARDGYDDGPYTLETWGQGTLVTVSSASTKGPSVFPLAPSSKSTSGGTAALGCLVKDYFPEPVTVSWNSGALTSGVHTFPAVLQSSGLYSLSSVVTVPSSNFGTQTYTCNVDHKPSNTKVDKTVERKSCVECPPCPAPPVAGPSVFLFPPKPKDTLMISRTPEVTCVVVDVSQEDPEVQFNWYVDGVEVHNAKTKPREEQFNSTFRVVSVLTVVHQDWLNGKEYKCKVSNKGLPAPIEKTISKTKGQPREPQVYTLPPSQEEMTKNQVSLTCLVKGFYPSDIAVEWESNGQPENNYKTTPPMLDSDGSFFLYSKLTVDKSRWQEGNVFSCSVMHEALHNHYTQKSLSLSP

SEQ ID NO: 6857 - protein, 451 aa, Artificial Sequence
  source: /note="Description of Artificial Sequence: Synthetic polypeptide"
EVQLVESGGGLEQPGGSLRLSCAGSGFTFRDYAMTWVRQAPGKGLEWVSSISGSGGNTYYADSVKGRFTISRDNSKNTLYLQMNSLRAEDTAVYYCAKDRLSITIRPRYYGLDVWGQGTTVTVSSASTKGPSVFPLAPCSRSTSESTAALGCLVKDYFPEPVTVSWNSGALTSGVHTFPAVLQSSGLYSLSSVVTVPSSSLGTKTYTCNVDHKPSNTKVDKRVESKYGPPCPPCPAPEFLGGPSVFLFPPKPKDTLMISRTPEVTCVVVDVSQEDPEVQFNWYVDGVEVHNAKTKPREEQFNSTYRVVSVLTVLHQDWLNGKEYKCKVSNKGLPSSIEKTISKAKGQPREPQVYTLPPSQEEMTKNQVSLTCLVKGFYPSDIAVEWESNGQPENNYKTTPPVLDSDGSFFLYSRLTVDKSRWQEGNVFSCSVMHEALHNHYTQKSLSLSLG

SEQ ID NO: 6858 - protein, 121 aa, Artificial Sequence [sequence omitted]

SEQ ID NO: 6859 - protein, 451 aa, Artificial Sequence
  source: /note="Description of Artificial Sequence: Synthetic polypeptide"
EVQLVQSGAEVKKPGASVKVSCKASGYTFTSYVIHWVRQRPGQGLAWMGYINPYNDGTKYNERFKGKVTITSDRSTSTVYMELSSLRSEDTAVYLCGREGIRYYGLLGDYWGQGTLVTVSSASTKGPSVFPLAPSSKSTSGGTAALGCLVKDYFPEPVTVSWNSGALTSGVHTFPAVLQSSGLYSLSSVVTVPSSSLGTQTYICNVNHKPSNTKVDKKVEPKSCDKTHTCPPCPAPELLGGPSVFLFPPKPKDTLMISRTPEVTCVVVDVSHEDPEVKFNWYVDGVEVHNAKTKPREEQYNSTYRVVSVLTVLHQDWLNGKEYKCKVSNKALPAPIEKTISKAKGQPREPQVYTLPPSRDELTKNQVSLTCLVKGFYPSDIAVEWESNGQPENNYKTTPPVLDSDGSFFLYSKLTVDKSRWQQGNVFSCSVMHEALHNHYTQKSLSLSPGK

SEQ ID NO: 6860 - protein, 447 aa, Artificial Sequence; identical to SEQ ID NO: 6840
  source: /note="Description of Artificial Sequence: Synthetic polypeptide"

SEQ ID NO: 6861 - protein, 449 aa, Artificial Sequence
  source: /note="Description of Artificial Sequence: Synthetic polypeptide"
EVQLVESGGKLLKPGGSLKLSCAASGFTFSSFAMSWFRQSPEKRLEWVAEISSGGSYTYYPDTVTGRFTISRDNAKNTLYLEMSSLRSEDTAMYYCARGLWGYYALDYWGQGTSVTVSSASTKGPSVFPLAPSSKSTSGGTAALGCLVKDYFPEPVTVSWNSGALTSGVHTFPAVLQSSGLYSLSSVVTVPSSSLGTQTYICNVNHKPSNTKVDKKVEPKSCDKTHTCPPCPAPELLGGPSVFLFPPKPKDTLMISRTPEVTCVVVDVSHEDPEVKFNWYVDGVEVHNAKTKPREEQYNSTYRVVSVLTVLHQDWLNGKEYKCKVSNKALPAPIEKTISKAKGQPREPQVYTLPPSRDELTKNQVSLTCLVKGFYPSDIAVEWESNGQPENNYKTTPPVLDSDGSFFLYSKLTVDKSRWQQGNVFSCSVMHEALHNHYTQKSLSLSPGK

SEQ ID NO: 6862 - protein, 120 aa, Artificial Sequence
  source: /note="Description of Artificial Sequence: Synthetic polypeptide"
EVQILETGGGLVKPGGSLRLSCATSGFNFNDYFMNWVRQAPGKGLEWLAQMRNKNYQYGTYYAESLEGRVTVSRDDAKNSVYLQVSSLRAEDTAIYYCTRESYYGFTSYWGQGVMVTVSS

SEQ ID NO: 6863 - protein, 166 aa, Artificial Sequence
  source: /note="Description of Artificial Sequence: Synthetic polypeptide"
METGLRWLLLVAVLSGVQCQSLEESGGRLVTPGTPLTLTCTASGFSLSNYYMTWVRQAPGKGLEWIGMIYGSDETAYANWAIGRFTISKTSTTVDLKMTSLTAADTATYFCARDDSSDWDAKFNLWGQGTLVTVSSASTKGPSVFPLAPSSKSTSGGTAALGCLVK

SEQ ID NO: 6864 - protein, 109 aa, Artificial Sequence
  source: /note="Description of Artificial Sequence: Synthetic polypeptide"
EVQLVESGGGLVQPGGSLRLSCAASGFSLSNYYMTWVRQAPGKGLEWVGMIYGSDETAYANWAIGRFTISRDNSKNTLYLQMNSLRAEDTAVYYCARDDSSDWDAKFNL

SEQ ID NO: 6865 - protein, 109 aa, Artificial Sequence
  source: /note="Description of Artificial Sequence: Synthetic polypeptide"
EVQLVESGGGLVQPGGSLRLSCAASGFSLSNYYMTWVRQAPGKGLEWVGMIYGSDETAYANSAIGRFTISRDNSKNTLYLQMNSLRAEDTAVYYCARDDSSDWDAKFNL

SEQ ID NO: 6866 - protein, 128 aa, Artificial Sequence
  source: /note="Description of Artificial Sequence: Synthetic polypeptide"
METGLRWLLLVAVLKGVQCHSVEESGGRLVTPGTPLTLTCTVSGFSLSSRTMSWVRQAPGKGLEWIGYIWSGGSTYYATWAKGRFTISKTSTTVDLKITSPTTEDTATYFCARLGDTGGHAYATRLNL

SEQ ID NO: 6867 - protein, 126 aa, Artificial Sequence
  source: /note="Description of Artificial Sequence: Synthetic polypeptide"
METGLRWLLLVAVLKGVQCQSVEESGGRLVKPDETLTLTCTASGFSLEGGYMTWVRQAPGKGLEWIGISYDSGSTYYASWAKGRFTISKTSSTTVDLKMTSLTTEDTATYFCVRSLKYPTVTSDDL

SEQ ID NO: 6868 - protein, 128 aa, Artificial Sequence
  source: /note="Description of Artificial Sequence: Synthetic polypeptide"
METGLRWLLLVAVLKGVQCQSVEESGGRLVTPGTPLTLTCTVSGLSLSSNTINWVRQAPGKGLEWIGYIWSGGSTYYASWVNGRFTISKTSTTVDLKITSPTTEDTATYFCARGGYASGGYPYATRLD

SEQ ID NO: 6869 - protein, 123 aa, Artificial Sequence
  source: /note="Description of Artificial Sequence: Synthetic polypeptide"
METGLRWLLLVAVLKGVQCQSLEESGGRLVTPGTPLTLTCTVSGFTLSTNYYLSWVRQAPGKGLEWIGIIYPSGNTYCAKWAKGRFTISKTSSTTVDLKMTSPTTEDTATYFCARNYGGDESL

SEQ ID NO: 6870 - protein, 109 aa, Artificial Sequence
  source: /note="Description of Artificial Sequence: Synthetic polypeptide"
EVQLVESGGGLVQPGGSLRLSCAASGFSLSNYYVTWVRQAPGKGLEWVGIIYGSDETAYATWAIGRFTISRDNSKNTLYLQMNSLRAEDTAVYYCARDDSSDWDAKFNL

SEQ ID NO: 6871 - protein, 128 aa, Artificial Sequence
  source: /note="Description of Artificial Sequence: Synthetic polypeptide"
METGLRWLLLVTVLKGVQCQEQLVESGGGLVQPEGSLTLTCTASGFDFSSGYYMCWVRQAPGKGLEWIACIFTITTNTYYASWAKGRFTISKTSSTTVTLQMTSLTAADTATYLCARGIYSDNNYYAL

SEQ ID NO: 6872 - protein, 109 aa, Artificial Sequence
  source: /note="Description of Artificial Sequence: Synthetic polypeptide"
EVQLVESGGGLVQPGGSLRLSCAASGFSLSNYYVTWVRQAPGKGLEWVGIIYGSDETAYATSAIGRFTISRDNSKNTLYLQMNSLRAEDTAVYYCARDDSSDWDAKFNL

SEQ ID NO: 6873 - protein, 128 aa, Artificial Sequence
  source: /note="Description of Artificial Sequence: Synthetic polypeptide"
METGLRWLLLVAVLKGVQCQQQLVESGGGLVKPGASLTLTCKASGFSFSSGYYMCWVRQAPGKGLESIACIFTITDNTYYANWAKGRFTISKPSSPTVTLQMTSLTAADTATYFCARGIYSTDNYYAL

SEQ ID NO: 6874 - protein, 133 aa, Artificial Sequence
  source: /note="Description of Artificial Sequence: Synthetic polypeptide"
METGLRWLLLVAVLKGVQCQSVEESGGRLVTPGTPLTLTCTVSGISLSSNAISWVRQAPGKGLEWIGIISYSGTTYYASWAKGRFTISKTSSTTVDLKITSPTTEDTATYFCARDDPTTVMVMLIPFGAGMDL

SEQ ID NO: 6875 - protein, 167 aa, Artificial Sequence
  source: /note="Description of Artificial Sequence: Synthetic polypeptide"
METGLRWLLLVAVLKGVQCQEQLKESGGRLVTPGTPLTLTCTASGFSLNDHAMGWVRQAPGKGLEYIGFINSGGSARYASWAEGRFTISRTSTTVDLKMTSLTTEDTATYFCVRGGAVWSIHSFDPWGPGTLVTVSSASTKGPSVFPLAPSSKSTSGGTAALGCLVK

SEQ ID NO: 6876 - protein, 119 aa, Artificial Sequence
  source: /note="Description of Artificial Sequence: Synthetic polypeptide"
METGLRWLLLVAVLKGVQCQSLEESGGDLVKPEGSLTLTCTASGFSFSSYWMCWVRQAPGKGLEWIACIVTGNGNTYYANWAKGRFTISKTSSTTVTLQMTSLTAADTATYFCAKAYDL

SEQ ID NO: 6877 - protein, 125 aa, Artificial Sequence
  source: /note="Description of Artificial Sequence: Synthetic polypeptide"
METGLRWLLLVAVPKGVQCQSLEESGGRLVTPGTPLTLTCTLSGFSLSAYYMSWVRQAPGKGLEWIGFITLSDHISYARWAKGRFTISKTSTTVDLKMTSPTTEDTATYFCARSRGWGAMGRLDL

SEQ ID NO: 6878 - protein, 121 aa, Artificial Sequence
  source: /note="Description of Artificial Sequence: Synthetic polypeptide"
METGLRWLLLVAVLKGVQCQSVEESGGRLVTPGTPLTLTCTASGFSLSSYSMTWVRQAPGKGLEYIGVIGTSGSTYYATWAKGRFTISRTSTTVALKITSPTTEDTATYFCVRSLSSITFL

SEQ ID NO: 6879 - protein, 128 aa, Artificial Sequence
  source: /note="Description of Artificial Sequence: Synthetic polypeptide"
METGLRWLLLVAVLKGVQCQEQLVESGGDLVQPEGSLTLTCTASELDFSSGYWICWVRQVPGKGLEWIGCIYTGSSGSTFYASWAKGRFTISKTSSTTVTLQMTSLTAADTATYFCARGYSGFGYFKL

SEQ ID NO: 6880 - protein, 123 aa, Artificial Sequence
  source: /note="Description of Artificial Sequence: Synthetic polypeptide"
METGLRWLLLVAVLKGVQCQSVEESGGRLVTPGTPLTLTCTASGFSLSSYYMSWVRQAPGKGLEWIGIITTSGNTFYASWAKGRLTISRTSTTVDLKITSPTTEDTATYFCARTSDIFYYRNL

SEQ ID NO: 6881 - protein, 166 aa, Artificial Sequence
  source: /note="Description of Artificial Sequence: Synthetic polypeptide"
METGLRWLLLVAVLKGVQCQSLEESGGRLVTPGTPLTLTCTASGFSLSNYYVTWVRQAPGKGLEWIGIIYGSDETAYATWAIGRFTISKTSTTVDLKMTSLTAADTATYFCARDDSSDWDAKFNLWGQGTLVTVSSASTKGPSVFPLAPSSKSTSGGTAALGCLVK

SEQ ID NO: 6882 - protein, 129 aa, Artificial Sequence
  source: /note="Description of Artificial Sequence: Synthetic polypeptide"
METGLRWLLLVAVLKGVQCQSVEESGGRLVTPGTPLTLTCTVSGFSLTRHAITWVRQAPGKGLEWIGCIWSGGSTYYATWAKGRFTISKTSTTVDLRITSPTTEDTATYFCARVIGDTAGYAYFTGLDL

SEQ ID NO: 6883 - protein, 128 aa, Artificial Sequence
  source: /note="Description of Artificial Sequence: Synthetic polypeptide"
METGLRWLLLVAVLKGVQCQSLEEAGGRLVTPGTPLTLTCTVSGIDLSSYAMGWVRQAPGKGLEYIGIISSSGSTYYATWAKGRFTISQASSTTVDLKITSPTTEDSATYFCARGGAGSGGVWLLDGF

SEQ ID NO: 6884 - protein, 128 aa, Artificial Sequence
  source: /note="Description of Artificial Sequence: Synthetic polypeptide"
METGLRWLLLVAVLKGVQCQEQLKESGGRLVTPGTPLTLTCTVSGFSLNDYAVGWFRQAPGKGLEWIGYIRSSGTTAYATWAKGRFTISATSTTVDLKITSPTTEDTATYFCARGGAGSSGVWILDGF

SEQ ID NO: 6885 - protein, 128 aa, Artificial Sequence
  source: /note="Description of Artificial Sequence: Synthetic polypeptide"
METGLRWLLLVAVLKGVQCQSLEESGGDLVKPGASLTLTCTASGFSFTSTYYIYWVRQAPGKGLEWIACIDAGSSGSTYYATWVNGRFTISKTSSTTVTLQMTSLTAADTATYFCAKWDYGGNVGWGY

SEQ ID NO: 6886 - protein, 127 aa, Artificial Sequence
  source: /note="Description of Artificial Sequence: Synthetic polypeptide"
METGLRWLLLVAVLKGVQCQSLEESGGDLVKPEGSLTLTCKASGLDLGTYWFMCWVRQAPGKGLEWIACIYTGSSGSTFYASWVNGRFTISKTSSTTVTLQMTSLTAADTATYFCARGYSGYGYFKL

SEQ ID NO: 6887 - protein, 166 aa, Artificial Sequence
  source: /note="Description of Artificial Sequence: Synthetic polypeptide"
METGLRWLLLVAVLKGVQCQSLEESGGRLVTPGTPLTLTCTASGFSLSVYYMNWVRQAPGKGLEWIGFITMSDNINYASWAKGRFTISKTSTTVDLKMTSPTTEDTATYFCARSRGWGTMGRLDLWGPGTLVTVSSASTKGPSVFPLAPSSKSTSGGTAALGCLVK

SEQ ID NO: 6888 - protein, 128 aa, Artificial Sequence
  source: /note="Description of Artificial Sequence: Synthetic polypeptide"
METGLRWLLLVAVLKGVQCQSLEESGGDLVKPGASLTLTCTTSGFSFSSSYFICWVRQAPGKGLEWIACIYGGDGSTYYASWAKGRFTISKTSSTTVTLQMTSLTAADTATYFCAREWAYSQGYFGAF

SEQ ID NO: 6889 - protein, 124 aa, Artificial Sequence
  source: /note="Description of Artificial Sequence: Synthetic polypeptide"
METGLRWLLLVAVLKGVQCQSVEESGGRLVTPGTPLTLTCTVSGFSLSSYFMTWVRQAPGEGLEYIGFINPGGSAYYASWVKGRFTISKSSTTVDLKITSPTTEDTATYFCARVLIVSYGAFTI

SEQ ID NO: 6890 - protein, 124 aa, Artificial Sequence
  source: /note="Description of Artificial Sequence: Synthetic polypeptide"
METGLRWLLLVAVLKGVQCQSVEESGGRLVTPGTPLTLTCTVSGFSLSSYFMTWVRQAPGEGLEYIGFMNTGDNAYYASWAKGRFTISKTSTTVDLKITSPTTEDTATYFCARVLVVAYGAFNI

SEQ ID NO: 6891 - protein, 127 aa, Artificial Sequence
  source: /note="Description of Artificial Sequence: Synthetic polypeptide"
METGLRWLLLVAVLKGVQCQSVEESGGRLVKPDETLTLTCTVSGIDLSSYPMNWVRQAPGKGLEWIGFINTGGTIVYASWAKGRFTISKTSTTVDLKMTSPTTEDTATYFCARGSYVSSGYAYYFNV

SEQ ID NO: 6892 - protein, 126 aa, Artificial Sequence
  source: /note="Description of Artificial Sequence: Synthetic polypeptide"
METGLRWLLLVAVLKGVQCQSVEESGGRLVTPGTPLTLTCTVSGFSLSTYSINWVRQAPGKGLEWIGIIANSGTTFYANWAKGRFTVSKTSTTVDLKITSPTTEDTATYFCARESGMYNEYGKFNI

SEQ ID NO: 6893 - protein, 128 aa, Artificial Sequence
  source: /note="Description of Artificial Sequence: Synthetic polypeptide"
METGLRWLLLVAVLKGVQCQSLEESGGRLVTPGTPLTLTCTVSGIDLSAYAMIWVRQAPGEGLEWITIIYPNGITYYANWAKGRFTVSKTSTAMDLKITSPTTEDTATYFCARDAESSKNAYWGYFNV

SEQ ID NO: 6894 - protein, 128 aa, Artificial Sequence; identical to SEQ ID NO: 6893
  source: /note="Description of Artificial Sequence: Synthetic polypeptide"

SEQ ID NO: 6895 - protein, 123 aa, Artificial Sequence
  source: /note="Description of Artificial Sequence: Synthetic polypeptide"
METGLRWLLLVAVLKGVQCQSLEESGGRLVTPGTPLTLTCTVSGFSLNRNSITWVRQAPGEGLEWIGIITGSGRTYYANWAKGRFTISKTSTTVDLKMTSPTTEDTATYFCARGHPGLGSGNI

SEQ ID NO: 6896 - protein, 122 aa, Artificial Sequence
  source: /note="Description of Artificial Sequence: Synthetic polypeptide"
METGLRWLLLVAVLKGVQCQSLEESGGRLVTPGTPLTLTCTASGFSLNNYYIQWVRQAPGEGLEWIGIIYAGGSAYYATWANGRFTIAKTSSTTVDLKMTSLTTEDTATYFCARGTFDGYEL

SEQ ID NO: 6897 - protein, 124 aa, Artificial Sequence
  source: /note="Description of Artificial Sequence: Synthetic polypeptide"
METGLRWLLLVAVLKGVQCQSVEESGGRLVTPGTPLTLTCTVSGFSLSSYFMSWVRQAPGEGLEYIGFINPGGSAYYASWASGRLTISKTSTTVDLKITSPTTEDTATYFCARILIVSYGAFTI

SEQ ID NO: 6898 - protein, 167 aa, Artificial Sequence
  source: /note="Description of Artificial Sequence: Synthetic polypeptide"
METGLRWLLLVAVLKGVQCQEQLKESGGGLVTPGGTLTLTCTASGFSLNAYYMNWVRQAPGKGLEWIGFITLNNNVAYANWAKGRFTFSKTSTTVDLKMTSPTPEDTATYFCARSRGWGAMGRLDLWGHGTLVTVSSASTKGPSVFPLAPSSKSTSGGTAALGCLVK

SEQ ID NO: 6899 - protein, 128 aa, Artificial Sequence
  source: /note="Description of Artificial Sequence: Synthetic polypeptide"
METGLRWLLLVAVLKGVQCQSLEESGGRLVTPGTPLTLTCTVSGFSLSKYYMSWVRQAPEKGLKYIGYIDSTTVNTYYATWARGRFTISKTSTTVDLKITSPTSEDTATYFCARGSTYFTDGGHRLDL

SEQ ID NO: 6900 - protein, 124 aa, Artificial Sequence
  source: /note="Description of Artificial Sequence: Synthetic polypeptide"
METGLRWLLLVAVLKGVQCQSLEESGGRLVTPGTPLTLTCTVSGFSLSTYNMGWVRQAPGKGLEWIGSITIDGRTYYASWAKGRFTVSKSSTTVDLKMTSLTTGDTATYFCARILIVSYGAFTI

SEQ ID NO: 6901 - protein, 117 aa, Artificial Sequence
  source: /note="Description of Artificial Sequence: Synthetic polypeptide"
QSLEESGGRLVTPGTPLTLTCTASGFSLSNYYVTWVRQAPGKGLEWIGIIYGSDETAYATWAIGRFTISKTSTTVDLKMTSLTAADTATYFCARDDSSDWDAKFNLWGQGTLVTVSS

SEQ ID NO: 6902 - protein, 97 aa, Artificial Sequence
  source: /note="Description of Artificial Sequence: Synthetic polypeptide"
EVQLVESGGGLVQPGGSLRLSCAASGFTVSSNYMSWVRQAPGKGLEWVSVIYSGGSTYYADSVKGRFTISRDNSKNTLYLQMNSLRAEDTAVYYCAR

SEQ ID NO: 6903 - protein, 97 aa, Artificial Sequence
  source: /note="Description of Artificial Sequence: Synthetic polypeptide"
EVQLVESGGGLIQPGGSLRLSCAASGFTVSSNYMSWVRQAPGKGLEWVSVIYSGGSTYYADSVKGRFTISRDNSKNTLYLQMNSLRAEDTAVYYCAR

SEQ ID NO: 6904 - protein, 98 aa, Artificial Sequence
  source: /note="Description of Artificial Sequence: Synthetic polypeptide"
EVQLLESGGGLVQPGGSLRLSCAASGFTFSSYAMSWVRQAPGKGLEWVSVIYSGGSSTYYADSVKGRFTISRDNSKNTLYLQMNSLRAEDTAVYYCAK

SEQ ID NO: 6905 - protein, 120 aa, Artificial Sequence
  source: /note="Description of Artificial Sequence: Synthetic polypeptide"
EVQLVESGGGLVQPGGSLRLSCAASGFSLSNYYVTWVRQAPGKGLEWVGIIYGSDETAYATWAIGRFTISRDNSKNTLYLQMNSLRAEDTAVYYCARDDSSDWDAKFNLWGQGTLVTVSS

SEQ ID NO: 6906 - protein, 120 aa, Artificial Sequence
  source: /note="Description of Artificial Sequence: Synthetic polypeptide"
EVQLVESGGGLVQPGGSLRLSCAASGFSLSNYYVTWVRQAPGKGLEWVGIIYGSDETAYATSAIGRFTISRDNSKNTLYLQMNSLRAEDTAVYYCARDDSSDWDAKFNLWGQGTLVTVSS

SEQ ID NO: 6907 - protein, 166 aa, Artificial Sequence
  source: /note="Description of Artificial Sequence: Synthetic polypeptide"
METGLRWLLLVAVLKGVQCQSLEESGGRLVTPGTPLTLTCTASGFSLSNYYVTWVRQAPGKGLEWIGIIYGSDETAYATSAIGRFTISKTSTTVDLKMTSLTAADTATYFCARDDSSDWDAKFNLWGQGTLVTVSSASTKGPSVFPLAPSSKSTSGGTAALGCLVK

SEQ ID NO: 6908 - protein, 125 aa, Artificial Sequence
  source: /note="Description of Artificial Sequence: Synthetic polypeptide"
METGLRWLLLVAVLKGVQCQSLEESGGRLVTPGTPLTLTCTASGFSLSNYYVTWVRQAPGKGLEWIGIIYGSDETAYATWAIGRFTISKTSTTVDLKMTSLTAADTATYFCARDDSSDWDAKFNL

SEQ ID NO: 6909 - protein, 450 aa, Artificial Sequence
  source: /note="Description of Artificial Sequence: Synthetic polypeptide"
EVQLVESGGGLVQPGGSLRLSCAASGFSLSNYYVTWVRQAPGKGLEWVGIIYGSDETAYATWAIGRFTISRDNSKNTLYLQMNSLRAEDTAVYYCARDDSSDWDAKFNLWGQGTLVTVSSASTKGPSVFPLAPSSKSTSGGTAALGCLVKDYFPEPVTVSWNSGALTSGVHTFPAVLQSSGLYSLSSVVTVPSSSLGTQTYICNVNHKPSNTKVDKRVEPKSCDKTHTCPPCPAPELLGGPSVFLFPPKPKDTLMISRTPEVTCVVVDVSHEDPEVKFNWYVDGVEVHNAKTKPREEQYASTYRVVSVLTVLHQDWLNGKEYKCKVSNKALPAPIEKTISKAKGQPREPQVYTLPPSRDELTKNQVSLTCLVKGFYPSDIAVEWESNGQPENNYKTTPPVLDSDGSFFLYSKLTVDKSRWQQGNVFSCSVMHEALHNHYTQKSLSLSPGK

SEQ ID NO: 6910 - protein, 450 aa, Artificial Sequence
  source: /note="Description of Artificial Sequence: Synthetic polypeptide"
EVQLVESGGGLVQPGGSLRLSCAASGFSLSNYYVTWVRQAPGKGLEWVGIIYGSDETAYATSAIGRFTISRDNSKNTLYLQMNSLRAEDTAVYYCARDDSSDWDAKFNLWGQGTLVTVSSASTKGPSVFPLAPSSKSTSGGTAALGCLVKDYFPEPVTVSWNSGALTSGVHTFPAVLQSSGLYSLSSVVTVPSSSLGTQTYICNVNHKPSNTKVDKRVEPKSCDKTHTCPPCPAPELLGGPSVFLFPPKPKDTLMISRTPEVTCVVVDVSHEDPEVKFNWYVDGVEVHNAKTKPREEQYASTYRVVSVLTVLHQDWLNGKEYKCKVSNKALPAPIEKTISKAKGQPREPQVYTLPPSRDELTKNQVSLTCLVKGFYPSDIAVEWESNGQPENNYKTTPPVLDSDGSFFLYSKLTVDKSRWQQGNVFSCSVMHEALHNHYTQKSLSLSPGK

SEQ ID NO: 6911 - protein, 126 aa, Artificial Sequence
  source: /note="Description of Artificial Sequence: Synthetic polypeptide"
METGLRWLLLVAVLKGVQCQEQLKESGGRLVTPGTPLTLTCTASGFSLNDHAMGWVRQAPGKGLEYIGFINSGGSARYASWAEGRFTISRTSTTVDLKMTSLTTEDTATYFCVRGGAVWSIHSFDP

SEQ ID NO: 6912 - protein, 125 aa, Artificial Sequence
  source: /note="Description of Artificial Sequence: Synthetic polypeptide"
METGLRWLLLVAVLKGVQCQSLEESGGRLVTPGTPLTLTCTASGFSLSVYYMNWVRQAPGKGLEWIGFITMSDNINYASWAKGRFTISKTSTTVDLKMTSPTTEDTATYFCARSRGWGTMGRLDL

SEQ ID NO: 6913 - protein, 126 aa, Artificial Sequence
  source: /note="Description of Artificial Sequence: Synthetic polypeptide"
METGLRWLLLVAVLKGVQCQEQLKESGGGLVTPGGTLTLTCTASGFSLNAYYMNWVRQAPGKGLEWIGFITLNNNVAYANWAKGRFTFSKTSTTVDLKMTSPTPEDTATYFCARSRGWGAMGRLDL

SEQ ID NO: 6914 - protein, 122 aa, Artificial Sequence
  source: /note="Description of Artificial Sequence: Synthetic polypeptide"
METGLRWLLLVAVLKGVQCQSVEESGGRLVTPGTPLTLTCTVSGFSLSSYAMSWVRQAPGKGLEWIGIIGGFGTTYYATWAKGRFTISKTSTTVDLRITSPTTEDTATYFCARGGPGNGGDI

SEQ ID NO: 6915 - protein, 128 aa, Artificial Sequence
  source: /note="Description of Artificial Sequence: Synthetic polypeptide"
METGLRWLLLVAVLKGVQCQSVEESGGRLVTPGTPLTLTCTVSGIDLSDYAMSWVRQAPGKGLEWIGIIYAGSGSTWYASWAKGRFTISKTSTTVDLKITSPTTEDTATYFCARDGYDDYGDFDRLDL

SEQ ID NO: 6916 - protein, 125 aa, Artificial Sequence
  source: /note="Description of Artificial Sequence: Synthetic polypeptide"
METGLRWLLLVAVLSGVQCQSLEESGGRLVTPGTPLTLTCTASGFSLSNYYMTWVRQAPGKGLEWIGMIYGSDETAYANWAIGRFTISKTSTTVDLKMTSLTAADTATYFCARDDSSDWDAKFNL

SEQ ID NO: 6917 - protein, 450 aa, Artificial Sequence
  source: /note="Description of Artificial Sequence: Synthetic polypeptide"
EVQLVESGGGLVQPGGSLRLSCAASGFSLSNYYMTWVRQAPGKGLEWVGMIYGSDETAYANWAIGRFTISRDNSKNTLYLQMNSLRAEDTAVYYCARDDSSDWDAKFNLWGQGTLVTVSSASTKGPSVFPLAPSSKSTSGGTAALGCLVKDYFPEPVTVSWNSGALTSGVHTFPAVLQSSGLYSLSSVVTVPSSSLGTQTYICNVNHKPSNTKVDKRVEPKSCDKTHTCPPCPAPELLGGPSVFLFPPKPKDTLMISRTPEVTCVVVDVSHEDPEVKFNWYVDGVEVHNAKTKPREEQYASTYRVVSVLTVLHQDWLNGKEYKCKVSNKALPAPIEKTISKAKGQPREPQVYTLPPSRDELTKNQVSLTCLVKGFYPSDIAVEWESNGQPENNYKTTPPVLDSDGSFFLYSKLTVDKSRWQQGNVFSCSVMHEALHNHYTQKSLSLSPGK

SEQ ID NO: 6918 - protein, 450 aa, Artificial Sequence
  source: /note="Description of Artificial Sequence: Synthetic polypeptide"
EVQLVESGGGLVQPGGSLRLSCAASGFSLSNYYMTWVRQAPGKGLEWVGMIYGSDETAYANSAIGRFTISRDNSKNTLYLQMNSLRAEDTAVYYCARDDSSDWDAKFNLWGQGTLVTVSSASTKGPSVFPLAPSSKSTSGGTAALGCLVKDYFPEPVTVSWNSGALTSGVHTFPAVLQSSGLYSLSSVVTVPSSSLGTQTYICNVNHKPSNTKVDKRVEPKSCDKTHTCPPCPAPELLGGPSVFLFPPKPKDTLMISRTPEVTCVVVDVSHEDPEVKFNWYVDGVEVHNAKTKPREEQYASTYRVVSVLTVLHQDWLNGKEYKCKVSNKALPAPIEKTISKAKGQPREPQVYTLPPSRDELTKNQVSLTCLVKGFYPSDIAVEWESNGQPENNYKTTPPVLDSDGSFFLYSKLTVDKSRWQQGNVFSCSVMHEALHNHYTQKSLSLSPGK

SEQ ID NO: 6919 - protein, 164 aa, Artificial Sequence
  source: /note="Description of Artificial Sequence: Synthetic polypeptide"
METGLRWLLLVAVLKGVQCQSVEESGGRLVTPGTPLTLTCTVSGFSLSSYAMSWVRQAPGKGLEWIGIIGGFGTTYYATWAKGRFTISKTSTTVDLRITSPTTEDTATYFCARGGPGNGGDIWGQGTLVTVSSASTKGPSVFPLAPSSKSTSGGTAALGCLVKD

SEQ ID NO: 6920 - protein, 450 aa, Artificial Sequence
  source: /note="Description of Artificial Sequence: Synthetic polypeptide"
EVQLVESGGGLVQPGGSLRLSCAASGFSLSNYYVTWVRQAPGKGLEWVGIIYGSDETAYATSAIGRFTISRDNSKNTLYLQMNSLRAEDTAVYYCARDDSSDWDAKFNLWGQGTLVTVSSASTKGPSVFPLAPSSKSTSGGTAALGCLVKDYFPEPVTVSWNSGALTSGVHTFPAVLQSSGLYSLSSVVTVPSSSLGTQTYICNVNHKPSNTKVDKRVEPKSCDKTHTCPPCPAPELLGGPSVFLFPPKPKDTLMISRTPEVTCVVVDVSHEDPEVKFNWYVDGVEVHNAKTKPREEQYASTYRVVSVLTVLHQDWLNGKEYKCKVSNKALPAPIEKTISKAKGQPREPQVYTLPPSREEMTKNQVSLTCLVKGFYPSDIAVEWESNGQPENNYKTTPPVLDSDGSFFLYSKLTVDKSRWQQGNVFSCSVMHEALHNHYTQKSLSLSPGK

SEQ ID NO: 6921 - protein, 468 aa, Artificial Sequence
  source: /note="Description of Artificial Sequence: Synthetic polypeptide"
MKWVTFISLLFLFSSAYSEVQLVESGGGLVQPGGSLRLSCAASGFSLSNYYVTWVRQAPGKGLEWVGIIYGSDETAYATSAIGRFTISRDNSKNTLYLQMNSLRAEDTAVYYCARDDSSDWDAKFNLWGQGTLVTVSSASTKGPSVFPLAPSSKSTSGGTAALGCLVKDYFPEPVTVSWNSGALTSGVHTFPAVLQSSGLYSLSSVVTVPSSSLGTQTYICNVNHKPSNTKVDKRVEPKSCDKTHTCPPCPAPELLGGPSVFLFPPKPKDTLMISRTPEVTCVVVDVSHEDPEVKFNWYVDGVEVHNAKTKPREEQYASTYRVVSVLTVLHQDWLNGKEYKCKVSNKALPAPIEKTISKAKGQPREPQVYTLPPSREEMTKNQVSLTCLVKGFYPSDIAVEWESNGQPENNYKTTPPVLDSDGSFFLYSKLTVDKSRWQQGNVFSCSVMHEALHNHYTQKSLSLSPGK

SEQ ID NO: 6922 - protein, 170 aa, Artificial Sequence
  source: /note="Description of Artificial Sequence: Synthetic polypeptide"
METGLRWLLLVAVLKGVQCQSVEESGGRLVTPGTPLTLTCTVSGIDLSDYAMSWVRQAPGKGLEWIGIIYAGSGSTWYASWAKGRFTISKTSTTVDLKITSPTTEDTATYFCARDGYDDYGDFDRLDLWGPGTLVTVSSASTKGPSVFPLAPSSKSTSGGTAALGCLVKD

SEQ ID NO: 6923 - protein, 446 aa, Artificial Sequence
  source: /note="Description of Artificial Sequence: Synthetic polypeptide"
EVQLVESGGGLVQPGRSLRLSCAASRFTFDDYAMHWVRQAPGKGLEWVSGISWNSGRIGYADSVKGRFTISRDNAENSLFLQMNGLRAEDTALYYCAKGRDSFDIWGQGTMVTVSSASTKGPSVFPLAPSSKSTSGGTAALGCLVKDYFPEPVTVSWNSGALTSGVHTFPAVLQSSGLYSLSSVVTVPSSSLGTQTYICNVNHKPSNTKVDKKVEPKSCDKTHTCPPCPAPELLGGPSVFLFPPKPKDTLMISRTPEVTCVVVDVSHEDPEVKFNWYVDGVEVHNAKTKPREEQYNSTYRVVSVLTVLHQDWLNGKEYKCKVSNKALPAPIEKTISKAKGQPREPQVYTLPPSRDELTKNQVSLTCLVKGFYPSDIAVEWESNGQPENNYKTTPPVLDSDGSFFLYSKLTVDKSRWQQGNVFSCSVMHEALHNHYTQKSLSLSPGK

SEQ ID NO: 6924 - protein, 117 aa, Artificial Sequence
  source: /note="Description of Artificial Sequence: Synthetic polypeptide"
QVNLRESGGGLVKPGGSLRLSCAASGFTFDDSVMHWVRQAPGKGLEWLSLVGWDGFFTYYADSVKGRFTISRDNTKNLLYLQMNSLRAEDTAVYYCARQGDYMGNNWGQGTLVTVSS

SEQ ID NO: 6925 - protein, 117 aa, Artificial Sequence; identical to SEQ ID NO: 6924
  source: /note="Description of Artificial Sequence: Synthetic polypeptide"

SEQ ID NO: 6926 - protein, 431 aa, Artificial Sequence
  source: /note="Description of Artificial Sequence: Synthetic polypeptide"
QVNLRESGGGLVKPGGSLRLSCAASGFTFDDSVMHWVRQAPGKGLEWLSLVGWDGFFTYYADSVKGRFTISRDNTKNLLYLQMNSLRAEDTAVYYCARQGDYMGNNWGQGTLVTVSSASTKGPSVFPLAPCSRSTSESTAALGCLVKDYFPEPVTVSWNSGALTSGVHTFPAVLQSSGLYSLSSVVTVPSSNFGTQTYTCNVDHKPSNTKVDKTVAPPVAGPSVFLFPPKPKDTLMISRTPEVTCVVVDVSHEDPEVQFNWYVDGVEVHNAKTKPREEQFNSTFRVVSVLTVVHQDWLNGKEYKCKVSNKGLPSSIEKTISKTKGQPREPQVYTLPPSREEMTKNQVSLTCLVKGFYPSDIAVEWESNGQPENNYKTTPPMLDSDGSFFLYSKLTVDKSRWQQGNVFSCSVMHEALHNHYTQKSLSLSPGK

SEQ ID NO: 6927 - protein, 117 aa, Artificial Sequence
  source: /note="Description of Artificial Sequence: Synthetic polypeptide"
QVNLRESGGGLVKPGGSLRLSCAASGFTFDDSVMHWVRQAPGKGLEWLSLVGWDGSATYYADSVKGRFTISRDNTKNLLYLQMNSLRAEDTAVYYCARQGDYVFDYWGQGTLVTVSS

SEQ ID NO: 6928 - protein, 118 aa, Artificial Sequence
  source: /note="Description of Artificial Sequence: Synthetic polypeptide"
QVTLKESGGGLVQPGGSLRLSCAASGFTFSNYGMHWVRQAPGKGLEWVSAISGSGGSTYYADSVKGRFTISRDNSKNTVYLQMNSLRDEDTAVYYCARDISGGGMDVWGQGTTVTVSS

SEQ ID NO: 6929 - protein, 117 aa, Artificial Sequence
  source: /note="Description of Artificial Sequence: Synthetic polypeptide"
EVQLVESGGGLVKPGGSLRLSCAASGFTFDDSVMHWVRQAPGKGLEWVSLVGWDGFFTYYADSVKGRFTISRDNAKNSLYLQMNSLRAEDTAVYYCARQGDYMGNNWGQGTLVTVSS

SEQ ID NO: 6930 - protein, 432 aa, Artificial Sequence
  source: /note="Description of Artificial Sequence: Synthetic polypeptide"
EVQLVESGGGLVKPGGSLRLSCAASGFTFDDSVMHWVRQAPGKGLEWVSLVGWDGFFTYYADSVKGRFTISRDNAKNSLYLQMNSLRAEDTAVYYCARQGDYMGNNWGQGTLVTVSSASTKGPSVFPLAPSSKSTSGGTAALGCLVKDYFPEPVTVSWNSGALTSGVHTFPAVLQSSGLYSLSSVVTVPSSSLGTQTYICNVNHKPSNTKVDKKVAPELLGGPSVFLFPPKPKDTLMISRTPEVTCVVVDVSHEDPEVKFNWYVDGVEVHNAKTKPREEQYNSTYRVVSVLTVLHQDWLNGKEYKCKVSNKALPAPIEKTISKAKGQPREPQVYTLPPSREEMTKNQVSLTCLVKGFYPSDIAVEWESNGQPENNYKTTPPVLDSDGSFFLYSKLTVDKSRWQQGNVFSCSVMHEALHNHYTQKSLSLSPGK

SEQ ID NO: 6931 - protein, 431 aa, Artificial Sequence
  source: /note="Description of Artificial Sequence: Synthetic polypeptide"
EVQLVESGGGLVKPGGSLRLSCAASGFTFDDSVMHWVRQAPGKGLEWVSLVGWDGFFTYYADSVKGRFTISRDNAKNSLYLQMNSLRAEDTAVYYCARQGDYMGNNWGQGTLVTVSSASTKGPSVFPLAPCSRSTSESTAALGCLVKDYFPEPVTVSWNSGALTSGVHTFPAVLQSSGLYSLSSVVTVPSSNFGTQTYTCNVDHKPSNTKVDKTVAPPVAGPSVFLFPPKPKDTLMISRTPEVTCVVVDVSHEDPEVQFNWYVDGVEVHNAKTKPREEQFNSTFRVVSVLTVVHQDWLNGKEYKCKVSNKGLPSSIEKTISKTKGQPREPQVYTLPPSREEMTKNQVSLTCLVKGFYPSDIAVEWESNGQPENNYKTTPPMLDSDGSFFLYSKLTVDKSRWQQGNVFSCSVMHEALHNHYTQKSLSLSPGK

SEQ ID NO: 6932 - protein, 117 aa, Artificial Sequence
  source: /note="Description of Artificial Sequence: Synthetic polypeptide"
QVNLRESGGGLVKPGGSLRLSCAASGFTFDDSVMHWVRQAPGKGLEWLSLVGWDGFFTYYADSVKGRFTISRDNTKNLLYLQMNSLRAEDTAVYYCARQGDYVFNNWGQGTLVTVSS

SEQ ID NO: 6933 - protein, 117 aa, Artificial Sequence
  source: /note="Description of Artificial Sequence: Synthetic polypeptide"
QVNLRESGGGLVKPGGSLRLSCAASGFTFDDSVMHWVRQAPGKGLEWLSLVGWDGFFTYYADSVKGRFTISRDNTKNLLYLQMNSLRAEDTAVYYCARQGDYMGDYWGQGTLVTVSS

SEQ ID NO: 6934 - protein, 120 aa, Artificial Sequence [sequence omitted]

SEQ ID NO: 6935 - protein, 452 aa, Artificial Sequence
  source: /note="Description of Artificial Sequence: Synthetic polypeptide"
QVQLVQSGAEVKKPGSSVKVSCKASGGTFSYYWIEWVRQAPGQGLEWMGEILPGSGTTNPNEKFKGRVTITADESTSTAYMELSSLRSEDTAVYYCARADYYGSDYVKFDYWGQGTLVTVSSASTKGPSVFPLAPSSKSTSGGTAALGCLVKDYFPEPVTVSWNSGALTSGVHTFPAVLQSSGLYSLSSVVTVPSSSLGTQTYICNVNHKPSNTKVDKRVEPKSCDKTHTCPPCPAPELLGGPSVFLFPPKPKDTLMISRTPEVTCVVVDVSHEDPEVKFNWYVDGVEVHNAKTKPREEQYNSTYRVVSVLTVLHQDWLNGKEYKCKVSNKALPAPIEKTISKAKGQPREPQVYTLPPSREEMTKNQVSLTCLVKGFYPSDIAVEWESNGQPENNYKTTPPVLDSDGSFFLYSKLTVDKSRWQQGNVFSCSVMHEALHNHYTQKSLSLSPGK

SEQ ID NO: 6936 - protein, 444 aa, Artificial Sequence
  source: /note="Description of Artificial Sequence: Synthetic polypeptide"
QVQLVQSGAEVKKPGASVKVSCKVSGYTLSDLSIHWVRQAPGKGLEWMGGFDPQDGETIYAQKFQGRVTMTEDTSTDTAYMELSSLKSEDTAVYYCATGSSSSWFDPWGQGTLVTVSSASTKGPSVFPLAPCSRSTSESTAALGCLVKDYFPEPVTVSWNSGALTSGVHTFPAVLQSSGLYSLSSVVTVPSSNFGTQTYTCNVDHKPSNTKVDKTVERKCCVECPPCPAPPVAGPSVFLFPPKPKDTLMISRTPEVTCVVVDVSHEDPEVQFNWYVDGVEVHNAKTKPREEQFNSTFRVVSVLTVVHQDWLNGKEYKCKVSNKGLPAPIEKTISKTKGQPREPQVYTLPPSREEMTKNQVSLTCLVKGFYPSDIAVEWESNGQPENNYKTTPPMLDSDGSFFLYSKLTVDKSRWQQGNVFSCSVMHEALHNHYTQKSLSLSPGK

SEQ ID NO: 6937 - protein, 446 aa, Artificial Sequence
  source: /note="Description of Artificial Sequence: Synthetic polypeptide"
QVQLQESGPGLVKPSETLSLTCTVSGFSLTNYGIHWIRQPPGKGLEWLGVIWARGFTNYNSALMSRLTISKDNSKNQVSLKLSSVTAADTAVYYCARANDGVYYAMDYWGQGTLVTVSSASTKGPSVFPLAPCSRSTSESTAALGCLVKDYFPEPVTVSWNSGALTSGVHTFPAVLQSSGLYSLSSVVTVPSSSLGTKTYTCNVDHKPSNTKVDKRVESKYGPPCPSCPAPEFLGGPSVFLFPPKPKDTLMISRTPEVTCVVVDVSQEDPEVQFNWYVDGVEVHNAKTKPREEQFNSTYRVVSVLTVLHQDWLNGKEYKCKVSNKGLPSSIEKTISKAKGQPREPQVYTLPPSQEEMTKNQVSLTCLVKGFYPSDIAVEWESNGQPENNYKTTPPVLDSDGSFFLYSRLTVDKSRWQEGNVFSCSVMHEALHNHYTQKSLSLSLGK

SEQ ID NO: 6938 - protein, 447 aa, Artificial Sequence
  source: /note="Description of Artificial Sequence: Synthetic polypeptide"
QVQLVESGGGVVQPGRSLRLSCAASGFTFSSYDMSWVRQAPGKGLEWVAKVSSGGGSTYYLDTVQGRFTISRDNSKNTLYLQMNSLRAEDTAVYYCARHLHGSFASWGQGTTVTVSSASTKGPSVFPLAPSSKSTSGGTAALGCLVKDYFPEPVTVSWNSGALTSGVHTFPAVLQSSGLYSLSSVVTVPSSSLGTQTYICNVNHKPSNTKVDKRVEPKSCDKTHTCPPCPAPELLGGPSVFLFPPKPKDTLMISRTPEVTCVVVDVSHEDPEVKFNWYVDGVEVHNAKTKPREEQYNSTYRVVSVLTVLHQDWLNGKEYKCKVSNKALPAPIEKTISKAKGQPREPQVYTLPPSREEMTKNQVSLTCLVKGFYPSDIAVEWESNGQPENNYKTTPPVLDSDGSFFLYSKLTVDKSRWQQGNVFSCSVMHEALHNHYTQKSLSLSPGK

SEQ ID NO: 6939 - protein, 449 aa, Artificial Sequence
  source: /note="Description of Artificial Sequence: Synthetic polypeptide"
QVQLVESGGGVVQPGRSRRLSCAASGFTFSRYTMHWVRQAPGKGLEWVAVISFDGSNKYYVDSVKGRFTISRDNSENTLYLQVNILRAEDTAVYYCAREARGSYAFDIWGQGTMVTVSSASTKGPSVFPLAPSSKSTSGGTAALGCLVKDYFPEPVTVSWNSGALTSGVHTFPAVLQSSGLYSLSSVVTVPSSSLGTQTYICNVNHKPSNTKVDKKVEPKSCDKTHTCPPCPAPELLGGPSVFLFPPKPKDTLMISRTPEVTCVVVDVSHEDPEVKFNWYVDGVEVHNAKTKPREEQYNSTYRVVSVLTVLHQDWLNGKEYKCKVSNKALPAPIEKTISKAKGQPREPQVYTLPPSRDELTKNQVSLTCLVKGFYPSDIAVEWESNGQPENNYKTTPPVLDSDGSFFLYSKLTVDKSRWQQGNVFSCSVMHEALHNHYTQKSLSLSPGK

SEQ ID NO: 6940 - protein, 446 aa, Artificial Sequence
  source: /note="Description of Artificial Sequence: Synthetic polypeptide"
EVQLVQSGGGLVKPGGSLRLSCAASGFTFSSYSMNWVRQAPGKGLEWVSSISSSSSYIYYADSVKGRFTISRDNAKNSLYLQMNSLRAEDTAVYYCARVTDAFDIWGQGTMVTVSSASTKGPSVFPLAPSSKSTSGGTAALGCLVKDYFPEPVTVSWNSGALTSGVHTFPAVLQSSGLYSLSSVVTVPSSSLGTQTYICNVNHKPSNTKVDKKVEPKSCDKTHTCPPCPAPELLGGPSVFLFPPKPKDTLMISRTPEVTCVVVDVSHEDPEVKFNWYVDGVEVHNAKTKPREEQYNSTYRVVSVLTVLHQDWLNGKEYKCKVSNKALPAPIEKTISKAKGQPREPQVYTLPPSREEMTKNQVSLTCLVKGFYPSDIAVEWESNGQPENNYKTTPPVLDSDGSFFLYSKLTVDKSRWQQGNVFSCSVMHEALHNHYTQKSLSLSPGK

SEQ ID NO: 6941 - protein, 450 aa, Artificial Sequence
  source: /note="Description of Artificial Sequence: Synthetic polypeptide"
QVQLVQSGAEVKKPGSSVKVSCKASGGTFSFYAISWVRQAPGQGLEWMGGFIPIFGAANYAQKFQGRVTITADESTSTAYMELSSLRSDDTAVYYCARIPSGSYYYDYDMDVWGQGTTVTVSSASTKGPSVFPLAPCSRSTSESTAALGCLVKDYFPEPVTVSWNSGALTSGVHTFPAVLQSSGLYSLSSVVTVPSSSLGTKTYTCNVDHKPSNTKVDKRVESKYGPPCPPCPAPEFLGGPSVFLFPPKPKDTLMISRTPEVTCVVVDVSQEDPEVQFNWYVDGVEVHNAKTKPREEQFNSTYRVVSVLTVLHQDWLNGKEYKCKVSNKGLPSSIEKTISKAKGQPREPQVYTLPPSQEEMTKNQVSLTCLVKGFYPSDIAVEWESNGQPENNYKTTPPVLDSDGSFFLYSRLTVDKSRWQEGNVFSCSVMHEALHNHYTQKSLSLSLGK

SEQ ID NO: 6942 - protein, 450 aa, Artificial Sequence
  source: /note="Description of Artificial Sequence: Synthetic polypeptide"
QVQLVQSGAEVKKPGASVKVSCKASGYTFTSYWMNWVRQAPGQGLEWMGRIDPYDSETHYAQKLQGRVTMTTDTSTSTAYMELRSLRSDDTAVYYCARGGYDFDVGTLYWFFDVWGQGTTVTVSSASTKGPSVFPLAPCSRSTSESTAALGCLVKDYFPEPVTVSWNSGALTSGVHTFPAVLQSSGLYSLSSVVTVPSSSLGTKTYTCNVDHKPSNTKVDKRVESKYGPPCPPCPAPEFLGGPSVFLFPPKPKDTLMISRTPEVTCVVVDVSQEDPEVQFNWYVDGVEVHNAKTKPREEQFNSTYRVVSVLTVLHQDWLNGKEYKCKVSNKGLPSSIEKTISKAKGQPREPQVYTLPPSQEEMTKNQVSLTCLVKGFYPSDIAVEWESNGQPENNYKTTPPVLDSDGSFFLYSRLTVDKSRWQEGNVFSCSVMHEALHNHYTQKSLSLSL

SEQ ID NO: 6943 - protein, 452 aa, Artificial Sequence
  source: /note="Description of Artificial Sequence: Synthetic polypeptide"
EVQLVQSGAEVKKPGATVKISCKVSGFTLTNYGMNWVRQAPGQGLEWMGWINTDTGEPTYADDFKGRFVFSLDTSVSTAYLQISSLKAEDTAVYYCARNPPYYYGTNNAEAMDYWGQGTTVTVSSASTKGPSVFPLAPCSRSTSESTAALGCLVKDYFPEPVTVSWNSGALTSGVHTFPAVLQSSGLYSLSSVVTVPSSSLGTKTYTCNVDHKPSNTKVDKRVESKYGPPCPPCPAPEFLGGPSVFLFPPKPKDTLMISRTPEVTCVVVDVSQEDPEVQFNWYVDGVEVHNAKTKPREEQFNSTYRVVSVLTVLHQDWLNGKEYKCKVSNKGLPSSIEKTISKAKGQPREPQVYTLPPSQEEMTKNQVSLTCLVKGFYPSDIAVEWESNGQPENNYKTTPPVLDSDGSFFLYSRLTVDKSRWQEGNVFSCSVMHEALHNHYTQKSLSLSLGK

SEQ ID NO: 6944 - protein, 452 aa, Artificial Sequence
  source: /note="Description of Artificial Sequence: Synthetic polypeptide"
QVQLVQSGAEVKKPGASVKVSCKASGFTLTNYGMNWVRQARGQRLEWIGWINTDTGEPTYADDFKGRFVFSLDTSVSTAYLQISSLKAEDTAVYYCARNPPYYYGTNNAEAMDYWGQGTTVTVSSASTKGPSVFPLAPCSRSTSESTAALGCLVKDYFPEPVTVSWNSGALTSGVHTFPAVLQSSGLYSLSSVVTVPSSSLGTKTYTCNVDHKPSNTKVDKRVESKYGPPCPPCPAPEFLGGPSVFLFPPKPKDTLMISRTPEVTCVVVDVSQEDPEVQFNWYVDGVEVHNAKTKPREEQFNSTYRVVSVLTVLHQDWLNGKEYKCKVSNKGLPSSIEKTISKAKGQPREPQVYTLPPSQEEMTKNQVSLTCLVKGFYPSDIAVEWESNGQPENNYKTTPPVLDSDGSFFLYSRLTVDKSRWQEGNVFSCSVMHEALHNHYTQKSLSLSLGK

SEQ ID NO: 6945 - protein, 452 aa, Artificial Sequence
  source: /note="Description of Artificial Sequence: Synthetic polypeptide"
QVQLVQSGAEVKKPGASVKVSCKASGFTLTNYGMNWVRQAPGQGLEWMGWINTDTGEPTYADDFKGRFVFSLDTSVSTAYLQISSLKAEDTAVYYCARNPPYYYGTNNAEAMDYWGQGTTVTVSSASTKGPSVFPLAPCSRSTSESTAALGCLVKDYFPEPVTVSWNSGALTSGVHTFPAVLQSSGLYSLSSVVTVPSSSLGTKTYTCNVDHKPSNTKVDKRVESKYGPPCPPCPAPEFLGGPSVFLFPPKPKDTLMISRTPEVTCVVVDVSQEDPEVQFNWYVDGVEVHNAKTKPREEQFNSTYRVVSVLTVLHQDWLNGKEYKCKVSNKGLPSSIEKTISKAKGQPREPQVYTLPPSQEEMTKNQVSLTCLVKGFYPSDIAVEWESNGQPENNYKTTPPVLDSDGSFFLYSRLTVDKSRWQEGNVFSCSVMHEALHNHYTQKSLSLSLGK

SEQ ID NO: 6946 - protein, 451 aa, Artificial Sequence
  source: /note="Description of Artificial Sequence: Synthetic polypeptide"
EVQLVQSGAEVKKPGATVKISCKVSGFTLTNYGMNWVRQAPGQGLEWMGWINTDTGEPTYADDFKGRFVFSLDTSVSTAYLQISSLKAEDTAVYYCARNPPYYYGTNNAEAMDYWGQGTTVTVSSASTKGPSVFPLAPCSRSTSESTAALGCLVKDYFPEPVTVSWNSGALTSGVHTFPAVLQSSGLYSLSSVVTVPSSSLGTKTYTCNVDHKPSNTKVDKRVESKYGPPCPPCPAPEFLGGPSVFLFPPKPKDTLMISRTPEVTCVVVDVSQEDPEVQFNWYVDGVEVHNAKTKPREEQFNSTYRVVSVLTVLHQDWLNGKEYKCKVSNKGLPSSIEKTISKAKGQPREPQVYTLPPSQEEMTKNQVSLTCLVKGFYPSDIAVEWESNGQPENNYKTTPPVLDSDGSFFLYSRLTVDKSRWQEGNVFSCSVMHEALHNHYTQKSLSLSLG

SEQ ID NO: 6947 - protein, 451 aa, Artificial Sequence
  source: /note="Description of Artificial Sequence: Synthetic polypeptide"
QVQLVQSGAEVKKPGASVKVSCKASGFTLTNYGMNWVRQARGQRLEWIGWINTDTGEPTYADDFKGRFVFSLDTSVSTAYLQISSLKAEDTAVYYCARNPPYYYGTNNAEAMDYWGQGTTVTVSSASTKGPSVFPLAPCSRSTSESTAALGCLVKDYFPEPVTVSWNSGALTSGVHTFPAVLQSSGLYSLSSVVTVPSSSLGTKTYTCNVDHKPSNTKVDKRVESKYGPPCPPCPAPEFLGGPSVFLFPPKPKDTLMISRTPEVTCVVVDVSQEDPEVQFNWYVDGVEVHNAKTKPREEQFNSTYRVVSVLTVLHQDWLNGKEYKCKVSNKGLPSSIEKTISKAKGQPREPQVYTLPPSQEEMTKNQVSLTCLVKGFYPSDIAVEWESNGQPENNYKTTPPVLDSDGSFFLYSRLTVDKSRWQEGNVFSCSVMHEALHNHYTQKSLSLSLG

SEQ ID NO: 6948 - protein, 451 aa, Artificial Sequence
  source: /note="Description of Artificial Sequence: Synthetic polypeptide"
QVQLVQSGAEVKKPGASVKVSCKASGFTLTNYGMNWVRQAPGQGLEWMGWINTDTGEPTYADDFKGRFVFSLDTSVSTAYLQISSLKAEDTAVYYCARNPPYYYGTNNAEAMDYWGQGTTVTVSSASTKGPSVFPLAPCSRSTSESTAALGCLVKDYFPEPVTVSWNSGALTSGVHTFPAVLQSSGLYSLSSVVTVPSSSLGTKTYTCNVDHKPSNTKVDKRVESKYGPPCPPCPAPEFLGGPSVFLFPPKPKDTLMISRTPEVTCVVVDVSQEDPEVQFNWYVDGVEVHNAKTKPREEQFNSTYRVVSVLTVLHQDWLNGKEYKCKVSNKGLPSSIEKTISKAKGQPREPQVYTLPPSQEEMTKNQVSLTCLVKGFYPSDIAVEWESNGQPENNYKTTPPVLDSDGSFFLYSRLTVDKSRWQEGNVFSCSVMHEALHNHYTQKSLSLSLG

SEQ ID NO: 6949 - protein, 452 aa, Artificial Sequence
  source: /note="Description of Artificial Sequence: Synthetic polypeptide"
EVQLVQSGAEVKKPGATVKISCKVSGFTLTNYGMNWIRQSPSRGLEWLGWINTDTGEPTYADDFKGRFVFSLDTSVSTAYLQISSLKAEDTAVYYCARNPPYYYGTNNAEAMDYWGQGTTVTVSSASTKGPSVFPLAPCSRSTSESTAALGCLVKDYFPEPVTVSWNSGALTSGVHTFPAVLQSSGLYSLSSVVTVPSSSLGTKTYTCNVDHKPSNTKVDKRVESKYGPPCPPCPAPEFLGGPSVFLFPPKPKDTLMISRTPEVTCVVVDVSQEDPEVQFNWYVDGVEVHNAKTKPREEQFNSTYRVVSVLTVLHQDWLNGKEYKCKVSNKGLPSSIEKTISKAKGQPREPQVYTLPPSQEEMTKNQVSLTCLVKGFYPSDIAVEWESNGQPENNYKTTPPVLDSDGSFFLYSRLTVDKSRWQEGNVFSCSVMHEALHNHYTQKSLSLSLGK

SEQ ID NO: 6950 - protein, 452 aa, Artificial Sequence
  source: /note="Description of Artificial Sequence: Synthetic polypeptide"
QIQLVQSGPELKKPGETVKISCKASGFTLTNYGMNWVRQTPGKGLKWMGWINTDTGEPTYADDFKGRFAFSLETSASTASLQINNLKNADTATYFCARNPPYYYGTNNAEAMDYWGQGTTVTVSSASTKGPSVFPLAPCSRSTSESTAALGCLVKDYFPEPVTVSWNSGALTSGVHTFPAVLQSSGLYSLSSVVTVPSSSLGTKTYTCNVDHKPSNTKVDKRVESKYGPPCPPCPAPEFLGGPSVFLFPPKPKDTLMISRTPEVTCVVVDVSQEDPEVQFNWYVDGVEVHNAKTKPREEQFNSTYRVVSVLTVLHQDWLNGKEYKCKVSNKGLPSSIEKTISKAKGQPREPQVYTLPPSQEEMTKNQVSLTCLVKGFYPSDIAVEWESNGQPENNYKTTPPVLDSDGSFFLYSRLTVDKSRWQEGNVFSCSVMHEALHNHYTQKSLSLSLGK

SEQ ID NO: 6951 - protein, 452 aa, Artificial Sequence
  source: /note="Description of Artificial Sequence: Synthetic polypeptide"
EVQLVQSGAEVKKPGATVKISCKVSGFTLTNYGMNWVRQAPGQGLEWMGWINTDTGEPTYADDFKGRFVFSLDTSVSTAYLQICSLKAEDTAVYYCARNPPYYYGTNNAEAMDYWGQGTTVTVSSASTKGPSVFPLAPCSRSTSESTAALGCLVKDYFPEPVTVSWNSGALTSGVHTFPAVLQSSGLYSLSSVVTVPSSSLGTKTYTCNVDHKPSNTKVDKRVESKYGPPCPPCPAPEFLGGPSVFLFPPKPKDTLMISRTPEVTCVVVDVSQEDPEVQFNWYVDGVEVHNAKTKPREEQFNSTYRVVSVLTVLHQDWLNGKEYKCKVSNKGLPSSIEKTISKAKGQPREPQVYTLPPSQEEMTKNQVSLTCLVKGFYPSDIAVEWESNGQPENNYKTTPPVLDSDGSFFLYSRLTVDKSRWQEGNVFSCSVMHEALHNHYTQKSLSLSLGK

SEQ ID NO: 6952 - protein, 452 aa, Artificial Sequence
  source: /note="Description of Artificial Sequence: Synthetic polypeptide"
QVQLVQSGAEVKKPGASVKVSCKASGFTLTNYGMNWVRQARGQRLEWIGWINTDTGEPTYADDFKGRFVFSLDTSVSTAYLQICSLKAEDTAVYYCARNPPYYYGTNNAEAMDYWGQGTTVTVSSASTKGPSVFPLAPCSRSTSESTAALGCLVKDYFPEPVTVSWNSGALTSGVHTFPAVLQSSGLYSLSSVVTVPSSSLGTKTYTCNVDHKPSNTKVDKRVESKYGPPCPPCPAPEFLGGPSVFLFPPKPKDTLMISRTPEVTCVVVDVSQEDPEVQFNWYVDGVEVHNAKTKPREEQFNSTYRVVSVLTVLHQDWLNGKEYKCKVSNKGLPSSIEKTISKAKGQPREPQVYTLPPSQEEMTKNQVSLTCLVKGFYPSDIAVEWESNGQPENNYKTTPPVLDSDGSFFLYSRLTVDKSRWQEGNVFSCSVMHEALHNHYTQKSLSLSLGK

SEQ ID NO: 6953 - protein, 452 aa, Artificial Sequence
  source: /note="Description of Artificial Sequence: Synthetic polypeptide"
QVQLVQSGAEVKKPGASVKVSCKASGFTLTNYGMNWVRQAPGQGLEWMGWINTDTGEPTYADDFKGRFVFSLDTSVSTAYLQICSLKAEDTAVYYCARNPPYYYGTNNAEAMDYWGQGTTVTVSSASTKGPSVFPLAPCSRSTSESTAALGCLVKDYFPEPVTVSWNSGALTSGVHTFPAVLQSSGLYSLSSVVTVPSSSLGTKTYTCNVDHKPSNTKVDKRVESKYGPPCPPCPAPEFLGGPSVFLFPPKPKDTLMISRTPEVTCVVVDVSQEDPEVQFNWYVDGVEVHNAKTKPREEQFNSTYRVVSVLTVLHQDWLNGKEYKCKVSNKGLPSSIEKTISKAKGQPREPQVYTLPPSQEEMTKNQVSLTCLVKGFYPSDIAVEWESNGQPENNYKTTPPVLDSDGSFFLYSRLTVDKSRWQEGNVFSCSVMHEALHNHYTQKSLSLSLGK

SEQ ID NO: 6954 - protein, 452 aa, Artificial Sequence
  source: /note="Description of Artificial Sequence: Synthetic polypeptide"
EVQLVQSGAEVKKPGATVKISCKVSGFTLTNYGMNWIRQSPSRGLEWLGWINTDTGEPTYADDFKGRFVFSLDTSVSTAYLQICSLKAEDTAVYYCARNPPYYYGTNNAEAMDYWGQGTTVTVSSASTKGPSVFPLAPCSRSTSESTAALGCLVKDYFPEPVTVSWNSGALTSGVHTFPAVLQSSGLYSLSSVVTVPSSSLGTKTYTCNVDHKPSNTKVDKRVESKYGPPCPPCPAPEFLGGPSVFLFPPKPKDTLMISRTPEVTCVVVDVSQEDPEVQFNWYVDGVEVHNAKTKPREEQFNSTYRVVSVLTVLHQDWLNGKEYKCKVSNKGLPSSIEKTISKAKGQPREPQVYTLPPSQEEMTKNQVSLTCLVKGFYPSDIAVEWESNGQPENNYKTTPPVLDSDGSFFLYSRLTVDKSRWQEGNVFSCSVMHEALHNHYTQKSLSLSLGK

SEQ ID NO: 6955 - protein, 452 aa, Artificial Sequence
  source: /note="Description of Artificial Sequence: Synthetic polypeptide"
EVQLVQSGAEVKKPGESLRISCKGSGFTLTNYGMNWVRQATGQGLEWMGWINTDTGEPTYADDFKGRVTISADKSISTAYLQWSSLKASDTAMYYCARNPPYYYGTNNAEAMDYWGQGTTVTVSSASTKGPSVFPLAPCSRSTSESTAALGCLVKDYFPEPVTVSWNSGALTSGVHTFPAVLQSSGLYSLSSVVTVPSSSLGTKTYTCNVDHKPSNTKVDKRVESKYGPPCPPCPAPEFLGGPSVFLFPPKPKDTLMISRTPEVTCVVVDVSQEDPEVQFNWYVDGVEVHNAKTKPREEQFNSTYRVVSVLTVLHQDWLNGKEYKCKVSNKGLPSSIEKTISKAKGQPREPQVYTLPPSQEEMTKNQVSLTCLVKGFYPSDIAVEWESNGQPENNYKTTPPVLDSDGSFFLYSRLTVDKSRWQEGNVFSCSVMHEALHNHYTQKSLSLSLGK

SEQ ID NO: 6956 - protein, 452 aa, Artificial Sequence
  source: /note="Description of Artificial Sequence: Synthetic polypeptide"
QVQLVQSGSELKKPGASVKVSCKASGFTLTNYGMNWVRQAPGQGLEWMGWINTDTGEPTYADDFKGRFVFSLDTSVSTAYLQISTLKAEDTATYFCARNPPYYYGTNNAEAMDYWGQGTTVTVSSASTKGPSVFPLAPCSRSTSESTAALGCLVKDYFPEPVTVSWNSGALTSGVHTFPAVLQSSGLYSLSSVVTVPSSSLGTKTYTCNVDHKPSNTKVDKRVESKYGPPCPPCPAPEFLGGPSVFLFPPKPKDTLMISRTPEVTCVVVDVSQEDPEVQFNWYVDGVEVHNAKTKPREEQFNSTYRVVSVLTVLHQDWLNGKEYKCKVSNKGLPSSIEKTISKAKGQPREPQVYTLPPSQEEMTKNQVSLTCLVKGFYPSDIAVEWESNGQPENNYKTTPPVLDSDGSFFLYSRLTVDKSRWQEGNVFSCSVMHEALHNHYTQKSLSLSLGK

SEQ ID NO: 6957 - protein, 447 aa, Artificial Sequence
  source: /note="Description of Artificial Sequence: Synthetic polypeptide"
EVQLLESGGGLVQPGGSLRLSCAASGFTFSAYEMKWVRQAPGKGLEWVSVIGPSGGFTFYADSVKGRFTISRDNSKNTLYLQMNSLRAEDTAVYYCATEGDNDAFDIWGQGTTVTVSSASTKGPSVFPLAPSSKSTSGGTAALGCLVKDYFPEPVTVSWNSGALTSGVHTFPAVLQSSGLYSLSSVVTVPSSSLGTQTYICNVNHKPSNTKVDKKVEPKSCDKTHTCPPCPAPELLGGPSVFLFPPKPKDTLMISRTPEVTCVVVDVSHEDPEVKFNWYVDGVEVHNAKTKPREEQYNSAYRVVSVLTVLHQDWLNGKEYKCKVSNKALPAPIEKTISKAKGQPREPQVYTLPPSRDELTKNQVSLTCLVKGFYPSDIAVEWESNGQPENNYKTTPPVLDSDGSFFLYSKLTVDKSRWQQGNVFSCSVMHEALHNHYTQKSLSLSPG

SEQ ID NO: 6958 - protein, 230 aa, Artificial Sequence
  source: /note="Description of Artificial Sequence: Synthetic polypeptide"
EVQLLESGGGLVQPGGSLRLSCAASGFTFSIYPMFWVRQAPGKGLEWVSWIGPSGGITKYADSVKGRFTISRDNSKNTLYLQMNSLRAEDTATYYCAREGHNDWYFDLWGRGTLVTVSSASTKGPSVFPLAPSSKSTSGGTAALGCLVKDYFPEPVTVSWNSGALTSGVHTFPAVLQSSGLYSLSSVVTVPSSSLGTQTYICNVNHKPSNTKVDKKVEPKSCDKTHTCPP

SEQ ID NO: 6959 - protein, 447 aa, Artificial Sequence; identical to SEQ ID NO: 6957
  source: /note="Description of Artificial Sequence: Synthetic polypeptide"

SEQ ID NO: 6960 - protein, 447 aa, Artificial Sequence
  source: /note="Description of Artificial Sequence: Synthetic polypeptide"
EVQLLESGGGLVQPGGSLRLSCAASGFTFSAYEMKWVRQAPGKGLEWVSVIGPSGGFTFYADSVKGRFTISRDNSKNTLYLQMNSLRAEDTAVYYCATEGDNDAFDIWGQGTTVTVSSASTKGPSVFPLAPSSKSTSGGTAALGCLVKDYFPEPVTVSWNSGALTSGVHTFPAVLQSSGLYSLSSVVTVPSSSLGTQTYICNVNHKPSNTKVDKKVEPKSCDKTHTCPPCPAPELLGGPSVFLFPPKPKDTLMISRTPEVTCVVVDVSHEDPEVKFNWYVDGVEVHNAKTKPREEQYNSTYRVVSVLTVLHQDWLNGKEYKCKVSNKALPAPIEKTISKAKGQPREPQVYTLPPSRDELTKNQVSLTCLVKGFYPSDIAVEWESNGQPENNYKTTPPVLDSDGSFFLYSKLTVDKSRWQQGNVFSCSVMHEALHNHYTQKSLSLSPG

SEQ ID NO: 6961 - protein, 443 aa, Artificial Sequence
  source: /note="Description of Artificial Sequence: Synthetic polypeptide"
QVQLVQSGAEVKKPGASVKVSCKASGYAFTYYLIEWVRQAPGQGLEWIGVINPGSGGTNYNEKFKGRATITADKSTSTAYMELSSLRSEDTAVYFCARNWMNFDYWGQGTTVTVSSASTKGPSVFPLAPCSRSTSESTAALGCLVKDYFPEPVTVSWNSGALTSGVHTFPAVLQSSGLYSLSSVVTVPSSSLGTKTYTCNVDHKPSNTKVDKRVESKYGPPCPPCPAPEFLGGPSVFLFPPKPKDTLMISRTPEVTCVVVDVSQEDPEVQFNWYVDGVEVHNAKTKPREEQFNSTYRVVSVLTVLHQDWLNGKEYKCKVSNKGLPSSIEKTISKAKGQPREPQVYTLPPSQEEMTKNQVSLTCLVKGFYPSDIAVEWESNGQPENNYKTTPPVLDSDGSFFLYSRLTVDKSRWQEGNVFSCSVMHEALHNHYTQKSLSLSLGK

SEQ ID NO: 6962 - protein, 448 aa, Artificial Sequence
  source: /note="Description of Artificial Sequence: Synthetic polypeptide"
QVQLQQSGSELKKPGASVKVSCKASGFTFTNYGMNWVKQAPGQGLKWMGWINTYTREPTYADDFKGRFAFSLDTSVSTAYLQISSLKADDTAVYFCARDITAVVPTGFDYWGQGSLVTVSSASTKGPSVFPLAPCSRSTSESTAALGCLVKDYFPEPVTVSWNSGALTSGVHTFPAVLQSSGLYSLSSVVTVPSSSLGTKTYTCNVDHKPSNTKVDKRVESKYGPPCPPCPAPEFLGGPSVFLFPPKPKDTLMISRTPEVTCVVVDVSQEDPEVQFNWYVDGVEVHNAKTKPREEQFNSTYRVVSVLTVLHQDWLNGKEYKCKVSNKGLPSSIEKTISKAKGQPREPQVYTLPPSQEEMTKNQVSLTCLVKGFYPSDIAVEWESNGQPENNYKTTPPVLDSDGSFFLYSRLTVDKSRWQEGNVFSCSVMHEALHNHYTQKSLSLSLGK

SEQ ID NO: 6963 - protein, 449 aa, Artificial Sequence
  source: /note="Description of Artificial Sequence: Synthetic polypeptide"
QVQLQQSGPELVKPGASVKMSCKASGYTFTSYYIYWVKQRPGQGLEWLGWIWPGDGSTKYNEKFKDKTTLTADKSSNTAYMFLSSLTSEDSAVYFCASPMITPNYAMDYWGQGASVTVSSASTKGPSVFPLAPSSKSTSGGTAALGCLVKDYFPEPVTVSWNSGALTSGVHTFPAVLQSSGLYSLSSVVTVPSSSLGTQTYICNVNHKPSNTKVDKRVEPKSCDKTHTCPPCPAPELLGGPSVFLFPPKPKDTLMISRTPEVTCVVVDVSHEDPEVKFNWYVDGVEVHNAKTKPREEQYNSTYRVVSVLTVLHQDWLNGKEYKCKVSNKALPAPIEKTISKAKGQPREPQVYTLPPSREEMTKNQVSLTCLVKGFYPSDIAVEWESNGQPENNYKTTPPVLDSDGSFFLYSKLTVDKSRWQQGNVFSCSVMHEALHNHYTQKSLSLSPG

SEQ ID NO: 6964 - protein, 449 aa, Artificial Sequence
  source: /note="Description of Artificial Sequence: Synthetic polypeptide"
QVQLQQSGPELVKPGASVKMSCKASGYTFTSYYIHWVKQRPGQGLEWIGWIWPGDGSTKYNEKFKGKTTLTADKSSSTAYMFLSSLTSEDSAVYFCASPMITPNYAMDYWGQGASVTVSSASTKGPSVFPLAPSSKSTSGGTAALGCLVKDYFPEPVTVSWNSGALTSGVHTFPAVLQSSGLYSLSSVVTVPSSSLGTQTYICNVNHKPSNTKVDKRVEPKSCDKTHTCPPCPAPELLGGPSVFLFPPKPKDTLMISRTPEVTCVVVDVSHEDPEVKFNWYVDGVEVHNAKTKPREEQYNSTYRVVSVLTVLHQDWLNGKEYKCKVSNKALPAPIEKTISKAKGQPREPQVYTLPPSREEMTKNQVSLTCLVKGFYPSDIAVEWESNGQPENNYKTTPPVLDSDGSFFLYSKLTVDKSRWQQGNVFSCSVMHEALHNHYTQKSLSLSPG

SEQ ID NO: 6965 - protein, 449 aa, Artificial Sequence
  source: /note="Description of Artificial Sequence: Synthetic polypeptide"
QVQLQQSGSELVKPGASVKLSCKASGYTFTSYYIHWVKQRPGQGLEWIGWIWPGDGSTKYNERFKGKTTLTADKSSSTAYMFLSSLTSEDSAVYFCASPMITPNYAMDYWGQGASVTVSSASTKGPSVFPLAPSSKSTSGGTAALGCLVKDYFPEPVTVSWNSGALTSGVHTFPAVLQSSGLYSLSSVVTVPSSSLGTQTYICNVNHKPSNTKVDKRVEPKSCDKTHTCPPCPAPELLGGPSVFLFPPKPKDTLMISRTPEVTCVVVDVSHEDPEVKFNWYVDGVEVHNAKTKPREEQYNSTYRVVSVLTVLHQDWLNGKEYKCKVSNKALPAPIEKTISKAKGQPREPQVYTLPPSREEMTKNQVSLTCLVKGFYPSDIAVEWESNGQPENNYKTTPPVLDSDGSFFLYSKLTVDKSRWQQGNVFSCSVMHEALHNHYTQKSLSLSPG

SEQ ID NO: 6966 - protein, 449 aa, Artificial Sequence
  source: /note="Description of Artificial Sequence: Synthetic polypeptide"
QVQLQQSGPELVKPGDSVKMSCKASGYSFTSYFIHWVKQRPGQGLEWIGWIWPGDGSTKYNEKFKGKTTLTTDKSSSTAYMFLNSLTSEDSAVYFCASPMITPNYAMDYWGQGASVTVSSASTKGPSVFPLAPSSKSTSGGTAALGCLVKDYFPEPVTVSWNSGALTSGVHTFPAVLQSSGLYSLSSVVTVPSSSLGTQTYICNVNHKPSNTKVDKRVEPKSCDKTHTCPPCPAPELLGGPSVFLFPPKPKDTLMISRTPEVTCVVVDVSHEDPEVKFNWYVDGVEVHNAKTKPREEQYNSTYRVVSVLTVLHQDWLNGKEYKCKVSNKALPAPIEKTISKAKGQPREPQVYTLPPSREEMTKNQVSLTCLVKGFYPSDIAVEWESNGQPENNYKTTPPVLDSDGSFFLYSKLTVDKSRWQQGNVFSCSVMHEALHNHYTQKSLSLSPG

SEQ ID NO: 6967 - protein, 449 aa, Artificial Sequence
  source: /note="Description of Artificial Sequence: Synthetic polypeptide"
QVQLQQSGSELVKPGASVKMSCKASGYTFTSYYIHWVKQRPGQGLEWIGWIWPGDGSTKYNERFKGKTTLTADKSSSTAYMFLSSLTSEDSAVYFCASPMITPNYAMDYWGQGASVTVSSASTKGPSVFPLAPSSKSTSGGTAALGCLVKDYFPEPVTVSWNSGALTSGVHTFPAVLQSSGLYSLSSVVTVPSSSLGTQTYICNVNHKPSNTKVDKRVEPKSCDKTHTCPPCPAPELLGGPSVFLFPPKPKDTLMISRTPEVTCVVVDVSHEDPEVKFNWYVDGVEVHNAKTKPREEQYNSTYRVVSVLTVLHQDWLNGKEYKCKVSNKALPAPIEKTISKAKGQPREPQVYTLPPSREEMTKNQVSLTCLVKGFYPSDIAVEWESNGQPENNYKTTPPVLDSDGSFFLYSKLTVDKSRWQQGNVFSCSVMHEALHNHYTQKSLSLSPG

SEQ ID NO: 6968 - protein, 449 aa, Artificial Sequence
  source: /note="Description of Artificial Sequence: Synthetic polypeptide"
QVQLQQSGPELEKPGASVKISCKASGYSFTGYTMNWVKQSHGKSLEWIGLITPYNGASSYNQKFRGKATLTVDKSSSTAYMDLLSLTSEDSAVYFCARGGYDGRGFDYWGSGTPVTVSSASTKGPSVFPLAPSSKSTSGGTAALGCLVKDYFPEPVTVSWNSGALTSGVHTFPAVLQSSGLYSLSSVVTVPSSSLGTQTYICNVNHKPSNTKVDKKVEPKSCDKTHTCPPCPAPELLGGPSVFLFPPKPKDTLMISRTPEVTCVVVDVSHEDPEVKFNWYVDGVEVHNAKTKPREEQYNSTYRVVSVLTVLHQDWLNGKEYKCKVSNKALPAPIEKTISKAKGQPREPQVYTLPPSRDELTKNQVSLTCLVKGFYPSDIAVEWESNGQPENNYKTTPPVLDSDGSFFLYSKLTVDKSRWQQGNVFSCSVMHEALHNHYTQKSLSLSPGK

SEQ ID NO: 6969 - protein, 449 aa, Artificial Sequence
  source: /note="Description of Artificial Sequence: Synthetic polypeptide"
EVQLVESGGGLVQPGGSLRLSCAASGYTFTSYWLHWVRQAPGKGLEWVGMIDPSNSDTRFNPNFKDRFTISADTSKNTAYLQMNSLRAEDTAVYYCATYRSYVTPLDYWGQGTLVTVSSASTKGPSVFPLAPSSKSTSGGTAALGCLVKDYFPEPVTVSWNSGALTSGVHTFPAVLQSSGLYSLSSVVTVPSSSLGTQTYICNVNHKPSNTKVDKKVEPKSCDKTHTCPPCPAPELLGGPSVFLFPPKPKDTLMISRTPEVTCVVVDVSHEDPEVKFNWYVDGVEVHNAKTKPREEQYNSTYRVVSVLTVLHQDWLNGKEYKCKVSNKALPAPIEKTISKAKGQPREPQVYTLPPSREEMTKNQVSLSCAVKGFYPSDIAVEWESNGQPENNYKTTPPVLDSDGSFFLVSKLTVDKSRWQQGNVFSCSVMHEALHNHYTQKSLSLSPGK

SEQ ID NO: 6970 - protein, 250 aa, Artificial Sequence
  source: /note="Description of Artificial Sequence: Synthetic polypeptide"
EVQLVESGAEVKKPGASVKVSCKASGYTFTSYYMHWVRQAPGQGLEWMGIINPSGGSTSYAQKFQGRVTMTRDTSTSTVYMELSSLRSEDTAVYYCAREGDNYYGDAFDIWGQGTMVTVSSASTKGPSVFPLAPSSKSTSGGTAALGCLVKDYFPEPVTVSWNSGALTSGVHTFPAVLQSSGLYSLSSVVTVPSSSLGTQTYICNVNHKPSNTKVDKKVEPKSCAAAHHHHHHGAAEQKLISEEDLNGAA

SEQ ID NO: 6971 - protein, 249 aa, Artificial Sequence
  source: /note="Description of Artificial Sequence: Synthetic polypeptide"
QLQLQESGPGLVKPSETLSLTCTVSGVSISSRSGHWGWVRQPPGKGLEWIGSISYSGSTYYNPSLKSRVTISVDTSKNQLSLKLSSVTAADTAVYYCARESHPAAALVGWGQGTLVTVSSASTKGPSVFPLAPSSKSTSGGTAALGCLVKDYFPEPVTVSWNSGALTSGVHTFPAVLQSSGLYSLSSVVTVPSSSLGTQTYICNVNHKPSNTKVDKKVEPKSCAAAHHHHHHGAAEQKLISEEDLNGAA

SEQ ID NO: 6972 - protein, 264 aa, Artificial Sequence
  source: /note="Description of Artificial Sequence: Synthetic polypeptide"
QVQLQESGGGLVKPGGSLRLSCAASGFTFSSYSMNWVRQAPGKGLEWVSSISSSSSYIYYADSVKGRFTISRDNAKNSLYLQMNSLRAEDTAVYYCARVRGHRYYYDSSGYYSSDYYYYYGMDVWGQGTTVTVSSASTKGPSVFPLAPSSKSTSGGTAALGCLVKDYFPEPVTVSWNSGALTSGVHTFPAVLQSSGLYSLSSVVTVPSSSLGTQTYICNVNHKPSNTKVDKKVEPKSCAAAHHHHHHGAAEQKLISEEDLNGAA

SEQ ID NO: 6973 - protein, 249 aa, Artificial Sequence
  source: /note="Description of Artificial Sequence: Synthetic polypeptide"
QVQLQESGPGLVKPSETLSLTCTVSGGSISGYYWSWIRQPPGKGLEWIGYIYYSGSTNYNPSLKSRVSISVDTSKNQFSLRLSSVTAADSAVYFCARDERDAYYYGMDVWGQGTTVTVSSASTKGPSVFPLAPSSKSTSGGTAALGCLVKDYFPEPVTVSWNSGALTSGVHTFPAVLQSSGLYSLSSVVTVPSSSLGTQTYICNVNHKPSNTKVDKKVEPKSCAAAHHHHHHGAAEQKLISEEDLNGAA

SEQ ID NO: 6974 - protein, 258 aa, Artificial Sequence
  source: /note="Description of Artificial Sequence: Synthetic polypeptide"
QVQLVQSGGGVVQPGRSLRLSCAASGFTFSSYAMHWVRQAPGKGLEWVAVISYDGSNKYYADSVKGRFTISRDNSKNTLYLQMNSLRAEDTAVYYCARDRSFWSGYYIINYYYYGMDVWGQGTTVTVSSASTKGPSVFPLAPSSKSTSGGTAALGCLVKDYFPEPVTVSWNSGALTSGVHTFPAVLQSSGLYSLSSVVTVPSSSLGTQTYICNVNHKPSNTKVDKKVEPKSCAAAHHHHHHGAAEQKLISEEDLNGAA

SEQ ID NO: 6975 - protein, 448 aa, Artificial Sequence
  source: /note="Description of Artificial Sequence: Synthetic polypeptide"
EVQLLESGGGLVQPGGSLRLSCAASGFTFSIYSMNWVRQAPGKGLEWVSSIGSSGGTTYYADSVKGRFTISRDNSKNTLYLQMNSLRAEDTAVYYCAGSQWLYGMDVWGQGTTVTVSSASTKGPSVFPLAPSSKSTSGGTAALGCLVKDYFPEPVTVSWNSGALTSGVHTFPAVLQSSGLYSLSSVVTVPSSSLGTQTYICNVNHKPSNTKVDKRVEPKSCDKTHTCPPCPAPELLGGPSVFLFPPKPKDTLMISRTPEVTCVVVDVSHEDPEVKFNWYVDGVEVHNAKTKPREEQYNSTYRVVSVLTVLHQDWLNGKEYKCKVSNKALPAPIEKTISKAKGQPREPQVYTLPPSREEMTKNQVSLTCLVKGFYPSDIAVEWESNGQPENNYKTTPPVLDSDGSFFLYSKLTVDKSRWQQGNVFSCSVMHEALHNHYTQKSLSLSPGK

SEQ ID NO: 6976 - protein, 119 aa, Artificial Sequence
  source: /note="Description of Artificial Sequence: Synthetic polypeptide"
QVQLVQSGAEVKKPGSSVKVSCKASGYAFSYSWINWVRQAPGQGLEWMGRIFPGDGDTDYNGKFKGRVTITADKSTSTAYMELSSLRSEDTAVYYCARNVFDGYWLVYWGQGTLVTVSS

SEQ ID NO: 6977 - protein, 449 aa, Artificial Sequence
  source: /note="Description of Artificial Sequence: Synthetic polypeptide"
QVQLVQSGAEVKKPGSSVKVSCKASGYAFSYSWINWVRQAPGQGLEWMGRIFPGDGDTDYNGKFKGRVTITADKSTSTAYMELSSLRSEDTAVYYCARNVFDGYWLVYWGQGTLVTVSSASTKGPSVFPLAPSSKSTSGGTAALGCLVKDYFPEPVTVSWNSGALTSGVHTFPAVLQSSGLYSLSSVVTVPSSSLGTQTYICNVNHKPSNTKVDKKVEPKSCDKTHTCPPCPAPELLGGPSVFLFPPKPKDTLMISRTPEVTCVVVDVSHEDPEVKFNWYVDGVEVHNAKTKPREEQYNSTYRVVSVLTVLHQDWLNGKEYKCKVSNKALPAPIEKTISKAKGQPREPQVYTLPPSRDELTKNQVSLTCLVKGFYPSDIAVEWESNGQPENNYKTTPPVLDSDGSFFLYSKLTVDKSRWQQGNVFSCSVMHEALHNHYTQKSLSLSPGK

SEQ ID NO: 6978 - protein, 451 aa, Artificial Sequence
  source: /note="Description of Artificial Sequence: Synthetic polypeptide"
QVQLQQSGAEVKKPGSSVKVSCKASGYTFTSYNMHWVKQAPGQGLEWIGAIYPGMGDTSYNQKFKGKATLTADESTNTAYMELSSLRSEDTAFYYCARSTYYGGDWYFDVWGQGTTVTVSSASTKGPSVFPLAPSSKSTSGGTAALGCLVKDYFPEPVTVSWNSGALTSGVHTFPAVLQSSGLYSLSSVVTVPSSSLGTQTYICNVNHKPSNTKVDKRVEPKSCDKTHTCPPCPAPELLGGPSVFLFPPKPKDTLMISRTPEVTCVVVDVSHEDPEVKFNWYVDGVEVHNAKTKPREEQYNSTYRVVSVLTVLHQDWLNGKEYKCKVSNKALPAPIEKTISKAKGQPREPQVYTLPPSREEMTKNQVSLTCLVKGFYPSDIAVEWESNGQPENNYKTTPPVLDSDGSFFLYSKLTVDKSRWQQGNVFSCSVMHEALHNHYTQKSLSLSPGK

SEQ ID NO: 6979 - protein, 449 aa, Artificial Sequence; identical to SEQ ID NO: 6977
  source: /note="Description of Artificial Sequence: Synthetic polypeptide"

SEQ ID NO: 6980 - protein, 448 aa, Artificial Sequence; identical to SEQ ID NO: 6702
  source: /note="Description of Artificial Sequence: Synthetic polypeptide"

SEQ ID NO: 6981 - protein, 450 aa, Artificial Sequence
  source: /note="Description of Artificial Sequence: Synthetic polypeptide"
EVQLVQSGAEVKKPGESLKISCKGSGRTFTSYNMHWVRQMPGKGLEWMGAIYPLTGDTSYNQKSKLQVTISADKSISTAYLQWSSLKASDTAMYYCARSTYVGGDWQFDVWGKGTTVTVSSASTKGPSVFPLAPSSKSTSGGTAALGCLVKDYFPEPVTVSWNSGALTSGVHTFPAVLQSSGLYSLSSVVTVPSSSLGTQTYICNVNHKPSNTKVDKKVEPKSCDKTHTCPPCPAPELLGGPSVFLFPPKIKDTLMISRTPEVTCVVVDVSHEDPEVKFNWYVDGVEVHNAKTKPREEQYNSTYRVVSVLTVLHQDWLNGKEYKCKVSNKALPAPIEKTISKQKGQPREPQVYTLPPSRDELTKNQVSLTCLVKGFYPSDIAVEWESNGQPENNYKTTPPVLDSDGSFFLYSKLTVDKSRWQQGNVFSCSVMHEALHNHYTQKSLSLSPG

SEQ ID NO: 6982 - protein, 450 aa, Artificial Sequence
  source: /note="Description of Artificial Sequence: Synthetic polypeptide"
QVELVQSGAEVKKPGESLKISCKGSGYSFTSYWIGWVRQAPGKGLEWMGIIDPGDSRTRYSPSFQGQVTISADKSISTAYLQWSSLKASDTAMYYCARGQLYGGTYMDGWGQGTLVTVSSASTKGPSVFPLAPSSKSTSGGTAALGCLVKDYFPEPVTVSWNSGALTSGVHTFPAVLQSSGLYSLSSVVTVPSSSLGTQTYICNVNHKPSNTKVDKKVEPKSCDKTHTCPPCPAPELLGGPSVFLFPPKPKDTLMISRTPEVTCVVVDVSHEDPEVKFNWYVDGVEVHNAKTKPREEQYNSTYRVVSVLTVLHQDWLNGKEYKCKVSNKALPAPIEKTISKAKGQPREPQVYTLPPSRDELTKNQVSLTCLVKGFYPSDIAVEWESNGQPENNYKTTPPVLDSDGSFFLYSKLTVDKSRWQQGNVFSCSVMHEALHNHYTQKSLSLSPGK

SEQ ID NO: 6983 - protein, 452 aa, Artificial Sequence
  source: /note="Description of Artificial Sequence: Synthetic polypeptide"
EVQLVESGGGLVQPGGSLRLSCAASGFTFSSYLMTWVRQAPGKGLEWVANIKQDGSEKYYVDSVKGRFTISRDNAKNSLNLQMNSLRAEDTAVYYCTRDGYSSGRHYGMDVWGQGTTVIVSSASTKGPSVFPLAPSSKSTSGGTAALGCLVKDYFPEPVTVSWNSGALTSGVHTFPAVLQSSGLYSLSSVVTVPSSSLGTQTYICNVNHKPSNTKVDKRVEPKSCDKTHTCPPCPAPELLGGPSVFLFPPKPKDTLMISRTPEVTCVVVDVSHEDPEVKFNWYVDGVEVHNAKTKPREEQYNSTYRVVSVLTVLHQDWLNGKEYKCKVSNKALPAPIEKTISKAKGQPREPQVYTLPPSREEMTKNQVSLTCLVKGFYPSDIAVEWESNGQPENNYKTTPPVLDSDGSFFLYSKLTVDKSRWQQGNVFSCSVMHEALHNHYTQKSLSLSPGK

SEQ ID NO: 6984 - protein, 449 aa, Artificial Sequence
  source: /note="Description of Artificial Sequence: Synthetic polypeptide"
QVQLVQSGAEVKKPGETVKISCKASDYTFTYYGMNWVKQAPGQGLKWMGWIDTTTGEPTYAQKFQGRIAFSLETSASTAYLQIKSLKSEDTATYFCARRGPYNWYFDVWGQGTTVTVSSASTKGPSVFPLAPSSKSTSGGTAALGCLVKDYFPEPVTVSWNSGALTSGVHTFPAVLQSSGLYSLSSVVTVPSSSLGTQTYICNVNHKPSNTKVDKKVEPKSCDKTHTCPPCPAPELLGGPSVFLFPPKPKDTLMISRTPEVTCVVVDVSHEDPEVKFNWYVDGVEVHNAKTKPREEQYNSTYRVVSVLTVLHQDWLNGKEYKCKVSNKALPAPIEKTISKAKGQPREPQVYTLPPSRDELTKNQVSLTCLVKGFYPSDIAVEWESNGQPENNYKTTPPVLDSDGSFFLYSKLTVDKSRWQQGNVFSCSVMHEALHNHYTQKSLSLSPGK

SEQ ID NO: 6985 - protein, 449 aa, Artificial Sequence
  source: /note="Description of Artificial Sequence: Synthetic polypeptide"
QVQLQQSGAEVKKPGASVKVSCEASGYTFPSYVLHWVKQAPGQGLEWIGYINPYNDGTQYNEKFKGKATLTRDTSINTAYMELSRLRSDDTAVYYCARGFGGSYGFAYWGQGTLVTVSSASTKGPSVFPLAPSSKSTSGGTAALGCLVKDYFPEPVTVSWNSGALTSGVHTFPAVLQSSGLYSLSSVVTVPSSSLGTQTYICNVNHKPSNTKVDKRVEPKSCDKTHTCPPCPAPELLGGPSVFLFPPKPKDTLMISRTPEVTCVVVDVSHEDPEVKFNWYVDGVEVHNAKTKPREEQYNSTYRVVSVLTVLHQDWLNGKEYKCKVSNKALPAPIEKTISKAKGQPREPQVYTLPPSREEMTKNQVSLTCLVKGFYPSDIAVEWESNGQPENNYKTTPPVLDSDGSFFLYSKLTVDKSRWQQGNVFSCSVMHEALHNHYTQKSLSLSPGK

SEQ ID NO: 6986 - protein, 443 aa, Artificial Sequence
  source: /note="Description of Artificial Sequence: Synthetic polypeptide"
QVQLKESGPDLVAPSQSLSITCTVSGFSLSKFGVNWVRQPPGKGLEWLGVIWGDGSTSYNSGLISRLSISKENSKSQVFLKLNSLQADDTATYYCVKPGGDYWGHGTSVTVSSASTKGPSVFPLAPSSKSTSGGTAALGCLVKDYFPEPVTVSWNSGALTSGVHTFPAVLQSSGPYSLSSVVTVPSSSLGTQTYICNVNHKPSNTKVDKKVEPKSCDKTHTCPPCPAPELLGGPSVFLFPPKPKDTLMISRTPEVTCVVVDVSHEDPEVKFNWYVDGVEVHNAKTKPREEQYNSTYRVVSVLTVLHQDWLNGKEYKCKVSNKALPAPIEKTISKAKGQPREPQVYTLPPSRDELTKNQVSLTCLVKGFYPSDIAVEWESNGQPENNYKTMPPVLDSDGSFFLYSKLTVDKSRWQQGNVFSCSVMHEALHNHYTQKSLSLSPGK

SEQ ID NO: 6987 - protein, 449 aa, Artificial Sequence
  source: /note="Description of Artificial Sequence: Synthetic polypeptide"
QVQLVQSGAEVKKPGETVKISCKASDYTFTYYGMNWVKQAPGQGLKWMGWIDTTTGEFTYAQKFQGRIAFSLETSASTAYLQIKSLKSEDTATYFCARRGPYNWYTDVWGQGTTVTVSSASTKGPSVFPLAPSSKSTSGGTAALGCLVKDYFPEPVTVSWNSGALTSGVHTFPAVLQSSGLYSLSSVVTVPSSSLGTQTYICNSFHKPSNTKVTDKKVEPKSCDKTHTCPPCPAPELLGGPSVFLFPPKPKDTLMISRTPEVTCVWDVSHEDPEVKFNWYVDGVEVHNAKTKPREEQYNSTYRVVSVLTVLHQDWLNGKEYKCKVSNKALPAPIEKTISKAKGQPREPQVYTLPPSRDELTKNQVSLTCLVKGFYPSDIAVEWESNGQPENNYKTTPPVLDSDGSFFLYSKLTVDKSRWQQGNVFSCSVMHEALHNHYTQKSLSLSPGK

SEQ ID NO: 6988 - protein, 448 aa, Artificial Sequence
  source: /note="Description of Artificial Sequence: Synthetic polypeptide"
QVQLVESGGGVVQPGRSLRLSCAASGFTFSSFGMHWVRQAPGKGLEWVAYISSGSFTIYYADSVKGRFTISRDNSKNTLYLQMNSLRAEDTAVYYCARMRKGYAMDYWGQGTLVTVSSASTKGPSVFPLAPSSKSTSGGTAALGCLVKDYFPEPVTVSWNSGALTSGVHTFPAVLQSSGLYSLSSVVTVPSSSLGTQTYICNVNHKPSNTKVDKKVEPKSCDKTHTCPPCPAPELLGGPSVFLFPPKPKDTLMISRTPEVTCVVVDVSHEDPEVKFNWYVDGVEVHNAKTKPREEQYNSTYRVVSVLTVLHQDWLNGKEYKCKVSNKALPAPIEKTISKAKGQPREPQVYTLPPSRDELTKNQVSLTCLVKGFYPSDIAVEWESNGQPENNYKTTPPVLDSDGSFFLYSKLTVDKSRWQQGNVFSCSVMHEALHNHYTQKSLSLSPGK

SEQ ID NO: 6989 - protein, 446 aa, Artificial Sequence; identical to SEQ ID NO: 6219
  source: /note="Description of Artificial Sequence: Synthetic polypeptide"

SEQ ID NO: 6990 - protein, 454 aa, Artificial Sequence; identical to SEQ ID NO: 6220
  source: /note="Description of Artificial Sequence: Synthetic polypeptide"

SEQ ID NO: 6991 - protein, 462 aa, Artificial Sequence; identical to SEQ ID NO: 3870
  source: /note="Description of Artificial Sequence: Synthetic polypeptide"

SEQ ID NO: 6992 - protein, 462 aa, Artificial Sequence; identical to SEQ ID NO: 3871
  source: /note="Description of Artificial Sequence: Synthetic polypeptide"

SEQ ID NO: 6993 - protein, 462 aa, Artificial Sequence; identical to SEQ ID NO: 3872
  source: /note="Description of Artificial Sequence: Synthetic polypeptide"

SEQ ID NO: 6994 - protein, 462 aa, Artificial Sequence; identical to SEQ ID NO: 3873
  source: /note="Description of Artificial Sequence: Synthetic polypeptide"

SEQ ID NO: 6995 - protein, 462 aa, Artificial Sequence; identical to SEQ ID NO: 3874
  source: /note="Description of Artificial Sequence: Synthetic polypeptide"

SEQ ID NO: 6996 - protein, 462 aa, Artificial Sequence; identical to SEQ ID NO: 3875
  source: /note="Description of Artificial Sequence: Synthetic polypeptide"

SEQ ID NO: 6997 - protein, 462 aa, Artificial Sequence; identical to SEQ ID NO: 3876
  source: /note="Description of Artificial Sequence: Synthetic polypeptide"

SEQ ID NO: 6998 - protein, 144 aa, Artificial Sequence; identical to SEQ ID NO: 3877
  source: /note="Description of Artificial Sequence: Synthetic polypeptide"

SEQ ID NO: 6999 - protein, 114 aa, Artificial Sequence; identical to SEQ ID NO: 3878
  source: /note="Description of Artificial Sequence: Synthetic polypeptide"
  MOD_RES (3)..(3): Any amino acid

SEQ ID NO: 7000 - protein, 441 aa, Artificial Sequence
  source: /note="Description of Artificial Sequence: Synthetic polypeptide"
EVQLVESGGGLVQPGGSLRLSCAASGFTFSSSGMSWVRQAPGKGLEWVSVIASSGSNTYYADSVKGRFTISRDNSKNTLYLQMNSLRAEDTAVYYCARSIFYTTWGQGTLVTVSSASTKGPSVFPLAPCSRSTSESTAALGCLVKDYFPEPVTVSWNSGALTSGVHTFPAVLQSSGLYSLSSVVTVPSSNFGTQTYTCNVDHKPSNTKVDKTVERKCCVECPPCPAPPVAGPSVFLFPPKPKDTLMISRTPEVTCVVVDVSHEDPEVQFNWYVDGVEVHNAKTKPREEQFNSTFRVVSVLTVVHQDWLNGKEYKCKVSNKGLPAPIEKTISKTKGQPREPQVYTLPPSREEMTKNQVSLTCLVKGFYPSDIAVEWESNGQPENNYKTTPPMLDSDGSFFLYSKLTVDKSRWQQGNVFSCSVMHEALHNHYTQKSLSLSPGK

SEQ ID NO: 7001 - protein, 447 aa, Artificial Sequence
  source: /note="Description of Artificial Sequence: Synthetic polypeptide"
QVQLVQSGAEVKKPGASVKISCKVSGYTLRGYWIEWVRQAPGKGLEWIGQILPGTGRTNYNEKFKGRVTMTADTSTDTAYMELSSLRSEDTAVYYCARFDGNYGYYAMDYWGQGTTVTVSSASTKGPSVFPLAPCSRSTSESTAALGCLVKDYFPEPVTVSWNSGALTSGVHTFPAVLQSSGLYSLSSVVTVPSSNFGTQTYTCNVDHKPSNTKVDKTVERKCCVECPPCPAPPVAGPSVFLFPPKPKDTLMISRTPEVTCVVVDVSHEDPEVQFNWYVDGVEVHNAKTKPREEQFNSTFRVVSVLTVVHQDWLNGKEYKCKVSNKGLPAPIEKTISKTKGQPREPQVYTLPPSREEMTKNQVSLTCLVKGFYPSDIAVEWESNGQPENNYKTTPPMLDSDGSFFLYSKLTVDKSRWQQGNVFSCSVMHEALHNHYTQKSLSLSPGK

SEQ ID NO: 7002 - protein, 453 aa, Artificial Sequence
  source: /note="Description of Artificial Sequence: Synthetic polypeptide"
EVQLVESGGGLVQPGGSLRLSCAASGFTFSSYAMSWVRQAPGKGLEWVSQISPAGGYTNYADSVKGRFTISADTSKNTAYLQMNSLRAEDTAVYYCARGELPYYRMSKVMDVWGQGTLVTVSSASTKGPSVFPLAPSSKSTSGGTAALGCLVKDYFPEPVTVSWNSGALTSGVHTFPAVLQSSGLYSLSSVVTVPSSSLGTQTYICNVNHKPSNTKVDKKVEPKSCDKTHTCPPCPAPELLGGPSVFLFPPKPKDTLMISRTPEVTCVVVDVSHEDPEVKFNWYVDGVEVHNAKTKPREEQYNSTYRVVSVLTVLHQDWLNGKEYKCKVSNKALPAPIEKTISKAKGQPREPQVYTLPPSREEMTKNQVSLTCLVKGFYPSDIAVEWESNGQPENNYKTTPPVLDSDGSFFLYSKLTVDKSRWQQGNVFSCSVMHEALHNHYTQKSLSLSPGK

SEQ ID NO: 7003 - protein, 449 aa, Artificial Sequence
  source: /note="Description of Artificial Sequence: Synthetic polypeptide"
EVQLLESGGGLVQPGGSLRLSCAASGFTFNSYAMSWVRQAPGKGLEWVSIISGSGGFTYYADSVKGRFTISRDNSRTTLYLQMNSLRAEDTAVYYCAKDRLVAPGTFDYWGQGALVTVSSASTKGPSVFPLAPSSKSTSGGTAALGCLVKDYFPEPVTVSWNSGALTSGVHTFPAVLQSSGLYSLSSVVTVPSSSLGTQTYICNVNHKPSNTKVDKKVEPKSCDKTHTCPPCPAPELLGGPSVFLFPPKPKDTLMISRTPEVTCVVVDVSHEDPEVKFNWYVDGVEVHNAKTKPREEQYNSTYRVVSVLTVLHQDWLNGKEYKCKVSNKALPAPIEKTISKAKGQPREPQVYTLPPSRDELTKNQVSLTCLVKGFYPSDIAVEWESNGQPENNYKTTPPVLDSDGSFFLYSKLTVDKSRWQQGNVFSCSVMHEALHNHYTQKSLSLSPG

SEQ ID NO: 7004 - protein, 443 aa, Artificial Sequence
  source: /note="Description of Artificial Sequence: Synthetic polypeptide"
EVQLVQSGAEVKKPGESLRISCKGSGYTFTTYWMHWIRQSPSRGLEWLGNIYPGTGGSNFDEKFKNRFTISRDNSKNTLYLQMNSLRAEDTAVYYCTRWTTGTGAYWGQGTTVTVSSASTKGPSVFPLAPCSRSTSESTAALGCLVKDYFPEPVTVSWNSGALTSGVHTFPAVLQSSGLYSLSSVVTVPSSSLGTKTYTCNVDHKPSNTKVDKRVESKYGPPCPPCPAPEFLGGPSVFLFPPKPKDTLMISRTPEVTCVVVDVSQEDPEVQFNWYVDGVEVHNAKTKPREEQFNSTYRVVSVLTVLHQDWLNGKEYKCKVSNKGLPSSIEKTISKAKGQPREPQVYTLPPSQEEMTKNQVSLTCLVKGFYPSDIAVEWESNGQPENNYKTTPPVLDSDGSFFLYSRLTVDKSRWQEGNVFSCSVMHEALHNHYTQKSLSLSLG

SEQ ID NO: 7005 - protein, 444 aa, Artificial Sequence
  source: /note="Description of Artificial Sequence: Synthetic polypeptide"
QVQLQQPGSELVRPGASVKLSCKASGYTFTTYWMHWVRQRPGQGLEWIGNIYPGTGGSNFDEKFKNRTSLTVDTSSTTAYMHLASLTSEDSAVYYCTRWTTGTGAYWGQGTTVTVSSASTKGPSVFPLAPCSRSTSESTAALGCLVKDYFPEPVTVSWNSGALTSGVHTFPAVLQSSGLYSLSSVVTVPSSSLGTKTYTCNVDHKPSNTKVDKRVESKYGPPCPPCPAPEFLGGPSVFLFPPKPKDTLMISRTPEVTCVVVDVSQEDPEVQFNWYVDGVEVHNAKTKPREEQFNSTYRVVSVLTVLHQDWLNGKEYKCKVSNKGLPSSIEKTISKAKGQPREPQVYTLPPSQEEMTKNQVSLTCLVKGFYPSDIAVEWESNGQPENNYKTTPPVLDSDGSFFLYSRLTVDKSRWQEGNVFSCSVMHEALHNHYTQKSLSLSLGK

SEQ ID NO: 7006 - protein, 444 aa, Artificial Sequence
  source: /note="Description of Artificial Sequence: Synthetic polypeptide"
QVQLQQSGSELVRPGASVKLSCKASGYTFTTYWMHWVRQRPGQGLEWIGNIYPGTGGSNFDEKFKNRTSLTVDTSSTTAYMHLASLTSEDSAVYYCTRWTTGTGAYWGQGTTVTVSSASTKGPSVFPLAPCSRSTSESTAALGCLVKDYFPEPVTVSWNSGALTSGVHTFPAVLQSSGLYSLSSVVTVPSSSLGTKTYTCNVDHKPSNTKVDKRVESKYGPPCPPCPAPEFLGGPSVFLFPPKPKDTLMISRTPEVTCVVVDVSQEDPEVQFNWYVDGVEVHNAKTKPREEQFNSTYRVVSVLTVLHQDWLNGKEYKCKVSNKGLPSSIEKTISKAKGQPREPQVYTLPPSQEEMTKNQVSLTCLVKGFYPSDIAVEWESNGQPENNYKTTPPVLDSDGSFFLYSRLTVDKSRWQEGNVFSCSVMHEALHNHYTQKSLSLSLGK

SEQ ID NO: 7007 - protein, 444 aa, Artificial Sequence
  source: /note="Description of Artificial Sequence: Synthetic polypeptide"
EVQLVQSGAEVKKPGESLRISCKGSGYTFTTYWMHWVRQATGQGLEWMGNIYPGTGGSNFDEKFKNRVTITADKSTSTAYMELSSLRSEDTAVYYCTRWTTGTGAYWGQGTTVTVSSASTKGPSVFPLAPCSRSTSESTAALGCLVKDYFPEPVTVSWNSGALTSGVHTFPAVLQSSGLYSLSSVVTVPSSSLGTKTYTCNVDHKPSNTKVDKRVESKYGPPCPPCPAPEFLGGPSVFLFPPKPKDTLMISRTPEVTCVVVDVSQEDPEVQFNWYVDGVEVHNAKTKPREEQFNSTYRVVSVLTVLHQDWLNGKEYKCKVSNKGLPSSIEKTISKAKGQPREPQVYTLPPSQEEMTKNQVSLTCLVKGFYPSDIAVEWESNGQPENNYKTTPPVLDSDGSFFLYSRLTVDKSRWQEGNVFSCSVMHEALHNHYTQKSLSLSLGK

SEQ ID NO: 7008 - protein, 444 aa, Artificial Sequence
  source: /note="Description of Artificial Sequence: Synthetic polypeptide"
EVQLVQSGAEVKKPGESLRISCKGSGYTFTTYWMHWIRQSPSRGLEWLGNIYPGTGGSNFDEKFKNRFTISRDNSKNTLYLQMNSLRAEDTAVYYCTRWTTGTGAYWGQGTTVTVSSASTKGPSVFPLAPCSRSTSESTAALGCLVKDYFPEPVTVSWNSGALTSGVHTFPAVLQSSGLYSLSSVVTVPSSSLGTKTYTCNVDHKPSNTKVDKRVESKYGPPCPPCPAPEFLGGPSVFLFPPKPKDTLMISRTPEVTCVVVDVSQEDPEVQFNWYVDGVEVHNAKTKPREEQFNSTYRVVSVLTVLHQDWLNGKEYKCKVSNKGLPSSIEKTISKAKGQPREPQVYTLPPSQEEMTKNQVSLTCLVKGFYPSDIAVEWESNGQPENNYKTTPPVLDSDGSFFLYSRLTVDKSRWQEGNVFSCSVMHEALHNHYTQKSLSLSLGK

SEQ ID NO: 7009 - protein, 444 aa, Artificial Sequence
  source: /note="Description of Artificial Sequence: Synthetic polypeptide"
QVQLVQSGAEVKKPGASVKVSCKASGYTFTTYWMHWIRQSPSRGLEWLGNIYPGTGGSNFDEKFKNRFTISRDNSKNTLYLQMNSLRAEDTAVYYCTRWTTGTGAYWGQGTTVTVSSASTKGPSVFPLAPCSRSTSESTAALGCLVKDYFPEPVTVSWNSGALTSGVHTFPAVLQSSGLYSLSSVVTVPSSSLGTKTYTCNVDHKPSNTKVDKRVESKYGPPCPPCPAPEFLGGPSVFLFPPKPKDTLMISRTPEVTCVVVDVSQEDPEVQFNWYVDGVEVHNAKTKPREEQFNSTYRVVSVLTVLHQDWLNGKEYKCKVSNKGLPSSIEKTISKAKGQPREPQVYTLPPSQEEMTKNQVSLTCLVKGFYPSDIAVEWESNGQPENNYKTTPPVLDSDGSFFLYSRLTVDKSRWQEGNVFSCSVMHEALHNHYTQKSLSLSLGK

SEQ ID NO: 7010 - protein, 444 aa, Artificial Sequence
  source: /note="Description of Artificial Sequence: Synthetic polypeptide"
EVQLVQSGAEVKKPGESLRISCKGSGYTFTTYWMHWVRQAPGQGLEWMGNIYPGTGGSNFDEKFKNRFTISRDNSKNTLYLQMNSLRAEDTAVYYCTRWTTGTGAYWGQGTTVTVSSASTKGPSVFPLAPCSRSTSESTAALGCLVKDYFPEPVTVSWNSGALTSGVHTFPAVLQSSGLYSLSSVVTVPSSSLGTKTYTCNVDHKPSNTKVDKRVESKYGPPCPPCPAPEFLGGPSVFLFPPKPKDTLMISRTPEVTCVVVDVSQEDPEVQFNWYVDGVEVHNAKTKPREEQFNSTYRVVSVLTVLHQDWLNGKEYKCKVSNKGLPSSIEKTISKAKGQPREPQVYTLPPSQEEMTKNQVSLTCLVKGFYPSDIAVEWESNGQPENNYKTTPPVLDSDGSFFLYSRLTVDKSRWQEGNVFSCSVMHEALHNHYTQKSLSLSLGK

SEQ ID NO: 7011 - protein, 443 aa, Artificial Sequence
  source: /note="Description of Artificial Sequence: Synthetic polypeptide"
EVQLVQSGAEVKKPGESLRISCKGSGYTFTTYWMHWVRQATGQGLEWMGNIYPGTGGSNFDEKFKNRVTITADKSTSTAYMELSSLRSEDTAVYYCTRWTTGTGAYWGQGTTVTVSSASTKGPSVFPLAPCSRSTSESTAALGCLVKDYFPEPVTVSWNSGALTSGVHTFPAVLQSSGLYSLSSVVTVPSSSLGTKTYTCNVDHKPSNTKVDKRVESKYGPPCPPCPAPEFLGGPSVFLFPPKPKDTLMISRTPEVTCVVVDVSQEDPEVQFNWYVDGVEVHNAKTKPREEQFNSTYRVVSVLTVLHQDWLNGKEYKCKVSNKGLPSSIEKTISKAKGQPREPQVYTLPPSQEEMTKNQVSLTCLVKGFYPSDIAVEWESNGQPENNYKTTPPVLDSDGSFFLYSRLTVDKSRWQEGNVFSCSVMHEALHNHYTQKSLSLSLG

SEQ ID NO: 7012 - protein, 447 aa, Artificial Sequence
  source: /note="Description of Artificial Sequence: Synthetic polypeptide"
QVQLVQSGVEVKKPGASVKVSCKASGYTFTNYYMYWVRQAPGQGLEWMGGINPSNGGTNFNEKFKNRVTLTTDSSTTTAYMELKSLQFDDTAVYYCARRDYRFDMGFDYWGQGTTVTVSSASTKGPSVFPLAPCSRSTSESTAALGCLVKDYFPEPVTVSWNSGALTSGVHTFPAVLQSSGLYSLSSVVTVPSSSLGTKTYTCNVDHKPSNTKVDKRVESKYGPPCPPCPAPEFLGGPSVFLFPPKPKDTLMISRTPEVTCVVVDVSQEDPEVQFNWYVDGVEVHNAKTKPREEQFNSTYRVVSVLTVLHQDWLNGKEYKCKVSNKGLPSSIEKTISKAKGQPREPQVYTLPPSQEEMTKNQVSLTCLVKGFYPSDIAVEWESNGQPENNYKTTPPVLDSDGSFFLYSRLTVDKSRWQEGNVFSCSVMHEALHNHYTQKSLSLSLGK

SEQ ID NO: 7013 - protein, 457 aa, Artificial Sequence
  source: /note="Description of Artificial Sequence: Synthetic polypeptide"
QLQLQESGPGLVKPSETLSLTCTVSGGSINSSSYYWGWLRQSPGKGLEWIGSFFYTGSTYYNPSLRSRLTISVDTSKNQFSLMLSSVTAADTAVYYCARQSTYYYGSGNYYGWFDRWDQGTLVTVSSASTKGPSVFPLAPSSKSTSGGTAALGCLVKDYFPEPVTVSWNSGALTSGVHTFPAVLQSSGLYSLSSVVTVPSSSLGTQTYICNVNHKPSNTKVDKRVEPKSCDKTHTCPPCPAPELLGGPSVFLFPPKPKDTLMISRTPEVTCVVVDVSHEDPEVKFNWYVDGVEVHNAKTKPREEQYNSTYRVVSVLTVLHQDWLNGKEYKCKVSNKALPAPIEKTISKAKGQPREPQVYTLPPSREEMTKNQVSLTCLVKGFYPSDIAVEWESNGQPENNYKTTPPVLDSDGSFFLYSKLTVDKSRWQQGNVFSCSVMHEALHNHYTQKSLSLSPGK

SEQ ID NO: 7014 - protein, 446 aa, Artificial Sequence
  source: /note="Description of Artificial Sequence: Synthetic polypeptide"
QVQLVESGGGLVKPGGSLRLSCAASGFTFSDYYMNWIRQAPGKGLEWVSYISSSGSIIYYADSVKGRFTISRDNAKNSLYLQMNSLRAEDTAVYYCAREGRIAARGMDVWGQGTTVTVSSASTKGPSVFPLAPCSRSTSESTAALGCLVKDYFPEPVTVSWNSGALTSGVHTFPAVLQSSGLYSLSSVVTVPSSNFGTQTYTCNVDHKPSNTKVDKTVERKCCVECPPCPAPPVAGPSVFLFPPKPKDTLMISRTPEVTCVVVDVSHEDPEVQFNWYVDGVEVHNAKTKPREEQFNSTFRVVSVLTVVHQDWLNGKEYKCKVSNKGLPAPIEKTISKTKGQPREPQVYTLPPSREEMTKNQVSLTCLVKGFYPSDIAVEWESNGQPENNYKTTPPMLDSDGSFFLYSKLTVDKSRWQQGNVFSCSVMHEALHNHYTQKSLSLSPGK

SEQ ID NO: 7015 - protein, 448 aa, Artificial Sequence
  source: /note="Description of Artificial Sequence: Synthetic polypeptide"
EVQLVESGGGLVQPGGSLRLSCAASGFTFSDSWIHWVRQAPGKGLEWVAWISPYGGSTYYADSVKGRFTISADTSKNTAYLQMNSLRAEDTAVYYCARRHWPGGFDYWGQGTLVTVSSASTKGPSVFPLAPSSKSTSGGTAALGCLVKDYFPEPVTVSWNSGALTSGVHTFPAVLQSSGLYSLSSVVTVPSSSLGTQTYICNVNHKPSNTKVDKKVEPKSCDKTHTCPPCPAPELLGGPSVFLFPPKPKDTLMISRTPEVTCVVVDVSHEDPEVKFNWYVDGVEVHNAKTKPREEQYASTYRVVSVLTVLHQDWLNGKEYKCKVSNKALPAPIEKTISKAKGQPREPQVYTLPPSREEMTKNQVSLTCLVKGFYPSDIAVEWESNGQPENNYKTTPPVLDSDGSFFLYSKLTVDKSRWQQGNVFSCSVMHEALHNHYTQKSLSLSPGK

SEQ ID NO: 7016 - protein, 451 aa, Artificial Sequence
  source: /note="Description of Artificial Sequence: Synthetic polypeptide"
EVQLVESGGGLVQPGGSLRLSCAASGFTFSRYWMSWVRQAPGKGLEWVANIKQDGSEKYYVDSVKGRFTISRDNAKNSLYLQMNSLRAEDTAVYYCAREGGWFGELAFDYWGQGTLVTVSSASTKGPSVFPLAPSSKSTSGGTAALGCLVKDYFPEPVTVSWNSGALTSGVHTFPAVLQSSGLYSLSSVVTVPSSSLGTQTYICNVNHKPSNTKVDKRVEPKSCDKTHTCPPCPAPEFEGGPSVFLFPPKPKDTLMISRTPEVTCVVVDVSHEDPEVKFNWYVDGVEVHNAKTKPREEQYNSTYRVVSVLTVLHQDWLNGKEYKCKVSNKALPASIEKTISKAKGQPREPQVYTLPPSREEMTKNQVSLTCLVKGFYPSDIAVEWESNGQPENNYKTTPPVLDSDGSFFLYSKLTVDKSRWQQGNVFSCSVMHEALHNHYTQKSLSLSPGK

SEQ ID NO: 7017 - protein, 118 aa, Artificial Sequence
  source: /note="Description of Artificial Sequence: Synthetic polypeptide"
EVQLVESGGGLVQPGGSLRLSCAASGFTFSDSWIHWVRQAPGKGLEWVAWISPYGGSTYYADSVKGRFTISADTSKNTAYLQMNSLRAEDTAVYYCARRHWPGGFDYWGQGTLVTVSA

SEQ ID NO: 7018 - protein, 440 aa, Artificial Sequence
  source: /note="Description of Artificial Sequence: Synthetic polypeptide"
QVQLVESGGGVVQPGRSLRLDCKASGITFSNSGMHWVRQAPGKGLEWVAVIWYDGSKRYYADSVKGRFTISRDNSKNTLFLQMNSLRAEDTAVYYCATNDDYWGQGTLVTVSSASTKGPSVFPLAPCSRSTSESTAALGCLVKDYFPEPVTVSWNSGALTSGVHTFPAVLQSSGLYSLSSVVTVPSSSLGTKTYTCNVDHKPSNTKVDKRVESKYGPPCPPCPAPEFLGGPSVFLFPPKPKDTLMISRTPEVTCVVVDVSQEDPEVQFNWYVDGVEVHNAKTKPREEQFNSTYRVVSVLTVLHQDWLNGKEYKCKVSNKGLPSSIEKTISKAKGQPREPQVYTLPPSQEEMTKNQVSLTCLVKGFYPSDIAVEWESNGQPENNYKTTPPVLDSDGSFFLYSRLTVDKSRWQEGNVFSCSVMHEALHNHYTQKSLSLSLGK

SEQ ID NO: 7019 - protein, 118 aa, Artificial Sequence [sequence omitted]

SEQ ID NO: 7020 - protein, 447 aa, Artificial Sequence
  source: /note="Description of Artificial Sequence: Synthetic polypeptide"
EVQLVESGGGLVQPGGSLRLSCAASGFTFSDSWIHWVRQAPGKGLEWVAWISPYGGSTYYADSVKGRFTISADTSKNTAYLQMNSLRAEDTAVYYCARRHWPGGFDYWGQGTLVTVSSASTKGPSVFPLAPSSKSTSGGTAALGCLVKDYFPEPVTVSWNSGALTSGVHTFPAVLQSSGLYSLSSVVTVPSSSLGTQTYICNVNHKPSNTKVDKKVEPKSCDKTHTCPPCPAPELLGGPSVFLFPPKPKDTLMISRTPEVTCVVVDVSHEDPEVKFNWYVDGVEVHNAKTKPREEQYASTYRVVSVLTVLHQDWLNGKEYKCKVSNKALPAPIEKTISKAKGQPREPQVYTLPPSREEMTKNQVSLTCLVKGFYPSDIAVEWESNGQPENNYKTTPPVLDSDGSFFLYSKLTVDKSRWQQGNVFSCSVMHEALHNHYTQKSLSLSPG

SEQ ID NO: 7021 - protein, 122 aa, Artificial Sequence
  source: /note="Description of Artificial Sequence: Synthetic polypeptide"
EVQLVESGGGLVQPGGSLRLSCAASGFTFSDSWIHWVRQAPGKGLEWVAWISPYGGSTYYADSVKGRFTISADTSKNTAYLQMNSLRAEDTAVYYCARRHWPGGFDYWGQGTLVTVSSASTK

SEQ ID NO: 7022 - protein, 450 aa, Artificial Sequence
  source: /note="Description of Artificial Sequence: Synthetic polypeptide"
EVQLQQSGPELEKPGASVKLSCKASGYSFTGYNMNWVKQSHGKSLEWIGHIDPYYGDTSYNQKFRGKATLTVDKSSSTAYMQLKSLTSEDSAVYYCVKGGYYGHWYFDVWGAGTTVTVSSASTKGPSVFPLAPSSKSTSGGTAALGCLVKDYFPEPVTVSWNSGALTSGVHTFPAVLQSSGLYSLSSVVTVPSSSLGTQTYICNVNHKPSNTKVDKKVEPKSCDKTHTCPPCPAPELLGGPSVFLFPPKPKDTLMISRTPEVTCVVVDVSHEDPEVKFNWYVDGVEVHNAKTKPREEQYNSTYRVVSVLTVLHQDWLNGKEYKCKVSNKALPAPIEKTISKAKGQPREPQVYTLPPSRDELTKNQVSLTCLVKGFYPSDIAVEWESNGQPENNYKTTPPVLDSDGSFFLYSKLTVDKSRWQQGNVFSCSVMHEALHNHYTQKSLSLSPGK

SEQ ID NO: 7023 - protein, 447 aa, Artificial Sequence
  source: /note="Description of Artificial Sequence: Synthetic polypeptide"
EVQLVESGGGLVQPGGSLRLSCAASGFTFSSYNMNWVRQAPGKGLEWVSYISSSSSTIYYADSVKGRFTISRDNAKNSLSLQMNSLRDEDTAVYYCARAYYYGMDVWGQGTTVTVSSASTKGPSVFPLAPSSKSTSGGTAALGCLVKDYFPEPVTVSWNSGALTSGVHTFPAVLQSSGLYSLSSVVTVPSSSLGTQTYICNVNHKPSNTKVDKRVEPKSCDKTHTCPPCPAPELLGGPSVFLFPPKPKDTLMISRTPEVTCVVVDVSHEDPEVKFNWYVDGVEVHNAKTKPREEQYNSTYRVVSVLTVLHQDWLNGKEYKCKVSNKALPAPIEKTISKAKGQPREPQVYTLPPSREEMTKNQVSLTCLVKGFYPSDIAVEWESNGQPENNYKTTPPVLDSDGSFFLYSKLTVDKSRWQQGNVFSCSVMHEALHNHYTQKSLSLSPGK

SEQ ID NO: 7024 - protein, 444 aa, Artificial Sequence; identical to SEQ ID NO: 5732
  source: /note="Description of Artificial Sequence: Synthetic polypeptide"

SEQ ID NO: 7025 - protein, 216 aa, Artificial Sequence
  source: /note="Description of Artificial Sequence: Synthetic polypeptide"
EVQLQQSGAELVKPGASVKLSCTASGFNIKDYYIHWVQQRTEQGLEWIGRIDPEDGETKYAPKFQDKATITADTSSNTAYLHLSSLTSEDTAVYYCARWGAYWGQGTLVTVSSASTKGPSVFPLAPSSKSTSGGTAALGCLVKDYFPEPVTVSWNSGALTSGVHTFPAVLQSSGLYSLSSVVTVPSSSLGTQTYICNVNHKPSNTKVDKKVEPKSC

SEQ ID NO: 7026 - protein, 240 aa, Artificial Sequence
  source: /note="Description of Artificial Sequence: Synthetic polypeptide"
QVQLQQPGAELVKPGASVKMSCKASGYTFTSYNMHWVKQTPGRGLEWIGAIYPGNGDTSYNQKFKGKATLTADKSSSTAYMQLSSLTSEDSAVYYCARSTYYGGDWYFNVWGAGTTVTVSSASTKGPEVQLQQSGAELVKPGASVKLSCTASGFNIKDYYIHWVQQRTEQGLEWIGRIDPEDGETKYAPKFQDKATITADTSSNTAYLHLSSLTSEDTAVYYCARWGAYWGQGTLVTVSS

SEQ ID NO: 7027 - protein, 239 aa, Artificial Sequence
  source: /note="Description of Artificial Sequence: Synthetic polypeptide"
EVQLVESGGGLVQPGGSLRLSCAASGFNIKDTYIHWVRQAPGKGLEWVARIYPTNGYTRYADSVKGRFTISADTSKNTAYLQMNSLRAEDTAVYYCSRWGGDGFYAMDYWGQGTLVTVSSASTKGPEVQLQQSGAELVKPGASVKLSCTASGFNIKDYYIHWVQQRTEQGLEWIGRIDPEDGETKYAPKFQDKATITADTSSNTAYLHLSSLTSEDTAVYYCARWGAYWGQGTLVTVSS

SEQ ID NO: 7028 - protein, 237 aa, Artificial Sequence
  source: /note="Description of Artificial Sequence: Synthetic polypeptide"
QVQLVESGGGVVQPGRSLRLSCAASGFTFSSFGMHWVRQAPGKGLEWVAYISSGSFTIYYADSVKGRFTISRDNSKNTLYLQMNSLRAEDTAVYYCARMRKGYAMDYWGQGTLVTVSSASTKGPEVQLQQSGAELVKPGASVKLSCTASGFNIKDYYIHWVQQRTEQGLEWIGRIDPEDGETKYAPKFQDKATITADTSSNTAYLHLSSLTSEDTAVYYCARWGAYWGQGTLVTVSS

SEQ ID NO: 7029 - protein, 449 aa, Artificial Sequence
  source: /note="Description of Artificial Sequence: Synthetic polypeptide"
EVQLVESGGGLVQPGGSLRLSCAASGFDFSRYWMSWVRQAPGKGLEWIGEINPDSSTINYAPSLKDKFIISRDNAKNSLYLQMNSLRAEDTAVYYCARPDGNYWYFDVWGQGTLVTVSSASTKGPSVFPLAPSSKSTSGGTAALGCLVKDYFPEPVTVSWNSGALTSGVHTFPAVLQSSGLYSLSSVVTVPSSSLGTQTYICNVNHKPSNTKVDKKVEPKSCDKTHTCPPCPAPELLGGPSVFLFPPKPKDTLMISRTPEVTCVVVDVSHEDPEVKFNWYVDGVEVHNAKTKPREEQYNSTYRVVSVLTVLHQDWLNGKEYKCKVSNKALPAPIEKTISKAKGQPREPQVYTLPPSRDELTKNQVSLTCLVKGFYPSDIAVEWESNGQPENNYKTTPPVLDSDGSFFLYSKLTVDKSRWQQGNVFSCSVMHEALHNHYTQKSLSLSPGK

SEQ ID NO: 7030 - protein, 450 aa, Artificial Sequence
  source: /note="Description of Artificial Sequence: Synthetic polypeptide"
EVQLVESGGGLVQPGGSLRLSCAASGFSFSDFAMSWVRQAPGKGLEWVATIGRVAFHTYYPDSMKGRFTISRDNSKNTLYLQMNSLRAEDTAVYYCARHRGFDVGHFDFWGQGTLVTVSSASTKGPSVFPLAPSSKSTSGGTAALGCLVKDYFPEPVTVSWNSGALTSGVHTFPAVLQSSGLYSLSSVVTVPSSSLGTQTYICNVNHKPSNTKVDKKVEPKSCDKTHTCPPCPAPELLGGPSVFLFPPKPKDTLMISRTPEVTCVVVDVSHEDPEVKFNWYVDGVEVHNAKTKPREEQYNSTYRVVSVLTVLHQDWLNGKEYKCKVSNKALPAPIEKTISKAKGQPREPQVYTLPPSREEMTKNQVSLTCLVKGFYPSDIAVEWESNGQPENNYKTTPPVLDSDGSFFLYSKLTVDKSRWQQGNVFSCSVMHEALHNHYTQKSLSLSPGK

SEQ ID NO: 7031 - protein, 454 aa, Artificial Sequence
  source: /note="Description of Artificial Sequence: Synthetic polypeptide"
EVQLVESGGGLVQPGGSLRLSCAVSGYSITSDYAWNWVRQAPGKGLEWVGYISNSGSTSYNPSLKSRFTISRDTSKNTLYLQMNSLRAEDTAVYYCARERNYDYDDYYYAMDYWGQGTLVTVSSASTKGPSVFPLAPSSKSTSGGTAALGCLVKDYFPEPVTVSWNSGALTSGVHTFPAVLQSSGLYSLSSVVTVPSSSLGTQTYICNVNHKPSNTKVDKKVEPKSCDKTHTCPPCPAPELLGGPSVFLFPPKPKDTLMISRTPEVTCVVVDVSHEDPEVKFNWYVDGVEVHNAKTKPREEQYNSTYRVVSVLTVLHQDWLNGKEYKCKVSNKALPAPIEKTISKAKGQPREPQVYTLPPSREEMTKNQVSLTCLVKGFYPSDIAVEWESNGQPENNYKTTPPVLDSDGSFFLYSKLTVDKSRWQQGNVFSCSVMHEALHNHYTQKSLSLSPGK

SEQ ID NO: 7032 - protein, 470 aa, Artificial Sequence
  source: /note="Description of Artificial Sequence: Synthetic polypeptide"
MKHLWFFLLLVAAPRWVLSQVQLQESGPGLVKPSETLSLTCAVSGFSLSRYGINWVRQAPGSGLEWIGAIGETGRAYYASWAKSRSTISRDTSKNQVSLKMSSVTAADTAVYFCARGELFNNGWGAFNIWGPGTMVTVSSASTKGPSVFPLAPSSKSTSGGTAALGCLVKDYFPEPVTVSWNSGALTSGVHTFPAVLQSSGLYSLSSVVTVPSSSLGTQTYICNVNHKPSNTKVDKKVEPKSCDKTHTCPPCPAPELLGGPSVFLFPPKPKDTLMISRTPEVTCVVVDVSHEDPEVKFNWYVDGVEVHNAKTKPREEQYNSTYRVVSVLTVLHQDWLNGKEYKCKVSNKALPAPIEKTISKAKGQPREPQVYTLPPSRDELTKNQVSLTCLVKGFYPSDIAVEWESNGQPENNYKTTPPVLDSDGSFFLYSKLTVDKSRWQQGNVFSCSVMHEALHNHYTQKSLSLSPGK

SEQ ID NO: 7033 - protein, 469 aa, Artificial Sequence
  source: /note="Description of Artificial Sequence: Synthetic polypeptide"
METGLRWLLLVAVLKGVQCQQLQESGPGLVKPSETLSLTCAVSGFSLSRYGINWVRQAPGSGLEWIGAIGETGRAYYASWAKSRSTISRDTSKNQVSLKMSSVTAADTAVYFCARGELFNNGWGAFNIWGPGTMVTVSSASTKGPSVFPLAPSSKSTSGGTAALGCLVKDYFPEPVTVSWNSGALTSGVHTFPAVLQSSGLYSLSSVVTVPSSSLGTQTYICNVNHKPSNTKVDKKVEPKSCDKTHTCPPCPAPELLGGPSVFLFPPKPKDTLMISRTPEVTCVVVDVSHEDPEVKFNWYVDGVEVHNAKTKPREEQYNSTYRVVSVLTVLHQDWLNGKEYKCKVSNKALPAPIEKTISKAKGQPREPQVYTLPPSRDELTKNQVSLTCLVKGFYPSDIAVEWESNGQPENNYKTTPPVLDSDGSFFLYSKLTVDKSRWQQGNVFSCSVMHEALHNHYTQKSLSLSPGK

SEQ ID NO: 7034 - protein, 451 aa, Artificial Sequence
  source: /note="Description of Artificial Sequence: Synthetic polypeptide"
EVQLVQSGGGVERPGGSLRLSCAASGFTFDDYAMSWVRQAPGKGLEWVSGINWQGGSTGYADSVKGRVTISRDNAKNSLYLQMNSLRAEDTAVYYCAKILGAGRGWYFDYWGKGTTVTVSSASTKGPSVFPLAPSSKSTSGGTAALGCLVKDYFPEPVTVSWNSGALTSGVHTFPAVLQSSGLYSLSSVVTVPSSSLGTQTYICNVNHKPSNTKVDKKVEPKSCDKTHTCPPCPAPELLGGPSVFLFPPKPKDTLMISRTPEVTCVVVDVSHEDPEVKFNWYVDGVEVHNAKTKPREEQYNSTYRVVSVLTVLHQDWLNGKEYKCKVSNKALPAPIEKTISKAKGQPREPQVYTLPPSREEMTKNQVSLTCLVKGFYPSDIAVEWESNGQPENNYKTTPPVLDSDGSFFLYSKLTVDKSRWQQGNVFSCSVMHEALHNHYTQKSLSLSPGK

SEQ ID NO: 7035 - protein, 452 aa, Artificial Sequence
  source: /note="Description of Artificial Sequence: Synthetic polypeptide"
QVQLQESGPGLVKPSQTLSLTCTVSGGSISSGDYFWSWIRQLPGKGLEWIGHIHNSGTTYYNPSLKSRVTISVDTSKKQFSLRLSSVTAADTAVYYCARDRGGDYYYGMDVWGQGTTVTVSSASTKGPSVFPLAPSSKSTSGGTAALGCLVKDYFPEPVTVSWNSGALTSGVHTFPAVLQSSGLYSLSSVVTVPSSSLGTQTYICNVNHKPSNTKVDKRVEPKSCDKTHTCPPCPAPELLGGPSVFLFPPKPKDTLMISRTPEVTCVVVDVSHEDPEVKFNWYVDGVEVHNAKTKPREEQYNSTYRVVSVLTVLHQDWLNGKEYKCKVSNKALPAPIEKTISKAKGQPREPQVYTLPPSREEMTKNQVSLTCLVKGFYPSDIAVEWESNGQPENNYKTTPPVLDSDGSFFLYSKLTVDKSRWQQGNVFSCSVMHEALHNHYTQKSLSLSPGK

SEQ ID NO: 7036 - protein, 449 aa, Artificial Sequence
  source: /note="Description of Artificial Sequence: Synthetic polypeptide"
EVQLVESGGGLVQPGGSLRLSCAASGFTFSSYVMSWVRQAPGKGLEWVATISSGGSYTYYPDSVKGRFTISRDNAKNTLYLQMNSLRAEDTAVYYCARRGDSMITTDYWGQGTLVTVSSASTKGPSVFPLAPSSKSTSGGTAALGCLVKDYFPEPVTVSWNSGALTSGVHTFPAVLQSSGLYSLSSVVTVPSSSLGTQTYICNVNHKPSNTKVDKRVEPKSCDKTHTCPPCPAPELLGGPSVFLFPPKPKDTLMISRTPEVTCVVVDVSHEDPEVKFNWYVDGVEVHNAKTKPREEQYNSTYRVVSVLTVLHQDWLNGKEYKCKVSNKALPAPIEKTISKAKGQPREPQVYTLPPSREEMTKNQVSLTCLVKGFYPSDIAVEWESNGQPENNYKTTPPVLDSDGSFFLYSKLTVDKSRWQQGNVFSCSVMHEALHNHYTQKSLSLSPGK

SEQ ID NO: 7037 - protein, 449 aa, Artificial Sequence
  source: /note="Description of Artificial Sequence: Synthetic polypeptide"
EVQLVESGGGLVQPGGSLRLSCAASGFTFSSYWMSWVRQAPGKGLEWVAEIRLKSDNYATHYAESVKGRFTISRDDSKNSLYLQMNSLRAEDTAVYYCTGYYADAMDYWGQGTLVTVSSASTKGPSVFPLAPSSKSTSGGTAALGCLVKDYFPEPVTVSWNSGALTSGVHTFPAVLQSSGLYSLSSVVTVPSSSLGTQTYICNVNHKPSNTKVDKKVEPKSCDKTHTCPPCPAPELLGGPSVFLFPPKPKDTLMISRTPEVTCVVVDVSHEDPEVKFNWYVDGVEVHNAKTKPREEQYNSTYRVVSVLTVLHQDWLNGKEYKCKVSNKALPAPIEKTISKAKGQPREPQVYTLPPSREEMTKNQVSLTCLVKGFYPSDIAVEWESNGQPENNYKTTPPVLDSDGSFFLYSKLTVDKSRWQQGNVFSCSVMHEALHNHYTQKSLSLSPGK

SEQ ID NO: 7038 - protein, 446 aa, Artificial Sequence
  source: /note="Description of Artificial Sequence: Synthetic polypeptide"
QIQLQQSGPEVVKPGASVKISCKASGYTFTDYYITWVKQKPGQGLEWIGWIYPGSGNTKYNEKFKGKATLTVDTSSSTAFMQLSSLTSEDTAVYFCANYGNYWFAYWGQGTQVTVSAASTKGPSVFPLAPSSKSTSGGTAALGCLVKDYFPEPVTVSWNSGALTSGVHTFPAVLQSSGLYSLSSVVTVPSSSLGTQTYICNVNHKPSNTKVDKKVEPKSCDKTHTCPPCPAPELLGGPSVFLFPPKPKDTLMISRTPEVTCVVVDVSHEDPEVKFNWYVDGVEVHNAKTKPREEQYNSTYRVVSVLTVLHQDWLNGKEYKCKVSNKALPAPIEKTISKAKGQPREPQVYTLPPSRDELTKNQVSLTCLVKGFYPSDIAVEWESNGQPENNYKTTPPVLDSDGSFFLYSKLTVDKSRWQQGNVFSCSVMHEALHNHYTQKSLSLSPG

SEQ ID NO: 7039 - protein, 447 aa, Artificial Sequence
  source: /note="Description of Artificial Sequence: Synthetic polypeptide"
VQLQQWGAGLLKPSETLSLTCAVYGGSFSGYYWSWIRQSPEKGLEWIGEINHGGYVTYNPSLESRVTISVDTSKNQFSLKLSSVTAADTAVYYCARDYGPGNYDWYFDLWGRGTLVTVSSASTKGPSVFPLAPCSRSTSESTAALGCLVKDYFPEPVTVSWNSGALTSGVHTFPAVLQSSGLYSLSSVVTVPSSSLGTKTYTCNVDHKPSNTKVDKRVESKYGPPCPPCPAPEFLGGPSVFLFPPKPKDTLMISRTPEVTCVVVDVSQEDPEVQFNWYVDGVEVHNAKTKPREEQFNSTYRVVSVLTVLHQDWLNGKEYKCKVSNKGLPSSIEKTISKAKGQPREPQVYTLPPSQEEMTKNQVSLTCLVKGFYPSDIAVEWESNGQPENNYKTTPPVLDSDGSFFLYSRLTVDKSRWQEGNVFSCSVMHEALHNHYTQKSLSLSLGK

SEQ ID NO: 7040 - protein, 450 aa, Artificial Sequence
  source: /note="Description of Artificial Sequence: Synthetic polypeptide"
QVQLQQWGAGLLKPSETLSLTCAVYGGSFSGYYWSWIRQPPGKGLEWIGEINHSGSTNYNPSLKSRVTISVDTSKNQFSLKLSSVTAADTAVYYCARGYYDILTGYYYYFDYWGQGTLVTVSSASTKGPSVFPLAPCSRSTSESTAALGCLVKDYFPEPVTVSWNSGALTSGVHTFPAVLQSSGLYSLSSVVTVPSSSLGTKTYTCNVDHKPSNTKVDKRVESKYGPPCPPCPAPEFLGGPSVFLFPPKPKDTLMISRTPEVTCVVVDVSQEDPEVQFNWYVDGVEVHNAKTKPREEQFNSTYRVVSVLTVLHQDWLNGKEYKCKVSNKGLPSSIEKTISKAKGQPREPQVYTLPPSQEEMTKNQVSLTCLVKGFYPSDIAVEWESNGQPENNYKTTPPVLDSDGSFFLYSRLTVDKSRWQEGNVFSCSVMHEALHNHYTQKSLSLSLGK

SEQ ID NO: 7041 - protein, 451 aa, Artificial Sequence
  source: /note="Description of Artificial Sequence: Synthetic polypeptide"
EVQLVQSGGGVERPGGSLRLSCAASGFTFDDYGMSWVRQAPGKGLEWVSGINWNGGSTGYADSVKGRVTISRDNAKNSLYLQMNSLRAEDTAVYYCAKILGAGRGWYFDLWGKGTTVTVSSASTKGPSVFPLAPSSKSTSGGTAALGCLVKDYFPEPVTVSWNSGALTSGVHTFPAVLQSSGLYSLSSVVTVPSSSLGTQTYICNVNHKPSNTKVDKRVEPKSCDKTHTCPPCPAPELLGGPSVFLFPPKPKDTLMISRTPEVTCVVVDVSHEDPEVKFNWYVDGVEVHNAKTKPREEQYNSTYRVVSVLTVLHQDWLNGKEYKCKVSNKALPAPIEKTISKAKGQPREPQVYTLPPSREEMTKNQVSLTCLVKGFYPSDIAVEWESNGQPENNYKTTPPVLDSDGSFFLYSKLTVDKSRWQQGNVFSCSVMHEALHNHYTQKSLSLSPGK

SEQ ID NO: 7042 - protein, 453 aa, Artificial Sequence
  source: /note="Description of Artificial Sequence: Synthetic polypeptide"
EVKLLESGGGLVQPGGSLRLSCAASGFTFSTYTMSWVRQTPGKRLEWVAYISKGGGSTYYPDTVKGRFTISRDNSKNTLYLQMNSLRAEDTAVYYCARGAMYGNDFFYPMDYWGQGTTVTVSSASTKGPSVFPLAPSSKSTSGGTAALGCLVKDYFPEPVTVSWNSGALTSGVHTFPAVLQSSGLYSLSSVVTVPSSSLGTQTYICNVNHKPSNTKVDKKVEPKSCDKTHTCPPCPAPELLGGPSVFLFPPKPKDTLMISRTPEVTCVVVDVSHEDPEVKFNWYVDGVEVHNAKTKPREEQYNSTYRVVSVLTVLHQDWLNGKEYKCKVSNKALPAPIEKTISKAKGQPREPQVYTLPPSRDELTKNQVSLTCLVKGFYPSDIAVEWESNGQPENNYKTTPPVLDSDGSFFLYSKLTVDKSRWQQGNVFSCSVMHEALHNHYTQKSLSLSPGK

SEQ ID NO: 7043 - protein, 453 aa, Artificial Sequence
  source: /note="Description of Artificial Sequence: Synthetic polypeptide"
EVQLLESGGGLVQPGGSLRLSCAASGFTFSTYTMSWVRQTPGKRLEWVAYISKGGGSTYYPDTVKGRFTISRDNSKNTLYLQMNSLRAEDTAVYYCARGAMYGNDFFYPMDYWGQGTTVTVSSASTKGPSVFPLAPSSKSTSGGTAALGCLVKDYFPEPVTVSWNSGALTSGVHTFPAVLQSSGLYSLSSVVTVPSSSLGTQTYICNVNHKPSNTKVDKKVEPKSCDKTHTCPPCPAPELLGGPSVFLFPPKPKDTLMISRTPEVTCVVVDVSHEDPEVKFNWYVDGVEVHNAKTKPREEQYNSTYRVVSVLTVLHQDWLNGKEYKCKVSNKALPAPIEKTISKAKGQPREPQVYTLPPSRDELTKNQVSLTCLVKGFYPSDIAVEWESNGQPENNYKTTPPVLDSDGSFFLYSKLTVDKSRWQQGNVFSCSVMHEALHNHYTQKSLSLSPGK

SEQ ID NO: 7044 - protein, 453 aa, Artificial Sequence
  source: /note="Description of Artificial Sequence: Synthetic polypeptide"
EVKLLESGGGLVQPGGSLRLSCAASGFTFSTYTMSWARQTPGKRLEWVAYISKGGGSTYYPDTVKGRFTISRDNSKNTLYLQMNSLRAEDTAVYYCARGAMYGNDFFYPMDYWGQGTTVTVSSASTKGPSVFPLAPSSKSTSGGTAALGCLVKDYFPEPVTVSWNSGALTSGVHTFPAVLQSSGLYSLSSVVTVPSSSLGTQTYICNVNHKPSNTKVDKKVEPKSCDKTHTCPPCPAPELLGGPSVFLFPPKPKDTLMISRTPEVTCVVVDVSHEDPEVKFNWYVDGVEVHNAKTKPREEQYNSTYRVVSVLTVLHQDWLNGKEYKCKVSNKALPAPIEKTISKAKGQPREPQVYTLPPSRDELTKNQVSLTCLVKGFYPSDIAVEWESNGQPENNYKTTPPVLDSDGSFFLYSKLTVDKSRWQQGNVFSCSVMHEALHNHYTQKSLSLSPGK

SEQ ID NO: 7045 - protein, 450 aa, Artificial Sequence
  source: /note="Description of Artificial Sequence: Synthetic polypeptide"
EVKLLESGGGLVQPGGSLRLSCAASGFTFSTYTMSWARQTPGKRLEWVAYISKGGGSTYYPDTVKGRFTISRDNSKNTLYLQMNSLRAEDTAVYYCARGAMYGNDFFYPMDYWGQGTTVTVSSASTKGPSVFPLAPCSRSTSESTAALGCLVKDYFPEPVTVSWNSGALTSGVHTFPAVLQSSGLYSLSSVVTVPSSSLGTKTYTCNVDHKPSNTKVDKRVESKYGPPCPPCPAPEFLGGPSVFLFPPKPKDTLMISRTPEVTCVVVDVSQEDPEVQFNWYVDGVEVHNAKTKPREEQFNSTYRVVSVLTVLHQDWLNGKEYKCKVSNKGLPSSIEKTISKAKGQPREPQVYTLPPSQEEMTKNQVSLTCLVKGFYPSDIAVEWESNGQPENNYKTTPPVLDSDGSFFLYSRLTVDKSRWQEGNVFSCSVMHEALHNHYTQKSLSLSLGK

SEQ ID NO: 7046 - protein, 453 aa, Artificial Sequence
  source: /note="Description of Artificial Sequence: Synthetic polypeptide"
EVKLLESGGGLVQPGGSLRLSCAASGFTFSTYTMSWVRQTPEKRLEWVAYISKGGGSTYYPDTVKGRFTISRDNSKNTLYLQMNSLRAEDTAVYYCARGAMYGNDFFYPMDYWGQGTTVTVSSASTKGPSVFPLAPSSKSTSGGTAALGCLVKDYFPEPVTVSWNSGALTSGVHTFPAVLQSSGLYSLSSVVTVPSSSLGTQTYICNVNHKPSNTKVDKKVEPKSCDKTHTCPPCPAPELLGGPSVFLFPPKPKDTLMISRTPEVTCVVVDVSHEDPEVKFNWYVDGVEVHNAKTKPREEQYNSTYRVVSVLTVLHQDWLNGKEYKCKVSNKALPAPIEKTISKAKGQPREPQVYTLPPSRDELTKNQVSLTCLVKGFYPSDIAVEWESNGQPENNYKTTPPVLDSDGSFFLYSKLTVDKSRWQQGNVFSCSVMHEALHNHYTQKSLSLSPGK

SEQ ID NO: 7047 - protein, 453 aa, Artificial Sequence
  source: /note="Description of Artificial Sequence: Synthetic polypeptide"
EVKLLESGGGLVQPGGSLRLSCAASGFTFSTYTMSWVRQTPGKRLEWVAYISKGGGSTYYPDTVKGRFTISRDNSKNTLYLQMNSLRAEDTALYYCARGAMYGNDFFYPMDYWGQGTTVTVSSASTKGPSVFPLAPSSKSTSGGTAALGCLVKDYFPEPVTVSWNSGALTSGVHTFPAVLQSSGLYSLSSVVTVPSSSLGTQTYICNVNHKPSNTKVDKKVEPKSCDKTHTCPPCPAPELLGGPSVFLFPPKPKDTLMISRTPEVTCVVVDVSHEDPEVKFNWYVDGVEVHNAKTKPREEQYNSTYRVVSVLTVLHQDWLNGKEYKCKVSNKALPAPIEKTISKAKGQPREPQVYTLPPSRDELTKNQVSLTCLVKGFYPSDIAVEWESNGQPENNYKTTPPVLDSDGSFFLYSKLTVDKSRWQQGNVFSCSVMHEALHNHYTQKSLSLSPGK

SEQ ID NO: 7048 - protein, 453 aa, Artificial Sequence
  source: /note="Description of Artificial Sequence: Synthetic polypeptide"
EVKLLESGGGLVQPGGSLRLSCAASGFTFSTYTMSWVRQTPGKRLEWVAYISKGGGSTYYPDTVKGRFTISRDNSKNTLYLQMNSLRAEDTAVYYCAKGAMYGNDFFYPMDYWGQGTTVTVSSASTKGPSVFPLAPSSKSTSGGTAALGCLVKDYFPEPVTVSWNSGALTSGVHTFPAVLQSSGLYSLSSVVTVPSSSLGTQTYICNVNHKPSNTKVDKKVEPKSCDKTHTCPPCPAPELLGGPSVFLFPPKPKDTLMISRTPEVTCVVVDVSHEDPEVKFNWYVDGVEVHNAKTKPREEQYNSTYRVVSVLTVLHQDWLNGKEYKCKVSNKALPAPIEKTISKAKGQPREPQVYTLPPSRDELTKNQVSLTCLVKGFYPSDIAVEWESNGQPENNYKTTPPVLDSDGSFFLYSKLTVDKSRWQQGNVFSCSVMHEALHNHYTQKSLSLSPGK

SEQ ID NO: 7049 - protein, 453 aa, Artificial Sequence
  source: /note="Description of Artificial Sequence: Synthetic polypeptide"
EVQLLESGGGLVQPGGSLRLSCAASGFTFSTYTMSWARQTPGKRLEWVAYISKGGGSTYYPDTVKGRFTISRDNSKNTLYLQMNSLRAEDTAVYYCARGAMYGNDFFYPMDYWGQGTTVTVSSASTKGPSVFPLAPSSKSTSGGTAALGCLVKDYFPEPVTVSWNSGALTSGVHTFPAVLQSSGLYSLSSVVTVPSSSLGTQTYICNVNHKPSNTKVDKKVEPKSCDKTHTCPPCPAPELLGGPSVFLFPPKPKDTLMISRTPEVTCVVVDVSHEDPEVKFNWYVDGVEVHNAKTKPREEQYNSTYRVVSVLTVLHQDWLNGKEYKCKVSNKALPAPIEKTISKAKGQPREPQVYTLPPSRDELTKNQVSLTCLVKGFYPSDIAVEWESNGQPENNYKTTPPVLDSDGSFFLYSKLTVDKSRWQQGNVFSCSVMHEALHNHYTQKSLSLSPGK

SEQ ID NO: 7050 - protein, 450 aa, Artificial Sequence
  source: /note="Description of Artificial Sequence: Synthetic polypeptide"
EVQLLESGGGLVQPGGSLRLSCAASGFTFSTYTMSWARQTPGKRLEWVAYISKGGGSTYYPDTVKGRFTISRDNSKNTLYLQMNSLRAEDTAVYYCARGAMYGNDFFYPMDYWGQGTTVTVSSASTKGPSVFPLAPCSRSTSESTAALGCLVKDYFPEPVTVSWNSGALTSGVHTFPAVLQSSGLYSLSSVVTVPSSSLGTKTYTCNVDHKPSNTKVDKRVESKYGPPCPPCPAPEFLGGPSVFLFPPKPKDTLMISRTPEVTCVVVDVSQEDPEVQFNWYVDGVEVHNAKTKPREEQFNSTYRVVSVLTVLHQDWLNGKEYKCKVSNKGLPSSIEKTISKAKGQPREPQVYTLPPSQEEMTKNQVSLTCLVKGFYPSDIAVEWESNGQPENNYKTTPPVLDSDGSFFLYSRLTVDKSRWQEGNVFSCSVMHEALHNHYTQKSLSLSLGK

SEQ ID NO: 7051 - protein, 453 aa, Artificial Sequence
  source: /note="Description of Artificial Sequence: Synthetic polypeptide"
EVQLLESGGGLVQPGGSLRLSCAASGFTFSTYTMSWVRQAPGKRLEWVAYISKGGGSTYYPDTVKGRFTISRDNSKNTLYLQMNSLRAEDTAVYYCARGAMYGNDFFYPMDYWGQGTTVTVSSASTKGPSVFPLAPSSKSTSGGTAALGCLVKDYFPEPVTVSWNSGALTSGVHTFPAVLQSSGLYSLSSVVTVPSSSLGTQTYICNVNHKPSNTKVDKKVEPKSCDKTHTCPPCPAPELLGGPSVFLFPPKPKDTLMISRTPEVTCVVVDVSHEDPEVKFNWYVDGVEVHNAKTKPREEQYNSTYRVVSVLTVLHQDWLNGKEYKCKVSNKALPAPIEKTISKAKGQPREPQVYTLPPSRDELTKNQVSLTCLVKGFYPSDIAVEWESNGQPENNYKTTPPVLDSDGSFFLYSKLTVDKSRWQQGNVFSCSVMHEALHNHYTQKSLSLSPGK

SEQ ID NO: 7052 - protein, 453 aa, Artificial Sequence
  source: /note="Description of Artificial Sequence: Synthetic polypeptide"
EVKLLESGGGLVQPGGSLRLSCAASGFTFSTYTMSWVRQTPGKRLEWVAYISKGGGSTYYADSVKGRFTISRDNSKNTLYLQMNSLRAEDTAVYYCARGAMYGNDFFYPMDYWGQGTTVTVSSASTKGPSVFPLAPSSKSTSGGTAALGCLVKDYFPEPVTVSWNSGALTSGVHTFPAVLQSSGLYSLSSVVTVPSSSLGTQTYICNVNHKPSNTKVDKKVEPKSCDKTHTCPPCPAPELLGGPSVFLFPPKPKDTLMISRTPEVTCVVVDVSHEDPEVKFNWYVDGVEVHNAKTKPREEQYNSTYRVVSVLTVLHQDWLNGKEYKCKVSNKALPAPIEKTISKAKGQPREPQVYTLPPSRDELTKNQVSLTCLVKGFYPSDIAVEWESNGQPENNYKTTPPVLDSDGSFFLYSKLTVDKSRWQQGNVFSCSVMHEALHNHYTQKSLSLSPGK

SEQ ID NO: 7053 - protein, 453 aa, Artificial Sequence
  source: /note="Description of Artificial Sequence: Synthetic polypeptide"
EVQLLESGGGLVQPGGSLRLSCAASGFTFSTYTMSWARQTPGKGLEWVAYISKGGGSTYYPDTVKGRFTISRDNSKNTLYLQMNSLRAEDTAVYYCARGAMYGNDFFYPMDYWGQGTTVTVSSASTKGPSVFPLAPSSKSTSGGTAALGCLVKDYFPEPVTVSWNSGALTSGVHTFPAVLQSSGLYSLSSVVTVPSSSLGTQTYICNVNHKPSNTKVDKKVEPKSCDKTHTCPPCPAPELLGGPSVFLFPPKPKDTLMISRTPEVTCVVVDVSHEDPEVKFNWYVDGVEVHNAKTKPREEQYNSTYRVVSVLTVLHQDWLNGKEYKCKVSNKALPAPIEKTISKAKGQPREPQVYTLPPSRDELTKNQVSLTCLVKGFYPSDIAVEWESNGQPENNYKTTPPVLDSDGSFFLYSKLTVDKSRWQQGNVFSCSVMHEALHNHYTQKSLSLSPGK

SEQ ID NO: 7054 - protein, 453 aa, Artificial Sequence
  source: /note="Description of Artificial Sequence: Synthetic polypeptide"
EVQLLESGGGLVQPGGSLRLSCAASGFTFSTYTMSWVRQTPGKRLEWVSAISKGGGSTYYPDTVKGRFTISRDNSKNTLYLQMNSLRAEDTAVYYCARGAMYGNDFFYPMDYWGQGTTVTVSSASTKGPSVFPLAPSSKSTSGGTAALGCLVKDYFPEPVTVSWNSGALTSGVHTFPAVLQSSGLYSLSSVVTVPSSSLGTQTYICNVNHKPSNTKVDKKVEPKSCDKTHTCPPCPAPELLGGPSVFLFPPKPKDTLMISRTPEVTCVVVDVSHEDPEVKFNWYVDGVEVHNAKTKPREEQYNSTYRVVSVLTVLHQDWLNGKEYKCKVSNKALPAPIEKTISKAKGQPREPQVYTLPPSRDELTKNQVSLTCLVKGFYPSDIAVEWESNGQPENNYKTTPPVLDSDGSFFLYSKLTVDKSRWQQGNVFSCSVMHEALHNHYTQKSLSLSPGK

SEQ ID NO: 7055 - protein, 453 aa, Artificial Sequence
  source: /note="Description of Artificial Sequence: Synthetic polypeptide"
EVQLLESGGGLVQPGGSLRLSCAASGFTFSTYTMSWVRQTPGKRLEWVAYISKGGGSTYYADSVKGRFTISRDNSKNTLYLQMNSLRAEDTAVYYCARGAMYGNDFFYPMDYWGQGTTVTVSSASTKGPSVFPLAPSSKSTSGGTAALGCLVKDYFPEPVTVSWNSGALTSGVHTFPAVLQSSGLYSLSSVVTVPSSSLGTQTYICNVNHKPSNTKVDKKVEPKSCDKTHTCPPCPAPELLGGPSVFLFPPKPKDTLMISRTPEVTCVVVDVSHEDPEVKFNWYVDGVEVHNAKTKPREEQYNSTYRVVSVLTVLHQDWLNGKEYKCKVSNKALPAPIEKTISKAKGQPREPQVYTLPPSRDELTKNQVSLTCLVKGFYPSDIAVEWESNGQPENNYKTTPPVLDSDGSFFLYSKLTVDKSRWQQGNVFSCSVMHEALHNHYTQKSLSLSPGK

SEQ ID NO: 7056 - protein, 453 aa, Artificial Sequence
  source: /note="Description of Artificial Sequence: Synthetic polypeptide"
EVQLLESGGGLVQPGGSLRLSCAASGFTFSTYTMSWVRQAPGKRLEWVAYISKGGGSTYYADSVKGRFTISRDNSKNTLYLQMNSLRAEDTAVYYCARGAMYGNDFFYPMDYWGQGTTVTVSSASTKGPSVFPLAPSSKSTSGGTAALGCLVKDYFPEPVTVSWNSGALTSGVHTFPAVLQSSGLYSLSSVVTVPSSSLGTQTYICNVNHKPSNTKVDKKVEPKSCDKTHTCPPCPAPELLGGPSVFLFPPKPKDTLMISRTPEVTCVVVDVSHEDPEVKFNWYVDGVEVHNAKTKPREEQYNSTYRVVSVLTVLHQDWLNGKEYKCKVSNKALPAPIEKTISKAKGQPREPQVYTLPPSRDELTKNQVSLTCLVKGFYPSDIAVEWESNGQPENNYKTTPPVLDSDGSFFLYSKLTVDKSRWQQGNVFSCSVMHEALHNHYTQKSLSLSPGK

SEQ ID NO: 7057 - protein, 453 aa, Artificial Sequence
  source: /note="Description of Artificial Sequence: Synthetic polypeptide"
EVQLLESGGGLVQPGGSLRLSCAASGFTFSTYTMSWARQAPGKRLEWVAYISKGGGSTYYADSVKGRFTISRDNSKNTLYLQMNSLRAEDTAVYYCARGAMYGNDFFYPMDYWGQGTTVTVSSASTKGPSVFPLAPSSKSTSGGTAALGCLVKDYFPEPVTVSWNSGALTSGVHTFPAVLQSSGLYSLSSVVTVPSSSLGTQTYICNVNHKPSNTKVDKKVEPKSCDKTHTCPPCPAPELLGGPSVFLFPPKPKDTLMISRTPEVTCVVVDVSHEDPEVKFNWYVDGVEVHNAKTKPREEQYNSTYRVVSVLTVLHQDWLNGKEYKCKVSNKALPAPIEKTISKAKGQPREPQVYTLPPSRDELTKNQVSLTCLVKGFYPSDIAVEWESNGQPENNYKTTPPVLDSDGSFFLYSKLTVDKSRWQQGNVFSCSVMHEALHNHYTQKSLSLSPGK

SEQ ID NO: 7058 - protein, 453 aa, Artificial Sequence
  source: /note="Description of Artificial Sequence: Synthetic polypeptide"
EVQLLESGGGLVQPGGSLRLSCAASGFTFSTYTMSWVRQAPGKGLEWVSAISKGGGSTYYPDTVKGRFTISRDNSKNTLYLQMNSLRAEDTAVYYCARGAMYGNDFFYPMDYWGQGTTVTVSSASTKGPSVFPLAPSSKSTSGGTAALGCLVKDYFPEPVTVSWNSGALTSGVHTFPAVLQSSGLYSLSSVVTVPSSSLGTQTYICNVNHKPSNTKVDKKVEPKSCDKTHTCPPCPAPELLGGPSVFLFPPKPKDTLMISRTPEVTCVVVDVSHEDPEVKFNWYVDGVEVHNAKTKPREEQYNSTYRVVSVLTVLHQDWLNGKEYKCKVSNKALPAPIEKTISKAKGQPREPQVYTLPPSRDELTKNQVSLTCLVKGFYPSDIAVEWESNGQPENNYKTTPPVLDSDGSFFLYSKLTVDKSRWQQGNVFSCSVMHEALHNHYTQKSLSLSPGK

SEQ ID NO: 7059 - protein, 453 aa, Artificial Sequence
  source: /note="Description of Artificial Sequence: Synthetic polypeptide"
EVQLLESGGGLVQPGGSLRLSCAASGFTFSTYTMSWVRQTPGKRLEWVSAISKGGGSTYYADSVKGRFTISRDNSKNTLYLQMNSLRAEDTAVYYCARGAMYGNDFFYPMDYWGQGTTVTVSSASTKGPSVFPLAPSSKSTSGGTAALGCLVKDYFPEPVTVSWNSGALTSGVHTFPAVLQSSGLYSLSSVVTVPSSSLGTQTYICNVNHKPSNTKVDKKVEPKSCDKTHTCPPCPAPELLGGPSVFLFPPKPKDTLMISRTPEVTCVVVDVSHEDPEVKFNWYVDGVEVHNAKTKPREEQYNSTYRVVSVLTVLHQDWLNGKEYKCKVSNKALPAPIEKTISKAKGQPREPQVYTLPPSRDELTKNQVSLTCLVKGFYPSDIAVEWESNGQPENNYKTTPPVLDSDGSFFLYSKLTVDKSRWQQGNVFSCSVMHEALHNHYTQKSLSLSPGK

SEQ ID NO: 7060 - protein, 453 aa, Artificial Sequence
  source: /note="Description of Artificial Sequence: Synthetic polypeptide"
EVQLLESGGGLVQPGGSLRLSCAASGFTFSTYTMSWVRQAPGKGLEWVSAISKGGGSTYYADSVKGRFTISRDNSKNTLYLQMNSLRAEDTAVYYCARGAMYGNDFFYPMDYWGQGTTVTVSSASTKGPSVFPLAPSSKSTSGGTAALGCLVKDYFPEPVTVSWNSGALTSGVHTFPAVLQSSGLYSLSSVVTVPSSSLGTQTYICNVNHKPSNTKVDKKVEPKSCDKTHTCPPCPAPELLGGPSVFLFPPKPKDTLMISRTPEVTCVVVDVSHEDPEVKFNWYVDGVEVHNAKTKPREEQYNSTYRVVSVLTVLHQDWLNGKEYKCKVSNKALPAPIEKTISKAKGQPREPQVYTLPPSRDELTKNQVSLTCLVKGFYPSDIAVEWESNGQPENNYKTTPPVLDSDGSFFLYSKLTVDKSRWQQGNVFSCSVMHEALHNHYTQKSLSLSPGK

SEQ ID NO: 7061 - protein, 453 aa, Artificial Sequence
  source: /note="Description of Artificial Sequence: Synthetic polypeptide"
EVQLLESGGGLVQPGGSLRLSCAASGFTFSTYTMSWVRQAPGKGLEWVSAISKGGGSTYYADSVKGRFTISRDNSKNTLYLQMNSLRAEDTAVYYCAKGAMYGNDFFYPMDYWGQGTTVTVSSASTKGPSVFPLAPSSKSTSGGTAALGCLVKDYFPEPVTVSWNSGALTSGVHTFPAVLQSSGLYSLSSVVTVPSSSLGTQTYICNVNHKPSNTKVDKKVEPKSCDKTHTCPPCPAPELLGGPSVFLFPPKPKDTLMISRTPEVTCVVVDVSHEDPEVKFNWYVDGVEVHNAKTKPREEQYNSTYRVVSVLTVLHQDWLNGKEYKCKVSNKALPAPIEKTISKAKGQPREPQVYTLPPSRDELTKNQVSLTCLVKGFYPSDIAVEWESNGQPENNYKTTPPVLDSDGSFFLYSKLTVDKSRWQQGNVFSCSVMHEALHNHYTQKSLSLSPGK

SEQ ID NO: 7062 - protein, 123 aa, Artificial Sequence; identical to SEQ ID NO: 4359
  source: /note="Description of Artificial Sequence: Synthetic polypeptide"

SEQ ID NO: 7063 - protein, 123 aa, Artificial Sequence; identical to SEQ ID NO: 4360
  source: /note="Description of Artificial Sequence: Synthetic polypeptide"

SEQ ID NO: 7064 - protein, 123 aa, Artificial Sequence; identical to SEQ ID NO: 4361
  source: /note="Description of Artificial Sequence: Synthetic polypeptide"

SEQ ID NO: 7065 - protein, 123 aa, Artificial Sequence; identical to SEQ ID NO: 4362
  source: /note="Description of Artificial Sequence: Synthetic polypeptide"

SEQ ID NO: 7066 - protein, 123 aa, Artificial Sequence; identical to SEQ ID NO: 4363
  source: /note="Description of Artificial Sequence: Synthetic polypeptide"

SEQ ID NO: 7067 - protein, 123 aa, Artificial Sequence; identical to SEQ ID NO: 4364
  source: /note="Description of Artificial Sequence: Synthetic polypeptide"

SEQ ID NO: 7068 - protein, 123 aa, Artificial Sequence; identical to SEQ ID NO: 4365
  source: /note="Description of Artificial Sequence: Synthetic polypeptide"

SEQ ID NO: 7069 - protein, 448 aa, Artificial Sequence
  source: /note="Description of Artificial Sequence: Synthetic polypeptide"
QMQLVESGGGVVQPGRSLRLSCAASGFTFRTYGMHWVRQAPGKGLEWVAVIWYDGSNKHYADSVKGRFTITRDNSKNTLNLQMNSLRAEDTAVYYCARAPQWELVHEAFDIWGQGTMVTVSSASTKGPSVFPLAPCSRSTSESTAALGCLVKDYFPEPVTVSWNSGALTSGVHTFPAVLQSSGLYSLSSVVTVPSSNFGTQTYTCNVDHKPSNTKVDKTVERKCCVECPPCPAPPVAGPSVFLFPPKPKDTLMISRTPEVTCVVVDVSHEDPEVQFNWYVDGVEVHNAKTKPREEQFNSTFRVVSVLTVVHQDWLNGKEYKCKVSNKGLPAPIEKTISKTKGQPREPQVYTLPPSREEMTKNQVSLTCLVKGFYPSDIAVEWESNGQPENNYKTTPPMLDSDGSFFLYSKLTVDKSRWQQGNVFSCSVMHEALHNHYTQKSLSLSPGK

SEQ ID NO: 7070 - protein, 117 aa, Artificial Sequence
  source: /note="Description of Artificial Sequence: Synthetic polypeptide"
EVKLVESGGGLVQPGGSMKLSCVASGFTFSNYWMNWVRQSPEKGLEWVAEIRLKSNNYTTHYAESVKGRFTISRDDSKSSVSLQMNNLRVEDTGIYYCTRHYYFDYWGQGTTLTVSS

SEQ ID NO: 7071 - protein, 451 aa, Artificial Sequence
  source: /note="Description of Artificial Sequence: Synthetic polypeptide"
QVQLQQSGSELKKPGASVKVSCKASGYTFTNYGMNWVKQAPGQGLKWMGWINTYTGEPTYTDDFKGRFAFSLDTSVSTAYLQISSLKADDTAVYFCARGGFGSSYWYFDVWGQGSLVTVSSASTKGPSVFPLAPSSKSTSGGTAALGCLVKDYFPEPVTVSWNSGALTSGVHTFPAVLQSSGLYSLSSVVTVPSSSLGTQTYICNVNHKPSNTKVDKRVEPKSCDKTHTCPPCPAPELLGGPSVFLFPPKPKDTLMISRTPEVTCVVVDVSHEDPEVKFNWYVDGVEVHNAKTKPREEQYNSTYRVVSVLTVLHQDWLNGKEYKCKVSNKALPAPIEKTISKAKGQPREPQVYTLPPSREEMTKNQVSLTCLVKGFYPSDIAVEWESNGQPENNYKTTPPVLDSDGSFFLYSKLTVDKSRWQQGNVFSCSVMHEALHNHYTQKSLSLSPGK

SEQ ID NO: 7072 - protein, 449 aa, Artificial Sequence
  source: /note="Description of Artificial Sequence: Synthetic polypeptide"
QVQLVQSGSELKKPGASVKISCKASGYTFTSYAMNWVRQAPGQGLESMGWINTNTGNPTYAQGFTGRFVFSMDTSVSTAYLQISSLKAEDTAIYYCAPRYSSSWYLDYWGQGTLVTVSSASTKGPSVFPLAPSSKSTSGGTAALGCLVKDYFPEPVTVSWNSGALTSGVHTFPAVLQSSGLYSLSSVVTVPSSSLGTQTYICNVNHKPSNTKVDKRVEPKSCDKTHTCPPCPAPELLGGPSVFLFPPKPKDTLMISRTPEVTCVVVDVSHEDPEVKFNWYVDGVEVHNAKTKPREEQYNSTYRVVSVLTVLHQDWLNGKEYKCKVSNKALPAPIEKTISKAKGQPREPQVYTLPPSREEMTKNQVSLTCLVKGFYPSDIAVEWESNGQPENNYKTTPPVLDSDGSFFLYSKLTVDKSRWQQGNVFSCSVMHEALHNHYTQKSLSLSPGK

SEQ ID NO: 7073 - protein, 453 aa, Artificial Sequence
  source: /note="Description of Artificial Sequence: Synthetic polypeptide"
EVQLVESGGGLVQPGGSLRLSCAASGYTFTNYGMNWVRQAPGKGLEWVGWINTYTGEPTYAADFKRRFTFSLDTSKSTAYLQMNSLRAEDTAVYYCAKYPHYYGSSHWYFDVWGQGTLVTVSSASTKGPSVFPLAPSSKSTSGGTAALGCLVKDYFPEPVTVSWNSGALTSGVHTFPAVLQSSGLYSLSSVVTVPSSSLGTQTYICNVNHKPSNTKVDKKVEPKSCDKTHTCPPCPAPELLGGPSVFLFPPKPKDTLMISRTPEVTCVVVDVSHEDPEVKFNWYVDGVEVHNAKTKPREEQYNSTYRVVSVLTVLHQDWLNGKEYKCKVSNKALPAPIEKTISKAKGQPREPQVYTLPPSREEMTKNQVSLTCLVKGFYPSDIAVEWESNGQPENNYKTTPPVLDSDGSFFLYSKLTVDKSRWQQGNVFSCSVMHEALHNHYTQKSLSLSPGK

SEQ ID NO: 7074 - protein, 228 aa, Artificial Sequence
  source: /note="Description of Artificial Sequence: Synthetic polypeptide"
EVQLVESGGGLVQPGGSLRLSCAASGFTFSSYGMSWVRQAPGKGLEWVATITSGGSYTYYVDSVKGRFTISRDNAKNTLYLQMNSLRAEDTAVYYCVRIGEDALDYWGQGTLVTVSSASTKGPSVFPLAPSSKSTSGGTAALGCLVKDYFPEPVTVSWNSGALTSGVHTFPAVLQSSGLYSLSSVVTVPSSSLGTQTYICNVNHKPSNTKVDKKVEPKSCDKTHTCAA

SEQ ID NO: 7075 - protein, 450 aa, Artificial Sequence
  source: /note="Description of Artificial Sequence: Synthetic polypeptide"
EVQLLESGGDLVQPGGSLRLSCAASGFTFSNYAMSWVRQAPGKGLEWVSAITPSGGSTNYADSVKGRFTISRDNSQNTLYLQMNSLRVEDTAVYICGRVPYRSTWYPLYWGQGTLVTVSSASTKGPSVFPLAPSSKSTSGGTAALGCLVKDYFPEPVTVSWNSGALTSGVHTFPAVLQSSGLYSLSSVVTVPSSSLGTQTYICNVNHKPSNTKVDKKVEPKSCDKTHTCPPCPAPELLGGPSVFLFPPKPKDTLMISRTPEVTCVVVDVSHEDPEVKFNWYVDGVEVHNAKTKPREEQYNSTYRVVSVLTVLHQDWLNGKEYKCKVSNKALPAPIEKTISKAKGQPREPQVYTLPPSRDELTKNQVSLTCLVKGFYPSDIAVEWESNGQPENNYKTTPPVLDSDGSFFLYSKLTVDKSRWQQGNVFSCSVMHEALHNHYTQKSLSLSPGK

SEQ ID NO: 7076 - protein, 122 aa, Artificial Sequence
  source: /note="Description of Artificial Sequence: Synthetic polypeptide"
QVQLVQSGAEVKKPGASVKVSCKASGYTFTSYNMHWVRQAPGKGLEWVGAIYPGNGDTSYNQKFKGRVTISADKSISTAYLQWSSLKASDTAMYYCARSHYGSNYVDYFDYWGQGTLVTVSS

SEQ ID NO: 7077 - protein, 122 aa, Artificial Sequence
  source: /note="Description of Artificial Sequence: Synthetic polypeptide"
QVQLVQSGAEVKKPGASVKVSCKASGYTFTSYNMHWVRQAPGKGLEWVGAIYPGNGDTSYNQKFKGRVTITADKSTSTAYMELSSLRSEDTAVYYCARSHYGSNYVDYFDYWGQGTLVTVSS

SEQ ID NO: 7078 - protein, 122 aa, Artificial Sequence
  source: /note="Description of Artificial Sequence: Synthetic polypeptide"
QVQLVQSGAEVKKPGASVKVSCKASGYTFTSYNMHWVRQAPGKGLEWMGAIYPGNGDTSYNQKFKGRFTISRDNAKNSLYLQMNSLRAEDTAVYYCARSHYGSNYVDYFDYWGQGTLVTVSS

SEQ ID NO: 7079 - protein, 122 aa, Artificial Sequence
  source: /note="Description of Artificial Sequence: Synthetic polypeptide"
QVQLVQSGAEVKKPGASVKVSCKASGYTFTSYNMHWVRQAPGKGLEWVGAIYPGNGDTSYNQKFKGRFTISRDNAKNSLYLQMNSLRAEDTAVYYCARSHYGSNYVDYFDYWGQGTLVTVSS

SEQ ID NO: 7080 - protein, 122 aa, Artificial Sequence
  source: /note="Description of Artificial Sequence: Synthetic polypeptide"
QVQLVQSGAEVKKPGASVKVSCKASGYTFTSYNMHWVRQAPGQGLEWMGAIYPGNGDTSYNQKFKGRVTISADKSISTAYLQWSSLKASDTAMYYCARSHYGSNYVDYFDYWGQGTLVTVSS

SEQ ID NO: 7081 - protein, 122 aa, Artificial Sequence
  source: /note="Description of Artificial Sequence: Synthetic polypeptide"
EVQLVQSGAEVKKPGESLKISCKGSGYTFTSYNMHWVRQAPGKGLEWMGAIYPGNGDTSYNQKFKGRVTISADKSISTAYLQWSSLKASDTAMYYCARSHYGSNYVDYFDYWGQGTLVTVSS

SEQ ID NO: 7082 - protein, 122 aa, Artificial Sequence
  source: /note="Description of Artificial Sequence: Synthetic polypeptide"
QVQLVQSGAEVKKPGASVKVSCKASGYTFTSYNMHWVRQAPGKGLEWMGAIYPGNGDTSYNQKFKGRVTITADKSTSTAYMELSSLRSEDTAVYYCARSHYGSNYVDYFDYWGQGTLVTVSS

SEQ ID NO: 7083 - protein, 122 aa, Artificial Sequence
  source: /note="Description of Artificial Sequence: Synthetic polypeptide"
QVQLVQSGAEVKKPGASVKVSCKASGYTFTSYNMHWVRQAPGQGLEWMGAIYPGNGDTSYNQKFKGRVTITADKSTSTAYMELSSLRSEDTAVYYCARSHYGSNYVDYFDYWGQGTLVTVSS

SEQ ID NO: 7084 - protein, 457 aa, Artificial Sequence [sequence omitted]

SEQ ID NO: 7085 - protein, 442 aa, Artificial Sequence
  source: /note="Description of Artificial Sequence: Synthetic polypeptide"
EVKLVESGGGLVQPGGSLRLSCATSGFTFTDYYMNWVRQPPGKALEWLGFIGNKANGYTTEYSASVKGRFTISRDKSQSILYLQMNTLRAEDSATYYCTRDRGLRFYFDYWGQGTTLTVSSAKTTPPSVYPLAPGSAAQTNSMVTLGCLVKGYFPEPVTVTWNSGSLSSGVHTFPAVLQSDLYTLSSSVTVPSSPRPSETVTCNVAHPASSTKVDKKIVPRDCPPCKCPAPNLLGGPSVFIFPPKIKDVLMISLSPIVTCVVVDVSEDDPDVQISWFVNNVEVHTAQTQTHREDYNSTLRVVSALPIQHQDWMSGKEFKCKVNNKDLPAPIERTISKPKGSVRAPQVYVLPPPEEEMTKKQVTLTCMVTDFMPEDIYVEWTNNGKTELNYKNTEPVLDSDGSYFMYSKLRVEKKNWVERNSYSCSVVHEGLHNHHTTKSFSR

SEQ ID NO: 7086 - protein, 448 aa, Artificial Sequence
  source: /note="Description of Artificial Sequence: Synthetic polypeptide"
QVQLQQSRAELVRPGASVTLSCKPSGYTFTDYEVHWVKQTPVHGLEWIGAIDPETGGTADNQKFKGKAILTADKSSSTAYMELRSLTSEDSAVYYCTNFVDVWGTGTTVTVSSASTTAPSVFPLAPSCGSQSGSTVALACLVSGYFPEPVTVSWNSGSLTSGVHTFPSVLQSSGLYSLSSMVTVPSSRWPSETFTCNVAHPASKTKVDKPVPKRENGRVPRPPDCPKCPAPEMLGGPSVFIFPPKPKDTLLIARTPEVTCVVVDLDPEDPEVQISWFVDGKQMQTAKTQPREEQFNGTYRVVSVLPIGHQDWLKGKQFTCKVNNKALPSPIERTISKARGQAHQPSVYVLPPSREELSKNTVSLTCLIKDFFPPDIDVEWQSNGQQEPESKYRTTPPQLDEDGSYFLYSKLSVDKSRWQRGDTFICAVMHEALHNHYTQKSLSHSPGK

SEQ ID NO: 7087 - protein, 447 aa, Artificial Sequence; identical to SEQ ID NO: 7023
  source: /note="Description of Artificial Sequence: Synthetic polypeptide"

SEQ ID NO: 7088 - protein, 450 aa, Artificial Sequence; identical to SEQ ID NO: 6761
  source: /note="Description of Artificial Sequence: Synthetic polypeptide"

SEQ ID NO: 7089 - protein, 446 aa, Artificial Sequence; identical to SEQ ID NO: 6923
  source: /note="Description of Artificial Sequence: Synthetic polypeptide"

SEQ ID NO: 7090 - protein, 432 aa, Artificial Sequence
  source: /note="Description of Artificial Sequence: Synthetic polypeptide"
QVQLQQSDAELVKPGASVKISCKASGYTFTDHAIHWAKQKPEQGLEWIGYISPGNDDIKYNEKFKGKATLTADKSSSTAYMQLNSLTSEDSAVYFCKRSYYGHWGQGTTLTVSSASTKGPSVFPLAPCSRSTSESTAALGCLVKDYFPEPVTVSWNSGALTSGVHTFPAVLQSSGLYSLSSVVTVPSSSLGTKTYTCNVDHKPSNTKVDKRVCPPCKCPAPNLLGGPSVFIFPPKIKDVLMISLSPIVTCVVVDVSEDDPDVQISWFVNNVEVHTAQTQTHREDYNSTLRVVSALPIQHQDWMSGKEFKCKVNNKDLPAPIERTISKPKGSVRAPQVYVLPPPEEEMTKKQVTLTCMVTDFMPEDIYVEWTNNGKTELNYKNTEPVLDSDGSYFMYSKLRVEKKNWVERNSYSCSVVHEGLHNHHTTKSFSR

SEQ ID NO: 7091 - protein, 446 aa, Artificial Sequence
  source: /note="Description of Artificial Sequence: Synthetic polypeptide"
QVQLVQSGAEVKKPGSSVKVSCKASGYTFTSYWLHWVRQAPGQGLEWIGYINPRNDYTEYNQNFKDKATITADESTNTAYMELSSLRSEDTAFYFCARRDITTFYWGQGTTVTVSSASTKGPSVFPLAPSSKSTSGGTAALGCLVKDYFPEPVTVSWNSGALTSGVHTFPAVLQSSGLYSLSSVVTVPSSSLGTQTYICNVNHKPSNTKVDKRVEPKSCDKTHTCPPCPAPELLGGPSVFLFPPKPKDTLMISRTPEVTCVVVDVSHEDPEVKFNWYVDGVEVHNAKTKPREEQYNSTYRVVSVLTVLHQDWLNGKEYKCKVSNKALPAPIEKTISKAKGQPREPQVYTLPPSREEMTKNQVSLTCLVKGFYPSDIAVEWESNGQPENNYKTTPPVLDSDGSFFLYSKLTVDKSRWQQGNVFSCSVMHEALHNHYTQKSLSLSPGK

SEQ ID NO: 7092 - protein, 445 aa, Artificial Sequence
  source: /note="Description of Artificial Sequence: Synthetic polypeptide"
QVQLQESGPGLVKPSQTLSLTCSFSGFSLSTSGMGVGWIRQPSGKGLEWLAHIWWDGDESYNPSLKSRLTISKDTSKNQVSLKITSVTAADTAVYFCARNRYDPPWFVDWGQGTLVTVSSASTKGPSVFPLAPCSRSTSESTAALGCLVKDYFPEPVTVSWNSGALTSGVHTFPAVLQSSGLYSLSSVVTVTSSNFGTQTYTCNVDHKPSNTKVDKTVERKCCVECPPCPAPPVAGPSVFLFPPKPKDTLMISRTPEVTCVVVDVSHEDPEVQFNWYVDGMEVHNAKTKPREEQFNSTFRVVSVLTVVHQDWLNGKEYKCKVSNKGLPAPIEKTISKTKGQPREPQVYTLPPSREEMTKNQVSLTCLVKGFYPSDIAVEWESNGQPENNYKTTPPMLDSDGSFFLYSKLTVDKSRWQQGNVFSCSVMHEALHNHYTQKSLSLSPG

SEQ ID NO: 7093 - protein, 449 aa, Artificial Sequence
  source: /note="Description of Artificial Sequence: Synthetic polypeptide"
EVQLVQSGAEVKKPGESLKISCKGSGYSFTTYWLGWVRQMPGKGLDWIGIMSPVDSDIRYSPSFQGQVTMSVDKSITTAYLQWNSLKASDTAMYYCARRRPGQGYFDFWGQGTLVTVSSSSTKGPSVFPLAPSSKSTSGGTAALGCLVKDYFPEPVTVSWNSGALTSGVHTFPAVLQSSGLYSLSSVVTVPSSSLGTQTYICNVNHKPSNTKVDKRVEPKSCDKTHTCPPCPAPELLGGPSVFLFPPKPKDTLMISRTPEVTCVVVDVSHEDPEVKFNWYVDGVEVHNAKTKPREEQYNSTYRVVSVLTVLHQDWLNGKEYKCKVSNKALPAPIEKTISKAKGQPREPQVYTLPPSRDELTKNQVSLTCLVKGFYPSDIAVEWESNGQPENNYKTTPPVLDSDGSFFLYSKLTVDKSRWQQGNVFSCSVMHEALHNHYTQKSLSLSPGK

SEQ ID NO: 7094 - protein, 450 aa, Artificial Sequence
  source: /note="Description of Artificial Sequence: Synthetic polypeptide"
QVQLVQSGAEVKKPGSSVKVSCKASGGTFSFYAISWVRQAPGQGLEWMGGFIPIFGAANYAQKFQGRVTITADESTSTAYMELSSLRSDDTAVYYCARIPSGSYYYDYDMDVWGQGTTVTVSSASTKGPSVFPLAPCSRSTSESTAALGCLVKDYFPEPVTVSWNSGALTSGVHTFPAVLQSSGLYSLSSVVTVPSSSLGTKTYTCNVDHKPSNTKVDKRVESKYGPPCPSCPAPEFLGGPSVFLFPPKPKDTLMISRTPEVTCVVVDVSQEDPEVQFNWYVDGVEVHNAKTKPREEQFNSTYRVVSVLTVLHQDWLNGKEYKCKVSNKGLPSSIEKTISKAKGQPREPQVYTLPPSQEEMTKNQVSLTCLVKGFYPSDIAVEWESNGQPENNYKTTPPVLDSDGSFFLYSRLTVDKSRWQEGNVFSCSVMHEALHNHYTQKSLSLSLGK

SEQ ID NO: 7095 - protein, 19 aa, Artificial Sequence
  source: /note="Description of Artificial Sequence: Synthetic peptide"
MGWSYIILFLVATATDVHS

SEQ ID NO: 7096 - protein, 448 aa, Artificial Sequence
  source: /note="Description of Artificial Sequence: Synthetic polypeptide"
QVQLVQSGAEVKKPGASVKVSCKASGYIFSNYWIQWVRQAPGQGLEWMGEILPGSGSTEYTENFKDRVTMTRDTSTSTVYMELSSLRSEDTAVYYCARYFFGSSPNWYFDVWGQGTLVTVSSASTKGPSVFPLAPCSRSTSESTAALGCLVKDYFPEPVTVSWNSGALTSGVHTFPAVLQSSGLYSLSSVVTVPSSNFGTQTYTCNVDHKPSNTKVDKTVERKCCVECPPCPAPPVAGPSVFLFPPKPKDTLMISRTPEVTCVVVDVSQEDPEVQFNWYVDGVEVHNAKTKPREEQFNSTYRVVSVLTVLHQDWLNGKEYKCKVSNKGLPSSIEKTISKAKGQPREPQVYTLPPSQEEMTKNQVSLTCLVKGFYPSDIAVEWESNGQPENNYKTTPPVLDSDGSFFLYSRLTVDKSRWQEGNVFSCSVMHEALHNHYTQKSLSLSLGK

SEQ ID NO: 7097 - protein, 140 aa, Artificial Sequence
  source: /note="Description of Artificial Sequence: Synthetic polypeptide"
MGWSCIILFLVATATGVHSQVQLQQSGAEVKKPGSSVKVSCKASGYTFTSYNMHWVKQAPGQGLEWIGAIYPGNGDTSYNQKFKGKATLTADESTNTAYMELSSLRSEDTAFYYCARSTYYGGDWYFDVWGQGTTVTVSS

SEQ ID NO: 7098 - protein, 451 aa, Artificial Sequence
  source: /note="Description of Artificial Sequence: Synthetic polypeptide"
QVQLQESGPGLVRPSQTLSLTCTVSGFTFTDFYMNWVRQPPGRGLEWIGFIRDKAKGYTTEYNPSVKGRVTMLVDTSKNQFSLRLSSVTAADTAVYYCAREGHTAAPFDYWGQGSLVTVSSASTKGPSVFPLAPSSKSTSGGTAALGCLVKDYFPEPVTVSWNSGALTSGVHTFPAVLQSSGLYSLSSVVTVPSSSLGTQTYICNVNHKPSNTKVDKKVEPKSCDKTHTCPPCPAPELLGGPSVFLFPPKPKDTLMISRTPEVTCVVVDVSHEDPEVKFNWYVDGVEVHNAKTKPREEQYNSTYRVVSVLTVLHQDWLNGKEYKCKVSNKALPAPIEKTISKAKGQPREPQVYTLPPSRDELTKNQVSLTCLVKGFYPSDIAVEWESNGQPENNYKTTPPVLDSDGSFFLYSKLTVDKSRWQQGNVFSCSVMHEALHNHYTQKSLSLSPGK

SEQ ID NO: 7099 - protein, 451 aa, Artificial Sequence
  source: /note="Description of Artificial Sequence: Synthetic polypeptide"
EVQLVESGGGLVQPGGSLRLSCAASGFNIKDTYIHWVRQAPGKGLEWVARIYPTNGYTRYADSVKGRFTISADTSKNTAYLQMNSLRAEDTAVYYCSRWGGDGFYAMDYWGQGTLVTVSSASTKGPSVFPLAPSSKSTSGGTAALGCLVKDYFPEPVTVSWNSGALTSGVHTFPAVLQSSGLYSLSSVVTVPSSSLGTQTYICNVNHKPSNTKVDKKVEPPKSCDKTHTCPPCPAPELLGGPSVFLFPPKPKDTLMISRTPEVTCVVVDVSHEDPEVKFNWYVDGVEVHNAKTKPREEQYNSTYRVVSVLTVLHQDWLNGKEYKCKVSNKALPAPIEKTISKAKGQPREPQVYTLPPSRDELTKNQVSLTCLVKGFYPSDIAVEWESNGQPENNYKTTPPVLDSDGSFFLYSKLTVDKSRWQQGNVFSCSVMHEALHNHYTQKSLSLSPGK

SEQ ID NO: 7100 - protein, 450 aa, Artificial Sequence
  source: /note="Description of Artificial Sequence: Synthetic polypeptide"
QVQLQQSGAELARPGASVKMSCKASGYTFTRYTMHWVKQRPGQGLEWIGYINPSRGYTNYNQKFKDKATLTTDKSSSTAYMQLSSLTSEDSAVYYCARYYDDHYCLDYWGQGTTLTVSSAKTTAPSVYPLAPVCGGTTGSSVTLGCLVKGYFPEPVTLTWNSGSLSSGVHTFPAVLQSDLYTLSSSVTVTSSTWPSQSITCNVAHPASSTKVDKKIEPRPKSCDKTHTCPPCPAPELLGGPSVFLFPPKPKDTLMISRTPEVTCVVVDVSHEDPEVKFNWYVDGVEVHNAKTKPREEQYNSTYRVVSVLTVLHQDWLNGKEYKCKVSNKALPAPIEKTISKAKGQPREPQVYTLPPSRDELTKNQVSLTCLVKGFYPSDIAVEWESNGQPENNYKTTPPVLDSDGSFFLYSKLTVDKSRWQQGNVFSCSVMHEALHNHYTQKSLSLSPGK

SEQ ID NO: 7101 - protein, 140 aa, Artificial Sequence
  source: /note="Description of Artificial Sequence: Synthetic polypeptide"
MGWSCIILFLVATATGVHSQVQLQQSGAEVKKPGSSVKVSCKASGYTFSSYNMHWVRQAPGQGLEWMGAIYPGNGDTSYNQKFKGRATITADESTNTAYMELSSLRSEDTAFYFCARSTYYGGDWYFDVWGQGTTVTVSS

SEQ ID NO: 7102 - protein, 452 aa, Artificial Sequence; identical to SEQ ID NO: 6660
  source: /note="Description of Artificial Sequence: Synthetic polypeptide"

SEQ ID NO: 7103 - protein, 107 aa, Artificial Sequence
  source: /note="Description of Artificial Sequence: Synthetic polypeptide"
DIQMTQSPSSLSASVGDRVTITCRASQDISKFLNWYQQKPGKAIKLLIYHTSRLHSGVPSRFSGSGSGTDFTLTISSLQPEDFATYYCQQGATLPYTFGPGTKVDIK

SEQ ID NO: 7104 - protein, 107 aa, Artificial Sequence
  source: /note="Description of Artificial Sequence: Synthetic polypeptide"
DIVMTQTPSSLSASVGDRVTITCRASQDISKYLNWYQQKPGKAPKLLIYHTSRLHSGVPSRFSGSGSGTDHTLTISSLQPEDFATYYCQQGNTLPYTFGPGTKVDIK

SEQ ID NO: 7105 - protein, 107 aa, Artificial Sequence
  source: /note="Description of Artificial Sequence: Synthetic polypeptide"
DIVMTQTPSSLSASVGDRVTITCRASQDISKYLNWYQQKPGKAPKLLIYHTSRLHSGVPSRFSGSGSGTDSTLTISSLQPEDFATYYCQQGNTLPYTFGPGTKVDIK

SEQ ID NO: 7106 - protein, 5 aa, Artificial Sequence
  source: /note="Description of Artificial Sequence: Synthetic peptide"
SYRMH

SEQ ID NO: 7107 - protein, 17 aa, Artificial Sequence
  source: /note="Description of Artificial Sequence: Synthetic peptide"
YINPSTGYTEYNQKFKD

SEQ ID NO: 7108 - protein, 7 aa, Artificial Sequence
  source: /note="Description of Artificial Sequence: Synthetic peptide"
GGGVFDY

SEQ ID NO: 7109 - protein, 135 aa, Artificial Sequence
  source: /note="Description of Artificial Sequence: Synthetic polypeptide"
MGWSCIILFLVATATGVHSEVQLVESGGGLVQPGGSLRLSCAVSGLSLTSNSVNWIRQAPGKGLEWVGLIWSNGDTDYNSAIKSRFTISRDTSKSTVYLQMNSLRAEDTAVYYCAREYYGYFDYWGQGTLVTVSS

SEQ ID NO: 7110 - protein, 5 aa, Artificial Sequence
  source: /note="Description of Artificial Sequence: Synthetic peptide"
SYTMH

SEQ ID NO: 7111 - protein, 5 aa, Artificial Sequence
  source: /note="Description of Artificial Sequence: Synthetic peptide"
SYAIS

SEQ ID NO: 7112 - protein, 5 aa, Artificial Sequence
  source: /note="Description of Artificial Sequence: Synthetic peptide"
AYSVN

SEQ ID NO: 7113 - protein, 5 aa, Artificial Sequence
  source: /note="Description of Artificial Sequence: Synthetic peptide"
NYWMN

SEQ ID NO: 7114 - protein, 5 aa, Artificial Sequence
  source: /note="Description of Artificial Sequence: Synthetic peptide"
RYGIS

SEQ ID NO: 7115 - protein, 10 aa, Artificial Sequence
  source: /note="Description of Artificial Sequence: Synthetic peptide"
GYIFITYWMT

SEQ ID NO: 7116 - protein, 8 aa, Artificial Sequence
  source: /note="Description of Artificial Sequence: Synthetic peptide"
GFTFRDYA

SEQ ID NO: 7117 - protein, 5 aa, Artificial Sequence
  source: /note="Description of Artificial Sequence: Synthetic peptide"
SYSVH

SEQ ID NO: 7118 - protein, 5 aa, Artificial Sequence
  source: /note="Description of Artificial Sequence: Synthetic peptide"
SFAMS

SEQ ID NO: 7119 - protein, 5 aa, Artificial Sequence
  source: /note="Description of Artificial Sequence: Synthetic peptide"
TYWLG

SEQ ID NO: 7120 - protein, 6 aa, Artificial Sequence
  source: /note="Description of Artificial Sequence: Synthetic peptide"
NDYAMH

SEQ ID NO: 7121 - protein, 5 aa, Artificial Sequence
  source: /note="Description of Artificial Sequence: Synthetic peptide"
SYVLH

SEQ ID NO: 7122 - protein, 5 aa, Artificial Sequence
  source: /note="Description of Artificial Sequence: Synthetic peptide"
DHAIH

SEQ ID NO: 7123 - protein, 5 aa, Artificial Sequence
  source: /note="Description of Artificial Sequence: Synthetic peptide"
NSGMN

SEQ ID NO: 7124 - protein, 5 aa, Artificial Sequence
  source: /note="Description of Artificial Sequence: Synthetic peptide"
NYWIQ

SEQ ID NO: 7125 - protein, 10 aa, Artificial Sequence
  source: /note="Description of Artificial Sequence: Synthetic peptide"
GFTFSPFAMS

SEQ ID NO: 7126 - protein, 10 aa, Artificial Sequence
  source: /note="Description of Artificial Sequence: Synthetic peptide"
GFIFSSYAMH

SEQ ID NO: 7127 - protein, 17 aa, Artificial Sequence
  source: /note="Description of Artificial Sequence: Synthetic peptide"
FISYDGNNKYYADSVKG

SEQ ID NO: 7128 - protein, 17 aa, Artificial Sequence
  source: /note="Description of Artificial Sequence: Synthetic peptide"
GIIPIFGTANYAQKFQG

SEQ ID NO: 7129 - protein, 16 aa, Artificial Sequence
  source: /note="Description of Artificial Sequence: Synthetic peptide"
MIWGDGKIVYNSALKS

SEQ ID NO: 7130 - protein, 16 aa, Artificial Sequence
  source: /note="Description of Artificial Sequence: Synthetic peptide"
AINQDGSEKYYVGSVK

SEQ ID NO: 7131 - protein, 17 aa, Artificial Sequence
  source: /note="Description of Artificial Sequence: Synthetic peptide"
WISTYSGNTNYAQKLQG

SEQ ID NO: 7132 - protein, 16 aa, Artificial Sequence
  source: /note="Description of Artificial Sequence: Synthetic peptide"
QIFPASGSADYNEMFE

SEQ ID NO: 7133 - protein, 16 aa, Artificial Sequence
  source: /note="Description of Artificial Sequence: Synthetic peptide"
QIFPASGSADYNEKFE

SEQ ID NO: 7134 - protein, 16 aa, Artificial Sequence
  source: /note="Description of Artificial Sequence: Synthetic peptide"
QIFPASGSADYAQKLQ

SEQ ID NO: 7135 - protein, 8 aa, Artificial Sequence
  source: /note="Description of Artificial Sequence: Synthetic peptide"
ISGSGGNT

SEQ ID NO: 7136 - protein, 16 aa, Artificial Sequence
  source: /note="Description of Artificial Sequence: Synthetic peptide"
VIWASGGTDYNSALMS

SEQ ID NO: 7137 - protein, 17 aa, Artificial Sequence
  source: /note="Description of Artificial Sequence: Synthetic peptide"
EISSGGSYTYYPDTVTG

SEQ ID NO: 7138 - protein, 16 aa, Artificial Sequence
  source: /note="Description of Artificial Sequence: Synthetic peptide"
IMSPVDSDIRYSPSFQ

SEQ ID NO: 7139 - protein, 17 aa, Artificial Sequence
  source: /note="Description of Artificial Sequence: Synthetic peptide"
TISWNSGSIGYADSVKG

SEQ ID NO: 7140 - protein, 17 aa, Artificial Sequence
  source: /note="Description of Artificial Sequence: Synthetic peptide"
YINPYNDGTQYNEKFKG

SEQ ID NO: 7141 - protein, 17 aa, Artificial Sequence
  source: /note="Description of Artificial Sequence: Synthetic peptide"
YFSPGNDDFKYNERFKG

SEQ ID NO: 7142 - protein, 17 aa, Artificial Sequence
  source: /note="Description of Artificial Sequence: Synthetic peptide"
VIWYDGSKRYYADSVKG

SEQ ID NO: 7143 - protein, 17 aa, Artificial Sequence
  source: /note="Description of Artificial Sequence: Synthetic peptide"
EILPGSGSTEYTENFKD

SEQ ID NO: 7144 - protein, 17 aa, Artificial Sequence
  source: /note="Description of Artificial Sequence: Synthetic peptide"
KISPGGSWTYYSDTVTG

SEQ ID NO: 7145 - protein, 17 aa, Artificial Sequence
  source: /note="Description of Artificial Sequence: Synthetic peptide"
FMSYDGSNKKYADSVKG

SEQ ID NO: 7146 - protein, 9 aa, Artificial Sequence
  source: /note="Description of Artificial Sequence: Synthetic peptide"
TGWLGPFDY

SEQ ID NO: 7147 - protein, 21 aa, Artificial Sequence
  source: /note="Description of Artificial Sequence: Synthetic peptide"
APLRFLEWSTQDHYYYYYMDV

SEQ ID NO: 7148 - protein, 10 aa, Artificial Sequence
  source: /note="Description of Artificial Sequence: Synthetic peptide"
DGYYPYAMDN

SEQ ID NO: 7149 - protein, 18 aa, Artificial Sequence
  source: /note="Description of Artificial Sequence: Synthetic peptide"
DYYDILTDYYIHYWYFDL

SEQ ID NO: 7150 - protein, 7 aa, Artificial Sequence
  source: /note="Description of Artificial Sequence: Synthetic peptide"
RQLYFDY

SEQ ID NO: 7151 - protein, 7 aa, Artificial Sequence
  source: /note="Description of Artificial Sequence: Synthetic peptide"
GGGGFAY

SEQ ID NO: 7152 - protein, 18 aa, Artificial Sequence
  source: /note="Description of Artificial Sequence: Synthetic peptide"
AKDRLSITIRPRYYGLDV

SEQ ID NO: 7153 - protein, 11 aa, Artificial Sequence
  source: /note="Description of Artificial Sequence: Synthetic peptide"
DPPSSLLRLDY

SEQ ID NO: 7154 - protein, 10 aa, Artificial Sequence
  source: /note="Description of Artificial Sequence: Synthetic peptide"
GLWGYYALDY

SEQ ID NO: 7155 - protein, 10 aa, Artificial Sequence
  source: /note="Description of Artificial Sequence: Synthetic peptide"
RRPGQGYFDF

SEQ ID NO: 7156 - protein, 13 aa, Artificial Sequence
  source: /note="Description of Artificial Sequence: Synthetic peptide"
DIQYGNYYYGMDV

SEQ ID NO: 7157 - protein, 10 aa, Artificial Sequence
  source: /note="Description of Artificial Sequence: Synthetic peptide"
GFGGSYGFAY

SEQ ID NO: 7158 - protein, 6 aa, Artificial Sequence
  source: /note="Description of Artificial Sequence: Synthetic peptide"
SLNMAY

SEQ ID NO: 7159 - protein, 4 aa, Artificial Sequence
  source: /note="Description of Artificial Sequence: Synthetic peptide"
NDDY

SEQ ID NO: 7160 - protein, 13 aa, Artificial Sequence
  source: /note="Description of Artificial Sequence: Synthetic peptide"
YFFGSSPNWYFDV

SEQ ID NO: 7161 - protein, 10 aa, Artificial Sequence
  source: /note="Description of Artificial Sequence: Synthetic peptide"
QLWGYYALDI

SEQ ID NO: 7162 - protein, 17 aa, Artificial Sequence
  source: /note="Description of Artificial Sequence: Synthetic peptide"
DRGIAAGGNYYYYGMDV

SEQ ID NO: 7163 - protein, 451 aa, Artificial Sequence
  source: /note="Description of Artificial Sequence: Synthetic polypeptide"
QVQLQQPGAELVKPGASVKMSCKASGYTFTSYNMHWVKQTPGRGLEWIGAIYPGNGDTSYNQKFKGKATLTADKSSSTAYMQLSSLTSEDSAVYYCARSTYYGGDWYFNVWGAGTTVTVSAASTKGPSVFPLAPSSKSTSGGTAALGCLVKDYFPEPVTVSWNSGALTSGVHTFPAVLQSSGLYSLSSVVTVPSSSLGTQTYICNVNHKPSNTKVDKKVEPKSCDKTHTCPPCPAPELLGGPSVFLFPPKPKDTLMISRTPEVTCVVVDVSHEDPEVKFNWYVDGVEVHNAKTKPREEQYNSTYRVVSVLTVLHQDWLNGKEYKCKVSNKALPAPIEKTISKAKGQPREPQVYTLPPSRDELTKNQVSLTCLVKGFYPSDIAVEWESNGQPENNYKTTPPVLDSDGSFFLYSKLTVDKSRWQQGNVFSCSVMHEALHNHYTQKSLSLSPGK

SEQ ID NO: 7164 - protein, 471 aa, Artificial Sequence
  source: /note="Description of Artificial Sequence: Synthetic polypeptide"
MGWSYIILFLVATATDVHSQVQLQQSGSELMMPGASVKISCKATGYTFSNYWIEWVKQRPGHGLEWIGEILPGTGRTIYNEKFKGKATFTADISSNTVQMQLSSLTSEDSAVYYCARRDYYGNFYYAMDYWGQGTSVTVSSASTKGPSVFPLAPSSKSTSGGTAALGCLVKDYFPEPVTVSWNSGALTSGVHTFPAVLQSSGLYSLSSVVTVPSSSLGTQTYICNVNHKPSNTKVDKKVEPKSCDKTHTCPPCPAPELLGGPSVFLFPPKPKDTLMISRTPEVTCVVVDVSHEDPEVKFNWYVDGVEVHNAKTKPREEQYNSTYRVVSVLTVLHQDWLNGKEYKCKVSNKALPAPIEKTISKAKGQPREPQVYTLPPSRDELTKNQVSLTCLVKGFYPSDIAVEWESNGQPENNYKTTPPVLDSDGSFFLYSKLTVDKSRWQQGNVFSCSVMHEALHNHYTQKSLSLSPGK

SEQ ID NO: 7165 - protein, 326 aa, Artificial Sequence
  source: /note="Description of Artificial Sequence: Synthetic polypeptide"
ASTKGPSVFPLAPCSRSTSESTAALGCLVKDYFPEPVTVSWNSGALTSGVHTFPAVLQSSGLYSLSSVVTVPSSSLGTKTYTCNVDHKPSNTKVDKRVESKYGPPCPPCPAPPVAGPSVFLFPPKPKDTLMISRTPEVTCVVVDVSQEDPEVQFNWYVDGVEVHNAKTKPREEQFNSTYRVVSVLTVLHQDWLNGKEYKCKVSNKGLPSSIEKTISKAKGQPREPQVYTLPPSQEEMTKNQVSLTCLVKGFYPSDIAVEWESNGQPENNYKTTPPVLDSDGSFFLYSRLTVDKSRWQEGNVFSCSVMHEALHNHYTQKSLSLSLGK

SEQ ID NO: 7166 - protein, 329 aa, Artificial Sequence
  source: /note="Description of Artificial Sequence: Synthetic polypeptide"
ASTKGPSVFPLAPSSKSTSGGTAALGCLVKDYFPEPVTVSWNSGALTSGVHTFPAVLQSSGLYSLSSVVTVPSSSLGTQTYICNVNHKPSNTKVDKKVEPKSCDKTHTCPPCPAPPVAGPSVFLFPPKPKDTLMISRTPEVTCVVVDVSQEDPEVQFNWYVDGVEVHNAKTKPREEQFNSTYRVVSVLTVLHQDWLNGKEYKCKVSNKGLPSSIEKTISKAKGQPREPQVYTLPPSRDELTKNQVSLTCLVKGFYPSDIAVEWESNGQPENNYKTTPPVLDSDGSFFLYSKLTVDKSRWQQGNVFSCSVMHEALHNHYTQKSLSLSPGK

SEQ ID NO: 7167 - protein, 330 aa, Artificial Sequence
  source: /note="Description of Artificial Sequence: Synthetic polypeptide"
AKTTAPSVYPLAPVCGDTTGSSVTLGCLVKGYFPEPVTLTWNSGSLSSGVHTFPAVLQSDLYTLSSSVTVTSSTWPSQSITCNVAHPASSTKVDKKIEPRGPTIKPCPPCKCPAPNLLGGPSVFIFPPKIKDVLMISLSPIVTCVVVDVSEDDPDVQISWFVNNVEVHTAQTQTHREDYNSTLRVVSALPIQHQDWMSGKEFKCKVNNKDLPAPIERTISKPKGSVRAPQVYVLPPPEEEMTKKQVTLTCMVTDFMPEDIYVEWTNNGKTELNYKNTEPVLDSDGSYFMYSKLRVEKKNWVERNSYSCSVVHEGLHNHHTTKSFSRTPGK

SEQ ID NO: 7168 - protein, 330 aa, Artificial Sequence [sequence omitted]

SEQ ID NO: 7169 - protein, 326 aa, Artificial Sequence; identical to SEQ ID NO: 3888
  source: /note="Description of Artificial Sequence: Synthetic polypeptide"

SEQ ID NO: 7170 - protein, 377 aa, Artificial Sequence
  source: /note="Description of Artificial Sequence: Synthetic polypeptide"
ASTKGPSVFPLAPCSRSTSGGTAALGCLVKDYFPEPVTVSWNSGALTSGVHTFPAVLQSSGLYSLSSVVTVPSSSLGTQTYTCNVNHKPSNTKVDKRVELKTPLGDTTHTCPRCPEPKSCDTPPPCPRCPEPKSCDTPPPCPRCPEPKSCDTPPPCPRCPAPELLGGPSVFLFPPKPKDTLMISRTPEVTCVVVDVSHEDPEVQFKWYVDGVEVHNAKTKPREEQYNSTFRVVSVLTVLHQDWLNGKEYKCKVSNKALPAPIEKTISKTKGQPREPQVYTLPPSREEMTKNQVSLTCLVKGFYPSDIAVEWESSGQPENNYNTTPPMLDSDGSFFLYSKLTVDKSRWQQGNIFSCSVMHEALHNRFTQKSLSLSPGK

SEQ ID NO: 7171 - protein, 327 aa, Artificial Sequence
  source: /note="Description of Artificial Sequence: Synthetic polypeptide"
ASTKGPSVFPLAPCSRSTSESTAALGCLVKDYFPEPVTVSWNSGALTSGVHTFPAVLQSSGLYSLSSVVTVPSSSLGTKTYTCNVDHKPSNTKVDKRVESKYGPPCPSCPAPEFLGGPSVFLFPPKPKDTLMISRTPEVTCVVVDVSQEDPEVQFNWYVDGVEVHNAKTKPREEQFNSTYRVVSVLTVLHQDWLNGKEYKCKVSNKGLPSSIEKTISKAKGQPREPQVYTLPPSQEEMTKNQVSLTCLVKGFYPSDIAVEWESNGQPENNYKTTPPVLDSDGSFFLYSRLTVDKSRWQEGNVFSCSVMHEALHNHYTQKSLSLSLGK

SEQ ID NO: 7172 - protein, 329 aa, Artificial Sequence
  source: /note="Description of Artificial Sequence: Synthetic polypeptide"
ASTKGPSVFPLAPSSKSTSGGTAALGCLVKDYFPEPVTVSWNSGALTSGVHTFPAVLQSSGLYSLSSVVTVPSSSLGTQTYICNVNHKPSNTKVDKKVEPKSCDKTHTCPPCPAPPVAGPSVFLFPPKPKDTLMISRTPEVTCVVVDVSHEDPEVQFNWYVDGVEVHNAKTKPREEQFNSTFRVVSVLTVVHQDWLNGKEYKCKVSNKGLPAPIEKTISKTKGQPREPQVYTLPPSREEMTKNQVSLTCLVKGFYPSDIAVEWESNGQPENNYKTTPPMLDSDGSFFLYSKLTVDKSRWQQGNVFSCSVMHEALHNHYTQKSLSLSPGK

SEQ ID NO: 7173 - protein, 330 aa, Artificial Sequence
  source: /note="Description of Artificial Sequence: Synthetic polypeptide"
ASTKGPSVFPLAPSSKSTSGGTAALGCLVKDYFPEPVTVSWNSGALTSGVHTFPAVLQSSGLYSLSSVVTVPSSSLGTQTYICNVNHKPSNTKVDKKVEPKSCDKTHTCPPCPAPELLGGPSVFLFPPKPKDTLMISRTPEVTCVVVDVSHEDPEVQFNWYVDGVEVHNAKTKPREEQFNSTFRVVSVLTVVHQDWLNGKEYKCKVSNKGLPAPIEKTISKTKGQPREPQVYTLPPSREEMTKNQVSLTCLVKGFYPSDIAVEWESNGQPENNYKTTPPMLDSDGSFFLYSKLTVDKSRWQQGNVFSCSVMHEALHNHYTQKSLSLSPGK

SEQ ID NO: 7174 - protein, 218 aa, Artificial Sequence
  source: /note="Description of Artificial Sequence: Synthetic polypeptide"
EIVLTQSPDSLAVSLGERATINCKASQSVDFDGDSYLNWYQQKPGQPPKVLIYAASTLQSGVPSRFSGSGSGTDFTLTINSLEAEDAATYYCQQSNEDPWTFGGGTKVEIKRTVAAPSVFIFPPSDEQLKSGTASVVCLLNNFYPREAKVQWKVDNALQSGNSQESVTEQDSKDSTYSLSSTLTLSKADYEKHKVYACEVTHQGLSSPVTKSFNRGEC

SEQ ID NO: 7175 - protein, 330 aa, Artificial Sequence; identical to SEQ ID NO: 3890
  source: /note="Description of Artificial Sequence: Synthetic polypeptide"

SEQ ID NO: 7176 - protein, 330 aa, Artificial Sequence; identical to SEQ ID NO: 3890
  source: /note="Description of Artificial Sequence: Synthetic polypeptide"

SEQ ID NO: 7177 - protein, 330 aa, Artificial Sequence
  source: /note="Description of Artificial Sequence: Synthetic polypeptide"
SASTKGPSVFPLAPSSKSTSGGTAALGCLVKDYFPEPVTVSWNSGALTSGVHTFPAVLQSSGLYSLSSVVTVPSSSLGTQTYICNVNHKPSNTKVDKRVEPKSCDKTHTCPPCPAPELLGGPSVFLFPPKPKDTLMISRTPEVTCVVVDVSHEDPEVKFNWYVDGVEVHNAKTKPREEQYNSTYRVVSVLTVLHQDWLNGKEYKCKVSNKALPAPIEKTISKAKGQPREPQVYTLPPSREEMTKNQVSLTCLVKGFYPSDIAVEWESNGQPENNYKTTPPVLDSDGSFFLYSKLTVDKSRWQQGNVFSCSVMHEALHNHYTQKSLSLSPG

SEQ ID NO: 7178 - protein, 330 aa, Artificial Sequence
  source: /note="Description of Artificial Sequence: Synthetic polypeptide"
ASTKGPSVFPLAPSSKSTSGGTAALGCLVKDYFPEPVTVSWNSGALTSGVHTFPAVLQSSGLYSLSSVVTVPSSSLGTQTYICNVNHKPSNTKVDKKVEPKSCDKTHTCPPCPAPELLGGPSVFLFPPKPKDTLMISRTPEVTCVVVDVSHEDPEVKFNWYVDGVEVHNAKTKPREEQYNSTYRVVSVLTVLHQDWLNGKEYKCKVSNKALPAPIEKTISKAKGQPREPQVYTLPPSREEMTKNQVSLTCLVKGFYPSDIAVEWESNGQPENNYKTTPPVLDSDGSFFLYSKLTVDKSRWQQGNVFSCSVMHEALHNHYTQKSLSLSPGK

SEQ ID NO: 7179 - protein, 327 aa, Artificial Sequence
  source: /note="Description of Artificial Sequence: Synthetic polypeptide"
ASTKGPSVFPLAPCSRSTSESTAALGCLVKDYFPEPVTVSWNSGALTSGVHTFPAVLQSSGLYSLSSVVTVPSSSLGTKTYTCNVDHKPSNTKVDKRVESKYGPPCPPCPAPEFLGGPSVFLFPPKPKDTLMISRTPEVTCVVVDVSQEDPEVQFNWYVDGVEVHNAKTKPREEQFNSTYRVVSVLTVLHQDWLNGKEYKCKVSNKGLPSSIEKTISKAKGQPREPQVYTLPPSQEEMTKNQVSLTCLVKGFYPSDIAVEWESNGQPENNYKTTPPVLDSDGSFFLYSRLTVDKSRWQEGNVFSCSVMHEALHNHYTQKSLSLSLGK

SEQ ID NO: 7180 - protein, 243 aa, Artificial Sequence
  source: /note="Description of Artificial Sequence: Synthetic polypeptide"
KPSNTKVDKKVEPKSCDKTHTCPPCPAPELLGGPSVFLFPPKPKDTLMISRTPEVTCVVVDVSHEDPEVKFNWYVDGVEVHNAKTKPREEQYNSTYRVVSVLTVLHQDWLNGKEYKCKVSNKALPAPIEKTISKAKGQPREPQVYTLPPSREEMTKNQVSLTCLVKGFYPSDIAVEWESNGQPENNYKTTPPVLDSDGSFFLYSKLTVDKSRWQQGNVFSCSVMHEALHNHYTQKSLSLSPGK

SEQ ID NO: 7181 - protein, 326 aa, Artificial Sequence
  source: /note="Description of Artificial Sequence: Synthetic polypeptide"
ASTKGPSVFPLAPCSRSTSESTAALGCLVKDYFPEPVTVSWNSGALTSGVHTFPAVLQSSGLYSLSSVVTVPSSNFGTQTYTCNVDHKPSNTKVDKTVERKCCVECPPCPAPPAAAPSVFLFPPKPKDTLMISRTPEVTCVVVDVSHEDPEVQFNWYVDGVEVHNAKTKPREEQFNSTFRVVSVLTVVHQDWLNGKEYKCKVSNKGLPAPIEKTISKTKGQPREPQVYTLPPSREEMTKNQVSLTCLVKGFYPSDIAVEWESNGQPENNYKTTPPMLDSDGSFFLYSKLTVDKSRWQQGNVFSCSVMHEALHNHYTQKSLSLSPSK

SEQ ID NO: 7182 - protein, 103 aa, Artificial Sequence
  source: /note="Description of Artificial Sequence: Synthetic polypeptide"
ASTKGPSVFPLAPSSKSTSGGTAALGCLVKDYFPEPVTVSWNSGALTSGVHTFPAVLQSSGLYSLSSVVTVPSSSLGTQTYICNVNHKPSNTKVDKKVEPKSC

SEQ ID NO: 7183 - protein, 103 aa, Artificial Sequence
  source: /note="Description of Artificial Sequence: Synthetic polypeptide"
PSVFLFPPKPKDTLMISRTPEVTCVVVDVSHEDPEVKFNWYVDGVEVHNAKTKPREEQYNSTYRVVSVLTVLHQDWLNGKEYKCKVSNKGLPSSIEKTISKAK

SEQ ID NO: 7184 - protein, 107 aa, Artificial Sequence
  source: /note="Description of Artificial Sequence: Synthetic polypeptide"
GQPREPQVYTLPPSRDELTKNQVSLTCLVKGFYPSDIAVEWESNGQPENNYKTTPPVLDSDGSFFLYSKLTVDKSRWQQGNVFSCSVMHEALHNHYTQKSLSLSPGK

SEQ ID NO: 7185 - protein, 460 aa, Artificial Sequence; identical to SEQ ID NO: 3899
  source: /note="Description of Artificial Sequence: Synthetic polypeptide"

SEQ ID NO: 7186 - protein, 458 aa, Artificial Sequence; identical to SEQ ID NO: 3900
  source: /note="Description of Artificial Sequence: Synthetic polypeptide"

SEQ ID NO: 7187 - protein, 459 aa, Artificial Sequence; identical to SEQ ID NO: 3901
  source: /note="Description of Artificial Sequence: Synthetic polypeptide"

SEQ ID NO: 7188 - protein, 459 aa, Artificial Sequence; identical to SEQ ID NO: 3902
  source: /note="Description of Artificial Sequence: Synthetic polypeptide"

SEQ ID NO: 7189 - protein, 458 aa, Artificial Sequence; identical to SEQ ID NO: 3903
  source: /note="Description of Artificial Sequence: Synthetic polypeptide"

SEQ ID NO: 7190 - protein, 458 aa, Artificial Sequence; identical to SEQ ID NO: 3904
  source: /note="Description of Artificial Sequence: Synthetic polypeptide"

SEQ ID NO: 7191 - protein, 460 aa, Artificial Sequence; identical to SEQ ID NO: 3905
  source: /note="Description of Artificial Sequence: Synthetic polypeptide"

SEQ ID NO: 7192 - protein, 459 aa, Artificial Sequence; identical to SEQ ID NO: 3906
  source: /note="Description of Artificial Sequence: Synthetic polypeptide"

SEQ ID NO: 7193 - protein, 460 aa, Artificial Sequence; identical to SEQ ID NO: 3907
  source: /note="Description of Artificial Sequence: Synthetic polypeptide"

SEQ ID NO: 7194 - protein, 460 aa, Artificial Sequence; identical to SEQ ID NO: 3908
  source: /note="Description of Artificial Sequence: Synthetic polypeptide"

SEQ ID NO: 7195 - protein, 459 aa, Artificial Sequence; identical to SEQ ID NO: 3909
  source: /note="Description of Artificial Sequence: Synthetic polypeptide"

SEQ ID NO: 7196 - protein, 459 aa, Artificial Sequence; identical to SEQ ID NO: 3910
  source: /note="Description of Artificial Sequence: Synthetic polypeptide"

SEQ ID NO: 7197 - protein, 460 aa, Artificial Sequence; identical to SEQ ID NO: 3911
  source: /note="Description of Artificial Sequence: Synthetic polypeptide"

SEQ ID NO: 7198 - protein, 460 aa, Artificial Sequence; identical to SEQ ID NO: 3912
  source: /note="Description of Artificial Sequence: Synthetic polypeptide"

SEQ ID NO: 7199 - protein, 460 aa, Artificial Sequence; identical to SEQ ID NO: 3913
  source: /note="Description of Artificial Sequence: Synthetic polypeptide"

SEQ ID NO: 7200 - protein, 459 aa, Artificial Sequence; identical to SEQ ID NO: 3914
  source: /note="Description of Artificial Sequence: Synthetic polypeptide"

SEQ ID NO: 7201 - protein, 441 aa, Artificial Sequence; identical to SEQ ID NO: 3915
  source: /note="Description of Artificial Sequence: Synthetic polypeptide"

SEQ ID NO: 7202 - protein, 118 aa, Artificial Sequence
  source: /note="Description of Artificial Sequence: Synthetic polypeptide"
QVQLVESGGGVVQPGRSLRLSCAASGFTFSSYTMHWVRQAPGKGLEWVTFISYDGNNKYYADSVKGRFTISRDNSKNTLYLQMNSLRAEDTAIYYCARTGWLGPFDYWGQGTLVTVSS

SEQ ID NO: 7203 - protein, 118 aa, Artificial Sequence
  source: /note="Description of Artificial Sequence: Synthetic polypeptide"
QVQLVESGGGVVQPGRSLRLSCAASGFTFSSYTMHWVRQAPGKGLEWVTFISYDGSNKHYADSVKGRFTVSRDNSKNTLYLQMNSLRAEDTAIYYCARTGWLGPFDYWGQGTLVTVSS

SEQ ID NO: 7204 - protein, 119 aa, Artificial Sequence
  source: /note="Description of Artificial Sequence: Synthetic polypeptide"
QVQLVESGGGVVQPGRSLRLSCAASGFTFSSYGMHWVRQAPGKGLEWVAVIWYDGSNKYYADSVKGRFTISRDNSKNTLYLQMNSLRAEDTAVFYCARAPNYIGAFDVWGQGTMVTVSS

SEQ ID NO: 7205 - protein, 137 aa, Artificial Sequence
  source: /note="Description of Artificial Sequence: Synthetic polypeptide"
MEFGLSWVFLVAILKGVQCEVQLVQSGGGLVHPGGSLRLSCAASGFTFSSFAMHWVRQAPGKGLEWISVIDTRGATYYADSVKGRFTISRDNAKNSLYLQMNSLRAEDMAVYYCARLGNFYYGMDVWGQGTTVTVSS

SEQ ID NO: 7206 - protein, 137 aa, Artificial Sequence
  source: /note="Description of Artificial Sequence: Synthetic polypeptide"
MEFGLSWVFLVAILKGVQCEVQLVQSGGGLVKPGGSLRLSCAASGFTFSSFAMHWVRQAPGKGLEWISVIDTRGATYYADSVKGRFTISRDNAKNSLYLQMNSLRAEDTAVYYCARLGNFYYGMDVWGQGTTVTVSS

SEQ ID NO: 7207 - protein, 137 aa, Artificial Sequence
  source: /note="Description of Artificial Sequence: Synthetic polypeptide"
MEFGLSWVFLVAILKGVQCEVQLVQSGGGLVQPGGSLRLSCAASGFTFSSFAMHWVRQAPGKGLEWISVIDTRGATYYADSVKGRFTISRDNAKNSLYLQMNSLRAEDTAVYYCARLGNFYYGMDVWGQGTTVTVSS

SEQ ID NO: 7208 - protein, 444 aa, Artificial Sequence
  source: /note="Description of Artificial Sequence: Synthetic polypeptide"
QVQLVQSGAEVVKPGASVKLSCKASGYIFTSYYMYWVKQAPGQGLEWIGEINPSNGDTNFNEKFKSKATLTVDKSASTAYMELSSLRSEDTAVYYCTRSDGRNDMDSWGQGTLVTVSSASTKGPSVFPLAPCSRSTSESTAALGCLVKDYFPEPVTVSWNSGALTSGVHTFPAVLQSSGLYSLSSVVTVPSSSLGTKTYTCNVDHKPSNTKVDKRVESKYGPPCPPCPAPEFLGGPSVFLFPPKPKDTLMISRTPEVTCVVVDVSQEDPEVQFNWYVDGVEVHNAKTKPREEQFNSAYRVVSVLTVLHQDWLNGKEYKCKVSNKGLPSSIEKTISKAKGQPREPQVYTLPPSQEEMTKNQVSLTCLVKGFYPSDIAVEWESNGQPENNYKTTPPVLDSDGSFFLYSRLTVDKSRWQEGNVFSCSVMHEALHNHYTQKSLSLSLG

SEQ ID NO: 7209 - protein, 121 aa, Artificial Sequence
  source: /note="Description of Artificial Sequence: Synthetic polypeptide"
QVQLVQSGAEVKKPGASVKVSCKASGYTFTSYDINWVRQATGQGLEWMGWMNPNSGNTGYAQKFQGRVTMTRNTSISTAYMELSSLRSEDTAVYYCARDPYYYYYGMDVWGQGTTVTVSSA

SEQ ID NO: 7210 - protein, 449 aa, Artificial Sequence
  source: /note="Description of Artificial Sequence: Synthetic polypeptide"
QVTLRESGPALVKPTQTLTLTCTVSGFSLTSYSVHWVRQPPGKGLEWLGVIWASGGTDYNSALMSRLSISKDTSRNQVVLTMTNMDPVDTATYYCARDPPSSLLRLDYWGRGTPVTVSSASTKGPSVFPLAPSSKSTSGGTAALGCLVKDNSGALTYFPEPVTVSWSGVHTFPAVLQSSGLYSLSSVVTVPSSSLGTQTYICNVNHKPSNTKVDKRVEPKSCDKTHTCPPCPAPELLGGPSVFLFPPKPKDTLMISRTPEVTCVVVDVSHEDPEVKFNWYVDGVEVHNAKTKPREEQYNSTYRVVSVLTVLHQDWLNGKEYKCKVSNKALPAPIEKTISKAKGQPREPQVYTLPPSREEMTKNQVSLTCLVKGFYPSDIAVEWESNGQPDSDGSENNYKTTPPVLFFLYSKLTVDKSRWQQGNVFSCSVMHEALHNHYTQKSLSLSPGK

SEQ ID NO: 7211 - protein, 119 aa, Artificial Sequence [sequence omitted]

SEQ ID NO: 7212 - protein, 449 aa, Artificial Sequence
  source: /note="Description of Artificial Sequence: Synthetic polypeptide"
QVTLRESGPALVKPTQTLTLTCTVSGFSLTSYSVHWVRQPPGKGLEWLGVSRIWASGGTDYNSALMLSISKDTSRNQVVLTMTNMDPVDTATYYCARDPPSSLLRLDYWGRGTLVTVSSASTKGPSVFPLAPSSKSTSGGTAALGCLVKDNSGALTYFPEPVTVSWSGVHTFPAVLQSSGLYSLSSVVTVPSSSLGTQTYICNVNHKPSNTKVDKKVEPKSCDKTHTCPPCPAPELLGGPSVFLFPPKPKDTLMISRTPEVTCVVVDVSHEDPEVKFNWYVDGVEVHNAKTKPREEQYNSTYRVVSVLTVLHQDWLNGKEYKCKVSNKALPAPIEKTISKAKGQLPPSRDELPREPQVYTTKNQVSLTCLVKGFYPSDIAVEWESNGQPENNYKTTPPVLDSDGSFFLYSKLTVDKSRWQQGNVFSCSVMHEALHNHYTQKSLSLSPGK

SEQ ID NO: 7213 - protein, 122 aa, Artificial Sequence [sequence omitted]

SEQ ID NO: 7214 - protein, 122 aa, Artificial Sequence
  source: /note="Description of Artificial Sequence: Synthetic polypeptide"
EVQLVESGGGLVQPDRSLRLSCAASGFTFHDYAMHWVRQAPGKGLEWVSTISWNSGTIGYADSVKGRFTISRDNAKNSLYLQMNSLRAEDTALYYCAKDIQYGNYYYGMDVWGQGTTVTVSS

SEQ ID NO: 7215 - protein, 125 aa, Artificial Sequence [sequence omitted]

SEQ ID NO: 7216 - protein, 124 aa, Artificial Sequence
  source: /note="Description of Artificial Sequence: Synthetic polypeptide"
QVQLVQSGAEVKKPGASVKVSCKTSRYTFTEYTIHWVRQAPGQRLEWIGGINPNNGIPNYNQKFKGRATLTVGKSASTAYMELSSLRSEDTAVYFCARRRIAYGYDEGHAMDYWGQGTLVTVSS

SEQ ID NO: 7217 - protein, 124 aa, Artificial Sequence
  source: /note="Description of Artificial Sequence: Synthetic polypeptide"
QVQLVQSGAEVKKPGASVKVSCKTSRYTFTEYTIHWVRQAPGQRLEWIGGINPNNGIPNYNQKFKGRVTITVDTSASTAYMELSSLRSEDTAVYYCARRRIAYGYDEGHAMDYWGQGTLVTVSS

SEQ ID NO: 7218 - protein, 124 aa, Artificial Sequence
  source: /note="Description of Artificial Sequence: Synthetic polypeptide"
QVQLVQSGAEVKKPGASVKVSCKTSRYTFTEYTIHWVRQAPGQRLEWIGGINPNNGIPNYNQKFKGRVTITVDTSASTAYMELSSLRSEDTAVYFCARRRIAYGYDEGHAMDYWGQGTLVTVSS

SEQ ID NO: 7219 - protein, 124 aa, Artificial Sequence
  source: /note="Description of Artificial Sequence: Synthetic polypeptide"
QVQLVQSGAEVKKPGASVKVSCKTSGYTFTEYTIHWVRQAPGQRLEWIGGINPNNGIPNYNQKFKGRVTITVDTSASTAYMELSSLRSEDTAVYYCARRRIAYGYDEGHAMDYWGQGTLVTVSS

SEQ ID NO: 7220 - protein, 124 aa, Artificial Sequence
  source: /note="Description of Artificial Sequence: Synthetic polypeptide"
QVQLVQSGAEVKKPGASVKVSCKTSRYTFTEYTIHWVRQAPGQRLEWIGGINPNNGIPNYNQKFKGRATLTVGKSASTAYMELSSLRSEDTAVYYCARRRIAYGYDEGHAMDYWGQGTLVTVSS

SEQ ID NO: 7221 - protein, 450 aa, Artificial Sequence; identical to SEQ ID NO: 6733
  source: /note="Description of Artificial Sequence: Synthetic polypeptide"

SEQ ID NO: 7222 - protein, 450 aa, Artificial Sequence
  source: /note="Description of Artificial Sequence: Synthetic polypeptide"
QVQLVESGGGVVQPGRSLRLSCAASGFTFSSYGMHWVRQAPGKGLEWVAVISYEESNRYHADSVKGRFTISRDNSKITLYLQMNSLRTEDTAVYYCARDGGIAAPGPDYWGQGTLVTVSSASTKGPSVFPLAPSSKSTSGGTAALGCLVKDYFPEPVTVSWNSGALTSGVHTFPAVLQSSGLYSLSSVVTVPSSSLGTQTYICNVNHKPSNTKVDKRVEPKSCDKTHTCPPCPAPELLGGPSVFLFPPKPKDTLMISRTPEVTCVVVDVSHEDPEVKFNWYVDGVEVHNAKTKPREEQYNSTYRVVSVLTVLHQDWLNGKEYKCKVSNKALPAPIEKTISKAKGQPREPQVYTLPPSREEMTKNQVSLTCLVKGFYPSDIAVEWESNGQPENNYKTTPPVLDSDGSFFLYSKLTVDKSRWQQGNVFSCSVMHEALHNHYTQKSLSLSPGK

SEQ ID NO: 7223 - protein, 116 aa, Artificial Sequence [sequence omitted]

SEQ ID NO: 7224 - protein, 117 aa, Artificial Sequence
  source: /note="Description of Artificial Sequence: Synthetic polypeptide"
QIQLQQSGPEVVKPGASVKISCKASGYTFTDYYITWVKQKPGQGLEWIGWIYPGSGNTKYNEKFKGKATLTVDTSSSTAFMQLSSLTSEDTAVYFCANYGNYWFAYWGQGTQVTVSA

SEQ ID NO: 7225 - protein, 117 aa, Artificial Sequence
  source: /note="Description of Artificial Sequence: Synthetic polypeptide"
QIQLVESGGGLVKPGGSLRLSCAASGYTFTDYYITWVRQAPGQGLEWMGWIYPGSGNTKYNEKFQGRVTMTVDTSTSTAYMELSSLRSEDTAVYFCANYGNYWFAYWGQGTLVTVSS

SEQ ID NO: 7226 - protein, 117 aa, Artificial Sequence
  source: /note="Description of Artificial Sequence: Synthetic polypeptide"
QIQLVQSGPEVKKPGASVKVSCKASGYTFTDYYITWVRQAPGQGLEWMGWIYPGSGNTKYNEKFQGRFVFSVDTSASTAYLQISSLKAEDTAVYFCANYGNYWFAYWGQGTLVTVSS

SEQ ID NO: 7227 - protein, 111 aa, Artificial Sequence
  source: /note="Description of Artificial Sequence: Synthetic polypeptide"
DIVLTQSPATLSLSPGERATLSCRASQSVDFDGDSYMNWYQQKPGQPPKVLIYAASNLESGIPARFSGSGSGTDFTLTISSLQPEDFATYYCQQSNEDPWTFGGGTKVEIK

SEQ ID NO: 7228 - protein, 111 aa, Artificial Sequence
  source: /note="Description of Artificial Sequence: Synthetic polypeptide"
DIVLTQSPSSLSASVGDRVTITCRASQSVDFDGDSYMNWYQQKPGQPPKVLIYAASNLESGIPARFSGSGSGTDFTLTISSLQPEDFATYYCQQSNEDPWTFGGGTKVEIK

SEQ ID NO: 7229 - protein, 111 aa, Artificial Sequence
  source: /note="Description of Artificial Sequence: Synthetic polypeptide"
DIVLTQSPDSLAVSLGERATINCKASQSVDFDGDSYMNWYQQKPGQPPKVLIYAASNLESGIPARFSGSGSGTDFTLTINSLEAEDAATYYCQQSNEDPWTFGGGTKVEIK

SEQ ID NO: 7230 - protein, 121 aa, Artificial Sequence [sequence omitted]

SEQ ID NO: 7231 - protein, 126 aa, Artificial Sequence
  source: /note="Description of Artificial Sequence: Synthetic polypeptide"
QVQLQQWGAGLLKPSETLSLTCAVYGGSFSGYYWSWIRQPPGKGLEWIGEINHSGSTNYNPSLKSRVTISVDTSKNQFSLKLSSVTAADTAVYYCARGPRYYDILTGYRYNWFDPWGRGTLVTVSS

SEQ ID NO: 7232 - protein, 123 aa, Artificial Sequence
  source: /note="Description of Artificial Sequence: Synthetic polypeptide"
QVQLQQSGAEVKKPGSSVRVSCKASGGTFNNNAINWVRQAPGQGLEWMGGIIPMFGTAKYSQNFQGRVAITADESTGTASMELSSLRSEDTAVYYCARSRDLLLFPHHALSPWGRGTMVTVSS

SEQ ID NO: 7233 - protein, 122 aa, Artificial Sequence
  source: /note="Description of Artificial Sequence: Synthetic polypeptide"
EVQLVESGGGLVQPGGSLRLSCAASGFTFSSYDIHWVRQATGKGLEWVSAIGPAGDTYYPGSVKGRFTISRENAKNSLYLQMNSLRAGDTAVYYCARGLITFGGLIAPFDYWGQGTLVTVSS

SEQ ID NO: 7234 - protein, 119 aa, Artificial Sequence
  source: /note="Description of Artificial Sequence: Synthetic polypeptide"
EVQLVQSGAEVKKPGASVKVSCKASGYTFTNYYIHWVRQAPGQGLEWIGWIYPGDGNTKYNEKFKGRATLTADTSTSTAYLELSSLRSEDTAVYYCARDSYSNYYFDYWGQGTLVTVSS

SEQ ID NO: 7235 - protein, 119 aa, Artificial Sequence
  source: /note="Description of Artificial Sequence: Synthetic polypeptide"
QVQLQQSGPELVKPGASVKISCKASGYTFTNYYIHWVKQRPGQGLEWIGWIYPGDGNTKYNEKFKGKATLTADTSSSTAYMQLSSLTSEDSAVYYCARDSYSNYYFDYWGQGTTLTVSS

SEQ ID NO: 7236 - protein, 119 aa, Artificial Sequence
  source: /note="Description of Artificial Sequence: Synthetic polypeptide"
EVQLVQSGAEVKKPGASVKVSCKASGFTFTSYYIHWVRQAPGQGLEWIGWIYPENDNTKYNEKFKDRVTITADTSTSTAYLELSSLRSEDTAVYYCARDGYSRYYFDYWGQGTLVTVSS

SEQ ID NO: 7237 - protein, 119 aa, Artificial Sequence
  source: /note="Description of Artificial Sequence: Synthetic polypeptide"
EVQLVQSGAEVKKPGASVKVSCKASGFTFTSYYIHWVRQAPGQGLEWIGWIYPENDNTKYNEKFKDRVTITADTSTSTAYLELSSLRSEDTAVYYCARDAYSRYYFDYWGQGTLVTVSS

SEQ ID NO: 7238 - protein, 119 aa, Artificial Sequence; identical to SEQ ID NO: 7236
  source: /note="Description of Artificial Sequence: Synthetic polypeptide"

SEQ ID NO: 7239 - protein, 119 aa, Artificial Sequence; identical to SEQ ID NO: 7236
  source: /note="Description of Artificial Sequence: Synthetic polypeptide"

SEQ ID NO: 7240 - protein, 119 aa, Artificial Sequence; identical to SEQ ID NO: 7236
  source: /note="Description of Artificial Sequence: Synthetic polypeptide"

SEQ ID NO: 7241 - protein, 119 aa, Artificial Sequence
  source: /note="Description of Artificial Sequence: Synthetic polypeptide"
EVQLVQSGAEVKKPGASVKVSCKASGFTFTSYYIHWVRQAPGQGLEWIGWIYPENDNTKYNEKFKDRVTITADTSTSTAYLELSSLRSEDTAVYYCARTGYSRYYFDYWGQGTLVTVSS

SEQ ID NO: 7242 - protein, 119 aa, Artificial Sequence
  source: /note="Description of Artificial Sequence: Synthetic polypeptide"
EVQLVQSGAEVKKPGASVKVSCKASGFTFTSYYIHWVRQAPGQGLEWIGWIYPENDNTKYNEKFKDRVTITADTSTSTAYLELSSLRSEDTAVYYCARDGYSRYAFDYWGQGTLVTVSS

SEQ ID NO: 7243 - protein, 119 aa, Artificial Sequence
  source: /note="Description of Artificial Sequence: Synthetic polypeptide"
EVQLVQSGAEVKKPGASVKVSCKASGFTFTSYYIHWVRQAPGQGLEWIGWIYPENDNTKYNEKFKDRVTITADTSTSTAYLELSSLRSEDTAVYYCARSGYSRYYFDYWGQGTLVTVSS

SEQ ID NO: 7244 - protein, 119 aa, Artificial Sequence
  source: /note="Description of Artificial Sequence: Synthetic polypeptide"
EVQLVQSGAEVKKPGASVKVSCKASGFTFTSYYIHWVRQAPGQGLEWIGWIYPENDNTKYNEKFKDRVTITADTSTSTAYLELSSLRSEDTAVYYCARDGYSRAYFDYWGQGTLVTVSS

SEQ ID NO: 7245 - protein, 119 aa, Artificial Sequence
  source: /note="Description of Artificial Sequence: Synthetic polypeptide"
EVQLVQSGAEVKKPGASVKVSCKASGFTFTSYYIHWVRQAPGQGLEWIGWIYPENDNTKYNEKFKDRVTITADTSTSTAYLELSSLRSEDTAVYYCARDSYSNYYFDYWGQGTLVTVSS

SEQ ID NO: 7246 - protein, 122 aa, Artificial Sequence
  source: /note="Description of Artificial Sequence: Synthetic polypeptide"
EVQLVESGGGLVQPGGSLRLSCAASGYSFTGYTMNWVRQAPGKDLEWVALINPYKGVSTYNQKFKDRFTISVDKSKNTAYLQMNSLRAEDTAVYYCARSGYYGDSDWYFDVWGQGTLVTVSS

SEQ ID NO: 7247 - protein, 122 aa, Artificial Sequence
  source: /note="Description of Artificial Sequence: Synthetic polypeptide"
EVQLVESGGGLVQPGGSLRLSCAASGYSFTGYTMNWVRQAPGKGLEWVALINPYKGVTTYADSVKGRFTISVDKSKNTAYLQMNSLRAEDTAVYYCARSGYYGDSDWYFDVWGQGTLVTVSS

SEQ ID NO: 7248 - protein, 122 aa, Artificial Sequence
  source: /note="Description of Artificial Sequence: Synthetic polypeptide"
EVQLVESGGGLVQPGGSLRLSCAASGYSFTGYTMNWVRQAPGKGLEWVALINPYKGVSTYADSVKGRFTISVDKSKNTAYLQMNSLRAEDTAVYYCARSGYYGDSDWYFDVWGQGTLVTVSS

SEQ ID NO: 7249 - protein, 125 aa, Artificial Sequence
  source: /note="Description of Artificial Sequence: Synthetic polypeptide"
EVQLVESGGGLVQPGGSLRLSCAASGFTFNTYAMNWVRQAPGKGLEWVARIRSKYNNYATYYADSVKDRFTISRDDSKNTLYLQMNSLRAEDTAVYYCVRHGNFGNSYVSWFAYWGQGTLVTVSS

SEQ ID NO: 7250 - protein, 125 aa, Artificial Sequence
  source: /note="Description of Artificial Sequence: Synthetic polypeptide"
EVQLVESGGGLVQPKGSLKLSCAASGFTFNTYAMNWVRQAPGKGLEWVARIRSKYNNYATYYADSVKDRFTISRDDSQSILYLQMNNLKTEDTAMYYCVRHGNFGNSYVSWFAYWGQGTLVTVSS

SEQ ID NO: 7251 - protein, 120 aa, Artificial Sequence
  source: /note="Description of Artificial Sequence: Synthetic polypeptide"
QVQLVQSGSELKKPGASVKVSCKASGYTFTNYGMNWVRQAPGQGLEWMGWINTNTGKPTYAEEFKGRFVFSLDTSVSTAYLQICSLKAEDTAVYYCARRGDYRYAWFLYWGQGTLVTVSS

SEQ ID NO: 7252 - protein, 120 aa, Artificial Sequence
  source: /note="Description of Artificial Sequence: Synthetic polypeptide"
QIQLVQSGPELKKPGETVKISCKASGYTFTNYGMNWVKQAPGKGLKWMGWINTNTGKPTYAEEFKGRFVFSLETSASTTYLQINNLKNEDTATYFCARRGDYRYAWFLYWGQGTLVTVSA

SEQ ID NO: 7253 - protein, 117 aa, Artificial Sequence
  source: /note="Description of Artificial Sequence: Synthetic polypeptide"
EVQLVQSGAEVKKPGASVKVSCKASGYTFTSYYIHWVRQAPGQGLEWIGWIYPGNVNTKYNEKFKGRVTITRDTSTSTAYLELSSLRSEDTAVYYCARNHDYYFDYWGQGTLVTVSS

SEQ ID NO: 7254 - protein, 117 aa, Artificial Sequence
  source: /note="Description of Artificial Sequence: Synthetic polypeptide"
QVQLVQSGAEVKKPGASVKVSCKASGYTFTSYYIHWVRQAPGQRLEWMGWIYPGNVNTKYNEKFKGRVTITADTSASTAYMELSSLRSEDTAVYYCARNHDYYFDYWGQGTLVTVSS

SEQ ID NO: 7255 - protein, 117 aa, Artificial Sequence
  source: /note="Description of Artificial Sequence: Synthetic polypeptide"
EVQLQQSGPELVKPGASVRISCKASGYTFTSYYIHWMKQRPGQGLEWIGWIYPGNVNTKYNEKFKGKATLTADNSSSTANMQLSSLTSEDSAVYFCARNHDYYFDYWGQGTTLTVSS

SEQ ID NO: 7256 - protein, 119 aa, Artificial Sequence
  source: /note="Description of Artificial Sequence: Synthetic polypeptide"
EVQLVESGPGLVKPSETLSLTCTVSGFSLTNYAIHWIRQPPGKGLEWIGVIWAGGNTKYNSALMSRVTISVDTSKNQFSLKLSSVTAADTAVYYCAREDSSGYVALDYWGQGTLVTVSS

SEQ ID NO: 7257 - protein, 119 aa, Artificial Sequence
  source: /note="Description of Artificial Sequence: Synthetic polypeptide"
QVQLKESGPGLVAPSQSLSITCTVSGFSLTNYAIHWVRQPPGKGLDWLGVIWAGGNTKYNSALMSRLSFSKDNSKSQVFLEINSLQTDDTAMYYCAREDSSGYVALDYWGQGTSVTVSS

SEQ ID NO: 7258 - protein, 119 aa, Artificial Sequence
  source: /note="Description of Artificial Sequence: Synthetic polypeptide"
EVQLVESGGGLVQPGGSLRLSCAVSGFSLTNYAIHWVRQAPGKGLEWVGVIWAGGNTKYNSALMSRFTISRDNSKNTLYLQMNSLRAEDTAVYYCAREDSSGYVALDYWGQGTLVTVSS

SEQ ID NO: 7259 - protein, 120 aa, Artificial Sequence
  source: /note="Description of Artificial Sequence: Synthetic polypeptide"
EVQLVESGGGVVQPGGSLKLSCAASGFTFSGSAMHWVRQASEKGLEWVGRIRSRANSYATAYAASVKDRFTISRDNSKNTAYLQMNSLKTEDTAVYYCIRDTMVRGIDYWGQGTLVTVSS

SEQ ID NO: 7260 - protein, 117 aa, Artificial Sequence
  source: /note="Description of Artificial Sequence: Synthetic polypeptide"
QVQLQQSGPELVKPGASVRISCKASGYTFTSDYIHWMRQRPGQGLEWIGWIYFGNVNTKYNEKFKGKAILTADKFSSTAYMQLSSLTSEDSAVYFCARDGGYYFDYWGQGTTLTVSS

SEQ ID NO: 7261 - protein, 117 aa, Artificial Sequence
  source: /note="Description of Artificial Sequence: Synthetic polypeptide"
QVQLQQSGPELVKPGASVKMSCKASGYTFTSHYLHWVKQSPGQGLEWIVWINPGDGNVKYNEKFKDKTTVTADRSSTTVHMFLSSLTSEDSAIYFCARDGAYYFDYWGQGTTLTVSS

SEQ ID NO: 7262 - protein, 117 aa, Artificial Sequence
  source: /note="Description of Artificial Sequence: Synthetic polypeptide"
EVQLQQSGPELVKPGASVKISCKASGYSFTSYYIHWVKQRPGQGLEWIGWIFPGSDNTKYNEKFKGKATLTADTSSSTAYMQLSSLTSEDSAVYFCARNGNYAMDYWGQGTSVTVSS

SEQ ID NO: 7263 - protein, 117 aa, Artificial Sequence; identical to SEQ ID NO: 7255
  source: /note="Description of Artificial Sequence: Synthetic polypeptide"

SEQ ID NO: 7264 - protein, 120 aa, Artificial Sequence
  source: /note="Description of Artificial Sequence: Synthetic polypeptide"
QIQLVQSGPELKKPGETVKISCKASGYTFTNYGMNWVKQAPGKGLKWMGWINTNTGKPTYAEDFKGRFAFSLETSASTAYLQINNLKNEDTATYFCARRGDYRYAWFTYWGQGTLVTVSA

SEQ ID NO: 7265 - protein, 119 aa, Artificial Sequence
  source: /note="Description of Artificial Sequence: Synthetic polypeptide"
EVQLQQSGPELVKPGTSVKISCKASGFSFTNYYIHWMKQRPGQGLEWIGWIYPGSDNTKFNDKFKGKATLTADTSSTTAYMQLSSLTSEDSAVYYCARDSITNYYFDYWGQGTTLTVSS

SEQ ID NO: 7266 - protein, 119 aa, Artificial Sequence
  source: /note="Description of Artificial Sequence: Synthetic polypeptide"
QVQLQQSGSELVRPGASLKLSCKASGYTFTSYWMHWVRQRPGQGLEWIGNFYPGDLTVNYDEKFKNKVTLAVDTSSSTAFLQLSSLTSEDSAVYYCTRDAYSRYFFDYWGQGTTLTVSS

SEQ ID NO: 7267 - protein, 119 aa, Artificial Sequence
  source: /note="Description of Artificial Sequence: Synthetic polypeptide"
QVQLQQSGPELVKPGASVKISCKASGYSFTNYYMHWVKQRPGQGLEWIGWISPGSGSIKYNEKFKGKATLTADTSSSTAYMQLSSLTSEDSAVYYCARDGYSLYFFDFWGQGTTLTVSS

SEQ ID NO: 7268 - protein, 119 aa, Artificial Sequence
  source: /note="Description of Artificial Sequence: Synthetic polypeptide"
QVQLQQSGPELVKPGTSVKISCKTSGYSFINYYTHWVKQRPGQGLEWIGWIYPGNGNIKYNEKFMGKATLTADTSSTTAHMHLSSLVSEDSAVYYCARDSYGSYYFDYWGQGTTLTVSS

SEQ ID NO: 7269 - protein, 119 aa, Artificial Sequence
  source: /note="Description of Artificial Sequence: Synthetic polypeptide"
QVQLQQSGPELVKPGTSVKISCKTSGYNFINYYTHWVKQRPGQGLEWIGWIYPGNGNIKYNEKFMGKATLTADTSSTTAHMHLSSLVSEDSAVYYCARDSYGSYYFDYWGQGTTLTVSS

SEQ ID NO: 7270 - protein, 119 aa, Artificial Sequence
  source: /note="Description of Artificial Sequence: Synthetic polypeptide"
QVQLQQSGPELVKPGASLKISCKASGYSFANYYTHWVRQRPGQGLEWIGWLYPGNGDTRYNEKFKDKATLTADTSSNTASMQLNSLTSEDSAVYYCTRDSYGNYFFDYWGQGTTLIVSS

SEQ ID NO: 7271 - protein, 119 aa, Artificial Sequence
  source: /note="Description of Artificial Sequence: Synthetic polypeptide"
QVQLQQSGSELVRPGASLKLSCKASGYTFTSYWMHWVRQRPGQGLEWIGNSYPGDLNVNYDEKFKNKVTLAVDTSSSTAFLQLSSLTSEDSAVYYCTRDAYSRYFFDYWGQGTTLTVSS

SEQ ID NO: 7272 - protein, 119 aa, Artificial Sequence
  source: /note="Description of Artificial Sequence: Synthetic polypeptide"
QVQLQQSGPEMVKPGASVTISCKTSGFTFTSYYIHWMMQRPGQGLEWIGWLYPGDVSTRYNEKFRDKATLTADKSSTTAYLYLSSLTSEDSAVYFCARDSSASYYFDFWGQGTTLTVSS

SEQ ID NO: 7273 - protein, 119 aa, Artificial Sequence
  source: /note="Description of Artificial Sequence: Synthetic polypeptide"
QVQLQQPGSELVRPGASVTLSCTASGYSFTSYWMHWVKQRPGQGLEWVGNIYPGGEIINYAEKFKTKGTLTVDISSSTAYMHLSSLTSDDSAVYYCTRDTTGNYFFDYWGQGTTLTVSS

SEQ ID NO: 7274 - protein, 116 aa, Artificial Sequence
  source: /note="Description of Artificial Sequence: Synthetic polypeptide"
QSVKESEGGLFKPTDTLTLTCTVSGCSLSSCAISWVRQAPGKGLEWIGFMSVTGSAYYANWAKSRSTITRNTNENTVTLKMTRLTAADTAIYFCARVGIGSGLNIWGQGTLVTVSS

SEQ ID NO: 7275 - protein, 115 aa, Artificial Sequence; identical to SEQ ID NO: 6221
  source: /note="Description of Artificial Sequence: Synthetic polypeptide"

SEQ ID NO: 7276 - protein, 123 aa, Artificial Sequence; identical to SEQ ID NO: 6222
  source: /note="Description of Artificial Sequence: Synthetic polypeptide"

SEQ ID NO: 7277 - protein, 118 aa, Artificial Sequence; identical to SEQ ID NO: 6493
  source: /note="Description of Artificial Sequence: Synthetic polypeptide"

SEQ ID NO: 7278 - protein, 122 aa, Artificial Sequence
  source: /note="Description of Artificial Sequence: Synthetic polypeptide"
DVQLVESGGGLVQPGGSRKLSCAASGFTFSSFGMHWVRQAPEKGLEWVAYISSDSSAIYYADTVKGRFTISRDNPKNTLFLQMTSLRSEDTAMYYCGRGRENIYYGSRLDYWGQGTTLTVSS

SEQ ID NO: 7279 - protein, 120 aa, Artificial Sequence
  source: /note="Description of Artificial Sequence: Synthetic polypeptide"
QVQLQQSGAELARPGASVKLSCKASGYTFTSYWMQWVKQRPGQGLEWIGTIYPGDGDTRYTQKFKGKATLTADKSSSTAYMQLSSLASEDSAVYYCARRGIPRLWYFDVWGAGTTVTVSS

SEQ ID NO: 7280 - protein, 117 aa, Artificial Sequence
  source: /note="Description of Artificial Sequence: Synthetic polypeptide"
EVQQVESGGDLVKPGGSLKLSCAASGFTFSSYGMSWVRQTPDKRLEWVATINSGGSNTYYPDSLKGRFTISRDNAKNTLYLQMRSLKSEDTAMYYCARHDGGAMDYWGQGTSVTVSS

SEQ ID NO: 7281 - protein, 122 aa, Artificial Sequence
  source: /note="Description of Artificial Sequence: Synthetic polypeptide"
  MOD_RES (13)..(13): Any amino acid
QVQLVQSGAEVKXPGASVKVSCKASGHIFSNYWIQWVRQAPGQGLEWMGEILPGSGHTEYTENFKDRVTMTRDTSTSTVYMELSSLRSEDTAVYYCARYFFGSSPNWYFDVWGQGTLVTVSS

SEQ ID NO: 7282 - protein, 118 aa, Artificial Sequence
  source: /note="Description of Artificial Sequence: Synthetic polypeptide"
EVHLQESGPSLVKPSQTLSLTCSVTGDSITNGYWNWIRKFPGNKLDYMGYISYDGNTYYNPSLKSRFSITRDTSKNQYYLQLNSVTTEDTATYYCSRGDYGTYVMDYWGQGTSVTVSS

SEQ ID NO: 7283 - protein, 115 aa, Artificial Sequence
  source: /note="Description of Artificial Sequence: Synthetic polypeptide"
QVQLQQPGAELVKPGASVKMSCKASGYTFTSYNIHWVKQTPGQGLEWIGAVSPRNGDTSYNQRFKGKATLTADISSSTAYMQLSSLTSEDSAVYYCARGYGYDYWGQGTTLTVSS

SEQ ID NO: 7284 - protein, 120 aa, Artificial Sequence
  source: /note="Description of Artificial Sequence: Synthetic polypeptide"
QVQLKESGPGLVAPSQSLSITCTVSGFSLTGYGIHWVRQPPGKGLEWLGVIWPGGGTNYNSALMSRLSISKDNSKSQVFLKMNSLQTDDTAMYYCARGPLITTEVSMDYWGQGTSVTVSS

SEQ ID NO: 7285 - protein, 120 aa, Artificial Sequence
  source: /note="Description of Artificial Sequence: Synthetic polypeptide"
QVQLKESGPGLVAPSQSLSITCTVSGFSLTGYGIHWVRQPPGKGLEWLGVIWPGGGTNYNSALMSRLNISKDNSKSQVFLKMNSLQTDDTAMYYCARGPLITTEVSMDYWGQGTSVTVSS

SEQ ID NO: 7286 - protein, 119 aa, Artificial Sequence
  source: /note="Description of Artificial Sequence: Synthetic polypeptide"
EVQLVQSGAEVKKPGESLKISCKGSGFNIKDTYIHWVRQMPGKGLEWIGRIDPANGNTQYDPKFQGKATISADTSISTAYLQWSSLKASDTAMYYCARRWDYDYAMDYWGQGTTVTVSS

SEQ ID NO: 7287 - protein, 120 aa, Artificial Sequence
  source: /note="Description of Artificial Sequence: Synthetic polypeptide"
EVQLVESGGGLVQPGGSLRLSCAASGFSLTGYAMHWVRQAPGKGLEWVGVIWPGGGTNYNSALMSRFTISKDNSKNTVYLQMNSLRAEDTAVYYCARGPLITTEVSMDYWGQGTLVTVSS

SEQ ID NO: 7288 - protein, 119 aa, Artificial Sequence
  source: /note="Description of Artificial Sequence: Synthetic polypeptide"
EVQLQQSGAELVKPGASVKLSCTASGFNIKDTYIHWVKQRPEQGLEWIGRIDPANGNTQYDPKFQGKATITADTSSNTAYLQLTSLTSEDTAVYYCARRWDYDYAMDYWGQGTSVTVSS

SEQ ID NO: 7289 - protein, 124 aa, Artificial Sequence
  source: /note="Description of Artificial Sequence: Synthetic polypeptide"
EFEVQLQESGPELVKPGASVKMSCKASGYTFTSYVMHWVKQKPGQGLEWIGYFNPYNDGTDYYEKFKGKATLTSDKSSSTAYMALSSLTSEDSAVYYCARGTYYYGSSYPFDYWGQGTTLTVSS

SEQ ID NO: 7290 - protein, 123 aa, Artificial Sequence
  source: /note="Description of Artificial Sequence: Synthetic polypeptide"
EFEVQLQESGPELVKPGASVKISCKASGYAFSSSWMNWVIQRPGQGLEWIGRIYPGDGDTNYNGKFKGKATLTADKSSSTAYMQLSSLTSVDSAVYFCARSGFITTVLDFDYWGHGTTLTVSS

SEQ ID NO: 7291 - protein, 121 aa, Artificial Sequence
  source: /note="Description of Artificial Sequence: Synthetic polypeptide"
EVQLQQSGPELIKPGASVKMSCKASGYTFTSYVMHWVKQKPGQGLEWIGYINPYNDGTKYNEKFKGKATLTSDKSSSTAYMALSSLTSEDSAVYYCARGTYYYGSRVFDYWGQGTTLTVSS

SEQ ID NO: 7292 - protein, 124 aa, Artificial Sequence
  source: /note="Description of Artificial Sequence: Synthetic polypeptide"
QVQLQQSGAELVRPGSSVKISCKASGYAFSSYWMNWVKQRPGQGLEWIGQIWPGDGDTNYNGKFKGKATLTADESSSTAYMQLSSLASEDSAVYFCARRETTTVGRYYYAMDYWGQGTSVTVSS

SEQ ID NO: 7293 - protein, 124 aa, Artificial Sequence
  source: /note="Description of Artificial Sequence: Synthetic polypeptide"
QVQLLESGAELVRPGSSVKISCKASGYAFSSYWMNWVKQRPGQGLEWIGQIWPGDGDTNYNGKFKGKATLTADESSSTAYMQLSSLRSEDSAVYSCARRETTTVGRYYYAMDYWGQGTTVTVSS

SEQ ID NO: 7294 - protein, 121 aa, Artificial Sequence
  source: /note="Description of Artificial Sequence: Synthetic polypeptide"
EVKLQESGPGLVAPSQSLSVTCTVSGVSLPDYGVSWIRQPPRKGLEWLGVIWGSEDTTYYNSALKSRLTIIKDNSKSQVFLKMNSLQTDDTAIYYCAKHYYYGGSYAMDYWGQGTSVTVSS

SEQ ID NO: 7295 - protein, 121 aa, Artificial Sequence
  source: /note="Description of Artificial Sequence: Synthetic polypeptide"
EVQLVESGGGLVQPGGSLRLSCAASGFTFSSSWMNWVRQAPGKGLEWVGRIYPGDGDTNYNVKFKGRFTISRDDSKNSLYLQMNSLKTEDTAVYYCARSGFITTVRDFDYWGQGTLVTVSS

SEQ ID NO: 7296 - protein, 124 aa, Artificial Sequence
  source: /note="Description of Artificial Sequence: Synthetic polypeptide"
QVQLQQSGAEVKKPGSSVKVSCKASGYAFSSYWMNWVRQRPGQGLEWIGQIWPGDGDTNYNGKFKGRATITADESTNTAYMELSSLRSEDTAFYSCARRETTTVGRYYYAMDYWGQGTTVTVSS

SEQ ID NO: 7297 - protein, 124 aa, Artificial Sequence; identical to SEQ ID NO: 7296
  source: /note="Description of Artificial Sequence: Synthetic polypeptide"

SEQ ID NO: 7298 - protein, 124 aa, Artificial Sequence
  source: /note="Description of Artificial Sequence: Synthetic polypeptide"
QVQLQESGAELVRPGSSVKISCKASGYAFSSYWMNWVKQRPGQGLEWIGQIWPGDGDTNYNGKFKGKATLTADESSSTAYMQLSSLRSEDSAVYSCARRETTTVGRYYYAMDYWGQGTTVTVSS

SEQ ID NO: 7299 - protein, 117 aa, Artificial Sequence
  source: /note="Description of Artificial Sequence: Synthetic polypeptide"
QVQLVQSGAEVKKPGSSVKVSCKASGGTFSSYWLHWVRQAPGQGLEWMGGIVPMFGPPNYAQKFQGRATITADESTNTAYMELSSLRSEDTAFYFCAGGYGIYSPEWGQGSLVTVSS

SEQ ID NO: 7300 - protein, 124 aa, Artificial Sequence; identical to SEQ ID NO: 7298
  source: /note="Description of Artificial Sequence: Synthetic polypeptide"

SEQ ID NO: 7301 - protein, 124 aa, Artificial Sequence; identical to SEQ ID NO: 7296
  source: /note="Description of Artificial Sequence: Synthetic polypeptide"

SEQ ID NO: 7302 - protein, 117 aa, Artificial Sequence; identical to SEQ ID NO: 7299
  source: /note="Description of Artificial Sequence: Synthetic polypeptide"

SEQ ID NO: 7303 - protein, 105 aa, Artificial Sequence
  source: /note="Description of Artificial Sequence: Synthetic polypeptide"
DIQLTQSPAILSASPGEKVTMTCRASSSVSYIHWFQQKPGSSPKPWIYATSNLASGVPVRFSGSGSGTSYSLTISRVEAEDAATYYCQQWTSNPPTFGGGTKLEI

SEQ ID NO: 7304 - protein, 106 aa, Artificial Sequence
  source: /note="Description of Artificial Sequence: Synthetic polypeptide"
DIQLTQSPAILSASPGEKVTMTCRASSSVSYIHWFQQKPGSSPKPWIYATSNLASGVPVRFSGSGSGTSYSLTISRVEAEDAATYYCQQWTSNPPTFGGGTKLEIK

SEQ ID NO: 7305 - protein, 122 aa, Artificial Sequence [sequence omitted]

SEQ ID NO: 7306 - protein, 266 aa, Artificial Sequence
  source: /note="Description of Artificial Sequence: Synthetic polypeptide"
MDFQVQIFSFLLISASVIIARGQIVLSQSPAILSASPGEKVTMTCRASSSVSYMHWYQQKPGSSPKPWIYAPSNLASGVPARFSGSGSGTSYSLTISRVEAEDAATYYCQQWSFNPPTFGAGTKLELKDGGGSGGGGSGGGGSSQAYLQQSGAELVRPGASVKMSCKASGYTFTSYNMHWVKQTPRQGLEWIGAIYPGNGDTSYNQKFKGKATLTVDKSSSTAYMQLSSLTSEDSAVYFCARVVYYSNSYWYFDVWGTGTTVTVSD

SEQ ID NO: 7307 - protein, 121 aa, Artificial Sequence
  source: /note="Description of Artificial Sequence: Synthetic polypeptide"
QVQLQQPGAELVRPGTSVKLSCKASGYTFTSYWMHWIKQRPGQGLEWIGVIDPSDNYTKYNQKFKGKATLTVDTSSSTAYMQLSSLTSEDSAVYFCAREGYYGSSPWFAYWGQGTLVTVSS

SEQ ID NO: 7308 - protein, 122 aa, Artificial Sequence
  source: /note="Description of Artificial Sequence: Synthetic polypeptide"
EVQLVESGGGLVQPGRSLRLSCAASGFTFYDYAMHWVRQAPGKGLEWVSGISWNSGYIGYADSVKGRFTISRDNAKNSLYLQMNSLRAEDTALYYCAKDNSYGKFYYGLDVWGQGTTVTVSS

SEQ ID NO: 7309 - protein, 122 aa, Artificial Sequence; identical to SEQ ID NO: 7308
  source: /note="Description of Artificial Sequence: Synthetic polypeptide"

SEQ ID NO: 7310 - protein, 128 aa, Artificial Sequence
  source: /note="Description of Artificial Sequence: Synthetic polypeptide"
QVQLVQSGAEVKKPGASVKVSCEASGYTFNSYGISWVRQAPGQGLEWMGWIRTYNGNTNYAQKLQGRVTMTTDTSTSTAYMELRSLRSDDTAVYYCARDEARIVVAGTTPYYYGMDVWGQGTTVTVSS

SEQ ID NO: 7311 - protein, 128 aa, Artificial Sequence
  source: /note="Description of Artificial Sequence: Synthetic polypeptide"
QVQLVQSGAEVKKPGASVKVSCKASGYTFNSYGISWVRQAPGQGLEWMGWIRTYNGNTNYAQKLQGRVTMTTDTSTSTAYMELRSLRSDDTAVYYCARDEARIVVAGTTPYYYGMDVWGQGTTVTVSS

SEQ ID NO: 7312 - protein, 126 aa, Artificial Sequence
  source: /note="Description of Artificial Sequence: Synthetic polypeptide"
EVQLVESGGGLVQPGRSLRLSCAASGFTFHDYTMHWVRQAPGKGLEWVSGISWNSGSIGYADSVKGRFTISRDNAKNSLYLQMNSLRIEDTALYYCAKDPSYGSGSYYYYYGMDVWGQGTTVTVSS

SEQ ID NO: 7313 - protein, 126 aa, Artificial Sequence
  source: /note="Description of Artificial Sequence: Synthetic polypeptide"
EVQLVESGGGLVQPGRSLRLSCAASGFTFHDYTMHWVRQAPGKGLEWVSGISWNSGSIGYADSVKGRFTISRDNAKNSLYLQMNSLRAEDTALYYCAKDPSYGSGSYYYYYGMDVWGQGTTVTVSS

SEQ ID NO: 7314 - protein, 123 aa, Artificial Sequence
  source: /note="Description of Artificial Sequence: Synthetic polypeptide"
EVQLVESGGGLVQPGRSLRLSCAASGFTFRDYAMHWVRQGPGKGLEWVSGISWNTDYIGYADSVKGRFTISRDNAKNSLYLQMNSLRPEDTALYYCAKDARYGRDNYYGMDVWGQGTTVTVSS

SEQ ID NO: 7315 - protein, 127 aa, Artificial Sequence
  source: /note="Description of Artificial Sequence: Synthetic polypeptide"
EVQLVESGGGLVQPGRSLRLSCVASGFTFNDYAMHWVRQAPGKGLEWVSVISWNSDSIGYADSVKGRFTISRDNAKNSLYLQMHSLRAEDTALYYCAKDNHYGSGSYYYYQYGMDVWGQGTTVTVSS

SEQ ID NO: 7316 - protein, 123 aa, Artificial Sequence
  source: /note="Description of Artificial Sequence: Synthetic polypeptide"
EVQLVESGGGLVQPGRSLRLSCAASGFTFRDYAMHWVRQAPGKGLEWVSGISWNTDYIGYADSVKGRFTISRDNAKNSLYLQMNSLRAEDTALYYCAKDARYGRDNYYGMDVWGQGTTVTVSS

SEQ ID NO: 7317 - protein, 123 aa, Artificial Sequence
  source: /note="Description of Artificial Sequence: Synthetic polypeptide"
EVQLVESGGGLVQSGRSLRLSCAASGITFHDYAMHWVRQPPGKGLEWVSGISWNSDYIGYADSVKGRFTISRDNAKKSLYLQMNSLRPDDTALYYCVKDFHYGSGSNYGMDVWGQGTTVTVSS

SEQ ID NO: 7318 - protein, 123 aa, Artificial Sequence
  source: /note="Description of Artificial Sequence: Synthetic polypeptide"
EVQLVESGGGLVQPGRSLRLSCAASGITFHDYAMHWVRQAPGKGLEWVSGISWNSDYIGYADSVKGRFTISRDNAKNSLYLQMNSLRAEDTALYYCVKDFHYGSGSNYGMDVWGQGTTVTVSS

SEQ ID NO: 7319 - protein, 127 aa, Artificial Sequence
  source: /note="Description of Artificial Sequence: Synthetic polypeptide"
EVQLVESGGGLVQPGRSLRLSCAASGFTFNDYAMHWVRQAPGKGLEWVSGISWNSDSIGYADSVKGRFTISRDNAKNSLYLQMNSLRAEDTALYYCAKDNHYGSGSYYYYQYGMDVWGQGTTVTVSS

SEQ ID NO: 7320 - protein, 127 aa, Artificial Sequence
  source: /note="Description of Artificial Sequence: Synthetic polypeptide"
EVQLVESGGGLVQPGRSLRLSCAASGFSFHDYAMHWVRQAPGKGLEWVSGISWNSDSLGYADSVKGRFTISRDNAKNSLYLQMNSLRAEDTALYYCAKDNHYGSGSHYYYKYGMDVWGQGTTVTVSS

SEQ ID NO: 7321 - protein, 127 aa, Artificial Sequence; identical to SEQ ID NO: 7320
  source: /note="Description of Artificial Sequence: Synthetic polypeptide"

SEQ ID NO: 7322 - protein, 122 aa, Artificial Sequence
  source: /note="Description of Artificial Sequence: Synthetic polypeptide"
EVQLVESGGGLVQPGRSLRLSCAASGFTFYDYAMHWVRQAPGKGLEWVSGISWNSDTIGYADSVKGRFTISRDNAKNSLYLQMNSLRAEDTALYYCTKDGSYGHFYSGLDVWGQGTTVTVSS

SEQ ID NO: 7323 - protein, 122 aa, Artificial Sequence; identical to SEQ ID NO: 7322
  source: /note="Description of Artificial Sequence: Synthetic polypeptide"

SEQ ID NO: 7324 - protein, 123 aa, Artificial Sequence
  source: /note="Description of Artificial Sequence: Synthetic polypeptide"
EVQLVESGGGLVQPGRSLRLSCAASGFTFYDYAMHWVRQAPGKGLEWVSGISWNSDYIGYADSVKGRFTISRDNAKNSLYLQMNSLRAEDTALYYCAKDARYGRNNYYGMDVWGQGTTVTVSS

SEQ ID NO: 7325 - protein, 123 aa, Artificial Sequence; identical to SEQ ID NO: 7324
  source: /note="Description of Artificial Sequence: Synthetic polypeptide"

SEQ ID NO: 7326 - protein, 123 aa, Artificial Sequence
  source: /note="Description of Artificial Sequence: Synthetic polypeptide"
EVQLVESGGGLVQPGRSLRLSCAASGFTFDDYAMHWVRQVPGKGLEWVSGISWNSGSIGYADSVKGRFTISRDNAKNSLYLQMNSLRAEDTALYYCAKDMGYGNYYHYGMDVWGQGTTVTVSS

SEQ ID NO: 7327 - protein, 123 aa, Artificial Sequence
  source: /note="Description of Artificial Sequence: Synthetic polypeptide"
EVQLVESGGGLVQPGRSLRLSCAASGFTFDDYAMHWVRQAPGKGLEWVSGISWNSGSIGYADSVKGRFTISRDNAKNSLYLQMNSLRAEDTALYYCAKDMGYGNYYHYGMDVWGQGTTVTVSS

SEQ ID NO: 7328 - protein, 123 aa, Artificial Sequence
  source: /note="Description of Artificial Sequence: Synthetic polypeptide"
EVQLVESGGGLVQPGRSLRLSCAASGFTFRDYAMHWVRQVPGKGLEWVSGISWNRGTIGYADSVKGRFTISRDNAKNSLFLQMNSLRADDTALYYCAKDHYYGSGSPYGMDVWGQGTTVTVSS

SEQ ID NO: 7329 - protein, 123 aa, Artificial Sequence
  source: /note="Description of Artificial Sequence: Synthetic polypeptide"
EVQLVESGGGLVQPGRSLRLSCAASGFTFRDYAMHWVRQAPGKGLEWVSGISWNRGTIGYADSVKGRFTISRDNAKNSLYLQMNSLRAEDTALYYCAKDHYYGSGSPYGMDVWGQGTTVTVSS

SEQ ID NO: 7330 - protein, 126 aa, Artificial Sequence
  source: /note="Description of Artificial Sequence: Synthetic polypeptide"
EVQLVESGGGLVQPGRSLRLSCAASGFTFHDYTMHWVRQAPGKGLEWVSGISWNSGSLGYADSVKGRFTISRDNAKKSLYLQMNSLRAEDTALYYCAKDPSYGSGSYHSYYGMDVWGQGTTVTVSS

SEQ ID NO: 7331 - protein, 126 aa, Artificial Sequence
  source: /note="Description of Artificial Sequence: Synthetic polypeptide"
EVQLVESGGGLVQPGRSLRLSCAASGFTFHDYTMHWVRQAPGKGLEWVSGISWNSGSLGYADSVKGRFTISRDNAKNSLYLQMNSLRAEDTALYYCAKDPSYGSGSYHSYYGMDVWGQGTTVTVSS

SEQ ID NO: 7332 - protein, 127 aa, Artificial Sequence
  source: /note="Description of Artificial Sequence: Synthetic polypeptide"
EVQLVESGGGLVQPGRSLRLSCTASGFTFGDFPMHWVRQAPGKGLEWVSGITWNSGSIVYADSVKGRFTISRDNAKNSLYLQMNSLRTEDTALYYCAKDSHYGSGNFYYYYYGMDVWGQGTTVTVSS

SEQ ID NO: 7333 - protein, 127 aa, Artificial Sequence
  source: /note="Description of Artificial Sequence: Synthetic polypeptide"
EVQLVESGGGLVQPGRSLRLSCAASGFTFGDFPMHWVRQAPGKGLEWVSGITWNSGSIGYADSVKGRFTISRDNAKNSLYLQMNSLRAEDTALYYCAKDSHYGSGNFYYYYYGMDVWGQGTTVTVSS

SEQ ID NO: 7334 - protein, 122 aa, Artificial Sequence
  source: /note="Description of Artificial Sequence: Synthetic polypeptide"
QVQLVESGGGLVKPGGSLRLSCAASGFTFSDSYMTWIRQAPGKGLEWVSFISSSGSTIYYADSVKGRFTISRDNVKKSLYLQMNRLRAEDTAVYYCAREEPGNYVYYGMDVWGQGTTVTVSS

SEQ ID NO: 7335 - protein, 122 aa, Artificial Sequence
  source: /note="Description of Artificial Sequence: Synthetic polypeptide"
QVQLVESGGGLVKPGGSLRLSCAASGFTFSDSYMSWIRQAPGKGLEWVSYISSSGSTIYYADSVKGRFTISRDNAKNSLYLQMNSLRAEDTAVYYCAREEPGNYVYYGMDVWGQGTTVTVSS

SEQ ID NO: 7336 - protein, 123 aa, Artificial Sequence
  source: /note="Description of Artificial Sequence: Synthetic polypeptide"
EVQLVESGGGLVQPGRSLRLSCAASGFTFRDYTMHWVRQGPGKGLEWVSGISWNSDYIGYADSVKGRFTISRDNAKNSLYLQMNSLRVEDTALYYCAKLSGTYRDYFYGVDVWGQGTTVTVSS

SEQ ID NO: 7337 - protein, 123 aa, Artificial Sequence
  source: /note="Description of Artificial Sequence: Synthetic polypeptide"
EVQLVESGGGLVQPGRSLRLSCAASGFTFRDYTMHWVRQAPGKGLEWVSGISWNSDYIGYADSVKGRFTISRDNAKNSLYLQMNSLRAEDTALYYCAKLSGTYRDYFYGVDVWGQGTTVTVSS

SEQ ID NO: 7338 - protein, 123 aa, Artificial Sequence; identical to SEQ ID NO: 7314
  source: /note="Description of Artificial Sequence: Synthetic polypeptide"

SEQ ID NO: 7339 - protein, 123 aa, Artificial Sequence; identical to SEQ ID NO: 7316
  source: /note="Description of Artificial Sequence: Synthetic polypeptide"

SEQ ID NO: 7340 - protein, 122 aa, Artificial Sequence
  source: /note="Description of Artificial Sequence: Synthetic polypeptide"
EVQLVESGGGLVQPGRSLRLSCAASGFTFNDYAMHWVRQAPGKGLEWVSTISWNSGSIGYADSVKGRFTISRDNAKKSLYLQMNSLRAEDTALYYCAKDIQYGNYYYGMDVWGQGTTVTVSS

SEQ ID NO: 7341 - protein, 140 aa, Artificial Sequence; identical to SEQ ID NO: 7097
  source: /note="Description of Artificial Sequence: Synthetic polypeptide"

SEQ ID NO: 7342 - protein, 125 aa, Artificial Sequence
  source: /note="Description of Artificial Sequence: Synthetic polypeptide"
EVQLVQSGGGLVHPGGSLRLSCTGSGFTFSYHAMHWVRQAPGKGLEWVSIIGTGGVTYYADSVKGRFTISRDNVKNSLYLQMNSLRAEDMAVYYCARDYYGAGSFYDGLYGMDVWGQGTTVTVSS

SEQ ID NO: 7343 - protein, 122 aa, Artificial Sequence; identical to SEQ ID NO: 7214
  source: /note="Description of Artificial Sequence: Synthetic polypeptide"

SEQ ID NO: 7344 - protein, 112 aa, Artificial Sequence
  source: /note="Description of Artificial Sequence: Synthetic polypeptide"
GPELVKPGASVKISCKASGYAFSYSWMNWVKLRPGQGLEWIGRIFPGDGDTDYNGKFKGKATLTADKSSNTAYMQLTSLTSVDSAVYLCARNVFDGYWLVYWGQGTLVTVSA

SEQ ID NO: 7345 - protein, 119 aa, Artificial Sequence
  source: /note="Description of Artificial Sequence: Synthetic polypeptide"
QVQLVQSGAEVKKPGSSVKVSCKASGYAFSYSWMNWVRQAPGQGLEWMGRIFPGDGDTDYNGKFKGRVTITADKSTSTAYMELSSLRSEDTAVYYCARNVFDGYWLVYWGQGTLVTVSS

SEQ ID NO: 7346 - protein, 119 aa, Artificial Sequence
  source: /note="Description of Artificial Sequence: Synthetic polypeptide"
QVQLVQSGAEVKKPGSSVKVSCKASGYAFSYSWMNWVRQAPGQGLEWMGRIFPGDGDTDYNGKFKGRVTITADKSTSTAYMELSSLRSEDTAVYLCARNVFDGYWLVYWGQGTLVTVSS

SEQ ID NO: 7347 - protein, 119 aa, Artificial Sequence
  source: /note="Description of Artificial Sequence: Synthetic polypeptide"
QVQLVQSGAEVKKPGASVKVSCKVSGYAFSYSWMNWVRQAPGQGLEWMGRIFPGDGDTDYNGKFKGRVTITADKSTSTAYMELSSLRSEDTAVYYCARNVFDGYWLVYWGQGTLVTVSS

SEQ ID NO: 7348 - protein, 119 aa, Artificial Sequence
  source: /note="Description of Artificial Sequence: Synthetic polypeptide"
QVQLVQSGAEVKKPGSSVKVSCKASGYAFSYSWMSWVRQAPGQGLEWMGRIFPGDGDTDYNGKFKGRVTITADKSTSTAYMELSSLRSEDTAVYYCARNVFDGYWLVYWGQGTLVTVSS

SEQ ID NO: 7349 - protein, 119 aa, Artificial Sequence; identical to SEQ ID NO: 6976
  source: /note="Description of Artificial Sequence: Synthetic polypeptide"

SEQ ID NO: 7350 - protein, 119 aa, Artificial Sequence
  source: /note="Description of Artificial Sequence: Synthetic polypeptide"
QVQLVQSGAEVKKPGSSVKVSCKASGYAFSYSWISWVRQAPGQGLEWMGRIFPGDGDTDYNGKFKGRVTITADKSTSTAYMELSSLRSEDTAVYYCARNVFDGYWLVYWGQGTLVTVSS

SEQ ID NO: 7351 - protein, 119 aa, Artificial Sequence
  source: /note="Description of Artificial Sequence: Synthetic polypeptide"
QVQLVQSGAEVKKPGASVKVSCKASGYTFTYSWMNWVRQAPGQGLEWMGRIFPGDGDTDYNGKFKGRVTITADKSTSTAYMELSSLRSEDTAVYYCARNVFDGYWLVYWGQGTLVTVSS

SEQ ID NO: 7352 - protein, 119 aa, Artificial Sequence
  source: /note="Description of Artificial Sequence: Synthetic polypeptide"
QVQLVQSGAEVKKPGASVKVSCKASGYTFSYSWMNWVRQAPGQGLEWMGRIFPGDGDTDYNGKFKGRVTITADKSTSTAYMELSSLRSEDTAVYYCARNVFDGYWLVYWGQGTLVTVSS

SEQ ID NO: 7353 - protein, 119 aa, Artificial Sequence
  source: /note="Description of Artificial Sequence: Synthetic polypeptide"
EVQLVESGGGLVKPGGSLRLSCAASGFTFSYSWMNWVRQAPGKGLEWVGRIFPGDGDTDYNGKFKGRVTITADKSTSTAYMELSSLRSEDTAVYYCARNVFDGYWLVYWGQGTLVTVSS

SEQ ID NO: 7354 - protein, 119 aa, Artificial Sequence
  source: /note="Description of Artificial Sequence: Synthetic polypeptide"
EVQLVESGGGLVKPGGSLRLSCAASGFAFSYSWMNWVRQAPGKGLEWVGRIFPGDGDTDYNGKFKGRVTITADKSTSTAYMELSSLRSEDTAVYYCARNVFDGYWLVYWGQGTLVTVSS

SEQ ID NO: 7355 - protein, 119 aa, Artificial Sequence
  source: /note="Description of Artificial Sequence: Synthetic polypeptide"
QVQLVESGGGLVKPGGSLRLSCAASGFTFSYSWMNWVRQAPGKGLEWVGRIFPGDGDTDYNGKFKGRVTITADKSTSTAYMELSSLRSEDTAVYYCARNVFDGYWLVYWGQGTLVTVSS

SEQ ID NO: 7356 - protein, 119 aa, Artificial Sequence
  source: /note="Description of Artificial Sequence: Synthetic polypeptide"
EVQLVESGAGLVKPGGSLRLSCAASGFTFSYSWMNWVRQAPGKGLEWMGRIFPGDGDTDYNGKFKGRVTITADKSTSTAYMELSSLRSEDTAVYYCARNVFDGYWLVYWGQGTLVTVSS

SEQ ID NO: 7357 - protein, 119 aa, Artificial Sequence
  source: /note="Description of Artificial Sequence: Synthetic polypeptide"
EVQLVESGGGVVKPGGSLRLSCAASGFTFSYSWMNWVRQAPGKGLEWMGRIFPGDGDTDYNGKFKGRVTITADKSTSTAYMELSSLRSEDTAVYYCARNVFDGYWLVYWGQGTLVTVSS

SEQ ID NO: 7358 - protein, 119 aa, Artificial Sequence
  source: /note="Description of Artificial Sequence: Synthetic polypeptide"
EVQLVESGGGLKKPGGSLRLSCAASGFTFSYSWMNWVRQAPGKGLEWMGRIFPGDGDTDYNGKFKGRVTITADKSTSTAYMELSSLRSEDTAVYYCARNVFDGYWLVYWGQGTLVTVSS

SEQ ID NO: 7359 - protein, 119 aa, Artificial Sequence
  source: /note="Description of Artificial Sequence: Synthetic polypeptide"
EVQLVESGGGLVKPGSSLRLSCAASGFTFSYSWMNWVRQAPGKGLEWMGRIFPGDGDTDYNGKFKGRVTITADKSTSTAYMELSSLRSEDTAVYYCARNVFDGYWLVYWGQGTLVTVSS

SEQ ID NO: 7360 - protein, 119 aa, Artificial Sequence
  source: /note="Description of Artificial Sequence: Synthetic polypeptide"
EVQLVESGGGLVKPGGSLRVSCAASGFTFSYSWMNWVRQAPGKGLEWMGRIFPGDGDTDYNGKFKGRVTITADKSTSTAYMELSSLRSEDTAVYYCARNVFDGYWLVYWGQGTLVTVSS

SEQ ID NO: 7361 - protein, 119 aa, Artificial Sequence
  source: /note="Description of Artificial Sequence: Synthetic polypeptide"
EVQLVESGGGLVKPGGSLRLSCAASGFTFSYSWMNWVRQAPGKGLEWMGRIFPGDGDTDYNGKFKGRVTITADKSTSTAYMELSSLRSEDTAVYYCARNVFDGYWLVYWGQGTLVTVSS

SEQ ID NO: 7362 - protein, 119 aa, Artificial Sequence; identical to SEQ ID NO: 6976
  source: /note="Description of Artificial Sequence: Synthetic polypeptide"

SEQ ID NO: 7363 - protein, 122 aa, Artificial Sequence
  source: /note="Description of Artificial Sequence: Synthetic polypeptide"
QAYLQQSGAELVRPGASVKMSCKASGYTFTSYNMHWVKQTPRQGLEWIGAIYPGNGDTSYNQKFKGKATLTVDKSSSTAYMQLSSLTSEDSAVYFCARVVYYSNSYWYFDVWGTGTTVTVSS

SEQ ID NO: 7364 - protein, 122 aa, Artificial Sequence [sequence omitted]

SEQ ID NO: 7365 - protein, 123 aa, Artificial Sequence
  source: /note="Description of Artificial Sequence: Synthetic polypeptide"
AVQLVESGGGLVQPGRSLRLSCAASGFTFGDYTMHWVRQAPGKGLEWVSGISWNSGSIGYADSVKGRFTISRDNAKNSLYLQMNSLRAEDTALYYCTKDNQYGSGSTYGLGVWGQGTLVTVSS

SEQ ID NO: 7366 - protein, 140 aa, Artificial Sequence
  source: /note="Description of Artificial Sequence: Synthetic polypeptide"
MELGLSWIFLLAILKGVQCEVQLVESGGGLVQPGRSLRLSCAASGFTFNDYAMHWVRQAPGKGLEWVSTISWNSGSIGYADSVKGRFTISRDNAKKSLYLQMNSLRAEDTALYYCAKDIQYGNYYYGMDVWGQGTTVTVS

SEQ ID NO: 7367 - protein, 121 aa, Artificial Sequence
  source: /note="Description of Artificial Sequence: Synthetic polypeptide"
QVQLQQPGAELVKPGASVKMSCKASGYTFTSYNMHWVKQTPGRGLEWIGAIYPGNGDTSYNQKFKGKATLTADKSSSTAYMQLSSLTSEDSAVYYCARSTYYGGDWYFDVWGQGTTVTVSS

SEQ ID NO: 7368 - protein, 140 aa, Artificial Sequence; identical to SEQ ID NO: 7097
  source: /note="Description of Artificial Sequence: Synthetic polypeptide"

SEQ ID NO: 7369 - protein, 122 aa, Artificial Sequence; identical to SEQ ID NO: 7308
  source: /note="Description of Artificial Sequence: Synthetic polypeptide"

SEQ ID NO: 7370 - protein, 122 aa, Artificial Sequence; identical to SEQ ID NO: 7308
  source: /note="Description of Artificial Sequence: Synthetic polypeptide"

SEQ ID NO: 7371 - protein, 128 aa, Artificial Sequence
  source: /note="Description of Artificial Sequence: Synthetic polypeptide"
QVQLVESGAEVKKPGASVKVSCEASGYTFNSYGISWVRQAPGQGLEWMGWIRTYNGNTNYAQKLQGRVTMTTDTSTSTAYMELRSLRSDDTAVYYCARDEARIVVAGTTPYYYGMDVWGQGTTVTVSS

SEQ ID NO: 7372 - protein, 128 aa, Artificial Sequence; identical to SEQ ID NO: 7310
  source: /note="Description of Artificial Sequence: Synthetic polypeptide"

SEQ ID NO: 7373 - protein, 128 aa, Artificial Sequence; identical to SEQ ID NO: 7311
  source: /note="Description of Artificial Sequence: Synthetic polypeptide"

SEQ ID NO: 7374 - protein, 126 aa, Artificial Sequence
  source: /note="Description of Artificial Sequence: Synthetic polypeptide"
EEQLVESGGDLVQPGRSLRLSCAASGFTFHDYTMHWVRQAPGKGLEWVSGISWNSGSIGYADSVKGRFTISRDNAKNSLYLQMNSLRIEDTALYYCAKDPSYGSGSYYYYYGMDVWGQGTTVTVSS

SEQ ID NO: 7375 - protein, 126 aa, Artificial Sequence; identical to SEQ ID NO: 7312
  source: /note="Description of Artificial Sequence: Synthetic polypeptide"

SEQ ID NO: 7376 - protein, 126 aa, Artificial Sequence; identical to SEQ ID NO: 7313
  source: /note="Description of Artificial Sequence: Synthetic polypeptide"

SEQ ID NO: 7377 - protein, 123 aa, Artificial Sequence
  source: /note="Description of Artificial Sequence: Synthetic polypeptide"
AVQLVESGGGLVQPGRSLRLSCAASGFTFRDYAMHWVRQGPGKGLEWVSGISWNTDYIGYADSVKGRFTISRDNAKNSLYLQMNSLRPEDTALYYCAKDARYGRDNYYGMDVWGQGTTVTVSS

SEQ ID NO: 7378 - protein, 123 aa, Artificial Sequence; identical to SEQ ID NO: 7314
  source: /note="Description of Artificial Sequence: Synthetic polypeptide"

SEQ ID NO: 7379 - protein, 127 aa, Artificial Sequence; identical to SEQ ID NO: 7315
  source: /note="Description of Artificial Sequence: Synthetic polypeptide"

SEQ ID NO: 7380 - protein, 123 aa, Artificial Sequence; identical to SEQ ID NO: 7316
  source: /note="Description of Artificial Sequence: Synthetic polypeptide"

SEQ ID NO: 7381 - protein, 123 aa, Artificial Sequence
  source: /note="Description of Artificial Sequence: Synthetic polypeptide"
EVQLAESGGDLVQSGRSLRLSCAASGITFHDYAMHWVRQPPGKGLEWVSGISWNSDYIGYADSVKGRFTISRDNAKKSLYLQMNSLRPDDTALYYCVKDFHYGSGSNYGMDVWGQGTTVTVSP

SEQ ID NO: 7382 - protein, 123 aa, Artificial Sequence; identical to SEQ ID NO: 7317
  source: /note="Description of Artificial Sequence: Synthetic polypeptide"

SEQ ID NO: 7383 - protein, 123 aa, Artificial Sequence; identical to SEQ ID NO: 7318
  source: /note="Description of Artificial Sequence: Synthetic polypeptide"

SEQ ID NO: 7384 - protein, 127 aa, Artificial Sequence; identical to SEQ ID NO: 7320
  source: /note="Description of Artificial Sequence: Synthetic polypeptide"

SEQ ID NO: 7385 - protein, 127 aa, Artificial Sequence; identical to SEQ ID NO: 7319
  source: /note="Description of Artificial Sequence: Synthetic polypeptide"

SEQ ID NO: 7386 - protein, 127 aa, Artificial Sequence; identical to SEQ ID NO: 7320
  source: /note="Description of Artificial Sequence: Synthetic polypeptide"

SEQ ID NO: 7387 - protein, 127 aa, Artificial Sequence; identical to SEQ ID NO: 7320
  source: /note="Description of Artificial Sequence: Synthetic polypeptide"

SEQ ID NO: 7388 - protein, 122 aa, Artificial Sequence; identical to SEQ ID NO: 7322
  source: /note="Description of Artificial Sequence: Synthetic polypeptide"

SEQ ID NO: 7389 - protein, 122 aa, Artificial Sequence; identical to SEQ ID NO: 7322
  source: /note="Description of Artificial Sequence: Synthetic polypeptide"

SEQ ID NO: 7390 - protein, 122 aa, Artificial Sequence; identical to SEQ ID NO: 7322
  source: /note="Description of Artificial Sequence: Synthetic polypeptide"

SEQ ID NO: 7391 - protein, 123 aa, Artificial Sequence
  source: /note="Description of Artificial Sequence: Synthetic polypeptide"
EVQLVESGGGLVQPGRSLRLSCAASGFTFYDYAMHWVRQAPGKGLEWVSGISWNSDYIGYADSVKGRFTISRDNAKNSLYLQMNSLRAEDTALYYCAKDARYGRNNYYGMDVWGPGTTVTVSS

SEQ ID NO: 7392 - protein, 122 aa, Artificial Sequence
  source: /note="Description of Artificial Sequence: Synthetic polypeptide"
QVQLVESGGDSVKPGGSLRLSCAASGFTFSDSYMTWIRQAPGKGLEWVSFISSSGSTIYYADSVKGRFTISRDNVKKSLYLQMNRLRAEDTAVYYCAREEPGNYVYYGMDVWGQGTTVTVSS

SEQ ID NO: 7393 - protein, 123 aa, Artificial Sequence; identical to SEQ ID NO: 7324
  source: /note="Description of Artificial Sequence: Synthetic polypeptide"

SEQ ID NO: 7394 - protein, 123 aa, Artificial Sequence; identical to SEQ ID NO: 7324
  source: /note="Description of Artificial Sequence: Synthetic polypeptide"

SEQ ID NO: 7395 - protein, 123 aa, Artificial Sequence; identical to SEQ ID NO: 7326
  source: /note="Description of Artificial Sequence: Synthetic polypeptide"

SEQ ID NO: 7396 - protein, 127 aa, Artificial Sequence; identical to SEQ ID NO: 7315
  source: /note="Description of Artificial Sequence: Synthetic polypeptide"

SEQ ID NO: 7397 - protein, 123 aa, Artificial Sequence; identical to SEQ ID NO: 7326
  source: /note="Description of Artificial Sequence: Synthetic polypeptide"

SEQ ID NO: 7398 - protein, 123 aa, Artificial Sequence; identical to SEQ ID NO: 7327
  source: /note="Description of Artificial Sequence: Synthetic polypeptide"

SEQ ID NO: 7399 - protein, 123 aa, Artificial Sequence; identical to SEQ ID NO: 7328
  source: /note="Description of Artificial Sequence: Synthetic polypeptide"

SEQ ID NO: 7400 - protein, 123 aa, Artificial Sequence; identical to SEQ ID NO: 7328
  source: /note="Description of Artificial Sequence: Synthetic polypeptide"

SEQ ID NO: 7401 - protein, 123 aa, Artificial Sequence; identical to SEQ ID NO: 7329
  source: /note="Description of Artificial Sequence: Synthetic polypeptide"

SEQ ID NO: 7402 - protein, 126 aa, Artificial Sequence
  source: /note="Description of Artificial Sequence: Synthetic polypeptide"
EEQLVESGGDLVQPGRSLRLSCAASGFTFHDYTMHWVRQAPGKGLEWVSGISWNSGSLGYADSVKGRFTISRDNAKKSLYLQMNSLRAEDTALYYCAKDPSYGSGSYHSYYGMDVWGQGTTVTVSS

SEQ ID NO: 7403 - protein, 126 aa, Artificial Sequence; identical to SEQ ID NO: 7330
  source: /note="Description of Artificial Sequence: Synthetic polypeptide"

SEQ ID NO: 7404 - protein, 126 aa, Artificial Sequence; identical to SEQ ID NO: 7331
  source: /note="Description of Artificial Sequence: Synthetic polypeptide"

SEQ ID NO: 7405 - protein, 127 aa, Artificial Sequence; identical to SEQ ID NO: 7332
  source: /note="Description of Artificial Sequence: Synthetic polypeptide"

SEQ ID NO: 7406 - protein, 127 aa, Artificial Sequence; identical to SEQ ID NO: 7332
  source: /note="Description of Artificial Sequence: Synthetic polypeptide"

SEQ ID NO: 7407 - protein, 127 aa, Artificial Sequence; identical to SEQ ID NO: 7333
  source: /note="Description of Artificial Sequence: Synthetic polypeptide"

SEQ ID NO: 7408 - protein, 122 aa, Artificial Sequence; identical to SEQ ID NO: 7334
  source: /note="Description of Artificial Sequence: Synthetic polypeptide"

SEQ ID NO: 7409 - protein, 122 aa, Artificial Sequence; identical to SEQ ID NO: 7335
  source: /note="Description of Artificial Sequence: Synthetic polypeptide"

SEQ ID NO: 7410 - protein, 123 aa, Artificial Sequence; identical to SEQ ID NO: 7336
  source: /note="Description of Artificial Sequence: Synthetic polypeptide"

SEQ ID NO: 7411 - protein, 123 aa, Artificial Sequence; identical to SEQ ID NO: 7336
  source: /note="Description of Artificial Sequence: Synthetic polypeptide"

SEQ ID NO: 7412 - protein, 123 aa, Artificial Sequence; identical to SEQ ID NO: 7337
  source: /note="Description of Artificial Sequence: Synthetic polypeptide"

SEQ ID NO: 7413 - protein, 123 aa, Artificial Sequence; identical to SEQ ID NO: 7314
  source: /note="Description of Artificial Sequence: Synthetic polypeptide"

SEQ ID NO: 7414 - protein, 123 aa, Artificial Sequence; identical to SEQ ID NO: 7314
  source: /note="Description of Artificial Sequence: Synthetic polypeptide"

SEQ ID NO: 7415 - protein, 123 aa, Artificial Sequence; identical to SEQ ID NO: 7316
  source: /note="Description of Artificial Sequence: Synthetic polypeptide"

SEQ ID NO: 7416 - protein, 122 aa, Artificial Sequence; identical to SEQ ID NO: 7308
  source: /note="Description of Artificial Sequence: Synthetic polypeptide"

SEQ ID NO: 7417 - protein, 121 aa, Artificial Sequence
  source: /note="Description of Artificial Sequence: Synthetic polypeptide"
QVQLVQSGAEVKKPGASVKVSCKASGYTFTSYNMHWVRQPPGKGLEWIGAIYPGNGDTSYNQKFKGRVTITADESTSTAYMELSSLRSEDTAVYYCARSTYYGGDWYFNVWGQGTTVTVSS

SEQ ID NO: 7418 - protein, 121 aa, Artificial Sequence
  source: /note="Description of Artificial Sequence: Synthetic polypeptide"
QVQLVQSGAEVKKPGASVKVSCKASGYTFTSYNMHWVRQAPGKGLEWIGAIYPGNGDTSYNQKFKGRVTITADKSTSTAYMELSSLRSEDTAVYYCARSTYYGGDWYFNVWGQGTTVTVSS

SEQ ID NO: 7419 - protein, 121 aa, Artificial Sequence
  source: /note="Description of Artificial Sequence: Synthetic polypeptide"
QVQLVQSGAEVKKPGASVKVSCKASGYTFTSYTMHWVRQAPGKGLEWIGAIYPGNSDTNYNQKFKGRVTITADKSTSTAYMELSSLRSEDTAVYYCARSTYYGGDWNFEVWGQGTTVTVSS

SEQ ID NO: 7420 - protein, 122 aa, Artificial Sequence
  source: /note="Description of Artificial Sequence: Synthetic polypeptide"
EVQLQQSGAELKKPGASVKVSCKASGYTFTSYNMHWVKQTPGQGLEWIGAIYPGNGDTSYNQKFKGKTTLTADKSSSTAYMELSSLRSEDTAVYYCARSNYYGSSYWFFDVWGTGTTVTVSS

SEQ ID NO: 7421 - protein, 121 aa, Artificial Sequence
  source: /note="Description of Artificial Sequence: Synthetic polypeptide"
QVQLQQPGAELKKPGASVKVSCKASGYTFTSYNMHWVKQTPGRGLEWTGAIYPGNGDTSYNQKFKGKTTLTADKSSSTAYMELSSLRSEDTAVYYCARSTYYGGDWYFNVWGAGTTVTVSA

SEQ ID NO: 7422 - protein, 106 aa, Artificial Sequence
  source: /note="Description of Artificial Sequence: Synthetic polypeptide"
QIVLSQSPAIITASPGEKVTMTCRASTSVSYIHWFQQKPTSSPKPWIYATSNLASGVPSRFSGSGSGTTYSMTISSLEAEDAATYYCQQWTSNPPTFGGGTKLEIK

SEQ ID NO: 7423 - protein, 106 aa, Artificial Sequence
  source: /note="Description of Artificial Sequence: Synthetic polypeptide"
QIVLSQSPAIITASPGEKVTMTCRASSSVSYIHWFQQKPGSSPKPWIYATSNLASGVPSRFSGSGSGTTYSMTISSLEAEDAATYYCQQWTSNPPTFGGGTKLEIK

SEQ ID NO: 7424 - protein, 120 aa, Artificial Sequence
  source: /note="Description of Artificial Sequence: Synthetic polypeptide"
QAYLQQSGAELVRPGASVKMSCKASGYTFTSYNMHWVKQTPRQGLEWIGAIYPGNGDTSYNQKFKGKATLTVDKSSSTAYMQLSSLTSEDSAVYFCARWYYSNSYWYFDVWGTGTTVTVS

SEQ ID NO: 7425 - protein, 452 aa, Artificial Sequence; identical to SEQ ID NO: 6660
  source: /note="Description of Artificial Sequence: Synthetic polypeptide"

SEQ ID NO: 7426 - protein, 452 aa, Artificial Sequence
  source: /note="Description of Artificial Sequence: Synthetic polypeptide"
EVQLVESGGGLVQPGGSLRLSCAASGYTFTSYNMHWVRQAPGKGLEWVGAIYPGNGATSYNQKFKGRFTISVDKSKNTLYLQMNSLRAEDTAVYYCARVVYYSYRYWYFDVWGQGTLVTVSSASTKGPSVFPLAPSSKSTSGGTAALGCLVKDYFPEPVTVSWNSGALTSGVHTFPAVLQSSGLYSLSSVVTVPSSSLGTQTYICNVNHKPSNTKVDKKVEPKSCDKTHTCPPCPAPELLGGPSVFLFPPKPKDTLMISRTPEVTCVVVDVSHEDPEVKFNWYVDGVEVHNAKTKPREEQYNATYRVVSVLTVLHQDWLNGKEYKCKVSNAALPAPIAATISKAKGQPREPQVYTLPPSREEMTKNQVSLTCLVKGFYPSDIAVEWESNGQPENNYKTTPPVLDSDGSFFLYSKLTVDKSRWQQGNVFSCSVMHEALHNHYTQKSLSLSPGK

SEQ ID NO: 7427 - protein, 451 aa, Artificial Sequence
  source: /note="Description of Artificial Sequence: Synthetic polypeptide"
EVQLVESGGGLVQPGGSLRLSCAASGYTFTSYNMHWVRQAPGKGLEWVGAIYPGNGDTSYNQKFKGRFTISVDKSKNTLYLQMNSLRAEDTAVYYCARVVYYSNSYWYFDKTISKAKGQPREPQVYTLPPSREEMTKNQVSLTCLVKGFYPSDIAVEWESNGQPENNYKTTPPVLDSDGSFFLYSKLTVDKSRWQQGNVFSCSVMHEALHNHYTQKSLSLSPGVWGQGTLVTVSSASTKGPSVFPLAPSSKSTSGGTAALGCLVKDYFPEPVTVSWNSGALTSGVHTFPAVLQSSGLYSLSSVVTVPSSSLGTQTYICNVNHKPSNTKVDKKVEPKSCDKTHTCPPCPAPELLGGPSVFLFPPKPKDTLMISRTPEVTCVVVDVSHEDPEVKFNWYVDGVEVHNAKTKPREEQYNSTYRVVSVLTVLHQDWLNGKEYKCKVSNKALPAPIE

SEQ ID NO: 7428 - protein, 122 aa, Artificial Sequence
  source: /note="Description of Artificial Sequence: Synthetic polypeptide"
EVQLVESGGGLVQPGGSLRLSCAASGYTFTSYNMHWVRQAPGKGLEWVGAIYPGNGATSYNQKFKGRFTISVDKSKNTLYLQMNSLRAEDTAVYYCARVVYYSYRYWYFDVWGQGTLVTVSS

SEQ ID NO: 7429 - protein, 451 aa, Artificial Sequence
  source: /note="Description of Artificial Sequence: Synthetic polypeptide"
EVQLVESGGGLVQPGGSLRLSCAASGYTFTSYNMHWVRQAPGKGLEWVGAIYPGNGATSYNQKFKGRFTISVDKSKNTLYLQMNSLRAEDTAVYYCARVVYYSYRYWYFDVWGQGTLVTVSSASTKGPSVFPLAPSSKSTSGGTAALGCLVKDYFPEPVTVSWNSGALTSGVHTFPAVLQSSGLYSLSSVVTVPSSSLGTQTYICNVNHKPSNTKVDKKVEPKSCDKTHTCPPCPAPELLGGPSVFLFPPKPKDTLMISRTPEVTCVVVDVSHEDPEVKFNWYVDGVEVHNAKTKPREEQYNATYRVVSVLTVLHQDWLNGKEYKCKVSNAALPAPIAATISKAKGQPREPQVYTLPPSREEMTKNQVSLTCLVKGFYPSDIAVEWESNGQPENNYKTTPPVLDSDGSFFLYSKLTVDKSRWQQGNVFSCSVMHEALHNHYTQKSLSLSPG

SEQ ID NO: 7430 - protein, 122 aa, Artificial Sequence [sequence omitted]

SEQ ID NO: 7431 - protein, 128 aa, Artificial Sequence; identical to SEQ ID NO: 7371
  source: /note="Description of Artificial Sequence: Synthetic polypeptide"

SEQ ID NO: 7432 - protein, 126 aa, Artificial Sequence; identical to SEQ ID NO: 7374
  source: /note="Description of Artificial Sequence: Synthetic polypeptide"

SEQ ID NO: 7433 - protein, 123 aa, Artificial Sequence; identical to SEQ ID NO: 7377
  source: /note="Description of Artificial Sequence: Synthetic polypeptide"

SEQ ID NO: 7434 - protein, 123 aa, Artificial Sequence; identical to SEQ ID NO: 7381
  source: /note="Description of Artificial Sequence: Synthetic polypeptide"

SEQ ID NO: 7435 - protein, 127 aa, Artificial Sequence; identical to SEQ ID NO: 7320
  source: /note="Description of Artificial Sequence: Synthetic polypeptide"

SEQ ID NO: 7436 - protein, 122 aa, Artificial Sequence; identical to SEQ ID NO: 7322
  source: /note="Description of Artificial Sequence: Synthetic polypeptide"

SEQ ID NO: 7437 - protein, 123 aa, Artificial Sequence; identical to SEQ ID NO: 7391
  source: /note="Description of Artificial Sequence: Synthetic polypeptide"

SEQ ID NO: 7438 - protein, 122 aa, Artificial Sequence; identical to SEQ ID NO: 7392
  source: /note="Description of Artificial Sequence: Synthetic polypeptide"

SEQ ID NO: 7439 - protein, 123 aa, Artificial Sequence; identical to SEQ ID NO: 7326
  source: /note="Description of Artificial Sequence: Synthetic polypeptide"

SEQ ID NO: 7440 - protein, 127 aa, Artificial Sequence; identical to SEQ ID NO: 7315
  source: /note="Description of Artificial Sequence: Synthetic polypeptide"

SEQ ID NO: 7441 - protein, 123 aa, Artificial Sequence; identical to SEQ ID NO: 7328
  source: /note="Description of Artificial Sequence: Synthetic polypeptide"

SEQ ID NO: 7442 - protein, 126 aa, Artificial Sequence; identical to SEQ ID NO: 7402
  source: /note="Description of Artificial Sequence: Synthetic polypeptide"

SEQ ID NO: 7443 - protein, 127 aa, Artificial Sequence; identical to SEQ ID NO: 7332
  source: /note="Description of Artificial Sequence: Synthetic polypeptide"

SEQ ID NO: 7444 - protein, 123 aa, Artificial Sequence; identical to SEQ ID NO: 7336
  source: /note="Description of Artificial Sequence: Synthetic polypeptide"

SEQ ID NO: 7445 - protein, 123 aa, Artificial Sequence; identical to SEQ ID NO: 7314
  source: /note="Description of Artificial Sequence: Synthetic polypeptide"

SEQ ID NO: 7446 - protein, 122 aa, Artificial Sequence; identical to SEQ ID NO: 7308
  source: /note="Description of Artificial Sequence: Synthetic polypeptide"

SEQ ID NO: 7447 - protein, 121 aa, Artificial Sequence
  source: /note="Description of Artificial Sequence: Synthetic polypeptide"
EVQLVQSGAEVKKPGESLKISCKGSGYSFTNYWIVWVRQMPGKGLEWMGIIYPGDSDTRYSPSFQGQVTISADKSISTAYLQWSSLKASDTAMYYCARHGDYYYYYGMDVWGQGTTVTVSS

SEQ ID NO: 7448 - protein, 121 aa, Artificial Sequence
  source: /note="Description of Artificial Sequence: Synthetic polypeptide"
EVQLVQSGAEVKKPGESLKISCKGSRNSFTNYWIGWVRQMPGKGLEWMGIIYPGDSDTRYSPSFQGQVTISADKSISTAYLQWSSLKASDTAMYYCARTGSYSYYYGMDVWGQGTTVTVSS

SEQ ID NO: 7449 - protein, 121 aa, Artificial Sequence
  source: /note="Description of Artificial Sequence: Synthetic polypeptide"
GVQLVQSGAEVKKPGESLKISCKGSGYSFTSYWIGWVRQMPGKGLEWMGIIYPGDSDTRYSPSFQGQVIISADKSISTAYLQWSSLKASDTAMYYCARTGDYYSYHGMDVWGQGTTVTVSS

SEQ ID NO: 7450 - protein, 124 aa, Artificial Sequence
  source: /note="Description of Artificial Sequence: Synthetic polypeptide"
EVQLVQSGAEVKKSGESLKISCKGSGYSFTNFWIGWVRQMPGKGLEWMGIIYPGDSDTRYSPSFQGQVTISADKSISTTYLQWSSLKASDTAMYYCARHPPYSGSYYADAFDIWGQGTMVTVSS

SEQ ID NO: 7451 - protein, 124 aa, Artificial Sequence
  source: /note="Description of Artificial Sequence: Synthetic polypeptide"
EVQLVQSGAEVKKPGESLKISCKGSGYSFTSFWIGWVRQMPGKGLEWMGIIYPGDSDTRYSPSFRGLVTISADKSISTAYLHWSSLKASDTAIFYCARHPPYSGSYYADAFDIWGQGTMVTVSS

SEQ ID NO: 7452 - protein, 121 aa, Artificial Sequence
  source: /note="Description of Artificial Sequence: Synthetic polypeptide"
EVQLVQSGAEVKKPGESLKISCKGSGYSFTSYWIGWVRQMPGKGLEWMGIIYPGDSDTRYSPSFQGQVTISADKSISTAYLQWSSLKASDTAMYYCARTGDYHNYYGMDVWGQGTTVTVSS

SEQ ID NO: 7453 - protein, 121 aa, Artificial Sequence
  source: /note="Description of Artificial Sequence: Synthetic polypeptide"
EVQLVQSGAEVKKPGESLKISCKGSGYSFTSYWIGWVRQMPGKGLEWMGIIYPADSDTRYSPSFQGQVTISADKSLNTAYLQWRSLKASDTAMYYCARIGDFYYYSGMDVWGQGTTVTVSS

SEQ ID NO: 7454 - protein, 121 aa, Artificial Sequence
  source: /note="Description of Artificial Sequence: Synthetic polypeptide"
EVQLVQSGAEVKKPGESLKISCKGSGYIFTSYWIAWVRQMPGKGLEWMGIIYPGDSDTRYSPSFQGQITISADKSISTAYLQWSSLKASDTAMYYCARVGTTNYYYGMDVWGQGTSVTVSS

SEQ ID NO: 7455 - protein, 121 aa, Artificial Sequence
  source: /note="Description of Artificial Sequence: Synthetic polypeptide"
EVQLVQSGAEVKKPGESLKISCKGSGYSFTTYWIGWVRQMPGKGLEWMGIIYPGDSDTRYSPSFQGQVTISADKSISTAYLQWSSLKASDTAMYYCARIGDYYSYSGLDVWGQGTTVTVSS

SEQ ID NO: 7456 - protein, 122 aa, Artificial Sequence
  source: /note="Description of Artificial Sequence: Synthetic polypeptide"
QVQLQQSGPGLMKPSQTLSLTCAISGDSVSSNSVSWNWIRQSPSRGLEWLGRTYYRFKWFNDYAVSVKSRITINPDTSKNQFSLRLNSVTPEDTALYYCARIDIWNDVFDYWGQGTLVTVSS

SEQ ID NO: 7457 - protein, 122 aa, Artificial Sequence
  source: /note="Description of Artificial Sequence: Synthetic polypeptide"
EVQLVQSGAEVKKPGESLKISCKGSGYSFTSYWIGWVRQMSGKGLEWMGIIYPGDSDTRYSPSFQGQVTISADKSISTAYLQWSSLKASDTAIYYCARHPSYGSGSPNFDYWGQGTLVTVSS

SEQ ID NO: 7458 - protein, 121 aa, Artificial Sequence
  source: /note="Description of Artificial Sequence: Synthetic polypeptide"
EVQLVQSGAEVKKPGESLKISCKGSGYSFTNYWIGWVRQMPGKGLEWMGIIYPGDSDTRYSPSFQGQVTISADKSISTAYLQWSSLKASDTAMYYCARQGDYYHYSGMDVWGQGTTVTVSS

SEQ ID NO: 7459 - protein, 122 aa, Artificial Sequence
  source: /note="Description of Artificial Sequence: Synthetic polypeptide"
EVQLVQSGAEVKKPGESLKISCKGSGYSFTSYWIGWVRQMPGKGLEWMGIIYPGDSDTRYRPSFQGQVTISADKSITTAYLQWSSLKASDTAMYYCARHPSYGSGSPNFDYWGQGTLVTVSS

SEQ ID NO: 7460 - protein, 121 aa, Artificial Sequence
  source: /note="Description of Artificial Sequence: Synthetic polypeptide"
EVQLVQSGAEVKKPGESLKISCKGSGYSFTSYWIGWVRQMPGKGLEWMGIIYPGDSDTRYSPSFQGQVTISADKSISTAYLQWSSLKASDTAMYYCARLGDYYNYYGMDVWGQGTTVTVSS

SEQ ID NO: 7461 - protein, 122 aa, Artificial Sequence
  source: /note="Description of Artificial Sequence: Synthetic polypeptide"
EVQLVQSGAEVKKPGESLKISCKGSGYSFTSYWIGWVRQMPGKGLEWMGIIYPGDSDTRYSPSFQGQVTISADKSITTAYLQWSSLKASDTAMYYCARHPSYGSGSPNFDYWGQGTLVTVSS

SEQ ID NO: 7462 - protein, 122 aa, Artificial Sequence; identical to SEQ ID NO: 7461
  source: /note="Description of Artificial Sequence: Synthetic polypeptide"

SEQ ID NO: 7463 - protein, 121 aa, Artificial Sequence
  source: /note="Description of Artificial Sequence: Synthetic polypeptide"
EVQLVQSGAEVKKPGESLKISCKGSGYSFTSYWIGWVRQMPGKGLEWMGIIYPGDSDTRYSPSFQGQVTISADKSISTAYLQWSSLKASDTAMYYCARHGDYSNIDAFDIWGQGTMVTVSS

SEQ ID NO: 7464 - protein, 121 aa, Artificial Sequence
  source: /note="Description of Artificial Sequence: Synthetic polypeptide"
EVQLVQSGAEVKKPGESLKISCKGSGYSFTSYWIGWVRQMPGKGLEWMGIIYPGDSDTRYSPSFQGQVTISADKSISTAYLQWSSLKASDTAMYYCARTGTTDYYSGMDVWGQGTTVTVSS

SEQ ID NO: 7465 - protein, 122 aa, Artificial Sequence
  source: /note="Description of Artificial Sequence: Synthetic polypeptide"
EVQLVQSGAEVKKPGESLKISCKGSGYSFTSYWIGWVRQMPGKGLEWMGIIYPGDSDTRYSPSFQGQVTISADKSISTAYLQWSSLKASDTAMYYCARHGDFWSGYYSFDYWGQGTLVTVSS

SEQ ID NO: 7466 - protein, 122 aa, Artificial Sequence
  source: /note="Description of Artificial Sequence: Synthetic polypeptide"
EVQLVQSGAEVKKPGESLKISCKGSGYSFTSYWIGWVRQMPGKGLEWMGIIYPGDSDTRYSPSFQGQVTISADKSISTAYLQWSSLKASDTAMYYCARQGDFWSGYGGMDVWGQGTTVTVSS

SEQ ID NO: 7467 - protein, 122 aa, Artificial Sequence
  source: /note="Description of Artificial Sequence: Synthetic polypeptide"
EVQLVQSGAEVKKPGESLKISCKGSGYSFTSYWIGWVRQMPGKGLEWMGIIYPGDSDTKYSPSFQGQVTISADKSISTAYLQWSSLKASDTAMYYCARQGDFWSGNGGMDVWGQGTTVTVSS

SEQ ID NO: 7468 - protein, 123 aa, Artificial Sequence
  source: /note="Description of Artificial Sequence: Synthetic polypeptide"
EVQLVQSGAEVKKPGESLKISCKGSGYSFTNYWIGWVRQMPGKGLEWMGIIYPGDSDTRYSPSFQGQVTISADKSISTAYLQWSSLKASDTAMYYCARHGDYYASESSAFDIWGQGTMVTVSS

SEQ ID NO: 7469 - protein, 121 aa, Artificial Sequence
  source: /note="Description of Artificial Sequence: Synthetic polypeptide"
EVQLVQSGAEVKKPGESLKISCKGSGYSFTSYWIDWVRQMPGKGLEWMGSIYPGDSDTRYSPSFQGQVTISADKSISTAYLQWSSLKASDTAMYYCARQGASGYYYGMDVWGQGTTVTVSS

SEQ ID NO: 7470 - protein, 124 aa, Artificial Sequence
  source: /note="Description of Artificial Sequence: Synthetic polypeptide"
EVQLVQSGAEVKKPGESLKISCKGSGYSFTSYWIGWVRQMPGKGLEWMGIIYPGDSDTRYSPSFQGQVTISADKSISTAYLQWSSLKASDTAMYYCARMGDFWSGYYTRGMDVWGQGTTVTVSS

SEQ ID NO: 7471 - protein, 117 aa, Artificial Sequence
  source: /note="Description of Artificial Sequence: Synthetic polypeptide"
QVQLVQSGAEVKKPGASVKVSCTASGYSFSSYGISWVRQAPGQGLEWMGWISAYNGHTRYAQKLQGRVTMTSDTSTSTAYMELRSLRSDDTAVYYCARASSWYFDCWGQGTLVTVSS

SEQ ID NO: 7472 - protein, 117 aa, Artificial Sequence
  source: /note="Description of Artificial Sequence: Synthetic polypeptide"
QVQLVQSGAEVKKPGASVKVSCKASGYTFTSYGISWVRQAPGQGLEWMGWINAYNGNTNYAQKLRGRVTMTTDTFTSTADMELRSLRSDDTAVYYCARASTAMGDYWGQGTLVTVSS

SEQ ID NO: 7473 - protein, 123 aa, Artificial Sequence
  source: /note="Description of Artificial Sequence: Synthetic polypeptide"
EVQLVQSGAEVKKPGESLKISCKGSGYSFTNYWIAWVRQMPGKGLEWMGIIFPGDSDTRYSPAFQGQVTISADKSISTAYLHWSSLKASDTAMYYCARHRDYTSGGPDAFDVWGQGTMVTVSS

SEQ ID NO: 7474 - protein, 121 aa, Artificial Sequence
  source: /note="Description of Artificial Sequence: Synthetic polypeptide"
EVQLVQSGAEVKKPGESLKISCKGSGYSFTSYWIAWVRQMPGKGLEWMGIIYPGDSDTRYSPSFQGQVTISADKSISTAYLQWSNLKASDTAMYYCARTGSYYNYCGMDVWGQGTTVTVSS

SEQ ID NO: 7475 - protein, 121 aa, Artificial Sequence
  source: /note="Description of Artificial Sequence: Synthetic polypeptide"
EVQLVQSGAEVKKPGESLKISCKGSGYSFTNYWIAWVRQMPGKGLEWMGIIYPGDSDTRYSPSFQGQVTISADKSISTAYLQWSSLKASDTAMYYCTRQGDYYDSSGPDYWGQGTLVTVSS

SEQ ID NO: 7476 - protein, 115 aa, Artificial Sequence
  source: /note="Description of Artificial Sequence: Synthetic polypeptide"
QVQLVESAGGVVQPGRSLRLSCAASGFTFSSYGMHWVRQAPGKGLEWVAVIWHDGSKKYYEDSVKGRFTISRDNSKNTLYLQMNSLRAEDTAVYYCARNWFFDYWGQGTLVTVSS

SEQ ID NO: 7477 - protein, 122 aa, Artificial Sequence
  source: /note="Description of Artificial Sequence: Synthetic polypeptide"
QVQLVESGGGLVKPGGSLRLSCAASGFTFSDYYMSWIRQAPGKGLEWVSYISSSGTTIYYADSVKGRFTISRDNAKNSLYLQMNSLRAEDTAVYYCARDLYYGGNSYYFDYWGQGTLVTVSS

SEQ ID NO: 7478 - protein, 121 aa, Artificial Sequence
  source: /note="Description of Artificial Sequence: Synthetic polypeptide"
EVQLVQSGAEVKKPGESLKISCKGSGYSFTSYWIGWVRQMPGKGLEWMGIIYPGDSDTRYSPSFQGQVTISADKSIRTAYLQWSSLKASDTAMYYCARIGDHYHYNGMDVWGQGTTVTVSS

SEQ ID NO: 7479 - protein, 121 aa, Artificial Sequence
  source: /note="Description of Artificial Sequence: Synthetic polypeptide"
EVQLVQSGAEVKKPGESLKISCKGSGYSFSSYWINWVRQMPGKGLEWMGIIYPGDSDTRYSPSFQGQVTISADKSISTAYLQWRSLKASDTAIYYCARVGDYYSYYGMDVWGQGTTVTVSS

SEQ ID NO: 7480 - protein, 121 aa, Artificial Sequence
  source: /note="Description of Artificial Sequence: Synthetic polypeptide"
EVQLVQSGAEVKKPGESLKISCKGSGYSFTNYWINWVRQMPGKGLEWMGIIYPGDSDTRYSPSFQGQVTISADKSINTAYLQWSSLKASDTAMYYCARQGGHYYYSGMDVWGQGTTVTVSS

SEQ ID NO: 7481 - protein, 140 aa, Artificial Sequence; identical to SEQ ID NO: 7097
  source: /note="Description of Artificial Sequence: Synthetic polypeptide"

SEQ ID NO: 7482 - protein, 117 aa, Artificial Sequence
  source: /note="Description of Artificial Sequence: Synthetic polypeptide"
EVQLQESGPGLVAPSQSLSITCTVSGFSLSDYGVNWVRQIPGKGLEWLGIIWGDGRTDYNSALKSRLNISKDNSKSQVFLKMNSLKADDTARYYCARAPGNRAMEYWGQGTSVTVSS

SEQ ID NO: 7483 - protein, 121 aa, Artificial Sequence
  source: /note="Description of Artificial Sequence: Synthetic polypeptide"
EVQLQESGGGLVQPGGSLRLSCATSGFTFIDYYMNWVRQPPGKALEWLGFIKNKFNGYTTEYNTSVKGRFTISRDNSQSILYLQMNTLRAEDSATYYCARGLGRSYAMDYWGQGTSVTVSS

SEQ ID NO: 7484 - protein, 119 aa, Artificial Sequence
  source: /note="Description of Artificial Sequence: Synthetic polypeptide"
EVQLQESGGGLGATWRSMKLSCVASGFTFSYYWMNWVRQSPEKGLEWIAEIRLKSNNYATHYAESVKGRFTISRDDSKSSVYLQMNNLRAEDTGIYYCTRYDGSSRDYWGQGTTLTVSS

SEQ ID NO: 7485 - protein, 118 aa, Artificial Sequence
  source: /note="Description of Artificial Sequence: Synthetic polypeptide"
EVQLQESGPGLVKPSQSLSLTCSVTGYSITSGYYWNWIRQFPGNKLEWMGYIRYDGSNNYNPSLKNRISITRDTSKNQFFLKLNSVTTEDTATYYCARGGITVAMDYWGQGTSVTVSS

SEQ ID NO: 7486 - protein, 122 aa, Artificial Sequence
  source: /note="Description of Artificial Sequence: Synthetic polypeptide"
EVQLQESGPDLVKPGASVKISCKASGYSFIGYYMHWLKQSHGKSLEWIGAVNPNTAGLTYNQRFKDKAILTVDKSSNTAYMELRSLTSEDSAVYYCSRVDYDDYGYWFFDVWGAGTTVTVSS

SEQ ID NO: 7487 - protein, 135 aa, Artificial Sequence
  source: /note="Description of Artificial Sequence: Synthetic polypeptide"
MESQTQVFVFLLLCVSGAHGSIVMTQTPKFLLVSTGDRVTITCKASQTVTNDLAWYQQKPGQSPKLLIYYASNRYTGVPDRFTGSGYGTDFTFTINTVQAEDLAVYFCQQDYSSPLTFGAGTKLELKRADAAPTV

SEQ ID NO: 7488 - protein, 135 aa, Artificial Sequence
  source: /note="Description of Artificial Sequence: Synthetic polypeptide"
MESQTQVFVFLLLCVSGAHGSIVMTQTPKFLLVSAGDRVSITCKASQSVTNDVTWYQQKPGQSPKLLIYFASNRYTGVPDRFTGSGYGTDFTFTISTVQAEDLAVYFCQQDYSSPLTFGAGTKLELKRADAAPTV

SEQ ID NO: 7489 - protein, 139 aa, Artificial Sequence
  source: /note="Description of Artificial Sequence: Synthetic polypeptide"
MKLPVRLLVLMFWIPASSSDVVMTQTPLSLPVSLGDQASISCRSSQSLVHSNGNTYLHWYLQKPGQSPKLLIYKVSNRFSGVPDRFSGSGSGTDFTLKISRVEAEDLGVYFCSQSTHVPYTFGGGTKLEIKRADAAPTV

SEQ ID NO: 7490 - protein, 119 aa, Artificial Sequence
  source: /note="Description of Artificial Sequence: Synthetic polypeptide"
EVQLQESGPELVKPGASMKISCKASGYSFTDYTMNWVKQSHGKNLEWIGLLHPFNGGTSYNQKFKGKATLSVDKSSSTAFMELLSLTSEDSAVYFCARGTGRNYAMDYWGQGTSVTVSS

SEQ ID NO: 7491 - protein, 120 aa, Artificial Sequence
  source: /note="Description of Artificial Sequence: Synthetic polypeptide"
QVQLQESGPGLVKPSETLSLTCTVSGGSISSFYWSWIRQSPGKGLEWIGYIYYTGSTNYNPSLKSRVTISVDMSKNQFSLKLISLTAADTAVYYCARDSGSAWPRNFDYWGQGTLVTVSS

SEQ ID NO: 7492 - protein, 117 aa, Artificial Sequence
  source: /note="Description of Artificial Sequence: Synthetic polypeptide"
QVTLKESGPALVKPTQTLTLTCTFSGFSLSDYGVNWIRQPPGKALEWLAIIWGDGRTDYNSALKSRLTISKDTSKNQVVLTMTNVDPMDTATYYCARAPGNRAMEYWGQGTLVTVSS

SEQ ID NO: 7493 - protein, 117 aa, Artificial Sequence
  source: /note="Description of Artificial Sequence: Synthetic polypeptide"
QVQLQESGPALVKPTQTLTLTCTFSGFSLSDYGVNWIRQPPGKALEWLAIIWGDGRTDYNSALKSRLSISKDTSKNQVVLRMTNVDPVDTATYFCARAPGNRAMEYWGQGTVVTVSS

SEQ ID NO: 7494 - protein, 136 aa, Artificial Sequence
  source: /note="Description of Artificial Sequence: Synthetic polypeptide"
MDTLCSTLLLLTIPSWVLSQVQLQESGPALVKPTQTLTLTCTFSGFSLSDYGVNWIRQPPGKALEWLAIIWGDGRTDYNSALKSRLSISKDTSKNQVVLRMTNVDPVDTATYFCARAPGNRAMEYWGQGTVVTVSS

SEQ ID NO: 7495 - protein, 136 aa, Artificial Sequence
  source: /note="Description of Artificial Sequence: Synthetic polypeptide"
MDTLCSTLLLLTIPSWVLSQVQLQESGPALVKPTQTLTLTCTFSGFSLSDYGVNWIRQPPGKALEWLGIIWGDGRTDYNSALKSRLSISKDNSKNQVVLRMTNVDPVDTATYFCARAPGNRAMEYWGQGTVVTVSS

SEQ ID NO: 7496 - protein, 147 aa, Artificial Sequence
  source: /note="Description of Artificial Sequence: Synthetic polypeptide"
KLAATMAVLALLFCLVTFPSCILSQVQLKESGPGLVAPSQSLSITCTVSGFSLSDYGVNWVRQIPGKGLEWLGIIWGDGRTDYNSALKSRLNISKDNSKSQVFLKMNSLKADDTARYYCARAPGNRAMEYWGQGTSVTVSSASTKGP

SEQ ID NO: 7497 - protein, 136 aa, Artificial Sequence
  source: /note="Description of Artificial Sequence: Synthetic polypeptide"
MDTLCSTLLLLTIPSWVLSQVQLQESGPALVKPTQTLTLTCTFSGFSLSDYGVNWIRQPPGKALEWLGIIWGDGRTDYNSALKSRLSISKDTSKNQVVLRMTNVDPVDTATYFCARAPGNRAMEYWGQGTVVTVSS

SEQ ID NO: 7498 - protein, 136 aa, Artificial Sequence
  source: /note="Description of Artificial Sequence: Synthetic polypeptide"
MDTLCSTLLLLTIPSWVLSQVQLQESGPALVKPTQTLTLTCTFSGFSLSDYGVNWIRQPPGKALEWLAIIWGDGRTDYNSALKSRLSISKDNSKNQVVLRMTNVDPVDTATYFCARAPGNRAMEYWGQGTVVTVSS

SEQ ID NO: 7499 - protein, 136 aa, Artificial Sequence
  source: /note="Description of Artificial Sequence: Synthetic polypeptide"
MDTLCSTLLLLTIPSWVLSQVQLQESGPALVKPTQTLTLTCTVSGFSLSDYGVNWIRQPPGKALEWLGIIWGDGRTDYNSALKSRLSISKDNSKNQVVLRMTNVDPVDTATYFCARAPGNRAMEYWGQGTVVTVSS

SEQ ID NO: 7500 - protein, 126 aa, Artificial Sequence
  source: /note="Description of Artificial Sequence: Synthetic polypeptide"
QVQLQESGPALVKPTQTLILTCTFSGFSLSTRGMSVNWIRQPPGKALEWLARIDWDDDTFYSASLKTRLSISKDTSKNQVVLRMTNVDPVDTATYFCARASLYDSDSFYLFYHAYWGQGTVVTVSS

SEQ ID NO: 7501 - protein, 116 aa, Artificial Sequence
  source: /note="Description of Artificial Sequence: Synthetic polypeptide"
QVQLKESGPGLVAPSQSLSITCTVSGFSLSDYGVNWVRQIPGKGLEWLGIIWGDGRTDYNSALKSRLNISKDNSKSQVFLKMNSLKADDTARYYCARAPGNRAMEYWGQGTSVTVS

SEQ ID NO: 7502 - protein, 96 aa, Artificial Sequence
  source: /note="Description of Artificial Sequence: Synthetic polypeptide"
QVTLKESGPALVKPTQTLTLTCTFSGFSLSTSGMRVSWIRQPPGKALEWLARIDWDDDKFYSTSLKTRLTISKDTSKNQVVLTMTNVDPMDTATYY

SEQ ID NO: 7503 - protein, 121 aa, Artificial Sequence; identical to SEQ ID NO: 6714
  source: /note="Description of Artificial Sequence: Synthetic polypeptide"

SEQ ID NO: 7504 - protein, 121 aa, Artificial Sequence
  source: /note="Description of Artificial Sequence: Synthetic polypeptide"
EVQLVQSGAEVKKPGASVKVSCKASGYRFTNYWIHWVRQAPGQGLEWIGGINPGNQYTTYKRNLKGRATLTADTSTSTVYMELSSLRSEDTAVYYCTREGYGNYGAWFAYWGQGTLVTVSS

SEQ ID NO: 7505 - protein, 121 aa, Artificial Sequence
  source: /note="Description of Artificial Sequence: Synthetic polypeptide"
EVQLQQSGTVLARPGASVKMSCKASGYRFTNYWIHWVKQRPGQGLEWIGGINPGNNYTTYKRNLKGKATLTAVTSASTAYMDLSSLTSEDSAVYYCTREGYGNYGAWFAYWGQGTLVTVSS

SEQ ID NO: 7506 - protein, 121 aa, Artificial Sequence
  source: /note="Description of Artificial Sequence: Synthetic polypeptide"
QVQLVQSGAEVKKPGASVKVSCKASGYTFTRSTMHWVRQAPGQGLEWIGYINPSSAYTNYNQKFKDRVTITADKSTSTAYMELSSLRSEDTAVYYCASPQVHYDYNGFPYWGQGTLVTVSS

SEQ ID NO: 7507 - protein, 121 aa, Artificial Sequence
  source: /note="Description of Artificial Sequence: Synthetic polypeptide"
QVQLQQSGAELARPGASVKMSCKASGYTFTRSTMHWVKQRPGQGLEWIGYINPSSAYTNYNQKFKDKATLTADKSSSTAYMQLSSLTSEDSAVYYCASPQVHYDYNGFPYWGQGTLVTVSS

SEQ ID NO: 7508 - protein, 125 aa, Artificial Sequence
  source: /note="Description of Artificial Sequence: Synthetic polypeptide"
EVQLVESGGGLVQPGGSLRLSCAASGFTFSTYAMNWVRQAPGKGLEWVGRIRSKYNNYATYYADSVKDRFTISRDDSKNSLYLQMNSLKTEDTAVYYCARHGNFGNSYVSWFAYWGQGTLVTVSS

SEQ ID NO: 7509 - protein, 125 aa, Artificial Sequence
  source: /note="Description of Artificial Sequence: Synthetic polypeptide"
EVQLVESGGGLVQPGGSLRLSCAASGFTFNTYAMNWVRQAPGKGLEWVGRIRSKYNNYATYYADSVKDRFTISRDDSKNSLYLQMNSLKTEDTAVYYCARHGNFGNSYVSWFAYWGQGTLVTVSS

SEQ ID NO: 7510 - protein, 125 aa, Artificial Sequence
  source: /note="Description of Artificial Sequence: Synthetic polypeptide"
EVQLVESGGGLVQPGGSLRLSCAASGFTFSTYAMNWVRQAPGKGLEWVARIRSKYNNYATYYADSVKDRFTISRDDSKNSLYLQMNSLKTEDTAVYYCARHGNFGNSYVSWFAYWGQGTLVTVSS

SEQ ID NO: 7511 - protein, 125 aa, Artificial Sequence
  source: /note="Description of Artificial Sequence: Synthetic polypeptide"
EVQLVESGGGLVQPGGSLRLSCAASGFTFSTYAMNWVRQAPGKGLEWVGRIRSKYNNYATYYADSVKDRFTISRDDSKNSLYLQMNSLKTEDTAVYYCVRHGNFGNSYVSWFAYWGQGTLVTVSS

SEQ ID NO: 7512 - protein, 125 aa, Artificial Sequence
  source: /note="Description of Artificial Sequence: Synthetic polypeptide"
EVQLVESGGGLVQPGGSLRLSCAASGFTFNTYAMNWVRQAPGKGLEWVARIRSKYNNYATYYADSVKDRFTISRDDSKNSLYLQMNSLKTEDTAVYYCARHGNFGNSYVSWFAYWGQGTLVTVSS

SEQ ID NO: 7513 - protein, 125 aa, Artificial Sequence
  source: /note="Description of Artificial Sequence: Synthetic polypeptide"
EVQLVESGGGLVQPGGSLRLSCAASGFTFNTYAMNWVRQAPGKGLEWVGRIRSKYNNYATYYADSVKDRFTISRDDSKNSLYLQMNSLKTEDTAVYYCVRHGNFGNSYVSWFAYWGQGTLVTVSS

SEQ ID NO: 7514 - protein, 125 aa, Artificial Sequence
  source: /note="Description of Artificial Sequence: Synthetic polypeptide"
EVQLVESGGGLVQPGGSLRLSCAASGFTFSTYAMNWVRQAPGKGLEWVARIRSKYNNYATYYADSVKDRFTISRDDSKNSLYLQMNSLKTEDTAVYYCVRHGNFGNSYVSWFAYWGQGTLVTVSS

SEQ ID NO: 7515 - protein, 125 aa, Artificial Sequence
  source: /note="Description of Artificial Sequence: Synthetic polypeptide"
EVQLVESGGGLVQPGGSLRLSCAASGFTFNTYAMNWVRQAPGKGLEWVARIRSKYNNYATYYADSVKDRFTISRDDSKNSLYLQMNSLKTEDTAVYYCVRHGNFGNSYVSWFAYWGQGTLVTVSS

SEQ ID NO: 7516 - protein, 125 aa, Artificial Sequence
  source: /note="Description of Artificial Sequence: Synthetic polypeptide"
EVQLVESGGGLVQPKGSLKLSCAASGFTFNTYAMNWVRQAPGKGLEWVARIRSKYNNYATYYADSVKDRFTISRDDSQSILYLQMNNLKTEDTAMYYCVRHGNFGNSYVSWFAYWGQGTLVTVSA

SEQ ID NO: 7517 - protein, 125 aa, Artificial Sequence
  source: /note="Description of Artificial Sequence: Synthetic polypeptide"
EVQLVESGGGLVQPGGSLRLSCAASGFTFNTYAMNWVRQAPGKGLEWVGRIRNKYNNYATEYADSVKDRFTISRDDSKNSLYLQMNSLKTEDTAVYYCVRHGNFGNSYVSWFAYWGQGTLVTVSS

SEQ ID NO: 7518 - protein, 125 aa, Artificial Sequence
  source: /note="Description of Artificial Sequence: Synthetic polypeptide"
EVQLVESGGGLVQPGGSLRLSCAASGFTFNTYAMNWVRQAPGKGLEWVARIRNKYNNYATEYADSVKDRFTISRDDSKNSLYLQMNSLKTEDTAVYYCVRHGNFGNSYVSWFAYWGQGTLVTVSS

SEQ ID NO: 7519 - protein, 125 aa, Artificial Sequence
  source: /note="Description of Artificial Sequence: Synthetic polypeptide"
EVQLVESGGGLVQPGGSLRLSCAASGFTFNTYAMNWVRQAPGKGLEWVARTRSKANSYTTYYAASVKGRFTISRDDSKNSLYLQMNSLKTEDTAVYYCARHGNFGNSYVSWFAYWGQGTLVTVSS

SEQ ID NO: 7520 - protein, 125 aa, Artificial Sequence
  source: /note="Description of Artificial Sequence: Synthetic polypeptide"
EVQLVESGGGLVQPGGSLRLSCAASGFTFNTYAMNWVRQAPGKGLEWVGRTRSKANSYTTYYAASVKGRFTISRDDSKNSLYLQMNSLKTEDTAVYYCARHGNFGNSYVSWFAYWGQGTLVTVSS

SEQ ID NO: 7521 - protein, 125 aa, Artificial Sequence
  source: /note="Description of Artificial Sequence: Synthetic polypeptide"
EVKLLESGGGLVQPKGSLKLSCAASGFTFNTYAMNWVRQAPGKGLEWVARIRSKYNNYATYYADSVKDRFTISRDDSQSILYLQMNNLKTEDTAMYYCVRHGNFGNSYVSWFAYWGQGTLVTVSA

SEQ ID NO: 7522 - protein, 271 aa, Artificial Sequence
  source: /note="Description of Artificial Sequence: Synthetic polypeptide"
QAVVTQEPSLTVSPGGTVTLTCRSSTGAVTTSNYANWVQQKPGQAPRGLIGGTNKRAPWTPARFSGSLLGGKAALTITGAQAEDEADYYCALWYSNLWVFGGGTKLTVLGGGGSGGGGQVQLQQSGPELVKPGASVKISCKASGYTFSGSWMNWVKQRPGQGLEWIGRIYPGDGETNYNGKFKDKATLTADKSSTTAYMELSSLTSVDSAVYFCARIYGNNVYFDVWGAGTTVTVSSGGCGGGEVAALEKEVAALEKEVAALEKEVAALEK

SEQ ID NO: 7523 - protein, 125 aa, Artificial Sequence
  source: /note="Description of Artificial Sequence: Synthetic polypeptide"
EVQLVESGGGLVQPGGSLRLSCAASGFTFNTYAMNWVRQAPGKGLEWVARIRNKYNNYATEYAASVKDRFTISRDDSKNSLYLQMNSLKTEDTAVYYCVRHGNFGNSYVSWFAYWGQGTLVTVSS

SEQ ID NO: 7524 - protein, 125 aa, Artificial Sequence
  source: /note="Description of Artificial Sequence: Synthetic polypeptide"
EVKLLESGGGLVQPKGSLKLSCAASGFTFNTYAMNWVRQAPGKGLEWVARTASKANNYATYYADSVKDRFTISRDDSQSILYLQMNNLKTEDTAMYYCVRHGNFGNSYVSWFAYWGQGTLVTVSA

SEQ ID NO: 7525 - protein, 125 aa, Artificial Sequence
  source: /note="Description of Artificial Sequence: Synthetic polypeptide"
EVKLLESGGGLVQPKGSLKLSCAASGFTFNTYAMNWVRQAPGKGLEWVARTRSKYNSYATYYADSVKDRFTISRDDSQSILYLQMNNLKTEDTAMYYCVRHGNFGNSYVSWFAYWGQGTLVTVSA

SEQ ID NO: 7526 - protein, 125 aa, Artificial Sequence
  source: /note="Description of Artificial Sequence: Synthetic polypeptide"
EVKLLESGGGLVQPKGSLKLSCAASGFTFNTYAMNWVRQAPGKGLEWVARTRSKYNNYTTYYADSVKDRFTISRDDSQSILYLQMNNLKTEDTAMYYCVRHGNFGNSYVSWFAYWGQGTLVTVSA

SEQ ID NO: 7527 - protein, 125 aa, Artificial Sequence
  source: /note="Description of Artificial Sequence: Synthetic polypeptide"
EVKLLESGGGLVQPKGSLKLSCAASGFTFNTYAMNWVRQAPGKGLEWVARTRSKANSYATYYADSVKDRFTISRDDSQSILYLQMNNLKTEDTAMYYCVRHGNFGNSYVSWFAYWGQGTLVTVSA

SEQ ID NO: 7528 - protein, 125 aa, Artificial Sequence
  source: /note="Description of Artificial Sequence: Synthetic polypeptide"
EVKLLESGGGLVQPKGSLKLSCAASGFTFNTYAMNWVRQAPGKGLEWVARTRSKYNSYTTYYADSVKDRFTISRDDSQSILYLQMNNLKTEDTAMYYCVRHGNFGNSYVSWFAYWGQGTLVTVSA

SEQ ID NO: 7529 - protein, 125 aa, Artificial Sequence
  source: /note="Description of Artificial Sequence: Synthetic polypeptide"
EVKLLESGGGLVQPKGSLKLSCAASGFTFNTYAMNWVRQAPGKGLEWVARTRSKANSYTTYYADSVKDRFTISRDDSQSILYLQMNNLKTEDTAMYYCVRHGNFGNSYVSWFAYWGQGTLVTVSA

SEQ ID NO: 7530 - protein, 125 aa, Artificial Sequence
  source: /note="Description of Artificial Sequence: Synthetic polypeptide"
EVKLLESGGGLVQPKGSLKLSCAASGFTFNTYAMNWVRQAPGKGLEWVARTRSKYNNYATYYAASVKDRFTISRDDSQSILYLQMNNLKTEDTAMYYCVRHGNFGNSYVSWFAYWGQGTLVTVSA

SEQ ID NO: 7531 - protein, 125 aa, Artificial Sequence
  source: /note="Description of Artificial Sequence: Synthetic polypeptide"
EVKLLESGGGLVQPKGSLKLSCAASGFTFNTYAMNWVRQAPGKGLEWVARTRSKYNNYATYYADSVKGRFTISRDDSQSILYLQMNNLKTEDTAMYYCVRHGNFGNSYVSWFAYWGQGTLVTVSA

SEQ ID NO: 7532 - protein, 125 aa, Artificial Sequence
  source: /note="Description of Artificial Sequence: Synthetic polypeptide"
EVKLLESGGGLVQPKGSLKLSCAASGFTFNTYAMNWVRQAPGKGLEWVARTRSKANSYATYYAASVKDRFTISRDDSQSILYLQMNNLKTEDTAMYYCVRHGNFGNSYVSWFAYWGQGTLVTVSA

SEQ ID NO: 7533 - protein, 125 aa, Artificial Sequence
  source: /note="Description of Artificial Sequence: Synthetic polypeptide"
EVKLLESGGGLVQPKGSLKLSCAASGFTFNTYAMNWVRQAPGKGLEWVARTRSKANSYATYYADSVKGRFTISRDDSQSILYLQMNNLKTEDTAMYYCVRHGNFGNSYVSWFAYWGQGTLVTVSA

SEQ ID NO: 7534 - protein, 125 aa, Artificial Sequence
  source: /note="Description of Artificial Sequence: Synthetic polypeptide"
EVKLLESGGGLVQPKGSLKLSCAASGFTFNTYAMNWVRQAPGKGLEWVARTRSKANSYATYYAASVKGRFTISRDDSQSILYLQMNNLKTEDTAMYYCVRHGNFGNSYVSWFAYWGQGTLVTVSA

SEQ ID NO: 7535 - protein, 125 aa, Artificial Sequence; identical to SEQ ID NO: 7520
  source: /note="Description of Artificial Sequence: Synthetic polypeptide"

SEQ ID NO: 7536 - protein, 125 aa, Artificial Sequence; identical to SEQ ID NO: 7519
  source: /note="Description of Artificial Sequence: Synthetic polypeptide"

SEQ ID NO: 7537 - protein, 123 aa, Artificial Sequence
  source: /note="Description of Artificial Sequence: Synthetic polypeptide"
EVQLVESGGGLVQPGRSLRLSCAASGFTFDDYTMHWVRQAPGKGLEWVSGISWNSGSIGYADSVKGRFTISRDNAKKSLYLQMNSLRAEDTALYYCAKDNSGYGHYYYGMDVWGQGTTVTVAS

SEQ ID NO: 7538 - protein, 127 aa, Artificial Sequence; identical to SEQ ID NO: 7315
  source: /note="Description of Artificial Sequence: Synthetic polypeptide"

SEQ ID NO: 7539 - protein, 112 aa, Artificial Sequence
  source: /note="Description of Artificial Sequence: Synthetic polypeptide"
QVQLQQWGAGLLKPSETLSLTCAVYGGSFSAYYWSWIRQPPGKGLEWIGDINHGGGTNYNPSLKSRVTISVDTSKNQFSLKLNSVTAADTAVYYCASLTAYWGQGSLVTVSS

SEQ ID NO: 7540 - protein, 116 aa, Artificial Sequence
  source: /note="Description of Artificial Sequence: Synthetic polypeptide"
EVQLVESGGGLVQPGGSLRLSCVASGFTFSNSWMSWVRQAPGKGLEWVANINEDGSEKFYVDSVKGRFTFSRDNAENSLYLQMNSLRAEDTAVYYCARVHWYFHLWGRGTLVTVSS

SEQ ID NO: 7541 - protein, 116 aa, Artificial Sequence
  source: /note="Description of Artificial Sequence: Synthetic polypeptide"
QVQLQQWGAGLLKPSETLSLTCAVYGGSFSGYYWSWIRQPPGKGLEWIGEINHSGSTKYTPSLKSRVTISVDTSKHQFSLKLSSVTAADTAVYYCARETVYYFDLWGRGTLVTVSS

SEQ ID NO: 7542 - protein, 112 aa, Artificial Sequence; identical to SEQ ID NO: 7539
  source: /note="Description of Artificial Sequence: Synthetic polypeptide"

SEQ ID NO: 7543 - protein, 116 aa, Artificial Sequence; identical to SEQ ID NO: 7540
  source: /note="Description of Artificial Sequence: Synthetic polypeptide"

SEQ ID NO: 7544 - protein, 97 aa, Artificial Sequence
  source: /note="Description of Artificial Sequence: Synthetic polypeptide"
QVQLQQWGAGLLKPSETLSLTCAVYGGSFSGYYWSWIRQPPGKGLEWIGEINHSGSTNYNPSLKSRVTISVDTSKNQFSLKLSSVTAADTAVYYCAR

SEQ ID NO: 7545 - protein, 98 aa, Artificial Sequence
  source: /note="Description of Artificial Sequence: Synthetic polypeptide"
EVQLVESGGGLVQPGGSLRLSCAASGFTFSSYWMSWVRQAPGKGLEWVANIKQDGSEKYYVDSVKGRFTISRDNAKNSLYLQMNSLRAEDTAVYYCAR

SEQ ID NO: 7546 - protein, 116 aa, Artificial Sequence; identical to SEQ ID NO: 7541
  source: /note="Description of Artificial Sequence: Synthetic polypeptide"

SEQ ID NO: 7547 - protein, 117 aa, Artificial Sequence
  source: /note="Description of Artificial Sequence: Synthetic polypeptide"
QVQLVQSGAEVKKPGASVKVSCKVSGYTFTDYYITWVRQAPGQALEWMGWIYPGSGNTKYSQKFQGRFVFSVDTSASTAYLQISSLKAEDTAVYYCANYGNYWFAYWGQGTLVTVSS

SEQ ID NO: 7548 - protein, 117 aa, Artificial Sequence; identical to SEQ ID NO: 7224
  source: /note="Description of Artificial Sequence: Synthetic polypeptide"

SEQ ID NO: 7549 - protein, 117 aa, Artificial Sequence; identical to SEQ ID NO: 7226
  source: /note="Description of Artificial Sequence: Synthetic polypeptide"

SEQ ID NO: 7550 - protein, 117 aa, Artificial Sequence
  source: /note="Description of Artificial Sequence: Synthetic polypeptide"
QLQLVQSGPEVKKPGASVKVSCKVSGYTFTDYYITWVRQAPGQALEWMGWIYPGSGNTKYNEKFQGRFVFSVDTSASTAYLQISSLKAEDTAVYFCANYGNYWFAYWGQGTLVTVSS

SEQ ID NO: 7551 - protein, 117 aa, Artificial Sequence
  source: /note="Description of Artificial Sequence: Synthetic polypeptide"
QLQLVQSGAEVKKPGASVKVSCKVSGYTFTDYYITWVRQAPGQALEWMGWIYPGSGNTKYSQKFQGRFVFSVDTSASTAYLQISSLKAEDTAVYYCANYGNYWFAYWGQGTLVTVSS

SEQ ID NO: 7552 - protein, 117 aa, Artificial Sequence
  source: /note="Description of Artificial Sequence: Synthetic polypeptide"
QLQLVQSGAEVKKPGASVKVSCKVSGYTFTSYYISWVRQAPGQALEWMGWIYAGSGNTKYSQKFQGRFVFSVDTSASTAYLQISSLKAEDTAVYYCANYGNYWFAYWGQGTLVTVSS

SEQ ID NO: 7553 - protein, 112 aa, Artificial Sequence; identical to SEQ ID NO: 7539
  source: /note="Description of Artificial Sequence: Synthetic polypeptide"

SEQ ID NO: 7554 - protein, 116 aa, Artificial Sequence; identical to SEQ ID NO: 7540
  source: /note="Description of Artificial Sequence: Synthetic polypeptide"

SEQ ID NO: 7555 - protein, 116 aa, Artificial Sequence; identical to SEQ ID NO: 7541
  source: /note="Description of Artificial Sequence: Synthetic polypeptide"

SEQ ID NO: 7556 - protein, 97 aa, Artificial Sequence; identical to SEQ ID NO: 7544
  source: /note="Description of Artificial Sequence: Synthetic polypeptide"

SEQ ID NO: 7557 - protein, 98 aa, Artificial Sequence; identical to SEQ ID NO: 7545
  source: /note="Description of Artificial Sequence: Synthetic polypeptide"

SEQ ID NO: 7558 - protein, 116 aa, Artificial Sequence
  source: /note="Description of Artificial Sequence: Synthetic polypeptide"
DVQLQESGPGLVKPSQSLSLTCTVTGFSITSDYSWNWIRQFPGNKLEWMGYISYSGHTSYNPSLESRISITRDTSKNQFFLQLNSVTTEDTATYYCTRGNWDVVYWGQGTLVTVSA

SEQ ID NO: 7559 - protein, 123 aa, Artificial Sequence
  source: /note="Description of Artificial Sequence: Synthetic polypeptide"
QVQLKESGPGLVAPSQSLSITCTVSGFSLSRYSVQWVRQPPGKGLEWLGMIWGGGSTDYNSGLKSRLTISKDNSKSQVFLKMNSLQTDDTAMYFCARTQFYYGHDGGYAMDFWGQGTSVTVSS

SEQ ID NO: 7560 - protein, 120 aa, Artificial Sequence
  source: /note="Description of Artificial Sequence: Synthetic polypeptide"
DVQLVESGGGLVQPGGSRKLSCAASGFTFSSYGMHWVRQAPETGLEWVAYITTRSSTIYYAATVKGRFTISRDNARNTLFLQMTSLRSEDTAMYYCTREPLTGYYAMDYWGQGTSVTVSS

SEQ ID NO: 7561 - protein, 123 aa, Artificial Sequence
  source: /note="Description of Artificial Sequence: Synthetic polypeptide"
QVQLKESGPGLVAPSQSLSITCTVSGFSLSRYSVHWVRQPPGKGLEWLGMIWGGGSIDYNSGLKSRLSISKDNSKSQVFLKMNSLQSDDTAMYHCVRAQFYYGYDGGYAMDYWGQGTSVTVSS

SEQ ID NO: 7562 - protein, 118 aa, Artificial Sequence
  source: /note="Description of Artificial Sequence: Synthetic polypeptide"
SDVQLQESGPGLVKPSQSLSLTCTVTDYSITSDYAWNWIRQFPGNNLEWMGNIGYSGDTSYNPSLKSRISITRDTSKNQFFLQLNSVTTEDSATYYCARSSLGPFDYWGQGTALTVSS

SEQ ID NO: 7563 - protein, 118 aa, Artificial Sequence
  source: /note="Description of Artificial Sequence: Synthetic polypeptide"
QVQLQQSGNELVRPGSAVKISCKASGYAFSSYWMNWVKQRPGQGLEWIGQIYPGDDDSNYNGKFKGKATLTADKSSSSAYMHLSSLTSEDSAVYFCARGFATPTMDYWGQGTSVTVSS

SEQ ID NO: 7564 - protein, 119 aa, Artificial Sequence
  source: /note="Description of Artificial Sequence: Synthetic polypeptide"
QVQLQQSGAELMKTGASVKISCKATGYTFSSYWIEWVKQRPGHGLEWIGEILPGSGKTNYNENFKGKATFTADTSSNTAYMQLSSLTSEDSVVYYCARRGAYYGNFDYWGQGTTLTVSS

SEQ ID NO: 7565 - protein, 123 aa, Artificial Sequence
  source: /note="Description of Artificial Sequence: Synthetic polypeptide"
QVQLKESGPGLVAPSQSLSITCTVTGFSLSRYSVHWIRQPPGKGLEWLGMIWGGGSTDYNSALKSRLSINKDNSKSQVFLKMNSLQTVDTAMYYCARTQFYYGHDGGYAMDYWGQGTSVTVSS

SEQ ID NO: 7566 - protein, 116 aa, Artificial Sequence
  source: /note="Description of Artificial Sequence: Synthetic polypeptide"
EVQLQQSGPELLKPGASVKISCKASGYTFTDYNMHWVKQSHGKSLEWIGNIYPYNGGTGYNQKFKTKATLTVDNSSSTAYMELRSLTSEDSAVYYCAIGNYWFAFWGQGTLVTVSA

SEQ ID NO: 7567 - protein, 120 aa, Artificial Sequence
  source: /note="Description of Artificial Sequence: Synthetic polypeptide"
EVQLQQSGPDLVKPGTSVKISCKASGYSFTACYIHWVKQSHGKSLEWIGRFSPNNDRTTYNQKFKDKAILTVDKSSSTAYMDLRSLTSEDSAVYYCARGEESWDAWFTYWGQGTLVTVSA

SEQ ID NO: 7568 - protein, 119 aa, Artificial Sequence
  source: /note="Description of Artificial Sequence: Synthetic polypeptide"
QVTLKESGPGILQPSQTLSLTCSFSGFSLSTSGMGVGWIRQPSGKGLEWLAHIWWDDVKRYNPALKSRLTISKDTSSSQVFLKIASVDTADTATYHCARIAIGQPFAYWGQGTLVTVSA

SEQ ID NO: 7569 - protein, 120 aa, Artificial Sequence
  source: /note="Description of Artificial Sequence: Synthetic polypeptide"
QVQLQQPGAELVKPGASVKLSCRTSGYSFTSYWIHWVKQRPGRGLEWIGRIVPNSGGTKYNENFKNKATLTVDKSSNTAYMQLSSLTSEDSAVYYCTREDSYGPFDLDYWGQGTSVTVSS

SEQ ID NO: 7570 - protein, 121 aa, Artificial Sequence
  source: /note="Description of Artificial Sequence: Synthetic polypeptide"
EVQLQQSGPELVKPGASVKISCKASGYSFTGYFMNWVKQSHGKSLEWIGRINPYNGDNFYNQKFKGKATLTVDKSSSTAHMELLSLTSEDSAVYYCGRDYGSSYGWFFDVWGAGTTVTVSS

SEQ ID NO: 7571 - protein, 123 aa, Artificial Sequence
  source: /note="Description of Artificial Sequence: Synthetic polypeptide"
EVQLQQSGPELVKPGASMKISCKASGYTFTDHTMHWVKQSHGKNLEWIGRINPYNGDTSHNQNFKGKATLTVDKSSNTAYMELLSLTSEDSAVYYCARYGGDYTSSYYTMDYWGQGTSSTVSS

SEQ ID NO: 7572 - protein, 123 aa, Artificial Sequence
  source: /note="Description of Artificial Sequence: Synthetic polypeptide"
EVQLQQSGPELVKPGASMKISCKASGYTFTDYTMHWVRQSHGKNLEWIGRINPYNADTSHNQNFKGRATLTVDKSFNTAYMELLSLTSEDSAVYYCARYGGDFTSSYYTMDYWGQGTSVTVSS

SEQ ID NO: 7573 - protein, 118 aa, Artificial Sequence
  source: /note="Description of Artificial Sequence: Synthetic polypeptide"
QVQLKESGPGLVAPSQSLSITCTVSGFSLTSYTISWVRQPPGKGLEWLGIIWTAGATNYNSALKSRLSISKDNSKSQVFLKMNSLQTDDTARYYCARYSKDYYAVDYWGQGTSVTVSS

SEQ ID NO: 7574 - protein, 123 aa, Artificial Sequence
  source: /note="Description of Artificial Sequence: Synthetic polypeptide"
EVQLQQSGPELVKPGASMKISCKASGYTFTDYTMHWVKQSHGKNLEWIGRINPYNDDISHNQNFKDKATLTVDKSSNTAYMELLSLTSEDSAVYYCARYGGDYTSSYYTMDYWGQGTSVTVSS

SEQ ID NO: 7575 - protein, 123 aa, Artificial Sequence
  source: /note="Description of Artificial Sequence: Synthetic polypeptide"
QVQLKESGPGLVAPSQSLSITCTVSGFSLSRYSVHWVRQPSGKGLEWLGMIWGGGSTDYNSALKSRLIISKDNSKSQVFLKMNSLQTDDTAMYYCARTQFYYGHDGGYAMDYWGQGTSVTVSS

SEQ ID NO: 7576 - protein, 119 aa, Artificial Sequence
  source: /note="Description of Artificial Sequence: Synthetic polypeptide"
QVTLKESGPGILQPSQTLSLTCSFSGFSLSTSGMGVGWIRQPSGKGLEWLAHIWWDDVKRYNPALKSRLNISKDTSSSQVFLKIASVDTADTATYYCGRKSNSGYFDYWGQGTTLTVSS

SEQ ID NO: 7577 - protein, 116 aa, Artificial Sequence
  source: /note="Description of Artificial Sequence: Synthetic polypeptide"
EVQLQQSGPDLVKPGASVKISCKASGYSFTGYFMNWVKQSHGKSLEWIGRINPYNGDTFYNQKFKGKATLTVDKSSSTAHMELLSLTSEDSAVYYCGRGNYYFDYWGQGTTLTVSS

SEQ ID NO: 7578 - protein, 114 aa, Artificial Sequence
  source: /note="Description of Artificial Sequence: Synthetic polypeptide"
QVQLEQSGGDLVKPGGSLKLSCAASGFTFSSYGMSWVRQTPDKRLEWVATISSGGSYSYYPDSVKGRFTISRDNAKNTLYLQMSSLKSEDTAMYFCRPSFFPSWGQGTLVTVSA

SEQ ID NO: 7579 - protein, 109 aa, Artificial Sequence
  source: /note="Description of Artificial Sequence: Synthetic polypeptide"
EVQLQQSGAELVRPGASVKLSCTASGFNINDDYFHWVKQRPEQGLEWIGRIDPANGNTKYGPKFQDKATITADTSSNTAYLQFTSLTSEDTAVYYCASGWAFACWGQGT

SEQ ID NO: 7580 - protein, 123 aa, Artificial Sequence
  source: /note="Description of Artificial Sequence: Synthetic polypeptide"
EVQLQQSGPELVKPGTSMKISCKASGYTFTDYTMHWVKQSHGKNLEWIGRINPYTGSTSHNQNFKDKASLTVDKSSNTAYMDLLSLTSEDSAVYYCARFGGDYTSSYYTLDYWGQGTSVSVSS

SEQ ID NO: 7581 - protein, 117 aa, Artificial Sequence
  source: /note="Description of Artificial Sequence: Synthetic polypeptide"
EVQLQQSGPELVKPGDSVKMSCKASGNTVTNYYMDWVKQSHGKSLEWIGYIYANNGGTSYNQKFKGKATLTVDKSSSTAYMEIHSLTSEDSAVYYCAIYYRYEFAYWGQGTLVTVSA

SEQ ID NO: 7582 - protein, 121 aa, Artificial Sequence
  source: /note="Description of Artificial Sequence: Synthetic polypeptide"
SDVQLQESGPGLVKPSQSLSVTCTVTDYSLTSGYYWNWIRQFPGNKLEWMAYIHSSGSTHYNPSLKSRISVTRDTSKNQFFLQLNSVTTEDTATYYCARDGAYYSSWFPYWGQGTLVTVSA

SEQ ID NO: 7583 - protein, 112 aa, Artificial Sequence
  source: /note="Description of Artificial Sequence: Synthetic polypeptide"
QILLVQSGPELKKPGETVKISCKANYTFTDYGMHWVKQAPGKGLKWMGWINPKTGVASYADDFKGRFAFSLETSASTAYLQINNLENEDTSIYFCARFFDYWGQGTTLTVSS

SEQ ID NO: 7584 - protein, 118 aa, Artificial Sequence
  source: /note="Description of Artificial Sequence: Synthetic polypeptide"
QVQLVESGGGVVQPGRSLRLSCAASGFTFSSYGIHWVRQAPGKGLEWVAVIGYDGSDKNYADSVKGRFTIFRDNSKNTLYLQMNSLRAEDTAVYYCARDQLGDAFDIWGQGTMVTVSS

SEQ ID NO: 7585 - protein, 118 aa, Artificial Sequence
  source: /note="Description of Artificial Sequence: Synthetic polypeptide"
QVQLVQSGAEVKKPGASVKVSCKASGYTFTSYGLSWVRQAPGQGLEWMGWISPYNGNTHYAQKLQGRVTMTTDTSTSTADMDLRSLRSDDTAVYYCARASAAHGMDVWGQGTTVTVSS

SEQ ID NO: 7586 - protein, 118 aa, Artificial Sequence
  source: /note="Description of Artificial Sequence: Synthetic polypeptide"
QVQLVQSGAEVKKPGASVKVSCKASGYTFTSYGLSWVRQAPGQGLEWMGWISPYNGNTHYAQKLQGRVTMTTDTSTSTAYMDLRSLRSDDTAVYYCARDSAAHGMDVWGQGTTVTVSS

SEQ ID NO: 7587 - protein, 118 aa, Artificial Sequence
  source: /note="Description of Artificial Sequence: Synthetic polypeptide"
QVQLVQSGAEVKKPGASVKVSCKASGYTFTSYGLSWVRQAPGQGLEWMGWISAYNGNTNYAQKLQGRVTMTTDTSTSTAYMDLRSLRSDDTAVYYCARDSAAHGMDVWGQGTTVTVSS

SEQ ID NO: 7588 - protein, 118 aa, Artificial Sequence
  source: /note="Description of Artificial Sequence: Synthetic polypeptide"
QVQVVQSGAEVKKPGASVKVSCKTSGYTFTSYGISWVRQAPGQGLEWMGWISAYNGNTKYAQKLQGRLTMTTDTSTTTAYMELRSLRSDDTAVYYCARDSAAHGMDVWGQGTTVSVSS

SEQ ID NO: 7589 - protein, 117 aa, Artificial Sequence
  source: /note="Description of Artificial Sequence: Synthetic polypeptide"
EVQLLESGGGLVQPGGSLRLSCAASGFTFSNFVMSWVRQAPGKGLEWVSGISGSGGNTDHADSVKGRFTISRDNSKNTVYLQMNSLRAEDTAVYYCAKDSGGLFDYWGLGTLVTVSS

SEQ ID NO: 7590 - protein, 119 aa, Artificial Sequence
  source: /note="Description of Artificial Sequence: Synthetic polypeptide"
QVQLVESGGGVVQPGRSLRLSCAASGFTFSTYGMHWVRQAPGKGLEWVAVISHDGSDKYYADSVKGRFTISRDNSKNTLYLQMNSLRAEDTAVYYCARDQSIIETFDYWGQGTLVTVSS

SEQ ID NO: 7591 - protein, 118 aa, Artificial Sequence
  source: /note="Description of Artificial Sequence: Synthetic polypeptide"
QVQLVESGGGVVQPGRSLRLSCAVSGFTFRSYGMHWVRQAPGKGLEWVAVIWYDGSIKYYADSVKGRFTISRDNSKNTLYLQMNSLRAEDTAVYFCAREGGRDAFDIWGQGTMVTVSS

SEQ ID NO: 7592 - protein, 118 aa, Artificial Sequence
  source: /note="Description of Artificial Sequence: Synthetic polypeptide"
EVQLLESGGGLVQPGGSLRLSCAASGFTFSSYAMSWVRQAPGKGLEWVSAISDSGGSTYYADSVKGRFTISRDNSKNTLYLQMNSLRAEDTAAYYCAKEIAVALFDYWGQGTLVTVSS

SEQ ID NO: 7593 - protein, 118 aa, Artificial Sequence
  source: /note="Description of Artificial Sequence: Synthetic polypeptide"
QVQLVQSGGEVKKPGASVKVSCKTSGYTFTSYGISWVRQAPGQGLEWMGWISAYNGNTKYAQKLQGRLTMTTDTSTTTAYMELRSLRSDDTAVYYCARDSAAHGMDVWGQGTTVTVSS

SEQ ID NO: 7594 - protein, 120 aa, Artificial Sequence
  source: /note="Description of Artificial Sequence: Synthetic polypeptide"
EVKLQESGPELVKPGASVKMSCKASGYKFTDYVVHWLKQKPGQGLEWIGYINPYNDGTKYNEKFKGKATLTSDKSSSTAYMEVSSLTSEDSAVYYCARDYRYEVYGMDYWGQGTSVTVSS

SEQ ID NO: 7595 - protein, 120 aa, Artificial Sequence
  source: /note="Description of Artificial Sequence: Synthetic polypeptide"
EVKLQESGAELVRPGVSVKISCKGSGYTFTDYVLHWVKQSHAKSLEWIGLINTYNGDVRYNQKFMGKATMTIEKSSSTAYMELVRLTSEDSAIYYCARDYRYEYYAMDYWGQGTSVTVSS

SEQ ID NO: 7596 - protein, 117 aa, Artificial Sequence
  source: /note="Description of Artificial Sequence: Synthetic polypeptide"
QVQLVQSGAEVKKPGSSVKVSCKASGGTFSDYAISWVRQAPGQGLEWMGRIIPILGVANYAQKFQGRVTITADKSTRTAYMELSSLRSEDTAVYYCARNWADAFDIWGQGTMVTVSS

SEQ ID NO: 7597 - protein, 117 aa, Artificial Sequence
  source: /note="Description of Artificial Sequence: Synthetic polypeptide"
QVQLVQSGAEVKKPGSSVKVSCKASGDTFSSYAISWVRQAPGQGLEWMGRIIPIINIASYAQNFQGRVTITADKSTNTAYMELSSLRSEDTAVYYCARNWADAFDIWGQGTMVTVSS

SEQ ID NO: 7598 - protein, 117 aa, Artificial Sequence
  source: /note="Description of Artificial Sequence: Synthetic polypeptide"
QVQLVQSGTEVKKPGSSVKVSCKVSGDTFSSYAISWVRQAPGQGLEWMGRIIPIIGIANYAQKFQGRVTITADKSTSTAYMELSSLRSEDTAVYYCARHWLDAFDIWGQGTMVTVSS

SEQ ID NO: 7599 - protein, 117 aa, Artificial Sequence
  source: /note="Description of Artificial Sequence: Synthetic polypeptide"
QVQLVQSGAEVKKPGSSVKVSCKASGGTFSDYAISWVRQAPGQGLEWMGRIIPILGVADYAQKFQGRVTITADKSTRTAYMELSSLRSEDTAVYYCARNWADAFDIWGQGTMVTVSS

SEQ ID NO: 7600 - protein, 117 aa, Artificial Sequence; identical to SEQ ID NO: 7599
  source: /note="Description of Artificial Sequence: Synthetic polypeptide"

SEQ ID NO: 7601 - protein, 117 aa, Artificial Sequence
  source: /note="Description of Artificial Sequence: Synthetic polypeptide"
QVELVQSGAEVQKPGSSVKVSCKASGDTFSSYAISWVRQAPGQGLEWMGRIIPIVGIVNYAEKFQGRVTITADKSMSTAYMELSSLRSEDTAVYYCARNWADAFDIWGQGTMVTVSS

SEQ ID NO: 7602 - protein, 117 aa, Artificial Sequence
  source: /note="Description of Artificial Sequence: Synthetic polypeptide"
QVQLVQSGAEVKKPGSSVKVACKASGDTFSSYAISWVRQAPGQGLEWMGRVIPIIGIASYAQNFQGRVTITADRSTSTAYMALSSLRSEDTAVYYCARNWADAFDIWGQGTMVTVSS

SEQ ID NO: 7603 - protein, 117 aa, Artificial Sequence; identical to SEQ ID NO: 7602
  source: /note="Description of Artificial Sequence: Synthetic polypeptide"

SEQ ID NO: 7604 - protein, 117 aa, Artificial Sequence
  source: /note="Description of Artificial Sequence: Synthetic polypeptide"
QVQLVQSGAEVKKPGSSVKVACKASGDTFSSYAISWVRQAPGQGLEWMGRVIPIIGIASYAQNFEGRVTITADRSTSTAYMALSSLRSEDTAVYYCARNWADAFDIWGQGTMVTVSS

SEQ ID NO: 7605 - protein, 119 aa, Artificial Sequence
  source: /note="Description of Artificial Sequence: Synthetic polypeptide"
QVELVQSGAEVKKPGSSVKVSCKASGGTFSSYAISWVRQAPGQGLEWMGRIIPILDMANYAQKFQGRVTITADKSTYTAYMELSSLRSEDTAVYYCAREGGVDWYFDLWGRGTLVTVSS

SEQ ID NO: 7606 - protein, 119 aa, Artificial Sequence
  source: /note="Description of Artificial Sequence: Synthetic polypeptide"
QVELVQSGAEVKKPGSSVKVSCKASEDTFSSYAISWVRQAPGQGLEWMGRIIPIIGIVNYAQKFQGRVTITADKSTYTAYMELSSLRSEDTAVYYCAREGGVDWYFDLWGRGTLVTVSS

SEQ ID NO: 7607 - protein, 119 aa, Artificial Sequence
  source: /note="Description of Artificial Sequence: Synthetic polypeptide"
QVELVQSGAEVKKPGSSVKVSCKASGGTFSSYAISWVRQAPGQGLEWMGRIIPILGMANYAQKFQGRVTITADKSTYTAYMELSSLRSEDTAVYYCAREGGVDWYFDLWGRGTLVTVSS

SEQ ID NO: 7608 - protein, 119 aa, Artificial Sequence
  source: /note="Description of Artificial Sequence: Synthetic polypeptide"
QVQLVQSGAEVKKPGSSMKVSCKASEDTFSSYAISWVRQAPGQGLEWMGRIIPIIGIVNYAQKFQGRVTITADKSTCTAYMELTSLRSEDTAVYYCAREGGVDWYFDLWGRGTLVTVSS

SEQ ID NO: 7609 - protein, 119 aa, Artificial Sequence
  source: /note="Description of Artificial Sequence: Synthetic polypeptide"
QVQLVQSGAEVKKPGSSVKVSCKASGGTFSSYAISWVRQAPGQGLEWMGRIIPILGIANYAQKFQGRVTITADKSTYTAYMELSSLRSEDTAVYYCAREGGVDWYFDLWGRGTLVTVSS

SEQ ID NO: 7610 - protein, 117 aa, Artificial Sequence
  source: /note="Description of Artificial Sequence: Synthetic polypeptide"
QVQLQQPGAEWKPGASVKMSCKASGYTFTSYYIHWIKQTPGQGLEWVGVIYPGNDDISYNQKFKGKATLTADKSSTTAYMQLSSLTSEDSAVYYCAREVRLRYFDVWGAGTTVTVSS

SEQ ID NO: 7611 - protein, 117 aa, Artificial Sequence
  source: /note="Description of Artificial Sequence: Synthetic polypeptide"
QVQLQQPGAEWKPGASVKMSCKASGYTFTSYYIHWIKQTPGQGLEWVGVIYPGNDDISYNQKFQGKATLTADKSSTTAYMQLSSLTSEDSAVYYCAREVRLRYFDVWGQGTTVTVSS

SEQ ID NO: 7612 - protein, 117 aa, Artificial Sequence; identical to SEQ ID NO: 7596
  source: /note="Description of Artificial Sequence: Synthetic polypeptide"

SEQ ID NO: 7613 - protein, 117 aa, Artificial Sequence; identical to SEQ ID NO: 7597
  source: /note="Description of Artificial Sequence: Synthetic polypeptide"

SEQ ID NO: 7614 - protein, 117 aa, Artificial Sequence; identical to SEQ ID NO: 7598
  source: /note="Description of Artificial Sequence: Synthetic polypeptide"

SEQ ID NO: 7615 - protein, 117 aa, Artificial Sequence; identical to SEQ ID NO: 7599
  source: /note="Description of Artificial Sequence: Synthetic polypeptide"

SEQ ID NO: 7616 - protein, 117 aa, Artificial Sequence; identical to SEQ ID NO: 7599
  source: /note="Description of Artificial Sequence: Synthetic polypeptide"

SEQ ID NO: 7617 - protein, 117 aa, Artificial Sequence; identical to SEQ ID NO: 7601
  source: /note="Description of Artificial Sequence: Synthetic polypeptide"

SEQ ID NO: 7618 - protein, 117 aa, Artificial Sequence; identical to SEQ ID NO: 7602
  source: /note="Description of Artificial Sequence: Synthetic polypeptide"

SEQ ID NO: 7619 - protein, 117 aa, Artificial Sequence; identical to SEQ ID NO: 7602
  source: /note="Description of Artificial Sequence: Synthetic polypeptide"

SEQ ID NO: 7620 - protein, 117 aa, Artificial Sequence; identical to SEQ ID NO: 7604
  source: /note="Description of Artificial Sequence: Synthetic polypeptide"

SEQ ID NO: 7621 - protein, 119 aa, Artificial Sequence; identical to SEQ ID NO: 7605
  source: /note="Description of Artificial Sequence: Synthetic polypeptide"

SEQ ID NO: 7622 - protein, 119 aa, Artificial Sequence; identical to SEQ ID NO: 7606
  source: /note="Description of Artificial Sequence: Synthetic polypeptide"

SEQ ID NO: 7623 - protein, 119 aa, Artificial Sequence; identical to SEQ ID NO: 7607
  source: /note="Description of Artificial Sequence: Synthetic polypeptide"

SEQ ID NO: 7624 - protein, 119 aa, Artificial Sequence; identical to SEQ ID NO: 7608
  source: /note="Description of Artificial Sequence: Synthetic polypeptide"

SEQ ID NO: 7625 - protein, 119 aa, Artificial Sequence; identical to SEQ ID NO: 7609
  source: /note="Description of Artificial Sequence: Synthetic polypeptide"

SEQ ID NO: 7626 - protein, 116 aa, Artificial Sequence
  source: /note="Description of Artificial Sequence: Synthetic polypeptide"
AVQLQQSGPELEKPGASVKISCKASGYSFTGYNMNWVKQNNGKSLEWIGNIDPYYGGTTYNRKFKGKATLTVDKSSSTAYMQLKSLTSEDSAVYYCARSVGPMDYWGQGTSVTVSS

SEQ ID NO: 7627 - protein, 119 aa, Artificial Sequence
  source: /note="Description of Artificial Sequence: Synthetic polypeptide"
EIQLQQSGPELVKPGASVKVSCKASGYSFTDYNMYWVKQSHGKSLEWIGYIDPYNGDTTYNQKFKGKATLTVDKSSSTAFIHLNSLTSEDSAVYYCARSPYGHYAMDYWGQGTSVTVSS

SEQ ID NO: 7628 - protein, 116 aa, Artificial Sequence; identical to SEQ ID NO: 7626
  source: /note="Description of Artificial Sequence: Synthetic polypeptide"

SEQ ID NO: 7629 - protein, 116 aa, Artificial Sequence; identical to SEQ ID NO: 7626
  source: /note="Description of Artificial Sequence: Synthetic polypeptide"

SEQ ID NO: 7630 - protein, 115 aa, Artificial Sequence
  source: /note="Description of Artificial Sequence: Synthetic polypeptide"
QVQVQESGPGLVAPSQTLSITCTVSGFSLTTSGVSWVRQPPGKGLEWLGVIWGDGSTNYHPSLKSRLSIKKDHSKSQVFLKLNSLTAADTATYYCAKGGYSLAHWGQGTLVTVSS

SEQ ID NO: 7631 - protein, 115 aa, Artificial Sequence
  source: /note="Description of Artificial Sequence: Synthetic polypeptide"
QVQVQESGPGLVAPSQTLSITCTVSGFSLTTSGVSWVRQPPGKGLEWLGVIWGDGSTNYHSSLKSRLSIKKDHSKSQVFLKLNSLTAADTATYYCAKGGYSLAHWGQGTLVTVSS

SEQ ID NO: 7632 - protein, 116 aa, Artificial Sequence
  source: /note="Description of Artificial Sequence: Synthetic polypeptide"
EVQLVQSGAEVKKPGESLKISCKGSGYSFTGYNMNWVRQMPGKGLEWMGNIDPYYGGTTYNRKFKGQVTISADKSISTAYLQWSSLKASDTAMYYCARSVGPFDSWGQGTLVTVSS

SEQ ID NO: 7633 - protein, 116 aa, Artificial Sequence
  source: /note="Description of Artificial Sequence: Synthetic polypeptide"
AVQLVESGGGLVQPGGSLRLSCKASGYSFTGYNMNWVRQAPGKGLEWVANIDPYYGGTTYNRKVKGRFTISVDKSSSTAYLQMNSLRAEDTAVYYCARSVGPMDYWGQGTLVTVSS

SEQ ID NO: 7634 - protein, 116 aa, Artificial Sequence; identical to SEQ ID NO: 7626
  source: /note="Description of Artificial Sequence: Synthetic polypeptide"

SEQ ID NO: 7635 - protein, 330 aa, Artificial Sequence; identical to SEQ ID NO: 3890
  source: /note="Description of Artificial Sequence: Synthetic polypeptide"

SEQ ID NO: 7636 - protein, 446 aa, Artificial Sequence; identical to SEQ ID NO: 6724
  source: /note="Description of Artificial Sequence: Synthetic polypeptide"

SEQ ID NO: 7637 - protein, 446 aa, Artificial Sequence; identical to SEQ ID NO: 6725
  source: /note="Description of Artificial Sequence: Synthetic polypeptide"

SEQ ID NO: 7638 - protein, 446 aa, Artificial Sequence; identical to SEQ ID NO: 6722
  source: /note="Description of Artificial Sequence: Synthetic polypeptide"

SEQ ID NO: 7639 - protein, 446 aa, Artificial Sequence; identical to SEQ ID NO: 6723
  source: /note="Description of Artificial Sequence: Synthetic polypeptide"

SEQ ID NO: 7640 - protein, 116 aa, Artificial Sequence
  source: /note="Description of Artificial Sequence: Synthetic polypeptide"
AVQLVQSGAEVKKPGSSVKVSCKASGYSFTGYNMNWVRQAPGQGLEWMGNIDPYYGGTTYNRKFKGRVTLTVDKSSSTAYMELSSLRSEDTAVYYCARSVGPMDYWGQGTLVTVSS

SEQ ID NO: 7641 - protein, 116 aa, Artificial Sequence
  source: /note="Description of Artificial Sequence: Synthetic polypeptide"
AVQLVESGGGLVQPGGSLRLSCKASGYSFTGYNMNWVRQAPGKGLEWVGNIDPYYGGTTYNRKFKGRATLSVDKSSSTAYLQMNSLRAEDTAVYYCARSVGPMDYWGQGTLVTVSS

SEQ ID NO: 7642 - protein, 122 aa, Artificial Sequence
  source: /note="Description of Artificial Sequence: Synthetic polypeptide"
QVQLVQSGAEVKKPGSSVKVSCKASGGTFSSYAFSWVRQAPGQGLEWMGRVIPFLGIANSAQKFQGRVTITADKSTSTAYMDLSSLRSEDTAVYYCARDDIAALGPFDYWGQGTLVTVSSAS

SEQ ID NO: 7643 - protein, 122 aa, Artificial Sequence
  source: /note="Description of Artificial Sequence: Synthetic polypeptide"
EVQLVQSGAEVKKPGESLKISCKGSGYSFSNYWIGWVRQMPGKGLEWMGIIYPHDSDARYSPSFQGQVTFSADKSISTAYLQWSSLKASDTAMYYCARHVGWGSRYWYFDLWGRGTLVTVSS

SEQ ID NO: 7644 - protein, 120 aa, Artificial Sequence
  source: /note="Description of Artificial Sequence: Synthetic polypeptide"
QVQLVESGGGLVQPGGSLRLSCAASGFTFSSYYMNWVRQAPGKGLEWVSGISGDPSNTYYADSVKGRFTISRDNSKNTLYLQMNSLRAEDTAVYYCARDLPLVYTGFAYWGQGTLVTVSS

SEQ ID NO: 7645 - protein, 122 aa, Artificial Sequence [sequence omitted]

SEQ ID NO: 7646 - protein, 122 aa, Artificial Sequence; identical to SEQ ID NO: 7643
  source: /note="Description of Artificial Sequence: Synthetic polypeptide"

SEQ ID NO: 7647 - protein, 122 aa, Artificial Sequence; identical to SEQ ID NO: 7642
  source: /note="Description of Artificial Sequence: Synthetic polypeptide"

SEQ ID NO: 7648 - protein, 114 aa, Artificial Sequence
  source: /note="Description of Artificial Sequence: Synthetic polypeptide"
QIQLVQSGPELKKPGETVKISCKASGYTLTSYGMNWVKQAPGKGLKWMGWINTYTGEPTYADDFKGRFAFSLETSASTAFLQINNLKNEDTATYFCVRRGFAYWGQGTLVTVSA

SEQ ID NO: 7649 - protein, 114 aa, Artificial Sequence
  source: /note="Description of Artificial Sequence: Synthetic polypeptide"
QIQLVQSGPELKKPGETVKISCKASGYTFTNSGMNWVKQAPGKGLKWMGWINTYTGEPTYADDFKGRFAFSLETSASSAYLQISNLKNEDTATYFCARRGFVYWGQGTLVTVSA

SEQ ID NO: 7650 - protein, 120 aa, Artificial Sequence
  source: /note="Description of Artificial Sequence: Synthetic polypeptide"
QVQLQQSGAELARPGTSVKLSCKASGYTFTDYWMQWVKQRPGQGLEWIGTIYPGDGDTGYAQKFKGKATLTADKSSKTVYMHLSSLASEDSAVYYCARGDYYGSNSLDYWGQGTSVTVSS

SEQ ID NO: 7651 - protein, 119 aa, Artificial Sequence
  source: /note="Description of Artificial Sequence: Synthetic polypeptide"
QVQLQQSGPELVRPGASVKISCKTSGYAFSGSWMNWVKQRPGQGLEWIGRIYPGDGDIIYNGNFRDKVTLSADKSSNTAYMQLSSLTSVDSAVYFCSRWGTFTPSFDYWGQGTTLTVSS

SEQ ID NO: 7652 - protein, 117 aa, Artificial Sequence
  source: /note="Description of Artificial Sequence: Synthetic polypeptide"
DVKLVESGGGLVKPGGSLKLSCEASGFTFSSYTLSWVRQTPETRLEWVATISIGGRYTYYPDSVEGRFTISRDNAKNTLYLQMNSLKSEDTAMYYCTRDFNGYSDFWGQGTTLTVSS

SEQ ID NO: 7653 - protein, 120 aa, Artificial Sequence
  source: /note="Description of Artificial Sequence: Synthetic polypeptide"
NVQLVESGGGLVQPGGSRKLSCAASGFTFSNFGMHWVRQAPEKGLEWVAYIRSGSGTIYYSDTVKGRFTISRDNPKNTLFLQMTSLRSEDTAMYYCARSYYDFGAWFAYWGQGTLVTVSA

SEQ ID NO: 7654 - protein, 120 aa, Artificial Sequence [sequence omitted]

SEQ ID NO: 7655 - protein, 117 aa, Artificial Sequence
  source: /note="Description of Artificial Sequence: Synthetic polypeptide"
EVQLVESGGGLVKPGGSLRLSCEASGFTFSSYTLSWVRQTPGKGLEWVATISIGGRYTYYPDSVKGRFTISRDNAKNTLYLQMNSLKSEDTAMYYCTRDFNGYSDFWGQGTTLTVSS

SEQ ID NO: 7656 - protein, 121 aa, Artificial Sequence
  source: /note="Description of Artificial Sequence: Synthetic polypeptide"
QLQLQESGPGLVKPSETLSLTCTVSGGSISSSSYYWSWIRQHPGKGLEWIGYIYYSGSTNYNPSLKSRVTISVDTLKNQISLRLTSVTAADTAVYYCARVGGAGGWPMDVWGQGTTVTVSS

SEQ ID NO: 7657 - protein, 118 aa, Artificial Sequence
  source: /note="Description of Artificial Sequence: Synthetic polypeptide"
QVQLQESGPGLVKPSETLSLTCAVYGGSFSGYYWSWIRQPPGKGLEWIGSIYHSGSTYYNPSLKSRVTISVDTSKNQFSLKLSSVTAADTAVYYCARDLYYYYGMDVWGQGTTVTVSS

SEQ ID NO: 7658 - protein, 122 aa, Artificial Sequence
  source: /note="Description of Artificial Sequence: Synthetic polypeptide"
EVQLVQSGAEVKKSGASVKVSCKASGYTFTDYYIHWVRQAPGQGLEWMGWINPNNGGVTFAQKFQGRVTMTRDTSISTAYMDLSSLRSDDTAVYFCARDIRMSGWLAPFDYWGQGTLVTVSS

SEQ ID NO: 7659 - protein, 120 aa, Artificial Sequence
  source: /note="Description of Artificial Sequence: Synthetic polypeptide"
QVQLVESGGGVVQGGGSLRLSCAASGFTVRSNYMSWVRQAPGKGLEWVSAISGSGDSTYYADSVKGRFTISRDNSKNTLYLQMNSLRAEDTAVYYCAKVAVTTGWYFDLWGRGTLVTVSS

SEQ ID NO: 7660 - protein, 120 aa, Artificial Sequence
  source: /note="Description of Artificial Sequence: Synthetic polypeptide"
EVQLQQSGPEVGRPGSSVKISCKASGYTFTDYIMHWVKQSPGQGLEWIGWIDPEYGRTDYAEKFKKKATLTADTSSSTAYIQLSSLASEDTATYFCARSAHTTGFGFAYWGQGTLVTVSS

SEQ ID NO: 7661 - protein, 123 aa, Artificial Sequence
  source: /note="Description of Artificial Sequence: Synthetic polypeptide"
EVQLQQSGPEVGRPGSSVKISCKASGYIFTDYIMHWVKQSPGQGLEWIGWIDPEYGSTDYAEKFKKKATLTADTSSSTAYIQLSSLTSEDTATYFCARVAIITTVASGGFAYWGQGTLVTVSS

SEQ ID NO: 7662 - protein, 120 aa, Artificial Sequence
  source: /note="Description of Artificial Sequence: Synthetic polypeptide"
EVQLQQSGPEVGRPGSSVKISCKASGYTFTDSVMNWVKQSPGQGLEWIGWIDPEYGRTDVAEKFKKKATLTADSSSSTAYIYLSGLTSEDTATYFCARTKYNSGYGFPYWGQGSLVTVSS

SEQ ID NO: 7663 - protein, 125 aa, Artificial Sequence
  source: /note="Description of Artificial Sequence: Synthetic polypeptide"
QVQLVQSGAEVKKPGSSVKVSCKASGGNFISYSISWVRQAPGKRLEWMGWIIPIFGTTTYVQKFQGRVTITADESTSTAYMELSSLRSEDTAVYYCARVKYGSGSYYPNNWFDPWGQGTLVTVSS

SEQ ID NO: 7664 - protein, 123 aa, Artificial Sequence
  source: /note="Description of Artificial Sequence: Synthetic polypeptide"
QVQLVQSGAEVKKPGSSVKVSCKASGGTFSSYAISWVRQAPGQGLEWMGGIIPIFGTANYAQKFQGRVTITADESTSTAYMELSSLRSEDTAVYYCARDSSSWYFTYGYFQHWGQGTLVTVSS

SEQ ID NO: 7665 - protein, 124 aa, Artificial Sequence
  source: /note="Description of Artificial Sequence: Synthetic polypeptide"
EVQLLESGGGLVQPGGSLRLSCAVSGFTFNSFAMSWVRQAPGKGLEWVSAISGSGGGTYYADSVKGRFTISRDNSKNTLYLQMNSLRAEDTAVYFCAKDKILWFGEPVFDYWGQGTLVTVSSAS

SEQ ID NO: 7666 - protein, 113 aa, Artificial Sequence
  source: /note="Description of Artificial Sequence: Synthetic polypeptide"
EVQLQQSGPDLVKPGASVKISCKASGYSFTGYYIHWVKQSHGKSLEWIGRVIPNNGGTSYNQKFKGKAILTVDKSSSTAYMELRSLTSEDSAVYYCAREGIYWWGHGTTLTVS

SEQ ID NO: 7667 - protein, 113 aa, Artificial Sequence
  source: /note="Description of Artificial Sequence: Synthetic polypeptide"
EVQLVESGGGLVQPGGSLRLSCAASGYSFTGYYIHWVRQAPGKGLEWVARVIPNAGGTSYNQKFKGRFTLSVDNSKNTAYLQMNSLRAEDTAVYYCAREGIYWWGQGTLVTVS

SEQ ID NO: 7668 - protein, 113 aa, Artificial Sequence
  source: /note="Description of Artificial Sequence: Synthetic polypeptide"
EVQLVESGGGLVQPGGSLRLSCAASGYSFTGYYIHWVRQAPGKGLEWVARVIPNQGGTSYNQKFKGRFTLSVDNSKNTAYLQMNSLRAEDTAVYYCAREGIYWWGQGTLVTVS

SEQ ID NO: 7669 - protein, 113 aa, Artificial Sequence
  source: /note="Description of Artificial Sequence: Synthetic polypeptide"
EVQLVESGGGLVQPGGSLRLSCAASGYSFTGYYIHWVRQAPGKGLEWVARVIPNNGGTSYNQKFKGRFTISRDNSKNTLYLQMNSLRAEDTAVYYCAREGIYWWGQGTLVTVS

SEQ ID NO: 7670 - protein, 113 aa, Artificial Sequence
  source: /note="Description of Artificial Sequence: Synthetic polypeptide"
EVQLVESGGGLVQPGGSLRLSCAASGYSFTGYYIHWVRQAPGKGLEWVARVIPNNGGTSYNQKFKGRFTISVDNSKNTLYLQMNSLRAEDTAVYYCAREGIYWWGQGTLVTVS

SEQ ID NO: 7671 - protein, 113 aa, Artificial Sequence
  source: /note="Description of Artificial Sequence: Synthetic polypeptide"
EVQLVESGGGLVQPGGSLRLSCAASGYSFTGYYIHWVRQAPGKGLEWVARVIPNNGGTSYNQKFKGRFTISRDKSKNTLYLQMNSLRAEDTAVYYCAREGIYWWGQGTLVTVS

SEQ ID NO: 7672 - protein, 113 aa, Artificial Sequence
  source: /note="Description of Artificial Sequence: Synthetic polypeptide"
EVQLVESGGGLVQPGGSLRLSCAASGYSFTGYYIHWVRQAPGKGLEWVARVIPNNGGTSYNQKFKGRATLSVDNSKNTAYLQMNSLRAEDTAVYYCAREGIYWWGQGTLVTVS

SEQ ID NO: 7673 - protein, 113 aa, Artificial Sequence
  source: /note="Description of Artificial Sequence: Synthetic polypeptide"
EVQLVESGGGLVQPGGSLRLSCAASGYSFTGYYIHWVRQAPGKGLEWVARVIPNNGGTSYNQKFKGRFTLSVDNSKNTAYLQMNSLRAEDTAVYYCAREGIYWWGQGTLVTVS

SEQ ID NO: 7674 - protein, 113 aa, Artificial Sequence
  source: /note="Description of Artificial Sequence: Synthetic polypeptide"
EVQLVESGGGLVQPGGSLRLSCAASGYSFTGYYIHWVRQAPGKGLEWVARVIPNNGGTSYNQKFKGRATISVDNSKNTAYLQMNSLRAEDTAVYYCAREGIYWWGQGTLVTVS

SEQ ID NO: 7675 - protein, 113 aa, Artificial Sequence
  source: /note="Description of Artificial Sequence: Synthetic polypeptide"
EVQLVESGGGLVQPGGSLRLSCAASGYSFTGYYIHWVRQAPGKGLEWVARVIPNNGGTSYNQKFKGRATLSVDNSKNTLYLQMNSLRAEDTAVYYCAREGIYWWGQGTLVTVS

SEQ ID NO: 7676 - protein, 120 aa, Artificial Sequence
  source: /note="Description of Artificial Sequence: Synthetic polypeptide"
QVQLVESGGGVVQPGRSLRLSCAASGFTFSSYGMHWVRQAPGKGLEWVAVISYEESNRYHADSVKGRFTISRDNSKITLYLQMNSLRTEDTAVYYCARDGGIAAPGPDYWGQGTLVTVSS

SEQ ID NO: 7677 - protein, 116 aa, Artificial Sequence
  source: /note="Description of Artificial Sequence: Synthetic polypeptide"
EVQLLESGGGLVQPGGSLRLSCAASGFTFDAYDMQWVRQAPGKGLEWVSTITSEGLSTYYADSVKGRFTISRDNSKNTLYLQMNSLRAEDTAVYYCAKPSDLFDYWGQGTLVTVSS

SEQ ID NO: 7678 - protein, 121 aa, Artificial Sequence
  source: /note="Description of Artificial Sequence: Synthetic polypeptide"
EVQLLESGGGLVQPGGSLRLSCAASGFTFDGYDMGWVRQAPGKGLEWVSTISRGGWFTYYADSVKGRFTISRDNSKNTLYLQMNSLRAEDTAVYYCAKGTSQSSTGSFDYWGQGTLVTVSS

SEQ ID NO: 7679 - protein, 116 aa, Artificial Sequence
  source: /note="Description of Artificial Sequence: Synthetic polypeptide"
EVQLLESGGGLVQPGGSLRLSCAASGFTFRRYDMLWARQAPGKGLEWVSEISPTGALTYYADSVKGRFTISRDNSKNTLYLQMNSLRAEDTAVYYCAKLGSTFDYWGQGTLVTVSS

SEQ ID NO: 7680 - protein, 119 aa, Artificial Sequence
  source: /note="Description of Artificial Sequence: Synthetic polypeptide"
EVQLLESGGGLVQPGGSLRLSCAASGFTFFPYYMSWVRQAPGKGLEWVSSISGTGGLTYYADSVKGRFTISRDNSKNTLYLQMNSLRAEDTAVYYCAKTTQNATLFDYWGQGTLVTVSS

SEQ ID NO: 7681 - protein, 116 aa, Artificial Sequence
  source: /note="Description of Artificial Sequence: Synthetic polypeptide"
EVQLLESGGGLVQPGGSLRLSCAASGFTFEVYTMAWVRQAPGKGLEWVSTIDESGRDTYYADSVKGRFTISRDNSKNTLYLQMNSLRAEDTAVYYCAKPGVWFDYWGQGTLVTVSS

SEQ ID NO: 7682 - protein, 124 aa, Artificial Sequence
  source: /note="Description of Artificial Sequence: Synthetic polypeptide"
EVQLLESGGGLVQPGGSLRLSCAASGFTFAFYKMGWVRQAPGKGLEWVSTITPKGHHTYYADSVKGRFTISRDNSKNTLYLQMNSLRAEDTAVYYCAKVFKGKGWTRPSGFDYWGQGTLVTVSS

SEQ ID NO: 7683 - protein, 120 aa, Artificial Sequence
  source: /note="Description of Artificial Sequence: Synthetic polypeptide"
EVQLLESGGGLVQPGGSLRLSCAASGFTFNEYSMMWVRQAPGKGLEWVSSIGRRGWLTYYADSVKGRFTISRDNSKNTLYLQMNSLRAEDTAVYYCAKAVLLDSTKFDYWGQGTLVTVSS

SEQ ID NO: 7684 - protein, 124 aa, Artificial Sequence
  source: /note="Description of Artificial Sequence: Synthetic polypeptide"
EVQLLESGGGLVQPGGSLRLSCAASGFTFPSYDMAWVRQAPGKGLEWVSGISRSGSMTYYADSVKGRFTISRDNSKNTLYLQMNSLRAEDTAVYYCAKGVDAHVYYMEPFFDYWGQGTLVTVSS

SEQ ID NO: 7685 - protein, 121 aa, Artificial Sequence
  source: /note="Description of Artificial Sequence: Synthetic polypeptide"
EVQLLESGGGLVQPGGSLRLSCAASGFTFDEYPMTWVRQAPGKGLEWVSTISARGPFTYYADSVKGRFTISRDNSKNTLYLQMNSLRAEDTAVYYCAKGRHWLRNGRFDYWGQGTLVTVSS

SEQ ID NO: 7686 - protein, 116 aa, Artificial Sequence
  source: /note="Description of Artificial Sequence: Synthetic polypeptide"
EVQLLESGGGLVQPGGSLRLSCAASGFTFGMQSMQWVRQAPGKGLEWVSSITDDGTSTYYADSVKGRFTISRDNSKNTLYLQMNSLRAEDTAVYYCAKPDRVFDYWGQGTLVTVSS

SEQ ID NO: 7687 - protein, 116 aa, Artificial Sequence
  source: /note="Description of Artificial Sequence: Synthetic polypeptide"
EVQLLESGGGLVQPGGSLRLSCAASGFTFGAADMQWVRQAPGKGLEWVSLITNDGISTYYADSVKGRFTISRDNSKNTLYLQMNSLRAEDTAVYYCAKAGDRFDYWGQGTLVTVSS

SEQ ID NO: 7688 - protein, 121 aa, Artificial Sequence
  source: /note="Description of Artificial Sequence: Synthetic polypeptide"
EVQLLESGGGLVQPGGSLRLSCAASGFTFNKYRMQWVRQAPGKGLEWVSSIDSSGELTYYADSVKGRFTISRDNSKNTLYLQMNSLRAEDTAVYYCAEEVPMGNQTFFDYWGQGTLVTVSS

SEQ ID NO: 7689 - protein, 119 aa, Artificial Sequence
  source: /note="Description of Artificial Sequence: Synthetic polypeptide"
EVQLLESGGGLVQPGGSLRLSCAASGFTFTDYTMGWVRQAPGKGLEWVSSITSQGAFTYYADSVKGRFTISRDNSKNTLYLQMNSLRAEDTAVYYCAKATGTDSSFDYWGQGTLVTVSS

SEQ ID NO: 7690 - protein, 116 aa, Artificial Sequence
  source: /note="Description of Artificial Sequence: Synthetic polypeptide"
EVQLLESGGGLVQPGGSLRLSCAASGFTFEDYEMSWVRQAPGKGLEWVSCIGPGGKPTYYADSVKGRFTISRDNSKNTLYLQMNSLRAEDTAVYYCAKVDGHFDYWGQGTLVTVSS

SEQ ID NO: 7691 - protein, 119 aa, Artificial Sequence
  source: /note="Description of Artificial Sequence: Synthetic polypeptide"
EVQLLESGGGLVQPGGSLRLSCAASGFTFSQYDMGWVRQAPGKGLEWVSTISSRGWLTYYADSVKGRFTISRDNSKNTLYLQMNSLRAEDTAVYYCAKGPGGRRRFDYWGQGTLVTVSS

SEQ ID NO: 7692 - protein, 124 aa, Artificial Sequence
  source: /note="Description of Artificial Sequence: Synthetic polypeptide"
EVQLLESGGGLVQPGGSLRLSCAASGFTFLDYAMGWVRQAPGKGLEWVSTISPMGMGTYYADSVKGRFTISRDNSKNTLYLQMNSLRAEDTAVYYCAKSSAISFTSDISNFDYWGQGTLVTVSS

SEQ ID NO: 7693 - protein, 123 aa, Artificial Sequence
  source: /note="Description of Artificial Sequence: Synthetic polypeptide"
EVQLLESGGGLVQPGGSLRLSCAASGFTFSDYPMSWVRQAPGKGLEWVSSISWSGFQTYYADSVKGRFTISRDNSKNTLYLQMNSLRAEDTAVYYCAKPGVARMPTGIAFDYWGQGTLVTVSS

SEQ ID NO: 7694 - protein, 116 aa, Artificial Sequence
  source: /note="Description of Artificial Sequence: Synthetic polypeptide"
EVQLLESGGGLVQPGGSLRLSCAASGFTFSAYEMQWVRQAPGKGLEWVSSIDSAGTFTYYADSVKGRFTISRDNSKNTLYLQMNSLRAEDTAVYYCAEPFGMFDYWGQGTLVTVSS

SEQ ID NO: 7695 - protein, 116 aa, Artificial Sequence
  source: /note="Description of Artificial Sequence: Synthetic polypeptide"
EVQLLESGGGLVQPGGSLRLSCAASGFTFERYQMAWVRQAPGKGLEWVSTISSDGGGTYYADSVKGRFTISRDNSKNTLYLQMNSLRAEDTAVYYCAKPGTVFDYWGQGTLVTVSS

SEQ ID NO: 7696 - protein, 124 aa, Artificial Sequence
  source: /note="Description of Artificial Sequence: Synthetic polypeptide"
EVQLLESGGGLVQPGGSLRLSCAASGFTFSEYPMKWVRQAPGKGLEWVSTIDRQGDRTYYADSVKGRFTISRDNSKNTLYLQMNSLRAEDTAVYYCAKTVRRGLPRPSRYFDYWGQGTLVTVSS

SEQ ID NO: 7697 - protein, 121 aa, Artificial Sequence
  source: /note="Description of Artificial Sequence: Synthetic polypeptide"
EVQLLESGGGLVQPGGSLRLSCAASGFTFSDYDMGWVRQAPGKGLEWVSSISPMGTFTYYADSVKGRFTISRDNSKNTLYLQMNSLRAEDTAVYYCAKGLSVYSGLDFDYWGQGTLVTVSS

SEQ ID NO: 7698 - protein, 123 aa, Artificial Sequence
  source: /note="Description of Artificial Sequence: Synthetic polypeptide"
EVQLLESGGGLVQPGGSLRLSCAASGFTFSHYDMGWVRQAPGKGLEWVSDIDYIGKTTYYADSVKGRFTISRDNSKNTLYLQMNSLRAEDTAVYYCAKASDEVGVNTSKFDYWGQGTLVTVSS

SEQ ID NO: 7699 - protein, 116 aa, Artificial Sequence
  source: /note="Description of Artificial Sequence: Synthetic polypeptide"
EVQLLESGGGLVQPGGSLRLSCAASGFTFARYDMGWVRQAPGKGLEWVSTISPTGVLTYYADSVKGRFTISRDNSKNTLYLQMNSLRAEDTAVYYCAKGFEDFDYWGQGTLVTVSS

SEQ ID NO: 7700 - protein, 116 aa, Artificial Sequence
  source: /note="Description of Artificial Sequence: Synthetic polypeptide"
EVQLLESGGGLVQPGGSLRLSCAASGFTFEAYPMSWVRQAPGKGLEWVSLISHTGHATYYADSVKGRFTISRDNSKNTLYLQMNSLRAEDTAVYYCAKGHWPFDYRGQGTLITVSS

SEQ ID NO: 7701 - protein, 119 aa, Artificial Sequence
  source: /note="Description of Artificial Sequence: Synthetic polypeptide"
EVQLLESGGGLVQPGGSLRLSCAASGFTFEDEWMSWVRQAPGKGLEWVSDISPGGWTTYYADSVKGRFTISRDNSKNTLYLQMNSLRAEDTAVYYCAKGYRPFDEFDYWGQGTLVTVSS

SEQ ID NO: 7702 - protein, 118 aa, Artificial Sequence
  source: /note="Description of Artificial Sequence: Synthetic polypeptide"
EVQLLESGGGLVQPGGSLRLSCAASGVTFDAIEMSWVRQAPGKGLEWVSSISRHGEYTYYADSVKGRFTISRDNSKNTLYLQMNSLRAEDTAVYYCAEDAWSRHFDYWGQGTLVTVSS

SEQ ID NO: 7703 - protein, 116 aa, Artificial Sequence
  source: /note="Description of Artificial Sequence: Synthetic polypeptide"
EVQLLESGGGLVQPGGSLRLSCAASGFTFDSTDMSWVRQAPGKGLEWVSGILDNGSNTYYADSVKGRFTISRDNSKNMLYLQMNSLRAEDTAVYYCAKGARDFDYWGQGTLVTVSS

SEQ ID NO: 7704 - protein, 117 aa, Artificial Sequence
  source: /note="Description of Artificial Sequence: Synthetic polypeptide"
EVQLLESGGGLVQPGGSLRLSCAASGFTFGRQSMQWVRQAPGKGLEWVSSIDDDGFSTYYADSVKGRFTISRDNSKNTLYLQMNSLRAEDTAVYYCAKGDPWGFDYWGQGTLVTVSS

SEQ ID NO: 7705 - protein, 116 aa, Artificial Sequence
  source: /note="Description of Artificial Sequence: Synthetic polypeptide"
EVQLLESGGGLVQPGGSLRLSCTASGFTFSDTQMAWVRQAPGKGLEWVSGIDDGGVSTYYADSVKGRFTISRDNSKNTLYLQMNSLRAEDTAVYYCAKPDRHFDYWGQGTLVTVSS

SEQ ID NO: 7706 - protein, 116 aa, Artificial Sequence
  source: /note="Description of Artificial Sequence: Synthetic polypeptide"
EVQLLESGGGLVQPGGSLRLSCAASGFTFPKYEMAWVRQAPGKGLEWVSSIDGDGKSTYYADSVKGRFTISRDNSKNTLYLQMNSLRAEDTAVYYCAKPDQFFDYWGQGTLVTVSS

SEQ ID NO: 7707 - protein, 118 aa, Artificial Sequence
  source: /note="Description of Artificial Sequence: Synthetic polypeptide"
EVQLLESGGGLVQPGGSLRLSCAASGFTFGSTTMGWVRQAPGKGLEWVSVISDDGGFTYYADSVKGRFTISRDNSRNTLYLQMNSLRAEDTAVYYCAKVDGYGVFDYWGQGTLVTVSS

SEQ ID NO: 7708 - protein, 116 aa, Artificial Sequence
  source: /note="Description of Artificial Sequence: Synthetic polypeptide"
EVQLLESGGGLVQPGGSLRLSCAASGFTFRSGDMNWVRQAPGKGLEWVSTITNDGTSTYYADSVKGRFTISRDNSKNTLYLQMNSLRAEDTAVYYCAKSDSDFDYWGQGTLVTVSS

SEQ ID NO: 7709 - protein, 120 aa, Artificial Sequence
  source: /note="Description of Artificial Sequence: Synthetic polypeptide"
EVQLLESGGGLVQPGGSLRLSCAASGFTFAAYAMTWVRQAPGKGLEWVSYISPNGTATYYADSVKGRFTISRDNSKNTLYLQMNSLRAEDTAVYYCAEYVGMRWNSFDYWGQGTLVTVSS

SEQ ID NO: 7710 - protein, 116 aa, Artificial Sequence
  source: /note="Description of Artificial Sequence: Synthetic polypeptide"
EVQLLESGGGLVQPGGSLRLSCAASGFTFSSYEMAWVRQAPGKGLEWVSSITSLGTSTYYADSVKGRFTISRDNSKNTLYLQMNSLRAEDTAVYYCAKPGRKFDYWGQGTLVTVSS

SEQ ID NO: 7711 - protein, 116 aa, Artificial Sequence
  source: /note="Description of Artificial Sequence: Synthetic polypeptide"
EVQLLESGGGLVQPGGSLRLSCAASGFTFNEYEMTWVRQAPGKGLEWVSTITSEGSGTYYADSVKGRFTISRDNSKNTLYLQMNSLRAEDTAVYYCAKPNGKFDYWGQGTLVTVSS

SEQ ID NO: 7712 - protein, 116 aa, Artificial Sequence
  source: /note="Description of Artificial Sequence: Synthetic polypeptide"
EVQLLESGGGLVQPGGSLRLSCAASGFTFSDYEMLWVRQAPGKGLEWVSTITSEGHSTYYADSVKGRFTISRDNSKNTLYLQMNSLRAEDTAVYYCAKPGTSFDYWGQGTLVTVSS

SEQ ID NO: 7713 - protein, 116 aa, Artificial Sequence
  source: /note="Description of Artificial Sequence: Synthetic polypeptide"
EVQLLESGGGLVQPGGSLRLSCAASGFTFSDYEMSWVRQAPGKGLEWVSTIDSDGSFTYYADSVKGRFTISRDNSKNTLYLQMNSLRAEDTAVYYCAKPGVKFDYWGQGTLVTVSS

SEQ ID NO: 7714 - protein, 116 aa, Artificial Sequence
  source: /note="Description of Artificial Sequence: Synthetic polypeptide"
EVQLLESGGGLVQPGGSLRLSCAASGFTFKDYEMTWVRQAPGKGLEWVSSISSTGQSTYYADSVKGRFTISRDNSKNTLYLQMNSLRAEDTAVYYCAKPGNKFDYWGQGTLVTVSS

SEQ ID NO: 7715 - protein, 124 aa, Artificial Sequence
  source: /note="Description of Artificial Sequence: Synthetic polypeptide"
EVQLLESGGGLVQPGGSLRLSCAASGFTFLDYGMAWVRQAPGKGLEWVSAISPLGLSTYYADSVKSRFTISRDNSKNTLYLQMNSLRAEDTAVYYCAKEVRVGRGVHPPKFDYWGQGTLVTVSS

SEQ ID NO: 7716 - protein, 116 aa, Artificial Sequence
  source: /note="Description of Artificial Sequence: Synthetic polypeptide"
EVQLLESGGGLVQPGGSLRLSCAASGFTFNLYEMTWVRQAPGKGLEWVSSITSDGVSTYYADSVKGRFTISRDNSKNTLYLQMNSLRAEDTAVYYCAKAGVIFDYWGQGTLVTVSS

SEQ ID NO: 7717 - protein, 123 aa, Artificial Sequence
  source: /note="Description of Artificial Sequence: Synthetic polypeptide"
EVQLLESGGGLVQPGGSLRLSCAASGFTFSYYSMYWVRQAPGKGLEWVSSISPFGWGTYYADSVKGRFTISRDNSKDTLYLQMNSLRAEDTAVYYCAKYGETSGPISENFDYWGQGTLVTVSS

SEQ ID NO: 7718 - protein, 123 aa, Artificial Sequence
  source: /note="Description of Artificial Sequence: Synthetic polypeptide"
EVQLLESGGGLVQPGGSLRLSCAASGFTFENYAMSWVRQAPGKGLEWVSTIAPLGVPTYYADSVKGRFTISRDNSKNTLYLQMNSLRAEDTAVYYCAKKKVGAWLQSRSFDYWGQGTLVTVSS

SEQ ID NO: 7719 - protein, 120 aa, Artificial Sequence
  source: /note="Description of Artificial Sequence: Synthetic polypeptide"
EVQLLESGGGLVQPGGSLRLSCAASGFTFMDYEMHWVRQAPGKGLEWVSTIGASGHYTYYADSVKGRFTISRDNSKNTLYLQMNSLRAEDTAVYYCAKYLDMLLFGFDYWGQGTLVTVSS

SEQ ID NO: 7720 - protein, 116 aa, Artificial Sequence
  source: /note="Description of Artificial Sequence: Synthetic polypeptide"
EVQLLESGGGLVQPGGSLRLSCAASGFTFAEYEMMWARQAPGKGLEWVSRIAGNGSRTYYADSVKGRFTISRDNSKNTLYLQMNSLRAEDTAVYYCAIMLSHFDYWGQGTLVTVSS

SEQ ID NO: 7721 - protein, 121 aa, Artificial Sequence
  source: /note="Description of Artificial Sequence: Synthetic polypeptide"
EVQLLESGGGLVQPGGSLRLSCAASGFTFYNYDMSWVRQAPGKGLEWVSGIDSMGLVTYYADSVKGRFTISRDNSKNTLYLQMNSLRAEDTAVYYCAKGSNASDWVVFDYWGQGTLVTVSS

SEQ ID NO: 7722 - protein, 121 aa, Artificial Sequence
  source: /note="Description of Artificial Sequence: Synthetic polypeptide"
EVQLLESGGGLVQPGGSLRLSCAASGFTFASYHMTWVRQAPGKGLEWVSSIADTGDRTYYADSVKGRFTISRDNSKNTLYLQMNSLRAEDTAVYYCAKLRGMARVWGFDYWGQGTLVTVSS

SEQ ID NO: 7723 - protein, 123 aa, Artificial Sequence
  source: /note="Description of Artificial Sequence: Synthetic polypeptide"
EVQLLESGGGLVQPGGSLRLSCAASGFTFSYYDMMWVRQAPGKGLEWISSISDRGLQTYYADSVKGRFTISRDNSKNTLYLQMNSLRAEDTAVYYCAKFTEIPLDWLEVFDYWGQGTLVTVSS

SEQ ID NO: 7724 - protein, 122 aa, Artificial Sequence
  source: /note="Description of Artificial Sequence: Synthetic polypeptide"
EVQLLESGGGLVQPGGSLRLSCAASGFTFGSYKMLWVRQAPGKGLEWVSSITNSGTETYYADSVKGRFTISRDNSKNTLYLQMNSLRAEDTAVYYCAKSMYPDLEIVHFDYWGQGTLVTVSS

SEQ ID NO: 7725 - protein, 121 aa, Artificial Sequence
  source: /note="Description of Artificial Sequence: Synthetic polypeptide"
EVQLLESGGGLVQPGGSLRLSCAASGFTFETYRMSWVRQAPGKGLEWVSAIDQEGSATYYADSVKGRFTISRDNSKNTLYLQMNSLRAEDTAVYYCAKNSGTRPGLRFDYWGQGTLVTVSS

SEQ ID NO: 7726 - protein, 121 aa, Artificial Sequence
  source: /note="Description of Artificial Sequence: Synthetic polypeptide"
EVQLLESGGGLVQPGGSLRLSCAASGFTFSSYDMLWVRQAPGKGLEWVSRIDASGYFTYYADSVKGRFTISRDNSKNTLYLQMNSLRAEDTAVYYCAQLLKLSLNPNFDYWGQGTLVTVSS

SEQ ID NO: 7727 - protein, 120 aa, Artificial Sequence
  source: /note="Description of Artificial Sequence: Synthetic polypeptide"
EVQLLESGGGLVQPGGSLRLSCAASGFTFSSYAMSWVRQAPGKGLEWVSSIHNTGLSTYYADSVKGRFTISRDNSKNTLYLQMNSLRAEDTAVYYCAKGTQHRFVVFDYWGQGTLVTVSS

SEQ ID NO: 7728 - protein, 116 aa, Artificial Sequence
  source: /note="Description of Artificial Sequence: Synthetic polypeptide"
EVQLLESGGGLVQPGGSLRLSCTASGFTFAGYQMSWVRQAPGKGLEWVSSITNEGVSTYYADSVKGRFTISRDNSKNTLYLQMNSLRAEDTAVYYCAKPGKYFDYWGQGTLVTVSS

SEQ ID NO: 7729 - protein, 123 aa, Artificial Sequence
  source: /note="Description of Artificial Sequence: Synthetic polypeptide"
EVQLLESGGGLVQPGGSLRLSCAASGFTFEGYPMSWVRQAPGKGLEWVSTISPLGPDTYYADSVKGRFTISRDNSKNTLYLQMNSLRAEDTAVYYCAKLLMGEYLNSRTFDYWGQGTLVTVSS

SEQ ID NO: 7730 - protein, 116 aa, Artificial Sequence
  source: /note="Description of Artificial Sequence: Synthetic polypeptide"
EVQLLESGGGLVQPGGSLRLSCAASGFTFNTYSMSWVRQAPGKGLEWVSWIDADGWVTYYADSVKGRFTISRDNSKNTLYLQMNSLRAEDTAVYYCAQTGHTFDYWGQGTLVTVSS

SEQ ID NO: 7731 - protein, 116 aa, Artificial Sequence
  source: /note="Description of Artificial Sequence: Synthetic polypeptide"
EVQLLESGGGLVQPGGSLRLSCAASGFTFTDGEMGWARQAPGKGLEWVSRIVDPGDSTYYADSVKGRFTISRDNSKNTLYLQMNSLRAEDTAVYYCAKAGDQFDYWGQGTLVTVSS

SEQ ID NO: 7732 - protein, 116 aa, Artificial Sequence
  source: /note="Description of Artificial Sequence: Synthetic polypeptide"
EVQLLESGGGLVQPGGSLRLSCAASGFTFPEYEMKWVRQAPGKGLEWVSTITPSGGHTYYADSVKGRFTISRDNSKNTLYLQMNSLRAEDAAVYYCAIPLSSFDYWGRGTLVTVSS

SEQ ID NO: 7733 - protein, 123 aa, Artificial Sequence
  source: /note="Description of Artificial Sequence: Synthetic polypeptide"
EVQLLESGGGLVQPGGSLRLSCAASGFTFSNYVMIWVRQAPGKGLEWVSLINGAGDMTYYADSVKGRFTISRDNSKNTLYLQMNSLRAEDTAVYYCAEGGARSFGVPPNFDYWGQGTLVTVSS

SEQ ID NO: 7734 - protein, 116 aa, Artificial Sequence; identical to SEQ ID NO: 7731
  source: /note="Description of Artificial Sequence: Synthetic polypeptide"

SEQ ID NO: 7735 - protein, 116 aa, Artificial Sequence
  source: /note="Description of Artificial Sequence: Synthetic polypeptide"
EVQLLESGGGLVQPGGSLRLSCVASGFTFTLYNMSWVRQAPGKGLEWVSVISSKGDSTYYADSVKGRFTISRDNSKNTLYLQMNSLRAEDTAVYYCAQTSSVFDYWGQGTLVTVSS

SEQ ID NO: 7736 - protein, 123 aa, Artificial Sequence
  source: /note="Description of Artificial Sequence: Synthetic polypeptide"
EVQLLESGGGLVQPGGSLRLSCAASGFTFEAYYMSWVRQAPGKGLEWVSGIVNNGLLTYYADSVKGRFTISRDNSKNMLYLQMNSLRAEDTAVYYCAKSAVHPSYRAELFDYWGQGTLVTVSS

SEQ ID NO: 7737 - protein, 119 aa, Artificial Sequence
  source: /note="Description of Artificial Sequence: Synthetic polypeptide"
EVQLLESGGGLVQPGGSLRLSCAASGFTFSSYEMAWVRQAPGKGLEWVSRIEPDGSNTYYADSVKGRFTISRDNSKNTLYLQMNSLRAEDTAVYYCAKGPDNFTMFDYWGQGTLVTVSS

SEQ ID NO: 7738 - protein, 116 aa, Artificial Sequence
  source: /note="Description of Artificial Sequence: Synthetic polypeptide"
EVQLLESGGGLVQPGGSLRLSCAASGFTFNKYMMGWVRQAPGKGLEWVSSIDSLGHYTYYADSVKGRFTISRDNSKNTLYLQMNSLRAEDTAVYYCAEAEFPFDYWGQGTLVTVSS

SEQ ID NO: 7739 - protein, 116 aa, Artificial Sequence
  source: /note="Description of Artificial Sequence: Synthetic polypeptide"
EVQLLESGGGLVQPGGSLRLSCAASGFTFGEYEMVWVRQAPGKGLEWVSSITSDGLSTYYADSVKGRFTISRDNSKNTLYLQMNSLRAEDTAVYYCAKPGIRFDYWGQGTLVTVSS

SEQ ID NO: 7740 - protein, 116 aa, Artificial Sequence
  source: /note="Description of Artificial Sequence: Synthetic polypeptide"
EVQLLESGGGLVQPGGSLRLSCAASGFTFKRYEMTWVRQAPGKGLEWVSSISSDGSFTYYADSVKGRFTISRDNSKNTLYLQMNSLRAEDTAVYYCAEPFTEFDYWGQGTLVTVSS

SEQ ID NO: 7741 - protein, 116 aa, Artificial Sequence
  source: /note="Description of Artificial Sequence: Synthetic polypeptide"
EVQLLESGGGMVQPGGSLRLSCAASGFTFKRYEMMWVRQAPGKGLEWVSSISSDGSFTYYADSVKGRFTISRDNSKNTLYLQMNSLRAEDTAVYYCAEPFTEFDYWGQGTQVTVSS

SEQ ID NO: 7742 - protein, 116 aa, Artificial Sequence
  source: /note="Description of Artificial Sequence: Synthetic polypeptide"
EVQLLESGGGMVQPGGSLRLSCAASGFTFKRYEMMWVRQAPGKGLEWVSSISSDGSFTYYADSVKGRFTISRDNSKNTLYLQMNSLRAEDTAVYYCAEPFTEFDYWGQGTLVTVSS

SEQ ID NO: 7743 - protein, 116 aa, Artificial Sequence
  source: /note="Description of Artificial Sequence: Synthetic polypeptide"
EVQLLESGGGLVQPGGSLRLSCAASGFTFKRYEMMWVRKAPGKGLEWVSSISSDGSFTYYADSVKGRFTISRDNSENTLYLQMNSLRAEDTAVYYCADPFTEFDYWGQGTLVTVSS

SEQ ID NO: 7744 - protein, 116 aa, Artificial Sequence
  source: /note="Description of Artificial Sequence: Synthetic polypeptide"
EVQLLESGGGLVQPGGSLRLSCAASGFTFKRYEMMWVRQAPGKGLEWVSSISSDGSFTYYADSVKGRFTVSRDNSKNTLYLQMNSLRAEDTAVYYCADPFTEFDYWGQGTLVTVSS

SEQ ID NO: 7745 - protein, 116 aa, Artificial Sequence
  source: /note="Description of Artificial Sequence: Synthetic polypeptide"
EVQLLESGGGLVQPGGSLRLSCAASGFTFKRYEMMWVRQAPGKGLEWVSSISSDGSFTYYADSVKGRFTISRDNTKNTLYLQMNSLRAEDTAVYYCADPFTELDYWGHGTLVTVSS

SEQ ID NO: 7746 - protein, 116 aa, Artificial Sequence
  source: /note="Description of Artificial Sequence: Synthetic polypeptide"
EVQLLESGGGLVRPGGSLRLSCAASGFTFKRYEMMWVRQAPGKGLEWVSSISSDGSFTYYADSVKGRFTISRDNSKNTLYLQMNSLRAEDTAVYFCADPFTEFDYWGQGTLVTVSS

SEQ ID NO: 7747 - protein, 116 aa, Artificial Sequence
  source: /note="Description of Artificial Sequence: Synthetic polypeptide"
EVQLLESGGGLVQPGGSLRLSCAASGFAFKRYEMTWVRQAPGKGLEWVSSISSDGSFTYYADSVKGRFTISRDNSKNTLYLHMNSLRAEDTAVYYCADPFTEIDYWGQGTLVTVSS

SEQ ID NO: 7748 - protein, 116 aa, Artificial Sequence
  source: /note="Description of Artificial Sequence: Synthetic polypeptide"
EVQLLESGGGLVQPGGSLRLSCAASGFPFKRYEMTWVRQAPGKGLEWVSSISSDGSFTYYADSVKGRFTISRDNSKNTLYLQMNSLRAEDTAVYYCAEPFTEFDYRAQGTLVTVSS

SEQ ID NO: 7749 - protein, 116 aa, Artificial Sequence
  source: /note="Description of Artificial Sequence: Synthetic polypeptide"
EVQLLESGGGLVQPGGSLRLSCAASGFTFKRYEMSWVRQAPGKGLEWVSSISSDGSFTYYADSVKGRFTISRDNSKNTLYLQMNSLRAEDTAVYYCADPFTEIDYWGQGTQVTVSS

SEQ ID NO: 7750 - protein, 116 aa, Artificial Sequence
  source: /note="Description of Artificial Sequence: Synthetic polypeptide"
EVQLLESGGGLVQPGGSLRLSCAASGFTFADYDMAWVRQAPGKGLEWVSGIVDDGLMTYYADSVKGRFTISRDNSKNTLYLQMNSLRAEDTAVYYCAKPDVAFDYWGQGTLVTVSN

SEQ ID NO: 7751 - protein, 116 aa, Artificial Sequence
  source: /note="Description of Artificial Sequence: Synthetic polypeptide"
EVQLLESGGGLVHPGGSLRLSCAASGFTFKRYEMMWVRQAPGKGLEWVSSISSDGSFTYYADSVKGRFTISRDNSKNTLYLQMNSLRDEDTAVYYCAEPFTEFDYGGQGTLVTVSS

SEQ ID NO: 7752 - protein, 116 aa, Artificial Sequence
  source: /note="Description of Artificial Sequence: Synthetic polypeptide"
EVQLLESGGGWVQPGGSLRLSCAASGFTFKRYEMMWVRQAPGKGLEWVSSISSDGSFTYYADSVKGRFTISRDNSKNTLYLQMNSLRAEDTAVYYCADPFTEFDYWGQGTLVTVSS

SEQ ID NO: 7753 - protein, 116 aa, Artificial Sequence
  source: /note="Description of Artificial Sequence: Synthetic polypeptide"
EVQLLESGGGLVQPGGSLRLSCAASGFTFKRYEMMWVRQAPGKGLEWVSSISSDGSFTYYADSVKGRFTISRDNSKNTLYLQMNSLRAEDTAVYYCAEPFTEFDYWGHGTLVTVSS

SEQ ID NO: 7754 - protein, 116 aa, Artificial Sequence
  source: /note="Description of Artificial Sequence: Synthetic polypeptide"
EVQLLESGGGLVQPGGSLRLSCAASGFTFKRYEMTWVRQAPGKGLEWVSSISSDGSFTYYADSVKGRFTISRDNSKNTLYLQMNSLRAEDTAVYYCAEPFTEIDYRGQGTLVTVSS

SEQ ID NO: 7755 - protein, 116 aa, Artificial Sequence
  source: /note="Description of Artificial Sequence: Synthetic polypeptide"
EVQLLESGGGLVQPGGSLRLSCAASGFTFKKYEMMWVRQAPGKGLEWVSSISSDGSFTYYADSVKGRFTISRDNSKNTLYLQMNSLRAEDTAVYYCAEPFTEFDYWGHGTLVTVSS

SEQ ID NO: 7756 - protein, 116 aa, Artificial Sequence
  source: /note="Description of Artificial Sequence: Synthetic polypeptide"
EVQLLESGGGLVQPGGSLRLSCAASGFTFNSYEMMWVRQAPGKGLEWVSSISSDGSFTYYADSVKGRFTISRDNSKNTLYLQMNSLRAEDTAVYYCAEPFTEFDYWGHGTLVTVSS

SEQ ID NO: 7757 - protein, 116 aa, Artificial Sequence
  source: /note="Description of Artificial Sequence: Synthetic polypeptide"
EVQLLESGGGLVQPGGSLRLSCAASGFTFKRYEMMWVRQAPGKGLEWVSSISSDGSFTYYADSVKGRFTISRDNSKNTLYLQMNSLRAEDTAVYYCADPFTEFDYWGQGTLVTVSS

SEQ ID NO: 7758 - protein, 116 aa, Artificial Sequence
  source: /note="Description of Artificial Sequence: Synthetic polypeptide"
EVQLLESGGGLVQPGGSLRLSCAASGFTFKRYEMMWVRQAPGKGLEWVSSISSDGSFTYYADSVKGRFTISRDNSKNTLYLQMNSLRAEDTAVYYCADPFTEMDYWGHGTLVTVSS

SEQ ID NO: 7759 - protein, 116 aa, Artificial Sequence
  source: /note="Description of Artificial Sequence: Synthetic polypeptide"
EVQLLESGGGLVQPGGSLRLSCAASGFTFKRYEMMWVRQAPGKGLEWVSSISSDGSFTYYADSVKGRFTISRDNSKNTLYLQMNSLRAEDTAVYYCADPFTEFDYWGHGTLVTVSS

SEQ ID NO: 7760 - protein, 116 aa, Artificial Sequence
  source: /note="Description of Artificial Sequence: Synthetic polypeptide"
EVQLLESGGGLVQPGGSLRLSCAASGFTFKRYEMMWVRQAPGKGLEWVSSISSDGSFTYYADSVKGRFTISRDNSKNTLYLQMNSLRAEDTAVYYCAEPFTELDYWGHGTLVTVSS

SEQ ID NO: 7761 - protein, 123 aa, Artificial Sequence
  source: /note="Description of Artificial Sequence: Synthetic polypeptide"
EVQLLESGGGLVQPGGSLRLSCAASGFTFIGYAMAWVRQAPGKGLEWVSSIGPLGATTYYADSVKGRFTISRDNSKNTLYLQMNSLRAEDTAVYYCAKLPAGTSSHSVDFDYWGQGTLVTVSS

SEQ ID NO: 7762 - protein, 116 aa, Artificial Sequence
  source: /note="Description of Artificial Sequence: Synthetic polypeptide"
EVQLLESGGGLVQPGGSLRLSCAASGFTFKRYEMMWVRQAPGKGLEWVSSISSDGSFTYYAESVKGRFTISRDNSKNTLYLQMNSLRAEDTAVYYCAEPFTEFDYWGHGTLVTVSS

SEQ ID NO: 7763 - protein, 116 aa, Artificial Sequence
  source: /note="Description of Artificial Sequence: Synthetic polypeptide"
EVQLLESGGGLVQPGGSLRLSCAASGFTFNTYEMQWVRQAPGKGLEWVSSISSDGSFTYYADSVKGRFTISRDNSKNTLYLQMNSLRAEDTAVYYCAEPFTEFDYWGHGTLVTVSS

SEQ ID NO: 7764 - protein, 116 aa, Artificial Sequence
  source: /note="Description of Artificial Sequence: Synthetic polypeptide"
EVQLLESGGGLVQPGGSLRLSCAASGFTFNKYEMMWARQAPGKGLEWVSSISSDGSFTYYADSVKGRFTISRDNSRNTLYLQMNSLRAEDTAVYYCAEPFTEFDYWGHGTLVTVSS

SEQ ID NO: 7765 - protein, 116 aa, Artificial Sequence
  source: /note="Description of Artificial Sequence: Synthetic polypeptide"
EVQLSESGGGLVQPGGSLRLSCAASGFTFKRYEMMWVRQAPGKGLEWVSSISSDGSFTYYADSVKGRFTISRDNSKNTLYLQMNSLRAEDTAVYYCADPFTEFDYWGQGTLVTVSS

SEQ ID NO: 7766 - protein, 116 aa, Artificial Sequence
  source: /note="Description of Artificial Sequence: Synthetic polypeptide"
EVQLLESGGGLVQPGGSLRLSCAASGFTFKRYEMMWVRQTPGKGLEWVSSISSDGSFTYYADSVKGRFTISRDNSKNTLYLQMNSLRAEDTAVYYCAEPFTEFDYWGQGTLVTVSS

SEQ ID NO: 7767 - protein, 116 aa, Artificial Sequence
  source: /note="Description of Artificial Sequence: Synthetic polypeptide"
EVQLLESGGGLVQPGGSLRLSCAASGFTFKRYEMMWVRQAPGKGLEWVSSISSDGSFTYYADSVKGRFTISRDNSKNTLYLEMNSMRAEDTAVYYCAEPFTEFDNWGQGTLVTVSS

SEQ ID NO: 7768 - protein, 116 aa, Artificial Sequence
  source: /note="Description of Artificial Sequence: Synthetic polypeptide"
EVQLLESGGGLVQPGGSLRLSCAASGFTFKRYEMMWVRQAPGKGLEWVSSISSDGSFTYYADSVKGRFTISRDNSKNTLYLQMNSLRAEDTAVYYCAEPFTEFDYWGQGTQVTVSS

SEQ ID NO: 7769 - protein, 116 aa, Artificial Sequence
  source: /note="Description of Artificial Sequence: Synthetic polypeptide"
EVQLLESGGGLVQPGGSLRLSCAASGFNFKRYEMTWVRQAPGKGLEWVSSISSDGSFTYYADSVKGRFTISRDNSKNTLYLQMNSLRAEDTAVYYCADPFTEFDYWGQGTLVTVSS

SEQ ID NO: 7770 - protein, 116 aa, Artificial Sequence
  source: /note="Description of Artificial Sequence: Synthetic polypeptide"
EVQLLESGGDLVQPGGSLRLSCAASGFTFKRYEMMWVRQAPGKGLEWVSSISSDGSFTYYADSVKGRFTISRDNSKNTLYLQMNSLRAEDTAVYYCAEPFTEFDYRGQGTLVTVSS

SEQ ID NO: 7771 - protein, 116 aa, Artificial Sequence
  source: /note="Description of Artificial Sequence: Synthetic polypeptide"
EVQLLESGGGLVQPGGSLRLSCAASGFTFKRYEMSWVRQAPGKGLEWVSSISSDGSFTYYADSVKGRFTISRDNSKNTLYLQMNSLRAEDTAVYYCAEPFTEFDYWGRGTLVTVSS

SEQ ID NO: 7772 - protein, 116 aa, Artificial Sequence
  source: /note="Description of Artificial Sequence: Synthetic polypeptide"
EVQLLESGGGLVQPGGSLRLSCAASGFTFADYEMTWVRQAPGKGLEWVSSITSDGVSTYYADSVKGRFTISRDNSKNTLYLQMNSLRAEDTAVYYCAKPSVQFDYWGQGTLVTVSS

SEQ ID NO: 7773 - protein, 124 aa, Artificial Sequence
  source: /note="Description of Artificial Sequence: Synthetic polypeptide"
EVQLLESGGGLVQPGGSLRLSCAASGFTFEAYPMSWVRQAPGKGLEWVSSISPLGLWTYYADSVKGRFTISRDNSKNTLYLQMNSLRAEDTAVYYCAKLSAGAETHVYRLFDYWGQGTLVTVSS

SEQ ID NO: 7774 - protein, 122 aa, Artificial Sequence
  source: /note="Description of Artificial Sequence: Synthetic polypeptide"
EVQLLESGGGLVQPGGSLRLSCAASGFTFGNYEMMWVRQAPGKGLEWVSSIGVLGHTTYYADSVKGRFTISRDNSKNTLYLQMNSLRAEDTAVYYCAKLMSLRTFENLFDYWGQGTLVTVSS

SEQ ID NO: 7775 - protein, 121 aa, Artificial Sequence
  source: /note="Description of Artificial Sequence: Synthetic polypeptide"
EVQLLESGGGLVQPGGSLRLSCAASGFTFTKYPMAWVRQAPGKGLEWVSGIDANGNRTYYADSVKGRFTISRDNSKNTLYLQMNSLRAEDTAVYYCAEGTWRRHFAIFDYWGQGTLVTVSS

SEQ ID NO: 7776 - protein, 123 aa, Artificial Sequence
  source: /note="Description of Artificial Sequence: Synthetic polypeptide"
EVQLLESGGGLVQPGGSLRLSCAASGFTFDLYDMMWVRQAPGKGLEWVSSISDLGTLTYYADSVKGRFTISRDNSKNTLYLQMNSLRAEDTAVYYCAKNGFRVTSNDRRFDYWGQGTLVTVSS

SEQ ID NO: 7777 - protein, 119 aa, Artificial Sequence
  source: /note="Description of Artificial Sequence: Synthetic polypeptide"
EVQLLESGGGLVQPGGSLRLSCAASGFTFTGGDMWWVRQAPGKGLEWVSMIEGGGVTTYYADSVKGRFTISRDNSKNTLYLQMNSLRAEDTAVYYCAELDLRTGQFDYWGQGTLVTVSS

SEQ ID NO: 7778 - protein, 118 aa, Artificial Sequence
  source: /note="Description of Artificial Sequence: Synthetic polypeptide"
EVQLLESGGGLVQPGGSLRLSCAASGFTFSAYTMGWVRQAPGKGLEWVSLIGDRGSWTYYADSVKGRFTISRDNSKNTLYLQMNSLRAEDTAVYYCAEPSDPTKFDYWGQGTLVTVSS

SEQ ID NO: 7779 - protein, 118 aa, Artificial Sequence
  source: /note="Description of Artificial Sequence: Synthetic polypeptide"
EVQLLESGGGLVQPGGSLHLSCAASGFTFSAYTMGWVRQAPGKGLEWVSLIGDRGSWTYYADSVKGRFTISRDNSKNTLYLQMNSLRAEDTAVYFCADPSDPTKFDYWGQGTLVTVSS

SEQ ID NO: 7780 - protein, 118 aa, Artificial Sequence
  source: /note="Description of Artificial Sequence: Synthetic polypeptide"
EVQLLESGGGLVQPGGSLRLSCAASGFTFSAYTMGWVRQAPGKGLEWVSLIGDRGSWTYYADSVKGRFTISRDNSKNTLYLQMNSLRAEDTAVYYCADPSDPTKFDYWGQGTLVTVSS

SEQ ID NO: 7781 - protein, 118 aa, Artificial Sequence
  source: /note="Description of Artificial Sequence: Synthetic polypeptide"
EVQLLESGGGLVQPGGSLRLSCAASGFTFSAYTMGWVRQAPGKGLEWVSLIGDRGSWTYYADSVKGRFTISRDNSKNTLYLQMSSLRAEDTAVYYCADPSDPTKFDYWGQGTLVTVSS

SEQ ID NO: 7782 - protein, 118 aa, Artificial Sequence
  source: /note="Description of Artificial Sequence: Synthetic polypeptide"
EVQLLESGGGLVQPGGSLRLSCAASGFTFPAYTMGWVRQAPGKGLEWVSLIGDRGSWTYYADSVKGRFTISRDDSKNTLYLQMNSLRVEDTAVYYCAEPSDPTMFVYWGQGTLVTVSS

SEQ ID NO: 7783 - protein, 121 aa, Artificial Sequence
  source: /note="Description of Artificial Sequence: Synthetic polypeptide"
EVQLLESGGGLVQPGGSLRLSCAASGFTFRRYVMGWVRQAPGKGLEWVSWIEADGRTTYYADSVKGRFTISRDNSKNTLYLQMNSLRAEDTAVYYCAKGLTDQHVIEFDYWGQGTLVTVSS

SEQ ID NO: 7784 - protein, 118 aa, Artificial Sequence
  source: /note="Description of Artificial Sequence: Synthetic polypeptide"
EVQLLESGGGLVQPGGSLRLSCAASGFTFSAYTMGWVRQAPGKGLEWVSLIGDRGSWTYYADSVKGRFTISRDNSKNTLYLQMNSLRAEDTAVYYCAEPSDPTMFVYWGQGTLVTVSS

SEQ ID NO: 7785 - protein, 118 aa, Artificial Sequence
  source: /note="Description of Artificial Sequence: Synthetic polypeptide"
EVQLLESGGGLVQPGGSLRLSCAASGFTFSAYTMGWVRQAPGKGLEWVSLIGDRGSWTYYADSVKGRFTISRDNSKNTLYLQMNSLRAEDTAVYYCADPSDPTMFDYWGQGTLVTVSS

SEQ ID NO: 7786 - protein, 118 aa, Artificial Sequence
  source: /note="Description of Artificial Sequence: Synthetic polypeptide"
EVQLLESGGGMVQPGGSLRLSCAASGFTFSAYTMGWVRQAPGKGLEWVSLIGDRGSWTYYADSVKGRFTISRDNSKNTLYLQMNSMRAEDTAVYYCADPSDPTKFDYWGQGTLVTVSS

SEQ ID NO: 7787 - protein, 118 aa, Artificial Sequence
  source: /note="Description of Artificial Sequence: Synthetic polypeptide"
EVQLLESGGGLVQPGGSLRLSCAASGFTFSAYTMGWVRQAPGKGLEWVTLIGDRGSWTYYADSVKGRFTISRDNSKNTLYLQMNSLRAEDTAVYYCAEPSDPTMFDYWGQGTLVTVSS

SEQ ID NO: 7788 - protein, 118 aa, Artificial Sequence
  source: /note="Description of Artificial Sequence: Synthetic polypeptide"
EVQLLESGGGLVQPGGSLRLSCAASGFTFTAYTMGWVRQAPGKGLEWVSLIGDRGSWTYYADSVKGRFTISRDNSKNTLYLQMNSLRAEDTAVYYCAEPSDPTKLDYWGQGTLVTVSS

SEQ ID NO: 7789 - protein, 118 aa, Artificial Sequence
  source: /note="Description of Artificial Sequence: Synthetic polypeptide"
EVQLSESGGGLVQPGGSLRLTCAASGFTFSAYTMGWVRQAPGKGLEWVSLIGDRGSWTYYADSVKGRFTISRDNSKNTLYLQMNSLRAEDTAVYYCADPSDPTKFVYWGQGTLVTVSS

SEQ ID NO: 7790 - protein, 118 aa, Artificial Sequence
  source: /note="Description of Artificial Sequence: Synthetic polypeptide"
EVQLLESGGGLVQPGGSLRLSCAASGFTFSAYTMGWVRQAPGKGLEWVSLIGDRGSWTYYADSVKGRFTISRDNSKNTLYLQMNSLRAEDTAVYYCADPSDPTKFVYWGQGTLVTVSS

SEQ ID NO: 7791 - protein, 118 aa, Artificial Sequence
  source: /note="Description of Artificial Sequence: Synthetic polypeptide"
EVQLLESGGGLVQPGGSLRLSCAASGFTFSAYTMGWVRQAPGKGLEWVSLIGDRGSWTYYADSVKGRFTISRDNSKNTLYLQMNSLRAEDTAVYYCAEPSDPTKFVYWGQGTPVTVSS

SEQ ID NO: 7792 - protein, 117 aa, Artificial Sequence
  source: /note="Description of Artificial Sequence: Synthetic polypeptide"
VQLLESGGGLVQPGGSLRLSCAASGFTFSAYTMGWVRQAPGKGLEWVSLIGDRGSWTYYADSVKGRFTISRDNSRNMLYLQMKSLRAEDTAVYYCADPSDPTKFVYWGQGTQVTVSS

SEQ ID NO: 7793 - protein, 118 aa, Artificial Sequence
  source: /note="Description of Artificial Sequence: Synthetic polypeptide"
EVQLLESGGGLVQPGGSLRLSCAASGFTFSAYTMGWVRQAPGKGLEWVSLIGDRGSWTYYADSVKGRFTIFRDNSKNTLYLQMNSLRAEDTAVYYCADPSDPTKFVYWGQGTLVTVSS

SEQ ID NO: 7794 - protein, 117 aa, Artificial Sequence
  source: /note="Description of Artificial Sequence: Synthetic polypeptide"
EVQLLESGGGLVQPGGSLRLSCAASGFTFDGYRMGWVRQAPGKGLEWVSSIAPDGNYTYYADSVKGRFTISRDNSKNTLYLQMNSLRAEDTAVYYCAKFWGMQFDYWGQGTLVTVSS

SEQ ID NO: 7795 - protein, 118 aa, Artificial Sequence
  source: /note="Description of Artificial Sequence: Synthetic polypeptide"
EVQLLESGGGLLQPGGSLRLSCAASGFTFSDYTMGWVRQAPGKGLEWVSLIGDRGSWTYYADSVKGRFTISRDNSKNTLYLQMNSLRAEDTAVYYCAEPSDPTKFDYWGRGTLVTVSS

SEQ ID NO: 7796 - protein, 118 aa, Artificial Sequence
  source: /note="Description of Artificial Sequence: Synthetic polypeptide"
EVQLLESGGGLVQPGGSLRLSCAASGFTFSAYTMGWVRQAPGKGLEWVSLIGDRGSWTYYADSVKGRFTISRDNSKNTLYLQMNSLRAEDTAVYYCAEPSDPTKFVYWGQGTLVTVSS

SEQ ID NO: 7797 - protein, 118 aa, Artificial Sequence
  source: /note="Description of Artificial Sequence: Synthetic polypeptide"
EVQLLESGGGLVQPGGSLRLSCAASGFTFSAYTMGWVRQAPGKGLEWVSLIGDRGTWTYYADPVKGRFTISRDNSKNTLYLQMNSLRAEDTAVYYCADPSDPTKFDYWGQGTLVTVSS

SEQ ID NO: 7798 - protein, 118 aa, Artificial Sequence
  source: /note="Description of Artificial Sequence: Synthetic polypeptide"
EVQLLESGGGLVQPGGSLRLSCAASGFTFSAYTMGWVRQAPGKGLEWVSLIGDRGSWTYYADSVKGRFTVSRDNSKNTLYLQMNSLRAEDTAVYYCAEPSDPTKFDYWGQGTLVTVSS

SEQ ID NO: 7799 - protein, 118 aa, Artificial Sequence
  source: /note="Description of Artificial Sequence: Synthetic polypeptide"
EVQLLESGGGLVQPGGSLRLSCAASGFTFSAYTMGWVRQAPGMGLEWVSLIGDRGSWTYYADSVKGRFTISRDNSKNTLYLQMNSLRAEDTAVYYCAEPSDPTKFDYWGQGTLVTVSS

SEQ ID NO: 7800 - protein, 116 aa, Artificial Sequence
  source: /note="Description of Artificial Sequence: Synthetic polypeptide"
EVQLLESGGGLVQPGGSLRLSCAASGFTFDNYKMYWVRQAPGKGLEWVSSISEIGNLTYYADSVKGRFTISRDNSKNTLYLQMNSLRAEDTAVYYCAIALTRFDYWGQGTLVTVSS

SEQ ID NO: 7801 - protein, 122 aa, Artificial Sequence
  source: /note="Description of Artificial Sequence: Synthetic polypeptide"
EVQLLESGGGLVQPGGSLRLSCAASGFTFASYRMYWVRQAPGKGLEWVSYIDPPGSRTYYADSVKGRFTISRDNSKNTLYLQMNSLRAEDTAVYYCAKSLNLSFPYINFDYWGQGTLVTVSS

SEQ ID NO: 7802 - protein, 116 aa, Artificial Sequence
  source: /note="Description of Artificial Sequence: Synthetic polypeptide"
EVQLLESGGGLVQPGGSLRLSCAASGFTFERYEMLWVRQAPGKGLEWVSRISHSGRTTYYADSVKGRFTISRDNSKNTLYLQMNSLRAEDTAVYYCAQLDGPFDYWGQGTLVTVSS

SEQ ID NO: 7803 - protein, 122 aa, Artificial Sequence
  source: /note="Description of Artificial Sequence: Synthetic polypeptide"
EVQLLESGGGLVQPGGSLRLSCAASGFTFKRYYMDWVRQAPGKGLEWVSRINHNGSVTYYADSVKGRFTISRDNSKNTLYLQMNSLRAEDTAVYYCAKMPQGTSDWYYFDYWGQGTLVTVSS

SEQ ID NO: 7804 - protein, 116 aa, Artificial Sequence
  source: /note="Description of Artificial Sequence: Synthetic polypeptide"
EVQLLESGGGLVQPGGSLRLSCAASGFTFSKYDMSWVRQAPGKGLEWVSTILEDGLTTYYADSVKGRFTISRDNSKNTLYLQMNSLRAEDTAVYYCAKPGRLFDYWGQGTLVTVSS

SEQ ID NO: 7805 - protein, 120 aa, Artificial Sequence
  source: /note="Description of Artificial Sequence: Synthetic polypeptide"
EVQLLESGGGLVQPGGSLRLSCAASGFTFASYPMGWVRQAPGKGLEWVSSIGPIGFTTYYADSVKGRFTISRDNSKNTLYLQMNSLRAEDTAVYYCAEMKSPYKPQFDYWGQGTLVTVSS

SEQ ID NO: 7806 - protein, 116 aa, Artificial Sequence
  source: /note="Description of Artificial Sequence: Synthetic polypeptide"
EVQLLESGGGLVQPGGSLRLSCAASGFTFSDYPMTWVRQAPGKGLEWVSTILSPGTETYYADSVKGRFTISRDNSKNTLYLQMNSLRAEDTAVYYCAKAEKDFDYWGQGTLVTVSS

SEQ ID NO: 7807 - protein, 116 aa, Artificial Sequence
  source: /note="Description of Artificial Sequence: Synthetic polypeptide"
EVQLLESGGGLVQPGGSLRLSCAASGFTFEGGEMGWVRQAPGKGLEWVSMIPMDGSATYYADSVKGRFTISRDNSKNTLYLQMNSLRAEDTAVYYCAKAGEVFDYWGQGTLVTVSS

SEQ ID NO: 7808 - protein, 116 aa, Artificial Sequence
  source: /note="Description of Artificial Sequence: Synthetic polypeptide"
EVQLLESGGGLVQPGGSLRLSCAASGFTFREYHMKWARQAPGKGLEWVSGISRDGMNTYYADSVKGRFTISRDNSKNTLYLQMNSLRAEDTAVYYCAIQLALFDYWGQGTLVTVSS

SEQ ID NO: 7809 - protein, 121 aa, Artificial Sequence
  source: /note="Description of Artificial Sequence: Synthetic polypeptide"
EVQLLESGGGLVQPGGSLRLSCAASGFTFRDYEMLWARQAPGKGLEWVSGILPSGGATYYADSVKGRFTISRDNSKNTLYLQMNSLRAEDTAVYYCAKAGSGNGPILFDYWGQGTLVTVSS

SEQ ID NO: 7810 - protein, 122 aa, Artificial Sequence
  source: /note="Description of Artificial Sequence: Synthetic polypeptide"
EVQLLESGGGLVQPGGSLRLSCAASGFTFKEHDMFWVRQAPGKGLEWVSGIGAEGVWTYYADSVKGRFTISRDNSKNTLYLQMNSLRAEDTAVYYCAEPTMSNGSQSRFDYWGQGTLVTVSS

SEQ ID NO: 7811 - protein, 123 aa, Artificial Sequence
  source: /note="Description of Artificial Sequence: Synthetic polypeptide"
EVQLLESGGGLVQPGGSLRLSCAASGFTFDNTEMAWVRQAPGKGLEWVSGIIEDGNRTYYADSVKGRFTISRDNSKNTLYLQMNSLRAEDTAVYYCAKIRNLHWDVGRQFDYWGQGTLVTVSS

SEQ ID NO: 7812 - protein, 123 aa, Artificial Sequence
  source: /note="Description of Artificial Sequence: Synthetic polypeptide"
EVQLLESGGGLVQPGGSLRLSCAASGFTFDNTEMAWVRQAPGKGLEWVSGITEDGNRTYYADSVKGRFTISRDNSKNTLYLQMNSLRAEDTAVYYCAKIRNLHWDVGRQFDYWGQGTLVTVSS

SEQ ID NO: 7813 - protein, 123 aa, Artificial Sequence
  source: /note="Description of Artificial Sequence: Synthetic polypeptide"
EVQLLESGGGLVQPGGSLRLSCAASGFTFDNTEMAWVRQAPGKGLEWVSGITEDGNRTYYADSVKGRFTISRDNSKNTLYLQMNNLRAEDTAVYYCAKIRNLHWDVGRQFDYWGQGTLVTVSS

SEQ ID NO: 7814 - protein, 123 aa, Artificial Sequence
  source: /note="Description of Artificial Sequence: Synthetic polypeptide"
EVQLLESGGGLVQPGGSLRLSCAASGFTFDNTEMAWIRQAPGKGLEWVSGITEDGNRTYYADSVKGRFTISRDNFKNTLYLQMNSLRAEDTAVYYCAKIRNLHWDVGRQFDYWGQGTLVTVSS

SEQ ID NO: 7815 - protein, 123 aa, Artificial Sequence
  source: /note="Description of Artificial Sequence: Synthetic polypeptide"
EVQLLESGGGLVQPGGSLRLSCAASGFTFDNTEMAWVRQAPGKGLEWVSGITEDGNRTYYADSVKGRFTISRDNSMNTLYLQMNSLRAEDTAVYYCAKIRNLHWDVGRQFVYWGQGTLVTVSS

SEQ ID NO: 7816 - protein, 120 aa, Artificial Sequence
  source: /note="Description of Artificial Sequence: Synthetic polypeptide"
EVQLLESGGGLVQPGGSLRLSCAASGFTFLAYWMVWVRQAPGKGLEWVSSISPSGTHTYYADSVKGRFTISRDNSKNTLYLQMNSLRVEDTAVYYCAKYTEPGLGSFDYWGQGTLVTVSS

SEQ ID NO: 7817 - protein, 123 aa, Artificial Sequence
  source: /note="Description of Artificial Sequence: Synthetic polypeptide"
EVQLLESGGGLVQPGGSLRLSCAASGFTFDNTEMAWIRQAPGKGLEWVSGIIEDGNRTYYADSVKGRFTISRDNSKNTLYLQMNSLRAEDTAVYYCAKIRNLHWDVGRQFDYWGQGTLVTVSS

SEQ ID NO: 7818 - protein, 123 aa, Artificial Sequence
  source: /note="Description of Artificial Sequence: Synthetic polypeptide"
EVQLLESGGGLVQPGGSLRLSCAASGFTFDNTEMAWIRQAPGKGLEWVSGITEDGNRTYYADSVKGRFTISRDNSKNTLYLQMNSLRAEDTAVYYCAKIRNLHWDVGRQFDYWGQGTLVTVSS

SEQ ID NO: 7819 - protein, 123 aa, Artificial Sequence
  source: /note="Description of Artificial Sequence: Synthetic polypeptide"
EVQLLESGGGLVQPGGSLRLSCAASGFTFDNTEMAWIRQAPGKGLEWVSGITEDGNRTYYADSVKGRFTISRDNSKNALYLQMNSLRAEDTAVYYCAKIRNLHWDVGRQFDYWGLGTLVTVSS

SEQ ID NO: 7820 - protein, 123 aa, Artificial Sequence
  source: /note="Description of Artificial Sequence: Synthetic polypeptide"
EVQLLESGGGLVQPGGSLRLSCAASGFTFDNTEMAWVRQAPGKGLEWVSGITEDGNRTYYADSVKGRFTISRDNTKNTLYLQMNSLRAEDTAVYYCAKIRNLHWDVGRQFVYWGQGTLVTVSS

SEQ ID NO: 7821 - protein, 123 aa, Artificial Sequence
  source: /note="Description of Artificial Sequence: Synthetic polypeptide"
EVQLLESGGGLVQPGGSLRLSCAASGFTFDNTEMAWIRQAPGKGLEWVSGIIEDGNRTYYADSVKGRFTISRDNSKNRLYLQMNSLRAEDTAVYYCAKIRNLHWDVGRQFDYWGQGTLVTVSS

SEQ ID NO: 7822 - protein, 123 aa, Artificial Sequence
  source: /note="Description of Artificial Sequence: Synthetic polypeptide"
EVQLLESGGGLVQPGGSLRLSCAASGFTFDNTEMAWVRQAPGKGLEWVSGITEDGNRTYYADSVKGRFTISRDNSKNTLYLQMNSLRAEDTAVYHCAKIRNLHWDVGRQFDYWGQGTLVTVSS

SEQ ID NO: 7823 - protein, 123 aa, Artificial Sequence
  source: /note="Description of Artificial Sequence: Synthetic polypeptide"
EVQLLESGGGLVQPEGSLRLSCAASGFTFDNTEMAWVRQAPGKGLEWVSGIIEDGNRTYYADSVKGRFTISRDNSKNTLYLQMNSLRAEDTAVYYCAKIRNLHWDVGRQFDYWGQGTLVTVSS

SEQ ID NO: 7824 - protein, 123 aa, Artificial Sequence
  source: /note="Description of Artificial Sequence: Synthetic polypeptide"
EVQLLESGGGLVQPGGSLRLSCAASGFTFDNTEMAWVRQAPGKGLEWVSGISEDGNRTYYADSVKGRFTISRDNSKNTLYLQMNSLRAEDSAVYYCAKIRNLHWDVGRQFVYWGQGTLVTVSS

SEQ ID NO: 7825 - protein, 123 aa, Artificial Sequence
  source: /note="Description of Artificial Sequence: Synthetic polypeptide"
EVQLLESGGGLVEPGGSLRLSCAASGFTFDNTEMAWVRQAPGKGLEWVSGITEDGNRTYYADSVKGRFTISRDNSKNTLYLQMSSLRAEDTAVYYCAKIRNLHWDVGRQFDYWGQGTLVTVSS

SEQ ID NO: 7826 - protein, 123 aa, Artificial Sequence
  source: /note="Description of Artificial Sequence: Synthetic polypeptide"
EVQLLESGGGLVQPGGSLRLSCAASGFTFDNTEMAWVRQAPGKGLEWVSGISEDGNRTYYADSVKGRFTISRDNSKNTLYLQMNSLRAEDTAVYHCAKIRNLHWDVGRQFDYWGQGTLVTVSS

SEQ ID NO: 7827 - protein, 119 aa, Artificial Sequence
  source: /note="Description of Artificial Sequence: Synthetic polypeptide"
EVQLLESGGGLVQPGGSLRLSCAASGFTFSNYEMGWVRQAPGKGLEWVSVISEVGSLTYYADSVKGRFTISRDNSKNTLYLQMNSLRAEDTAVYYCAKPHDSSIGFDYWGQGTLVTVSS

SEQ ID NO: 7828 - protein, 123 aa, Artificial Sequence
  source: /note="Description of Artificial Sequence: Synthetic polypeptide"
EVQLLESGGGLVQPGGSLRLSCAASGFTFDNTEMAWVRQAPGKGLEWVSGITEDGNRTYYADSVKGRFIISRDNSKNTLNLQMNSLRAEDTAVYYCAKIRNLHWDVGRQFDYWGQGTLVTVSS

SEQ ID NO: 7829 - protein, 123 aa, Artificial Sequence
  source: /note="Description of Artificial Sequence: Synthetic polypeptide"
EVQLLESGGGLVQPGGSLRLSCAASGFTFDNTEMAWIRQAPGRGLEWVSGVTEDGNRTYYADSVKGRFTISRDNSKNTLYLQMNSLRAEDTAVYYCAKIRNLHWDVGRQFDYWGQGTLVTVSS

SEQ ID NO: 7830 - protein, 123 aa, Artificial Sequence
  source: /note="Description of Artificial Sequence: Synthetic polypeptide"
EVQLLESGGGLVQPGGSLRLSCEASGFTFDNTEMAWIRQAPGKGLEWVSGIIEDGNRTYYADSVKGRFTISRDNTKNTLYLQMNSLRAEDTAVYYCAKIRNLHWDVGRQFDYWGQGTLVTVSS

SEQ ID NO: 7831 - protein, 123 aa, Artificial Sequence
  source: /note="Description of Artificial Sequence: Synthetic polypeptide"
EVQLLESGGGLVQPGGSLRLSCAASGFTFDNTEMAWIRQAPGKGLEWVSGITEDGDRTYYADSVKGRFTISRDNSKSSLYLQMNSLRAEDTAVYYCAKIRNLHWDVGRQFDYWGQGTLVTVSS

SEQ ID NO: 7832 - protein, 123 aa, Artificial Sequence
  source: /note="Description of Artificial Sequence: Synthetic polypeptide"
EVQLLESGGGSVQPGGSLRLSCAASGFTFDNTEMAWVRQAPGKGLEWVSGITEDGNRTYYADSVKGRFTISRDNSKNTLYLQMNSLRAEDTAVYYCAKIRNLHWDVGRQFVYWGQGTLVTVSS

SEQ ID NO: 7833 - protein, 123 aa, Artificial Sequence
  source: /note="Description of Artificial Sequence: Synthetic polypeptide"
EVQLLESGGGLVQPGGSLRLSCAASGFTFGSAEMGWVRQAPGKGLEWVSGISRPGQVTYYADSVKGRFTISRDNSKNTLYLQMNSLRAEDTAVYYCAKIRNLHWDVGRQFDYWGQGTLVTVSS

SEQ ID NO: 7834 - protein, 119 aa, Artificial Sequence
  source: /note="Description of Artificial Sequence: Synthetic polypeptide"
EVQLLESGGGLVQPGGSLRLSCAASGFTFDDGTMGWARQAPGKGLEWVSLILPSGSRTYYADSVKGRFTISRDNSKNTLYLQMNSLRAEDTAVYYCAKHSLTNRPFDYWGQGTLVTVSS

SEQ ID NO: 7835 - protein, 116 aa, Artificial Sequence
  source: /note="Description of Artificial Sequence: Synthetic polypeptide"
EVQLLESGGGLVQPGGSLRLSCAASGFTFSKYDMRWARQAPGKGLEWVSDIDAVGTRTYYADSVKGRFTISRDNSKNTLYLQMNSLRAEDTAVYYCAIPGGTFDYWGQGTLVTVSS

SEQ ID NO: 7836 - protein, 116 aa, Artificial Sequence
  source: /note="Description of Artificial Sequence: Synthetic polypeptide"
EVQLLESGGGLVQPGGSLRLSCAASGFTFEMYGMMWARQAPGKGLEWVSSIEGAGHATYYADSVKGRFTISRDNSKNTLYLQMNSLRAEDTAVYYCAIVLGMFDYWGQGTLVTVSS

SEQ ID NO: 7837 - protein, 124 aa, Artificial Sequence
  source: /note="Description of Artificial Sequence: Synthetic polypeptide"
EVQLLESGGGLVQPGGSLRLSCAASGFTFLQYPMGWVRQAPGKGLEWVSTISPVGLTTYYADSVKGRFTISRDNSKNTLYLQMNSLRAEDTAVYYCAKLFEGSRIQRDVGFDYWGQGTLVTVSS

SEQ ID NO: 7838 - protein, 116 aa, Artificial Sequence
  source: /note="Description of Artificial Sequence: Synthetic polypeptide"
EVQLLESGGGLVQPGGSLRLSCAASGFTFWSYDMTWVRQAPGKGLEWVSSIMASGDDTYYADSVKGRFTISRDNSKNTLYLQMNSLRAEDTAVYYCAKWDRDFDYWGQGTLVTVSS

SEQ ID NO: 7839 - protein, 123 aa, Artificial Sequence
  source: /note="Description of Artificial Sequence: Synthetic polypeptide"
EVQLLESGGGLVQPGGSLRLSCAASGFTFEKYQMGWARQAPGKGLEWVSSIRGSGLVTYYADSVKGRFTISRDNSKNTLYLQMNSLRAEDTAVYYCAKVHTTLHTEVIGFDYWGQGTLVTVSS

SEQ ID NO: 7840 - protein, 116 aa, Artificial Sequence
  source: /note="Description of Artificial Sequence: Synthetic polypeptide"
EVQLLESGGGLVQPGGSLRLSCAASGFTFSQYTMYWARQAPGKGLEWVSEISHSGSNTYYADSVKGRFTISRDNSKNTLYLQMNSLRAEDTAVYYCAISGLHFDYWGQGTLVTVSS

SEQ ID NO: 7841 - protein, 120 aa, Artificial Sequence
  source: /note="Description of Artificial Sequence: Synthetic polypeptide"
EVQLLESGGGLVQPGGSLRLSCAASGFTFSDYAMAWVRQAPGKGLEWVSRIGVEGGDTYYADSVKGRFTISRDNSKNTLYLQMNSLRAEDTAVYYCAKLLRLYRLGFDYWGQGTLVTVSS

SEQ ID NO: 7842 - protein, 121 aa, Artificial Sequence
  source: /note="Description of Artificial Sequence: Synthetic polypeptide"
EVQLLESGGGLVQPGGSLRLSCAASGFTFAKYDMTWVRQAPGKGLEWVSKINSDGGLTYYADSVKGRFTISRDNSKNTLYLQMNSLRAEDTAVYYCAKGLHGRGFVIFDYWGQGTLVTVSS

SEQ ID NO: 7843 - protein, 124 aa, Artificial Sequence
  source: /note="Description of Artificial Sequence: Synthetic polypeptide"
EVQLLESGGGLVQPGGSLRLSCAASGFTFSRYDMVWVRQAPGKGLEWVSRINSMGLATYYADSVKGRFTISRDNSKNTLYLQMNSLRAEDTAVYYCAKDYSVAPHGYPLGFDYWGQGTLVTVSS

SEQ ID NO: 7844 - protein, 122 aa, Artificial Sequence
  source: /note="Description of Artificial Sequence: Synthetic polypeptide"
EVQLLESGGGLVQPGGSLRLSCAASGFTFKDYSMMWVRQAPGKGLEWVSTITDNGTSTYYADSVKGRFTISRDNSKNTLYLQMNSLRAEDTAVYYCAKHMSLATYLQFFDYWGQGTLVTVSS

SEQ ID NO: 7845 - protein, 123 aa, Artificial Sequence
  source: /note="Description of Artificial Sequence: Synthetic polypeptide"
EVQLLESGGGLVQPGGSLRLSCAASGFTFMEYDMLWVRQAPGKALEWVSRISSDGLWTYYADSVKGRFTISRDNSKNTLYLQMNSLRAEDTAVYYCAKGVSALAPFDIGFDYWGQGTLVTVSS

SEQ ID NO: 7846 - protein, 121 aa, Artificial Sequence
  source: /note="Description of Artificial Sequence: Synthetic polypeptide"
EVQLLESGGGLVQPGGSLRLSCAASGFTFKEYNMAWVRQAPGKGLEWVSSINFAGRTTYYADSVKGRFTISRDNSKNTLYLQMNSLRAEDTAVYYCAKLSLPLDIFSFDYWGQGTLVTVSS

SEQ ID NO: 7847 - protein, 116 aa, Artificial Sequence
  source: /note="Description of Artificial Sequence: Synthetic polypeptide"
EVQLLESGGGLVQPGGSLRLSCAASGFTFGDYGMNWVRQAPGKGLEWVSHISSNGRFTYYADSVKGRFTISRDNSKNTLYLQMNSLRAEDTAVYYCAETSGYFDYWGQGTLVTVSS

SEQ ID NO: 7848 - protein, 116 aa, Artificial Sequence
  source: /note="Description of Artificial Sequence: Synthetic polypeptide"
EVQLLESGGGLVQPGGSLRLSCAASGFTFGDYGMNWVRQAPGKGLEWVSHISSNGRFTYYADSVKGRFTISRDNSKNMLYLRMNSLRAEDTAVYYCAETSGYYEYWGQGTLVTVSS

SEQ ID NO: 7849 - protein, 120 aa, Artificial Sequence
  source: /note="Description of Artificial Sequence: Synthetic polypeptide"
EVQLLESGGGLVQPGGSLRLSCAASGFTFEEYVMSWVRQAPGKGLEWVSTISPIGLTTYYADSVKGRFTISRDNSKNTLYLQMNSLRAEDTAVYYCAEFPLIILPDFDYWGQGTLVTVSS

SEQ ID NO: 7850 - protein, 116 aa, Artificial Sequence
  source: /note="Description of Artificial Sequence: Synthetic polypeptide"
EVQLLESGGGLVQPGGSLRLSCAASGFTFGDYGMNWVRQAPGKGLEWVSHISSNGRFTYYADSVKGRFTISRDNSKNTLYLQMNSLRAEDTAVYYCAETSGYFEYWGQGTLVTVSS

SEQ ID NO: 7851 - protein, 116 aa, Artificial Sequence
  source: /note="Description of Artificial Sequence: Synthetic polypeptide"
EVQLLESGGGLVQPGGSLRLSCAASGFTFGDYGMNWVRQAPGKGLEWVSHISSNGRFTYYADSVKGRFTISRDNSKNTLYLQMNSLRAEDTAVYYCAETSSYFEYWGQGTLVTVSS

SEQ ID NO: 7852 - protein, 116 aa, Artificial Sequence
  source: /note="Description of Artificial Sequence: Synthetic polypeptide"
EVQLLESGGGLVQPGGSLRLSCAASGFTFGDYGMNWVRQAPGKGLEWVSHISSNGRFTYYADSVKGRFTISRDNSKNTLFLQMNSLRAEDTAVYYCAETSGYYEYWGHGTLVTVSS

SEQ ID NO: 7853 - protein, 116 aa, Artificial Sequence
  source: /note="Description of Artificial Sequence: Synthetic polypeptide"
EVQLLESGGGLVQPGGSLRLSCAASGFAFGDYGMNWVRQAPGKGLEWVSHISSNGRFTYYADSVKGRFTISRDNSKNTLYLQMNSLRAEDTAVYYCAETSGYFEYWGQGTLVTVSS

SEQ ID NO: 7854 - protein, 116 aa, Artificial Sequence
  source: /note="Description of Artificial Sequence: Synthetic polypeptide"
EVQLLESGGGLVQPGGSLRLSCAASGFTFGDYGMNWVRQAPGKGLEWVSHISSNGRFIYYADSVKGRFTISRDNSKNTLYLQMNSLRAEDTAVYYCAETSGYFEYWGQGTLVTVSS

SEQ ID NO: 7855 - protein, 116 aa, Artificial Sequence
  source: /note="Description of Artificial Sequence: Synthetic polypeptide"
EVQLLESGGGLVQPGGSLRLSCAASGFTFREYVMGWVRQAPGKGLEWVSTINGLGNVTYYADSVKGRFTISRDNTKNTLYLQMNSLRAEETAVYYCAIQLPNFDYWGQGTLVTVSS

SEQ ID NO: 7856 - protein, 119 aa, Artificial Sequence
  source: /note="Description of Artificial Sequence: Synthetic polypeptide"
EVQLLESGGGLVQPGGSLRLSCAASGFTFGNDGMWWVRQAPGKGLEWVSFINVDGRETYYADSVKGRFTISRDNSKNTLYLQMNSLRAEDTAVYYCAEWSPGRVQFDYWGQGTLVTVSS

SEQ ID NO: 7857 - protein, 119 aa, Artificial Sequence
  source: /note="Description of Artificial Sequence: Synthetic polypeptide"
EVQLLESGGGLVQPGGSLRLSCAASGFTFGGWDMAWVRQAPGKGLEWVSSIAHEGGETYYADSVKGRFTISRDNSKNTLYLQMNSLRAEDTAVYYCAKYVPGSPLFDYWGQRTLVTVSS

SEQ ID NO: 7858 - protein, 116 aa, Artificial Sequence
  source: /note="Description of Artificial Sequence: Synthetic polypeptide"
EVQLLESGGGLVQPGGSLRLSCAASGFTFDQGWMYWVRQAPGKGLEWVSGIGSNGPRTSYADSVKGRFTISRDNSKNTLYLQMNSLRAEDTAVYYCAKSGEYFDYWGQGTLVTVSS

SEQ ID NO: 7859 - protein, 117 aa, Artificial Sequence
  source: /note="Description of Artificial Sequence: Synthetic polypeptide"
EVQLLESGGGLVQPGGSLRLSCAASGFTFRQSDMWWVRQAPGKGLEWVSVIGNNGEFTYYADSVKGRFTISRDNSKNTLYLQMNSLRAEDTAVYYCAKDNWLLFDYWGQGTLVTVSS

SEQ ID NO: 7860 - protein, 123 aa, Artificial Sequence
  source: /note="Description of Artificial Sequence: Synthetic polypeptide"
EVQLLESGGGLVQPGGSLRLSCAASGFTFMEYAMIWVRQAPGKGLEWVSIISPLGLSTYYADSVKGRFTISRDNSKNTLYLQMNSLRAEDTAVYYCAKYQDSSDSQYTNFDYWGQGTLVTVSS

SEQ ID NO: 7861 - protein, 116 aa, Artificial Sequence
  source: /note="Description of Artificial Sequence: Synthetic polypeptide"
EVQLLESGGGLVQPGGSLRLSCAASGFTFDLSTMYWVRQAPGKGLEWVSTIGGDGSHTYYADSVKGRFTISRDNSKNTLYLQMNSLRAEDTAVYYCAEGTQYFDYWGQGTLVTVSS

SEQ ID NO: 7862 - protein, 116 aa, Artificial Sequence
  source: /note="Description of Artificial Sequence: Synthetic polypeptide"
EVQLLESGGGLVQPGGSLRLSCAASGFTFSAYTMEWVRQAPGKGLEWVSSIGVTGYDTYYADSVKGRFTISRDNSKNTLYLQMNSLRAEDTAVYYCAKGGQGFDYWGQGTLVTVSS

SEQ ID NO: 7863 - protein, 124 aa, Artificial Sequence
  source: /note="Description of Artificial Sequence: Synthetic polypeptide"
EVQLLESGGGLVQPGGSLRLSCAASGFTFGDYGMSWVRQAPGKGLEWVSYIDPLGRLTYYADSVKGRFTISRDNSKNTLYLQMNSLRAEDTAVYYCAEDLSSLQYGVSPNFDYWGQGTLVTVSS

SEQ ID NO: 7864 - protein, 121 aa, Artificial Sequence
  source: /note="Description of Artificial Sequence: Synthetic polypeptide"
EVQLLESGGGLVQPGGSLRLSCAASGFTFFHYSMSWVRQAPGKGLEWVSSIGPVGRETYYADSVKGRFTISRDNSKNTLYLQMNSLRAEDTAVYYCAKMIQSPLFKDFDYWGQGTLVTVSS

SEQ ID NO: 7865 - protein, 120 aa, Artificial Sequence
  source: /note="Description of Artificial Sequence: Synthetic polypeptide"
EVQLLESGGGLVQPGGSLRLSCAASGFTFEWYDMYWVRQAPGKGLEWVSRIDSGGNQTYYADSVKGRFTISRDNSKNTLYLQMNSLRAEDTAVYYCAEASLWKWRLFDYWGQGTLVTVSS

SEQ ID NO: 7866 - protein, 122 aa, Artificial Sequence
  source: /note="Description of Artificial Sequence: Synthetic polypeptide"
EVQLLESGGGLVQPGGSLRLSCAASGFTFEEYGMAWVRQAPGKGLEWVSTISPLGISTYYADSVKGRFTISRDNSKNTLYLQMNSLRAEDTAVYYCAKHATSQESLRSFDYWGQGTLVTVSS

SEQ ID NO: 7867 - protein, 123 aa, Artificial Sequence
  source: /note="Description of Artificial Sequence: Synthetic polypeptide"
EVQLLESGGGLVQPGGSLRLSCAASGFTFSKYEMMWVRQAPGKGLEWVSAISGSGGSTYYADSVKGRFTISRDNSKNTLYLQMNSLRAEDTAVYYCAKGPLPDAFWTRGFDYWGQGTLVTVSS

SEQ ID NO: 7868 - protein, 121 aa, Artificial Sequence
  source: /note="Description of Artificial Sequence: Synthetic polypeptide"
EVQLLESGGGLVQPGGSLRLSCAASGFTFGTYSMAWVRQAPGKGLEWVSTIDRHGLATYYADSVKGRFTISRDNSKNTLYLQMNSLRAEDTAVYYCAKTPGSSWQTVFGYWGQGTLVTVSS

SEQ ID NO: 7869 - protein, 121 aa, Artificial Sequence
  source: /note="Description of Artificial Sequence: Synthetic polypeptide"
EVQLLESGGGLVQPGGSLRLSCAASGFTFESYPMGWVRQAPGKGLEWVSSIDHHGHSTYYADSAKGRFTISRDNSKNTLYLQMNSLRAEDTAVYYCAKLLRVSMIFGFDYWGQGTLVTVSS

SEQ ID NO: 7870 - protein, 116 aa, Artificial Sequence
  source: /note="Description of Artificial Sequence: Synthetic polypeptide"
EVQLLESGGGLVQPGGSLRLSCAASGFTFVQYGMSWVRQAPGKGLEWVSWISSSGTYTYYADSVKGRFTISRDNSKNTLYLQMNSLRAEDTAVYYCAETSRMFDYWGQGTLVTVSS

SEQ ID NO: 7871 - protein, 121 aa, Artificial Sequence
  source: /note="Description of Artificial Sequence: Synthetic polypeptide"
EVQLLESGGGLVQPGGSLRLSCAASGFTFEDYGMGWARQAPGKGLEWVSSIGPLGLWTYYADSAKGRFTISRDNSKNTLYLQMNSLRAEDTAVYYCAKSPLEGLITNFDYWGQGTLVTVSS

SEQ ID NO: 7872 - protein, 121 aa, Artificial Sequence
  source: /note="Description of Artificial Sequence: Synthetic polypeptide"
EVQLLESGGGLVQPGGSLRLSCAASGFTFREYDMGWVRQAPGKGLEWVSLISPPGRTTYYADSVKGRFTISRDNSKNTLYLQMNSLRAEDTAVYYCAKVVILGYTNRFDYWGQGTLVTVSS

SEQ ID NO: 7873 - protein, 124 aa, Artificial Sequence
  source: /note="Description of Artificial Sequence: Synthetic polypeptide"
EVQLLESGGGLVQPGGSLRLSCAASGFTFPNYGMLWVRQAPGKGLEWVSSINSSGMETYYADSVKGRFTISRDNSKNTLYLQMNSLRAEDTAVYYCAKFFRLNDHNSVFGFDYWGQGTLVTVSS

SEQ ID NO: 7874 - protein, 116 aa, Artificial Sequence
  source: /note="Description of Artificial Sequence: Synthetic polypeptide"
EVQLLESGGGLVQPGGSLRLSCAASGFTFKDYKMMWIRQAPGKGLEWVSSIVGSGSMTYYADSVKGRFTISRDNSKNTLYLQMNSLRAEDTAVYYCAKGPGYFDYWGQGTLVTVSS

SEQ ID NO: 7875 - protein, 120 aa, Artificial Sequence
  source: /note="Description of Artificial Sequence: Synthetic polypeptide"
EVQLLESGGGLVQPGGSLRLSCAASGFTFHNYAMGWVRRAPGKGLEWVSSIDEHGTITYYADSVKGRFTISRDNSKNTLYLQMNSLRAEDTAVYYCAKDSLDRVWIFDYWGQGTLVTVSS

SEQ ID NO: 7876 - protein, 122 aa, Artificial Sequence
  source: /note="Description of Artificial Sequence: Synthetic polypeptide"
EVQLLESGGGLVQPGGSLRLSCAASGFTFADYPMTWVRQAPGKGLEWVSSIYSAGSPTYYADSVKGRFTISRDNSKNTLYLQMNSLRAEDTAVYYCAKLYHREPILFGFDYWGQGTLVTVSS

SEQ ID NO: 7877 - protein, 116 aa, Artificial Sequence
  source: /note="Description of Artificial Sequence: Synthetic polypeptide"
EVQLLESGGGLVQPGGSLRLSCAASGFTFERYQMAWVRQAPGKGLEWVSTISSDGGGTYYADSVKGRFTISRDNSKNTLYLQMNSLRAEDTAVYYCAKPGHRFDYWGQGTLVTVSS

SEQ ID NO: 7878 - protein, 119 aa, Artificial Sequence
  source: /note="Description of Artificial Sequence: Synthetic polypeptide"
EVQLLESGGGLVQPGGSLRLSCAASGFTFGSYTMMWVRQAPGKGLEWVSEIDRTGERTYYADSVKGRFTISRDNSKNTLYLQMNSLRAEDTAVYYCAEPGFASLPFDYWGQGTLVTVSS

SEQ ID NO: 7879 - protein, 116 aa, Artificial Sequence
  source: /note="Description of Artificial Sequence: Synthetic polypeptide"
EVQLLESGGGLVQPGGSLRLSCAASGFTFTDYTMYWVRQAPGKGLEWVSKISPSGRSTYYADSVKGRFTISRDNSKNTLYLQMNSLRAEDTAVYYCAKDPFGFDYWGQGTLVTVSS

SEQ ID NO: 7880 - protein, 119 aa, Artificial Sequence
  source: /note="Description of Artificial Sequence: Synthetic polypeptide"
EVQLLESGGGLVQPGGSLRLSCAASGFTFDDAEMFWVRQAPGKGLEWVSSIDARGLTTYYADPVKGRFTISRDNSKNTLYLQMNSLRAEDTAVYYCAEATSAMYPFDYWGQGTLVTVSS

SEQ ID NO: 7881 - protein, 121 aa, Artificial Sequence
  source: /note="Description of Artificial Sequence: Synthetic polypeptide"
EVQLLESGGGLVQPGGSLRLSCAASGFTFRDYDMGWVRQAPGKGLEWVSTISPLGHFTYYADSVKGRFTISRDNSKNTLYLQMNSLRAEDTAVYYCAKSGFHEYTEGFDYWGQGTLVTVSS

SEQ ID NO: 7882 - protein, 119 aa, Artificial Sequence
  source: /note="Description of Artificial Sequence: Synthetic polypeptide"
EVQLLESGGGLVQPGGSLRLSCAASGFTFDAYEMGWVRQAPGKGLEWVSIIDWDGNSTYYADSVKGRFTISRDNSKNTLYLQMNSLRAEDTAVYYCAKPGDNVGIFDYWGQGTLVTVSS

SEQ ID NO: 7883 - protein, 123 aa, Artificial Sequence
  source: /note="Description of Artificial Sequence: Synthetic polypeptide"
EVQLLESGGGLVQPGGSLRLSCAASGFTFDRAGMGWVRQAPGKGLEWVSLIGRGGDITYYADSVKGRFTISRDNSKNTLYLQMNSLRAEDTAVYYCAKIRNLHWDVGRQFDYWGQGTLVTVSS

SEQ ID NO: 7884 - protein, 116 aa, Artificial Sequence
  source: /note="Description of Artificial Sequence: Synthetic polypeptide"
EVQLLESGGGLVQPGGSLRLSCAASGFTFGRYQMAWVRQAPGKGLEWVSSISSDGGGTYYADSVKGRFTISRDNSKNTLYLQMNSLRAEDTAVYYCAKPSRRFDYWGQGTLVTVSS

SEQ ID NO: 7885 - protein, 123 aa, Artificial Sequence
  source: /note="Description of Artificial Sequence: Synthetic polypeptide"
EVQLLESGGGLVQPGGFLRLSCAASGFTFELYPMAWVRQAPGKGLEWVSSISPVGFLTYYADSVKGRFTISRDNSKNTLYLQMNSLRAEDTAVYYCAKGHEGSYTPRSAFDYWGQGTLVTVSS

SEQ ID NO: 7886 - protein, 123 aa, Artificial Sequence
  source: /note="Description of Artificial Sequence: Synthetic polypeptide"
EVQLLESGGGLVQPGGSLRLSCAASGFTFVAYPMAWVRQAPGKGLEWVSTIAPLGGNTYYADSVKGRFTISRDNSKNTLYLQMNSLRAEDTAVYYCAKRPEGLQIDSQNFDYWGQGTLVTVSS

SEQ ID NO: 7887 - protein, 116 aa, Artificial Sequence
  source: /note="Description of Artificial Sequence: Synthetic polypeptide"
EVQLLESGGGLVQPGGSLRLSCAASGFTFALYQMAWVRQAPGKGLEWVSSIDSSGSDTYYADSVKGRFTISRDNSKNTLYLQMNSLRAEDTAVYYCAKPERDFDYWGQGTLVTVSS

SEQ ID NO: 7888 - protein, 116 aa, Artificial Sequence
  source: /note="Description of Artificial Sequence: Synthetic polypeptide"
EVQLLESGGGLVQPGGSLRLSCAASGFTFRQYQMAWARQAPGKGLEWVSTIASDGVSTYYADSVKGRFTISRDNSKNTLYLQMNSLRAEDTAVYYCAKVGRDFDYWGQGTLVTVSS

SEQ ID NO: 7889 - protein, 116 aa, Artificial Sequence
  source: /note="Description of Artificial Sequence: Synthetic polypeptide"
EVQLLESGGGLVQPGGSLRLSCAASGFTFEQYDMRWVRQAPGKGLEWVSWIDEAGHETYYADSVKGRFTISRDNSRNTLYLQMNSLRAEDTAVYYCAKGMDGFDYWGQGTLVTVSS

SEQ ID NO: 7890 - protein, 123 aa, Artificial Sequence
  source: /note="Description of Artificial Sequence: Synthetic polypeptide"
EVQLLESGGGLVQPGGSLRLSCAASGFTFVDYPMGWVRQAPGKGLEWVSTISTGGFSTYYADSVKGRFTISRDNSKNTLYLQMNSLRAEDTAVYYCAKARYYYLSQIKNFDYWGQGTLVTVSS

SEQ ID NO: 7891 - protein, 120 aa, Artificial Sequence
  source: /note="Description of Artificial Sequence: Synthetic polypeptide"
EVQLLESGGGLVQPGGSLRLSCAASGFTFDIYGMTWVRQAPGKGLEWVSSISPLGLVTYYADPVKGRFTISRDNSKNTLYLQMNSLRAEDTAVYYCAKLKEHGDVPFDYWGQGTLVTVSS

SEQ ID NO: 7892 - protein, 123 aa, Artificial Sequence
  source: /note="Description of Artificial Sequence: Synthetic polypeptide"
EVQLLESGGGLVQPGGSLRLSCAASGFTFELYPMSWVRQAPGKGLEWVSTISPTGLLTYYADSVKGRFTISRDNSKNTLYLQMNSLRAEDTAVYYCAKFKRSGKTDDTNFDYWGQGTLVTVSS

SEQ ID NO: 7893 - protein, 122 aa, Artificial Sequence
  source: /note="Description of Artificial Sequence: Synthetic polypeptide"
EVQLLESGGGLVQPGGSLRLSCAASGFTFSNYYMVWVRQAPGKGLEWVSAIDEWGFATYYADSVKGRFTISRDNSKNTLYLQMNSLRAEDTAVYYCAKHWEFTSDTSRFDYWGQGTLVTVSS

SEQ ID NO: 7894 - protein, 116 aa, Artificial Sequence
  source: /note="Description of Artificial Sequence: Synthetic polypeptide"
EVQLLESGGGLVQPGGSLRLSCAASGFTFREYDMLWVRQAPGKGLEWVSTIVGDGNGTYYADSVKGRFTISRDNSKNTLYLQMNSLRAEDTAVYYCAKQDRQFDYWGQGTLVTVSS

SEQ ID NO: 7895 - protein, 120 aa, Artificial Sequence
  source: /note="Description of Artificial Sequence: Synthetic polypeptide"
EVQLLESGGGLVQPGGSLRLSCAASGFTFEEYGMSWVRQAPGKGLEWVSTISPIGVTTYYADSVKGRFTISRDNSKNTLYLQMNSLRAEDTAVYYCAKNAYDRKSNFDYWGQGTLVTVSS

SEQ ID NO: 7896 - protein, 124 aa, Artificial Sequence
  source: /note="Description of Artificial Sequence: Synthetic polypeptide"
EVQLLESGGGLVQPGGSLRLSCAASGFTFDRYVMVWVRQAPGKDLEWVSGITPSGRRTYYADSVKGRFTISRDNSKDTLYLQMNSLRAEDTAVYYCAKVLGRHFDPLLPSFDYWGQGTLVTVSS

SEQ ID NO: 7897 - protein, 123 aa, Artificial Sequence
  source: /note="Description of Artificial Sequence: Synthetic polypeptide"
EVQLLESGGGLVQPGGSLRLSCAASGFTFEDYAMSWVRQAPGKGLEWVSTITPGGFWTYYADSVKGRFTISRDNSKNTLYLQMNSLRAEDTAVYYCAKTSSGELQLVEDFDYWGQGTLVTVSS

SEQ ID NO: 7898 - protein, 116 aa, Artificial Sequence
  source: /note="Description of Artificial Sequence: Synthetic polypeptide"
EVQLLESGGGLVQPGGSLRLSCAASGFTFEDFDMAWVRQAPGKGLEWVSSINDQGSLTYYADSVKGRFTISRDNSKNTLYLQMNSLRAEDTAVYYCAKPDQFFDYWGQGTLVTVSS

SEQ ID NO: 7899 - protein, 122 aa, Artificial Sequence
  source: /note="Description of Artificial Sequence: Synthetic polypeptide"
EVQLLESGGGLVQPGGSLRLSCAASGFTFSAYDMMWVRQAPGKGLEWVSRISPQGQRTYYADSVKGRFTISRDNSKNTLYLQMNSLRAEDTAVYYCAKIRGQSRIPMRFDYWGQGTLVTVSS

SEQ ID NO: 7900 - protein, 119 aa, Artificial Sequence
  source: /note="Description of Artificial Sequence: Synthetic polypeptide"
EVQLLESGGGLVQPGGSLRLSCAASGFTFPEYDMTWVRQAPGKGLEWVSYISSDGYSTYYADSVKGRFTISRDNSKNTLYLQMNSLRAEDTAVYYCAKPHGSPREFDYWGQGTLVTVSS

SEQ ID NO: 7901 - protein, 116 aa, Artificial Sequence
  source: /note="Description of Artificial Sequence: Synthetic polypeptide"
EVQLLESGGGLVQPGGSLRLSCAASGFTFTDYEMGWVRQAPGKGLEWVSTITSLGESTYYADSVKGRFTISRDNSKNTLYLQMNSLRAEDTAVYYCAKPGRIFDYWGQGTLVTVSS

SEQ ID NO: 7902 - protein, 123 aa, Artificial Sequence
  source: /note="Description of Artificial Sequence: Synthetic polypeptide"
EVQLLESGGGLVQPGGSLRLSCAASGFTFAFYPMMWVRQAPGKGLEWVSWIDATGTRTYYADSVKGRFTISRDNSKNTLYLQMNSLRAEDTAVYYCAEGNYGSSYTMGVFDYWGQGTLVTVSS

SEQ ID NO: 7903 - protein, 122 aa, Artificial Sequence
  source: /note="Description of Artificial Sequence: Synthetic polypeptide"
EVQLLESGGGLVQPGGSLRLSCAASGFTFDEYPMYWVRQAPGKGLEWVSSIGPSGPNTYYADSVKGRFTISRDNSKNTLYLQMNSLRAEDTAVYYCAKSPYFDVIPSYFDYWGQGTLVTVSS

SEQ ID NO: 7904 - protein, 119 aa, Artificial Sequence
  source: /note="Description of Artificial Sequence: Synthetic polypeptide"
EVQLLESGGGLVQPGGSLRLSCAASGFTFADYGMGWVRQAPGKGLEWVSSIQSSGLRTYYADSVKGRFTISRDNSKNTLYLQMNSLRAEDTAVYYCAKRANSRRGFDYWGQGTLVTVSS

SEQ ID NO: 7905 - protein, 116 aa, Artificial Sequence
  source: /note="Description of Artificial Sequence: Synthetic polypeptide"
EVQLLESGGGLVQPGGSLRLSCAASGFTFSDYEMMWVRQAPGKGLEWVSSITSHGGSTYYADSVKGRFTISRDNSKNTLYLQMNSLRAEDTAVYYCAKPDKDFDYWGQGTLVTVSS

SEQ ID NO: 7906 - protein, 122 aa, Artificial Sequence
  source: /note="Description of Artificial Sequence: Synthetic polypeptide"
EVQLLESGGGLVQPGGSLRLSCAASGFTFAHYPMSWVRQAPGKGLEWVSSIGRLGNRTYYADSVKGRFTISRDNSKNTLYLQMNSLRAEDTAVYYCAKRATPVPIKGLFDYWGQGTLVTVSS

SEQ ID NO: 7907 - protein, 116 aa, Artificial Sequence
  source: /note="Description of Artificial Sequence: Synthetic polypeptide"
EVQLLESGGGLVQPGGSLRLSCAASGLTFGRYEMAWVRQAPGKGLEWVSSIDSDGWVTYYADSVKGRFTISRDNSKNTLYLQMNSLRAEDTAVYYCAQPDSLFDYWGQGTLVTVSS

SEQ ID NO: 7908 - protein, 117 aa, Artificial Sequence
  source: /note="Description of Artificial Sequence: Synthetic polypeptide"
EVQLLESGGGLVQPGGSLRLSCAASGFTFSSYSMVWVRQAPGKGLEWVSGINRGGTRTYYADSVKGRFTISRDNSKNTLYLQMNSLRAEDTAVYYCAKGWRRGFDYWGQGTLVTVSS

SEQ ID NO: 7909 - protein, 117 aa, Artificial Sequence
  source: /note="Description of Artificial Sequence: Synthetic polypeptide"
EVQLLESGGGLVQPGGSLRLSCAASGFTFTRYRMSWVRQAPGKGLEWVSGISRDGYRTYYADSVKGRFTISRDNSKNTLYLQMNSLRAEDTAVYYCAKGMTASFDYWGQGTLVTVSS

SEQ ID NO: 7910 - protein, 118 aa, Artificial Sequence
  source: /note="Description of Artificial Sequence: Synthetic polypeptide"
EVQLLESGGGLVQPGGSLRLSCAASGFTFQMYPMGWVRQAPGKGLEWVSMIEPAGDLTYYADSVKGRFTISRDNSKNTLYLQMNSLRAEDTAVYYCAKYQEQPWFDYWGQGTLVTVSS

SEQ ID NO: 7911 - protein, 116 aa, Artificial Sequence
  source: /note="Description of Artificial Sequence: Synthetic polypeptide"
EVQLLESGGGLVQPGGSLRLSCAASGFPFPQYQMAWVRQAPGKGLEWVSMITSDGLDTYYADSVKGRFTISRDNSKNTLYLQMNSLRAEDTAVYYCAKPEPLFDYWGQGTLVTVSS

SEQ ID NO: 7912 - protein, 116 aa, Artificial Sequence
  source: /note="Description of Artificial Sequence: Synthetic polypeptide"
EVQLLESGGGLVQPGGSLRLSCAASGFTFSMYDMHWVRQAPGKGLEWVSTILSDGTDTYYADSVKGRFTISRDNSKNTLYLQMNSLRAEDTAVYYCAKYGAMFDYWGQGTLVTVSS

SEQ ID NO: 7913 - protein, 118 aa, Artificial Sequence
  source: /note="Description of Artificial Sequence: Synthetic polypeptide"
EVQLLESGGGLVQPGGSLRLSCAASGFTFKLYPMTWVRQAPGKGLEWVSSIDAGGHETYYADSVKGRFTISRDNSKNTLYLQMNSLRAEDTAVYYCAKDWWDYLFDYWGQGTLVTVSS

SEQ ID NO: 7914 - protein, 117 aa, Artificial Sequence
  source: /note="Description of Artificial Sequence: Synthetic polypeptide"
EVQLLESGGGLVQPGGSLRLSCAASGFTFSRYPMSWVRQAPGKGLEWVSSINRSGMRTYYADSVKGRFTISRDNSKNTLYLQMNSLRAEDTAVYYCAEGHQAPFDYWGQGTLVTVSS

SEQ ID NO: 7915 - protein, 123 aa, Artificial Sequence
  source: /note="Description of Artificial Sequence: Synthetic polypeptide"
EVQLLESGGGLVQPGGSLRLSCAASGFTFTGYAMSWVRQAPGKGLEWVSTINANGIRTYYADSVKGRFTISRDNSKNTLYLQMNGLRAEDTAVYYCAKGGVWRWGTGHKFDYWGQGTLVTVSS

SEQ ID NO: 7916 - protein, 118 aa, Artificial Sequence
  source: /note="Description of Artificial Sequence: Synthetic polypeptide"
EVQLLESGGGLVQPGGSLRLSCAASGFTFKQYDMRWVRQAPGKGLEWVSTISQNGTKTYYADSVKGRFTISRDNSKNTLYLQMNSLRAEDTAVYYCAKSRTGRYFDYWGQGTLVTVSS

SEQ ID NO: 7917 - protein, 123 aa, Artificial Sequence
  source: /note="Description of Artificial Sequence: Synthetic polypeptide"
EVQLLESGGGLVQPGGSLRLSCAASGFTFGTYDMGWVRQAPGKGLEWVSRINWQGDRTYYADSVKGRFTISRDNSKNTLYLQMNSLRAEDTAVYYCAKAGFGHYVDGLGFDYWGQGTLVTVSS

SEQ ID NO: 7918 - protein, 116 aa, Artificial Sequence
  source: /note="Description of Artificial Sequence: Synthetic polypeptide"
EVQLLESGGGLVQPGGSLRLSCAASGFTFSGYEMAWVRQAPGKGLEWVSSITDMGDSTYYADSVKGRFTISRDNSKNTLYLQMNSLRAEDTAVYYCAKPGTAFDYWGPGTLVTVSS

SEQ ID NO: 7919 - protein, 117 aa, Artificial Sequence
  source: /note="Description of Artificial Sequence: Synthetic polypeptide"
EVQLLESGGGLVQPGGSLRLSCAASGFTFAKYKMWWVRQAPGKGLEWVSSITPKGHSTYYADSVKGRFTISRDNSKNTLYLQMNSLRAEDTAVYYCAKRPMTPFDYWGQGTLVTVSS

SEQ ID NO: 7920 - protein, 122 aa, Artificial Sequence
  source: /note="Description of Artificial Sequence: Synthetic polypeptide"
EVQLLESGGGLVQPGGSLRLSCAASGFTFERYNMSWVRQAPGKGLEWVSSIRPRGGKTYYADSVKGRFTISRDNSKNTLYLQMNSLRAEDTAVYYCAKWRREGYTGSKFDYWGQGTLVTVSS

SEQ ID NO: 7921 - protein, 118 aa, Artificial Sequence
  source: /note="Description of Artificial Sequence: Synthetic polypeptide"
EVQLLESGGGLVQPGGSLRLSCAASGFTFERYGMTWVRQAPGKGLEWVSSIWPRGQKTYYADSVKGRFTISRDNSKNTLYLQMNSLRAEDTAVYYCAKGNSRYVFDYWGQGTLVTVSS

SEQ ID NO: 7922 - protein, 116 aa, Artificial Sequence
  source: /note="Description of Artificial Sequence: Synthetic polypeptide"
EVQLLESGGGLVQPGGSLRLSCAASGFTFSDYEMMWVRQAPGKGLEWVSTITSDGISTYYADSVKGRFTIFRDNSKNTLYLQMNSLRAEDTAVYYCAKSGRFFDYWGQGTLVTVSS

SEQ ID NO: 7923 - protein, 116 aa, Artificial Sequence
  source: /note="Description of Artificial Sequence: Synthetic polypeptide"
EVQLLESGGGLVQPGGSLRLSCAASGFTFSGYQMAWVRQAPGKGLEWVSGISSEGLTTYYADSVKGRFTISRDNSKNTLYLQMNSLRAEDTAVYYCAKLGRRFDYWGQGTLVTVSS

SEQ ID NO: 7924 - protein, 120 aa, Artificial Sequence
  source: /note="Description of Artificial Sequence: Synthetic polypeptide"
EVQLLESGGGLVQPGGSLRLSCAASGFTFTNYSMGWVRQAPGKGLEWVSTIRPNGTKTYYADSVKGRFTISRDNSKNTLYLQMNSLRAEDTAVYYCAKRSSAHLQRFDYWGQGTLVTVSS

SEQ ID NO: 7925 - protein, 119 aa, Artificial Sequence
  source: /note="Description of Artificial Sequence: Synthetic polypeptide"
EVQLLESGGGLVQPGGSLRLSCAASGFTFGNYSMGWVRQAPGKGLEWVSSIGRHGGRTYYADSVKGRFTISRDNSKNTLYLQMNSLRAEDTAVYYCAKKGSTYPRFDYWGQGTLVTVSS

SEQ ID NO: 7926 - protein, 118 aa, Artificial Sequence
  source: /note="Description of Artificial Sequence: Synthetic polypeptide"
EVQLLESGGGLVQPGGSLRLSCTASGFTFSHYEMGWVRQAPGKGLEWVSSIEPFGGGTYYADSVKGRFTISRDNSKNTLYLQMNSLRAEDTAVYYCAKVYPQGSFDYWGQGTLVTVSS

SEQ ID NO: 7927 - protein, 124 aa, Artificial Sequence
  source: /note="Description of Artificial Sequence: Synthetic polypeptide"
EVQLLESGGGLVQPGGSLRLSCAASGFTFSNYTMGWVRQAPGKGLEWVSSIRPDGKITYYADSVKGRFTISRDNSKNTLYLQMNSLRAEDTAVYYCAEVYSSCAMCTPLLFDYWGQGTLVTVSS

SEQ ID NO: 7928 - protein, 123 aa, Artificial Sequence
  source: /note="Description of Artificial Sequence: Synthetic polypeptide"
EVQLLESGGGLVQPGGSLRLSCAASGFTFKRYSMAWVRQAPGKGLEWVSDIGPRGFSTYYADSVKGRFTISRDNSKNTLYLQMNSLRAEDTAVYYCAKVGRGQRDTSQPFDYWGQGTLVTVSS

SEQ ID NO: 7929 - protein, 116 aa, Artificial Sequence
  source: /note="Description of Artificial Sequence: Synthetic polypeptide"
EVQLLESGGGLVQPGGSLRLSCAASGFTFASYQMAWVRQAPGKGLEWVSGITSGGLSTYYADSVKGRFTISRDNSKNTLYLQMNSLRAEDTAVYYCAKPGRGFDYWGQGTLVTVSS

SEQ ID NO: 7930 - protein, 116 aa, Artificial Sequence
  source: /note="Description of Artificial Sequence: Synthetic polypeptide"
EVQLLESGGGLVQPGGSLRLSCAASGFTFASYEMTWVRQAPGKGLEWVSGISSDGLSTYYADSVKGRFTISRDNSKNTLYLQMNSLRAEDTAVYYCAKPGVLFDYWGQGTLVTVSS

SEQ ID NO: 7931 - protein, 117 aa, Artificial Sequence
  source: /note="Description of Artificial Sequence: Synthetic polypeptide"
EVQLLESGGGLVQPGGSLRLSCAASGFTFDKYLMSWVRQAPGKGLEWVSGIEPLGDVTYYADSVKGRFTISRDNSKNTLYLQMNSLRAEDTAVYYCAKEASGDFDYWGQGTLVTVSS

SEQ ID NO: 7932 - protein, 116 aa, Artificial Sequence
  source: /note="Description of Artificial Sequence: Synthetic polypeptide"
EVQLLESGGGLVQPGGSLRLSCAASGFTFTEYEMSWVRQAPGKGLEWVSSIDNVGSSTYYADSVKGRFTISRDNSKNTLYLQMNSLRAEDTAVYYCAKPGKLFDYWGQGTLVTVSS

SEQ ID NO: 7933 - protein, 118 aa, Artificial Sequence
  source: /note="Description of Artificial Sequence: Synthetic polypeptide"
EVQLLESGGGLVQPGGSLRLSCAASGFTFADYEMWWVRQAPGKGLEWVSAISRQGFATYYADSVKGRFTISRDNSKNTLYLQMNSLRAEDTAVYYCAKDLERDDFDYWGQGTLVTVSS

SEQ ID NO: 7934 - protein, 120 aa, Artificial Sequence
  source: /note="Description of Artificial Sequence: Synthetic polypeptide"
EVQLLESGGGLVQPGGSLRLSCAASGFTFANYEMGWARQAPGKGLEWVSVISEWGYSTYYADSAKGRFTISRDNSKNTLYLQMNSLRAEDTAVYYCAKLVGGTQYEFDYWGQGTLVTVSS

SEQ ID NO: 7935 - protein, 116 aa, Artificial Sequence
  source: /note="Description of Artificial Sequence: Synthetic polypeptide"
EVQLLESGGGLVQPGGSLRLSCAASGFTFHNYEMSWVRQAPGKGLEWVSSISSGGSSTYYADSVKGRFTISRDNSKNTLYLQMNSLRAEDTAVYYCAKPGVKFDYWGQGTLVTVSS

SEQ ID NO: 7936 - protein, 116 aa, Artificial Sequence
  source: /note="Description of Artificial Sequence: Synthetic polypeptide"
EVQLLESGGGLVQPGGSLRLSCAASGFTFGLYEMTWVRQAPGKGLEWVSSITGDGISTYYADSVKGRFTISRDNSRNTLYLQMNSLRAEDTAVYYCAKAGRKFDYWGQGTLVTVSS

SEQ ID NO: 7937 - protein, 116 aa, Artificial Sequence
  source: /note="Description of Artificial Sequence: Synthetic polypeptide"
EVQLLESGGGLVQPGGSLRLSCAASGFTFSNYQMAWVRQAPGKGLEWVSSITSEGGSTYYADSVKGRFTISRDNSKNTLYLQMNSLRAEDTAVYYCAKPGKNFDYWGQGTLVTVSS

SEQ ID NO: 7938 - protein, 116 aa, Artificial Sequence
  source: /note="Description of Artificial Sequence: Synthetic polypeptide"
EVQLLESGGGLVQPGGSLRLSCAASGFTFSDYQMAWVRQAPGKGLEWVSSITSEGGSTYYADSVKGRFTISRDNSKNTVYLQMNSLRAEDTAVYYCAKPGKNFDYWGQGTLVTVSS

SEQ ID NO: 7939 - protein, 116 aa, Artificial Sequence
  source: /note="Description of Artificial Sequence: Synthetic polypeptide"
EVQLLESGGGLVQPGGSLRLSCAASGFTFDNYEMTWVRQAPGKGLEWVSTITSQGTSTYYADSVKGRFTISRDNSKNTLYLQMNSLRAEDTAVYYCAKPDRSFDYWGQGTLVTVSS

SEQ ID NO: 7940 - protein, 116 aa, Artificial Sequence
  source: /note="Description of Artificial Sequence: Synthetic polypeptide"
EVQLLESGGGLVQPGGSLRLSCAASGFTFRSYEMTWVRQAPGKGLEWVSSITSDGGTTYYADSVKGRFTISRDNSKNTLYLQMNSLRAEDTAVYYCAKPDKTFDYWGQGTLVTVSS

SEQ ID NO: 7941 - protein, 116 aa, Artificial Sequence
  source: /note="Description of Artificial Sequence: Synthetic polypeptide"
EVQLLESGGGLVQPGGSLRLSCAASGFTFNLYEMTWVRQAPGKGLEWVSSITSDGVSTYYADSVKGRFTISRDNSKNTLYLQMNSLRAEDTAVYYCAKPDSPFDYWGQGTLVTVSS

SEQ ID NO: 7942 - protein, 116 aa, Artificial Sequence
  source: /note="Description of Artificial Sequence: Synthetic polypeptide"
EVQLLESGGGLVQPGGSLRLSCAASGFTFGHYDMAWVRQAPGKGLEWVSTISDNGNGTYYADSVKGRFTISRDNSKNTLYLQMNSLRAEDTAVYYCAKPGRDFDYWGQGTLVTVSS

SEQ ID NO: 7943 - protein, 116 aa, Artificial Sequence
  source: /note="Description of Artificial Sequence: Synthetic polypeptide"
EVQLLESGGGLVQPGGSLRLSCAASGFTFGRYQMAWVRQAPGKGLEWVSSISSDGGGTYYADSVKGRFTISRDNSKNTLYLQMNSLRAEDTAVYYCAKPGRAFDYWGQGTLVTVSS

SEQ ID NO: 7944 - protein, 116 aa, Artificial Sequence
  source: /note="Description of Artificial Sequence: Synthetic polypeptide"
EVQLLESGGGLVQPGGSLRLSCAASGFTFARYQMAWVRQAPGKGLEWVSTISDDGDSTYYADSVKGRFTISRDNSKNTLYLQMNSLRAEDTAVYYCAKLDKLFDYWGQGTLVTVSS

SEQ ID NO: 7945 - protein, 116 aa, Artificial Sequence
  source: /note="Description of Artificial Sequence: Synthetic polypeptide"
EVQLLESGGGLVQPGGSLRLSCAASGFTFDNDEMTWVRQAPGKGLEWVSAIDTTGGQTYYADSVKGRFTISRDNSKNTLYLQMNSLRAEDTAVYYCAKPGKEFDYWGQGTLVTVSS

SEQ ID NO: 7946 - protein, 116 aa, Artificial Sequence
  source: /note="Description of Artificial Sequence: Synthetic polypeptide"
EVQLLESGGGLVQPGGSLRLSCAASGFTFGESEMSWVRQAPGKGLEWVSSILDEGSGTYYADSVKGRFTISRDNSKNTLYLQMNSLRAEDTAVYYCAKPDKDFDYWGQGTLVTVSS

SEQ ID NO: 7947 - protein, 117 aa, Artificial Sequence
  source: /note="Description of Artificial Sequence: Synthetic polypeptide"
EVQLLESGGGLVQPGGSLRLSCAASGFTFGEEEMSWVRQAPGKGLEWVSAITDDGDDTYYADSVKGRFTISRDNSKNTLYLQMNSLRAEDTAVYYCAKPNAGAFDYWGQGTLVTVSS

SEQ ID NO: 7948 - protein, 116 aa, Artificial Sequence
  source: /note="Description of Artificial Sequence: Synthetic polypeptide"
EVQLLESGGGLVQPGGSLRLSCAASGFTFEVYDMAWVRQAPGKGLEWVSGIVNDGSSTYYADSVKGRFTISRDNSKNTLYLQMNSLRAEDTAVYYCAKPDKDFDYWGQGTLVTVSS

SEQ ID NO: 7949 - protein, 116 aa, Artificial Sequence
  source: /note="Description of Artificial Sequence: Synthetic polypeptide"
EVQLLESGGGLVQPGGSLRLSCAASGFTFGNTEMTWVRQAPGKGLEWVSSIADDGSSTYYADSVKGRFTISRDNSKNTLYLQMNSLRAEDTAVYYCAKPGQAFDYWGQGTLVTVSS

SEQ ID NO: 7950 - protein, 116 aa, Artificial Sequence
  source: /note="Description of Artificial Sequence: Synthetic polypeptide"
EVQLLESGGGLVQPGGSLRLSCAASGFTFEEYQMAWVRQAPGKGLEWVSTISDDGSSTYYADSVKGRFTISRDNSKNTLYLQMNSLRAEDTAVYYCAKPDLYFDYWGQGTLVTVSS

SEQ ID NO: 7951 - protein, 116 aa, Artificial Sequence
  source: /note="Description of Artificial Sequence: Synthetic polypeptide"
EVQLLESGGGLVQPGGSLRLSCAASGFTFEVYQMGWVRQAPGKGLEWVSFIVPGGDLTYYADSVKGRFTISRDNSKNTLYLQMNSLRAEDTAVYYCAETWPEFDYWGQGTLVTVSS

SEQ ID NO: 7952 - protein, 116 aa, Artificial Sequence
  source: /note="Description of Artificial Sequence: Synthetic polypeptide"
EVQLLESGGGLVQPGGSLRLSCAASGFTFDNYEMTWVRQAPGKGLEWVSSITSDGTSTYYADSVKGRFTISRDNSKNTLYLQMNSLRAEDTAVYYCAKPNPPFDYWGQGTLVTVSS

SEQ ID NO: 7953 - protein, 119 aa, Artificial Sequence
  source: /note="Description of Artificial Sequence: Synthetic polypeptide"
EVQLLESGGGLVQPGGSLRLSCAASGFTFKAYDMGWVRQAPGKGLEWVSQIGRDGSFTYYADSVKGRFTISRDNSKNTLYLQMNSLRAEDTAVYYCAKPRRYAIFTFDRGQGTLVTVSS

SEQ ID NO: 7954 - protein, 121 aa, Artificial Sequence
  source: /note="Description of Artificial Sequence: Synthetic polypeptide"
EVQLLESGGGLVQPGGSLRLSCAASGFTFKQYPMVWVRQAPGKGLEWVSTISTNGVRTYYADSVKGRFTISRDNSKNTLYLQMNSLRAEDTAVYYCAKWTDIISSSEFDYWGQGTLVTVSS

SEQ ID NO: 7955 - protein, 123 aa, Artificial Sequence
  source: /note="Description of Artificial Sequence: Synthetic polypeptide"
EVQLLESGGGLVQPGGSLRLSCAASGFTFFNYDMSWVRQAPGKGLEWVSAISGSGGSTYYADSVKGRFTISRDNSKNTLYLQMNSLRAEDTAVYYCAKVFVWSADIDFDFDYWGQGTLVTVSS

SEQ ID NO: 7956 - protein, 123 aa, Artificial Sequence
  source: /note="Description of Artificial Sequence: Synthetic polypeptide"
EVQLLESGGGLVQPGGSLRLSCAASGFTFSWYDMSWVRQAPGKGLEWVSHIASWGGKTYYADSVKGRFTISRDNSKNTLYLQMNSLRAEDTAVYYCAKVTVKDGGYLMDFDYWGQGTLVTVSS

SEQ ID NO: 7957 - protein, 122 aa, Artificial Sequence
  source: /note="Description of Artificial Sequence: Synthetic polypeptide"
EVQLLESGGGLVQPGGSLRLSCAASGFTFAEYAMAWVRQAPGKGLEWVSSIGRDGAVTYYADSVKGRFTISRDNSKNTLYLQMNSLRAEDTAVYYCAKWKAAKERGSWFDYWGQGTLVTVSS

SEQ ID NO: 7958 - protein, 116 aa, Artificial Sequence
  source: /note="Description of Artificial Sequence: Synthetic polypeptide"
EVQLLESGGGLVQPGGSLRLSCAASGFTFQAYQMQWVRQAPGKGLEWVSTISPNGLFTYYADSVKGRFTISRDNSKNTLYLQMNSLRAEDTAVYYCAKWLSSFDYWGQGTLVTVSS

SEQ ID NO: 7959 - protein, 120 aa, Artificial Sequence
  source: /note="Description of Artificial Sequence: Synthetic polypeptide"
EVQLLESGGGLVQPGGSLRLSCAASGFTFAMYSMAWVRQAPGKGLEWVSGISPRGVETYYADSVKGRFTISRDNSKNTLYLQMNSLRAEDTAVYYCAKTNWNGVDLFDYWGQGTLVTVSS

SEQ ID NO: 7960 - protein, 119 aa, Artificial Sequence
  source: /note="Description of Artificial Sequence: Synthetic polypeptide"
EVQLLESGGGLVQPGGSLRLSCAASGFTFPTYMMSWVRQAPGKGLEWVSTINTNGRDTYYADSVKGRFTISRDNSKNTLYLQMNSLRAEDTAVYYCAKGDSNMSFFDYWGQGTLVTVSS

SEQ ID NO: 7961 - protein, 120 aa, Artificial Sequence
  source: /note="Description of Artificial Sequence: Synthetic polypeptide"
EVQLLESGGGLVQPGGSLRLSCAASGFTFEGYSMTWVRQAPGKGLEWVSSINASGTLTYYADSVKGRFTISRDNSKNTLYLQMNSLRAEDTAVYYCAKDGNRSEVFFDYWGQGTLVTVSS

SEQ ID NO: 7962 - protein, 116 aa, Artificial Sequence
  source: /note="Description of Artificial Sequence: Synthetic polypeptide"
EVQLLESGGGLVQPGGSLRLSCAASGFTFFEYEMTWVRQAPGKGLEWVSSIANDGSTTYYADSVKGRFTISRDNSKNTLYLQMNSLRAEDTAVYYCAKPDRQFDYWGQGTLVTVSS

SEQ ID NO: 7963 - protein, 116 aa, Artificial Sequence
  source: /note="Description of Artificial Sequence: Synthetic polypeptide"
EVQLLESGGGLVQPGGSLRLSCAASGFTFQDYLMAWVRQAPGKGLEWVSEINQDGTVTYYADSVKGRFTISRDNSKNTLYLQMNSLRAEDTAVYYCAESSPYFDYWGQGTLVTVSS

SEQ ID NO: 7964 - protein, 123 aa, Artificial Sequence
  source: /note="Description of Artificial Sequence: Synthetic polypeptide"
EVQLLESGGGLVQPGGSLRLSCAASGFTFDNYAMSWVRQAPGKGLEWVSSISRDGHVTYYADSVKGRFTISRDNSKNTLYLQMNSLRAEDTAVYYCAKLSSKGGTFASSFDYWGQGTLVTVSS

SEQ ID NO: 7965 - protein, 119 aa, Artificial Sequence
  source: /note="Description of Artificial Sequence: Synthetic polypeptide"
EVQLLESGGGLVQPGGSLRLSCAASGFTFSAVPMTWVRQAPGKGLEWVSAITDDGLRTYYADSVKGRFTISRDNSKNTLYLQMNSLRAEDTAVYYCAKGHIYGDYFDYWGQGTLVTVSS

SEQ ID NO: 7966 - protein, 123 aa, Artificial Sequence
  source: /note="Description of Artificial Sequence: Synthetic polypeptide"
EVQLLESGGGLVQPGGSLRLSCAASGFTFELYRMMWVRQAPGKGLEWVSAISSDGDTTYYADSVKGRFTISRDNSKNTLYLQMNSLRAEDTAVYYCAEHWLGTTLSLRDFDYWGQGTLVTVSS

SEQ ID NO: 7967 - protein, 123 aa, Artificial Sequence
  source: /note="Description of Artificial Sequence: Synthetic polypeptide"
EVQLLESGGGLVQPGGSLRLSCAASGFTFYRYTMAWVRQAPGKGLEWVSQISPRGNITYYADSVKGRFTISRDNSKNTLYLQMNSLRAEDTAVYYCAKSGVAGAESPEYFDYWGQGTLVTVSS

SEQ ID NO: 7968 - protein, 119 aa, Artificial Sequence
  source: /note="Description of Artificial Sequence: Synthetic polypeptide"
EVQLLESGGGLVQPGGSLRLSCAASGFTFLGYYMSWIRQAPGKGLEWVSTIGPIGGGTYYADSVKGRFTISRDNSKNTLYLQMNSLRAEDTAVYYCAKSQNIYGPFDYWGQGTLVTVSS

SEQ ID NO: 7969 - protein, 116 aa, Artificial Sequence
  source: /note="Description of Artificial Sequence: Synthetic polypeptide"
EVQLLESGGGLVQPGGSLRLSCAASGFTFEQYDMAWVRQAPGKGLEWVSEISRDGGRTYYADSVKGRFTISRDNSKNTLYLQMNSLRAEDTAVYYCAEEYPYFDYWGQGTLVTVSS

SEQ ID NO: 7970 - protein, 121 aa, Artificial Sequence
  source: /note="Description of Artificial Sequence: Synthetic polypeptide"
EVQLLESGGGLVQPGGSLRLSCAASGFTFPQYSMVWVRQAPGKGLEWVSTISPLGSSTYYADSVKGRFTISRDNSKNTLYLQMNSLRAEDTAVYYCAKMSKLLLSREFDYWGQGTLVTVSS

SEQ ID NO: 7971 - protein, 120 aa, Artificial Sequence; identical to SEQ ID NO: 7959
  source: /note="Description of Artificial Sequence: Synthetic polypeptide"

SEQ ID NO: 7972 - protein, 119 aa, Artificial Sequence
  source: /note="Description of Artificial Sequence: Synthetic polypeptide"
EVQLLESGGGLVQPGGSLRLSCAASGFTFTRHGMAWVRQAPGKGLEWVSTITPTGNTTYYADSVKGRFTISRDNSKNTLYLQMNSLRAEDTAVYYCAKDAHDEGYFDYWGQGTLVTVSS

SEQ ID NO: 7973 - protein, 116 aa, Artificial Sequence
  source: /note="Description of Artificial Sequence: Synthetic polypeptide"
EVQLLESGGGLVQPGGSLRLSCAASGFTFGPYEMTWVRQAPGKGLEWVSSIVGDGLDTYYADSVKGRFTISRDNSKNTLYLQMNSLRAEDTAVYYCAKPDRVFDYWGQGTLVTVSS

SEQ ID NO: 7974 - protein, 114 aa, Artificial Sequence
  source: /note="Description of Artificial Sequence: Synthetic polypeptide"
EVQLLESGGGLVQPGGSLRLSCAASGFTFGSTPMMWVRQAPGKGLEWVSEIRDTGLATYYADSVKGRFTISRDNSKNTLYLQMNSLRAEDTAVYYCASVSFDYWGQGTLVTVSS

SEQ ID NO: 7975 - protein, 118 aa, Artificial Sequence
  source: /note="Description of Artificial Sequence: Synthetic polypeptide"
EVQLLESGGGLVQPGGSLRLSCAASGFTFHLGDMHWVRQAPGKGLEWVSSISGTGHTTYYADSVKGRFTISRDNSKNTLYLQMNSLRAEDTAVYYCAKPMNDQGFDYWGQGTLVTVSS

SEQ ID NO: 7976 - protein, 116 aa, Artificial Sequence
  source: /note="Description of Artificial Sequence: Synthetic polypeptide"
EVQLLESGGGLVQPGGSLRLSCAASGFTFMDEDMLWVRQAPGKGLEWVSRINSLGTHTYYADSVKGRFTISRDNSKNTLYLQMNSLRAEDTAVYYCAKSFMMFDYWGQGTLVTVSS

SEQ ID NO: 7977 - protein, 116 aa, Artificial Sequence
  source: /note="Description of Artificial Sequence: Synthetic polypeptide"
EVQLLESGGGLVQPGGSLRLSCAASGFTFRNYQMHWVRQAPGKGLEWVSGIDATGRATYYADSVKGRFTISRDNSKNTLYLQMNSLRAEDTAVYYCARSTRSFDYWGQGTLVTVSS

SEQ ID NO: 7978 - protein, 118 aa, Artificial Sequence
  source: /note="Description of Artificial Sequence: Synthetic polypeptide"
EVQLLESGGGLVQPGGSLRLSCAASGFTFTNADMVWVRQAPGKGLEWVSSISGSGGSTYYADSVKGRFTISRDNSKNTLYLQMNSLRAEDTAVYYCAKGYLTSHFDYWGQGTLVTVSS

SEQ ID NO: 7979 - protein, 120 aa, Artificial Sequence
  source: /note="Description of Artificial Sequence: Synthetic polypeptide"
EVQLLESGGGLVQPGGSLRLSCAASGFTFRDYSMAWVRQAPGKGLEWVSTITPSGLTTYYADSVKGRFTISRDNSKNTLYLQMNSLRAEDTAVYYCAEWSQAVTRSFDYWGQGTLVTVSS

SEQ ID NO: 7980 - protein, 116 aa, Artificial Sequence
  source: /note="Description of Artificial Sequence: Synthetic polypeptide"
EVQLLESGGDLVQPGGSLRLSCAASGFTFSDEGMMWVRQAPGKGLEWVSEINQQGSATYYADSVKGRFTISRDNSKNTLYLQMNSLRAEDTAVYYCAKTIGMFDYWGQGTLVTVSS

SEQ ID NO: 7981 - protein, 123 aa, Artificial Sequence
  source: /note="Description of Artificial Sequence: Synthetic polypeptide"
EVQLLESGGGLVQPGGSLRLSCAASGFTFTDQPMVWVRQAPGKGLEWVSSIGARGGPTYYADSVKGRFTVSRDNSKNTLYLQMNSLRAEDTAVYYCAKWFDIIAWDPFSFDYWGQGTLVTVSS

SEQ ID NO: 7982 - protein, 119 aa, Artificial Sequence
  source: /note="Description of Artificial Sequence: Synthetic polypeptide"
EVQLLESGGGLVQPGGSLRLSCAASGFTFNQYPMMWVRQAPGKGLEWVSSITPSGFLTYYADSVKGRFTISRDNSKNTLYLQMNSLRAEDTAVYYCAEWNPFITTFDYWGQGTLVTVSS

SEQ ID NO: 7983 - protein, 118 aa, Artificial Sequence
  source: /note="Description of Artificial Sequence: Synthetic polypeptide"
EVQLLESGGGLVQPGGSLRLSCAASGFTFGHQQMAWVRQAPGKGLEWVSTITPNGYYTYYADSVKGRFTISRDNSKNTLYLQMNSLRAEDTAVYYCAKFDYSLRFDYWGQGTLVTVSS

SEQ ID NO: 7984 - protein, 116 aa, Artificial Sequence
  source: /note="Description of Artificial Sequence: Synthetic polypeptide"
EVQLLESGGGLVQPGGSLRLSCAASGFTFASYEMAWVRQAPGKGLEWVSSIGSDGGPTYYADSVKGRFTISRDNSKNTLYLQMNSLRAEDSAVYYCAKPDRAFDYWGQGTLVTVSS

SEQ ID NO: 7985 - protein, 124 aa, Artificial Sequence
  source: /note="Description of Artificial Sequence: Synthetic polypeptide"
EVQLLESGGGLVQPGGSLRLSCAASGFTFSAEQMTWARQAPGKGLEWVSTITPHGDSTYYADSVKGRFTISRDNSKNTLYLQMNSLRAEDTAVYYCAKWRTLVDWPTSESFDYWGQGTLVTVSS

SEQ ID NO: 7986 - protein, 119 aa, Artificial Sequence
  source: /note="Description of Artificial Sequence: Synthetic polypeptide"
EVQLLESGGGLVQPGGSLRLSCAASGFTFTSYEMGWVRQAPGKGLEWVSSIEPTGITTYYADSVKGRFTISRDNSKNTLYLQMNSLRAEDTAVYYCAKPHFTELGFDYWGQGTLVTVSS

SEQ ID NO: 7987 - protein, 117 aa, Artificial Sequence
  source: /note="Description of Artificial Sequence: Synthetic polypeptide"
EVQLLESGGGLVQPGGSLRLSCAASGFTFEGEQMAWVRQAPGKGLEWVSTITLPGPYTFYADSVKGRFTISRDNSKNTLYLQMNSLRAEDTAVYYCAKGNGTFFDYWGQGTLVTVSS

SEQ ID NO: 7988 - protein, 120 aa, Artificial Sequence
  source: /note="Description of Artificial Sequence: Synthetic polypeptide"
EVQLLESGGGLVQPGGSLRLSCAASGFTFGNYAMAWVRQAPGKGLEWVSKIGAQGLHTYYAGSVKGRFTISRDNSKNTLYLQMNSLRAEDTAVYYCAKQTTMDYERFDYWGQGTLVTVSS

SEQ ID NO: 7989 - protein, 121 aa, Artificial Sequence
  source: /note="Description of Artificial Sequence: Synthetic polypeptide"
EVQLLESGGGLVQPGGSLRLSCAASGFTFDEVDMSWVRQAPGKGLEWVSAIGNNGLKTYYADSVKGRFTISRDNSKNTLYLQMNSLRAEDTAVYYCAKSALSYRPPVFDYWGQGTLVTVSS

SEQ ID NO: 7990 - protein, 118 aa, Artificial Sequence
  source: /note="Description of Artificial Sequence: Synthetic polypeptide"
EVQLLESGGGLVQPGGSLRLSCAASGFTFQDDTMSWVRQAPGKGLEWVSTITLKGPSTYYADSVKGRFTISRDNSKNTLYLQMNSLRAEDTAVYYCAKSRDGLYFDYWGQGTLVTVSS

SEQ ID NO: 7991 - protein, 118 aa, Artificial Sequence
  source: /note="Description of Artificial Sequence: Synthetic polypeptide"
EVQLLESGGGLVQPGGSLRLSCAASGFTFASSPMAWVRQAPGKGLEWVSSIGRDGSTTYYADSVKGRFTISRDNSKNTLYLQMNSLRAEDTAVYYCAKPSPYRRFDYWGQGTLVTVSS

SEQ ID NO: 7992 - protein, 120 aa, Artificial Sequence
  source: /note="Description of Artificial Sequence: Synthetic polypeptide"
EVQLLESGGGLVQPGGSLRLSCAASGFTFTDYSMVWVRQAPGKGLEWVSTIVSHGGTTYYADSVKGRFTISRDNSKNTLYLQMNSLRAEDTAVYYCAKGKGYNAQYFDYWGQGTLVTVSS

SEQ ID NO: 7993 - protein, 118 aa, Artificial Sequence; identical to SEQ ID NO: 7983
  source: /note="Description of Artificial Sequence: Synthetic polypeptide"

SEQ ID NO: 7994 - protein, 116 aa, Artificial Sequence
  source: /note="Description of Artificial Sequence: Synthetic polypeptide"
EVQLLESGGGLVQPGGSLRLSCAASGFTFNDYDMIWVRQAPGKGLEWVSTISSHGDSTYYADSVKGRFTISRDNSKNTLYLQMNSLRAEDTAVYYCAKGDVFFDYWGQGTLVTVSS

SEQ ID NO: 7995 - protein, 116 aa, Artificial Sequence
  source: /note="Description of Artificial Sequence: Synthetic polypeptide"
EVQLLESGGGLVQPGGSLRLSCAASGFTFGHQQMAWVRQAPGKGLEWVSTITPNGYYTYYADSVKGRFTISRDNSKNTLYLQMNSLRAEDTAVYYCAEWSDSFDYRGQGTLVTVSS

SEQ ID NO: 7996 - protein, 119 aa, Artificial Sequence
  source: /note="Description of Artificial Sequence: Synthetic polypeptide"
EVQLLESGGGLVQPGGSLRLSCAASGFTFADYEMAWVRQAPGKGLEWVSGIQSNGNITYYADSVKGRFTISRDNSKNTLYLQMNSLRAEDTAVYYCAKANSQVEYFDYWGQGTLVTVSS

SEQ ID NO: 7997 - protein, 118 aa, Artificial Sequence
  source: /note="Description of Artificial Sequence: Synthetic polypeptide"
EVQLLESGGGLVQPGGSLRLSCAASGFTFGVEPMSWVRQAPGKGLEWVSNIGRDGSMTYYADSVKGRFTISRDNSKNTLYLQMNSLRAEDTAVYYCAKLGKHGTFDYWGQGTLVTVSS

SEQ ID NO: 7998 - protein, 119 aa, Artificial Sequence
  source: /note="Description of Artificial Sequence: Synthetic polypeptide"
EVQLLESGGGLVQPGGSLRLSCAASGFTFPEYRMMWVRQAPGKGLEWVSWIDERGSLTYYADSVKGRFTISRDNSKNTLYLQMNSLRAEDTAVYYCAKRRKGTKQFDYWGQGTLVTVSS

SEQ ID NO: 7999 - protein, 117 aa, Artificial Sequence
  source: /note="Description of Artificial Sequence: Synthetic polypeptide"
EVQLLESGGGLVQPGGSLRLSCAASGFTFIAYDMSWVRQAPGKGLEWVSWIDEWGLQTYYADSVKGRFTISRDNSKNTLYLQMNSLRAEDTAVYYCAKKTPEEFDYWGQGTLVTVSS

SEQ ID NO: 8000 - protein, 122 aa, Artificial Sequence
  source: /note="Description of Artificial Sequence: Synthetic polypeptide"
EVQLLESGGGLVQPGGSLRLSCAASGFTFELYAMAWVRQAPGKGLEWVSGIGAVGETTYYADSVKGRFTISRDNSKNTLYLQMNSLRAEDTAVYYCAKEANNLSDNLVFDYWGQGTLVTVSS

SEQ ID NO: 8001 - protein, 117 aa, Artificial Sequence
  source: /note="Description of Artificial Sequence: Synthetic polypeptide"
EVQLLESGGGLVQPGGSLRLSCAASGFTFGHQQMAWVRQAPGKGLEWVSTITPNGYYTYYADSVKGRFTISRDNSKNTLYLQMNSLRAEDTAVYYCAKWSVEWFDYWGQGTLVTVSS

SEQ ID NO: 8002 - protein, 116 aa, Artificial Sequence
  source: /note="Description of Artificial Sequence: Synthetic polypeptide"
EVQLLESGGGLVQPGGSLRLSCAASGFTFNSYTMNWVRQAPGKGLEWVSSINPWGSRTYYADSVKGRFTISRDNSKNTLYLQMNSLRAEDTAVYYCAKGLVLFDYWGQGTLVTVSS

SEQ ID NO: 8003 - protein, 119 aa, Artificial Sequence
  source: /note="Description of Artificial Sequence: Synthetic polypeptide"
EVQLLESGGGLVQPGGSLRLSCAASGFTFDGDMMSWVRQAPGKGLEWVSSITQLGSRTYYADSVKGRFTISRDNSKNTLYLQMNSLRAEDTAVYYCAKQNWRTLTFDYWGQGTLVTVSS

SEQ ID NO: 8004 - protein, 119 aa, Artificial Sequence
  source: /note="Description of Artificial Sequence: Synthetic polypeptide"
EVQLLESGGGLVQPGGSLRLSCAASGFTFNAYGMMWVRQAPGKGLEWVSSILSDGVITYYADSVKGRFTISRDNSKNTLYLQMNSLRAEDTAVYYCAKSARGANFFDYWGQGTLVTVSS

SEQ ID NO: 8005 - protein, 120 aa, Artificial Sequence
  source: /note="Description of Artificial Sequence: Synthetic polypeptide"
EVQLLESGGGLVQPGGSLRLSCAASGFTFGHYMMVWVRQAPGKGLEWVSSITPHGTSTYYADSVKGRFTISRDNSKNTLYLQMNSLRAEDTAVYYCAEFNAIFSEAFDYWGQGTLVTVSS

SEQ ID NO: 8006 - protein, 120 aa, Artificial Sequence; identical to SEQ ID NO: 7979
  source: /note="Description of Artificial Sequence: Synthetic polypeptide"

SEQ ID NO: 8007 - protein, 120 aa, Artificial Sequence
  source: /note="Description of Artificial Sequence: Synthetic polypeptide"
EVQLLESGGGLVQPGGSLRLSCAASGFTFDLYAMAWVRQAPGKGLEWVSMIGRDGRFTYYADSVKGRFTISRDNSKNTLYLQMNSLRAEDTAVYYCAKLAGSLRGRFDYWGQGTLVTVSS

SEQ ID NO: 8008 - protein, 118 aa, Artificial Sequence
  source: /note="Description of Artificial Sequence: Synthetic polypeptide"
EVQLLESGGGLVQPGGSLRLSCAASGFTFNKASMGWVRQAPGKGLEWVSTITPHGSSTYYADSVKGRFTISRDNSKNTLYLQMNSLRAEDTAVYYCAKQRWGVEFDYWGQGTLVTVSS

SEQ ID NO: 8009 - protein, 120 aa, Artificial Sequence
  source: /note="Description of Artificial Sequence: Synthetic polypeptide"
EVQLLESGGGLVQPGGSLRLSCAASGFTFQGYSMGWVRQAPGKGLEWVSSIAGRGGVTYYADSVKGRFTISRDNSKNTLYLQMNSLRAEDTAVYYCAKGLYIYHSLFDYWGQGTLVTVSS

SEQ ID NO: 8010 - protein, 116 aa, Artificial Sequence
  source: /note="Description of Artificial Sequence: Synthetic polypeptide"
EVQLLESGGGLVQPGGSLRLSCAASGFTFGDYEMSWVRQAPGKGLEWVSGIDGEGSDTYYADSVKGRFTISRDNSKNTLYLQMNSLRAEDTAVYYCAKPGRSFDYWGQGTLVTVSS

SEQ ID NO: 8011 - protein, 116 aa, Artificial Sequence
  source: /note="Description of Artificial Sequence: Synthetic polypeptide"
EVQLLESGGGLVQPGGSLRLSCAASGFTFPGMEMSWVRQAPGKGLEWVSAITGTGSTTYYADSVKGRFTISRDNSKNTLYLQMNSLRAEDTAVYYCAKGYHPFDYWGQGTLVTVSS

SEQ ID NO: 8012 - protein, 117 aa, Artificial Sequence
  source: /note="Description of Artificial Sequence: Synthetic polypeptide"
EVQLLESGGGLVQPGGSLRLSCAASGFTFPMVAMSWVRQAPGKGLEWVSSIARDGNVTYYADSVKGRFTISRDNSKNTLYLQMNSLRAEDAAVYYCAKVSPTGFDYWGQGTLVTVSS

SEQ ID NO: 8013 - protein, 116 aa, Artificial Sequence
  source: /note="Description of Artificial Sequence: Synthetic polypeptide"
EVQLLESGGGLVQPGGSLRLSCAASGFTFGHQDMSWVRQAPGKGLEWVSGITDDGESTYYADSVKGRFTISRDNSKNTLYLQMNSLRAEDTAVYYCAKGDYDFDYWGQGTLVTVSS

SEQ ID NO: 8014 - protein, 117 aa, Artificial Sequence
  source: /note="Description of Artificial Sequence: Synthetic polypeptide"
EVQLLESGGGLVQPGGSLRLSCAASGFTFGEYNMMWVRQAPGKGLEWVSQITRDGSRTYYADSVRGRFTISRDNSRNTLYLQMNSLRAEDSAVYYCAKLSNIGFDYWGQGTLVTVSS

SEQ ID NO: 8015 - protein, 116 aa, Artificial Sequence
  source: /note="Description of Artificial Sequence: Synthetic polypeptide"
EVQLLESGGGLVQPGGSLRLSCAASGFTFSDYSMIWARQAPGKGLEWVSSITPYGSYTYYADSVKGRFTISRDNSKNTLYLQMNSLRAEDTAVYYCAKTDYLFDYWGQGTLVTVSS

SEQ ID NO: 8016 - protein, 116 aa, Artificial Sequence
  source: /note="Description of Artificial Sequence: Synthetic polypeptide"
EVQLLESGGGLVQPGGSLRLSCAASGFTFDTYSMMWVRQAPGKGLEWVSTITPYGSSTYYADSVKGRFTISRDNSKNTLYLQMNSLRAEDTAVYYCAKWGLVFDYWGQGTLVTVSS

SEQ ID NO: 8017 - protein, 118 aa, Artificial Sequence
  source: /note="Description of Artificial Sequence: Synthetic polypeptide"
EVQLLESGGGLVQPGGSLRLSCAASGFTFTTGPMMWVRQAPGKGLEWVSAIGIGGDTTYYADSVKGRFTISRDNSKNTLYLQMNSLRAEDTAVYYCAKLTPSNQFDYWGQGTLVTVSS

SEQ ID NO: 8018 - protein, 119 aa, Artificial Sequence
  source: /note="Description of Artificial Sequence: Synthetic polypeptide"
EVQLLESGGGLVQPGGSLRLSCAASGFTFKQYQMMWVRQAPGKGLEWVSSITPSGFLTYYADSVKGRFTISRDNSKNTLYLQMNSLRAEDTAVYYCAEWNPFISTFDYWGQGTLVTVSS

SEQ ID NO: 8019 - protein, 120 aa, Artificial Sequence
  source: /note="Description of Artificial Sequence: Synthetic polypeptide"
EVQLLESGGGLVQPGGSLRLSCAASGFTFPNYDMVWVRQAPGKGLEWVSSISALGNVTYYADSVKGRFTISRDNSKNTLYLQTNSLRAEDTAVYYCAKWRSAITGNFDYWGQGTLVTVSS

SEQ ID NO: 8020 - protein, 123 aa, Artificial Sequence
  source: /note="Description of Artificial Sequence: Synthetic polypeptide"
EVQLLESGGGLVQPGGSLRLSCAASGFTFKEYQMSWVRQAPGKGLEWVSTISPSGMNTYYADSVKGRFTISRDNSKNTLYLQMNSLRAEDTAVYYCAEWRSVVRPWPGVFDYWGQGTLVTVSS

SEQ ID NO: 8021 - protein, 124 aa, Artificial Sequence
  source: /note="Description of Artificial Sequence: Synthetic polypeptide"
EVQLLESGGGLVQPGGSLRLSCAASGFTFERYPMTWVRQAPGKGLEWVSTIHGSGSATYYADSVKGRFTISRDNSKNTLYLQMNSLRAEDTAVYYCAKGPYTSRHNSLGHFDYWGQGTLVTVSS

SEQ ID NO: 8022 - protein, 121 aa, Artificial Sequence
  source: /note="Description of Artificial Sequence: Synthetic polypeptide"
EVQLLESGGGLVQPGGSLRLSCAASGFTFDDESMAWVRQAPGKGLEWVSSITPHGTFTYYADSVKGRFTISRDNSKNTLYLQMNSLRAEDTAVYYCAKLHLKLYESHFDYWGQGTLVTVSS

SEQ ID NO: 8023 - protein, 116 aa, Artificial Sequence
  source: /note="Description of Artificial Sequence: Synthetic polypeptide"
EVQLLESGGGLVQPGGSLRLSCAASGFTFEGGEMGWVRQAPGKGLEWVSMIPMDGSATYYADSVKGRFTISRDNSKNTLYLQMNSLRAEDTAVYYCAKAGSTFDYWGQGTLVTVSS

SEQ ID NO: 8024 - protein, 118 aa, Artificial Sequence
  source: /note="Description of Artificial Sequence: Synthetic polypeptide"
EVQLLESGGGLVQPGGSLRLSCAASGFTFDFMPMAWVRQAPGKGLEWVSSIGRDGAYTYYADSVKGRFTISRDNSKNTLYLQMNSLRAEDTAVYYCAKLASPAQFDYWGQGTLVTVSS

SEQ ID NO: 8025 - protein, 121 aa, Artificial Sequence
  source: /note="Description of Artificial Sequence: Synthetic polypeptide"
EVQLLESGGGLVQPGGSLRLSCAASGFTFGDEPMLWVRQAPGKGLEWVSSIGGTGTTTYYADSVKGRFTISRDNSKNTLYLQMNSLRAEDTAVYYCAKGNQGDFINRFHYWGQGTLVTVSS

SEQ ID NO: 8026 - protein, 119 aa, Artificial Sequence
  source: /note="Description of Artificial Sequence: Synthetic polypeptide"
EVQLLESGGGLVQPGGSLRLSCAASGFTFHAYNMAWVRQAPGKGLEWVSTISPRGSYTYYADSVKGRFTISRDNSKNTLYLQMNSLRAEDTAVYYCAKWPPPSSHFDYWGQGTLVTVSS

SEQ ID NO: 8027 - protein, 116 aa, Artificial Sequence
  source: /note="Description of Artificial Sequence: Synthetic polypeptide"
EVQLLESGGGLVQPGGSLRLSCAASGFTFDGYEMAWVRQAPGKGLEWVSSITSDGTSTYYADSVKGRFTISRDNSKNTLYLQMNSLRAEDTAVYYCAKPGLRFDYWGQGTLVTVSS

SEQ ID NO: 8028 - protein, 119 aa, Artificial Sequence
  source: /note="Description of Artificial Sequence: Synthetic polypeptide"
EVQLLESGGGLVQPGGSLRLSCAASGFTFEGYMMYWVHQAPGKGLEWVSSISPQGHFTYYADSVKGRFTISRDNSKNTLYLQMNSLRAEDTAVYYCAELRELPRLFDYWGQGTLVTVSS

SEQ ID NO: 8029 - protein, 123 aa, Artificial Sequence
  source: /note="Description of Artificial Sequence: Synthetic polypeptide"
EVQLLESGGGLVQPGGSLRLSCAASGFTFSSYAMGWVRQAPGKGLEWVSSIDASGGPTYYADSVKGRFTISRDNSKNTLYLQMNSLRAEDTAVYYCAKANGKKFPFTKYFDYWGQGTLVTVSS

SEQ ID NO: 8030 - protein, 123 aa, Artificial Sequence
  source: /note="Description of Artificial Sequence: Synthetic polypeptide"
EVQLLESGGGLVQPGGSLRLSCAASGFTFPSVHMAWVRQAPGKGLEWVSGINLTGVDTYYADSVKGRFTISRDNSKNTLYLQMNSLRAEDTAVYYCAKSATTRQAHPLYFDYWGQGTLVTVSS

SEQ ID NO: 8031 - protein, 118 aa, Artificial Sequence
  source: /note="Description of Artificial Sequence: Synthetic polypeptide"
EVQLLESGGGLVQPGGSLRLSCAASGFTFKEGEMYWVRQAPGKGLEWVSTISTNGLTTYYADSVKGRFTISRDNSKNTLYLQMNSLRAEDTAVYYCAKSTRDLGFAYWGQGTLVTVSS

SEQ ID NO: 8032 - protein, 123 aa, Artificial Sequence
  source: /note="Description of Artificial Sequence: Synthetic polypeptide"
EVQLLESGGGLVQPGGSLRLSCAASGFTFMDYPMGWVRQAPGKGLEWVSSIGPVGMSTYYADSVKGRFTISRDNSKNTLYLQMNSLRAEDTAVYYCAKYGGTSGRHNTKFDYWGQGTLVTVSS

SEQ ID NO: 8033 - protein, 116 aa, Artificial Sequence
  source: /note="Description of Artificial Sequence: Synthetic polypeptide"
EVQLLESGGGLVQPGGSLRLSCAASGFTFEEYEMAWARQAPGKGLEWVSFISPRGHFTYYADSVKGRFTISRDNSKNTLYLQMNSLRAEDTAVYYCAKPAKTFDYWGQGTLVTVSS

SEQ ID NO: 8034 - protein, 116 aa, Artificial Sequence
  source: /note="Description of Artificial Sequence: Synthetic polypeptide"
EVQLLESGGGLVQPGGSLRLSCAASGFTFDTYEMLWVRQAPGKGLEWVSRISVDGSITYYADSVKGRFTISRDNSKNTLYLQMNSLRAEDTAVYYCAKTRMRFDYWGQGTLVTVSS

SEQ ID NO: 8035 - protein, 124 aa, Artificial Sequence
  source: /note="Description of Artificial Sequence: Synthetic polypeptide"
EVQLLESGGGLVQPGGSLRLSCAASGFTFSSYAMSWVRQAPGKGLEWVSNISRDGSKTYYADSVKGRFTISRDNSKNTLYLQMNSLRAEDTAVYYCAEAQSGGLRSGLTTFDYWGQGTLVTVSS

SEQ ID NO: 8036 - protein, 119 aa, Artificial Sequence
  source: /note="Description of Artificial Sequence: Synthetic polypeptide"
EVQLLESGGGLVQPGGSLRLSCADSGFTFSSYAMSWVRQAPGKGLEWVSSIGRDGAYTYYADSVKGRFTISRDNSKNTLYLQMNSLRAEDTAVYYCAKAGPKGIAFDYWGQGTLVTVSS

SEQ ID NO: 8037 - protein, 116 aa, Artificial Sequence
  source: /note="Description of Artificial Sequence: Synthetic polypeptide"
EVQLLESGGGLVQPGGSLRLSCAASGFTFSPHAMAWVRQAPGKGLEWVSGIDGGGSMTYYADSVKGRFTISRDNSKNTLYLQMNSLRAEDTAVYYCAKSDPPFDYWGQGTLVTVSS

SEQ ID NO: 8038 - protein, 118 aa, Artificial Sequence
  source: /note="Description of Artificial Sequence: Synthetic polypeptide"
EVQLLESGGGLVQPGGSLRLSCAASGFTFHAGEMHWVRQAPGKGLEWVSSITLPGDMTYYADSVKGRFTISRDNSKNTLYLQMNSLRAEDTAVYYCAKPNTGYTFDYWGQGTLVTVSS

SEQ ID NO: 8039 - protein, 116 aa, Artificial Sequence
  source: /note="Description of Artificial Sequence: Synthetic polypeptide"
EVQLLESGGGLVQPGGSLRLSCAASGFTFGNYGMSWVRQAPGKGLEWVSSISWDGSLTYYADSVKGRFTISRDNSKNTLYLQMNSLRAEDTAVYYCAQNTRLFDYWGQGTLVTVSS

SEQ ID NO: 8040 - protein, 116 aa, Artificial Sequence
  source: /note="Description of Artificial Sequence: Synthetic polypeptide"
EVQLLESGGGLVQPGGSLRLSCAASGFTFHDADMLWVRQAPGKGLEWVSGILSPGEDTYYADSVKGRFTISRDNSKNTLYLQMNSLRAEDTAVYYCAKFGLPFDYWGQGTLVTVSS

SEQ ID NO: 8041 - protein, 116 aa, Artificial Sequence
  source: /note="Description of Artificial Sequence: Synthetic polypeptide"
EVQLLESGGGLVQPGGSLRLSCAASGFTFRTDQMNWVRQAPGKGLEWVSSISPSGAYTYYADSVKGRFTISRDNSKNTLYLQMNSLRAEDTAVYYCAKGLGAFDYWGQGTLVTVSS

SEQ ID NO: 8042 - protein, 120 aa, Artificial Sequence
  source: /note="Description of Artificial Sequence: Synthetic polypeptide"
EVQLLESGGGLVQPGGSLRLSCAASGFIFEQYQMVWVRQAPGKGLEWVSWISPDGTHTYYADSVKGRFTISRDNSKNTLYLQMNSLRAEDTAVYYCAKFSLRKMEKFDYWGQGTLVTVSS

SEQ ID NO: 8043 - protein, 123 aa, Artificial Sequence
  source: /note="Description of Artificial Sequence: Synthetic polypeptide"
EVQLLESGGGLVQPGGSLRLSCAASGFTFTEYPMSWVRQAPGKGLEWVSVISPLGFTTYYADSVKGRFTISRDNSKNTLYLQMNSLRAEDTAVYYCAKWTGGSGILNSSFDYWGQGTLVTVSS

SEQ ID NO: 8044 - protein, 116 aa, Artificial Sequence
  source: /note="Description of Artificial Sequence: Synthetic polypeptide"
EVQLLESGGGLVQPGGSLRLSCAASGFTFQDEQMAWVRQAPGKGLEWVSSIASDGMSTYYADSVKGRFTISRDNSKNTLYLQMNSLRAEDTAVYYCAQPGKNFDHWGQGTLVTVSS

SEQ ID NO: 8045 - protein, 120 aa, Artificial Sequence
  source: /note="Description of Artificial Sequence: Synthetic polypeptide"
EVQLLESGGGLVQPGGSLRLSCAASGFTFSDYAMSWVRQAPGKGLEWVSSITTGGERTYYADSVKGRFTISRDNSKNTLYLQMNSLRAEDTAVYYCAKRWNLYTESFDYWGQGTLVTVSS

SEQ ID NO: 8046 - protein, 117 aa, Artificial Sequence
  source: /note="Description of Artificial Sequence: Synthetic polypeptide"
EVQLLESGGGLVQPGGSLRLSCAASGFTFGGQPMDWVRQAPGKGLEWVSSIAPDGIHTYYADSVKGRFTISRDNSKNTLYLQMNSLRAEDTAVYYCAKNLGQGFDYWGQGTLVTVSS

SEQ ID NO: 8047 - protein, 116 aa, Artificial Sequence
  source: /note="Description of Artificial Sequence: Synthetic polypeptide"
EVQLLESGGGLVQPGGSLRLSCAASGFTFERYQMTWVRQAPGKGLEWVSSISPSGTFTYYADSVKGRFTISRDNSKNTLYLQMNSLRAEDTAVYYCAEWKALFDYWGQGTLVTVSS

SEQ ID NO: 8048 - protein, 117 aa, Artificial Sequence
  source: /note="Description of Artificial Sequence: Synthetic polypeptide"
EVQLLESGGGLVQPGGSLRLSCAASGFTFPHSTMYWVRQAPGKGLEWVSLILPSGSRTYYADSVKGRFTISRDNSKNTLYLQMNSLRAEDTAVYYCAKFSDERFDYWGQGTLVTVSS

SEQ ID NO: 8049 - protein, 117 aa, Artificial Sequence
  source: /note="Description of Artificial Sequence: Synthetic polypeptide"
EVQLSESGGGLVQPGGSLRLSCAASGFTFGDGNMDWVRQAPGKGLEWVSGISSDGVTTYYADSVKGRFTISRDNSKNTLYLQMNSLRAEDTAVYYCAKDRGQGFDYWGQGTLVTVSS

SEQ ID NO: 8050 - protein, 116 aa, Artificial Sequence
  source: /note="Description of Artificial Sequence: Synthetic polypeptide"
EVQLLESGGGLVQPGGSLRLSCAASGFTFDDYMMWWVRQAPGKGLEWVSSISPHGVYTYYADSVKGRFTISRDNSKNTLYLQMNSLRAEDTAVYYCAKWLHTFDYWGQGTLVTVSS

SEQ ID NO: 8051 - protein, 123 aa, Artificial Sequence
  source: /note="Description of Artificial Sequence: Synthetic polypeptide"
EVQLLESGGGLVQPGGSLRLSCAASGFTFSNYTMAWGRQAPGKGLEWVSFIAGPGNYTYYADSVKGRFTISRDNSKNTLYLQMNSLRAEDTAVYYCAKPGSTATYNNGQFDYWGQGTLVTVSS

SEQ ID NO: 8052 - protein, 122 aa, Artificial Sequence
  source: /note="Description of Artificial Sequence: Synthetic polypeptide"
EVQLLESGGGLVQPGGSLRLSCAASGFTFTEYSMVWVRQAPGKGLEWVSSISGSGRVTYYADSVKGRFTISRDNSKNTLYLQMNSLRAEDTAVYYCAKWLKLVRAPNPFDYWGQGTLVTVSS

SEQ ID NO: 8053 - protein, 120 aa, Artificial Sequence
  source: /note="Description of Artificial Sequence: Synthetic polypeptide"
EVQLLESGGGLVQPGGSLRLSCAASGFTFSNYQMAWVRQAPGKGLEWVSGISKTGHSTYYADSVKGRFTISRDNSRNTLYLQMNSLRAEDTAVYYCAKASHSLGPLFDYWGQGTLVTVSS

SEQ ID NO: 8054 - protein, 123 aa, Artificial Sequence
  source: /note="Description of Artificial Sequence: Synthetic polypeptide"
EVQLLESGGGLVQPGGSLRLSCAASGFRVSNYDLTWVRQAPGKGLEWVSTISATNGSTYYADSVKGRFTISRDNSKNTLYLQMNSLRAEDTAVYYCAAVTWWLLRHNDNLGFWGQGTLVTVSS

SEQ ID NO: 8055 - protein, 123 aa, Artificial Sequence
  source: /note="Description of Artificial Sequence: Synthetic polypeptide"
EVQLLESGGGLVQPGGSLRLSCAASGFTFTAYRMAWVRQAPGKGLEWVSWISPSGSGTYYADSVKGRFTISRDNSKNTLYLQMNSLRAEDTAVYYCAKTLTDSPSGHYEFDYWGQGTLVTVSS

SEQ ID NO: 8056 - protein, 123 aa, Artificial Sequence
  source: /note="Description of Artificial Sequence: Synthetic polypeptide"
EVQLLESGGGLVQPGGSLRLSCAASGFTFARYEMGWVRQAPGKGLEWVSRITAQGLGTYYADSVKGRFTISRDNSKNTLYLQMNSLRAEDTAVYYCAKYLTDFSSGHQEFDYWGQGTLVTVSS

SEQ ID NO: 8057 - protein, 122 aa, Artificial Sequence
  source: /note="Description of Artificial Sequence: Synthetic polypeptide"
EVQLLESGGGLVQPGGSLRLSCAASGFTFDDYGMSWVRQVPGKGLEWVSGISHNGMLTYYADSVKGRFTISRDNSKNTLYLQMNSLRAEDTAVYYCAKYWPSTSWETDFDYWGQGTLVTVSS

SEQ ID NO: 8058 - protein, 117 aa, Artificial Sequence
  source: /note="Description of Artificial Sequence: Synthetic polypeptide"
EVQLLESGGGSVQPGGSLRLSCAASGFTFGNEPMAWVRQAPGKGLEWVSSIEMQGKNTYYADSVKGRFTISRDNSKNTLYLQMNSLRAEDTAVYYCAKDRGQGFDYWGQGTLVTVSS

SEQ ID NO: 8059 - protein, 120 aa, Artificial Sequence
  source: /note="Description of Artificial Sequence: Synthetic polypeptide"
EVQLLESGGGLVQPGGSLRLSCAASGFTFGEEEMSWVRQAPGKGLEWVSCIDNLGSPTYYADSVKGRFTISRDNSKNTLYLQMNSLRAEDAAVYYCAKTISHQYDRFDYWGQGTLVTVSS

SEQ ID NO: 8060 - protein, 120 aa, Artificial Sequence
  source: /note="Description of Artificial Sequence: Synthetic polypeptide"
EVQLLESGGGLVQPGGSLRLSCAASGFTFGEEEMSWVRQAPGKGLEWVSSIDEGGRWTYYADSVKGRFTISRDNSKNTLYLQMNSLRAEDTAVYYCAKWTPHKQLSFDYWGQGTLVTVSS

SEQ ID NO: 8061 - protein, 116 aa, Artificial Sequence
  source: /note="Description of Artificial Sequence: Synthetic polypeptide"
EVQLLESGGGLVQPGGSLRLSCAASGFSFADEYMVWARQAPGKGLEWVSEIDPLGTGTYYADSVKGRFTISRDNSKNTLYLQMNSLRAEDTAVYYCAKYGTAFDYWGQGTLVTVSS

SEQ ID NO: 8062 - protein, 119 aa, Artificial Sequence
  source: /note="Description of Artificial Sequence: Synthetic polypeptide"
EVQLLESGGGLVQPGGSLRLSCAASGFTFSTHDMMWVRQAPGKGLEWVSSISDDGISTYYADSVKGRFTISRDNSKNTLYLQMNSLRAEDTAVYYCAKPDMSLIEFDYWGQGTLVTVSS

SEQ ID NO: 8063 - protein, 121 aa, Artificial Sequence
  source: /note="Description of Artificial Sequence: Synthetic polypeptide"
EVQLLESGGGLVQPGGSLRLSCAASGFTFDGTPMVWVRQAPGKGLEWVSGISGDGRNTYYADSVKGRFTISRDNSKNTLYLQMNSLRAEDTAVYYCAEPYALTSSKPFDYWGQGTLVTVSS

SEQ ID NO: 8064 - protein, 123 aa, Artificial Sequence
  source: /note="Description of Artificial Sequence: Synthetic polypeptide"
EVQLLESGGGLVQPGGSLRLSCAASGFTFNDYTMGWVRQAPGKGLEWVSWIHGTGGQTYYADSVKGRFTISRDNSKNTLYLQMNSLRAEDTAVYYCAKALADRSGGVVEFDYWGQGTLVTVSS

SEQ ID NO: 8065 - protein, 121 aa, Artificial Sequence
  source: /note="Description of Artificial Sequence: Synthetic polypeptide"
EVQLLESGGGLVQPGGSLRLSCAASGFSISYKNMAWVRQAPGKGLEWVSAIKAANGSTYYADSVKGRFTISRDNSKNTLYLQMNSLRAEDTAVYYCATGSQKKRTYTFDFWGQGTLVTVSS

SEQ ID NO: 8066 - protein, 120 aa, Artificial Sequence
  source: /note="Description of Artificial Sequence: Synthetic polypeptide"
EVQLLESGGGLVQPGGSLRLSCAASGFTFEAETMAWVRQAPGKGLEWVSCISNDGNTTYYADSVKGRFTISRDNSKNTLYLQMNSLRAEDTAVYYCAKESLISPGLFDYWGQGTLVTVSS

SEQ ID NO: 8067 - protein, 119 aa, Artificial Sequence
  source: /note="Description of Artificial Sequence: Synthetic polypeptide"
EVQLLESGGGLVQPGGSLRLSCAASGFTFTGEYMNWVRQAPGKGLEWVSTINETGYMTYYADSVKGRFTISRDNSKNTLYLQMNSLRAEDTAVYYCAKLSTRGVPFDYWGQGTLVTVSS

SEQ ID NO: 8068 - protein, 120 aa, Artificial Sequence
  source: /note="Description of Artificial Sequence: Synthetic polypeptide"
EVQLLESGGGLVQPGGSLRLSCAASGFTFRSYDMGWVRQAPGKGLEWVSTISPMGVFTYYADSVKGRFTISRDNSKNTLYLQMNSLRAEDTAVYYCAKSNQHAHDPFDYWGQGTLVTVSS

SEQ ID NO: 8069 - protein, 119 aa, Artificial Sequence
  source: /note="Description of Artificial Sequence: Synthetic polypeptide"
EVQLLESGGGLVQPGGSLRLSCAASGFTFSDYDMGWVRQAPGKGLEWVSSISPMGTFTYYADSVKGRFTISRDNSKNTLYLQMNSLRAEDTAVYYCAKAALTEPMFDYWGQGTLVTVSS

SEQ ID NO: 8070 - protein, 116 aa, Artificial Sequence
  source: /note="Description of Artificial Sequence: Synthetic polypeptide"
EVQLLESGGGLVQPGGSLRLSCAASGFTFRDYDMGWVRQAPGKGLEWVSTISPLGHFTYYADSVKGRSTISRDNSKNTLYLQMNSLRAEDTAVYYCAKAEEAFDYWGQGTLVTVSS

SEQ ID NO: 8071 - protein, 116 aa, Artificial Sequence
  source: /note="Description of Artificial Sequence: Synthetic polypeptide"
EVQLLESGGGLVQPGGSLRLSCAASGFAFPRYGMTWVRQAPGKGLEWVSNIDQFGMKTYYADSVKGRFTISRDNSKNTLYLQMNSLRAEDTAVYYCAEEYASFDYWGQGTLVTVSS

SEQ ID NO: 8072 - protein, 119 aa, Artificial Sequence
  source: /note="Description of Artificial Sequence: Synthetic polypeptide"
EVQLLESGGGLVQPGGSLRLSCAASGFTFDKYDMGWVRQAPGKGLEWVSTISPMGVFTYYADSVKGRFTISRDNSKNTLYLQMNSLRAEDTAVYYCAKGRGNTSDFDYWGQGTLVTVSS

SEQ ID NO: 8073 - protein, 118 aa, Artificial Sequence
  source: /note="Description of Artificial Sequence: Synthetic polypeptide"
EVQLLESGGGLVQPGGSLRLSCAASGFTFSNYDMAWVRQAPGKGLEWVSTISGAGHFTYYADSVKGRFTISRDNSKNTLYLQMNSLRAEDTAVYYCAKSFPRDEFDYWGQGTLVTVSS

SEQ ID NO: 8074 - protein, 118 aa, Artificial Sequence
  source: /note="Description of Artificial Sequence: Synthetic polypeptide"
EVQLLESGGGLVQPGGSLRLSCAASGFTFPKYEMRWVRQAPGKGLEWVSEIGLDGSPTYYADSVKGRFTISRDNSKNTLYLQMNSLRAEDTAVYYCAKLGDPNGFDYWGQGTLVTVSS

SEQ ID NO: 8075 - protein, 116 aa, Artificial Sequence
  source: /note="Description of Artificial Sequence: Synthetic polypeptide"
EVQLLESGGGLVQPGGSLRLSCAASGFTFPTSEMDWVRQAPGKGLEWVSGIGPDGLTTYYADSVKGRFTISRDNSKNTLYLQMNSLRAEDTAVYYCAKHADWFDYWGQGTLVTVSS

SEQ ID NO: 8076 - protein, 118 aa, Artificial Sequence
  source: /note="Description of Artificial Sequence: Synthetic polypeptide"
EVQLLESGGGLVQPGGSLRLSCAASGFTFRLYEMAWVRQAPGKGLEWVSGIDILGSRTYYADSVKGRFTISRDNSKNTLYLQMNSLRAEDTAVYYCAKDLSWQGFDYWGQGTLVTVSS

SEQ ID NO: 8077 - protein, 116 aa, Artificial Sequence
  source: /note="Description of Artificial Sequence: Synthetic polypeptide"
EVQLLESGGGLVQPGGSLRLSCAASGFTFSEYDMYWVRQAPGKGLEWVSWIDTDGGDTYYADSVKGRFTISRDNSKNTLYLQMNSLRAEDTAVYYCAKPGLKFDYWGQGTLVTVSS

SEQ ID NO: 8078 - protein, 117 aa, Artificial Sequence
  source: /note="Description of Artificial Sequence: Synthetic polypeptide"
EVQLLESGGGLVQPGGSLRLSCTASGFTFENASMQWVRQAPGKGLEWVSSIEGQGNATYYADSVKGRFTISRDNSKNTLYLQMNSLRAEDTAVYYCAKSSSWSFDYWGQGTLVTVSS

SEQ ID NO: 8079 - protein, 119 aa, Artificial Sequence
  source: /note="Description of Artificial Sequence: Synthetic polypeptide"
EVQLLESGGGLVQPGGSLRLSCAASGFTFTRNEMGWVRQAPGKGLEWVSTITPTGTFTYYADSVKGRFTISRDNSKNTLYLQMNSLRAEDTAVYYCAKTDPGNRYFDYWGQGTLVTVSS

SEQ ID NO: 8080 - protein, 118 aa, Artificial Sequence
  source: /note="Description of Artificial Sequence: Synthetic polypeptide"
EVQLLESGGGLVQPGGSLRLSCAASGFTFNWQLMGWVRQAPGKGLEWVSGIEGPGDVTYYADSVKGRFTISRDNSKNTLYLQMNSLRAEDTAVYYCAKVGKESNFDYRGQGTLVTVSS

SEQ ID NO: 8081 - protein, 118 aa, Artificial Sequence
  source: /note="Description of Artificial Sequence: Synthetic polypeptide"
EVQLLESGGGLVQPGGSLRLSCAASGFTFNWQLMGWFRQAPGKGLEWVSGIEGPGDVTYYADSVKGRFTISRDNSKNTLYLQMNSLRAEDTAVYYCAKVGKESNFDYRGQGTLVTVSS

SEQ ID NO: 8082 - protein, 118 aa, Artificial Sequence
  source: /note="Description of Artificial Sequence: Synthetic polypeptide"
EVQLLESGGGLVQPGGSLRLSCAASGFTFNWQLMGWVRQAPGKGLEWVSGIEGPGDVTYYADSVKGRFTVSRDNSKNTLYLQMNSLRAEDTAVYYCAKVGKESNSDYRGQGTLVTVSS

SEQ ID NO: 8083 - protein, 118 aa, Artificial Sequence
  source: /note="Description of Artificial Sequence: Synthetic polypeptide"
EVQLLESGGGLVQPGGSLRLSCAASGFTFNWQLMGWVRQAPGKGLEWVSGIEGPGDVTYYADSVKGRFTISRDNSKNTLYLQMNSLRAEDTAVYYCVKVGKESNSDYRGQGTQVTVSS

SEQ ID NO: 8084 - protein, 118 aa, Artificial Sequence
  source: /note="Description of Artificial Sequence: Synthetic polypeptide"
EVQLLESGGGLVQPGGSLRLSCAASGFTFNWQLMGWARQAPGKGLEWVSGIEGPGDVTYYADSVKGRFTISRDNSKNTLYLQMNSLRAEDTAVYYCAKVGKESNSDYRGQGTLVTVSS

SEQ ID NO: 8085 - protein, 118 aa, Artificial Sequence
  source: /note="Description of Artificial Sequence: Synthetic polypeptide"
EVQLLESGGGLVQPGGSLRLSCAASGFTFNWQLMGWARQAPGKGLEWVSGIEGPGDVTYYADSVKDRFTISRDNSKNTLYLLMNSLRAEDTAVYYCAKVGKESNFDYWGQGTLVTVSS

SEQ ID NO: 8086 - protein, 118 aa, Artificial Sequence
  source: /note="Description of Artificial Sequence: Synthetic polypeptide"
EVQLLESGGGLVQPGGSLRLSCAASGFTFNWQLMGWVRQAPGKGLEWVSGIEGPGDVTYYADSVKGRFTISRDNTKNTLYLQMNSLRAEDTAVYYCVKVGKESNSDYRGQGTLVTVSS

SEQ ID NO: 8087 - protein, 123 aa, Artificial Sequence
  source: /note="Description of Artificial Sequence: Synthetic polypeptide"
EVQLLESGGGLVQPGGSLRLSCAASGFTFRSYTMGWVRQAPGKGLEWVSSINPMGYQTYYADSVKGRFTISRDNSKNTLYLQMNSLRAEDTAVYYCAKHGVGKGTKPHNFDYWGQGTLVTVSS

SEQ ID NO: 8088 - protein, 118 aa, Artificial Sequence
  source: /note="Description of Artificial Sequence: Synthetic polypeptide"
EVRLLESGGGLVQPGGSLRLSCAASGFNFNWQLMGWIRQAPGKGLEWVSGIEGPGDVTYYADSVKGRFTISRDNSKNTLYLQMNSLRAEDTAVYYCAKVGKESNSDYRGQGTLVTVSS

SEQ ID NO: 8089 - protein, 118 aa, Artificial Sequence
  source: /note="Description of Artificial Sequence: Synthetic polypeptide"
EVQLLESGGGLVRPGGSLRLSCVASGFTFNWQLMGWVRQAPGKGLEWVSGIEGPGDVTYYADSVKGRFTISRDNSKNTLYLQMNSLRAEDTAVYYCAKVGKESNFDYRGQGTLVTVSS

SEQ ID NO: 8090 - protein, 118 aa, Artificial Sequence
  source: /note="Description of Artificial Sequence: Synthetic polypeptide"
EVQLLESGGGLVQTGGSLRLSCAASGFTYNWQLMGWVRQAPGKGLEWVSGIEGPGDVTYYADSVKGRFTISRDNSKNTLYLQMNSLRADDTAVYYCVKVGKESNFDYRGHGTLVTVSS

SEQ ID NO: 8091 - protein, 118 aa, Artificial Sequence
  source: /note="Description of Artificial Sequence: Synthetic polypeptide"
EVQLLESGGGLVQPGGSLRLSCAASGFTFNWQLMGWVRKAPGKGLEWVSGIEGPGDVTYYADSVKGRFTISRDNSKNTLYLQMNSLRAEDTAVYYCAKVGKESNFDYRGQGTLVTVSS

SEQ ID NO: 8092 - protein, 118 aa, Artificial Sequence
  source: /note="Description of Artificial Sequence: Synthetic polypeptide"
EVQLLESGGGLVQPGGSLRLSCAASGFTFNWQLMGWVRQAPGKGLEWVSGIEGPGDVTYYADSVKGRFTISRDNTKNTLYLQMNSLRAEDTAVYYCAKVGKESNFDYRGQGTLVTVSS

SEQ ID NO: 8093 - protein, 118 aa, Artificial Sequence
  source: /note="Description of Artificial Sequence: Synthetic polypeptide"
EVQLLESGGGLVQPGGSLRLSCAASGFTFNWQLMGWVRQAPGKGLEWVSGIEGPGDVTYYADSVKGRFTISRDNSKNTLYLQMNSLRAEDTAVYYCAKVGKESKFDYLGQGTLVTVSS

SEQ ID NO: 8094 - protein, 118 aa, Artificial Sequence
  source: /note="Description of Artificial Sequence: Synthetic polypeptide"
EVQLLESGGGLVQPGGSLRLSCAASGFTFNWQLMGWVRQAPGKGLEWVSGIEGPGDVTYYAESVKGRFTISRDNSKNTLYLQMNSLRAEDTAVYYCAKVGKESNLDYRGQGTLVTVSS

SEQ ID NO: 8095 - protein, 118 aa, Artificial Sequence
  source: /note="Description of Artificial Sequence: Synthetic polypeptide"
EVQLFESGGGSVQPGGSLRLSCAASGFTFNWQLMGWVRQAPGKGLEWVSGIEGPGDVTYYADSVKGRFTISRDNSKNTLYLQMNSLRAEDTAVYYCAKVGKESNSDYRGQGTLVTVSS

SEQ ID NO: 8096 - protein, 118 aa, Artificial Sequence
  source: /note="Description of Artificial Sequence: Synthetic polypeptide"
EVQLLESGGGLVQPGGSLRLTCAASGFTFNWQLMGWVRQAPGKGLEWVSGIEGPGDVTYYADSVKGRFIISRDNSKNTLYLQMNSLRAEDTAVYYCAKVGKESNSDYRGQGTLVTVSS

SEQ ID NO: 8097 - protein, 118 aa, Artificial Sequence
  source: /note="Description of Artificial Sequence: Synthetic polypeptide"
EVQLLESGGGLVQPGGSLRLSCAASGFTFNWQLMGWVRQAPGKGLEWVSGIEGPGDVTYYADSVKGRFTISRDNSTNTLYLQMNSLRAEDTAVYYCAKVGKESEFDYRGQGTLVTVSS

SEQ ID NO: 8098 - protein, 123 aa, Artificial Sequence
  source: /note="Description of Artificial Sequence: Synthetic polypeptide"
EVQLLESGGGLVQPGGSLRLSCAASGFTFELYRMSWVRQAPGKGLEWVSEISGSGFPTYYADSVKGRFTISRDNSKNTLYLQMNSLRAEDTAVYYCAKSLHDKTQHHQEFDYWGQGTLVTVSS

SEQ ID NO: 8099 - protein, 118 aa, Artificial Sequence
  source: /note="Description of Artificial Sequence: Synthetic polypeptide"
EVRLLESGGGLVQPGGSLRLSCAASGFTFNWQLMGWVRQAPGKGLEWVSGIEGPGDVTYYADSVKGRFTITRDNSKNTLYLQMNSLRAEDTAVYYCVKVGKESNLDYRGQGTLVTVSS

SEQ ID NO: 8100 - protein, 118 aa, Artificial Sequence
  source: /note="Description of Artificial Sequence: Synthetic polypeptide"
EVQLLVSGGGLVQPGGSLRLSCAASGFTFNWQLMGWVRQAPGKGLEWVSGIEGPGDVTYYADSVKGRFTISRDNSKNTLYLQMNSLRAEDTAVYYCAKVGKESNFDYRGQGTLVTVSS

SEQ ID NO: 8101 - protein, 118 aa, Artificial Sequence
  source: /note="Description of Artificial Sequence: Synthetic polypeptide"
EVQLLVSGGGLVQPGGSLRLSCAASGFTFNWQLMGWVRQAPGKGLEWVSGIEGPGDVTYYADSVKGRFTISRDNSKNMLYLQMNGLRAEDTAVYYCAKVGKESNFDYRGQGTLVTVSS

SEQ ID NO: 8102 - protein, 118 aa, Artificial Sequence
  source: /note="Description of Artificial Sequence: Synthetic polypeptide"
EVQLLESGGGLVQPGGSLRLSCAASGFTFNWQLMGWVRQAPGKGLEWVSGIEGPGDVTYYADSVKGRFTISRDNSKNTLYLQMNSLRAEDTAVYYCVKVGKESNSDYRGQGTLVTVSS

SEQ ID NO: 8103 - protein, 118 aa, Artificial Sequence
  source: /note="Description of Artificial Sequence: Synthetic polypeptide"
EVQLLESGGGLVQPGGSLRLSCAASGFTFKWQLMGWARQAPGKGLEWVSGIEGPGDVTYYADPVKGRFTISRDNSKNTLYLQMNSLRAEDTAVYYCVKVGKESNSDYRGQGTLVTVSS

SEQ ID NO: 8104 - protein, 118 aa, Artificial Sequence
  source: /note="Description of Artificial Sequence: Synthetic polypeptide"
EVQLLESGGGLVQPGGSLRLSCAASGFTFKWHLMGWVRQAPGKGLEWVSGIEGPGDVTYYADSVKGRFTISRDNSKNTLYLQMNSLRAEDTAVYYCVKVGKESSSDYRGQGTLVTVSS

SEQ ID NO: 8105 - protein, 118 aa, Artificial Sequence
  source: /note="Description of Artificial Sequence: Synthetic polypeptide"
EVQLLESGGGLVQPGGSLRLSCAASGFTFNWHLMAWARQAPGKGLEWVSGIEGPGDVTYYADSVKGRFTISRDNSKNTLYLQMNSLRAEDTAVYYCVKVGKESNSDYRGQGTLVTVSS

SEQ ID NO: 8106 - protein, 118 aa, Artificial Sequence
  source: /note="Description of Artificial Sequence: Synthetic polypeptide"
EVQLLESGGGLVQPGGSLRLSCAASGFTFKWQLMGWVRQAPGKGLEWVSGIEGPGDVTYYADSVKGRFTISRDNSKNTLYLQMNSLRAEDTAVYYCVKVGKESNSDYRGQGTLVTVSS

SEQ ID NO: 8107 - protein, 118 aa, Artificial Sequence
  source: /note="Description of Artificial Sequence: Synthetic polypeptide"
EVQLLESGGGLVQPGGSLRLSCAASGFTFKWQLMAWARQAPGKGLEWVSGIEGPGDITYYADSVKGRFTISRDNSKNTLYLQMNSLRAEDTAVYYCVKVGKESNSDYRGQGTLVTVSS

SEQ ID NO: 8108 - protein, 118 aa, Artificial Sequence
  source: /note="Description of Artificial Sequence: Synthetic polypeptide"
EVQLLESGGGLVQPGGSLRLSCAASGFTFNWHLMGWARQAPGKGLEWVSGIEGPGDVTYYADSVKGRFTISRDNSKNTLYLQMNSLRAEDTAVYYCVKVGKESNSDYRGQGTLVTVSS

SEQ ID NO: 8109 - protein, 118 aa, Artificial Sequence
  source: /note="Description of Artificial Sequence: Synthetic polypeptide"
EVQLLESGGGLVQPGGSLRLSCAASGFTFIEYPMRWVRQAPGKGLEWVSLISPSGVFTYYADSVKGRFTISRDNSKNTLYLQMNSLRAEDTAVYYCAKGDESSTFDYWGQGTLVTVSS

SEQ ID NO: 8110 - protein, 118 aa, Artificial Sequence
  source: /note="Description of Artificial Sequence: Synthetic polypeptide"
EVQLLESGGGLVQPGGSLRLSCAASGFTFKWQLMGWARQAPGKGLEWVSGIEGPGDVTYYADSVKGRFTISRDNSKNTLYLQMNSLRAEDTAVYYCVKVGKESNSDYRGQGTLVTVSS

SEQ ID NO: 8111 - protein, 118 aa, Artificial Sequence
  source: /note="Description of Artificial Sequence: Synthetic polypeptide"
EVQLLESGGGLVQPGGSLRLSCAASGFTFNWELMGWARQAPGKGLEWVSGIEGPGDVTYYADSVKGRFTISRDNSKNTLYLQMNSLRAEDTAVYYCVKVGKESNSDYRGQGTLVTVSS

SEQ ID NO: 8112 - protein, 118 aa, Artificial Sequence
  source: /note="Description of Artificial Sequence: Synthetic polypeptide"
EVQLLESGGGLVQPGGSLRLSCAASGFTFNWQLMGWARQAPGKGLEWVSGIEGPGDVTYYADSVKGRFTISRDNSKNTLYLQMNSLRAEDTAVYYCVKVGKESNSDYRGQGTLVTVSS

SEQ ID NO: 8113 - protein, 118 aa, Artificial Sequence
  source: /note="Description of Artificial Sequence: Synthetic polypeptide"
EVQLLESGGGLVQPGGSLRLSCAASGFTFNWQLMGWVRQAPGKGLEWVSGIEGPGDVTYYADSVKGRFTISRDNSKNTLYLQMNSLRAEDTAVYYCVKVGKDSKSDYRGQGTLVTVSS

SEQ ID NO: 8114 - protein, 118 aa, Artificial Sequence
  source: /note="Description of Artificial Sequence: Synthetic polypeptide"
EVQLLESGGGLVQPGGSLRLSCAASGFTFNWQLMGWVRRAPGKGLEWVSGIEGPGDVTYYADSVKGRFTISRDNSKNTLYLQMNSLRAEDTAVYYCVKVGKDSKSDYRGQGTLVTVSS

SEQ ID NO: 8115 - protein, 118 aa, Artificial Sequence
  source: /note="Description of Artificial Sequence: Synthetic polypeptide"
EVQLLESGGGLVQPGGSLRLSCAASGFTFNWQLMGWVRQAPGKGLEWVSGIEGPGDVTYYADSVKGRFTISRDNSKNTLYLQMNSLRAEDTAVYYCVKVGKDSNSDYRGQGTLVTVSS

SEQ ID NO: 8116 - protein, 118 aa, Artificial Sequence
  source: /note="Description of Artificial Sequence: Synthetic polypeptide"
EVQLLESGGGLAQPGGSLRLSCAASGFTFNWQLMGWVRQAPGKGLEWVSGIEGPGDVTYYADSVKGRFTISRDNSKNTLYLQMNSLRAEDTAVYYCVKVGKDSKSDYRGQGTLVTVSS

SEQ ID NO: 8117 - protein, 118 aa, Artificial Sequence
  source: /note="Description of Artificial Sequence: Synthetic polypeptide"
EVQLLESGGGLVQPGGSLRLSCAASGFTFNWQLMGWVRQAPGKGLEWVSGIEGPGDVTYYADSVKGRFTISRDNSKNTLYLQMNSLRAEDTAVYYCVKVGKDAKSDYRGQGTLVTVSS

SEQ ID NO: 8118 - protein, 118 aa, Artificial Sequence
  source: /note="Description of Artificial Sequence: Synthetic polypeptide"
EVQLLESGGGLVQPGGSLRLSCAASGFTFNWQLMGWVRQAPGKGLEWVSGIEGPGDVTYYADSVKGRFTISRDNSKNTLYLQMNSLRAEDTAVYYCVKVGKDKNSDYRGQGTLVTVSS

SEQ ID NO: 8119 - protein, 118 aa, Artificial Sequence
  source: /note="Description of Artificial Sequence: Synthetic polypeptide"
EVQLLESGGGLVQPGGSLRLSCAASGFTFNWQLMGWVRQAPGKGLEWVSGIEGPGDVTYYADSVKGRFTISRDNSKNTLYLQMNSLRAEDTAVYYCVKVGKESKSDYRGQGTLVTVSS

SEQ ID NO: 8120 - protein, 124 aa, Artificial Sequence
  source: /note="Description of Artificial Sequence: Synthetic polypeptide"
EVQLLESGGGLVQPGGSLRLSCAASGFTFKRYDMDWVRQAPGKGLEWVSTIGSSGYPTYYADSVKGRFTISRDNSKNTLYLQMNSLRAEDTAVYYCAERMPGYFPGFARQFDYWGQGTLVTVSS

SEQ ID NO: 8121 - protein, 118 aa, Artificial Sequence
  source: /note="Description of Artificial Sequence: Synthetic polypeptide"
EVQLLESGGGLVQPGGSLRLSCAASGFTFNWQLMGWVRQAPGKGLEWVSGIEGPGDVTYYADSVKGRFTISRDNSKNTLYLQMNSLRAEDTAVYYCVKVGRDSKSDYRGQGTLVTVSS

SEQ ID NO: 8122 - protein, 118 aa, Artificial Sequence
  source: /note="Description of Artificial Sequence: Synthetic polypeptide"
EVQLLESGGGLVQPGGSLRLSCAASGFTFNWQLMGWVRQAPGKGLEWVSGIEGPGDVTYYADSVKGRFTISRDNSKNTLYLQMNSLRAEDTAVYYCVKVGKYSNSDYRGQGTLVTVSS

SEQ ID NO: 8123 - protein, 118 aa, Artificial Sequence
  source: /note="Description of Artificial Sequence: Synthetic polypeptide"
EVQLLESGGGLVQPGGSLRLSCAASGFTFNWQLMGWVRQAPGKGLEWVSGIEGPGDVTYYADSVKGRFTISRDNSKNTLYLQMNSLRAEDTAVYYCVKVGKDSRSDYRGQGTLVTVSS

SEQ ID NO: 8124 - protein, 118 aa, Artificial Sequence
  source: /note="Description of Artificial Sequence: Synthetic polypeptide"
EVQLLESGGGLVQPGGSLRLSCAASGFTFNWQLMGWVRQAPGKGLEWVSGIEGPGDVTYYADSVKGRFTISRDNSKNTLYLQMNSLRAEDTAVYYCVKVGKDDSSDYRGQGTLVTVSS

SEQ ID NO: 8125 - protein, 118 aa, Artificial Sequence
  source: /note="Description of Artificial Sequence: Synthetic polypeptide"
EVQLLEFGGGLVQPGGSLRFSCAASGFTFNWQLMGWFRQAPGKGLEWVSGIEGPGDVTYYADSVKGRFTISRDNSKNTLYLQMNSLRAEDTAVYYCVKVGRDSNSDYRGQGTLVTVSS

SEQ ID NO: 8126 - protein, 118 aa, Artificial Sequence
  source: /note="Description of Artificial Sequence: Synthetic polypeptide"
EVQLLESGGGLVQPGGSLRLSCAASGFTFNWQLMGWVRQAPGKGLEWVSGIEGPGDVTYYADSVKGRFTISRDNSKNTLYLQMNSLRAEDTAVYYCVKVGKDSTSDYRGQGTLVTVSS

SEQ ID NO: 8127 - protein, 118 aa, Artificial Sequence
  source: /note="Description of Artificial Sequence: Synthetic polypeptide"
EVQLLESGGGLVQPGGSLRLSCAASGFTFNWQLMGWVRQAPGKGLEWVSGIEGPGDVTYYADSVKGRFTISRDNSKNTLYLQMNSLRAEDTAVYYCVKVGKESSSDYRGQGTLVTVSS

SEQ ID NO: 8128 - protein, 118 aa, Artificial Sequence
  source: /note="Description of Artificial Sequence: Synthetic polypeptide"
EVQLLESGGGLVQPGGSLRLSCAASGFTFNWQLMGWVRQAPGKGLEWVSGIEGPGDVTYYADSVKGRFTIFRDNSKNTLYLQMNSLRAEDTAVYYCVKVGKDSASDYRGQGTLVTVSS

SEQ ID NO: 8129 - protein, 118 aa, Artificial Sequence
  source: /note="Description of Artificial Sequence: Synthetic polypeptide"
EVQLLESGGGLVQPGGSLRLSCAASGFTFNWQLMGWVRQAPGKGLEWVSGIEGPGDVTYYADSVKGRFTISRDNSKNTLYLQMNSLRAEDTAVYYCVKVGNDSYSDYRGQGTLVTVSS

SEQ ID NO: 8130 - protein, 118 aa, Artificial Sequence
  source: /note="Description of Artificial Sequence: Synthetic polypeptide"
EVQLLESGGGLVQPGGSLRLSCAASGFTFNWQLMGWVRQAPGKGLEWVSGIEGPGDVTYYADSVKGRFTISRDNSKNTLYLQMNGLRAEDTAVYYCVKVGKDSSSDYRGQGTLVTVSS

SEQ ID NO: 8131 - protein, 124 aa, Artificial Sequence
  source: /note="Description of Artificial Sequence: Synthetic polypeptide"
EVQLLESGGGLVQPGGSLRLSCAASGFTFWRYAMGWVRQAPGKGLEWVSTINDEGRETYYADSVKGRFTISRDNSKNTLYLQMNSLRAEDTAVYYCAKKRVSSSVNAPYEFDYWGQGTLVTVSS

SEQ ID NO: 8132 - protein, 118 aa, Artificial Sequence
  source: /note="Description of Artificial Sequence: Synthetic polypeptide"
EVQLLESGGGLVQPGGSLRLSCAASGFTFNWQLMGWVRQAPGKGLEWVSGIEGPGDVTYYADSVKGRFTISRDNSKNTLYLQMNSLRAEDTAIYYCVKVGKDSASDYRGQGTLVTVSS

SEQ ID NO: 8133 - protein, 118 aa, Artificial Sequence
  source: /note="Description of Artificial Sequence: Synthetic polypeptide"
EVQLLESGGGLVQPGGSLRLSCAASGFTFKWQLMGWVRQAPGKGLEWVSGIEGPGDVTYYADSVKGRFTISRDNSKNTLYLQMNSLRAEDTAVYYCVKVGKDAKSDYRGQGTLVTVSS

SEQ ID NO: 8134 - protein, 118 aa, Artificial Sequence
  source: /note="Description of Artificial Sequence: Synthetic polypeptide"
EVQLLESGGGLVQPGGSLRLSCAASGFTFKWQLMGWVRQAPGKGLEWVSGIEGPGDVTYYADSVKGRFTISRDNSKNTLYLQMNSLRAEDTAVYYCVKVGKDSRSDYRGQGTLVTVSS

SEQ ID NO: 8135 - protein, 118 aa, Artificial Sequence
  source: /note="Description of Artificial Sequence: Synthetic polypeptide"
EVQLLESGGGLVQPGGSLRLSCAASGFTFKWQLMGWVRQAPGKGLEWVSGIEGPGDVTYYADSVKGRFTISRDNSKNTLYLQMNSLRAEDTAVYYCVKVGKDSKSDYRGQGTLVTVSS

SEQ ID NO: 8136 - protein, 118 aa, Artificial Sequence
  source: /note="Description of Artificial Sequence: Synthetic polypeptide"
EVQLLESGGGLVQPGGSLRLSCAASGFTFNWELMGWARQAPGKGLEWVSGIEGPGDVTYYADSVKGRFTISRDNSKNTLYLQMNSLRAEDTAVYYCVKVGKDAKSDYRGQGTLVTVSS

SEQ ID NO: 8137 - protein, 118 aa, Artificial Sequence
  source: /note="Description of Artificial Sequence: Synthetic polypeptide"
EVQLLESGGGLVQPGGSLRLSCAASGFTFNWELMGWARQAPGKGLEWVSGIEGPGDVTYYADSVKGRFTISRDNSKNTLYLQMNSLRAEDTAVYYCVKVGKDSRSDYRGQGTLVTVSS

SEQ ID NO: 8138 - protein, 118 aa, Artificial Sequence
  source: /note="Description of Artificial Sequence: Synthetic polypeptide"
EVQLLESGGGLVQPGGSLRLSCAASGFTFNWELMGWARQAPGKGLEWVSGIEGPGDVTYYADSVKGRFTISRDNSKNTLYLQMNSLRAEDTAVYYCVKVGKDSKSDYRGQGTLVTVSS

SEQ ID NO: 8139 - protein, 118 aa, Artificial Sequence
  source: /note="Description of Artificial Sequence: Synthetic polypeptide"
EVQLLESGGGLVQPGGSLRLSCAASGFTFNWQLMGWARQAPGKGLEWVSGIEGPGDVTYYADSVKGRFTISRDNSKNTLYLQMNSLRAEDSAVYYCAKVGKESNFDYLGQGTLVTVSS

SEQ ID NO: 8140 - protein, 118 aa, Artificial Sequence
  source: /note="Description of Artificial Sequence: Synthetic polypeptide"
EVQLLESGGGLVQPGGSLRLSCVASGFTFNWQLMGWVRQAPGKGLEWVSGIEGPGDVTYYADSVKGRFTISRDNSKNTLYLQMNSLRAEDTAVYYCAKVGKESNSDYRGQGTLVTVSS

SEQ ID NO: 8141 - protein, 118 aa, Artificial Sequence
  source: /note="Description of Artificial Sequence: Synthetic polypeptide"
EVQLLESGGGLVQPGGSLRLSCAASGFTFNWQLMGWVRQAPGKGLEWVSGIEGPGDVTYYADSVKGRFTISRDNSKNTLYLQMNSLRAEDTAVYYCAKVGKESNSDYRGQGTLVTVSS

SEQ ID NO: 8142 - protein, 123 aa, Artificial Sequence
  source: /note="Description of Artificial Sequence: Synthetic polypeptide"
EVQLLESGGGLVQPGGSLRLSCAASGFTFANYSMSWVRQAPGKGLEWVSSIDRLGTHTYYADSVKGRFTISRDNSKNTLYLQMNSLRAEDTAVYYCAKVLADLIAGHAEFDYWGQGTLVTVSS

SEQ ID NO: 8143 - protein, 120 aa, Artificial Sequence
  source: /note="Description of Artificial Sequence: Synthetic polypeptide"
EVQLLESGGGLVQPGGSLRLSCAASGFTFSGWEMGWVRQAPGKGLEWVSSIDESGLNTYYADSVKGRFTISRDNSKNTLYLQMNSLRAEDTAVYYCAEGAPQYQITFDYWGQGTLVTVSS

SEQ ID NO: 8144 - protein, 120 aa, Artificial Sequence
  source: /note="Description of Artificial Sequence: Synthetic polypeptide"
EVQLLESGGGLVQPGGSLRLSCAASGFTFPNYGMYWVRQAPGKGLEWVSYISRRGLLTYYADSVKGRFTISRDNSKNTLYLQMNSLRAEDTAVYYCAKTSHYMNNGFDYWGQGTLVTVSS

SEQ ID NO: 8145 - protein, 123 aa, Artificial Sequence
  source: /note="Description of Artificial Sequence: Synthetic polypeptide"
EVQLLESGGGLVQPGGSLRLSCAASGFTFVDYTMAWVRQAPGKGLEWVSSISPIGTFTYYADSVKGRFTISRDNSKNTLYLQMNSLRAEDTAVYYCAKDPYGMEDGLTWFDYWGQGTLVTVSS

SEQ ID NO: 8146 - protein, 124 aa, Artificial Sequence
  source: /note="Description of Artificial Sequence: Synthetic polypeptide"
QVQLVQSGAEVKKPGASSVKVSCKASGFNIKDTYIHWVRQAPGQRLEWMBRIDPANGYTKYDPKEQGRVTITADTSASTAYMELSSLRSEDTAVYYCAREGYYGNYGVYAMDYWGQGTLVTVSS

SEQ ID NO: 8147 - protein, 124 aa, Artificial Sequence
  source: /note="Description of Artificial Sequence: Synthetic polypeptide"
QVQLVQSGAEVKKPGASSVKVSCKASGFNIKDTYIHWVRQAPGQGLEWMBRIDPANGYTKYDPKFQGRVTITADTSASTAYMELSSLRSEDTAVYYCAREGYYGNYGVYAMDYWGQGTLVTVSS

SEQ ID NO: 8148 - protein, 124 aa, Artificial Sequence
  source: /note="Description of Artificial Sequence: Synthetic polypeptide"
QVQLVQSGAEVKKPGASSVKVSCKASGFNIKDTYIHWVRQAPGQRLEWMBRIDPANGYTKYDPKFQGRVTITADTSASTAYMELSSLRSEDTAVYYCAREGYFGNYGVYAMDYWGQGTLVTVSS

SEQ ID NO: 8149 - protein, 121 aa, Artificial Sequence
  source: /note="Description of Artificial Sequence: Synthetic polypeptide"
QVQLQESGPGLVRPSQTLSLTCTVSGFNIKDTYMHWVRQPPGRGLEWIGRIDPASGDTKYDPKFQVRVTMLVDTSSNTAWLRLSSVTAADTAVYYCADGMWVSTGYALDFWGQGTTVTVSS

SEQ ID NO: 8150 - protein, 120 aa, Artificial Sequence
  source: /note="Description of Artificial Sequence: Synthetic polypeptide"
QVQLQESPGLVRPSQTLSLTCTVSGFNIKDTYMHWVRQPPGRGLEWIGRIDPASGDTKYDPKFQVKATITADTSSNQFSLRLSSVTAADTAVYYCADGMWVSTGYALDFWGQGTTVTVSS

SEQ ID NO: 8151 - protein, 121 aa, Artificial Sequence
  source: /note="Description of Artificial Sequence: Synthetic polypeptide"
QVQLQESGPGLVRPSQTLSLTCTVSGFNIKDTYMHWVRQPPGRGLEWIGRIDPASGDTKYDPKFQVRVTMLVDTSSNQFSLRLSSVTSEDTAVYYCADGMWVSTGYALDFWGQGTTVTVSS

SEQ ID NO: 8152 - protein, 121 aa, Artificial Sequence
  source: /note="Description of Artificial Sequence: Synthetic polypeptide"
QVQLQESGPGLVRPSQTLSLTCTVSGFNIKDTYMHWVKQRPGRGLEWIGRIDPASGDTKYDPKFQVRVTMLVDTSSNQFSLRLSSVTAADTAVYYCADGMWVSTGYALDFWGQGTTVTVSS

SEQ ID NO: 8153 - protein, 121 aa, Artificial Sequence
  source: /note="Description of Artificial Sequence: Synthetic polypeptide"
QVQLQESGPGLVRPSQTLSLTCTASGFNIKDTYMHWVRQPPGRGLEWIGRIDPASGDTKYDPKFQVRVTMLVDTSSNQFSLRLSSVTAADTAVYYCADGMWVSTGYALDFWGQGTTVTVSS

SEQ ID NO: 8154 - protein, 121 aa, Artificial Sequence
  source: /note="Description of Artificial Sequence: Synthetic polypeptide"
QVQLQESGAEVVKPGSSVKLSCKASGFNIKDTYMHWVKQRPGQGLEWIGRIDPASGDTKYDPKFQVKATITADESTSTAYLELSSLRSEDTAVYYCADGMWVSTGYALDFWGQGTTVTVSS

SEQ ID NO: 8155 - protein, 117 aa, Artificial Sequence
  source: /note="Description of Artificial Sequence: Synthetic polypeptide"
EVQLVESGGGLVQPGGSLRLSCAASGFTFSDYYMSWVRQAPGKGLEWVGFIRNKANGYTTEYSASVKGRFTISRDDSKNSLYLQMNSLKTEDTAVYYCARYIWFDYWGQGTTVTVSS

SEQ ID NO: 8156 - protein, 121 aa, Artificial Sequence
  source: /note="Description of Artificial Sequence: Synthetic polypeptide"
EVKLLESGGGLVQPGGSMRLSCAGSGFTFTDFYMNWIRQPAGKAPEWLGFIRDKAKGYTTEYNPSVKGRFTISRDNTQNMLYLQMNTLRAEDTATYYCAREGHTAAPFDYWGQGVMVTVSS

SEQ ID NO: 8157 - protein, 114 aa, Artificial Sequence
  source: /note="Description of Artificial Sequence: Synthetic polypeptide"
EVKLEESGGGLVQPGGSMKLSCAASGFTFSDAWMDWVRQSPEKGLEWVAEIRNKAKNHVAYYAESVKGRFTISRDDSKSSVYLQMNNLRAEDTGIYYCTTLDSWGQGTALTVSS

SEQ ID NO: 8158 - protein, 119 aa, Artificial Sequence
  source: /note="Description of Artificial Sequence: Synthetic polypeptide"
QVNLRESGGGLVQPGRSLRLSCAASGFTFDDYAMHWVRQAPGKGLEWVSGISWNSGSIGYADSVKGRFTISRDNAKNSLYLQMNSLRAEDTALYYCAKDRSDRGRLLDYWGLGTLVTVS

SEQ ID NO: 8159 - protein, 112 aa, Artificial Sequence
  source: /note="Description of Artificial Sequence: Synthetic polypeptide"
QVQLQQSGGGVVQPGRSLGLSCAASFTFSSYGMNWVRQAPGKGLEWVSYISSSSSTIYADSVKGRFTISRDNSKNTLYLQMNSLRAEDTAVYYCARGPGMDVWGQGTTVTVS

SEQ ID NO: 8160 - protein, 98 aa, Artificial Sequence
  source: /note="Description of Artificial Sequence: Synthetic polypeptide"
QVQLVESGGGVVQPGRSLRLSCAASGFTFSSYGMHWVRQAPGKGLEWVAVIWYDGSNKYYADSVKGRFTISRDNSKNTLYLQMNSLRAEDTAVYYCAR

SEQ ID NO: 8161 - protein, 118 aa, Artificial Sequence
  source: /note="Description of Artificial Sequence: Synthetic polypeptide"
QVQLVESGGGVVQPGRSLRLSCAASGFIFSGYGMHWVRQAPGKGLEWVTVIWYDGSNKYYADSVKGRFTISRDNSKNTLYLQMNSLRAEDTAVYYCARDTGDRFFDYWGQGTLVTVSS

SEQ ID NO: 8162 - protein, 120 aa, Artificial Sequence
  source: /note="Description of Artificial Sequence: Synthetic polypeptide"
QVQLQQSGSELKKPGASVKVSCKASGYTFTNYGVNWIKQAPGQGLQWMGWINPNTGEPTFDDDFKGRFAFSLDTSVSTAYLQISSLKADDTAVYFCSRSRGKNEAWFAYWGQGSLVTVSS

SEQ ID NO: 8163 - protein, 120 aa, Artificial Sequence
  source: /note="Description of Artificial Sequence: Synthetic polypeptide"
QIQLVQSGPELKKPGETVKVTCKTSGYTFTNYGVNWIKQTPGEGLQWMGWINPNTGEPTFDDDFKGRFAFSLESSASTAFLQISNLKNEDMGTYFCSRSRGKNEAWFAYWGQGTLVTVSE

SEQ ID NO: 8164 - protein, 120 aa, Artificial Sequence
  source: /note="Description of Artificial Sequence: Synthetic polypeptide"
QVQLQQSGPELKKPGETVKVTCKTSGYTFTNYGVNWIKQTPGEGLQWMGWINPNTGEPTFDDDFKGRFAFSLESSASTAFLQISNLKNEDMGTYFCSRSRGKNEAWFAYWGQGTLVTVSS

SEQ ID NO: 8165 - protein, 120 aa, Artificial Sequence
  source: /note="Description of Artificial Sequence: Synthetic polypeptide"
QVQLVQSGSELKKPGASVKVSCKASGYTFTSYAMNWVRQAPGQGLEWMGWINTNTGNPTYAQGFTGRFVFSLDTSVSTAYLQISSLKADDTAVYYCAREDSNGYKIFDYWGQGSLVTVSS

SEQ ID NO: 8166 - protein, 120 aa, Artificial Sequence; identical to SEQ ID NO: 8163
  source: /note="Description of Artificial Sequence: Synthetic polypeptide"

SEQ ID NO: 8167 - protein, 120 aa, Artificial Sequence; identical to SEQ ID NO: 8164
  source: /note="Description of Artificial Sequence: Synthetic polypeptide"

SEQ ID NO: 8168 - protein, 111 aa, Artificial Sequence
  source: /note="Description of Artificial Sequence: Synthetic polypeptide"
DVVMTQSPLSLPVTLGQPASISCRSSQSLVHSDGNTYLNWFQQRPGQSPRRLIYKVSNRDSGVPDRFSGSGSGTDFTLKISRVEAEDVGVYYCMQGTHWPFTFGQGTRLEI

SEQ ID NO: 8169 - protein, 113 aa, Artificial Sequence
  source: /note="Description of Artificial Sequence: Synthetic polypeptide"
DIQLTQSPLSLPVTLGQPASISCRSSQSLVHRNGNTYLHWFQQRPGQSPRLLIYTVSNRFSGVPDRFSGSGSGTDFTLKISRVEAEDVGVYFCSQSSHVPPTFGAGTRLEIKR

SEQ ID NO: 8170 - protein, 120 aa, Artificial Sequence; identical to SEQ ID NO: 8163
  source: /note="Description of Artificial Sequence: Synthetic polypeptide"

SEQ ID NO: 8171 - protein, 120 aa, Artificial Sequence; identical to SEQ ID NO: 8164
  source: /note="Description of Artificial Sequence: Synthetic polypeptide"

SEQ ID NO: 8172 - protein, 120 aa, Artificial Sequence; identical to SEQ ID NO: 8165
  source: /note="Description of Artificial Sequence: Synthetic polypeptide"

SEQ ID NO: 8173 - protein, 120 aa, Artificial Sequence; identical to SEQ ID NO: 8162
  source: /note="Description of Artificial Sequence: Synthetic polypeptide"

SEQ ID NO: 8174 - protein, 124 aa, Artificial Sequence
  source: /note="Description of Artificial Sequence: Synthetic polypeptide"
QVQLVESGGGVVQPGRSLRLSCAASGFTFSSYAMHWVRQAPGKGLEWVAVISYDGSNKYYADSVKGRFTISRDNSKNTLYLQMNSLRAEDTAVYYCARGREITSQNIVILLDYWGQGTLVTVSS

SEQ ID NO: 8175 - protein, 123 aa, Artificial Sequence
  source: /note="Description of Artificial Sequence: Synthetic polypeptide"
QVQLVESGGGVVQPGRSLRLSCAASGFTFSSYGMHWVRQAPDKGLEWVAVIWYDGSNKYYADSVKGRFTISRDNSKNTLYLQMNSLRAEDTAVYYCARGGTLVRGAMYGTDVWGQGTTVTVSS

SEQ ID NO: 8176 - protein, 124 aa, Artificial Sequence
  source: /note="Description of Artificial Sequence: Synthetic polypeptide"
QVQLVESGGGVVQPGRSLRLSCAASGFTFSSYAMHWVRQAPGKGLEWVAVISYDGSNKYYADSVKGRFTISRDNSKNTLYLQMNSLRAEDTAVYYCASGRYYGSGSYSSYFDYWGQGTLVTVSS

SEQ ID NO: 8177 - protein, 116 aa, Artificial Sequence
  source: /note="Description of Artificial Sequence: Synthetic polypeptide"
QVQLVQSGAEVKKPGASVKVSCKASGYTFTSYDISWVRQAPGQGLEWMGVIWTDGGTNYAQKLQGRVTMTTDTSTSTAYMELRSLRSDDTAVYYCARDQRLYFDVWGQGTTVTVSS

SEQ ID NO: 8178 - DNA, 355 bp, Artificial Sequence
  source: /note="Description of Artificial Sequence: Synthetic polynucleotide"
caggtgcagctggtggagtctgggggaggcgtggtccagcctgggaggtccctgagactctcctgtgcagcctctggattcaccttcagtagctatactatgcactgggtccgccaggctccaggcaaggggctggagtgggtgacatttatatcatatgatggaaacaataaatactacgcagactccgtgaagggccgattcaccatctccagagacaattccaagaacacgctgtatctgcaaatgaacagcctgagagctgaggacacggctatatattactgtgcgaggaccggctggctggggccctttgactactggggccagggaaccctggtcaccgtctcctcag

SEQ ID NO: 8179 - protein, 125 aa, Artificial Sequence
  source: /note="Description of Artificial Sequence: Synthetic polypeptide"
EVQLVESGGGLVQPGGSLRLSCAAAGFTFSSYSMNWVRQAPGKGLEWVSYISSRSRTIYYADSVKGRFTISRDNAKNSLYLQMNSLRDEDTAVYYCARDYGGQPPYYYYYGMDVWGQGTTVTVSS

SEQ ID NO: 8180 - protein, 122 aa, Artificial Sequence
  source: /note="Description of Artificial Sequence: Synthetic polypeptide"
QVQLQQPGTELVKPGTSVKLSCKASGYTFTSYWMHWVKQRPGQGLEWIGNINPSDGGIKYNEKFKSKATLTVDKSSSTAYMELSSLTSEDSAVYYCAKWGGHYVLYWYFDVWGTGTTVTVSS

SEQ ID NO: 8181 - protein, 122 aa, Artificial Sequence
  source: /note="Description of Artificial Sequence: Synthetic polypeptide"
QVQLQQPGTELVKPGASVKLSCKASGYNFPTYWMHWVKQRPGQGLEWIGNINPSDGGTNFNEKFNNKATLTVDKSSSTAYMQLSSLTSEDSAVYYCAKWGGHYVLYWYFDVWGTGTTVTVSS

SEQ ID NO: 8182 - protein, 125 aa, Artificial Sequence
  source: /note="Description of Artificial Sequence: Synthetic polypeptide"
EVQVQQSGAELVRPGSSVKMSCKTSGYTFTNYGIIWVKQRPGQGLEWIGYIYIGKGYTEYNEKFKGKATLTSDTSSSTVYMQLSSLTSEDSAIYFCARGAHYYGNAMDYWDQGTSVTVSSNYGII

SEQ ID NO: 8183 - protein, 122 aa, Artificial Sequence
  source: /note="Description of Artificial Sequence: Synthetic polypeptide"
QVQLQQPGTELVKPGASVKLSCKASGYNFATYWVHWVKQRPGQGLEWIGNINPSDGGTSYNEKFSKKATLTVDKSSSTAYMELSSLTSEDSAVYYCAKWGGHYVLYWSFDVWGTGTTVTVSS

SEQ ID NO: 8184 - protein, 122 aa, Artificial Sequence
  source: /note="Description of Artificial Sequence: Synthetic polypeptide"
QVQLQQPGTELVKPGASVKLSCKASGYNFATYWMHWVKQRPGQGLEWIGNINPSDGGTNFNEKFNNKATLTVDKSSSTAYMHLSSLTSEDSAVYYCAKWGGHYVLYWYFDVWGTGTTVTVSS

SEQ ID NO: 8185 - protein, 127 aa, Artificial Sequence
  source: /note="Description of Artificial Sequence: Synthetic polypeptide"
QVQLQQPGTELVKPGASVKLSCKASGYNFATYWMHWVKQRPGQGLEWIGNINPSDGGTNFNEKFNNKATLTVDKSSSTAYMQLSSLTSEDSAVYYCAKWGGHYVLYWYFDVWGTGTTVTVSSTYWMH

SEQ ID NO: 8186 - protein, 122 aa, Artificial Sequence
  source: /note="Description of Artificial Sequence: Synthetic polypeptide"
QVQLQQPGTELVKPGASVKLSCKASGYNFATYWMHWVKQRPGQGLEWIGNINPSDGGTNYNEKFNNKATLTVDKSSSTAYMQLSSLTSEDSAVYYCAKWGGHYVLYWYFDVWGTGTTVTVSS

SEQ ID NO: 8187 - protein, 127 aa, Artificial Sequence
  source: /note="Description of Artificial Sequence: Synthetic polypeptide"
QVQLQQPGTELVKPGASVKLSCKASGYNFATYWMHWVKQRPGQGLEWIGNINPSDGGTNFNEKFNSKATLTVDKSSSTAYMQLSSLTSEDSAVYYCAKWGGHYVLYWYFDVWGTGTTVTVSSTYWMH

SEQ ID NO: 8188 - protein, 115 aa, Artificial Sequence
  source: /note="Description of Artificial Sequence: Synthetic polypeptide"
QVQLVESGGGLVQPGGSLRLSCAASGFTFNNYGMTWVRQAPGKGLEWVSGISGSGSYTYYADSVKGRFTISRDNSKNTLYLQMNSLRAEDTAVYYCARTIYMDYWGQGTLVTVSS

SEQ ID NO: 8189 - protein, 116 aa, Artificial Sequence
  source: /note="Description of Artificial Sequence: Synthetic polypeptide"
QVQLVESGGGLVQPGGSLRLSCAASGFTFSSYWMSWVRQAPGKGLEWVSGISYSGSNTHYADSVKGRFTISRDNSKNTLYLQMNSLRAEDTAVYYCARMGIDLDYWGQGTLVTVSS

SEQ ID NO: 8190 - protein, 116 aa, Artificial Sequence; identical to SEQ ID NO: 8189
  source: /note="Description of Artificial Sequence: Synthetic polypeptide"

SEQ ID NO: 8191 - protein, 116 aa, Artificial Sequence; identical to SEQ ID NO: 8189
  source: /note="Description of Artificial Sequence: Synthetic polypeptide"

SEQ ID NO: 8192 - protein, 116 aa, Artificial Sequence
  source: /note="Description of Artificial Sequence: Synthetic polypeptide"
QVQLVESGGGLVQPGGSLRLSCAASGFTFSSYWMSWVRQAPGKGLEWVSVISSDSSSTYYADSVKGRFTISRDNSKNTLYLQMNSLRAEDTAVYYCARHGIDFDHWGQGTLVTVSS

SEQ ID NO: 8193 - protein, 118 aa, Artificial Sequence
  source: /note="Description of Artificial Sequence: Synthetic polypeptide"
QVQLVESGGGLVQPGGSLRLSCAASGFTFSSYWMSWVRQAPGKGLEWVSSIEHKDAGYTTWYAAGVKGRFTISRDNSKNTLYLQMNSLRAEDTAVYYCARHGIDFDHWGQGTLVTVSS

SEQ ID NO: 8194 - protein, 116 aa, Artificial Sequence; identical to SEQ ID NO: 8192
  source: /note="Description of Artificial Sequence: Synthetic polypeptide"

SEQ ID NO: 8195 - protein, 116 aa, Artificial Sequence; identical to SEQ ID NO: 8192
  source: /note="Description of Artificial Sequence: Synthetic polypeptide"

SEQ ID NO: 8196 - protein, 118 aa, Artificial Sequence
  source: /note="Description of Artificial Sequence: Synthetic polypeptide"
QVQLVESGGGLVQPGGSLRLSCAASGFTFSSYWMSWVRQAPGKGLEWVSVIEHKDKGGTTYYAASVKGRFTISRDNSKNTLYLQMNSLRAEDTAVYYCARHGIDFDHWGQGTLVTVSS

SEQ ID NO: 8197 - protein, 120 aa, Artificial Sequence
  source: /note="Description of Artificial Sequence: Synthetic polypeptide"
QVQLVQSGAEVKKPGESLKISCKGSGYSFTNYYIGWVRQMPGKGLEWMGIIVPGTSYTIYSPSFQGQVTISADKSISTAYLQWSSLKASDTAMYYCARGIPFRMRGFDYWGQGTLVTVSS

SEQ ID NO: 8198 - protein, 124 aa, Artificial Sequence
  source: /note="Description of Artificial Sequence: Synthetic polypeptide"
QVQLVESGGGLVQPGGSLRLSCAASGFTFSNYGLHWVRQAPGKGLEWVSSISYYGSSTYYADSVKGRFTISRDNSKNTLYLQMNSLRAEDTAVYYCARDGSHMDKPPGYVFAFWGQGTLVTVSS

SEQ ID NO: 8199 - protein, 115 aa, Artificial Sequence; identical to SEQ ID NO: 8188
  source: /note="Description of Artificial Sequence: Synthetic polypeptide"

SEQ ID NO: 8200 - protein, 114 aa, Artificial Sequence
  source: /note="Description of Artificial Sequence: Synthetic polypeptide"
QVQLVESGGGLVQPGGSLRLSCAASGFTFSSYGMSWVRQAPGKGLEWVSGISGSGSYTYYADSVKGRFTISRDNSKNTLYLQMNSLRAEDTAVYYCARHYMDHWGQGTLVTVSS

SEQ ID NO: 8201 - protein, 115 aa, Artificial Sequence; identical to SEQ ID NO: 8188
  source: /note="Description of Artificial Sequence: Synthetic polypeptide"

SEQ ID NO: 8202 - protein, 116 aa, Artificial Sequence; identical to SEQ ID NO: 8189
  source: /note="Description of Artificial Sequence: Synthetic polypeptide"

SEQ ID NO: 8203 - protein, 116 aa, Artificial Sequence; identical to SEQ ID NO: 8192
  source: /note="Description of Artificial Sequence: Synthetic polypeptide"

SEQ ID NO: 8204 - protein, 120 aa, Artificial Sequence
  source: /note="Description of Artificial Sequence: Synthetic polypeptide"
QVQLVQSGAEVKKPGESLKISCKGSGYSFTNYYIGWVRQMPGKGLEWMGIIYPTDSYTNYSPSFQGQVTISADKSISTAYLQWSSLKASDTAMYYCARGIPFRMRGFDYWGQGTLVTVSS

SEQ ID NO: 8205 - protein, 115 aa, Artificial Sequence; identical to SEQ ID NO: 8188
  source: /note="Description of Artificial Sequence: Synthetic polypeptide"

SEQ ID NO: 8206 - protein, 115 aa, Artificial Sequence; identical to SEQ ID NO: 8188
  source: /note="Description of Artificial Sequence: Synthetic polypeptide"

SEQ ID NO: 8207 - protein, 118 aa, Artificial Sequence
  source: /note="Description of Artificial Sequence: Synthetic polypeptide"
QVQLVQSGAEVKKPGASVKVSCKASGYTFTNYGMNWVRQAPGQGLEWMGWINTYTGEPTYADDFKGRVTMTTDTSTSTAYMELRSLRSDDTAVYYCARIGDSSPSDYWGQGTLVTVSS

SEQ ID NO: 8208 - protein, 123 aa, Artificial Sequence
  source: /note="Description of Artificial Sequence: Synthetic polypeptide"
QVQLVESGGGVVQPGRSLRLSCAASGFTFSSYGMHWVRQAPGKGLEWVSFLWYDGTNKNYVESVKGRFTISRDNSKNMLYLEMNSLRAEDTAVYYCARDHDFRSGYEGWFDPWGQGTLVTVSS

SEQ ID NO: 8209 - protein, 118 aa, Artificial Sequence
  source: /note="Description of Artificial Sequence: Synthetic polypeptide"
EVQLVESGGGLVQPGRSLKLSCAASGFTFSNYGMYWIRQAPTKGLQWVAFISHGGGITYYRDSVKGRFTISRDNAKSTLYLQMDSLRSEDTATYHCAALNWELGIDYWGQGVMVTVSS

SEQ ID NO: 8210 - protein, 118 aa, Artificial Sequence
  source: /note="Description of Artificial Sequence: Synthetic polypeptide"
EVQLVESGGGLVQPGRSMKLSCAASGFTFRNFPMAWVRQAPTRGLEWVATISSSDGTTYYRDSVKGRFTISRDNAKSTLYLQVNSLRSEDTATYYCSRGYYNSPFAYWGQGTLVTVSS

SEQ ID NO: 8211 - protein, 122 aa, Artificial Sequence
  source: /note="Description of Artificial Sequence: Synthetic polypeptide"
AVQLVESGGGLVQPKESLKISCAASGFTFSNAAMYWVRLAPGKGLEWVARIRTKPNNYATYYAESVKGRFTISRDDSKSMVYVQMDNLKTEDTAMYYCTAAPWRDSYAHVYWGQGVMVTVSS

SEQ ID NO: 8212 - protein, 116 aa, Artificial Sequence
  source: /note="Description of Artificial Sequence: Synthetic polypeptide"
EVQLVESGGGLVQPGRSLKLSCLASGFPFSSVWMTWIRQAPGKGLEWIATITNSGASTYYSASVKGRFTISRDNVKSTLYLQMTSLGSEDTATYYCTRVGTSFDYWGQGVMVTVSS

SEQ ID NO: 8213 - protein, 116 aa, Artificial Sequence
  source: /note="Description of Artificial Sequence: Synthetic polypeptide"
EVQLQQSGAELAKPGSSVKISCKASGYTFTNYDISWIKQTNGQGLEYLGYINTGSGGIYSNEKFKGKATLTVDKSSNTAFMQLSSLTPEDTAVYYCVREGNNFDHWGQGVKVTVSS

SEQ ID NO: 8214 - protein, 121 aa, Artificial Sequence
  source: /note="Description of Artificial Sequence: Synthetic polypeptide"
EVQLQQSGPELAKPGSSVKISCKASGYTFTNSYISWIKQTTGQGLEYVGYINTGSGGADYNEKFKGKATLTVDKSSRTAFMQLSSLTPGDSAVYYCAKSILLGSTCYFDYWGQGVLVTVSS

SEQ ID NO: 8215 - protein, 121 aa, Artificial Sequence
  source: /note="Description of Artificial Sequence: Synthetic polypeptide"
EVQLQQSGPELAKPGSSVKISCKASGYTFTSSYISWIKQTTGQGLEYIGYINTGSGGTDYNEKFKDKATLTVDKSSRTVFMQLSSLTPGDSAVYYCAKSILLGSTYYLDYWGQGVMVTVSS

SEQ ID NO: 8216 - protein, 118 aa, Artificial Sequence
  source: /note="Description of Artificial Sequence: Synthetic polypeptide"
EVQLVESGGGLVQPGGSLRLSCAASGFTFSNFPMAWVRQAPGKGLEWVATISSSDGTTYYRDSVKGRFTISRDNAKNSLYLQMNSLRAEDTAVYYCARGYYNSPFAYWGQGTLVTVSS

SEQ ID NO: 8217 - protein, 118 aa, Artificial Sequence
  source: /note="Description of Artificial Sequence: Synthetic polypeptide"
EVQLVESGGGLVQPGGSLRLSCAASGFTFSNFPMAWVRQAPGKGLEWVATISSSDGTTYYRDSVKGRFTISRDNAKNSLYLQMNSLRAEDTAVYYCSRGYYNSPFAYWGQGTLVTVSS

SEQ ID NO: 8218 - protein, 118 aa, Artificial Sequence
  source: /note="Description of Artificial Sequence: Synthetic polypeptide"
EVQLVESGGGLVQPGGSLRLSCAASGFTFSNFPMAWVRQAPGKGLEWVATISSSDGTTYYRDSVKGRFTISRDNSKSTLYLQMNSLRAEDTAVYYCSRGYYNSPFAYWGQGTLVTVSS

SEQ ID NO: 8219 - protein, 118 aa, Artificial Sequence
  source: /note="Description of Artificial Sequence: Synthetic polypeptide"
EVQLVESGGGVVQPGRSLRLSCAASGFTFSNYGMYWVRQAPGKGLEWVAFISHGGGITYYRDSVKGRFTISRDNSKNTLYLQMNSLRAEDTAVYYCARLNWELGIDYWGQGTMVTVSS

SEQ ID NO: 8220 - protein, 118 aa, Artificial Sequence
  source: /note="Description of Artificial Sequence: Synthetic polypeptide"
EVQLVESGGGVVQPGRSLRLSCAASGFTFSNYGMYWIRQAPGKGLEWVAFISHGGGITYYRDSVKGRFTISRDNSKSTLYLQMNSLRAEDTAVYHCAALNWELGIDYWGQGTMVTVSS

SEQ ID NO: 8221 - protein, 118 aa, Artificial Sequence
  source: /note="Description of Artificial Sequence: Synthetic polypeptide"
EVQLVESGGGVVQPGRSLRLSCAASGFTFSNYGMYWVRQAPGKGLEWVAFISHGGGITYYRDSVKGRFTISRDNSKNTLYLQMNSLRAEDTAVYYCAALNWELGIDYWGQGTMVTVSS

SEQ ID NO: 8222 - protein, 118 aa, Artificial Sequence
  source: /note="Description of Artificial Sequence: Synthetic polypeptide"
EVQLVESGGGLVQPGGSLRLSCAASGFTFSNYGMYWIRQAPGKGLEWVAFISHGGGITYYRDSVKGRFTISRDNSKSTLYLQMNSLRAEDTAVYHCAALNWELGIDYWGQGTMVTVSS

SEQ ID NO: 8223 - protein, 118 aa, Artificial Sequence; identical to SEQ ID NO: 8216
  source: /note="Description of Artificial Sequence: Synthetic polypeptide"

SEQ ID NO: 8224 - protein, 118 aa, Artificial Sequence
  source: /note="Description of Artificial Sequence: Synthetic polypeptide"
EVQLVESGGGLVQPGGSLRLSCAASGFTFRHFPMAWVRQAPGKGLEWVATISSSDAWPSYRDSVKGRFTISRDNAKNSLYLQMNSLRAEDTAVYYCSRGYYNSPFAYWGQGTLVTVSS

SEQ ID NO: 8225 - protein, 118 aa, Artificial Sequence
  source: /note="Description of Artificial Sequence: Synthetic polypeptide"
EVQLVESGGGLVQPGGSLRLSCAASGFTFGNFPMSWVRQAPGKGLEWVASISSSDSWATIGDSVKGRFTISRDNAKNSLYLQMNSLRAEDTAVYYCSRGYYNSPFAYWGQGTLVTVSS

SEQ ID NO: 8226 - protein, 118 aa, Artificial Sequence
  source: /note="Description of Artificial Sequence: Synthetic polypeptide"
EVQLVESGGGLVQPGGSLRLSCAASGFTFRNFPMAWVRQAPGKGLEWVATISSSDGWPTYRDSVKGRFTISRDNAKSSLYLQMNSLRAEDTAVYYCSRGYYNSPFAYWGQGTLVTVSS

SEQ ID NO: 8227 - protein, 118 aa, Artificial Sequence
  source: /note="Description of Artificial Sequence: Synthetic polypeptide"
EVQLVESGGGLVQPGGSLRLSCAASGFTFRHFPMAWVRQAPGKGLEWVATISSSDDWPNYRDSVKGRFTISRDNAKSSLYLQMNSLRAEDTAVYYCSRGYYNSPFAYWGQGTLVTVSS

SEQ ID NO: 8228 - protein, 118 aa, Artificial Sequence
  source: /note="Description of Artificial Sequence: Synthetic polypeptide"
EVQLVESGGGLVQPGGSLRLSCAASGFTFRYFPMSWVRQAPGKGLEWVASISGSDGWASYRDSVKGRFTISRDNAKNSLYLQMNSLRAEDTAVYYCARGYYNSPFASWGQGTLVTVSS

SEQ ID NO: 8229 - protein, 118 aa, Artificial Sequence
  source: /note="Description of Artificial Sequence: Synthetic polypeptide"
EVQLVESGGGLVQPGGSLRLSCAASGFTFRYFPMAWVRQAPGKGLEWVATISGSDEWPNYRDSVKGRFTISRDNAKNSLYLQMNSLRAEDTAVYYCARGYYNSPFAFWGQGTLVTVSS

SEQ ID NO: 8230 - protein, 118 aa, Artificial Sequence
  source: /note="Description of Artificial Sequence: Synthetic polypeptide"
EVQLVESGGGLVQPGGSLRLSCAASGFTFRYFPMSWVRQAPGKGLEWVASISGSDGWASYRDSVKGRFTISRDNAKNSLYLQMNSLRAEDTAVYYCARGYYNSPFAYWGQGTLVTVSS

SEQ ID NO: 8231 - protein, 118 aa, Artificial Sequence
  source: /note="Description of Artificial Sequence: Synthetic polypeptide"
EVQLVESGGGLVQPGGSLRLSCAASGFTFRHFPMAWVRQAPGKGLEWVATISSSDAWPSYRDSVKGRFTISRDNAKNSLYLQMNSLRAEDTAVYYCARGYYNSPFAYWGQGTLVTVSS

SEQ ID NO: 8232 - protein, 118 aa, Artificial Sequence
  source: /note="Description of Artificial Sequence: Synthetic polypeptide"
EVQLVESGGGLVQPGGSLRLSCAASGFTFGNFPMSWVRQAPGKGLEWVASISSSDSWATIGDSVKGRFTISRDNAKNSLYLQMNSLRAEDTAVYYCARGYYNSPFAFWGQGTLVTVSS

SEQ ID NO: 8233 - protein, 123 aa, Artificial Sequence [sequence omitted]

SEQ ID NO: 8234 - protein, 95 aa, Artificial Sequence
  source: /note="Description of Artificial Sequence: Synthetic polypeptide"
VSGGSVSSGDYYWTWIRQSPGKGLEWIGHIYYSGNTNYNPSLKSRLTISIDTSKTQFSLKLSSVTAADTAIYYCVRDRVTGAFDIWGQGTMVTSS

SEQ ID NO: 8235 - protein, 120 aa, Artificial Sequence [sequence omitted]

SEQ ID NO: 8236 - protein, 119 aa, Artificial Sequence
  source: /note="Description of Artificial Sequence: Synthetic polypeptide"
QVQLQESGPGLVKPSETLSLTCTVSGFSISNYGVHWIRQSPGKGLEWIGVIWSGGNTDYNTPFTSRVTISKDNSKNQVSLKLSSVTAADTAVYYCARALTYYDYEFAYWGQGTLVTVSA

SEQ ID NO: 8237 - protein, 119 aa, Artificial Sequence
  source: /note="Description of Artificial Sequence: Synthetic polypeptide"
QVQLKQSGPGLVQPSQSLSITCTVSGFSLTNYGVHWIRQPPGKGLEWIGVIWSGGNTDYNTPFTSRLSINKDNSKSQVFFKMNSLQSNDTAIYYCARALTYYDYEFAYWGQGTLVTVSA

SEQ ID NO: 8238 - protein, 118 aa, Artificial Sequence
  source: /note="Description of Artificial Sequence: Synthetic polypeptide"
QVQLQQPGAELVEPGGSVKLSCKASGYTFTSHWMHWVKQRPGQGLEWIGEINPSSGRNNYNEKFKSKATLTVDKSSSTAYMQFSSLTSEDSAVYYCVRYYGYDEAMDYWGQGTSVTVS

SEQ ID NO: 8239 - protein, 120 aa, Artificial Sequence
  source: /note="Description of Artificial Sequence: Synthetic polypeptide"
QVQLVQSGAEVKKPGASVKVSCKASGYTFRSSYISWVRQAPGQGLEWMGWIYAGTGSPSYNQKLQGRVTMTTDTSTSTAYMELRSLRSDDTAVYYCARHRDYYSNSLTYWGQGTLVTVSS

SEQ ID NO: 8240 - protein, 133 aa, Artificial Sequence
  source: /note="Description of Artificial Sequence: Synthetic polypeptide"
METGLRWLLLVAVLKGVQCQSVEESGGRLVTPGTPLTLTCKASGFSLSDSRVSWVRQAPGKGLEWIGIVGIGWNIYHANWAKGRFTISKTSSTTVDLKITSPTVEDTATYFCARGLGGGTVIWGPGTLVTVSL

SEQ ID NO: 8241 - protein, 135 aa, Artificial Sequence
  source: /note="Description of Artificial Sequence: Synthetic polypeptide"
METGLRWLLLVAVLKGVQCQSLEESGGRLVTPGTPLTLTCTVSGFSLSRNAINWVRQAPGKGLEYIGIIGSSGVTYYASWAKGRFTISRTSTTVDLKITSPTTEDTATYFCARNLYTGGSNDNLWGPGTLVTVSS

SEQ ID NO: 8242 - protein, 121 aa, Artificial Sequence
  source: /note="Description of Artificial Sequence: Synthetic polypeptide"
QVQLVQSGAEVKKPGASVKVSCKASGYTFTNYWIHWVRQAPGQGLEWMGVIDPSDTYPNYNKKFKGRVTMTTDTSTSTAYMELRSLRSDDTAVYYCARNGDSDYYSGMDYWGQGTTVTVSS

SEQ ID NO: 8243 - protein, 121 aa, Artificial Sequence
  source: /note="Description of Artificial Sequence: Synthetic polypeptide"
QVQLQQPVTELVRPGASVMLSCKASDYPFTNYWIHWVKQRPGQGLEWIGVIDPSDTYPNYNKKFKGKATLTVVVSSSTAYMQLSSLTSDDSAVYYCARNGDSDYYSGMDYWGQGTSVTVSS

SEQ ID NO: 8244 - protein, 121 aa, Artificial Sequence
  source: /note="Description of Artificial Sequence: Synthetic polypeptide"
QVQLVQSGAEVKKPGASVKVSCKASGYTFTNYWIHWVRQAPGQGLEWIGVIDPSDTYPNYNKKFKGRVTMTVVVSTSTAYMELRSLRSDDTAVYYCARNGDSDYYSGMDYWGQGTTVTVSS

SEQ ID NO: 8245 - protein, 116 aa, Artificial Sequence
  source: /note="Description of Artificial Sequence: Synthetic polypeptide"
EVKLEESGGGLVQPGGSMKLSCEASGFTFSDAWMDWVRQSPEKGLEWVAEIRNKAKNHATYYAESVIGRFTISRDDSKSSVYLQMNSLRAEDTGIYYCGALGLDYWGQGTTLTVSS

SEQ ID NO: 8246 - protein, 121 aa, Artificial Sequence; identical to SEQ ID NO: 8243
  source: /note="Description of Artificial Sequence: Synthetic polypeptide"

SEQ ID NO: 8247 - protein, 121 aa, Artificial Sequence; identical to SEQ ID NO: 8244
  source: /note="Description of Artificial Sequence: Synthetic polypeptide"

SEQ ID NO: 8248 - protein, 121 aa, Artificial Sequence
  source: /note="Description of Artificial Sequence: Synthetic polypeptide"
QVQLVQSGAEVKKPGASVKVSCKASGYTFTNYWIHWVRQAPGQGLEWIGVIDPSDTYPNYNKKFKGRVTMTVDTSTSTAYMELRSLRSDDTAVYYCARNGDSDYYSGMDYWGQGTTVTVSS

SEQ ID NO: 8249 - protein, 116 aa, Artificial Sequence; identical to SEQ ID NO: 8245
  source: /note="Description of Artificial Sequence: Synthetic polypeptide"

SEQ ID NO: 8250 - protein, 108 aa, Artificial Sequence
  source: /note="Description of Artificial Sequence: Synthetic polypeptide"
QIVMTQSPATLSVSPGERATLSCRASQSVGSYVDWYQQKPGQAPRLLIYGASTRYTGIPARFSGSGSGTEFTLTISSLQSEDFAVYYCLQYNNHPYTFGQGTKLEIKR

SEQ ID NO: 8251 - protein, 106 aa, Artificial Sequence; identical to SEQ ID NO: 4042
  source: /note="Description of Artificial Sequence: Synthetic polypeptide"

SEQ ID NO: 8252 - protein, 120 aa, Artificial Sequence
  source: /note="Description of Artificial Sequence: Synthetic polypeptide"
EVQLVQSGAEVKKPGESLKVSCKASGYTFTSYYMHWVRQAPGQGLEWMGIINPSGGSTSYAQKFQGRVTMTRDTSTSTVYMELSSLRSEDTAVYYCARGSAYYYDFADYWGQGTLVTVSS

SEQ ID NO: 8253 - protein, 119 aa, Artificial Sequence
  source: /note="Description of Artificial Sequence: Synthetic polypeptide"
EVQLVESGGGVVQPGRSLRLSCSASGFTFSGYGLSWVRQAPGKGLEWVAMISSGGSYTYYADSVKGRFAISRDNAKNTLFLQMDSLRPEDTGVYFCARHGDDPAWFAYWGQGTPVTVSS

SEQ ID NO: 8254 - protein, 121 aa, Artificial Sequence
  source: /note="Description of Artificial Sequence: Synthetic polypeptide"
EVQLVESGGGVVQPGRSLRLSCAASGFTFSSYGMHWVRQAPGKGLEWVSFIWYDGSNKYYADSVKGRFTISRDNSKNTLYLQMNSLTAEDTAVYYCARRGILTGTTAFDIWGQGTMVTVSS

SEQ ID NO: 8255 - protein, 121 aa, Artificial Sequence
  source: /note="Description of Artificial Sequence: Synthetic polypeptide"
QVQLVESGGGVVQPGRSLRLSCAASGFSFSDYVMHWVRQAPGKGLEWVASIWFDGSNELYADSVKGRFTISRDNSKNTLFLQMNSLRAEDTAVYYCAKKGVLVATSAFHIWGQGTMVTVSS

SEQ ID NO: 8256 - protein, 124 aa, Artificial Sequence
  source: /note="Description of Artificial Sequence: Synthetic polypeptide"
EVQLVESGGGLVQPGGSLRLSCAASGFTFSSYAMSWVRQAPGKGLEWVSVISGSGGSTYYADAVKGRFTISRDNSKHTLYLQMNSLRAEDTAVYYCTKPSSYSSSNFYYGMDVWGQGSTVTVSS

SEQ ID NO: 8257 - protein, 124 aa, Artificial Sequence
  source: /note="Description of Artificial Sequence: Synthetic polypeptide"
EVQLVESGGGLVQAGGSLRLSCVASGFTFSSYAMSWVRQAPGKGLEWVSAISGSGGSTYSADSVKGRFTISRDNSKNTLYLQMNSLRAEDTAVYYCTKPSSYSSSNFYYGMDVWGQGTTVTVSS

SEQ ID NO: 8258 - protein, 124 aa, Artificial Sequence
  source: /note="Description of Artificial Sequence: Synthetic polypeptide"
EVQLVESGGGLVQPGGSLRLSCAASGFTFSSYAMSWVRQAPGKGLEWVSVISGSGGSTYYADSVKGRFTISRDNSKNTLYLQMNSLRAEDTAVYYCAKPSSYSSSNFYYGMDVWGQGTTVTVSS

SEQ ID NO: 8259 - protein, 120 aa, Artificial Sequence
  source: /note="Description of Artificial Sequence: Synthetic polypeptide"
EVQLLESGGGLVQPGGSLRLSCAASGFTFSSYAMSWVRQGPGKGLEWVSGISGSGGSTYNADSVKGRFTISRDNSKNTLYLQMNSLRAEDTAVYYCAKDSGTYWYYFDYWGQGILVTVSS

SEQ ID NO: 8260 - protein, 123 aa, Artificial Sequence
  source: /note="Description of Artificial Sequence: Synthetic polypeptide"
EVQLVESGAEVKKSGSSVKVSCKASGGTFSRYAISWVRQAPGQGLEWMGGIIPLFGTLNYAQKFQGRVTLTTDESTSTAYMELSSLRSEDTAVYYCAVFYYGSGSYRNWFDPWGQGTLVTVSS

SEQ ID NO: 8261 - protein, 120 aa, Artificial Sequence
  source: /note="Description of Artificial Sequence: Synthetic polypeptide"
EVQLVESGGGLVQPGRSLRLSCAASGFTFNDYAMHWVRQAPGKGLEWVSGISWNSGNIGYADSVKGRFTISRDNAKNSLYLQMNSLRAEDTALYFCARDTRMATRPFDYWGQGTLVTVSS

SEQ ID NO: 8262 - protein, 119 aa, Artificial Sequence
  source: /note="Description of Artificial Sequence: Synthetic polypeptide"
EVQLLESGGGLVQPGGSLRLSCAASGFTFSTYAMSWVRQAPGKGLEWVSAIRGNGVNTYYGDSMKGRFTISRDNSKDTLYLQMNSLRAEDTAVYYCAKNKWELLVFEYWGQGTLVTVSS

SEQ ID NO: 8263 - protein, 121 aa, Artificial Sequence
  source: /note="Description of Artificial Sequence: Synthetic polypeptide"
EVQLVESGGGVVQPGRSLRLSCAASGFSFSDYVMHWVRQAPGKGLEWVASIWFDGSNEFYADSVKGRFTISRDNSKNTLFLQMNSLRAEDTAVYYCAKKGVLVATSAFDIWGQGTMVTVSS

SEQ ID NO: 8264 - protein, 120 aa, Artificial Sequence
  source: /note="Description of Artificial Sequence: Synthetic polypeptide"
EVQLVESGGGLVRPGRSLRLSCAASGFTFDNYAMHWVRQVPGKGLEWVSGITWNSVSLGYADSVKGRFTISRDNAQNSLYLQMNSLRTVDTALYYCAKDRWGGSYYFDFWGQGTLVTVSS

SEQ ID NO: 8265 - protein, 121 aa, Artificial Sequence
  source: /note="Description of Artificial Sequence: Synthetic polypeptide"
QVQLVESGGGVVQPGRSLRLSCAASGFSFSDYVMHWVRQAPGKGLEWVASIWFDGSNEFYADSVKGRFTISRDNSKNTLFLQMNSLRAEDTAVYYCAKKGVLVATSAFDIWGQGTMVTVSS

SEQ ID NO: 8266 - protein, 120 aa, Artificial Sequence
  source: /note="Description of Artificial Sequence: Synthetic polypeptide"
EVQLVQSGAEVKKPGASVKVSCKASGYTFTNYGITWVRQAPGQGLEWMGWISAYNGNTGYAQKFQGRVTMTTDTSTSTAYMELRSLRSDDTAVYYCAREDYDFWRAFDIWGQGTMVTVSS

SEQ ID NO: 8267 - protein, 121 aa, Artificial Sequence; identical to SEQ ID NO: 8265
  source: /note="Description of Artificial Sequence: Synthetic polypeptide"

SEQ ID NO: 8268 - protein, 120 aa, Artificial Sequence
  source: /note="Description of Artificial Sequence: Synthetic polypeptide"
EVQLVESGGGLVQPGGSLRLSCAASGFTFSSYAMSWVRQVPGKGLEWVSAISGSGDNTYNAESVKGRFTISRDNSKNMLYLQMNSLRAEDTAVYYCAKTKFSSSLLFDYWGQGTLVTVSS

SEQ ID NO: 8269 - protein, 124 aa, Artificial Sequence
  source: /note="Description of Artificial Sequence: Synthetic polypeptide"
EVQLVESGGGLVQPGGSLRLSCAASTFTFSSYAMTWVRQAPGKGLEWVSSISGSGDSTYYADSVKGRFTISRDNSKNTLFLQMNSLRAEDTAVYYCAKKDGPGRYYVRYGMDVWGQGTTVTVSS

SEQ ID NO: 8270 - protein, 123 aa, Artificial Sequence
  source: /note="Description of Artificial Sequence: Synthetic polypeptide"
EVQLLESGGNLVQPGGSLRLSCAASGFTFSSYAMTWVRQAPGKGLEWVSTISGSGTSTYYADSVKGRFTISRDNSRDTVFLQMNSLRAEDTAVYYCSKPSALRFLHWLAMDVWGQGTLVTVSS

SEQ ID NO: 8271 - protein, 124 aa, Artificial Sequence
  source: /note="Description of Artificial Sequence: Synthetic polypeptide"
EVQLVESGGGLEQPGGSLRLSCAASGFTFSSYVMSWVRQVPGKGLEWVSVISGSGGSTYYADSVKGRFTISRDNSKNTLYLQMNSLRAEDTAVYYCAKPSSYSSSNFHYGMDVWGQGTTVTVSS

SEQ ID NO: 8272 - protein, 124 aa, Artificial Sequence
  source: /note="Description of Artificial Sequence: Synthetic polypeptide"
QVQLVQSGAEVKKPGASVKVSCKASGYTFTSYGIIWVRQAPGQGLEWMGWISGYNGNTNYTQNLQGRVTMTTDTSTTTAYMELRSLRSDDTAVYYCARWGIATRPYYYYGMDVWGQGTTVTVSS

SEQ ID NO: 8273 - protein, 123 aa, Artificial Sequence
  source: /note="Description of Artificial Sequence: Synthetic polypeptide"
EVQLLESGGNLVQPGGSLRLSCAASGFTFSSYAMTWVRQAPGKGLEWVSTISGSGTSTYYADSVKGRFTISRDNSRDTVFLQMNSLRAEDTAVYYCSKPSALRFLHWLCMDVWGQGTLVTVSS

SEQ ID NO: 8274 - protein, 124 aa, Artificial Sequence
  source: /note="Description of Artificial Sequence: Synthetic polypeptide"
QVQLVQSGAEVKKPGASVKVSCKASGYTFTSYGIIWVRQAPGQGLEWMGWISGYNGNTNYAQNLQGRVTMTTDTSTTTAYMELRSLRSDDTAVYYCARWGIATRPYYYYGMDVWGQGTTVTVSS

SEQ ID NO: 8275 - protein, 121 aa, Artificial Sequence
  source: /note="Description of Artificial Sequence: Synthetic polypeptide"
EVQLLESGGGLVQPGGSLRVSCAASGFTFSTSAMSWVRQAPGKGLEWVSGISGIGGGSTYYADSVKGRFTISRDNSKNTLYLQMNSLRAEDTAVYFCAKFYKWNSYIFDLWGQGTMVTVSS

SEQ ID NO: 8276 - protein, 120 aa, Artificial Sequence
  source: /note="Description of Artificial Sequence: Synthetic polypeptide"
EVQLLESGGGLVQSGGSLRLSCAASGFSFNNYAMSWVRQAPGKGLEWVSFISGSGGSTYYADSVKGRFTISRDNSKNTLYLQMNSLRVEDTAVFYCAKDRYNYGTFFDYWGQGTLVTVSS

SEQ ID NO: 8277 - protein, 124 aa, Artificial Sequence
  source: /note="Description of Artificial Sequence: Synthetic polypeptide"
EVQLVESGGGLVQPGESLRLSCAASGFTFSNYAMSWVRQAPGKGLEWVSVISGSGGSTYYADSVKGRFTMSRDNSKNTLYLQMNSLRAEDTAVYYCAKPPSRAARYFNYGMDVWGQGTTVTVSS

SEQ ID NO: 8278 - protein, 115 aa, Artificial Sequence
  source: /note="Description of Artificial Sequence: Synthetic polypeptide"
QVQLVQSGGGVVQPGRSLRLSCAASGFTFSSYGMHWVRQAPGKGLEWVAFIRYDGSNKYYADSVKGRFTISRDNSKNTLYLQMKSLRAEDTAVYYCKTHGSHDNWGQGTMVTVSS

SEQ ID NO: 8279 - protein, 115 aa, Artificial Sequence [sequence omitted]

SEQ ID NO: 8280 - protein, 116 aa, Artificial Sequence
  source: /note="Description of Artificial Sequence: Synthetic polypeptide"
QVQLQQPGAELVRPGASVQLSCKASGYTFTSSWIHWVNQRPGQGLEWIGMIHPSDSETRLNQKFKDKATLTVDKSSSTAYMQLSSPTSEDSAVYYCASTATDFDYWGQGTTLTVSS

SEQ ID NO: 8281 - protein, 116 aa, Artificial Sequence
  source: /note="Description of Artificial Sequence: Synthetic polypeptide"
QVRLQQPGAELVRPGASVKLSCKASGYTFTSSWIHWVNQRPGQGLEWIGMIHPSDSETRLNQKFKDKATLTVDKSSSTAYMQLSSPTSEDSAVYYCASTATDFDYWGQGTTLTVSS

SEQ ID NO: 8282 - protein, 120 aa, Artificial Sequence
  source: /note="Description of Artificial Sequence: Synthetic polypeptide"
QVQLQQSGDDLVKPGASVKLSCKASGYTFTSYWINWIKQRPGQGLEWIGHIAPGSGETYDNEMFKDKAKLTVDTSSNTAYIHLSSLSSEDSAVYFCARGSFTFFYAMDYWGQGTSVTVSS

SEQ ID NO: 8283 - protein, 120 aa, Artificial Sequence
  source: /note="Description of Artificial Sequence: Synthetic polypeptide"
QVQLQQSGDDLVKPGASVKLSCKASGYTFTSYWINWIKQRPGQGLEWIGHIAPGSGETYDNEMFKDKAKLTVDTSSSTAYIHLSSLSSEDSAVYFCARGSFTFFYAMDYWGQGTSVTVSS

SEQ ID NO: 8284 - protein, 123 aa, Artificial Sequence
  source: /note="Description of Artificial Sequence: Synthetic polypeptide"
QVQLQQSGAELARPGTSVKLSCKASGYTFTTYGISWVKQRTGQGLEWIGEIYPGSYNTYYNEKFRGKATLTADKSSSTAYMQLSSLTSEDSAVYFCSRWRTSYFSDYGYFDYWGQGTTLTVSS

SEQ ID NO: 8285 - protein, 123 aa, Artificial Sequence
  source: /note="Description of Artificial Sequence: Synthetic polypeptide"
QVQLQQSGAELARPGTSVKLSCKASGYTFTTYGVSWVKQRTGQGLEWIGEIYPGNYNTYYNEKFRGKATLTADKSSSTAYMQLSSLTSEDSAVYFCSRWRTSYFSDYGYFDYWGQGTTLTVSS

SEQ ID NO: 8286 - protein, 111 aa, Artificial Sequence
  source: /note="Description of Artificial Sequence: Synthetic polypeptide"
EVQLVESGGGLVKPGGSLKLSCAASGFTFSTYAMSWVRQTPEKRLEWVAGISSGGSYTYYPETMKGRFTISRDNARNTLYLQMSSLRSEDTAIYYCTRGSWGQGTSVTVSS

SEQ ID NO: 8287 - protein, 117 aa, Artificial Sequence
  source: /note="Description of Artificial Sequence: Synthetic polypeptide"
EVKLVESGGGLVRPGGSLKLSCAASGFTFSSYAMNWVRQTPEKRLEWVASISSGGNIYYSDSVKGRFTISRDNARNTLHLQMSSLRSEDTAMYYCARDGYLYAMDYWGQGTSVTVSS

SEQ ID NO: 8288 - protein, 123 aa, Artificial Sequence
  source: /note="Description of Artificial Sequence: Synthetic polypeptide"
QVTLKESGPGILQPSQTLSLTCSFSGFSLSTSDMGVDWIRQPSGKGLEWLAHIWWDDVKRYNPALKSRLTISKDTSSSQVFLMLASVDTADTATYYCARTVSSGYIYYAMDYWGQGTSVTVSS

SEQ ID NO: 8289 - protein, 66 aa, Artificial Sequence
  source: /note="Description of Artificial Sequence: Synthetic polypeptide"
VKRYNPALKSRLTISKDTSSSQVFLMLASVDTADTATYYCARIVSSGYIYYALDYWGQGTSVTVSS

SEQ ID NO: 8290 - protein, 123 aa, Artificial Sequence
  source: /note="Description of Artificial Sequence: Synthetic polypeptide"
QVTLKESGPGILQPSQTLSLTCSFSGFSLSTSDLGVGWIRQPSGKGLEWLAHIWWDDVKRYNPALKSRLTISKDTSSSQVFLMIASVDTADTATYYCARIGSSGYIYYEMDYWGQGTSVTVSS

SEQ ID NO: 8291 - protein, 118 aa, Artificial Sequence
  source: /note="Description of Artificial Sequence: Synthetic polypeptide"
EVQLQQSGAEFVRPGALVKLSCKASGFNIKDYYMYWVKQRPEQGLEWIGRIDPENGNTIYDPKFQGKASITGDTSSNTAYLQLSSLTSEDTAVYYCARYAYYGPFDYWGQGTTLTVSS

SEQ ID NO: 8292 - protein, 110 aa, Artificial Sequence
  source: /note="Description of Artificial Sequence: Synthetic polypeptide"
QAVVTQESALTTSPGETVTLTCRSSIGTVTTNNYANWVQEKPDHLFTGLIGSTNNRAPGVPARFSGSLIGDKAALTITGAQTEDEAIYFCALWYSNHWVFGGGTKLTVLG

SEQ ID NO: 8293 - protein, 112 aa, Artificial Sequence
  source: /note="Description of Artificial Sequence: Synthetic polypeptide"
NIVLTQSPASLAVSLGQRATISCRASETVDSYGKSYLHWYQQKPGQPPKLLIYLASNLESGVPARFSGSGSRTDFTLIIDPVEADDAATYYCQQNNEGPRTFGGGTKLEIKR

SEQ ID NO: 8294 - protein, 112 aa, Artificial Sequence
  source: /note="Description of Artificial Sequence: Synthetic polypeptide"
NIVLTQSPASLAVSLGQRATIFCRASESVDSYGNSFMHWYQQKSGQPPKLLIYLASNLESGVPARFSGSGSRTDFTLTIDPVEADDAATFYCQQNNENPRTFGGGTKLEIKR

SEQ ID NO: 8295 - protein, 112 aa, Artificial Sequence
  source: /note="Description of Artificial Sequence: Synthetic polypeptide"
NIVLTQSPASLAVSLGQRATISCRASESVDSYGNSFMHWYQQKPGQPPKLLIYLASNLESGVPARFSGSGSRADFTLTIDPVEADDAATYYCQQNNENPRTFGGGTKLEIKR

SEQ ID NO: 8296 - protein, 112 aa, Artificial Sequence
  source: /note="Description of Artificial Sequence: Synthetic polypeptide"
NIVLTQSPASLAVSLGQRATISCRASETVDSYGNSFMHWYQQKPGQPPKLLIYLASNLESGVPARFSGSGSRTDFTLTIDPVEADDAATYYCQQNNEDPRTFGGGTKLEIKR

SEQ ID NO: 8297 - protein, 112 aa, Artificial Sequence
  source: /note="Description of Artificial Sequence: Synthetic polypeptide"
HIVLTQSPASLAVSLGQRATISCRASETVDSYGSSFLHWYQQKPGQPPKLLIYLASKLESGVPARFSGSGSRTDFTLTIDPVEADDAATYYCQQNNEGPRTFGGGSKLEIKR

SEQ ID NO: 8298 - protein, 121 aa, Artificial Sequence
  source: /note="Description of Artificial Sequence: Synthetic polypeptide"
QIQLVQSGPELKKPGETVKISCKASGFTFTNYGMNWVKQAPGKGLKWMGWINTYTREPTYADDFKGRFAFSLETSASTAYLQINNLKNEDTAKYFCARDITAVVPTGFDYWGQGTTLTVSS

SEQ ID NO: 8299 - protein, 121 aa, Artificial Sequence
  source: /note="Description of Artificial Sequence: Synthetic polypeptide"
QVQLQQSGSELKKPGASVKVSCKASGFTFTNYGMNWVKQAPGQGLKWMGWINTYTREPTYADDFKGRFAFSLDTSVSTAYLQISSLKADDTAVYFCARDITAVVPTGFDYWGQGSLVTVSS

SEQ ID NO: 8300 - protein, 120 aa, Artificial Sequence
  source: /note="Description of Artificial Sequence: Synthetic polypeptide"
QIQLVQSGPELKKPGETVKISCKASGFTFTNYGMNWVKQAPGKGLKWMGWINTYTREPTYADDFKGRFAFSLETSASTAYLQINNLKNEDTAKYFCARDITAVVPTGFDYWGQGTTLTVS

SEQ ID NO: 8301 - protein, 121 aa, Artificial Sequence; identical to SEQ ID NO: 8299
  source: /note="Description of Artificial Sequence: Synthetic polypeptide"

SEQ ID NO: 8302 - protein, 118 aa, Artificial Sequence
  source: /note="Description of Artificial Sequence: Synthetic polypeptide"
QVQLVESGGGVVQPGRSQRLSCAASGFTFSHYGMHWVRQAPGKGLEWVAVISYDGNNKHYADSVKGRFTTSRDNSKNTLFLQMNSLRAEDTAVYYCARGYSGYVLDYWGQGTLVTVSS

SEQ ID NO: 8303 - protein, 121 aa, Artificial Sequence
  source: /note="Description of Artificial Sequence: Synthetic polypeptide"
EVQLVESGPGLVKSSETLSLKCTVSGGSISSSGYYWGWIRQPPGKGLEWIGSIHRSGSTFYNPSLKSRVTISVDTSKSQFSLRLTSVTAADTSVYFCGRHGRDYYYGMDVWGQGTTVTVSS

SEQ ID NO: 8304 - protein, 121 aa, Artificial Sequence
  source: /note="Description of Artificial Sequence: Synthetic polypeptide"
EVQLVQSGPGLVKSSETLSLKCTVSGGSISSSGYYWGWIRQPPGKGLEWIGSIHRSGSTFYNPSLKSRVTISVDTSKSQFSLRLTSVTAADTSVYFCGRHGRDYYYGMDVWGQGTTVTVSS

SEQ ID NO: 8305 - protein, 121 aa, Artificial Sequence
  source: /note="Description of Artificial Sequence: Synthetic polypeptide"
EVQLVESGPGLVKPSETLSLKCTVSGGSIRSSGYYWGWIRQPPGKGLEWIGSIHHSGSTYYNPSLKSRVTISVDTSKSQFSLRLTSVTAADTAVYYCGRHGRDYYYGMDVWGQGTTVTVSS

SEQ ID NO: 8306 - protein, 126 aa, Artificial Sequence
  source: /note="Description of Artificial Sequence: Synthetic polypeptide"
QVQLVESGGGLVQPGGSLRLSCAASGFTFSSYGMSWVRQVPGKGLEWVSAISGSGGSTYYVDSVKGRFTISRDNFKNTLYLQMNSLRVEDTAVYYCAKDVGYCSTTSCRGDAFDVWGQGTMVTVSS

SEQ ID NO: 8307 - protein, 126 aa, Artificial Sequence
  source: /note="Description of Artificial Sequence: Synthetic polypeptide"
QVQLVQSGAEVKKPGASVKVSCKASGYTFTSYGISWVRQAPGQGLEWMGWISAYNGNTNYAQKLQGRVTMTTDTSTSTVYMELRRLRSDDTAVYYCARDGSPTMVTRYYSYGMDVWGQGTLVTVSS

SEQ ID NO: 8308 - protein, 114 aa, Artificial Sequence
  source: /note="Description of Artificial Sequence: Synthetic polypeptide"
KVQLVESGGGLVQFGGSLRLSCAASGFTFSSYGMNWVRQTPGKGLEWVSAIGGSGGSTYYADSVKGRFTISRDNSKNTLYLQMTSLRAEDTAVYYCAKGAYDVWGQGTTVTVSS

SEQ ID NO: 8309 - protein, 114 aa, Artificial Sequence
  source: /note="Description of Artificial Sequence: Synthetic polypeptide"
QVQLVESGGGLVQFGGSLRLSCAASGFTFSSYGMNWVRQTPGKGLEWVSAIGGSGGSTYYADSVKGRFTISRDNSKNTLYLQMTSLRAEDTAVYYCAKGAYDVWGQGTTVTVSS

SEQ ID NO: 8310 - protein, 114 aa, Artificial Sequence
  source: /note="Description of Artificial Sequence: Synthetic polypeptide"
EVQLVESGGGLVQFGGSLRLSCAASGFTFSSYGMNWVRQTPGKGLEWVSAIGGSGGSTYYADSVKGRFTISRDNSKNTLYLQMTSLRAEDTAVYYCAKGAYDVWGQGTTVTVSS

SEQ ID NO: 8311 - protein, 114 aa, Artificial Sequence
  source: /note="Description of Artificial Sequence: Synthetic polypeptide"
QVQLVESGGGLVKPGGSLRLSCAASGFTFSDYYISWIRQAPGKGLEWVSYISSSGSTRYYADSVKGRFTISRDNAKNSLYLQMNSLRAEDTAVYYCVRSGMDVWGQGTTVTVSS

SEQ ID NO: 8312 - protein, 117 aa, Artificial Sequence
  source: /note="Description of Artificial Sequence: Synthetic polypeptide"
QVQLVQSGGDLVQPGRSLRLSCAASGFTFDVYAMHWVRQAPGKGLEWVSGISWNSGYIGYADSVKGRFTISRDNAKNSLYLQMNSLRAEDTALYYCAKDKGIGFDYWGQGTLVTVSS

SEQ ID NO: 8313 - protein, 118 aa, Artificial Sequence
  source: /note="Description of Artificial Sequence: Synthetic polypeptide"
QVQLVESGGGVVQPGRSLRLSCAASGFTFSNYGMHWVRQAPGKGLEWVAVTSYDGSNKHYADSVKGRFSTSRDNPKNTLYLQMDSLRGEDTAVYYCARGYSGFVLDNWGQGTLVTVSS

SEQ ID NO: 8314 - protein, 121 aa, Artificial Sequence
  source: /note="Description of Artificial Sequence: Synthetic polypeptide"
QVQLVESGGGLVQPGGSLRLSCAASGFTFSSYAMSWVRQAPGKGLEWVSAISGSGGSTYYADSVKGRFTISRDNSKNTLYLQMNSLRAEDTAVYYCAKAPYSGYDWYFDYWGQGTLVTVSS

SEQ ID NO: 8315 - protein, 121 aa, Artificial Sequence
  source: /note="Description of Artificial Sequence: Synthetic polypeptide"
QVQLVESGGGVVQPGRSLRLSCAASGFIFSNYGMHWVRQAPGKGLEWVAVIAYDGSSKHYVDSVKGRFTISRDNSKNTLYLQMNSLRAEDTAVYYCAKPIAVARYYGMDVWGQGITVTVSS

SEQ ID NO: 8316 - protein, 114 aa, Artificial Sequence; identical to SEQ ID NO: 8310
  source: /note="Description of Artificial Sequence: Synthetic polypeptide"

SEQ ID NO: 8317 - protein, 121 aa, Artificial Sequence
  source: /note="Description of Artificial Sequence: Synthetic polypeptide"
EVQLVQSGGGVVQPGRSLRLSCAASGFTFSSYGMHWVRQAPGKGLEWVAVIWYDGSNKYYADSVKGRFTISRDNSKNTLYLQMNSLRAEDTAVYYCATRSGYSSTWYVDYWGQGTLVTVSS

SEQ ID NO: 8318 - protein, 114 aa, Artificial Sequence
  source: /note="Description of Artificial Sequence: Synthetic polypeptide"
QVQLVESGGGLVQFGGSLKLSCAASGFTFSSYGMNWVRQTPGKGLEWVSAIGGSGGSTYYADSVKGRFTISRDNSKNTLYLQMTSLRAEDTAVYYCAKGAYDVWGQGTTVTVSS

SEQ ID NO: 8319 - protein, 114 aa, Artificial Sequence
  source: /note="Description of Artificial Sequence: Synthetic polypeptide"
QVQLVESGGGLVQFGGSLRLSCAASGFTFSSYGMNWVRQSPGKGLEWVSAIGGSGGSTYYADSVKGRFTISRDNSKNTLYLQMTSLRAEDTAVYYCAKGAYDVWGQGTTVTVSS

SEQ ID NO: 8320 - protein, 114 aa, Artificial Sequence
  source: /note="Description of Artificial Sequence: Synthetic polypeptide"
QVQLVESGGGLVQFGGSLKLSCAASGFTFSSYGMNWVRQTPGKGLEWVSAIGGSGGSTYYADSVKGRFTISRDNSKNTLYLQMTSLRAEDTAVYYCAKGAYDVWAQGTTVTVSS

SEQ ID NO: 8321 - protein, 121 aa, Artificial Sequence; identical to SEQ ID NO: 8315
  source: /note="Description of Artificial Sequence: Synthetic polypeptide"

SEQ ID NO: 8322 - protein, 114 aa, Artificial Sequence; identical to SEQ ID NO: 8309
  source: /note="Description of Artificial Sequence: Synthetic polypeptide"

SEQ ID NO: 8323 - protein, 120 aa, Artificial Sequence
  source: /note="Description of Artificial Sequence: Synthetic polypeptide"
QVQLVESGGGVVQPGRSLRLSCAASGFTFSSYGMHWVRQAPGKGLEWVAVIWYDGSNKYYVDSVKGRFTTSRDNSKNTLYLQMNSLRAEDTAMYYCVRGRGTQDPLFDNWGQGTLVTVSS

SEQ ID NO: 8324 - protein, 123 aa, Artificial Sequence
  source: /note="Description of Artificial Sequence: Synthetic polypeptide"
QVQLVESGGGVVQPGRSLTLSCAASGFMFNRFGMHWVRQAPGKGLDWVAVIWYDGSNKYYADSVKGRFTISRDNSKNTLYLQVNSLRAEDTAVYYCAREGTPHYYDSSGLDYWGQGTLVTVSS

SEQ ID NO: 8325 - protein, 114 aa, Artificial Sequence; identical to SEQ ID NO: 8309
  source: /note="Description of Artificial Sequence: Synthetic polypeptide"

SEQ ID NO: 8326 - protein, 132 aa, Artificial Sequence
  source: /note="Description of Artificial Sequence: Synthetic polypeptide"
QVQLVQSGGGVVQPGRSLRLSCAASGFTFSSYGMHWVRQAPGKGLEWVAFISYDGSNKYYADSVKGRLTISRDNSKNMLYLQMNSLRAEDTAVYYCAKGGVVVPGPTRYNWNHYYYYGMDVWGQGTTVTVSS

SEQ ID NO: 8327 - protein, 118 aa, Artificial Sequence
  source: /note="Description of Artificial Sequence: Synthetic polypeptide"
QVQLVQSGGGVVQPGRSLRLSCAASGFTFSSYGMHWVRQAPGKGLEWVAVISYDGSDKKYADSVKGRITISRDNSKNTLYLQMNSLRAEDTAVYYCAKGGSGSSFDYWGQGILVTVSS

SEQ ID NO: 8328 - protein, 118 aa, Artificial Sequence
  source: /note="Description of Artificial Sequence: Synthetic polypeptide"
QVQLVESGGGVVQPGRSLRLSCAASGFTFSSYGMHWVRQAPGKGLEWVAVISYDGNDKKYADSVKGRFTISRDNSKSTLYLQMNTLRDEDTAIFYCAKGGRGFAFDIWGQGTMVTVSS

SEQ ID NO: 8329 - protein, 117 aa, Artificial Sequence
  source: /note="Description of Artificial Sequence: Synthetic polypeptide"
EVQLVQSGGGVVQPGRSLRLSCAASGFTFSSYGMHWVRQAPGKGLEWVVVIWYDGSNKYYGDSVKGRFTISRDNSKNTLYLQMNSLRAEDTAVYYCARGNYFAFDIWGQGTMVTVSS

SEQ ID NO: 8330 - protein, 121 aa, Artificial Sequence
  source: /note="Description of Artificial Sequence: Synthetic polypeptide"
QVQLVESGGGVVQPGRSLSLSCAASGFTFSNYGMHWVRQAPGKGLEWVAAISYDGNTKYYVDSVKGRFTISRDNSKNTLYLQMNSLRGEDMAVYYCVGARPGYDHYGMDVWGQGTTVTVSS

SEQ ID NO: 8331 - protein, 132 aa, Artificial Sequence
  source: /note="Description of Artificial Sequence: Synthetic polypeptide"
EVQLVESGGGVVQPGRSLRLSCAASGFTFSSYGMHWVRQAPGKGLEWVAFISYDGSNKFYADSVKGRLTISRDNSKNMLYLQMNSLRAEDTAVYYCAKGGVVIPGPTRYNWNHYYYYGMDVWGQGTTVTVSS

SEQ ID NO: 8332 - protein, 118 aa, Artificial Sequence
  source: /note="Description of Artificial Sequence: Synthetic polypeptide"
QVQLVESGGGVVQPGRSLRLSCAASGFTFSSYGMHWVRQAPGKGLEWVTVISYDGSDKYYADSVKGRFTISRDNSKNTLYLQMNSLRAEDTAMYYCVKGGSGWSFDYWGQGTLVTVSS

SEQ ID NO: 8333 - protein, 118 aa, Artificial Sequence
  source: /note="Description of Artificial Sequence: Synthetic polypeptide"
QVQLVESGGGVVQPGRSLRLSCVASGFIFSDYGMHWVRQAPGKGLEWVAVISYDGSDKNYVDSVKGRFTISRDNSKKTQYLQMNSLRAEDTAVYYCAKGGSGWSFDYWGPGTLVTVSS

SEQ ID NO: 8334 - protein, 118 aa, Artificial Sequence
  source: /note="Description of Artificial Sequence: Synthetic polypeptide"
QVQLVESGGGVVQPGRSLRLSCVASGFTFSDYGMHWVRQAPGKGLEWVAVISYDGNNKNYADSVMGRFTISRDNSKKTQYLQMNSLRAEDTAVYYCAKGGSGWSFDYWGPGTLVTVSS

SEQ ID NO: 8335 - protein, 118 aa, Artificial Sequence
  source: /note="Description of Artificial Sequence: Synthetic polypeptide"
EVQLVESGGGVVQPGRSLRLSCAASGFTFSSYGMHWVRQAPGKGLEWVTVISYDGSDKYYADSVKGRFTISRDNSKNTLYLQMNSLRAEDTAMYYCVKGGSGWSFDYWGQGTLVTVSS

SEQ ID NO: 8336 - protein, 118 aa, Artificial Sequence; identical to SEQ ID NO: 8302
  source: /note="Description of Artificial Sequence: Synthetic polypeptide"

SEQ ID NO: 8337 - protein, 124 aa, Artificial Sequence
  source: /note="Description of Artificial Sequence: Synthetic polypeptide"
EVQLVQSGGGLVKPGGSLRLSCTASGFTFSNAWMSWVRQAPGKGLEWVGRIKSKPAGGTTDYAAPVKDRFSISRDDSKTTLYLRMNSLKTEDTAVYYCTTSITTRRGTYYFDYWGQGTLVTVSS

SEQ ID NO: 8338 - protein, 118 aa, Artificial Sequence
  source: /note="Description of Artificial Sequence: Synthetic polypeptide"
EVQLVQSGGGVVQPGRSLRLSCAASGFTFNNYGMHWVRQAPGKGLEWLAVISYDGNDKHYVDSVKGRFTTSRDNSKNTLYLQMNSLRVEDTAVFYCVRGGSGWSFDSWGQGTLVTVSS

SEQ ID NO: 8339 - protein, 118 aa, Artificial Sequence
  source: /note="Description of Artificial Sequence: Synthetic polypeptide"
QVQLVESGGGVVQPGRSLRLSCAASGFTFNNYGMHWVRQAPGKGLEWLAVISYDGNDKHYVDSVKGRFTTSRDNSKNTLYLQMNSLRVEDTAVFYCVRGGSGWSFDSWGQGTLVTVSS

SEQ ID NO: 8340 - protein, 121 aa, Artificial Sequence
  source: /note="Description of Artificial Sequence: Synthetic polypeptide"
EVQLVQSGGGVVQPGRSLRLSCAASGFTFSSYGMHWVRQAPGKGLEWVAVISYAGINKYYADSVKGRFTISRDDSKNTLFLQMNSLRTEDTAVYYCAKRDSGISHDPFDIWGQGTMVTVSS

SEQ ID NO: 8341 - protein, 119 aa, Artificial Sequence
  source: /note="Description of Artificial Sequence: Synthetic polypeptide"
QVQLVQSGGGVVQPGRSLRLSCAASGFTFSSYGMHWVRQAPGKGLEWVAVISYQESNKYYVDSVKGRFTISRDNSKNTLYLQMNSLSAEDTAVYYCAQSRGYSYGLGYWGQGTLVTVSS

SEQ ID NO: 8342 - protein, 119 aa, Artificial Sequence
  source: /note="Description of Artificial Sequence: Synthetic polypeptide"
QVQLVQSGGGVVQPGRSLRLSCEASGFTFSSYGMHWVRQAPGKGLEWVAVISYDGSNKHYADSVKGRFTISRDNSKNTLYVQMNSLRAEDTAVYYCAQSRGYSYGLGYWGQGTLVTVSS

SEQ ID NO: 8343 - protein, 119 aa, Artificial Sequence
  source: /note="Description of Artificial Sequence: Synthetic polypeptide"
EVQLVQSGGGVVQPGRSLRLSCAASGFTFSSYGMHWVRQAPGKGLEWVAVISYQESNKHYVDSVKGRFTISRDNSKNTLYLHMNSLRAEDTAVYYCAQSRGYSYGLGYWGQGTLVTVSS

SEQ ID NO: 8344 - protein, 119 aa, Artificial Sequence
  source: /note="Description of Artificial Sequence: Synthetic polypeptide"
QVQLVESGGGVVQPGRSLRLSCAASGFTFSSYGMHWVRQAPGKGLEWVALISYAGSNKHYADSVKGRFTISRDDSKNTLYLQMNSLRVEDTAVYYCAKSRGYSYGLGYWGQGTLVTVSS

SEQ ID NO: 8345 - protein, 119 aa, Artificial Sequence
  source: /note="Description of Artificial Sequence: Synthetic polypeptide"
QVQLVQSGGGVVQPGRSLRLSCAASGFTFSSYGMHWVRQAPGKGLEWVAVISYQESNKHYVDSVKGRFTISRDNSKNTLYLQMNSLRAEDTAVYYCAKSRGYSYGLGYWGQGTLVTVSS

SEQ ID NO: 8346 - protein, 117 aa, Artificial Sequence
  source: /note="Description of Artificial Sequence: Synthetic polypeptide"
EVQLVQSGGGLVQPGGSLRLSCAASGFTFRSYVMSWVRQAPGMGLEWVSAITASGGSTYYGDSVKGRFTISRDNSKNTLYLQMNSLRAEDTAVYYCAKDYYGPFDYWGQGTLVTVSS

SEQ ID NO: 8347 - protein, 124 aa, Artificial Sequence
  source: /note="Description of Artificial Sequence: Synthetic polypeptide"
EVQLVESGGGLVQPGGSLRLSCAASGFTFSIFWMNWVRQAPGKGLEWVAKIKQDGSEKYYVDSMKGRFTISRDNVKNSLYLQMNSLRAEDTAVYYCARGVWGSYRYTSSGLDVWGQGTTVTVSS

SEQ ID NO: 8348 - protein, 119 aa, Artificial Sequence
  source: /note="Description of Artificial Sequence: Synthetic polypeptide"
QVQLVESGGGVVQPGRSLRLSCAASGFTFSSYGMHWVRQAPGKGLEWVALISYVGSNKHYADSVKGRFTISRDNSKNTLYLQMNSLRAEDTAVYYCAKSRGYSYGLDYWGQGTLVTVSS

SEQ ID NO: 8349 - protein, 119 aa, Artificial Sequence
  source: /note="Description of Artificial Sequence: Synthetic polypeptide"
QVQLVQSGGGVVQPGRSLRLSCAASGFSFSSFGMHWVRQAPGKGLEWVAVISYGGINKHYSDSVKGRFTISRDDSKNTLYLQMNSLRAEDTAVYYCAKREGYRYAYDYWGQGTLVTVSS

SEQ ID NO: 8350 - protein, 119 aa, Artificial Sequence; identical to SEQ ID NO: 8345
  source: /note="Description of Artificial Sequence: Synthetic polypeptide"

SEQ ID NO: 8351 - protein, 119 aa, Artificial Sequence
  source: /note="Description of Artificial Sequence: Synthetic polypeptide"
QVQLVESGGGVVQPGRSLRLSCAASGFSFSSFGMHWVRQAPGKGLEWVAVISYGGINKHYSDSVKGRFTISRDDSKNTLYLQMNSLRAEDTAVYYCAKREGYRYAYDYWGQGTLVTVSS

SEQ ID NO: 8352 - protein, 119 aa, Artificial Sequence
  source: /note="Description of Artificial Sequence: Synthetic polypeptide"
EVQLVQSGGGVVQPGRSLRLSCAASGFTFSSYGMHWVRQAPGKGLEWVAVISYQESNKHYVDSVKGRFTISRDNSKNTLYLQMNSLRAEDTAVYYCAKSRGYSYGLGYWGQGTMVTVSS

SEQ ID NO: 8353 - protein, 119 aa, Artificial Sequence
  source: /note="Description of Artificial Sequence: Synthetic polypeptide"
EVQLVESGGGVVQPGRSLRISCAASGFTFSSYGMHWVRHAPGKGLEWVAMISYEGSNRHYVDSVKGRFTISRDNSNNTLYLQMNSLRAEDTAVYFCAKRNSTKGYFDIWGQGTMVTVSS

SEQ ID NO: 8354 - protein, 119 aa, Artificial Sequence
  source: /note="Description of Artificial Sequence: Synthetic polypeptide"
QVQLVQSGGGVVQPGRSLRLSCAASGFTFSSYGMHWVRQAPGKGLEWVTVISYDGSNRNYADSVKGRFTISRDNSENTLYLQMNSLRADDTAVYYCAQSRGYSYGLGYWGQGTLVTVSS

SEQ ID NO: 8355 - protein, 119 aa, Artificial Sequence
  source: /note="Description of Artificial Sequence: Synthetic polypeptide"
QVQLVQSGGGVVQPGRSLRLSCAASGFTFSSYGMHWVRQAPGKGLEWVALISYAGSNKHYADSVKGRFTISRDDSKNTLYLQMNSLRVEDTAVYYCAKSRGYSYGLGYWGQGTMVTVSS

SEQ ID NO: 8356 - protein, 119 aa, Artificial Sequence
  source: /note="Description of Artificial Sequence: Synthetic polypeptide"
QVQLVQSVGGVVQPGRSLRLSCAASGFTFSSYGMHWVRQAPGKGLEWVALISYAGINEYYADSVKGRFTISRDDSKNTLYLQMNSLRVEDTAVYYCAKSRGYSYGLGYWGQGTLVTVSS

SEQ ID NO: 8357 - protein, 119 aa, Artificial Sequence
  source: /note="Description of Artificial Sequence: Synthetic polypeptide"
QVQLVQSGGGVVQPGRSLRLSCAASGFTFSSYGMHWVRQAPGKGLEWVALISYVGSNKHYADSVKGRFTISRDNSKNTLYLQMNSLRAEDTAVYYCAKSRGYSYGLDYWGQGTLVTVSS

SEQ ID NO: 8358 - protein, 117 aa, Artificial Sequence
  source: /note="Description of Artificial Sequence: Synthetic polypeptide"
QVQLVESGAEVKKPGASVKVSCKASGYTFTTYGISWVRQAPGQGLEWMGWISAYNGKTNYAQKFQGRVTMTTDTSTNTAYMELRSLRFDDTAVYYCARDGGTPFYYWGQGTLVTVSS

SEQ ID NO: 8359 - protein, 119 aa, Artificial Sequence
  source: /note="Description of Artificial Sequence: Synthetic polypeptide"
QVQLVESGGGVVQPGRSLRLSCAASGFTFSSYGMHWVRQAPGKGLEWVAVISYQESNKHYVDSVKGRFTISRDNSKNTLYLQMNSLRAEDTAVYYCAKSRGYSYGLGYWGQGTLVTVSS

SEQ ID NO: 8360 - protein, 122 aa, Artificial Sequence
  source: /note="Description of Artificial Sequence: Synthetic polypeptide"
QVQLVESGGGLVQPGGSLRLSCVASGFTFSSYAMSWVRQAPGKGLEWVSGISGSGGNTYYADSVKGRFTISRDNSENTLYLQMNSLRAEDTAVYHCAKDPHSSRWPGFFDLWGRGTLVTVSS

SEQ ID NO: 8361 - protein, 122 aa, Artificial Sequence
  source: /note="Description of Artificial Sequence: Synthetic polypeptide"
QVQLVQSGGGLVQPGGSLRLSCAASGFTFSNYAMSWVRQAPGKGLEWVSAISGSGDNTYYADSVRGRFTISRDNSKNTLYLQMNSLRAEDTAIYYCAKDPHSSRWPGFFDLWGRGTLVTVSS

SEQ ID NO: 8362 - protein, 121 aa, Artificial Sequence
  source: /note="Description of Artificial Sequence: Synthetic polypeptide"
QVQLQQWGAGLLTPSETLSLTCAVYGGSFSGHYWSWIRQPPGKGLEWIGEINPRGSTNYKPSLKSRVTISVDTSKNQFSLNLRSVTAADTAMYYCAREGNLAARLWFFDLWGRGTLVTVSS

SEQ ID NO: 8363 - protein, 114 aa, Artificial Sequence
  source: /note="Description of Artificial Sequence: Synthetic polypeptide"
QVQLVQSGGGLVQPGGSLRLSCAASGFTFSSYAMNWVRQAPGKGLEWVSTISGSGGSTYYADSVKGRFTFSRDNSKNTLYLQMNNLRAEDTAVYYCAKVGGDVWGQGTTVTVSS

SEQ ID NO: 8364 - protein, 122 aa, Artificial Sequence
  source: /note="Description of Artificial Sequence: Synthetic polypeptide"
QVQLVQSGGGLVQPGGSLRLSCAASGFTFSNYAMSWVRQAPGKGLEWVSAISGSGDNTYYADSVRGRFTISRDNSKNTLYLQMNSLRAEDTAVYYCAKDPHSSRWPGFFDLWGRGTLVTVSS

SEQ ID NO: 8365 - protein, 128 aa, Artificial Sequence
  source: /note="Description of Artificial Sequence: Synthetic polypeptide"
QVQLVQSGGGLVQPGRSLRLSCAASGFTFDDYAMHWVRQTPGKGLEWVSGISWNSGSIGYADSVKGRFTISRDNAKNSLYLQMNSLITEDTALYYCAKDMEYYDILTGYYSYYIMDVWGQGTTVTVSS

SEQ ID NO: 8366 - protein, 113 aa, Artificial Sequence
  source: /note="Description of Artificial Sequence: Synthetic polypeptide"
QVQLVESGGGLVQPGGSLRLSCAASGFTFSSYAMNWVRQAPGKGLEWVSTISGSGGSTYYPDSVKGRFTISRDNSKNTLYLQMNSLKAEDTAVYYCAKVGGDVWGQGTTVMFS
